United States Patent Application Publication US 2006/0134663 A1 - sequence listing, part 122

SEQ ID NO: 389991 - DNA, 1000 bp, Homo Sapiens
gctgccctccaatgcccaatttccctacaattgtctggggtgcctaagcttctgcccaccaagagggccagagctggcagcgagcagctgcaggtaggagagataggtacccataagggaggtgggaaagagagatggaaggagaggggtgcagagcacacacctcccctgcctgacaacttcctgagggctggtcatgccagcagatttaaggcggaggcaggggagatggggcgggagaggaagtgaaaaaggagagggtggggatggagaggaagagagggtgatcattcattcattccattgctactgactggatgccagctgtgagccaggcaccaccctagctctgggcatgtggttgtaatcttggagcctcatggagctcacagggagtgctggcaaggagatggataatggacggataacaaataaacatttagtacaatgtccgggaatggaaagttctcgaaagaaaaataaagctggtgagcatatagacagccctgaaggcggccaggccaggcatttctgaggaggtggcatttgagctaagaccaaaatgtggtgggagagggagccacacaaggatctgggggtgtgtgcactgggagggggagcagcaagtgcaaagggcctgaaggtatgtagggggtggagaagggacaccactaattgccttgggtgcctttcaggcgtctccatgccaaggctctaacccctgatgtggaagccaacatagtaattataattatagtgaagaggggtgtgtgtgtgtgtgtgtgtgtgtgtgtgtgtgtgattgaaagagagagagaatgagtctctgtaccttctcttgggtctgtatgttgaaaacctaagtgaccctaaagaagaatatttgcatattattaattatgtagctatacatgttttttttgagacaaagtcttgctttgtcacccagactggagtgcagtggcagcaatcatggctcactgcagcctctgcctcccag

SEQ ID NO: 389992 - DNA, 893 bp, Homo Sapiens
caactattaatcaattgcctatctatctgtatggatttcctattctggcccttcttatacatagaatcataaaatatgtggcttctttcacttggcacaatgttgtcgagattcattcatgctgtagcacatatcagcacttcattccttttcatggctgaataatactccattgtatggatataccatattttccttattcattcacccactgatggacatgcgggttgtgttcaccttctggctgttatgaatatgcttccatgaatattcatgtgcaagtttatgtgtgaacatgtgttttcaattattttgggcatatacccaggagtagaattgctagatcatatagtaactctagggtttaactttttgaggaactgccaaaatatttttcacagaaggttgtatcattttacataaaaatacttttatatgtatttggctgtatgtgacaaatatacaaaaatgtatgtttgtatactagaagtttccttttctagtttcataaagtaaaagaagcatttgagtgaattttaacttggatgttcaagggaaaaaattaaacagaagaaaattccacatagcaaaatgaagcaattatttatacatatataaaaatatattttatatttaaaaatatatattttaaaaatataatatatacacataatttttccatttatcaaaaatatattcatgatatagaaagggtttgaagattttttatttctgaagataaaaactgatatttattcagtttcaccatcactaaggaaagattgttgaagttaccctttagaaaatatttccataacgataaaaaatgaaagtaattattttcaacattataatgcatgctgtgttttaagtgatatatttatatctaacag

SEQ ID NO: 389993 - DNA, 1000 bp, Homo Sapiens
tctctcggaaacacctccctgagtggcccctccatccactgcccctctgctgcagtatgtatcggcatcctcccaggcctgggtgcctactctgggagcagcgactccgagtccagctcagacagcgaaggcaccatcaatgccaccggaaagattgtctcctccatcttccgaaccaacaccttcctcgaggccccctagtttctccgtccctacacagggagctcctccccaagggtagatcggaccgttcatgctgcctataggcattatgtccctcaaaaaaaaactcctttgcctgcatcctgtgtacaacatgacatttttaaccaatccaatctaaaaatgtgccagaatccacctgtggcccgaatcgtgtttggttcctctttctactccactgcagatgaccaaacctgtcccgctgccactttcctcactgatattgggaggagggcaaggcccagccgaagttccactaaaaatgccccaggagaataggcaccggctggcttgccaaagggtttgggttttattgctttctgttttttcttttcccgacagcacaaagaagtaagggcagttattggacaggtgttatttaaacattctattgtaaatgaatgtgttgtttggttctactgcattgtggagcatgcgggggaagagaactgacccaggtaatgaaatggagcccttccctggaactaaccagtccttgatgttgtgtgactaagtaaagatgataaaccccatctgctgggggtgtcacttcacactcggcatgcattgtgaaagctttccatacccttggccattccctctctcctctctctccaaccccatttatgcaggaagggactgctaacaagaacgcttccatctcaaaccttttctctgcctgggaaattattttatgtttgtttttgaaataaaggatttagtttaagattctaaaaaaaaaaaaaaaaaaaaaaaaaaaaaaaaaaaaaaaaaaaaa

SEQ ID NO: 389994 - DNA, 1000 bp, Homo Sapiens; identical to SEQ ID NO: 114736

SEQ ID NO: 389995 - DNA, 1000 bp, Homo Sapiens
tgacaatgttgtccacagtggctcaatcctatatttccagcactttgggagcttcaaccaggagaatgttttaggcccaggaatttgatacccagttgggcaatagagcaagacttcatcactaaacaacaacaacaacaaatagcttgatgtggtgttgcacacatgtagtcccagctacctgggaggctgagagaggaagatagcttgagcccaggaggttgaggctgcagtgtgtgaagatggtgccaatgcactccagcctgggtgaccaagcaagaacttgtccaaaaaaaggtttgggagctggcatggtggctcatgcctgtaatcccagcactttgggaggctgaggccagtaaatcacctgaagtcaggagtttaagaccagtctgaccaacatggggaaaacccatctctactaaaaatacaaaattagccaggaggggtggtgtgtgcctgtaatcccagctactcaggaggctgaggcaggagaattgcttgaacccaagaggctgaagttgcagtgagctgtgagcaggccactgcattccagactgagtgacaaagtggaactgcatctcaagaaaaataaaggtcaatagaaagataataaaatatataaatgtgtgatgtaaaatttaatggtgataaaatacactgaatttctctgtgtaagttacacatacaaatgtaatgacgagacagtgataagacaaatcaaggttttatctcaatacttagtgtctacatgtaacatatgttctttaggatagttatagtccattttctttccaggagagactgatgagaatgcagaaatgttaaagcacaagtgatggaagcttccagctgtgcccacctgtaacctgacatagacagttccattgtttgcttcattactcaggtcaaagacattaatgcaaatgtggtacacagtcaaattcttttctatctacatgatagaaactataactttgtccctgtatagaagggtata

SEQ ID NO: 389996 - DNA, 1000 bp, Homo Sapiens; identical to SEQ ID NO: 281193

SEQ ID NO: 389997 - DNA, 1000 bp, Homo Sapiens
tccctcgccagagcacttggcaaggtcagtgaggggccagtagacccccggagaagcagtaccgacaatgacgaagataccagatcccttcccaacccctttgcaccggtcccactaaggggcagggtcgagagaggaggggggatagggggagcagaccctgagatctgggcataggcaccgcattctgatctggacaaagtcgggacagcaccatcccagccccgaagcccgggccatgccagcaggccccaccatggaaatcaaaacaccgcaccagccagcagaatggacattctgacatcgccagccgacgccctgaatcttggtgcagcacccaccgcgtgcctgtgtggcgggactggagggcacagttgaggaaggagggtggttaagaaatacagtggggccctctcgctgtcccttgcccagggcacttgtattccagcctcgctgcatttgctctctcgattgcccctttcctcctacatgcctcccaagcccaccctactccaaaagtaatgtgtcacttgatttggaactattcaagcagtaaaagtaaatgaatcccacctttactaaaacactttctctgaaccccccttgcccctcactgatcttgcttttccctggtctcagcagttgtggtcaatattgtggtaatcgctaattgtactgattgtttaagtgtgcattagttgtctctccccagctagattgtaagctcctggaggacagggaccacctctacaaaaaataaaaaaagtacctcccctgtctcgcacagtgtcccaggaccctgcggtgcagtagaggcgcaccaaaactttgtctcttgtgatttctttagcggcatcaacatacacttctaagactcagctgatgtgcccactgtggaacaggcacactgcttgggggagggaggaaaaggagggccatcaaaattgcaataagctgggcccctcacacacccaaccccatctcaatgctgtcctgtgat

SEQ ID NO: 389998 - DNA, 1000 bp, Homo Sapiens
tgggctgttctgggatgcaggggctgatgggggcatagagtgtggaccatccaatgggtcaattaactactcccccaacccaggacagagaaagcccctcctacccagggctcttccccaaacctgagttccatctccagggccggctctggaatcccttagagcggtagatctccaagtgtagcccttcctggggactcgttagatatgcaaattctcaggccctactcagacctactcagacagactctgggtagggcccagaaattcgtattttgataagctttccaggagattccggcttctgtaaagtttgagagccactgtctaagagtactcagctctcagccctgtgttcccatctcagtgttgctgggctgggctgtgtgaccctgcagagcccctcactatctccgggactctgttttctcatctttttattgggtgtagggattcaatcacatgcttcaaaggtcacagccagaggttgaactggggccccaaagctctgcgggggcccacgaagaggggcgtctaggtggggaggggtcttggattgaccctgggtacatccccgacaaggaacctgtttcttcctgtacacaaccccaggataacaagagatttgccctgctgggtgatttcttccggaaatctaaagagaagattggcaaagagtttaaaagaattgtccagagaatcaaggattttttgcggaatcttgtacccaggacagagtcctagtgtgtgccctaccctggctcaggcttctgggctctgagaaataaactatgagagcaatttcctcaggcttcagtctcacttgttttgcctcctctctctcaccacaactgagcccttagctcagggagtccacgtgtgagtgtgagtgtgtgtgagtgtgacacagaggtggcgagggcagtgttccatccaggaggacacagggtaaggcagtagggccaagagatccaagatggcattcccattctcagtggaa

SEQ ID NO: 389999 - DNA, 1000 bp, Homo Sapiens; identical to SEQ ID NO: 114738

SEQ ID NO: 390000 - DNA, 1000 bp, Homo Sapiens
tattcgcctacacaattctccgatccgtccctaacaaactaggaggcgtccttgccctattactatccatcctcatcctagcaataatccccatcctccatatatccaaacaacaaagcataatatttcgcccactaagccaatcactttattgactcctaaccgcagacctcctcattctaacctgaatcggaggacaaccagtaagctacccttttaccatcattggacaagtagcatccgtactatacttcacaacaatcctaatcctaataccaactatctccctaattgaaaacaaaatactcaaatgggcctgtccttgtagtataaactaatacaccagtcttgtaaaccggagatgaaaacctttttccaaggacaaatcagagaaaaagtctttaactccaccattagcacccaaagctaagattctaatttaaactattctctgttctttcatggggaagcagatttgggtaccacccaagtattgactcacccatcaacaaccgctatgtatttcgtacattactgccagtcaccatgaatattgtacggtaccataaatacttgaccacctgtagtacataaaaacccaatccacatcaaaaccccctccccatgcttacaagcaagtacagcaatcaaccttcaactatcacacatcaactgcaactccaaagccacccctcgcccactaggataccaacaaacctatccacccttaacagtacatagtacataaaaccatttaccgtacatagcacattacagtcaaatcccttctcgcccccatggatgacccccctcagataggggtcccttgaccaccatcctccgtgaaatcaatatcccgcacaagagtgctactctcctcgctccgggcccataacacttgggggtagctaaagtgaactgtatccgacatctggttcctacttcagggtcataaagcctaaatagcccacacgttccccttaaataagacatcacgatg

SEQ ID NO: 390001 - DNA, 1000 bp, Homo Sapiens
tattcgcctacacaattctccgatccgtccctaacaaactaggaggcgtccttgccctactactatccatcctcatcctagcaataatccccatcctccatatatccaaacaacaaagcataatatttcgcccactaagccaatcactttattgactcctagccgcagacctcctcattctaacctgaatcggaggacaaccagtaagctacccctttaccatcattggacaagtagcatccgtactatacttcacaacaatcctaatcctaataccaactatctccctaattgaaaacaaaatactcaaatgggcctgtccttgtagtataaactaatacaccagtcttgtaaaccggagatgaaaacctttttccaaggacaaatcagagaaaaagtctttaactccaccattagcacccaaagctaagattctaatttaaactattctctgttctttcatggggaagcagatttgggtaccacccaagtattgactcacccatcaacaaccgctatgtatttcgtacattactgccagccaccatgaatattgtacggtaccataaatacttgaccacctgtagtacataaaaacccaatccacatcaaaaccccctccccatgcttacaagcaagtacagcaatcaaccttcaactatcacacatcaactgcaactccaaagccacccctcacccactaggatatcaacaaatctacccatccttaacagtacatggtacataaagccatttaccgtacatagcacattacagtcaaatcccttctcgtccccatggatgacccccctcagataggagtcccttgaccaccatcctccgtgaaatcaatatcccgcacaagagtgctactctcctcgctccgggcccataacacttgggggtagctaaagtgaactgtatccgacatctggttcctacttcagggccataaagcctaaatagcccacacgttccccttaaataagacatcacgatg

SEQ ID NO: 390002 - DNA, 1000 bp, Homo Sapiens; identical to SEQ ID NO: 281197

SEQ ID NO: 390003 - DNA, 1000 bp, Homo Sapiens; identical to SEQ ID NO: 201597

SEQ ID NO: 390004 - DNA, 1000 bp, Homo Sapiens
tattcgcctacacaattctccgatccgtccctaacaaactaggaggcgtccttgccctattactatccatcctcatcctagcaataatccccatcctccatatatccaaacaacaaagcataatatttcgcccactaagccaatcactttattgactcctagccgcagacctcctcattctaacctgaatcggaggacaaccagtaagctacccttttaccatcattggacaagtagcatccgtactatacttcacaacaatcctaatcctaataccaactatctccctaattgaaaacaaaatactcaaatgggcctgtccttgtagtataaactaatacaccagtcttgtaaaccggagatgaaaacctttttccaaggacaaatcagagaaaaagtctttaactccaccattagcacccaaagctaagattctaatttaaactattctctgttctttcatggggaagcagatttgggtaccacccaagtattgacttacccatcaacaaccgctatgtatttcgtacattactgccagccaccatgaatattgcacggtaccataaatacttgaccacctgtagtacataaaaacccaatccacatcaaaaccccctccccatgcttacaagcaagtacagcaatcaaccctcaactatcacacatcaactgcaactccaaagccacccctcacccactaggataccaacaaacctacccacccttaacagtacatagtacataaagccatttaccgtacatagcacattacagtcaaatcccttctcgtccccatggatgacccccctcagataggggtcccttgaccaccatcctccgtgaaatcaatatcccgcacaagagtgctactctcctcgctccgggcccataacacttgggggtagctaaagtgaactgtatccgacatctggttcctacttcagggtcataaagcctaaatagcccacacgttccccttaaataagacatcacgatg

SEQ ID NO: 390005 - DNA, 1000 bp, Homo Sapiens; identical to SEQ ID NO: 201599

SEQ ID NO: 390006 - DNA, 1000 bp, Homo Sapiens
tattcgcctacacaattctccgatccgtccctaacaaactaggaggcgtccttgccctattactatccatcctcatcctagcaataatccccatcctccatatatccaaacaacaaagcataatatttcgcccactaagccaatcactttattgactcctagccgcagacctcctcattctaacctgaatcggaggacaaccagtaagctacccttttaccatcattggacaagtagcatccgtactatacttcacaacaatcctaatcctaataccaactatctccctaattgaaaacaaaatactcaaatgggcctgtccttgtagtataaattaatacaccagtcttgtaaaccggagatgaaaacctttttccaaggacaaatcagagaaaaagtctttaactccaccattagcacccaaagctaagattctaatttaaactattctctgttctttcatggggaagcagatttgggtaccacccaagtattgactcacccatcaacaaccgctatgtatttcgtacattactgccagccaccatgaatattgtacggtaccataaatacttgaccacctatagtacataaaaacccaatccacatcaaaaccccctccccatgcttacaagcaagtacagcaatcaaccctcaactatcacacatcaactgcaactccaaagccacccctcacccactaggataccaacaaacctacccaccctcaacagtacatagtacataaagccatttaccgtacatagcacattacagtcaaatcccttctcgtccccatggatgacccccctcagataggggtcccttgaccaccatcctccgtgaaatcaatatcccgcacaagagtgctactctcctcgctccgggcccataacacttgggggtagctaaagtgaactgtatccgacatctggttcctacttcagggtcataaagcctaaatagcccacacgttccccttaaataagacatcacgatg

SEQ ID NO: 390007 - DNA, 1000 bp, Homo Sapiens
tattcgcctacacaattctccgatccgtccctaacaaactaggaggcgtccttgccctattactatccatcctcatcctagcaataatccccatcctccatatatccaaacaacaaagcataatatttcgcccactaagccaatcactttattgactcctagccgcagacctcctcgttctaacctgaatcggaggacaaccagtaagctacccttttaccatcattggacaagtagcatccgtactatacttcacaacaatcctaatcctaataccaactatctccctaattgaaaacaaaatactcaaatgggcctgtccttgtagtataaactaatacaccagtcttgtaaaccggagatgaaaacctttttccaaggacaaatcagagaaaaagtctttaactccaccattagcacccaaagctaagattctaatttaaactattctctgttctttcatggggaagcagatttgggtaccacccaagtattgactcacccatcaacaaccgctatgtatttcgtacattactgccagccaccatgaatattgtacggtaccataaatacttgaccacctgtagtacataaaaacccaatccacatcaaccccccccccccatgcttacaagcaagtacagcaaccaaccctcaactatcacacatcaactgcagctccaaagccacctctcacccactaggataccaacaaacctacccacccttaacagtacatagtacataaagccatctaccgtacatagcacattacagtcaaatcccttctcgtccccatggatgacccccctcagataggggtcccttgaccaccatcctccgtgaaatcaatatcccgcacaagagtgctactctcctcgctccgggcccataacacttgggggtagctaaagtgaactgtatccgacatctggttcctacttcagggccataaagcctaaatagcccacacgttccccttaaataagacatcacgatg

SEQ ID NO: 390008 - DNA, 1000 bp, Homo Sapiens
tattcgcctacacaattctccgatccgtccctaacaaactaggaggcgtccttgccctattactatccatcctcatcctagcaataatccccatcctccatatatccaaacaacaaagcataatatttcgcccactaagccaatcactttattgactcctagccgcagacctcctcattctaacctgaatcggaggacaaccagtaagctacccttttaccatcattggacaagtagcatccgtactatacttcacaacaatcctaatcctaataccaactatctccctaattgaaaacaaaatactcaaatgggcctgtccttgtagtataaactaatacaccagtcttgtaaaccggagatgaaaacctttttccaaggacaaatcagagaaaaagtctttaactccaccattagcacccaaagctaagattctaatttaaactattctctgttctttcatggggaagcagatttgggtaccacccaagtattgactcacccatcaacaaccgctatgtatttcgtacattactgccagccaccatgaatattgtacggtaccataaatacttgatcacctgtagtacataaaaacccaatccacatcaaacacccccccccatgcttacaagcaagtacagcaaccaaccctcaactatcacgcatcaactgcaactccaaagccacccctcacccactaggataccaacaaacctacccacccttaacagtacatagtacataaagccatttaccgtacatagcacattacagtcaaatcccttctcgtccccatggatgacccccctcagataggggtcccttgaccaccatcctccgtgaaatcaatatcccgcacaagagtgctactctcctcgctccgggcccataacacttgggggtagctaaagtgaactgtatccgacatctggttcctacttcagggccataaagcctaaatagcccacacgttccccttaaataagacatcacgatg

SEQ ID NO: 390009 - DNA, 1000 bp, Homo Sapiens
tattcgcctacacaattctccgatccgtccctaacaaactaggaggcgtccttgccctattactatccatcctcatcctagcaataatccccatcctccatatatccaaacaacaaagcataatatttcgcccactaagccaatcactttattgactcctagccgcagacctcctcattctaacctgaatcggaggacaaccagtaagctacccttttaccatcattggacaagtagcatccgtactatacttcacaacaatcctaatcctaataccaactatctccctaattgaaaacaaaatactcaaatgggcctgtccttgtagtataaactaatacaccagtcttgtaaaccggagatgaaaacctttttccaaggacaaatcagagaaaaagtctttaactccaccattagcacccaaagctaagattctaatttaaactattctctgttctttcatggggaagcagatttgggtaccacccaagtattgactcacccatcaacaaccgctatgtatttcgtacattactgccagccaccatgaatatcgtacggtaccataaatacttgaccacctgtagtacataaaaacccaatccacatcaaaaccccctccccatgcttacaagcaagtacagcaatcaaccttcaactatcacacatcaactgcaactccaaagccacccctcacccactaggataccaacaaacctacccacccttaacagtacatagtacataaaaccatttaccgtacatagcacattacagtcaaatcccttctcgtccccatggatgacccccctcagataggggtcccttgaccaccatcctccgtgaaatcaatatcccgcacaagagtgctactctcctcgctccgggcccataacacttgggggtagctaaagtgaactgtatccgacatctggttcctacttcagggtcataaagcctaaatagcccacacgttccccttaaataagacatcacgatg

SEQ ID NO: 390010 - DNA, 1000 bp, Homo Sapiens; identical to SEQ ID NO: 281201

SEQ ID NO: 390011 - DNA, 1000 bp, Homo Sapiens
tgacctgtcagatacttgttcctgggtgagcttcttgtcgctctccagcaggatggacacgtagtggcggatcatgtctacgaagagtgataacgatgggtaggaccacccagaggcagatgttggagtcaagcaacagttctggccctgccatcttcactgaaagctggctcccagccggtgatgggcgagcttctcttcaccggggcgcagttgcttctctctgacgtcgcctctgggccttctctcgcccctatgcccggctagcacagaactctgctgcagcggtgagcccagcttattgccttcagctgggctgcccggccttccacttccggcgcggaagttggcgtcacgtcatggcgcgcctcggtggcgtcagagcggcgtcgggcctggcgggaaagtcgaaaactacgggcggcgacggcttctcggtgagtaagtggagcaatggtcgtagtctctcgaggccccgctcccctgcggcctaatctctaagtccgggccgcggtcggcgttctcctctggggctccgcgccccgaaccttggcttcctcatctgccctgagatgggataatccccacaggtacctttctgcgtcattaaaatgcggaaacgagaaaggcttttaccctcacccgcttcccgatgaactaatccaggcagtcggcctcatctcacttctgttgggcttttctggaagccagatggtatcgcacgtgttaaaggcgggtgcctggaagccggacgtgctgacaagacttagtttttccatctgcaagatggctgataatggttatccgtattaaccgaagcggcgataaataaaaagtttagcacagggcccggtacctcgtaaatgttaaccattattagaagtcattataatcatcaagagtaagtataggtggtgaagagcgcaggtgctgaagccagactccgagttagaatcccagttctgcccgtgatgatgagaataatggtacccacctcaaa

SEQ ID NO: 390012 - DNA, 1000 bp, Homo Sapiens
gccaagaagccacagaacaccctctgcacaaaaggagtgtttgcacaaagaaaaacaaccctccgggggttctttagaaatgcttatactcaattagctagaacttcatgtgaaatcccagcgtggaagacaacaagccggcaccggtgaaaactttgctgtgcacctgccctctaccaagccgccagccccaccagccctgtggtcctaggtgggcacagctgctgcacggtcccccaggcctgcctctcctcggggtctcaaccttcataccagatttgccagcatccccattcccgccttgtgggtggagagtccttgagaccctctgtcactctgtcagcttccccaggtcagcgagctgtggcttggctcccacgcatcagcttttatgggaggcccattaggagctgggcaggagggacagaggggaggccaggcagccactgctgagtgggacgggtagcccagcccatgaggctggccagccctacaggggaggtcccacagcactggccgggaagtccacataggaaagcatcagttgagggatgaagccatggacgatggggacaacggccacagggtgtgctaagctgaggaaattagtaggaggtgctcataagctgttttgttttttggtttgtttgttttttcttttaagagaccagggacagtgggggtctcgctctgtcacccaggctggagtgcagtggcatgatcgtggcttactgcagcctccaactaataggctcaggtgatcctcctgcctcagcctcccgagtaactcatggcctttaagtgaactgcttccaccatccagctgtgcaggtggcctgggaacagcagcacatctgtcccctgccacctcttgcatgcacacttgacctcctgacttgggctctgaaacctgtaaaatgtggggtgtagagaaatcgagtcatttggcctcatcctggtgccattatctcttgctacattaataaaccacctcaaacag

SEQ ID NO: 390013 - DNA, 1000 bp, Homo Sapiens
aggagcctctgtgcagtgggcagggttggaggggcggaggggagcctctctctctatcttggctgacctggtaaaaatgatccctccacccctagtggcagaagaccctgacctgcctggaacctgccagggtaaggctaagatgtctgcttgttgaacaccagctagaatagagccagcacgcagatgacactcatgtaacagcagccatccaggtgagaatgccacttaccacgtgagatcttgctggttatcctgggtgctgccaccactggttttagtcatacagacagtttgcaagtaattgcctccatttttcctcctcctaatcagttgtgaaaatgcttgttgtccttgggtgatgtctgtcctcatttgaatatcactacagatgtctcaatcagaaatcaattagacagcctggtggtggggctgccagtctcaaaggcctcatcctctacctcatactggaatctaggtctgattgtttctaaggacaaaaattccctggctatacccaagcctcccaatctatttagaaaacaggcagccacgtggtcagtctcattcctgttgcatctgttctaggagaggccgacttatcctgctacctgattttgcaaggggtattttacaaaacacaagggagtcctttcccccagggcagtgattacagtcatgacccaaccaaggccaagccactctctagctcggcagagctagacccctgctttcactcttagatgagaagtcttaggtgaaatccctgagctccagtgcttggaaagcagttcaacagcctaacagacataaacaagttttgaataagtttctaggattttaaacaggtgactccacacttcatgaatcacaagctgaggtgaatgagatgtacttttctttctgatcaaagtcatttgctcttgctacctgtcctagaaccttggtttttaaatttaaatacaggaaacagggaatttaaataaagggaaataaaagt

SEQ ID NO: 390014 - DNA, 1000 bp, Homo Sapiens; identical to SEQ ID NO: 281209

SEQ ID NO: 390015 - DNA, 1000 bp, Homo Sapiens
aaacaacccgagttggctttggccaaggaacaaaccagccccaaacttagaggctggaacagtggcatgttctgtaggccaggggtgggctggctcagctgatgcttctgctgctggctgtgcctgtgtccctcctgcgtctgtgatctggggccggtggggcctaatgagctcattcatggctggtgtagtaaaggagactacatcctgggtccagcgtcccacaggccagcccaggcttgggcacgtggtgggctcaggcttccagaaggcctggagagggcaagcctctgcttgtgtcacctttggtacctccctgttggccaaagtgcctcacgaggccaagcccagatcccaggtggagtgagccactgtcctgtgctgggaggagccgcagtcacatggcagaggctgtgcacaccagcaggggagggggcagccagcagtggcacccggctctcgggttcatgtcctggggttgaggaagacacaagatggaagccagggcgatgtggcagagatgggtgcctgctttagactgggtggtcccgacactggagcccagcccagggatggagggaaagggcctctggccgatgggtactctgggagccagggctggggcagatggagaacaggggaggtgaggccctcggggagggagtgggaagcacagcacaggcactgccagtcacccgggtgatgcgtgagcagcaggcggaactcgccccaggctgggggacccagtgctgtgcagaccagcgaagtcgggatacctggatatagtaagctggagatgaaacttgagaactgtcactgcgtggatatttcaaaccctgagaatctttgtaagaccctatacggggtggtgtgaagacaggacagagtggaggccccaccccagtatctgagcagtgctaatagatgtataatgcaagccacatctgtaatttaaagttttttggtagctacgttaaaagataaaatgaatttcaagaat

SEQ ID NO: 390016 - DNA, 1000 bp, Homo Sapiens
ccagggagcaaggcatgatccccaaggcctgcgttcttaaccgccacactgtgtggggcttgattgggagggcggtgggagccagtaaaggctgtggtgcacatagtggtaggctaggaagccagagctggggcgaggtgtgaaggccaccacagtggggagatagaggctgaggctgacccacctgagacagaggctgggacccacctgggggagtggctgctggtggagcgtgcccagcctcagcaggctgtcccagaagcgccgcaccgtgagccccacggacatgcagggccccgcagcctgtgcagggggcatcatctgctctgagccaaggttctccaagtagctcatacagctttgaagcagcagcaggagcctgcgggcagagatgctaggttgctggggcccaggctggtgctaacataccctcagaccatacaaccgcagctctggctctggggaactggcccaggcatcaagagcttggagagtctcagaatatgctctgctgggccagcttcaaacctaacccaggggctacttcctcagggaagccctccctggccacagcctcagcttgggagcctcttctgtgtctcctgggtggcacttctgcctggctcttctccactggaccagggagctctgtgaagccaggcctggccttgcctcagttgtatcctgagtccttgaaaagttctgggtgaatggctgccttatatccagtggcccggagcctccacttgatagatgacagagctgagacccagagaggggaagagcttgcccacagacacacattgatagggcagagcagggagtgtgcacagtctcctgaggctagtcaggggcttctgcagggtgagctgcttctgtgacagtggagacctgtgtcaagacagctaggtctctgtcctaacctccaagtttaaaactacagtcaggcatgaattgtaagaaaaaggagtattataataaaaagctaagtttgcatttg

SEQ ID NO: 390017 - DNA, 1000 bp, Homo Sapiens; identical to SEQ ID NO: 281210

SEQ ID NO: 390018 - DNA, 1000 bp, Homo Sapiens
gtgtacaggacaaggtgtcaggtgactccttcccagcagggcctcgcagatgcacaagcacggagctggtgggttttgcccaagaaaggtcacgcggcacatgcagggattggaactcccaggccagggctctaggtcgctcccaccttttcatgtttctttctgtggccatgggtatagtggaaagacataaagctaaagccaacttttaatcctgaatgcactgcttgccaggtaaatgcccttggttgtggtatcttgttgagacttagttttcacagagggataatgaaccgttgcagaggtttattgagatcattaacagagtggaattcagcacctgccactgcactccagcctgggcgacagagcaagactcagtctcaaaaaaaaaaaaaattagctgggcagggcatggtgatggtgcctgtaatcctagctacttgggaggctgaggcatgagaattgcctgaacccaggaggtggaggttgcagtgagccgagatcgtgccactgtactccagcctgggtgacagcgcgagactccgtctcaaaaaaagctgggtgtggggaacacctgtggtcccagctattctggagactgaggcaggaggattgcttgagctcaggagttctggctgcagtgagctatgatcatgccactgtattacagaatgggtgacagaatgagagcgacactgtctcaaaaaaaaaaaaaaaaaaaggccgggagcggtcgtttgtgcctgtaatcccaacactttgggaggccagggtgggcggatcacttgaggccaggagttcaagaccagcctggccaacatggtgaatccccatctctactaaaaaaattaactggacatggtggtggacacttgtaatcccagctactcaggaggctgacacatgagaattgcttgaacccgggaggcggaggttacagtgagccgagatagcaccactgcactccaacctgggcacagagtaaggctctgtcttt

SEQ ID NO: 390019 - DNA, 561 bp, Homo Sapiens
gtactgtgtgtttgtgtctggggatactgggaaagggtaactggagggggattcaatgtgtctgtctcatccaataagcactcatgacctcagccccatactctttcttccctatgttcccagagacagaatagacctggccccttccttctaggggatcacaatattggaaggatgaggactccaaacagccagctcccatgccaaatagaacgatgagtgctgggatcaatttctatgggagcctggggagagggatcctttctagttgaagggtgggttgggtcaaggaagacttcctggaggaagtggttttgatccacactttgaaagatgcatagactttgggataaactggggcaataacagttggtaggggaatcagcaggatccagcgcccagaaataaaaaagcccagagtgattgtggggaggtggcgtttcccaaggtggctgttccacagagtggatatagggaggtggtaggaagtgagaggagatgaagtgcacacgacagtttctaatcccagtcttgggaccctaggatttgtctttcctgcag

SEQ ID NO: 390020 - DNA, 1000 bp, Homo Sapiens; identical to SEQ ID NO: 281212

SEQ ID NO: 390021 - DNA, 1000 bp, Homo Sapiens
tgcaccactgcgcccagctgatttttgtatttttaatagagacagagtttcaccatgttggccaggctggtcttgaactcctgacctcaagtgatctgcccaccttggactcttgaagttctgggattacaagcatgagccactgtgcctggccatacccccaacttcttagctagggagtataggtgagaagacatgagaagatgttgaaaatctcttacaaacacataggtttacaaaacacaagcctaaaaccaagatgctcaggcagtgctgaaatttgctcttgggaggaaatcccagtttcatgatgtttgaaaacattctttctcttgctggatcacgtgtcatcagatagagaagggccaaaattgtagtataaaaggttctttagggatgagattatggacgcaaattttttcttcaagggaagagtattttttcttactactagttttcttcaggtttgtttattattatttttttagacaaggtctcactctgttgctgaggctggagttgcagtggcatgattactgcttactgcatcctcgagctcctgggctcaagtgatcctcccacctcagcctccagaatagctgggaccacaggcatgcgccaccatgcctcgctaacattttttaaaattttttttgtaatctcagcactttgggaggccaaggcagatggatcacctgaggtcaggagttcgaggccaggctggccaacatggtgaaacccgtttctactaaaaatacaaaaaaaatagctgggtgtggtgttgtgcatctgtaagcccagctatgccagagctgtagcaggagaatcacttggacccgaagcgtgaggttgcagtgagccgaggtcgtgccattgcacctcagcctgggcacaagagggaaccttgtctccaggaaaaacaaaaaaaagtgagacaagtctccttaggtgccagcctggcttgaacttctggctcagtaacctctgctcaacctccaaa

SEQ ID NO: 390022 - DNA, 1000 bp, Homo Sapiens
tgctgtaagaagcttacaatgtcatcatgtttaaggctaagaccttttccgtgtctcaagtgtatattttgtccagttataactggatggtaagacagtattaagagtgcaagtacctggcacttgaagtttgtcccaggaaaatgcctgtgtataattacctaacttcagatctgcacattaacttatttaacaaaataaatcagccgggcgcagtggctcatgcctgtaatcccagcaatttgggaggctgaggagggtggatcacctgaggtcaggagttcaagaccagcctggccaacgtggcgaaaccccgtctctactaaaaagataaaaaattagccaggtgtggtggtgcacacctgtaatcccagctacttgggaggctgaggcaggagaattgcttgaacccaggaggtggagcctgcagtaagccaagatcacaccactgtactccagcctgggtgacagagtgagactccatctccaaaaaagaaaaaaaaacaaaaaacaaaaaaaactatccagcaaaattataaaatctactttgttttgcttccttgattattccaagttcttaccaaatattcttagccttttataagtaaaactgttttacatttaactccttatttcccttacccccaagaaaacgcaatattaaaaatgattaagctggggtggtagagtatacctgtagacccagctacttgggaggctgagataggaggatcccttgagcccaggaggtggaggctgcagtgaaccgtgactgtaccaatgcactccagcctggtgacaacctggtgtttaaaaaaagaaaataaaaattagttacatatataatgttttatcagcttatatatgaaaaaatttccctcagttcgttaattagccctacactgtttacataaatttatttactgagtataaaatcagtagtcataataaacttgacaattcttacattggtaggaaaccatattctaattaaaattga

SEQ ID NO: 390023 - DNA, 1000 bp, Homo Sapiens; identical to SEQ ID NO: 281213

SEQ ID NO: 390024 - DNA, 1000 bp, Homo Sapiens
tgaccaagttaagttgacctcacagactttattatttctcaacatcctagttattaatctcatttcagctcatacaaaagtttttcagtgctgggttgctctgctattacatcttctcaagtatattatatcagattataacattcagaaaactcttatacttattactaccagattgaaaagtccaagggggcaatggcagtatttgtcttctttgctaatatattaccattatcgaatgcgatttttagaatagattacacaataaataagatgaataaatggattaagtagaggagttagtatgtataaatattattctaacattgagaaacttttccaaaatgtacgtaacaaaataggatagaacatactaatgaatatctatcaaaagataagacataaattgattttcagattgatatcaaagataatactattatgttagggtttaaaataattgtagcataatttttatagggttgatttcaattgtcttaggttttttaatataaacctttgaaagatgaaggttcctatataagatgatggggtagaggagcaggacttagaatagtggagactggccttaaactgacatataaatttaattacttgctaagcataaagtggtataaaccttcctatgcagtagaaagaacaaaattagtttacactttaaataagaatccagatgggctgggcgcggtggctcacgcctgtaatcccagcactttgggaggccgaggcgggcggatcacaaggtcaggagatcgagaccatcttggctaacacggtgaaaccccgtctctactaaaaatacaaaaaaaattagccgggcgcggtggcgggcgcctgtagtcccagctactcgggaggctgaggcaggagaatggcgtgaacctgggaggcggggcttgcagtgagccaagattgtgccactgcaatccggcctgggctaaagagcgggactccgtctcaaaaaaaaaaaaaaaaaaaa

SEQ ID NO: 390025 - DNA, 1000 bp, Homo Sapiens
ctgagccttcctcctgcctctcctgagcttgccctgaccccaaacatgtgggcctggaaagggcggggcccctcctagctggcctctcaccgggtggtaggagcccgctgggtcagtgcagccacactggccaaggggcacgcaggaggttccactcaagatgtggcctttctgacattcacagctctcagcacagggcagtgctttggggcagtccctcgggttgtttatgctgctgcaggtgtctgggcaggggctgctgcaggggctgtagctgctgccaggtgggcacctcatagctaaagaaaatgagagcattaggaagagtggggtggcatgtccagcccccaaaccttggggcatcaaaagctcctagtagtggccaggagcggtagctcgcacatgtgatcccagcactttgggaggccgaggcaggtggatcacctgaggtcaggagttcgagaacaggctggccaacatggtgaaaaaccgactctactaaaaatacaaaaattagccaggcgtggtggcacacgcctgtagtcccagctacttggggtggcacacgcctgtagtcccagctacttgggtggctgagacacgagaatctcttgaacctgagaggcagaggttgcaatgaggcgaggtcagaccactgcactccagcctgggcgacagcgagactctcaaaagcaaaaaaaaaaaaaaacaaacaaaaaaaaacagacataaaatctacaattttaacaattttctttttcttggagacagtctcgctctgtcgcccaggctggagtgcagtggcatgatcttgggtcactgcaagctccacctcccagattcacgccattctcctgcttcagcctcccgagtagctgggactacaggcgcccaccaccacgcctggctaattttttgtatttttggtagagacggggtttctccgtgttagccaggatggtctcgatctcctgacctcgtgatccttctatagtgtcac

SEQ ID NO: 390026 - DNA, 1000 bp, Homo Sapiens
atccctcctgtcccattctcaaaaggcagaacacgtgacttctcacaaggccttgatttcttcattcacagcccgggaggggataagcttcccagaagtgcttaggttatttgaaaaaggcccaggtctcatcaaaggacactatcaagaaattgaaaggaggccaagcacagaggctcacgcctgtaatcccagcactttggaacgccaaggcaggcggatcacttgaggtcaggagtttgagaccagcctggacaacatagtgaaacctcatctctactaaatatacaaaaactagctgaatgtagtggctagcctcagctgctcaggagactgtaatctcagctgatcaggaggctgtaatcccagctactcaggaggctgaggcatgagaatcacttgaactcaggaggcaggggttgcagtgagctgagaccctgctgttgcactccagcctgggctacagagtgagactctgtctcaaaaaaaaaaaaaaaattgaaaagacaacccacagaatgagagaaaatatttgcaaaacatatagctgttgaagcatttatatatagaatatataaagaactcctggccgggcacgatgcctcacccctgtaattccagcacttcgggaggccaaggcaggtggatcatctgaggtcaggagtttgagaccagcctggccaacatggtgaaatcctgtctctactaaaaatacaaaaattagccaggcatggtggcgggcaactgtaatcccagctactcaggaggctgaggctggaaaatcgcttgaacccagggacagagtttgcagtctcactctgtcgcccaggctggagtgcagtggcaccatcttggcttactgcagcctcaacctcccaggctcaatcgatcctcccaccttgggacaacatatgcaggccaccatgcctggctgatttttctaatttttgtagagatggggttttaccatgttgcccaaactggtctcgaactcctgatc

SEQ ID NO: 390027 - DNA, 1000 bp, Homo Sapiens
cggggtcccctcctgcccgggtccggctccctgcccagaggcgtcaggggtggctgtggcggcgtccgcaccggtaggcggctcggggctctcgagggcgccaggggtgcgagcgcggggcggtggcccgggaggggcgccggacgcgggttgcagtccagccgggctgacaggtcgctgaggaagcccattgcagggaagggctccgggacataatagcaggttaatcccgagaagtccggagcgagctcccagcgccgagctgcgccgagctgcgccgcgctgcgggctgggctggaggcgtgcagggacctgtttctgcttggggggcgggagccggagacagaaggaagggaccaggacgcctggtctcccagggcccggggctggcgctggcgctggccgggccttggtttttccccggggcaggaagaaactccgtccagaccttaaagaagacaacggccccccagctccccgtgtctagcctaaggaggaaggggtggtaaccgctggtgacctgtctgtttctccttgactggatctgcgctcagggcgctccctgggtaggggcggaaggtttgctgcagggagggagactaaagggatgagctccagtgagtgggtggacagggagcaagcggacccgcgctcctttcatccccgctcagggacagttccccatgccccgcgcttaaccctggccccagttcctcctgcccagagctctgccaccatccgctgtgggcatgaaaagcatggggtgggaagggggatcgccaacagtgtagctggggtttccatggagacagggagagaggaaaaaattctctctgcatcaagaccaaagaacaaatatctcccatgaaattgccccgagtgtccaatggctgttgctatgaggtcattgtggccagccagagccctccaggctggaaggagtgtgttcgttggggtcagagccacccagggcttgggggacggaggtgatgtggaattc

SEQ ID NO: 390028 - DNA, 1000 bp, Homo Sapiens; identical to SEQ ID NO: 281214

SEQ ID NO: 390029 - DNA, 1000 bp, Homo Sapiens; identical to SEQ ID NO: 281215

SEQ ID NO: 390030 - DNA, 1000 bp, Homo Sapiens; identical to SEQ ID NO: 114741

SEQ ID NO: 390031 - DNA, 1000 bp, Homo Sapiens
aatgcccggatgtgccctcatccggaactggtgcctttgtcagaggggacaaaaggggagttgggcatgggtgttcccaagaagctggttctgagaggctgtaatctccagtggagggcaggaatctgtgaatgcactttgtggggggcgggctggttaggatcgcaggcaaggggctcttaacagggagcactctgaatggttaatcactggggctgggcgcaggggctcacgcctgtaatcccagcactttggacggcccaggcgggtggatcacttgaggtcaggagtttgagaccagcctggtcaacatggtgaaaccctgtctctactaaaaatacaaaaattagctgggcgtggtggcgcgtgcctgtaaccccagctactccggaggctgaggcaggagaatcgcttgaacccgggagatggaggctgcagtgggccgagatcacaccactgcactccagtctgggcgacagagactcgtctccaaaaaaacaaaaacaaaatcactgggtcaggggtgtgtaggaatatgaccccagagggactgtaattcccagtggtgtcaaactctgggttgatcttaaagggtgaggctcagaatgtggcttccagggacaggggtgtccaagtatgtccctgacgggggaaaggccagaacagggtctgcagagagagagtgggggagtgcgggtcggagcttctgcgcggaccggggcggggcacctctggagggcaggggcctctggtctctgggaggggagggaattgaccaatggggagagagcccatatttgctctcaggagcctgcaaattcctcagggctcagatatccgcccctgacaccattcctcccttcccccctccaccggccgcgggcataaaaggcgccaggtgagggcctcgccgctcctcccgcgaatcgcagcttctgagaccagggttgctccgtccgtgctccgcctcgccatgacttcctacagctatcgccagtcg

SEQ ID NO: 390032 - DNA, 1000 bp, Homo Sapiens
aaataaacaatccataaattttaaattgcgtgccattctgagcagcatgatgaaatctctcgtcatcctgcccaggtcgtgaatcatgcctttgtctagcatatccacactgtagaaactccccacccttagtcacgtagtagtcatctcagttctcacatggaaaaagcatgtatatgtagggtcagtactactcgaggtttcaggcatccactgggagtcttggaatgtatcccaccactgtaaccaatatctgatgctattctcacaccaagctggtaaacctggcctaaacaaagtcccaagctgcccccagacttgtgagctagggcttttgtctagaaacaatctttagtgacccaaagtcaaagcttaggtatcctgttgactgggcacagcagtagaacccatcgattctggaacatggacctctagccaggtagggttctgcttccttgttaggtgccttgaggaatgtggggccaggagggtccttcaggcctctccctacaccccagtcccaccccagccccctcctgctgctcctgcaactgccctactctctcagaagccttgtgcttcagaagtgttttaagacaagagagtgtgagactaaatgcaaactggcttcaaaaatgaccattgtttgtatccactgggaatccttcaagacctttccctcccctcccttctccccacggtgaactttaagcatttttatccatggagactaaagacaaagtactgtgtctggcttctctcctcttttccagccagcccacttgccagtctggcttctctcgtctttgtttggatgctcttcttcatgactcctcgccaatgcacagatgtaaactattgtctgattattaaaagaaaaacacaaaacacaaaaaaagcacacatgccttcagtattaatgaccatagagctgtctgcataaggtgaagtctggggcctgagcagaccacaagccatcagccctgcgtccaggaacttt

SEQ ID NO: 390033 - DNA, 1000 bp, Homo Sapiens; identical to SEQ ID NO: 201679

SEQ ID NO: 390034 - DNA, 1000 bp, Homo Sapiens; identical to SEQ ID NO: 281219

SEQ ID NO: 390035 - DNA, 1000 bp, Homo Sapiens; identical to SEQ ID NO: 281220

SEQ ID NO: 390036 - DNA, 1000 bp, Homo Sapiens; identical to SEQ ID NO: 281221

SEQ ID NO: 390037 - DNA, 1000 bp, Homo Sapiens
tgcctaaaccaaagttttgtatgtgatttcttttaaagtttctcttatttcctgttctgaggtttatacacaatagacccgaatagagtttgaataattgaagggtttatgaaatccagaggatattaccagctgctgatttgcacataccaagaacatgaacattttccaacggagaatttccctagcttaataagaaaaagtccaagagccggtcacagcattaacatttagtgggagtgcagtgagaattgggtttaacttctggcatttctgggcttgtggcttgtggttgattttttatttactttgcaaaagtttctgataggcggagcatctagtttcaacttccttttgcagcaagttctttcctgcactaatcacaattcttggaagaggagaactggacgttgtgaacagagttagctggtaaatgtcctcttaaaagatccaaaaaatgagacttctagcaaagattatttgccttatgttatgggctatttgtgtagcagaaggtaagattaaaagagactcttttctgaaaactgtattatgaaacatttgctaatgatgcttttcacaggagtaataaaaatttgatttagaaaatgtgcttaagtattctgtaacttgacaattgagtggcttttgacattgttgagtttaaaaaatgtaagaaccttatttgaatggtatatctaaatattcatcataattatatttaatataaaatagaataaaatgttttaataaacatttctgaaaaactatgatctggaataatcatttcccttgtaattatcataaaatgtaatttacttttttgcttaggagataaccaaaatgtattatgtgaaagcattaagaaggatgtgaatatacatagtcaataaaagccatcaaatcataatgattagatttatttcaaatatgattttaactcttcctaaataaaaattcatttatcatttacaactgatattgtcatgaccttagaatt

SEQ ID NO: 390038 - DNA, 1000 bp, Homo Sapiens; identical to SEQ ID NO: 201670

SEQ ID NO: 390039 - DNA, 1000 bp, Homo Sapiens; identical to SEQ ID NO: 201671

SEQ ID NO: 390040 - DNA, 1000 bp, Homo Sapiens; identical to SEQ ID NO: 201603
  misc_feature (914)..(914): n is a, c, g, or t
  misc_feature (977)..(977): n is a, c, g, or t
  misc_feature (989)..(989): n is a, c, g, or t

SEQ ID NO: 390041 - DNA, 1000 bp, Homo Sapiens
ggctaggtacgaggctgggtttgaatcggccgaggatctgtgcctgtgtacatggcggcgcccgttgtcacggccccgggcagagctctgctgcgggcgggcgctggacggctgcttcggggaggcgtccaggagctactgcggccgcgacatgaagggaacgcccctgacctggcctgcaacttcagcctttctcaaaatcggggcacggtcatcgtggagcgctggtggaaggtaccgctggccggggagggccggaagccgcgcctgcaccggcgacatcgcgtctataagctggtggaggacacgaagcatcggcccaaagaaaacctggagctcatcctgacgcagtcggtggagaatgttggagtccggggtgacctggtctcagtgaagaaatctttaggccggaatcgactccttcctcagggactggctgtatatgcatcccctgaaaacaagaagctgtttgaagaggagaaattgctgagacaagaaggaaaattagagaagatccagaccaaggcaggtgaggcgacagtgaaatttctaaaaagctgtcgcctggaggtagggatgaagaacaatgtcaaatgggagctgaaccctgaaatagttgcccgccacttctttaagaatcttggtgttgtggttgccccacatacattaaagttaccagcagagcctatcacacggtggggcgagtattggtgtgaggtgacggtaaatgggcttgatactgtgagagtgcctatgtctgtcgtgaactttgagaagcccaagaccaaaagatataagtactggttagcccagcaagctgccaaggctatggcccccaccagcccccagatctaaatctactctccctccaaggcagcaaagcagaatcgggagcagtggagcagaaatgtgcaagcaccctgatctcactcccagctctgaccaaatacagaattttagagaacatctgaagacatcagactgcactgggttttcatgt

SEQ ID NO: 390042 - DNA, 132 bp, Homo Sapiens
gggaggaaaccaagactccagggtggagtgattggctgtatgtttcacctgcagccacgcgaggcccagaagtcttccagtgctttggaggttcacaagaaatatggtgactcaactggaaccacattagag

SEQ ID NO: 390043 - DNA, 1000 bp, Homo Sapiens; identical to SEQ ID NO: 281225

SEQ ID NO: 390044 - DNA, 1000 bp, Homo Sapiens
tggctaaactactaactaatgtggaggtttaatagtatctgagggatttggtggcttcatgtaatgttctcattaatgaatacttcctaatatcgttggctctactaatattttccaatttgctgggatgtcacctagcaatagtttggattatatagaaagtaaactgtggtcaatacttgcatttaattagacgaaacggggagtaattatgacacgaagtacttatgtttatttcttagtgagctggattatcttgaacctgtgctattaaatggaaatttccatacatcttccccatactattttttataaaagagcctattcaatagctcagaggttgaactctggttaaacaagataatatgttattaataaaaatagaagaagaaagaataaagcttagtcctgtgtctttaaaaattaaaaattttacttgattcccatctatgggctttagacctattactgggtggagtcttaaagttataattgttcaatatgttttttgaacagtgtgctaaatcaatagcaaacccactgccatattagttattctgaatatactaaaaaaatccagctagattgcagtttaataattaaactgtacatactgtgcatataatgaatttttatcttatgtaaattatttttagaacacaagttgggaaatgtggcttctgttcatttcgtttaattaaagctacctcctaaactatagtggctgccagtagcagactgttaaattgtggtttatatactttttgcattgtaaatagtctttgttgtacattgtcagtgtaataaaaacagaatctttgtatatcaaaatcatgtagtttgtataaaatgtgggaaggatttatttacagtgtgttgtaattttgtaaggccaactatttacaagttttaaaaattgctatcatgtatatttacacatctgataaatattaaatcataacttggtaagaaactcctaattaaaaggttttttccaaaa

SEQ ID NO: 390045 - DNA, 495 bp, Homo Sapiens
gcgagactgtggccttgtgtctgtgagtacatcctctgggctctgcctgcacgtgactttgtggaccctggaacgcccgtcggtcggtctgtgtacgcatcgctgggggtgtggatctgtgggtcccagtcagtgtgtgtgtccgactgtcccggtgtctgggcgatctccccacaccccgccgcacagcgcctgggtcctccttgccttgggctaggccctgccccgtcccccgctgcagggaaacccccggcgcggaggtaggggggggcgcggcgcgcgcctgcaagtcctgacttgtccgcggcgggcgggcggggccgtagcgtcacgcgggggcggggcgtgggacccgccgggcgggggcggggcggggcggggcggggcggctttggagcgggcccgggatccgccgggcggcctgagacgcggcgcgagccacatgcgagcgggcgcctggcggcggcggcggcggcaccagcgatcccagcagcg

SEQ ID NO: 390046 - DNA, 1000 bp, Homo Sapiens; identical to SEQ ID NO: 281226

SEQ ID NO: 390047 - DNA, 1000 bp, Homo Sapiens; identical to SEQ ID NO: 114742

SEQ ID NO: 390048 - DNA, 1000 bp, Homo Sapiens
agtgtccccctatcaaggcttagttttactattgcttaatatagatgaagaaaaaataaatcatatataaactcgggaagcttgggttttctcttaaagtaagccatgctgtgattgttccatctaaacagttatatcaactttactttgtatcatatgaaaacaacagcctgctgaatgactatgtattgtctatttccacctgctaaacaagagaagaccacatgaaataggatcagcttagccattaccttcaggaagcttcagacatattgtttattgcaaatggacatatattataaatgtatatacagacacatctttgtgatattacttcctgaagtatgttcttatggaaatttaactttgttcatccagtcagatttccagaaatttatctactgtgataattaatatattattctccaactctttgttattctcattctgtacttactttgctttcatcaaagacattttagcaaaattaatttccaggaccattttcttagtgaactaatgccatttgatcaacaatggccattttcgtttttatcttgaggatcacattgggcatttgtctctgacttttcactcagtttataatgcattcttgttccctttggaggatgtttgttctttttttctctgcttgctcccaacattaaaatccaaggtaaactcttaattaagtggagttgacagaagtcacattttctctataaagaacaattggaatccactggatttgccctatcaagaaaaaagaaaatcgtatctccaagagtaggtattggtaattaattaatccctaatctttttgaaaagtatctgtattagtccattttcatgctgctgattaagtcatacctgagactgggtagtttatcttaaaaaaaaaaaaaagaggtttaatggactcatagttccacgtggttggggaggcctcacaatcatggcagaaggcaaaaggcacatcttacatggtggcaggcaaggc

SEQ ID NO: 390049 - DNA, 1000 bp, Homo Sapiens
  misc_feature (861)..(861): n is a, c, g, or t
  misc_feature (910)..(910): n is a, c, g, or t
  misc_feature (985)..(986): n is a, c, g, or t
gctggccaactgcatcctcatctggaggcctgactacaaaaagattggctcaaaggcccctcagagtgttggcagcatttgtttccttgtggttgtaagattgaggtccctcttgcctcactatcagtcagctgggagtgacctcacctcctccaggctgctatcagattatgccacaggccccttccgtttctgtaataaagaactgccctcatattgaatccatatcacacctcagatttctctgatttcccttctgctttcaactagacaaactctctgcttatagaaaggctcatgtgattaaattgtgctctattttaaggtcaagtgtgctatgtaacatgaccaaataatgagagtaaaatctattatagtgacattccctggaattatgtagaagcgaaactattgctggaggggtagtctttggggccaacttagactattgattattccatgttcaaggagaggtggcatataattggagagctaagaaccgtcaatatctcaacatctaaaaaaataaaaattgtaattgtatttaaaatgttaggaaacatagttagaaatttagggttttaagcagatataaagatcttttaatcatgctactacctaattacaatattagataaagaagaacaattaagcctagtctatatgttagagaaatatagtaattttttctggaatgatttattatgtgcagactttgggttattggaatagatcattgaacatatatgttttaaagtacttaaaaatattttataaataaagttatttttatacagaacagaaaataggttgatattgaaatcagaaatactgttttagcataaggtcatatgttttaanggaaatatatttcctaaacaatagggaaagaaacacaggccaacactgnatgtaaaaaaaagatttacaggcctggagccttcatggcacttgggtttatgggactaagaattcttttgccttnnaaaaaacaaaaaaa

SEQ ID NO: 390050 - DNA, 1000 bp, Homo Sapiens
  misc_feature (961)..(961): n is a, c, g, or t
cctatcaaggcttagttttactattgcttaatatagatgaagaaaaaataaatcatatactaaactcgggaagcttgggttttctcttaaagtaagccatgctgtgattgttccatctaaacagttatatcaactttactttgtatcatatgaaaacaacagcctgctgaatgactatgtattgtctatttccacctgctaaacaagagaagaccacatgaaataggatcagcttagccattaccttcaggaagcttcagacatattgtttattgcaaatggacatatattataaatgtatatacagacacatctttgtgatattacttcctgaagtatgttttttatggaaatttaactttgttcatccagtcagatttccagaaatgtatctactgtgacaattaatatcttattctccaactctttgtttttctcattctgtacttactttgctttcatcaaagacattttagcaaaattaatttccaggaccattttcttagtgaactaatgccatttgatcaccaatggccattttcgtttttatctcgaggatcacattgggcatttgtctctgacttttcactcagtttataatgcattcttgttccctttggaggatgtttgttctttttttctctgcccgctcccaacattaaaatccaaggtaaactcttaattaagtggagttgacagaagtcacattttctctataaagaacaattggaatccactggatttgccctatcaagaaaaaagaaaatcatatctccaagagtaggtattggtaattaattaatccctaatctttttgaaaagtatctgtatcagtccattttcatgctgctgattaagtcatacctgagactgggtaatttatcttaaaaaaaaaaaaaaaaaaagagggttaatggactcatagttccatgtgggtggggaggccccacaatcatggcanaaggcaaaaggcacatcttacatgggggcaggcaaaggc

SEQ ID NO: 390051 - DNA, 1000 bp, Homo Sapiens; identical to SEQ ID NO: 201604

SEQ ID NO: 390052 - DNA, 1000 bp, Homo Sapiens
ttggcgattttttttttcttagtgatcttctaatgattggttctgaagtttcatatatggaaaaatggcaagaagatgaactaggttatcatagcctagtgtcattcataacatttcccttaaaatgttacaattaagtacaattaatatttaatgatgacatagattttaatcattttcgacaaaacgttttgtgcctttccactaaacgcttaaaaatagtttgtttcagcggggcaccctggcttaacacctgtaatcccagcactttaggagggtgaggcaggaggattgcttgagcccagtggttggagaacagcctgggcaacatagcaagaccctgtctctacttaataaataaataaataggtaaataaataaatagtgcttttattttatgtgcttcaaattctcttgtatctggaatcaggatcctgaggactaagtttttcttagggatgaatgaaatttctatgccccttttacctttctaggcaaatgtacattccatcaagttgactgtgtaacttaccatccacattggggcttttgagagtgagaaaaagggggtcttaataataactacactgggaaacaggtctgaactgggaccgactcagtttgaactgggatgtgtgctcgctgcctgtaacatcatcatgactgaatactttgtttgcatatcagcttttgaaaattcttagaagccttcgctcaagatacctgcttcatgactttcaatatagatttcagtatgataccagtcacataatatgtgtgcattagcattctagggagtcatttaattgaccctagaggagagtttaccatagggcagggatgattttgtttcccagctgttagttttctgagatcagtggttcaatatgtctggcagctttgtctttcacaaaccaagtcacatgtttgtgctactttttagggtaagcaagagaagtatttttcagggagaataagtcttagaaggtgatgatttcac

SEQ ID NO: 390053 - DNA, 535 bp, Homo Sapiens
gatttgttttttgttttttttttttggtggcaactattacattctctcataagctttatctgtatgtttattgtaatgtcttcttcctcactcagagtcagatgtaatgggaagaggccatgcacgcctggtgcatgttgaagagcctcacacggagaccgtacgaaagtacttccctgagacatggatctgggatttggtggtggtaaagtaagtaacttcctgcatatgcaatatgcaacaatagaggtccctgactattttcaactctttgctagtttttctgtttttattgttttatatgtttatgatgtacaacatgatgttttgatatatatatatacacatacacatagtgaaatgattactacagtcaagcaaattaacacatccattagctcacattgttacctatttttgtgtgcatagcaagcacacctaaaatctatcctcttagccaagtttcagtatccaatacagtattatcaactacagtcctcatgctgtactttagatttctaaatttattcatcct

SEQ ID NO: 390054 - DNA, 1000 bp, Homo Sapiens; identical to SEQ ID NO: 114743

SEQ ID NO: 390055 - DNA, 1000 bp, Homo Sapiens
tttctttggatgttcctctgatctggaaaactaaagatacaagctatctgccccctacatatgcaacacacaatggtgggtaaagcttgagacattgctgttcagaaagaggcagcaggggagggatgaaggaatggtggttctgaaatccagctggacagacgctggtgttccctaaacaggttttaagatgtgggaagattccatgtctcttggctctgccttctgggcttctgcctctgggtcatccttcttttctcacgaaagatccacgtgtttgcagccaagtagttttatcagccttcttcttgacagcagagtttggggtctctgacagtcttctttcattttgcactctgtcccctacagaccaatctgccagcactgtgggtgaaacagctttcccaaaccctttgcctgtcctctgtgggtttcagtggggctcatagtcgatttgtcaagagccatacccatgaatcttttagagataaactctacctttctaccttcagctcctgccaagatggcccccagggtaactcactgaagcttcccaagggccctaaggtttggtggagaggttctgcatggtacacccttgtaatctcttgcaacagacctctgtgtgactcattgctactcccatcctttgatctttatgcataatcacaaaagactgtacagttacaccctatgccacatgctcagaagccatttgttaatttcagcatctttttccatgtggggagactgacaattttcaaaatcatcaagtcctgattcaattttaacagtttaaaaaccagtctctttctcaatttatctctcttctctcacactatattataagcagtaagaagaaaccaggcagcatcctcaacattttacttggaaatctcctcaactgcatacccaatttatcacttacatgatgtgtttgccacgtaactgcaggagaccacttttctaagctttctgctcctacctaacaaggatccta

SEQ ID NO: 390056 - DNA, 1000 bp, Homo Sapiens
ttctttccttacctcttataaaagtgccatgagaatggaagttgtttttgttaattattaaattctgtataataaaagtacccatgctgttaaatttgcatgatgttttaaatattttaagatgaattatgccggtgcagctgtcgtgaaagtttacttgtgttttgctacttgcaaaggaaatgttcatgttctccctggcatagaacctatatttttaaagaaagataaatagaaattttaaggcctgaagtcaatattaaaaatatgagatatgagaaactgagttggctctgacaagtagtttttatagtgtcacaaatggttcatatatttcagtttccattttagctatttttgggacagaattttattttaatggaaaagatccttccactcagctactaaaataaggattaagaatatcccagagtaattggagtttttctttaaaaaaaaaaaaagtatgtttttactgaggtatgatgatttttgactacaactaaatgtttatcattgtttagtgtttatgtttaattatggttaattaattttgtttatgttaatttgtgttaattaatgttactgtaatgttataaacataagaccaagtgttcttatagttatttaaaaactacaactactcaatggataaggaatagataaggtctccttattgtaccttttttttcttttgaagtttatatgccagcaggcctttttgttttttccttttcagaatgtttcttattctctggaagcatcagcattttggaagtgtcttttatgggaagtggggcaggaatggggggtaaaaatgagtggtaaccaaagcctagcccctacggtcagcacccactggaggtgagaagccgaatggccttggttggcctggcacctggcccagggcctaaggccagaggccaaggcttggcccctgtggctggccagattctgcccttaggatccaaaccttcctccagggtcctgcccggttcca

SEQ ID NO: 390057 - DNA, 1000 bp, Homo Sapiens; identical to SEQ ID NO: 114744

SEQ ID NO: 390058 - DNA, 1000 bp, Homo Sapiens; identical to SEQ ID NO: 281234

SEQ ID NO: 390059 - DNA, 1000 bp, Homo Sapiens; identical to SEQ ID NO: 281235

SEQ ID NO: 390060 - DNA, 1000 bp, Homo Sapiens; identical to SEQ ID NO: 203896

SEQ ID NO: 390061 - DNA, 1000 bp, Homo Sapiens; identical to SEQ ID NO: 114745

SEQ ID NO: 390062 - DNA, 1000 bp, Homo Sapiens; identical to SEQ ID NO: 114746

SEQ ID NO: 390063 - DNA, 1000 bp, Homo Sapiens
tgacaggagatgggattaacagttactcagggaatctaaaagttaggaggttttgccacaatgagataccatctcataccagttagaatggcaatcattaaaaagtcaggaaacaacaggtgctggagaggatgtggagaaataggaatgcttttacactgttggtgggagtgtaaactagttcaaccattgtggaagacagtgtggcaattcctcaaggatctagaactagaaataccatttgacccagcgatcccattactggatatatacccaaatgattataaatcatgctactgtaaagacacatgcacacgtatgtttgttgcggcactattcacaatagcaaagactgggaaccaacccaaatgtccatcaatgatagactggattaagaaaatgtggcacatatacaccatggaatactatgcagccataaaaaaggatgagttcatgtcctttgtagggacatggatgaagctggaaaccatcattctgagcaaactgtcgcaaggacagaaaaccaaacactgcatgttcccactcatagatgggaattgaacaatgagaacacttggacacagggtggggaacatcacacaccggggcctgtcagggggtggggcatgggggagggatagcattaggagaaatacgtaatgtaagtgatgagttaattggtgcagcaaaccaacacagcacatgtatacatatgtaacaaacctgcacgttgtgcacgtgtaccctagaacttaaagtataatttaaaaaaataagtaaataaaaaaataaaagtttggaggttttggtagggcatgttattgtgtagatccattagtactttacctgtgcttacattaaaattatgtttctttgtctcttcatagacatatgtacaacattttatacataaatatttgatttcttttatagccactgtataaccagccatcagataccaaggtgtaccatgagaacatcaagacgtaagtattgatcc

SEQ ID NO: 390064 - DNA, 1000 bp, Homo Sapiens; identical to SEQ ID NO: 281240

SEQ ID NO: 390065 - DNA, 1000 bp, Homo Sapiens; identical to SEQ ID NO: 281241

SEQ ID NO: 390066 - DNA, 1000 bp, Homo Sapiens; identical to SEQ ID NO: 281242

SEQ ID NO: 390067 - DNA, 1000 bp, Homo Sapiens; identical to SEQ ID NO: 206989

SEQ ID NO: 390068 - DNA, 1000 bp, Homo Sapiens
atgtgcagttgactgtggtgagcacaaggctacatttgcagccaagcccaccagaggacccagagctagagggtgatgcttggaccccattctgcagggcagtttctcctcgtatagggtgcatgtctgtttagggccatgagaagcactggttgagtgcttatcaagttccctgtgcccggccacataactttaaacccccagcttagtgactggctacaagagtcaaactctgttcacaagccatgctacctggactcctggttccatttctcaggagtctaccagtgctgcccccagccccaaggacttcttagcagagcagggcccttagtgcatctgggtgggcccagagcagctgcagccctctctcctgcacggccagagcgacttagctgggccctgctctgcctgccctgtggccatgcttccatgggctcctgactctcctagggccttcttctggaaagtgctcaagaaccgagacactatcaccaaaactggagactctgggaataggatgtcatgtgttaagcatcagaatgtcccctccaacaagctaagagtgtctactcttgccaccctgtcatcattgtgcttgaggtcaaagccagtgccagaaggcaagaagaaatgaaaaaccatccaggccagaggggaagaaatgaaaccatctccctttgcagatcacatgattgcatagaaaatcctagggaatctacaggaaagttattagaactaataagtgtgtttaagcaaggtctccagatataaggtcaacgtaacagaaatcactcatatttatataatctatctgtaacagttgaaaattgaaaattttgagaaaagtgcccttaataatagcaccaaaaaaaataaaataaaaaaataaaaataatataaaatatgtgcacattctgtttgctgcaaactgtaaaaccatgatgacaaaaaggcttaaataaaaggaaagataccatgttcatggatcaggtgtctc

SEQ ID NO: 390069 - DNA, 1000 bp, Homo Sapiens; identical to SEQ ID NO: 281243

SEQ ID NO: 390070 - DNA, 1000 bp, Homo Sapiens
ccaaaaacttggtgttgtagttaccctgctctgccgtgcacttcctacaactgcacccacagtcgcggccaagcagcgaagatttaagaaagtaagaaagcgtgacggtttgctccactcttttgggctatagctcctccaatcagaaaaggaaggttctctgcatgtcccactttatgtgaaatctaacaaagttgaactcgtagaagtagagtgtagaaagagattggggccggggaggaagggaatggggagttactggtcaaagggtacaaagtttcagataggtaggaggaatgttttgaaatctattgcatagcagggcgactatagtcaataataaagtattgcatatttcaaaatcactgaaagggtaaatttcaaatgtctaccataaaaatgataggtaaaagaagtgcatttaatttttcttttaccacttttcttactctgttatcttcagctcaggagtatctaacctgcaaagatcttaattaaggctttggctttcgacttaaaagtctccataaaggaacgctacgcatcatcctgaaaataaagatcaaagtccacagccagtggtgaagaaacattaataagagaatcagtcagcctagtttttttgaggaaatctgtgcacagatcccaagtctacacataaaccaaaaagccaaagtaaagttaactgtatttgagcagtgtgggcagcccagccagccacagtaactgaagctggaagaattactccctacacacagggctcgtgttctctagatcaaccagacacatcacagactctgttgttgaggttctttcatttcctcaggccagttagcccttggctagtagccagagctgtacattaactgcccctacatttttaaaatcattgcttatgaatttctatgtattaacttagagaaatgtaattctagttcccatcttagaggaatggtctcttcttaatgtctttgtgttctaaatatttgatcatgtcaac

SEQ ID NO: 390071 - DNA, 206 bp, Homo Sapiens
caaccaaagcaaaaaaaaaaattaaaaactttaaaaaaatctaaaagtaaaaataggggatagttaacctgctatttctctggattattgtgaagggtaaatgaaataaactccagacaactttacagaattgttgttattctccagctaagtgagctactactttgcacctcaaaacctatgaatatgtttttgtgttttttcag

SEQ ID NO: 390072 - DNA, 1000 bp, Homo Sapiens; identical to SEQ ID NO: 281244

SEQ ID NO: 390073 - DNA, 1000 bp, Homo Sapiens; identical to SEQ ID NO: 281245

SEQ ID NO: 390074 - DNA, 588 bp, Homo Sapiens
cagtcaaacatattgatgagactcttttttaaaacataacagctcatttttgctttgaattctatatgaaaatttgtgctctattcgcaagtaacgaacagacgtggggtaaatctcggagtgtctgaagaccattccacaggcgccagttcttacccatgtttctgcttattctccaacctagttgacgccagagggaggcatcaaaaaaagattcggagcaaaactcagaattacctcaacgtgtatgcggcggaaggcctgcgcaccttgtgcatcgccaagagagtgagtgggggtgtctccgcgagggtgcacgtgcaggtggccgccccacagtgagcagcgcccggtgcagcactcaacaatgtatctcccataggttctgagtaaagaagagtatgcctgctggttgcaaagccacctagaagccgaatcctccctggaaaacagcgaggagctcctcttccagtctgccattcgcctggagaccaacctgcacttgttaggtaattaacttgagagtcgcatgcctaagggcagtgtggagtttgcagggacggccctggaggggtgagtgctcttgtc

SEQ ID NO: 390075 - DNA, 1000 bp, Homo Sapiens
ggagatggggagtcgtaatctttctggctacttcctgctgagagggggtcgtcgttatggggcaccaaaagcagcagtggagtggaagaggttgatttgttcgcagtagcactctctgtttcggggccttggaggcagcacctgctgaaacataatagtatgtaacagtacatataaataggctactgctcttttcttctgaagtttaagttgtctagtcttcagtttgcagggctttaagaaagcagagcttaggtttcagtgattaccaattaggaagaatgggggaaaatggaaaagaaagaggaaaaaattgaaaacattattttggagacctgtagccagaaaagttagaatttaatccaaactgcagaaaataataaaaactgaaaaacatcaggcaagactagaatttaacaacagatgtacttttttttttttttttttgagacagagtcttggtccgttgcccaggctggagtgcagtggcgtgatcttggctcactgcaacctccgcctcctgggttcaagcgaatctccaacctcagcctcctgagtagctgggactacaggcacgtgttactgtgttcggctcatttttgtatttttagtagagactgggtttcaccgtgttggccaggctggtctcgaactcctgacctcaggcgatctgcccaccttggcctcccaaagtgctgggattacaggtgtgagccactgagcccagccatagtttttgaaacataatttttctctctccagtttcccatttttattaaaagacagatcatagtaggactggtttgctttattatacttggtttaattatttgtatacagtacagcaagaataattagtttcacataggccttttaaattggctttgatggaacttcgttccatagaaggaatctgagataagtccttttaaagccgagccccagccatggatttgtaccaataaatacctatgagttgggtgaattcctcttctcttga

SEQ ID NO: 390076 - DNA, 1000 bp, Homo Sapiens; identical to SEQ ID NO: 281246

SEQ ID NO: 390077 - DNA, 1000 bp, Homo Sapiens; identical to SEQ ID NO: 281247

SEQ ID NO: 390078 - DNA, 340 bp, Homo Sapiens
gggaaatatcttcaaataaaaaccagacagaatcattctcagaaaattctttgtgatgtgtgcgttcaactcacatagtttaacctttcttttcatagagcagtttggaaacactctgtttgtaaagtctgcaagtggatatatggaccgcattgaggccttcgttggaaacgggatttcttcatttcatgctagacagaagaattctcagtaacttctttgtgctgtgtgtattcaactcacagagtggaacgtccctttgcacagagcagatttgaaacactctttttgtggaatttgcaagtggagatttcaagcgatttgatgccaacagtagaaa

SEQ ID NO: 390079 - DNA, 1000 bp, Homo Sapiens
ggtcaggagttcaagaccagcctggccaacatggcgaaactgcatctctactaaaaatacaaaaaattagccaggcgtggtgttgtgtgcctgtaatcccagctactcaggaggctgaggcaggagaatcacttgaacctgggaggcagaggctgcagtgagccaagattgtgccactgcattccagcctgggcaacagagtgagactctgcctcaacgaaaaaataaaataatttgctattttgcattcatttctttgtccagcaagtacttcttaagatctgtgatgtgccaggggctgtgttgatgggagcagagcgggcatccatattttcatccctttcctctccccaggtacggagatacaagggcctcatggactgtgccaagcaggtgctgcaaaaggaaggcgccctgggcttcttcaagggcctgtcccccagcttgctgaaggctgccctctccacaggcttcatgttcttctcgtatgaattcttctgtaatgtcttccactgcatgaacaggacagccagccagcgctgagtgcaggaaggaccccaggtcttccctggaggcagcctcctgaaggaaggaagattcagtctccactgagaggtgccgtctggcccttccctgcaggccagctgccccaagcggggtagcagccttgaacccacccagctgggacaccaccagaaggtccagggctctccccatgagagaatcagagggaatgcaggacgtggtctatggtgagccaacgacacagtgagaaggagcaggaagttgctgtttctcctctgaccagcccacactccaaaggaaacagacgccatcctacacctatcagccctgcctgccaggagaacagaacacactcctggtctggatggggctgctgcttgagtgcagagggctgcggtaggccctttgcaggagtcaggtccctacacttggcctgtttttccaacctatttaatagacattaaagctaaacaca

SEQ ID NO: 390080 - DNA, 566 bp, Homo Sapiens; identical to SEQ ID NO: 58418

SEQ ID NO: 390081 - DNA, 1000 bp, Homo Sapiens
aactcctcacacccaattggaccaatctatcaccctatagaagaactaatgttagtataagtaacatgaaaacattctcctccgcataagcctgcgtcagattaaaacactgaactgacaattaacagcccaatatctacaattaaccaacaagtcattattaccctcactgtcaacccaacacaggcatgctcataaggaaaggttaaaaaaagtaaaaggaactcggcaaatcttaccccgcctgtttaccaaaaacatcacctctagcatcaccagtattagaggcaccgcctgcccagtgacacatgtttaacggccgcggtaccctaaccgtgcaaaggtagcataatcacttgttccttaattagggacctgtatgaatggctccacgagggttcagctgtctcttacttttaaccagtgaaattgacctgcccgtgaagaggcgggcataacacagcaagacgagaagaccctatggagctttaatttattaatgcaaacagtacctaacaaacccacaggtcctaaactaccaaacctgcattaaaaatttcggttggggcgacctcggagcagaacccaacctccgagcagtacatgctaagacttcaccagtcaaagcgaactactatactcaattgatccaataacttgaccaacggaacaagttaccctagggataacagcgcaatcctattctagagtccatatcaacaatagggtttacgacctcgatgttggatcaggacatcccaatggtgcagccgctattaaaggttcgtttgttcaacgattaaagtcctacgtgatctgagttcagaccggagtaatccaggtcggtttctatctacttcaaattcctccctgtacgaaaggacaagagaaataaggcctacttcacaaagcgccttcccccgtaaatgatatcatctcaacttagtattatacccacacccacccaagaacagggtttgttaagaaaaaaaaaaaaaaa

SEQ ID NO: 390082 - DNA, 1000 bp, Homo Sapiens
agtaagagcctgaactatacgggagagaaaaaggagaaacctgctgccgttgccacagccatggccagagttcttcgggaaaccaagccaatccctaacctcatctttgccatagaacagtatgaaaaatttctcatccacctttctaagaagtccaaggtgaacctgatgcagcacatgaagctcagcacctcacgagacttcaagatcaaaggaaacatcctagacatggttcttcgagaggatggcgaagatgaaaatgaagagggcactgcatcagagcatgggggacagaacaaagaaccagccaagaagaaaaggaaaaaataaatgaaatgcctgagttaatgtgaactttggggcttctgcttcatttttacccaacaagcaacaatgccccttgtcctgtagtccacaccgatgttggcatcttggttctgaacccactgaattcaactgcaccttcagttagaaggaatcttcttggcaggtcctgctactgaaaaatggctggccttaggcaagcccttttgcaaaaagcacagctgaaagcctgagtttgggagcctgcacccaccccgatgaagctccacgggagcaaatacagagcctccaggcagtgctatggtccaggctggcttcgtttttccaaggagcctttggtgagttcaattatctggtaaatatccagcgcttcacctgaaagatagtgcaaattggttaggatgccacctcaagaactgtaactgagagctcagaagtgagcaaaggagcttaatgctaaggtcaaaaggagagtgaaaggttgagaacaattgccacgaacggtaatgttacatgttaggagggtctgttttctttttatataagtgtgtcttagatatattttaaatagaaaataagctttctgatttacttgtttggtatttaaagcacagtttgtttttctgtcacctatagagtgcaagaatgcactctatagaataaattctctttaaac

SEQ ID NO: 390083 - DNA, 1000 bp, Homo Sapiens
tgaggtaggaggaaggaaggtaagtaatacttcctagaagccaagtggataaagcatttcaagggggaggtgagtagttgtatcagatgctgctgataggtcaggaaagatgacaaatgggaaatggctattaaatttagcaacatgaaaatcattagtactttgaaaatagtcgttttgaagtggtgcatgtgaaagcctgactggttcaagagaaaatgggaggagatacattttctcctaaatggaagcaaagaaatggggtagtagctgagtggaccatcttgacctggtgtaatcctacacattgagggaataatggcttctccctgtcttacaacacatttattcaataaaatggttactaagggcctactgtgtgatataatccccaacccttcctctaagagtgatggttttgtgctcagcaggccacagcctaactactctcagttacgccacctggtggtggtggaggtaattgaccatctgaaccgtggctatcttctgactccatgaccttctcaattcatactatctcaaaataagttggtagctggagtgccttcaatcataagcatagctttaaaatttgtgtcttgcatgtaaattgcttcactgatgtttggcttaggcttagttgaagtacatgtttaaaatatccaatgactttgcatgatttgaactccaatacttaatgattttgtggaatattaacttcacaaaacgttttgtgaaaaacaaaatcagaatagtaagtgaaagatgtctcattgtctcttcctctttctgaatttcctcatagtcatattagtggaaatgctaaattcagtgtttaatttccatgaaatgtgttctatttctcaagcaagtgataacaagaactagaccattgaataggttaaaatattttactatgcaactttagaataaaatgattaggctgatgagggttataaagggtttcctttggatataaatcattaaaaatttagtcatt

SEQ ID NO: 390084 - DNA, 1000 bp, Homo Sapiens
aagggtgctcatcgcagatggaacaatagtgagaggacacctgaacaaaggagggaagcaattgttagcccttatgcagtttgtccctgctactgtgtcctatgtccattggcagaagccagaccgcacaatctaaactaaaacccgattggctgtttaaaatttttctaaataggtaaaagtaatggaaggataaaggaaaagaggaagttgcttacgaaaggacttagaaaagtaataatattcccaaataaggaaggggtataggctgtgagctgggacatgcctgtgagcacgtccagcacagatatcttggttaaagtataaggacatagaacgtactatgtgcctgtgagcacgtctaacagttacatagaatagggcttgacaaagagttattagcataaagcaaggaggtttgaaggaagttcgtctttaaaagaaaccattatttctaacacttacgatttattctttaacaagaagggaaactttcaagaggaacttttactttctacaacagctgacctctgctgagcgcttactacatgccaagcactgctctgaaagtttaacataccattcactcatgtaatcctcatattaatgcacatttactcacgtggaagccgagttccagggcatttgtcacttaccaaatgtcacatagccaaaatttgaatttgagcccaggtagtccagctctgggaccctgctgtgggccttcctgctgggccacctcaagggcattgaaagccagccccaccccactgggacacaagttcagagaagggcagagctggctgcctgtccagtgcttctttcactccaccacctacagctggccgctgagggagcattcacatgtgactctgtccccagggactccgatcttgccttaaagtcctccagggcctctggggatgggggcacagccttcaccctcaccccctccctggattttatagcccacttaccatgcataacagacaagtcccat

SEQ ID NO: 390085 - DNA, 1000 bp, Homo Sapiens
ttaaacagcttaaaatacagatttagtgactcagtacttcaaaccttgaatagaaacaaatatgattataaaatatttccaaacttatgttacatctaatctgaaacatattaatattataagcttaattcatgtcatcatttctttattttttattatatttcctggaggtataaggatatttatttttataatttccaagcactgagtaataatttatttcagaaagtttcagaaggttacagtaaactttaccaaacttgaagaagaatgactcagatcagtaagaagagtctgagttactcactaattgatttttattttatttatttattttttttgagacggggtctcgctctgttatccaggctggagtgcggtgacacaatcatggctcgctgcggcctcaacttcccaggctcgggcggccctcccgcctcggcctcctgagtggctgggactgcgggtgtgctctaccacgcctggctgagtttcgcgtttttctgtagagatggggtttcgcgagttgcccaggctggtctccaactcttggcctggagtgatttgcccatctcggcttcccaaagtgctgggattatagggatgagtcactgtgcacagctactaattgatttttgatctatgtatggcacctgatttcatcctcgagagtgacgtaaacctaagctactggttcattctctgtttatatagttaaacttcacttgtaatgttgataaaatcttttgtacccatgtgtttagcttcagtgtattttacaatctgatgtttctcctcacaatgaagtactaaattttgtttcttttcaactgtacaacccattgtcttgtgatatattgacctgatctcttaggattagtgaaaatttatgctttattaatatttgattgttattaggaccatctagagatttctgtttatgtgtgtgtatgtgcatctgaagatgtgtattttatttaaattttttgtattaagtgcc

SEQ ID NO: 390086 - DNA, 1000 bp, Homo Sapiens; identical to SEQ ID NO: 281250

SEQ ID NO: 390087 - DNA, 1000 bp, Homo Sapiens
cccccagcttcctgtatgggcctcgaaacacaatgggccttctcgctcactggtagagacaggggttgtggtccccaacctgccttctgctctgcccctgcacaggacccaaaggccccaggccctgcaaggtgtgctagttcctgctttcccgcggacttcctagtgcccaaatgccctgtgaggctgagagacccaggcccctgtggctttcaacacagcacagctgtggaagtggctgtgttcttctacagcctgtggaagaacccctgtagcagagcctcccgtccaccctcaggggctgaggcagctctcgaggagtggtgctcaagagctgacgcagggccacctccccttcccaagggggtgggagggagtgggcccacagggaaaagaaggcggctctgaaggaagatctcgcccacaccccaggacagaaagaggaaacaagcccgccctctggtgaaatgggactccctccatccaccaacacccaacctcctgaaagcttcacaacttcacgcagagtccggtgggcaggcaccaggcaggaaaggctcctcaagaggttcctggtggtctggcctaagccccagccagaggccctgctctctctggcctggggcatccacccgttgttctgaaggcagagcccattctgtgggctcacaagacacagtgaaggggatcatggcctgcacccctgcttttcagcagtaaaaagcccgaaaagcctggcgagcatggccgagctgggagggccgagccggaactccacgtccctcgagagcaggagcctcttaagggctggcactggtctcagcctaatggctgaggcggtaccctggcttcatatgcatctcactgctcccactgcaggggggcagggaaggggggtctgggagcccttcatgtgtgggggccgagctgggggcccccatggccatcctggacctcgctgctccagagtttaataaaggtagcacatgcttattgctag

SEQ ID NO: 390088 - DNA, 1000 bp, Homo Sapiens
caagatggccgctggcatcagacactcttcaccttccggacccaagacccccaacagctgcccatcatcagtgtggacaacctccctcctgcctcatcagggaagcagtaccgcctggaagttggacctgcgtgcttcctctgacctctgacctcgtggccactctaggcctcatggaggagggaagaggaagaggcaaggggagggtactgaggggcagatggctccaggagaggcagctcccctgcccaagggtccttgggcagaccccagctgttgtctgcccagtagaagtgggtgggggtaggaggggatagggtgtccttgggaacaatggatcccagcttagccccaaagaccaaccaaagagccagccagagtaagctggacctgcaacctgcctgagccccgtggcctctcagctctgcggccaccccgttccctccccagcttcctgcccaaagagccccacattcaagccaacttgagggaagggggcgtctcgtcagctggtccctgctagggagctattgatgtgcaatattagaaaggagacatgaaaaaaggagaaaaggaaagacagaagtgtatatatatattatttaaacaaacaaaaagaaggtgcgttactatttttttttcacccgggaaagaggtgagaggatgggaaggagcagccaggcgtgggaagcggcgagatcctcgggctgggggtgcccacgtttgctacctcccactgtgaaatcgctggtgctcgcaattgtctctcacagtgtatgtgatttttttaaggaaaaaaaaaaaacatccctatttaagattctgaaggtgctaccattattttgccacagactttgaagaaacttttggatgtggggcatcatccgcatctttctctctcctccaaatgacaaagtttggggaatttttgaattttcctagcatcgcccttgtgctcatcaggtaatctgctaaggaggaaaaaagaaaagaaaaaagg

SEQ ID NO: 390089 - DNA, 322 bp, Homo Sapiens
gagcctagtgaatggcaagcccatgcggggtgggtttgggtatgaggaggaggtcattgctggctggagtggccaagaggggtttcacaaagaagagtagcatctaaactggattgacaggaatggattggaagtgagacatttcagtgggaaaagggaattgtgccgtctgtgtcattttgtcctttttgtgctgttttttgtgtcctaaccagctgcttttctacagctactctcctctgcaaggcctaccgtgggggccacttaaccatccgccttgccctgggtggctgcaccaatcggccgttctaccgcattgtgg

SEQ ID NO: 390090 - DNA, 1000 bp, Homo Sapiens; identical to SEQ ID NO: 201578
  misc_feature (8)..(8): n is a, c, g, or t
  misc_feature (12)..(12): n is a, c, g, or t
  misc_feature (56)..(56): n is a, c, g, or t
  misc_feature (153)..(153): n is a, c, g, or t
  misc_feature (155)..(155): n is a, c, g, or t
  misc_feature (184)..(184): n is a, c, g, or t
  misc_feature (192)..(192): n is a, c, g, or t
  misc_feature (239)..(239): n is a, c, g, or t
  misc_feature (260)..(260): n is a, c, g, or t
  misc_feature (285)..(286): n is a, c, g, or t
  misc_feature (326)..(326): n is a, c, g, or t
  misc_feature (364)..(364): n is a, c, g, or t
  misc_feature (412)..(412): n is a, c, g, or t
  misc_feature (415)..(415): n is a, c, g, or t
  misc_feature (444)..(444): n is a, c, g, or t
  misc_feature (457)..(457): n is a, c, g, or t
  misc_feature (462)..(462): n is a, c, g, or t
  misc_feature (505)..(505): n is a, c, g, or t
  misc_feature (514)..(515): n is a, c, g, or t
  misc_feature (528)..(535): n is a, c, g, or t
  misc_feature (537)..(537): n is a, c, g, or t
  misc_feature (540)..(547): n is a, c, g, or t
  misc_feature (550)..(550): n is a, c, g, or t
  misc_feature (552)..(553): n is a, c, g, or t
  misc_feature (556)..(557): n is a, c, g, or t
  misc_feature (562)..(565): n is a, c, g, or t
  misc_feature (575)..(575): n is a, c, g, or t
  misc_feature (577)..(578): n is a, c, g, or t
  misc_feature (624)..(625): n is a, c, g, or t
  misc_feature (638)..(638): n is a, c, g, or t
  misc_feature (704)..(704): n is a, c, g, or t
  misc_feature (708)..(709): n is a, c, g, or t
  misc_feature (719)..(720): n is a, c, g, or t
  misc_feature (723)..(724): n is a, c, g, or t
  misc_feature (775)..(780): n is a, c, g, or t
  misc_feature (785)..(786): n is a, c, g, or t
  misc_feature (865)..(865): n is a, c, g, or t
  misc_feature (899)..(899): n is a, c, g, or t
  misc_feature (911)..(911): n is a, c, g, or t

SEQ ID NO: 390091 - DNA, 1000 bp, Homo Sapiens; identical to SEQ ID NO: 114747

SEQ ID NO: 390092 - DNA, 1000 bp, Homo Sapiens; identical to SEQ ID NO: 281255

SEQ ID NO: 390093 - DNA, 1000 bp, Homo Sapiens
ttttatttgtaaaatagagataaataatagcacttatgtcataggttgttgggagggattaaattagttctagccaggtcctatggcatgtgcccatagttctagttacttgggaggccgagtgaggcaggaggattggtttagtccaggaatttgaggctgtaatgtgctatgttcgtacctgtgaatagccgctgcagtccagcccgggcaacatagcaagaccccatctctctaaaaaattatttaattcatggaaagtacttacaacagtgcccgcagacagctgatactcaataaatgtcagctattactaaaaggaagagtttgcttctaaggcacttggctaatgtgttaaagttaaatcctctttttccaaactgtaaatatagatttgttgtggggttttttgtttgtttgtttgtttgtttgtttgtttgttttttgagatggaatctcacttatgtcgtccaggctggggtgcagtggtgcgatctcagctcacggcaacctccacctcccaggttcaaggattctcatgcctcagcctcccaagttgctggattacagtgttgccaccatgcctggctaatttttttgtatttttcatagagacagggtttcaccattttggccaggctggtctcgaactcctgacctcaaatgatctgcccgtctcagcctcccaaagttctgggattacaggcatgagccactgcgcccagtgctagatttgttgttatttcttatgtagtacatatttatggtgattttcttttgaataaaaatgatttttattcttgatttttaaggaaactttagtaaaatatgtcagacataattttaattggtttttttttgcctgttacatgtgactatattggctgaaaactttttagttatgaagtttttctgtgtgctactgtcttgtattttgtatatctagtattttgattgtcaaaacactttttgaccccaaattatgattttgtcattgcag

SEQ ID NO: 390094 - DNA, 1000 bp, Homo Sapiens; identical to SEQ ID NO: 207160

SEQ ID NO: 390095 - DNA, 1000 bp, Homo Sapiens
gagccttacagccaggctccgtgcggactgtgatgccagagaggcgtgcagcctctgggcaagtcgggagagggcttgggtggtccccacaaggcagaagaggtggaagggccagagaagaccaccaagaccaccgttcccgcaggcctggggtgagtgacctgactgagactagcgggcagagccaagcagggctaaactccaacccagggcccggtgttggacaaagtagctttttctttgctcgtttgtctgtgtattaagaagagactaaaatagccaaacgacgctggtcgcatgcgctggctgtggtctgtctgctgaatgtctatttttgtctcctgacgagacgtgaggaccatgcccttgatccctccgatggaccagaaacccccttccttgcaaaaaaaaggcaattgaattaggaaaagatagaccaacctagctcagatccaccaagataagcacagcaaagcttggctgcatttttgaggaataaaaacctgcagaaagcaccgataaccttcaagatctgaatgagattctattataacccgtctaaacgattgcaaaattcctcctttggttttggaagcagcgtttgctctcccgtggctcggattctctgaggaccagggagttgacacacaaaccccgccatgggtccgagccagctatttctcaaggctcccacctcgccaagctcccaagggcctgctggcagtgcctacgctgtgccaactaccctgtctggtacagaccacggctgggtaagcacccttaaaagcaacagaaatgacgtctggaagctgaaatgtgaaactgtcaagatggcttaggagaggaaggagtggacccgctggtctttggcattttgtatttagaattattctaactttatacataatgtataggccgatcttttggaagggataaggttttcattcttgtgcaactcattattctcattattggccttttaaataaaaagttgttttgc

SEQ ID NO: 390096 - DNA, 1000 bp, Homo Sapiens; identical to SEQ ID NO: 281259

SEQ ID NO: 390097 - DNA, 1000 bp, Homo Sapiens
gttagagagtctcactatgttgctaaggctgagctcaaacccccagcctcaagtgatcctcctgcctcagcctcccagagtgttgagattataggcgtgagccaacacacctggccccgttctttatttaactttttgagtaactgccagactgtttttcagcagctgtgccattttacattcccccccagccgggtatgagggttctgatttttctacatcctcaccagcaactcattttctgcctttttgattatagccgtctgtcctagtgggtgtgaagtggtacctggttaggttttgatttgcatctccctgacggccgacggtaatgagcatcgttttcatgtgcttatttgcaacccatatattctctttggtaaagtatctgttcagaattttgcccttccctctcattaaaaaaaattgggttagctgttttcttgttgttgagttttaagagttctgtatatactctggatacaagtcctgtagtgggcatgtagaggtaaggcatcctgcttctttgtaccccaggaagtacataaatgattgatctggggatgagattactatagtctgttttgttggtatttagcaggtactattccctgtttaaaccagctaaagaaatgttttgaagtattttagagattttaggaaggaatctgctattagagtagcaaagttattgagagtgaaaagatcaataatcccatctctcttaaattcagtctttattagagttctgatctttctgttagatgtctaaataagagaaaaaattatacagtggtctattaaaagggatgctattgatggttattttatattgtatatcaaagcctcttcatctataaggagctcttaccaattaataagaaaaaggaatgacatccagaaaaaaaaataggcaaaagacagaaatagataattcacaaaattagaaataaatacatgttgggtggcagggggaggtgaagggagggtgtctgttttt

SEQ ID NO: 390098 - DNA, 1000 bp, Homo Sapiens; identical to SEQ ID NO: 281260

SEQ ID NO: 390099 - DNA, 1000 bp, Homo Sapiens
tgttgaatgctgccactgttaaaatttctgagggggtataatagataaactatcccatagttcatctggaaaaataaggtggtgaaaattgctaagaaatttttgaaagggtaatgtaaacctagattaactgtttttgaaaggtagtacagaactgaatgcacaactagatatcaatggtatgtactcacccagaaaaaagacttcagtacatacatgtgagggcttaaaacattgttataaagacgggatcacaatgggaaaaggattattcaataagtagggcaggcattctctatgcctgctagggaagtgtgacttgttatactctttatgtacagcaattggcagtctgtgaaacttttaaattcatatacataaccttttgccctgcaattccacttctagaaatttatcctaccaaacaaagcacatagatgtgcaaaagtatgtatttacaagtatattctttgcaacttggtaatgtcaaagaattggaagcaacctaaatatctgccataggtaggataaccatatgctttggctttttgaacactaccagtttatacctgctgttcttggataattattaatggtgctttcattctcaatgtctcactttagataataaattacagaggattggtgaaactaatttgcccaatggaaaaaggaatgaagaagtgctttaggtactgagatgaaaagatctctaaggcataataatgtttattgagaaaagcatggtgtcaaactgtatggcatgctacaattgatgtataagaagaaaaaatgtgtatgtattcctatttgtttgtatatggtagactgtctctgaagacatatatggaagaacctgatcacattggtagtctccaaggagcagaactagatacctgggggataaggatcccaggagtgagccttttcattgtaaacttcattgtactttgagtttttaactgttcaaaaataataaaattagaaataaaaaaaaaaa

SEQ ID NO: 390100 - DNA, 1000 bp, Homo Sapiens
cttttttcaagttgaaacttgcctcttctactttaaaaaagtatatagaacagttacttctaataatcagaaagagatgttttatagaacatttctttaatataaagttagagatgtcttcataggcagtatggctatctttgccacagaaacataagtaaaattttagagttctgttttccatgaggtcaaaaatataatttattcctcagtcatggttttctaaatatctgtactccacattccattttaattgatatgagggtgttaaagtacctacttaatgggttgattactatcaaaatgaccaaattataccaaagaacttaagaggaagcactttcagaactattcacttgccaggtattttctaaaattccacctgaaagccaaaagataaaataaataagttgattttaatgatataagcatcacacaattttacattaagaaatactgtgcaggccatgcgtggtggctcaggcctgtaatcccagcactttgggaggccgaggtgggcagatcaccggaggtcaggagttcgagaccagccttgccaacatagtgaaaccctgtctctactaaaaatacaaaaattagccgggcatggtggcaggcacctgtaatcccagctactagggaggcttttgaacccaggaggcagaggttgcagcgagctgagatcgcgccactgcactccagcctgggtgatagagtgagattcagtctcaaaaaaaaaaaaaaaaaaaaaaagctgtgcgaaaatatttgtttttctctggggccttttctttcttttctttttaaactataccagaaattttacatcacagtttttatacaaagtgggaccttccatactttttgtattacaataaccttcagaagcccattccccttaaagtctgttgttcttgttttaatcatcaccacatataaatgttttagctttgtcttaaaaaaaaaaaaaaaaaaaaaaaaaaaaaaaaaaaaaaaaaaa

SEQ ID NO: 390101 - DNA, 1000 bp, Homo Sapiens; identical to SEQ ID NO: 281262

SEQ ID NO: 390102 - DNA, 1000 bp, Homo Sapiens; identical to SEQ ID NO: 281263

SEQ ID NO: 390103 - DNA, 412 bp, Homo Sapiens
tactctgggcaatattgtacctcacagcatagagggacactgatgctaacatgcagacttagagccaaatcagccccaaaacaattttttcattttttctatgttgttttatgaaaattttgcttatatgcatatttagacaaccacactgagaggaaaggaggtgacctagggaaaagaatgttttaaattaaaattagtttttaaaattaggatttggtttagaaatcaatgtattcctgctttcttttgtgatcttttgccttctccctcaatgcctcactttcactctgtcattatgaaccccattcctcactaatgggaactgggggagaatggacaatgatcctttaattgaaatggagttgtcatttccttgccatgctgataaaatgttgttgctgttgttgtt

SEQ ID NO: 390104 - DNA, 1000 bp, Homo Sapiens
gcccaccaccaccacaaagtggatcaagctccatgagtgccgtttccatgggtgtgtggatgaggatgttttccacaactcacgggtcattctgttcaaccctttggatgcgtgccggtttgagctaatgcggttcaggacagtgtttgctgagaagaccttgcctttcacactcaggacggccacaagtgtcaatggggcagaggtggaggtgcagagctggctgaggatgtcaactggcttctccgccaatcgtgaccccctcactcaggttccctgtgagaatgtgatgatccgttaccctgtgcccagtgagtgggtgaaaaacttccgcagggaaagtgtcctgggggaaaagtctttgaaagccaaagtgaaccggggggcaagttttggctccactagtgtttctggctctgagcctgtcatgagagtaactctgggaactgccaagtacgagcatgccttcaactccattgtgtggaggataaaccgactgccggacaaaaactcagcttccggtcacccacactgtttcttttgccaccttgaactcggctctgaccgggaagtgccttccagatttgccaatcacgtgaatgtcgagttcagcatgcccacaacttctgcctccaaagccagcgtgagatctatctctgtagaagacaagactgacgtcaggaagtgggtcaattattctgcacactacagctaccaggtagccttgggaagcatctggctaatgcttccaactccatttgttcaccccactaccctccccctcttattccttttagccatgcttactatgttcgcctggtaacctcttactgccttagaggaagttcaccatacatagctgtgggtgcgtctgctctgatttaaatgcataatctggctagtggatgagagaaaggttggaaaaaaataaagaggctcatcaaagagggggagaaattataaaaaaaaaaaaaaaaaaaaaaaaaaaaaaaaaaaaaaa

SEQ ID NO: 390105 - DNA, 1000 bp, Homo Sapiens; identical to SEQ ID NO: 281264

SEQ ID NO: 390106 - DNA, 1000 bp, Homo Sapiens
ctacgggggcgcacccagcccaatattccttccgccccgcccctgaccagcctgcccttctgcaggtctcataccgggcccagcagggtgacacgcggcgggcagtgcggaagatgctgctggtgtgggtgctggccttcctgctgtacggaccagccatcctgagctgggagtacctgtccgggggcagctccatccccgagggccactgctatgccgagttcttctacaactggtacttcctcatcacggcttccaccctggagttctttacgcccttcctcagcgtcaccttctttaacctcagcatctacctgaacatccagaggcgcacccgcctccggctggatggggctcgagaggcagccggccccgagccccctcccgaggcccagccctcaccacccccaccgcctggctgctggggctgctggcagaaggggcacggggaggccatgccgctgcacaggtatggggtgggtgaggtggccgtaggcgctgaggccggggaggcgaccctcgggggtggcggtgggggcggctccgtggcttcacccacctccagctccggcagctcctcgaggggcactgagaggccgcgctcactcaagaggggctccaagccgtcggcgtcctcggcctcgctggagaagcgcatgaagatggtgtcccagagcttcacccagcgctttcggctgtctcgggacaggaaagtggccaagtcgctggccgtcatcgtgagcatctttgggctctgctgggccccatacacgctgctgatgatcatccgggccgcctgccatggccactgcgtccctgactactggtacgaaacctccttctggctcctgtgggccaactcggctgtcaaccctgtcctctaccctctgtgccaccacagcttccgccgggccttcaccaagctgctctgcccccagaagctcaaaatccagccccacagctccctggagcactgctggaagtgagtggcccaccagag

SEQ ID NO: 390107 - DNA, 1000 bp, Homo Sapiens
ttcacctaatttttttttaaacgaaatccttgtattttattctacaaatgtaaaactctgtgaaaaaaatatttttccaaaaaccactaaaggagtttttttctattattttgtattcataaatgcaactgcccagtggcaggcacggtgggtgtgtatattcaagacatcatgctttctatttaaatattcttcttccttaagattattgatgctagctattgtattcatgtttaactctatttttaattccaattctaactatgaaaatacttgcagtaattttaatattcctctctatcccccttagcaggagtaataggaatatagactggaattgctgactcatggctgtatctggcctaatattgttctggttaatccatctctgactcatggccatatctggcctaatattgttctggttaatcgagcccagcccatggtgggttcttgtgactgtaccattcagtgggtgatactaagtttacctttggagaactgcaaacagcaattaattagctaatagaacaacaaaaggcccccatatcctgtagccaattgaagatctgagtttaatcagaccagtgcttcaaaatgggtagagccttgggtttcattttctgtcactttttctttctctttcatgtttctctctcgccctctccacagctgtcctttgcatgtgagtttctgctggatcctttcatgtgtgatgccctttcccctttttcttctttttatcgatgtccttttctcctgttctacttctagccctttcaagcttcatctttcctttcctaatttcccccacatgccactctttttttgctggctacaatttggaactgtgcagtttaaatatttatttattttgttttgtttttactctttctaatttggatattaggttttgcttcatctgtgttttttttctcttactcagtcaataaccatatctccaaactaaattaacgttactaaagtgaggaatttcccc

SEQ ID NO: 390108 - DNA, 1000 bp, Homo Sapiens
accaactcaaactctgcccacctctggactgtccacaccatcccaggatggggccctcctccgaaataggtgggtacacagggacccactggagggacagccactgtggcacggaggtggtgcagaccagcctggaggcagaaggcaggaggctgggacatcccgagtgtggcttcagtctaccacctggccctttagccctgagtgcccccctctaactcccctgcacaccaccctgtggccctactcagtctgccagtggaaggaggggcagaggggccttcctctgtcaccacgtaagcagcaatagcatcctctctgattcctctcaagtcccagaaaagcgtcagaggctgacaccaggtgcaggggtcctgtccccctttttcctgttttccaccttgatccatccctcccttgaggttatgaataaggaacagcccggctgcttgaatgggactggagatgatggaagatttatctgctacaggctcagaactctatttccctaaattcttccccctaaaaaatcgttatgttcccacagaagaactctcttttccccctccccccacctctccccagcctggctcactgagggcattgcctggggaccaggggatgtctgttgttggacttagcctgggaggagatacagaggatgctgctgcagtttctggattgaccactagggggaggtgtgtgccactggtctcagggcacttcagaggtcctggaggagccaggcctgagagggtagggtgagaggtctgactctggactgggtttcccaagtctcctgcacacccagctccccccagccctcactttccctccctctcgcacgtgacagctagtcctgttttcatcctgggctgaggcagcatttgtgccccagccccatgttcccagatgagtcgctgcttgccacctcctcttcacaccctggagagtgggtcagcagctgtctcctctgctggtcctgtgttagtgactgatg

SEQ ID NO: 390109 - DNA, 1000 bp, Homo Sapiens
acacacatatatatatacatataagcacctactacatgccaggcatcattaaatgtgttgcatccatcacgtcatttaaccccagcacttgcacactcctttctggttgtggaagactaagtaatttatctaagtcacccagctggaaggtcaggcagggacccagatttgaaatccaagtctacctacctacaggtcccctactcttaacctgtaggtcccactgcctacccaggaactgagggatgatgtagaaaatcccaaaacatgttaatatagggaatacctataaacatgcaatcaaagtctttgggactatacaaccactgtataaagcataacaatgtacaagcttccaaacaataactagaagttctgcctccctcttctgggttcctaaagcactgcacctatctacctgtcaaagcatctaccacattgtaccacaccttaaaatcaatggtttttttcttctcagccagcatgtggatgcctcaataaagcagactcctttcatgacctaaaactaatttcaggggggaaaaaaagacgagctgggcgcagtggctcacgcctataatcccagcactttgggaggctgaggcgggaggatcacttgaggtcagaagaccagcctggcccaacatggcaaaaccccgtctctactaaaaatacaaaaattagctgggcgtggtggcgcacctataatcccagctactcaggaagctgagacatgataatcgcttgagcctgggaggtagagcctggggctgcactccatcctgggcaacagagggagattctgtctcaaaaaataataataataatataaataaataaataatttttttaaaaaaagactctttcctatattaatctttgcatcctgtgcccatggccccaaacctgaccaatgaaggccccagtaaatattttttgaacaaaagaaaatatagatgatcaaagataagaaagataagaagacacctcaattcttgta

SEQ ID NO: 390110 - DNA, 1000 bp, Homo Sapiens
tggtatttctttccactagcattttgttggctttcgcttttccagttagcagctctttgaattatctttctaagatacagatttaattatgtcactattcaattcagaggttctgctatggaatgtagtttaaactgcttagcttggcacacagagatttatttctagccccttctccaccttcctatttcctccttcatttcagaatcttcctctccctcatccaatgctggcaaacaccagtgggggtggagtagtgggtgtaagctctagggagaaggcttggattggaatccaagttattccattacaagtagtgtgacctttaatacattatgtatattgtctaagtttcagctttattgtctgaaaaagaaaaataattgtgtgttcctcataatattgtggtacgaattgattctttcactcaagaaatatttactggagtacctactacatgcctggtgctgttgtagaccttgagataccttactcaagcaaaacagccaaggatccctgcccctggggaatttgaaattaagcaagggacagataaacaatgaacaaaatacataatatgtaagtctattgcatggcattctctaaggtgattggtgtcatggaaaaatagttaaaggagagcaggacagggaaattaggagtcctatgtatggtggagtgggagggctagaggtttaaaagggtaattatatgtggccttattgaggagatgccatttgaggaagcgctttaagaagtaagagaggtagctatttgaattccaggcaaaaggtatatccttgcaaaggctctgaagagattttcctggagtggtagaagaaccagcagaccagtgtgctgggcccagaagacggaagagaaaatcagccacacttgagaggaattcaggggaagcaatgtccttaggggagggccagtttatcttttgagaaggaggaagttgaggatatgatggatttggttagttctgggctgtaaa

SEQ ID NO: 390111 - DNA, 1000 bp, Homo Sapiens
gacccttcctgaaggatttttgttactgaagtatcagaaggcccttgttctaaggtggtggcactgtaatatctggcccaggaggaggtcagtgccgtgccggcgagtcctttgctcccttccttctctgaccagtaaacgcatctccagtcgctcccccgaggcccccctgcacgcagactccgacctcagagagtgagtcagatagaagccgctgcccaccctcccccaccctggccgggttcttgcctggcttgtgcgtccttgtgacaattcctgacacggatgcgcaccggcagtggcacgtccaggtgctgtgcgcgcccgggcccacaaagctcctttggacgctcatggcagccccttggtggaggaggtcgggtgcccaccccctccccgcccactgcggaagccggcgacccacggagctcgctctcggccgccgccacccctctgtgttcgcgcccttccgagctctgatccgacgctttgtttcttctcagtgggttcagggcctgggccagcctttacctacctcccccacccaaaaccggcaaaagctcagagcaccttgtctgccaaaagacagggagctgggatggtgcgggttggtctctaaaccggcgtggggaaaaaagaccctccgtacaaagccgcagggtggggctgtcgcaagggcggaaccgagagggtagctgggggcggggttcccagggccaagagggccattgtcctccctggagcccggcgcccccacagccagctctctgggagacagcccctcctttcgaatgcgcggggccctcagaccgcgcccggcccagcgctgggggatccttggctgcgggaggggcgccgcattgcgcgcggcgggcggggacgcgcggtgcggagcctgcgggccgggcggggctctgcggcggcgcctcccgattggccacccgcggtgacatcagccgatgcgaagggcggggccgcggctataagagcgcgcggccgc

SEQ ID NO: 390112 - DNA, 1000 bp, Homo Sapiens; identical to SEQ ID NO: 201595

SEQ ID NO: 390113 - DNA, 1000 bp, Homo Sapiens
gcaacaaagagtgtgagatgtgagattgtatagagatgaagtgtcatcacatcatgtgcatggtgcggaacctgctgttttatctatttattgtgccgtgtttacagttttttgtacactgtaccttcattggttcctgtgctgtagtaaatgtgttaggtagctgtggactccttggtattttgtaaatggtataacataacttggttcccctctgggtccttgagttttctgtgtatcatgtgaaaaaaaatggtgacatacatacagaattttacaaaaaaaaaaaaaaaaggcatcagtttttttaaaaatggggaatgtactattaaatggggatcttcctggtctactatcattaggacaagtaacaagctaaaaatgaagtctcttgaatctttccatccccaacttgcccacaaagctgtgggtggtttctggtacttaaagcactaatattatgttgctgctctgcgaacagcccagtagtcccatttccttccacaccaaaaagtgttaaatcaagtatgcaaatggagtccttacaactggagtttatgttgtcttgccctttttttagcacaaaaaaaattgtacttttttattgtcgaattgtttaaaagacttcattctttacttgttcttacgaaaaggatataagggagaagaatgcagtaattgctgtacgtgtatcatcattccagtttctaaaaacagccagccagcttttttccttttaagattctccagaaggctgcaaggccagaaccacaaatatcgggtgccttcctttggaaatatttgacctctcttctgtgaagagaatggtacttaacagactactactagtgctttgtcagtaccgaagtctgaatgcccagtccaatggcatacattatccttaaggtttttaatcccacctggaaaaattgtgatagaattctcacaaaataaacccagggcattacatgttgacaaactaaaaaaaaaaaaaaaaaaa

SEQ ID NO: 390114 - DNA, 1000 bp, Homo Sapiens; identical to SEQ ID NO: 114748

SEQ ID NO: 390115 - DNA, 1000 bp, Homo Sapiens; identical to SEQ ID NO: 201432

SEQ ID NO: 390116 - DNA, 1000 bp, Homo Sapiens; identical to SEQ ID NO: 281270

SEQ ID NO: 390117 - DNA, 1000 bp, Homo Sapiens; identical to SEQ ID NO: 114749

SEQ ID NO: 390118 - DNA, 1000 bp, Homo Sapiens; identical to SEQ ID NO: 201433

SEQ ID NO: 390119 - DNA, 1000 bp, Homo Sapiens; identical to SEQ ID NO: 281273

SEQ ID NO: 390120 - DNA, 1000 bp, Homo Sapiens; identical to SEQ ID NO: 114750

SEQ ID NO: 390121 - DNA, 1000 bp, Homo Sapiens; identical to SEQ ID NO: 201434

SEQ ID NO: 390122 - DNA, 399 bp, Homo Sapiens
cagtaaaagctagattcaaatgctggctacactcctaaccacccagctacattgcttcctgagggactatcttcagttttttgccattgtacccagtctagagactgacaagtacagcaggttgactgactgttacttttacaggcatggtttataaggcgagagcattttgggggggccatggtatggacattggacatggatgacgtcaggggcacgttctgtggcactggccctttcccccttgtctacgtattgaatgatatcctggtgcgggctggtaagtagctgtgacctagaagctggggttggaagttgcataaccaagcactgggtaaggcccttctgctagatctaaatgccttggtgaggcaacatgacattgaggggagagaaaaa

SEQ ID NO: 390123 - DNA, 1000 bp, Homo Sapiens
aaataaatttactatattaactgaaataccactctttgtgtaggtattttgtcatgtatttaagaaaaagataaaaagaatggaaatcatatgacataataacttaagtctttcttaaaagtgcatgctgtcttttgcaatacctcattcagccaagtatttgttctcttcctcattcagtataagtcagctttcaatttgcttagaaggcaacattagaaggttagagttcatcagaaacatagaattttaaaatgtgagttcaactgaataaatttgaatttctgtaggaggtaaagaatcaaaatacctgtttaaagattgcaattgcaatgtataataatcacttttaaattatttgattaaaccttttaggttttccagaaatgaaaaaaatcagttctaaaaccaaagctgatttttagaaaatttgagaatgtaaatcagccctatccataatatagtttctctaaaactttatcttaaagagtcattttaaaataatataactattaaaaatgtaactgatatttaaatgttttgaaataaaacattttaaaatataaatactgtagtttaaaagaaagaaactgggggaaagaaaagtagagaaagaaataccaattccagtccaaagctttatttgccagttttcttagaatgacttttaccagtttatgaattcttgtaaacagaatctataatggaaatactgaaagacttttgcctaaagtggcattattgaatgctgctgtgatgctactgtaatgtaataaattattaaattgttgcaaagtgctgtttttgccttaaaattttattttgtgtgtcttgaaaattatagtattaaaggtattgagattgtgcaaatgctgggcacgcttggcatgagataatctgtttttatttttaccaaattgtaatataactatgcaagtgtgtttattaaaagaacaccaactataaaaaaaagtcgacgcggccgcgaattccagctgac

SEQ ID NO: 390124 - DNA, 1000 bp, Homo Sapiens
ctttattcttgactctaagaaaatgaggtagctattagtattattctaattttacaaatgagaaagctgcattagaaacatgttaagaaacattttataactataaatagttgacccttattgagccaggtctatctgatttcaaggctctctgctatagtgcctatactgatttattatgttgactcagcatgtacctttgaaaagaaaaaagttgagaaattgaaaataacttatcattagtcatttatggataaaagaaaggaatgatgttgctggagagaagtacatgtagcctctattgctatagataaactgttttagttctagttcaggcctactgaaaggtgcactctccagtatccctgaaagtaagacactaaaggaaaaggaaagctgtgttttggggagtcatacctactagtaagtttggcactgatagggaagtctcataggtggaagatgggcaagatattatgaaacacacatagaaaggaaaaggggttcatcttcaaaatgtgtacaatgctacagagaagagagagaaagaggtagagataaaggttggatttgttctaccaagaagaatggacaaaggatgccagcaatgaagagccattcctgggggaagggatttgaaagattgtgtaggtcttttcatatgaggtcaaagtcaatgatcagaagtcagtcatgaactgctaaggtattttcttctccaaaaaatcaggaccaactttgcaggtcacttgtcagttgttggccaagttcctgcaggattaggtccagcctggtggtgagaggggagcacatagaaaaaattcccagcaagcctttgtcttttcctggcagtcagcccctcttttgctaccttgcccgttgcactcttgcaacatattttcatactttctctagtaaatctgcctttctttacccacaactgtcttggtaaattcttttaccacctgtgccaccagcctcagatagttgtcactcaccc

SEQ ID NO: 390125 - DNA, 1000 bp, Homo Sapiens; identical to SEQ ID NO: 281277

SEQ ID NO: 390126 - DNA, 1000 bp, Homo Sapiens; identical to SEQ ID NO: 281278

SEQ ID NO: 390127 - DNA, 1000 bp, Homo Sapiens; identical to SEQ ID NO: 281279

SEQ ID NO: 390128 - DNA, 1000 bp, Homo Sapiens; identical to SEQ ID NO: 114751

SEQ ID NO: 390129 - DNA, 1000 bp, Homo Sapiens
acagatggataatatccactgcggcccctccctgctttttctaccaactgccatcagccgagggcacagagctgtcagcatggccaactctgcctggaatttattctcccagtgtcttatttttttttgtttttttttagacaaggtcttgcaggtcttgctctgtcacccaagctggagtgcagtggcacaatctcaggtcaccacaacctccgcctcccaggttcaaacgactctcctgcctcagcctcccaaatagctgggattacagtagcgtgccatcacacctggctaatttttgtgttttttgtagagacagggttctgtcatgttggccaggctggtcttgaactcctgatctcaggtgatccacctgcctcagtctcccaaagtgatgggattgcaggcgtaagccaaagggcctgggcacttttttatattttttgtaaagatggggtctcgccatgttgcccaggctggtctcgaacccctgagctcaagtgatcctcccacctcggcttcccaaagtgctgggattacaggcatgagccaccatgcccggccccagtgtcttttttatggtacaagatacttgcagggagccacaccaggcagtgaccggtgcaccctcaccaacatgcacaccagggaagcctcctccaccaaccccggctggtggtacctcatcaaagtagaagagcactcggcgtccagccacttcatacctcttcatccccatgtgcttgtcaaggagcagctgcagaggaagccagaagtcagggtcctcagactctctacttgcttcctctcccatcccctgggggcagtggtcagtgggatgcttggacttgcccacaagttaccatgggctggggtctgggtgctggtcagtgctccccaggccctgccagcctctcagcacccaggagaggacgctcaaggatggctatccccgctgggagcacctgcctcgcctccctatacactccctcaacccagc

SEQ ID NO: 390130 - DNA, 1000 bp, Homo Sapiens
gccatgtacaggatccacaggggtggtgtcaaatgctattgaaattgtgttgaattgtatgctttttcacttttgataaataaacatgtaaaaatgtttcaaaaaaataataaaataaataaatacgaagaatatgtcaggacagtcactgccttcaccttctccatttcacaccggtggtacaagaaatcagaagcctaggccaggtgtggtggttcatgcctgtaatcccagcactttgggaagccgaggtgggtggatcacctaaggtcaggagtttgagaccagcctggacaacatggtgaaaccccgtctctactaaaaatacaaaaattagccgggcgtggtggctggcgcctgtaatcccagctactcgggaggctgaggcaggagaatcacttgaagccaggaggcagaggttgcagtgagctgagattgcaccactgaactccaggctgggtggcagagcgagactccctctcaaaaaacaacaactacaaagacaacaacaaacccagaatcaaaatcctgttggtccatagacctcatgggtggaagagaccttcctacatccaggttggcccaacatgggggagtccatgaaatggtcacctcagctctgccacaagccccaaggataagttgattctgcccctgggaatcatcctcaaaaaggaaaaaaatgttcccctgccataaactttccacttatgcagatgggcctgctcgtaagtcactgtcactgtgggttcccaactctgttcatgacacttccttccagcaccaaatgcttcccacccctctactcccactccccattcttcaaacccagctcaagttccagttcctccacctaggacttcccatggatccagccaatatcactctcaggtccggcgcagtggcccacgcctgtaatctcagcactttgggaggccggggcaggaagattgcttgaggccaggagtttcagaccagcctggacaacatagtgagactc

SEQ ID NO: 390131 - DNA, 1000 bp, Homo Sapiens; identical to SEQ ID NO: 206204

SEQ ID NO: 390132 - DNA, 1000 bp, Homo Sapiens
cacaggagagtaggagcccccaatccctgtggtcctgatttttgccatcattgcacaaagcacacgggagggggtgaggcgggcgcgggtgctcagccagtgtggggtagctctgtgtctatgcctgccctttccctcctcagaatcagaaccgagacccccgggaatggaaggctcatttcttggaggctgtggatgatgctttcaagacaatggatgtggatatggccgaggaacatgccagggcccagatgagggcccagatgaatatcggggatgaagcgctgattggacggtggagctgggatgacatacaagtcgagctcctgacctgggatgaggacggagattttggcgatgcctgggccaggatcccctttgctttctgggccagataccatcagtacattctgaatagcaaccgtgccaacaggagggccacgtggagagctggcgtcagcagtggcaccaatggaggggccagcaccagcgtcctagatggccccagcaccagctccaccatccggaccagaaatgctgccagagctggcgccagcttcttctcctggatccagtaagagtttcggtagagaaatgagactctgcaggagggctgcggaggggggtgagatgtcagagggagggccggggtgggggcgctgggggcaacggcaacagcatggacggacacttattttgttacgtacacccctccctggttcgcgtgtgtccacggatgttgtcactttggtttcttgtgcttttataggcaccgttgacgaactgcagcgatcttactggccaagccagagcgcctcctctcagattccttctcgacacagcaccctaggcggcttcttcctgtcagtcggaggtggcatgcaagatgaagctctctttgctcttcctgctttcattttgtgcttttccttgtgttttcatgttttgggtatcagtgttacattaaagttgcaaaattaatttggatgtttcttccttt

SEQ ID NO: 390133 - DNA, 1000 bp, Homo Sapiens
ctataaaaatttggaagtgatagaattaggtaaattctctttcttcaatagggaaatcaatgtatgacatctaacactgataaagcaaaaaacagtgggtaaaagtggtcatgggttgacagttgttgcagctggggatgtgtacagggggttggttatactattctccttttatacataattgaaagttttcataataaaaagagaagaaaaaataatgaatcaagcaatctttggaattataatgatagtcactggaaaaactaaaaataaaaatggaagatggtttgctgggaatgggacttggactaaggaggggtgaaacagggctggagactttcggctttccattataagtctgtgtgtgtgtgtgtgtgtgtgtgtgtgtgtgtgtgtgtgtgtgtgtgtgtgtgtgtgtgtgtgtgtgtgtgttatgtgcataaatgaagttttttcattaaagaaataacatttaaaagacaataactgttggtgaagatgtagaaaaattggaaccctcctacattgctggagtgattgaaaaatggtgtagtcactttggaaaacaattggcagttcctcaaaaggataaaatagtttacgatccagcaattccaatcctaggtatatacccaagggaactaggaacacatgtccacacaaaaacctctacacaaatgttcatagcaacattattcataatagcaaaaaagtagaagtggctgggaacagtggttcacacctataatcccagcactttgggaggccgaggcaggaggatcacttgaggccaggagttcaagaccagcctgggcaacaaggcaaaaccctgtctctacaaaaaactagctgagcatggtggcacatgcctgtagtcccagctactggagaggctgaggtgggaggatggctcaagcctgggaggttgaggctacaatgagctatgactgcgctgctgtactccagcctgagcgacagaataagaccctgtctcaaagaa

SEQ ID NO: 390134 - DNA, 521 bp, Homo Sapiens; identical to SEQ ID NO: 206206

SEQ ID NO: 390135 - DNA, 1000 bp, Homo Sapiens
ttcaaatagaaaagtaaaataacgaatatgcttttccaataacataatccccttctcacttgagaattttcctctaaaaagatatgctagatttatttcatgctttatgtgcctctggtgtgtccccttataacctcctccatatcatttagggatggtctcagctgcaagtaagaactgccacaacaggtgatgtaagcccaaaaaaaaaaaaaaaaaaaaagcaaagccaagcaaaacaaagcccatttaattatttcccataataataagtctgggagaaagaagattccagagttggctcagcagcttagtgacagcaaggccctaggctggcattttcttggccttcccgatggtcccaagatgactctcatggcctcaaacatcacttcctcacatcctgtcagggagaaagaggcaagtgagcaacaacaatttgtggtgtttggatcatttgtcagagaggaagaacgttcctaaaaactccgcctctgctgtttgacatcctcatcctattccttggccatggtggtatctcatggtcactcctctatctgccactgtaaagaggaactggattgctatattctgcttagacacatgaggatgcagcccaccttcccagaacatgtgcggaattagatttctacaaacacatttgtcttgcttctgcccaactctctcactagaatgcacattccataggggcaaacatttttgtctattttgttcacagctatattctcaacacctagaagagtgacagaaattcaataaatagttgttaagtgagcaaatgaatgcatgaataaggaaaagggtacatggctattgagtaggtaaccagcagtgttgatcacccccaacagcatacaactccagtctgatgaacatcatgctactaagtggccactcatcacccaagtctctgaccttactttttctctcttttctcccagggagtgagccataactggcggctgctcttgcgccaatg

SEQ ID NO: 390136 - DNA, 1000 bp, Homo Sapiens
aaggatggagcttgaacttagctggcagaactggaaacagaagattgtaaggaaagggactgggatcagtgtttcttctccaggacggattacccacagctgtccacgggcaggcacttgttactttctgggctgagcagggcagtgtggccgacggctgaaaggggaagctgcggctgcttttgtgcagggcatcttccattatactcttctctaaaattgttagctattcttgccatccgggcaattatattcattttcacaacaaccctcagattaagcaattgcccaaggtccaaaaatcagcaagagggacttggaacccaggtctgtcggaggccaaagctcttttcattacttcctgagggtggttttctaggcatggagaagcagaggtcagggaatcaagtgtggcgagagagagaagagaagtgaaagaagaaaggcaggtgtcagcttggtgtgggtttggtctctgggatatagactttgccagccaaaggatggagcttgaacttagctggcagaactggaaacagaagattgtaaggaaagggactgggatcagtgtttcttctccaggacggattacccacagctgtccacgggcaggcacttgttactttctgggctgagcagggcagtgtggccgacggctgaaaggggaagctgcggctgcttttgtgcaggggtggtggtgatgagggtgatgtggggggctggaaggcatggaggggaaaggatctggctgactacctggaagccaggacagatcccaccccagaaaggcgcagtaggggctctcatcctccactagcccgcccctccctacctaattaaggaccctaatcagcttggggagattaagggctctggccggctgtacccacgcccccgccctggcctgggctggcaaggaagacctgtgggcgggcgtcaaaagggggaccggccctgtgacccctcaccggggccgtgggcccgagccccggacttccct

SEQ ID NO: 390137 - DNA, 1000 bp, Homo Sapiens
agttctctcactactgaagacctcagtgcctttcctgaatactgatttcaggctaaatttttctgggatatagacattttcattcttatgttgcctatatttagacaaagttttatttgtctaatttacccatcatgttactgttgccacatgcacttctagagtgaaatactttgggacaaacctgaagaatttttttctcttctagatgtcaactttcaaaattatggaaaaatgaactaaatatcataataaagattcactcattcataatttaaacaagcccctgaagccctctctccaaatgtaagaattgttccctgccagtttgttctcttctcaggttcattgtttggcccacacctcctcccctcaacactccccaaggctgtattccagttagtgatactctgcctgcaatgtagcttttctcagtcactagaaaatgtcaagaaagtatagtttgaactgtggaggttattaatctctacgacactgtcaaaggaaagagggagagttttatagctgcaggttattaacactcttgacaatagaaaagttgacctttttttccccctttgcatttaggctcttgcctctgctttaaaaactggcagtgaacagaatatgcatttttagctttctcagtattacgtatataaaagtagtgagagatgaacctgacatatacttgataatcagatggttgcgttactgtacctagggtattgtagtttaacttttaattccaggatggttatttgtgacagtaaatgttcccgtgccaccaatcctggttttctgttttatcccacctctacttcccgtgtaaggaatatattgacatctgggaagagttagatccacccttgtttgacaacaccattacgctgggtaagatccactaagctgtgaaaacgcattcataaaacacctaaggtagaatctaagaacgcagtcttcctcttttcttgaggggcaatccaaacttataaactgg

SEQ ID NO: 390138 - DNA, 1000 bp, Homo Sapiens; identical to SEQ ID NO: 203365

SEQ ID NO: 390139 - DNA, 1000 bp, Homo Sapiens
tgagttcggtaatttaaagttgtacactactattttaactggttgccttcatattatgaaattaataagaaattaatgatgcactttgccatatgccttcaatttctttctgaataaaactaaaagtgataaagaaaaaatacatcaccagctgacactttaaagcttttctggttgtaatcattttcctgtggataaaatccattaaaaagtcacttgctgccttttttctaaagtgtccaaaactttcgatttaaaacaagatcaaataatgctagggttttttccgatgtaattttcttttgcagttgatgttttgtttcataaggaacttttattatgcggccaagcttgattgatgtttggagtttgctttcctctgtatgcgccatctttctttcttgagggacacaaagaacttggttagttaggaagcagaaacaagttgataggatggtctgttgtgcaatcaaatgtgtctgccataagattttgatttaaaggcaccctcctttacatgtcaggaatgaattttagaaaccctttacatggggctggagaaacgactcccagattgaggtgacagatcagggctcttacggagcagtgcaaaatcattgaagacacgtttctcaaacttgcctcttactgggtaaccaaagaagacgctctgttttacatcccctgaaattctcaacataaaccctagaaatacaatggcagtcataaaggaagcaaattcaacagctcaacacagagcaagggatgagagtctgggagtccttcccttggtttgatcacacatctcctctagaagtggttgctggatgctccagcaacagaagaaattttaggtacagtgcctcattagttactgacatttatgagattaatcccaatgatcattgagtgcctacagtgtgctagctctaagctagtattgcaggaagaacagggatcgacccaaggggcctttacttatctaactggaaggtggccg

SEQ ID NO: 390140 - DNA, 1000 bp, Homo Sapiens
cctagactggagagctgctctgtcccataagactgacataatcagtactgtttccttccggcaggcagttttgcacctcattaattagtaatcagggcagaagccatgcacttagagatctacgtatctgcaaatgtaaattatgattgggctctaaatctctccacaaggtattttttgctaattgtagtgcattccattttctggcttctccacagaatagaaagttttgaagaaaattccaagtcatagcatggtgctgccagcacccgacttgtcagagctttcttctctcagctttcagcagaaggcagcggcccatacctgtagttgaagctgctcaggaggccaaggcaggaggatcccttgagcccaggagttcaaggccagcctgggcaacatagatatataaataaagaaaataaaaaaatagcttttctctctctaggaggagactttggtgctttaaccactgtcttctcctcagccctgcactttacttagggttaattcgtttttttctctactgctttatcacaaacatgacacttagcaccagaagttgtcaaatccgctgctgctctgtggccctgtgagtgagccacgccactcctgtagtcagcagttgttcatcagttaccgtgtgccacgcatgttgctaggagctggggctgcagcactgaatagaaaaaggaagaagaaaagaccccaagagactgtgtctctgaccttgtagaactgacattcagtctactgatttaagtatccagaagtcacttaaacattgaacttggatttctgcagttgtaaaatggaattgatggtaactgtctcacctaagttgccttcccctgagcccaagactcaaataaggtgtttgtaacagtctctgtaatgatagaatgcctctatgaaatgttgattactgtttgcacccagaggtggtctcctggcctctgcaggctctccatggagcgtgctggcctgggaagaagaccac

SEQ ID NO: 390141 - DNA, 1000 bp, Homo Sapiens; identical to SEQ ID NO: 281289

SEQ ID NO: 390142 - DNA, 1000 bp, Homo Sapiens; identical to SEQ ID NO: 281290

SEQ ID NO: 390143 - DNA, 1000 bp, Homo Sapiens; identical to SEQ ID NO: 281291

SEQ ID NO: 390144 - DNA, 1000 bp, Homo Sapiens
tcaatgtgattcttctaaagcactggtttcaagaatatggaggctggaaggaaataaacattacggtacagacatggagatgtaaaatgagtttgtattattacaaatattgtcatctttttctagagttatcttctttattattcctagtctttccagtcaacatcgtggatgtagtgattaaatatatctagaactatcatttttacactattgtgaatatttggaattgaacgactgtatattgctaagagggccaaagaattggaatcctccttaatttaattgctttgaagcatagctacaatttgtttttgcatttttgttttgaaagtttaacaaatgactgtatctaggcatttcattatgctttgaactttagtttgcctgcagtttcttgtgtagatttgaaaattgtataccaacgtgttttctgtagactctaagatacactgcactttgtttagaaaaaaaactgaagatgaaatatatattgtaaagaagggatattaagaatcttagataacttcttgaaaaagatggcttatgtcatcagcaaagtacctccatgttatgaggatataatgtgtgcttcattgaattagaaaattagtgaccattattcacaggtggacaaatgttgtcctgttaatttataggagttttttgggatgtggaggtagttgggtagaaaaattattagaacattcacttttgttaacagtatttctcttttattctgttatatagtggatgatatacacagtggcaaaacaaaagtacattgcttaaaatatatagtgaaaaatgtcactatatcttcccatttaacattgtttttgtatattgggtgtagatttctgacatcaaaacttggacccttggaaaacaaaagttttaattaaaaaaaatccttgtgacttacaatttgcacaatatttcttttgttgtactttatatcttgtttacaataaagaattccctttggcaaaaaaaaaaa

SEQ ID NO: 390145 - DNA, 500 bp, Homo Sapiens
gatcagagggtaattcaccaagaaagacctctcctgttccattgtgtcatccaacaactgctcagagctcaaaattatagaaggcttctgagcccctagagatttttaatttgcttctaatccctgaggtgggaacatcatgagggaagatttgattttcagagttaaataaattgtatgtgcttttccagccatctggctcactcatttctgggtaatgcacatgactttgtttgcactggaggaagatggaagcttgcgtgtgtgcggtgtgtgtgtgtgtgtgtaagtgtgaggtaccttgtgtgtgacaagagacctcacttacgagaaagttggtggatcaggacattccagcctcaggcggcttggagcaggatcattcctcagcaggcattccttccacatgctatggatgaaccatgcacaagattttcggtttttttttttttctgttacagtgtctttagaaacaagtagaagtgttttgatatataaaa

SEQ ID NO: 390146 - DNA, 1000 bp, Homo Sapiens; identical to SEQ ID NO: 114752

SEQ ID NO: 390147 - DNA, 1000 bp, Homo Sapiens
gtcctaaagaacaaaaatagataccagacacataatgaaagaaatattgaggttaagtcttggagaggagcagagcttcccatacctagaagtgatctcattcgatttaaatatgtgttcagtggcaaattattcatggcaagctttgtctgttacatgtgcttttggagagagtggagctgggaggttttggtagcattctgacagttgtgtttgcaaataaaacctttgcagacatgttttgactggacttaccctggatttgcattttgtacattttctttttatgttaaagctgccaaggaagagtctgaagaagcaaaagaagaagaagaaggaggtgaaggtgaagaaggagaggaaaccaaagaagctgaagaggaggagaagaaagttgaaggtgctggggaggaacaagcagctaagaagaaagattgaacccccatttccttaattatttcaggaataattctcccgaaatcaggtcaaccccatcaccaaccaaccaaccagttgagttccagattctatgtgaattaaaaagtcaatatatgtataattctgagatgacttaggttggacattcaatgttgtgctatgaatttcctctttatgcagagtatctgtttgcttgcagagtggctttcggcttgctgccagcctgtgcatggtccacgcttatgagttcaggatctacggcaatgtgaatcattcagatgtttacaataaaaaacaccacatgagtaaatgaattcactaatgttaatgttaaacttcatggaaaagtagtcctttgaaccttcggtggttagcaattaaagaccctgagttatgtgcaataaatagtaaataaagttataccgaatgatgtattttttgccgtggttgttacctaattaaaataccttaaagatggcaccaatataaagtgtgtgccagtgaactattgacctccaattttttaaaaagccgaaattttaacaattaccaatactttttt

SEQ ID NO: 390148 - DNA, 1000 bp, Homo Sapiens; identical to SEQ ID NO: 281296

SEQ ID NO: 390149 - DNA, 1000 bp, Homo Sapiens
taagaaattcagaaactacagacaaagagagtggaaattacccactgtcaggcctctgagcccaagctaagccatcatatcccctgtgccctgcacgtatacacccagatggcctgaagcaactgaagatccacaaaagaagtgaaaatagccagttcctgccttaactgatgacattccaccattgtgatttgttcctgccccaccctaactgatcaattgaccttgtgacaatacaccttccccacccttgagaaggtgctttgtaatattctccccacccaccccacgcccgcacccccgcacccttaagaaggtattttgtaatattctctccgccattgagaatgtgctttgtaagatccaccccctgcccacaaaaaattgctcctaactccaccgcctatcccaaacctacaagaactaatgataatcccaccaccctttgctgactctttttggactcagcccacctgcacccaggtgattaaaaagctttattgttcacacaaagcctgtttggtagtctcttcacagggaagcatgtgacacccacaatcccacctagcccaggagagagctacggcagggtgtgtgttttgacactgagcttggggctttttccatcttctccccacagcctctggctccacacctccaccgttcaagcgccagaaagagctgtctatgcagcctgctcttgggcctggggatgagacacacaattcattggctcctggattttaagtagacatttgtaaatctatagctaactactgtccttaaagccattgtttccattacaaaatccaactctctgagagaaaagggtgttttaaatttaaaaaaataaaaacaaaaaagtttgattgagacaatgaagagccaatgtttgaagaactggaggcattaatagtttatcccaaaaatatgagtgggaatgagtgcctgataatgaaaaaggcggcttcattcaaaaggaggtcaagaattggcagac

SEQ ID NO: 390150 - DNA, 1000 bp, Homo Sapiens
aagggtgagctgaagcagctgcttacaaaggagcttgcaaacaccatcaaggtaggtgatgcccctctcactgcaaacttgcccatgaccctgcactgaggggagtggcaaggcctggcagaggatggtgggacaaggactggggtggggttggccccagtttgagctcccaaaggatgctctccccgctgctgtgggagaggtcctttgcttccctctctcaataactcacttaaggctctactcagttcctctctctgagtctgtttcctcatatgtaaaatggagagaggcagggcacgggaggggttgaatgagtgagcagaagagtaccttccaggtcaagccttgttaattccagggtggttcatgaccattgtgttctctgttttgttacactggattctccaacacagtgttggctaatgagttaatgtgcctgggccttcacaacccgagctctgagggataagaggcctaagaaagggtcttgtgtggaggttctgaactcaaggtctctgttgtccttttttcctagaatatcaaagataaagctgtcattgatgaaatattccaaggcctggatgctaatcaagatgaacaggtcgactttcaagaattcatatccctggtagccattgcgctgaaggctgcccattaccacacccacaaagagtaggtagctctctgaaggctttttacccagcaatgtcctcaatgagggtcttttctttccctcaccaaaacccagccttgcccgtggggagtaagagttaataaacacactcacgaaaagttctgaatagtgtctgtgaacttttttctttccatgcctgcggttcccaaacttgatcacaccttacccctgctcttctggcagtctgatttagatccttagaactcctgccccatttgttcatttgatcaccaattatttatttatcgaattatttattgaatgtccaccattcattcattcattcactcactcaacaaatat

SEQ ID NO: 390151 - DNA, 1000 bp, Homo Sapiens
gctgaaggaaaagtaagaaaaggatattgctgcatatcgggctaaaggaaagcctgctgcagcaaaaaaagggagttgtcaaggctgaaaaaagcaagaaaaagaaggaagaggaggaagatgaggaagatgaagaggataagaatgaggaggaggaagatgaagatgatgatgaataagttggttctagtgtagttttttttctcgtctataaagcatttaacctgtacataactcactccttttaaagaaaaaaactgaaatgtaaggctgtgtaagatttgtttttaaactgtacaatgtctttttttttttgtatagttaacacactaccaaatgtgtctttagatatccctgtcctggtggtattttcaatagccaccaaccttgcctagtacagtatggggattgtaaactggcatggaaattaaaagcaggttcttgttagtgcatggcacaaattagttatatatggggatggtagttttttcatcttcagttgtctctgatgcagcttatataaaatgactgttgttaagtgaataccactctgtaattgcaaaaaaaaaaaaaaaaagaaaagaaaaagttgtagccattttgttgacattctgaatgcttctaagcaaatacaattttttattaaaaataaataaagaaagaacacaccaatcaagagatgactttaaggattaaaatgctgacatttgacatcagcatttgtactacatcttgcctttctttgatgtgcagaaaacaactcataaaatggcaagcaatgatgttaggaaaaagtaggttctacaaatatttaatgaaaattatgtttcttttgtcagtaattatatagatcattactaataagccatactcaaaacttgaccccattcttgctcccagggagttcacaatcaagaaaaggagataagaaaactttataatgctctttcgggctcaaagacttgaataaatgaacttgcactggaaaacttggcatcac

SEQ ID NO: 390152 - DNA, 1000 bp, Homo Sapiens
atgctgtttcatgtattagggagtgcacatctttaaagagaagtgaagaacctttttggctaggcgctttctggggaccttggcagttatcaacaagtcactctgaaactaacagaaggtgaggagggagtaatccagaaaggaaactgccatttttgctagggcaagaaagtagacctagcaatgcaatgccatcaaggagttagctggctctagcgttctccgaactttgcaactcattttatattacattgtctgcgtcaagaaatttcaagtaaatgccttgagattttatatgtataaaatgtagtctctggccaggcggggtggctcacgcctgtaatcccagcactttgggaggctgaggcgagtagatcacgatgtcaggagatcaagaccatcctggctaacatggtgaaaccccgtctctactaaaaaatacaaaaaattagccgggcatgatggtgggcgcctgtagtcccagctactcgggaggctgagacaggagaatggtgtgaacccgggaggcagagcttgcagtgagccgagatcgcgccactgcactccagcctgggcgacagagcgagactccgtctcaaaaaaaaaaaaaaaaaaaaaagtctcagaagaagtgtcaagttgactaaatgatttttaagtcccttccactctactatatcacaataatttcccctattttaccttatttaattttcacaacaaccctgcagcctgtaagtaggtgactcctccatggtcagcaggtggtcagtggtcgaactatttaggactatctgatgctctttcctctgctcaccattgcaatacaatgagaaaaatgcaaatgaatctaagtacagtgttctctgggaatatgaagatagaactaaaaactgcctgagagatcagggcaggcttctagaaagttgtgtctaactagtcttgaggtttacataaaccacaccaggctgatgggactgggaagggcccactaagcagt

SEQ ID NO: 390153 - DNA, 1000 bp, Homo Sapiens
  misc_feature (452)..(452): n is a, c, g, or t
  misc_feature (534)..(535): n is a, c, g, or t
tcttcttgggccagggaaagcagggcagccgggacctgcggctgtgcctggactgaagctgtcccgcaggtccccaccctccaacacgtgctcacctgtccccctcctcgcagcagcctcgggacaaaacaatgactcaaggacagcacttcttgcagaaagtctggaagtgcccagaatgggaggcacggaagcccctcccggggaggactcccgcgttgatggaccgttcttggtgcagactcctgactgcgtgcatgaaacctgagacaagtgcaattccttccatgtcgccccagagtgcccaagaagcaggcagtgcggggtgcccaagcagacgggttcagcctgcagaactggaggcgacctgtgaaacccacccgggcaccccaacaggaacagaaacgtggtcctgcggctgcgtcccagcgagtttcactttccccttgttngtttttcccttgttgtaagtgttaacaactggcatgtgcttttaaacgtcaggtaagaggggaacagctgctgtacattgtnntggcgagtgacaatgtgacagaagcgtgggcgaggccctcggagggcagcagctggacagggattagtgggtttggcctggacagcactgatttgtggatgtggatgggggcacgttgtccgtgataaaagtacaagtgcccctcaccgcccgtggagattgctttttggtcccctgtgtggccccaggccacaaaccacaccgtcttggtcctgaactctcccggtgagtaagggccctggcctggtggtgtttcgaggtcctgccagcacactgggccctacaaggtgggcagccccttggggctgagctgtgcctgttcggaggcacacatgggcctccttagggccctggctccatcctgcagatgaggagctctggaaaagggcaaagtcccggaggctgaggagtggggcgggctccaagtgtccagcagggacctagaccctgagttttgggggatcc

SEQ ID NO: 390154 - DNA, 1000 bp, Homo Sapiens; identical to SEQ ID NO: 281299

SEQ ID NO: 390155 - DNA, 1000 bp, Homo Sapiens
ccctggttgtccgcaaaaactcctctgaccagtctgcctccggcctggtgggcggccaccaccagcccctgcaccagtcgcctctctctgccaccacgggcttcaccacgtccaccttccgccaccccttcccccttcccttgatggcctatccatttcagagcccattaggtgctccctccggctccttctctggaaaagacagagcctctcctgaatccttagacttaactagggataccacgagtctgaggaccaagatgtcatctcaccacctgagccaccacccttgttcaccagcacacccgcccagcaccgccgaagggctctccttgtcgctcataaagtccgagtgcggcgatcttcaagatatgtctgaaatatcaccttattcgggaagtgcaatgcaggaaggattgtcacccaatcacttgaaaaaagcaaagctcatgtttttttatacccgttatcccagctccaatatgctgaagacctacttctccgacgtaaagttcaacagatgcattacctctcagctcatcaagtggtttagcaatttccgtgagttttactacattcagatggagaagtacgcacgtcaagccatcaacgatggggtcaccagtactgaagagctgtctataaccagagactgtgagctgtacagggctctgaacatgcactacaataaagcaaatgactttgaggttccagagagattcctggaagtggctcagatcacattacgggagtttttcaatgccattatcgcaggcaaagatgttgatccttcctggaagaaggccatatacaaggtcatctgcaagctggatagtgaagtccctgagtttttcaaatccccgaactgcctacaagagctgcttcatgagtagaaatttcaacaactctttttgaatgtatgaagagtagcagtcctctttggatgtccaagttatatgtgtctagattttgatttcatatatatgtgtatgggaggcgg

SEQ ID NO: 390156 - DNA, 1000 bp, Homo Sapiens
ctcctgcatgacaaacattctcgtttttcaaattcttgccctattagacattcaataaaatagaaaccatcagaagctagatcccatcacctatctccttctcttgagtgattcttccacaatcttgaatggtccacaagtgcttcacagacatgggtttctttcaagtgtcgagtctggggtctcagcagctttgacagtgaggagagacgaacggggctgtagagttgcagccacccctcacttggaatggtgactactggttgtctgggcccagagatcaggagggacaagcagacggtctcttccatggactgggtttacacacaagaacacgtgtgtttcttctgttctagaaattagcatgggatatgcttcaaaaacatgactggccacagaaacagcttcatggttcattccattctttattgcatggttagtttttcactttttttaagcctgtgtctgcagtttacaagtagtgtagtatgcttgcaaccaaatcattccaatgctccccattggtctcctcttctgaaaaaggaaggtaatactagaatctacctaaaaggatcagagaaagggtaaaatggaacaactcgtgcaaagggctagcgttgcacctggcacatagtaagtgcacaataaatgtaagcacattttgaaatgtattattagtctttgggctaagcacctgcaccgaatttgttacctcctctttgctgctatttcctcattgatgaaattcagaaaacggtgggacctaattaactgtgttattgtgaagattaaatgacacaatacagtgccagcacctagttattactcaacataaatttgtcacagttctcacaagacatcagaacacccgctgatgtgctgtcccccatggcactcagcatattaagtgtggtcggcacaagcggctgcctggtgtgaagtatgagggcaaaaggcagggtctctgccttccaagaacaaagggtggagagcaaagtaa

SEQ ID NO: 390157 - DNA, 25 bp, Homo Sapiens
tttaggaaaatgaaaataaaaccag

SEQ ID NO: 390158 - DNA, 20 bp, Homo Sapiens
agggctatacctgggcattt

SEQ ID NO: 390159 - DNA, 22 bp, Homo Sapiens
aatgtggcatatcaatcacagg

SEQ ID NO: 390160 - DNA, 22 bp, Homo Sapiens
tccaaagctggaaaatacatcc

SEQ ID NO: 390161 - DNA, 23 bp, Homo Sapiens
atctgtggtatattgacctccag

SEQ ID NO: 390162 - DNA, 1000 bp, Homo Sapiens
ttcttttaatcagtcagtaaacatgttcattaatccttcctctttaaaatctaaactctataaatatgggatgctaaacatcaagttgatcttaaggtcagccaaacagtactgggatggagttttaatcatttcttctagggaataccttaagttgtttattgagtttcagtgataaagaattgttttttctccacaatgcatttctgggtattgcattacatgggaatactatacttctaatatgttccttaaaggcttggttacctctgtagcattaacagagacaatactgctgcttctgggaacctccttgtagtccacatctatccactattcaccaccttttcttggcacctattgagcaagtttcttgtatgtgtaacatcccgttacattgattagcctcctctccttccaccacttgctagttaggatgtaagttcagctactgtaacgaagacccgaatttacaatggcttaagcaaatctaaatttatttatctcacacaaaacaccctggaaaggcagtccagggctgatatggtagttctgtcctatgaggctgtccaggaggccttctatctcagaaccaccattcctagagtgcttgtttacacctgcatgtccaagatggctcattggcatgtctgaattctaactcaagaaaatgaaaaaagaaggataccacctggaaggtgtacacttttcttctgccacagctggctgcaattgttatctttattcaaagggaacatgtgtccaactaaaaatcagaagttctatttgtgtaaaagacactgatattgataaacaactagcaatctctcccacatcacccatgctaaaaaacacataagactagaaaaaagtataccctccaggccatcccacatgtgaaacacacacacacacacacacacacacacacacacacaaaagactcattccctctcacattcaagtccatcacaaaaaacaaagtccttccatccggcag

SEQ ID NO: 390163 - DNA, 1000 bp, Homo Sapiens; identical to SEQ ID NO: 281309

SEQ ID NO: 390164 - DNA, 1000 bp, Homo Sapiens
ttagaccccctcgcaggccagctgcctctcctgcagaaccgtgggtctcgggagaggctgccatccctgcacatgacaggtaggcacattgccgggttctggacatgcccccagagcagcctctgcccaccccttcctgggtccctgactccgtccccctccgtgtgcccctccccagatcacgcgctgccccatgatcccgtgctacatctcctccccggacgagtgcctctggatggactgggtcacagagaagaacatcaacgggcaccaggccaagttcttcgcctgcatcaagagaagtgacggctcctgtgcgtggtaccgcggcgcggcgccccccaagcaggagtttctcgacatcgaggacccataagcaggcctccaacgcccctgtggccaactgcaaaaaaagcctccaagggtttcgactggtccagctctgacatcccttcctggaaacagcatgaataaaacactcatcccatgggtccaaattaatatgattctgctccccccttctccttttagacatggttgtgggtctggagggagacgtgggtccaaggtcctcatcccatcctccctctgccaggcactatgtgtctggggcttcgatccttgggtgcaggcagggctgggacacgcggcttccctcccagtccctgccttggcaccgtcacagatgccaagcaggcagcacttagggatctcccagctgggttagggcagggcctgagaaatgtgcattttgcagaaacttttgagggtcgttgcaagactgtgtagaggcctacaggtccctttcatcttgagagggacatggcccttgttttctgcagcttccacgcctctgcactccctgcccctggaagtgctcccatcgcccggtgcccaccatgagctcccagcacctgactccccccacatggaagggcagcctggaaccagtggctagttcttgaattagccccatcaatcctattaatcctcagaattc

SEQ ID NO: 390165 - DNA, 1000 bp, Homo Sapiens
gatgacatgccaagctcgaagctcctacatcaccagtgagatcctgtggggttaccggttcacacctgtcctgaccctggaggatgggttctacgaagttgactacaacagcttccatgagacctatgagaccagcaccccatcccttagtgccaaagagctggccgagttagccagcagggcagagctgcccctgagttggtctgtatccagcaaactcaaccaacatgcagaactggagactgaagaggaagaaaagaacctcgaagagcaaacagaaagaaatggtgatgtggcaaacctggagaatgaatccaaagtttagtgccctagctgggcaaacccttctcttctccccccaacacaatctttccttgtctctcattctctttctttttctgtctctcttgctttgttctttatttgtttatatttaatttttacatgaccagaaaacaaatcttcaaggtgtaaaatatctacctgccctctctcagttattcagattgacaaggtagacatggatttgatgaaagtgcaaagtgccctcatttgtggcccaagcctggtctcctcccaaaatactacacatccaactcctggagatttcagttacttacctgcatgtgttgtacaataccagatcactcaaaaaggtgtgtcaaagattttacctgggatatgacaagcaaggtttctggtgcctatttattcattcagtgagacacagagtggagccctcagttttatggatcccaattcatttcatctactacagggtgaggtgcttgcccccatgtgggtgtggcagttacagggcccaggtgagctgaagacaaaccactgtacatatatatgccttatgtaattattttctttttgtaattagtaataaaacccagcatgtacaaaagtaccatagcacagcactgctaaatactgtacatagatgtatcattaatgtaggtttagatatataactttagaaataagaagcaaa

SEQ ID NO: 390166 - DNA, 1000 bp, Homo Sapiens; identical to SEQ ID NO: 207053

SEQ ID NO: 390167 - DNA, 1000 bp, Homo Sapiens
aggccatttgggaagaaaattctagcactggtggagaattatagaataaagattataaatggttggataagacaaatgtaagcttatttcataaacatttaaagctgattcagaacatgttaaaaactgttcccaattccaactatgtaaatagatcctatgttcacattttacacacacacacaaaaatctttaacatctgtggaacttcccagttttagtcttagaaagttagcatgttgcataagttcagtaatcctcaggaacctccaagtttacttttagctcttacggacagttgtttacataatctaattactgttttctgaagaacggaaattatataagctgctgtctgccttttggaatattcagaaaagcagattttatttgtacttctgtgatgttttctgaaatggaaagctgatgataaatatcaaagtagcaatcagtgcgttaaattattctgttacatgatatttattactgttgaattattctgtgacttagaaatggcagtaacctaaataatggaatttgcaaaattattatattgccgtatctgagatgttccatcacaagtttctacactggtttcttttgaaaatttaaaaagatttacgagatacattttctaggatatgattttttttttacaaaaagcttcatcttctgtagactatccttaatttctattttgaaacggtaaaaattgatattttaggacaccaggaagtctccaagccattcccactctctgaactccagtagggtctgtgatgtcccaggcaccagtaccaagttggatgtgcagatatgcataggcaggtcccatccttgaggacttcagagtccagtaaaaggcagcagaaacatgggctggtgcctaagaggagaaagcgtagccacagtaaaggctatgccagaaaactcctagcaaatgctctgtgttcttgggagagggcacattgtttttgttttctctcctatagttcctgta

SEQ ID NO: 390168 - DNA, 1000 bp, Homo Sapiens; identical to SEQ ID NO: 281312

SEQ ID NO: 390169 - DNA, 1000 bp, Homo Sapiens
ctttaaaccaatagtcccagaagagaccctctgaaattctaggactggatattaaaatgcctgaacctgttatctaaatcctttttaagaaacttaatgttccagctcttgaactacactgtggaacagtaatttgtgcccaatttagtggaagataatgaggctcactgtaaacactacattgtcctgcaaagtaattctgatgagagtttactgacttctagagccattctctttaaccgtctgcaggtctaaggattaactatatttgtgatttgtaataaaactgagttgtacaacactgcctgtgtttgtctggccaagacatttgcttcacttttaaaatgcacgttatctttggagaggtgaattattctacaaaatgcaccctaaatctcattgtttaaaaccttactgatctaataccatctacacaaaaaaatgttgtagttgcagaacttagtttataaaaacaaagaatgtgtatttcttcaatagccgggtatttggattgttctcttgataatatttgaatgtgactcttggatttaagtgcactattattcatggcttatacaataaaattgcactgtatggcaaatatgtctataatgtatgctttgctgaaacctcaagagtgctgtaaggtacaggtttccatattgtgaacctgtgtacgcacacacacatatacatacagtcttagggaaaaaaaaaagcagaacttttgtaagtctgtgtaacattttaatattgtttgtaatattcactaggtgataatttcccctgtaccctataactgtaatcattcaccttgggttggccggtttgtcaagcttggtttactgaatcaagaaagagtcttgtcgaatgtggtactgttcttagtgtgtaatatttgcgtatggtgttcctctgcctcagaggacagttgcacagatggctagtgttaaatttctatagacgatggtaataaaatctgaatatatttaagtgctaa

SEQ ID NO: 390170 - DNA, 1000 bp, Homo Sapiens
ggcttcttctgtttattcaccactgtatttctagcaccaagaatactatcaatattttttgaatgaatgaatcaaacagtgaaaaggccagtcatcttggtgtatatagaaggtagccaacagagacccaatagaaatgagtgcctatgttcctactgctctataactagtgggagtggggaggggaagcagctgggggtctaccagaccctgtcaccaactagtcagcacacgtggcaatcacagttgtagaagaggccaaacggagcagatctgccaatgacagccagtactaaactcgactggatgctgagggccatttctgctttgagtgaacagtgcagcctgctgggtggccaagggaacgtgtacaaatccactttgtttaaaggacccagagagtagtcagttctgctaaacctcatctgtttgttcagggatttttgtcctggggaggagtggggaagaagcgattagtcaggccaggctagctggtattagtttgcaggctgtgagtgcgactcttcagtctctgctcctctcatcattgccttttcacctacctttaccctaaattcacgtacacctctgccttcacaaattccaagcgattaactgttgtatttaatctctgtcccaaatctctctgcatcattcttcttttgattatgaagtcacgagggcccttgtttattttatttttaaaactttttttgagaaggagtttagctcttattgcccaggctggagtgcaatggcacaatctaggctcactgcaacctctggcttccgggttcaatgcaatcctcctgcctcagcctcccgaatagctgggattacaggcgcgcgccaccaagcccggctaattttttgtatttagtagagacggggtttcaccatgttggtcaggctggtctcgatcctaacctcaggtgacccagccacctcggtctcccaaagtgttgggattacaggcgtgagccaccgcacctggcctcaa

SEQ ID NO: 390171 - DNA, 1000 bp, Homo Sapiens
tcccagcattttgggaggctgaggcaggcggatcacttgaagtcaggagttcaagaccagcccggacaacatggtgaaaccctttttctactaaaaatacaaaaattgctggccatggtggtgtatgcctgtaatcccagctactcaggaggctgaggcatgagaatagcttgaacctgagaggcagaggttgcagtgagccaagatcacaccacggcactccagcctaggtgatagagtgagactctgtctcaaaaataaaagagagtcattggattgtttgtaacatgaaggataaatgcttgaggggagattaatatcccatcttccaagatgtgatcattacacattgcatgcctgtatcaaaacatctcatgtaccccataaatatatatacacctactatctacccacaaataattaaaaattttaaaaaaagaagagctacaaaagggaagtcaagggtatggagaaaaagaaggcctcctggactaggtgaaatgtaaaaagcctacatcttagtttgcttgggctgcagtaacaaaataccacagatgggcagcttcagcaacacaaatgcattttcttgcaatgatcttggaggctgcaagtccaaggtcaaggtgtcggcagggctggttcttctgaggactctctccttggcttggagatgccgtcccgtctctgtgtcctcacatggtttctctctgtgtatgtctgtgtcctcatctcctcttgttagaaggacaccagtcctactagattcgcttaatgacctcattttaacttcattatctctttaaagaccctctctccaaatagagtcccattctgagatgctgtgggttaggacttcaccctataaattttgggagggacacaaatagcctataaggctattagttgttgatcaggtgaccgatcctgaaaagaatgttgtattagtccattttcatgctgcttttatatacccgagactgggtaatttataaagaaaaag

SEQ ID NO: 390172 - DNA, 1000 bp, Homo Sapiens
acatttaattttcagtatctgctgacactcagaattctacattgtgctgacagattctgattcagtaaataaggaagtaaacagccttgtgggatttggccacgtaggtcatatttttatattttagtttttaaacacaaacaactgctgttacagcaaatcttggatggagaggaagaaagataaaaatatacacccttcaacgggcagtacattcaggtttcttaccagtttatctgtaaggagtgaaggcaagctgatgagagtaaactgcaggaagctctcatgagaccaagtgggcagaacagtcagagacacttcatgcaggtaggcaaaagtaaacctatccatacttatgagatgatgggctctgggctctcagttatgactcaagaaagggacctggaaatcactgtagatgtatgtatatcatctgtcaatttaaaaactttttaagcagggcacacaaggaagttagggcaggtaggatacagagcagagagatcagcacagttctccatgtgaaatgttagaaaagtctccctggtggggacacacttgctgatgatgaagtgagagagtcacatcagaccttccgtaatcaatcatctccttcagctggagcaaccaagtagctgagatttgtctggatagttggtggagattatctcaagagcaagggatatctcatttgtgtctgaattaggacaatatacagtaatatgatcgtcagagtaaaaaactaaaaatcactgttgttcattctgtggagatgttgcgccggttgtgattgtggtcctcaaaggccaagaatgtagtgggtatcatcaggaagggtgtcaaaaacaacaaaacaaaccacttacaaaacacttattttttccatgtacaagatcaaaagcagattggcttctacaatcagacaggaaattctggtggctgctcctcaagaaaagcctaacagctgataaaagtcctcaaaaaccccattaaattgatc

SEQ ID NO: 390173 - DNA, 1000 bp, Homo Sapiens; identical to SEQ ID NO: 281313

SEQ ID NO: 390174 - DNA, 1000 bp, Homo Sapiens
accacgcccggctaattttgtatttttagtagagacggggtttctccatgttggtcaggctggtcttgaactctcctgacctcaggtgatccaccctccttggcctcccaaagtgctgggattacagatgtgagccactgcgcccggccttttatttttttaaattattattatttttatttatttatttatttttttgagatgaagtctcgctctgtcacccggctggagtgcagtggcacgatctcggctcactgcaacctctgcctccctggtttaagcgattctcctgcctcagcctcccgagtagctgggattacaggcgtgcaccaccatgcctggcttaatttttgtatttttagtagagatggggttttcaccatgttggccaggctgctcttgaactcctgacctcaggtgatccacccgcctcggcctgccaaagtgctgggattacaggcatgagccaccgcactcggccaggactcaattttgaagttcttatgcaagcaaagctgcccatatctaggagtttatgcacacagtactgattcaatacctgcgtcttagtggtccatcaggaatttttcactcatgaaatatgactttaatacacgtgttgggaccagagagaaaaccttccctctgtgcatctttttttggagaacactgtcatgaacagccgaaaacatcagatcaaaagcgagagggatactgacaaaacagggagtgcggatttccgctgtgggtggggacattgggagacacggtgactcactcctcagtaagtgcattcttaggctctttactctgtgtgcatttttattttctcatgggcaacaatataatttctttcaaacatgaagagccatccagcatgtttctcaaaggcagacttaaatgatatgaggggtgtgcctaaatatataatttttaatggttaccatattggaaacattagccatgatcccatctgatgactaggaacatgagccagtct

SEQ ID NO: 390175 - DNA, 1000 bp, Homo Sapiens; identical to SEQ ID NO: 281314

SEQ ID NO: 390176 - DNA, 1000 bp, Homo Sapiens; identical to SEQ ID NO: 114754

SEQ ID NO: 390177 - DNA, 1000 bp, Homo Sapiens
actcacctgggaaatctggaattaggaatgtaagatcttaccactgcctcttgctcatataaagtggcttgtgaattcacctagccctcatcccactcagttgcggttggtggtttcctcatctctcccctacatctagcctgggcacttcctgggacctggggtcctgggttgttcatccgtagatcccagtggcctccatgcatgggaatgaatacaggagaaaaatcattctcaaattagatgatcttgtttaaggtttgatcttttaaatatcaaatatcagagagggaaaatatggcaaactaatcacattagagttgcattgtctttcacagttgtcaaagcactgtaacaagtccataggatagtaactttagaaaaagaagacctttgatcttggaagggtcatacgtttacctcgctcacatcatatcgatgcaagcattaaatctgcttgataaccaatgtttctattagaaaataggggtcactgacacattggttcagtcattgtgtaaatccaacacatatttattaaacacatactctattctaggtactggctagttatcagggttatacctgaggacagaccaagactgtttcctaccttcataaacaagaggagaaaagtattaaacagacattagatcactggatagatagatagatgatagatagatagatagatagatagatagatagatagatagatagataggagatagagataggtgacagatggatagatggatagatagatagcagatagaaaagagataggtagatagatgggaggaaggtagatagatagagataggtggatacatacatgcatatatgcatagacacagacacatgtatgtacagatatagatatacatatgcagtgcctgggtctcaaattgtaaaaagagaaacccagaggaaaacagcagtgtgctgtgaaagagaacaggttgacataacttaaacggagtttggatgaggaagcgtc

SEQ ID NO: 390178 - DNA, 1000 bp, Homo Sapiens; identical to SEQ ID NO: 281317

SEQ ID NO: 390179 - DNA, 1000 bp, Homo Sapiens
gtgctgaatgaatatctacttctggaattctttttgtctctccagacatccagtagaatcctctacacatacagaggcttttatgattgggttgagtttttatttgcagaaatcaaggcaagaaggtgaacttcatttctgaacccacacrcagtacagaatagagacaatatcmgggaaaaaaaatcataaacgaccaaaaaaggaaaaacaaacaaacaaaacattcacaggagcagaaaaataagcacaaggacccatgtccctgaaaagttataaaaatctttggattgagcctgagactatgtatggaatggaagcttgaccaatctacttaaattttaagagcaaagtgctcccagatgccatgtgggttatatgaagtcatatgatcttttccttctactactcaacaaaacaaacaaaaaacaaataaaatgaccttctacatattcaaactcttgtgcttaggagaagtttggctttgtatttgtttttaaaatttgctttattagaatcttttttccaaggcagtgattatttctaacatctctctttagaggtgtagtacttacagttagacacctttttaagctgaggaccacataaaataatagggtgacatctttttcagggactaaattgagccctgacaaccwacaaaaggggacccacttcccacaaatgagtaaagtattttacccatgacagatgcaggcccccagctgctccacaagcatatttaggccaagtctmctgtttccattcactgcccctttaattagaggtttcttaattgatttttaaataagaatttkgttattatctgtgtgggaaaratgatgcactttattgttcactmctaagatacatagkagtaatgctgcttttggttacaatttttttttaacatgagaatggaataaacttcagagatatttggtaaaggagaacttaaagctaagaagttgcaatttttcacccagtttcaaatttgtcc

SEQ ID NO: 390180 - DNA, 1000 bp, Homo Sapiens
agaaactgtttttgactttcgaatctcagacaagagtaggtaataaactaaatgatgcagggtttatttctccagaaattttacatagtcatcctgatacttcgtgctctttgggagtcacttctgattttcactttttaaatgaaaggtttgatagaaagctgaaaagatgggaagaacctaaggaattaccagctgaggacagccaagacttaacaagcactgactaccgttcccttgagctaccattatcacaagggtttgcctttcaattagtaaagctttttggatctccaggcgttccaatggaatccttgttgcctgatgactatgtggttccccttgactggaagacactaaagatgatctacttgcaatggaagatgtcagtggagaaaagacagaagaagattggttgaaaaatgaaaattccttggaactttgagttctgctgtcttcatggtactgctgaagatcatgatcacggagaaaagtcagagtgctcagtgccaacccaagggattctttccagagacgtacccgttggaaaccaaaattagtttggataatctgttcaaccattcttgataagttatctgaataataaaaaaactccacagaggaggtaacaatttgagcatttcattgtctaatttgaagatgtatgccatactttgtttgatagaagaaagtaaggcacagaaaacttgagtaccttatttttaaaactkcattaggattaaaaggttagcccctatatccaagtattggtctgagatcccatttctagaattctgaaatccaaaaagctctgaaaatcaatagttatttttccaaatgtattcattgtggtaaaatacaccaatataaaatttaccatcttaaccacttttaagtgtgttataaatacattcatgctaccatcactagcatccatctctggaactcttttcatcttgcaaaactgcaattctatacccattaaacaatgacccatagc

SEQ ID NO: 390181 - DNA, 1000 bp, Homo Sapiens
aaagcaaccagagcctgaagattcggaaaattctcagtctatccatattgcaaaaatttagcatgttctggagggaacatcaaagttgttgcaagacaaccatttcctaaagcaattagggatatgtgacttgtggatccaatcagccatcttggcagcaactagcagaagccaggatagagatggggttatacctatggaaatgctgctggctggtaccgaagggaacagagggataaaaatgaaggaagtctgttggatttcttgagattctataaaatgggtcagtagagctatctggctgtgaacatgtgttcttcaagaagagggaagaatgaccctgaagattattgagaaggcaaagsggctactattgctaccacaggacagagggctcaggcctgacgagtcaacgcaggctacttcttagsgctgagggaggtgggctaccacactggtgggctcagaagacagggctgccacccctgttaggtgggaagatggagaatgaagctgaagaagattattcttgagccttaaaatctaatgggatttgcctttatacgtttcagacctgcttaggatccatcaccccttctttctgatttttttggaataggaatgtttatcctatgcctgtctcaccagtggtgtattttggaagcaaataacttgtctagtttcacaggttcatgctggagaagaattttgcctcagggtgaaaccttgagtatgcctgtacctgatctaaatgatatttagatgagatttggggcttagagttgatactgaagtgggtcaagactttggsgctgttgggatggagtggatgtgttttgtgtctgagaaggacatgaattttgaggggscagatggcagaattttaggggttgaattgtatgctctccaaatgtatataagttaaagtcctaactcctagtacctagaatgtgaccatatttggagatggggcctttaaaaaggtaaaaaaaaaaaaaaa

SEQ ID NO: 390182 - DNA, 1000 bp, Homo Sapiens
catactttatacatttcaaaataacttttttactaatcacatctttcacttcagtgccgttatcacacatttaaaaaaatgccagttccttcagatcatgtaacccagtgtgtaattgaatctcctctgttgttcgaaaaaatctcttcacagttattttgtttgaattgggatccaaacgaagtcctcaaaatgcattttgttttatttaattaagttaatccatagcatgttccttcttttaaccctcataccattaaattgttgcagaaactatgttgtttgtcctgtagaaagttccacatgctgtagttgtctatttgcttctyggtgttaaccatttaacttgctcctcttctttgttttctgtgaatggaaattagctctagattagaggcttgattaggttcaacattttttttttttttttttttggcaagcagatatttggttgtcctgttcttagtaatggtgagcttaatcagtagctgcacagggacaacctcttccctctgtctgctgtcaagttccctattaaccttatatctgatggttttatccaataataaattgtttcctgagtcagttatttcattcagaattgcaaagtgatgatttttagtttagttattccttccatgtttaatggaattcttctgtaatgaagaacttctctcaaagctgccaactagggttgccctaaagtataatatatacaagaaaaatagtaatgcttttctttttaattgtcaaatacagtaaggaatttcagtgaggatgtttgtgtgtgttttagagatggggtcttgctttgttgcccaggctggagcgtagtgacacaatcatagctcagtgcagcctcgaattcctggactcaagggatccccctgcctcagcctcctgagtaactaggactacaggcaggtagctgggactacatacgtgtaccagcacacccagctattttttaaaaaaactttgtagaattttgaatgagcca

SEQ ID NO: 390183 - DNA, 1000 bp, Homo Sapiens; identical to SEQ ID NO: 281319

SEQ ID NO: 390184 - DNA, 1000 bp, Homo Sapiens
taagcccctgaggcccagcctgccgcctaggccctccaggtcccagaggaggacatacttccatatggaagccgctagaaaggaactcagtcctgccaataccttgatttgagcccagtgagacctgtgtagccctccaccctacagaactagaagataatacatttgccttaagccactaagtttgtaataacttattgcagtggcaacagggaactaatacagtgggtgtgaggattaaatgaaccagtagatgtggagccggagagctgagcttggccctgaggatttgtttagaagtgtgagccactgttacagatatcacaagtgagcagacgcccgggcctgtagggatgtccaacccagtgcctgtccgactcagttcccaggcagaattgggccccagtacctggtagagagggcctggaccccttcttctcccgagaagcaggatgaagctcagtgggctggaagcagcgtgctggtgccactacctcagcctgatttttagcaacagcatcagtaagtttaatattccgatttctgctcagacttcagaggagcagaaacctgggctgaagtctcagagtcggagtgagtggggctccaaggacccacagcccaacaagagcccgaaaagagtttgtggagacagtgggatgtggggaatggcctgatcttaggggaagggcagggcccactcaggggagagttaatgagggcatggttgtggacacagctggagtcaataagacctgagtttgaattccagctcctccacttcctagctgggtgtattagtctgttgtcacacgaccatgaagaactacctgagactgggtaatttatgaaggaaagaggtttcattgactcacagttccacatgcctgaggaggcctcaggaaacttacaatcatggcagagaccaaagggaagcaagctatgtcttacatagcagcgggagagagagagaggagggggactgccaaacacttttaaa

SEQ ID NO: 390185 - DNA, 1000 bp, Homo Sapiens
ctcaccacagcctcagcctcccatgtcagcctcccaagtagctgggactgtaggcccgcgccatcacacccagctaatttttgtgttttttttgtagagacggggttttgccttgttgcccaggctgatctgaaactcctgggcttctaaagtgccaggattacaggcatgagccactgggccgggcccttttttttttttttaaaggaaaaatgagaaggatggcttgtgcttgtgaggaggaaggggatgcattcatggaattccccagctcaggaactatttccaatcaatttcctggtagttaaaacacttccttggcacccctgttgtcatctgttgaagaaatgtgggccagaggacacactagagatgctggaatcgggtgtccagaaaggacacaaaactgccctgtggcaatgacataatttttgtcaactttggtttcttatctatctcaaagtattatagtgaggattccaggagagacacccagaggatcatgtggtgggccttagatttcattcgtgtaataagtattgagcaacagctattgggtggcgtgactgactggatggatgaataaggtgaagatctgggcgccaggactggctttctcaggcaattccgtgatgagggggcgggtctcgaggtaggtaccacgtgcacctactcgagattctgcacctacccggggttttgactgccggccacgcgagtttggcacgccggatgtgacgtcaccacccggtggttcccggaacctggcggtgggaccggaaatcaagtctacaaggcgggagggtgcacagatgaccggaagcgtgccctggcggcgctgccagccccagctgggagctggtaggggagtgcgaggaaggcgggacgcagggcggagcgctgcaggggcggggcctgcggacagggagccggggtttggggcgggaacccctcgtcccctgcagaccccgcctggtcgggggcgggcggcggcgcggcc

SEQ ID NO: 390186 - DNA, 1000 bp, Homo Sapiens
tctccttgtctcctctctcccctttttcccctcccccttctctgtctcttgcttggtgttggttttctgtgtgtctctgtgtgtccccgcgccaccccctgtgctgtgtcccaaaactctgcctggctggtgcctgtcttctctcttgagggcatctgtcacctcttctgcttggtcatctgtgttcctctttatttcttcctggccccatcttgctctctccccacaccgcctgtgtctaccctcctctccccgatcccccacttctccctctctcccctgggccccaatgtcttggactctcctaccagtggcgcttgaggctacaagtccaaggtaagcagagtggatgcccgggggggcattcctgggagctggggaggggtagagtgcatattgggagggggctgactggtatgacccctgctgtgacctctcaccgcgttttcagtatcttcagctcaagaagaagttagaagatgagttccccggccgcctggacatcgtgagtcttgggatggggagaaagacttgagcacagccactgtgtcggtccgttaggcctggatggcactgcaggggggttaggtcagccctacgcccttcacccatgttctcatccccctgggaaggggagggtctccccaagaggacatcttagcccctccaacatctcccctaccccctttcctcagtgcggcgagggaactccccaggccaccgggttctttgaagtgatggtagccgggaagttgattcactctaagaaggtatgtctgtctgtccgtcctgcctggttttggggctagcatggggttggggctgaggttggtgtctcggtcccagctcaccccttccctcttcctcccctccctagaaaggcgatggctacgtggacacagaaagcaagtttctgaagttggtggccgccatcaaagccgccttggctcagggctaatgcgccctgaaggcagaggtgagggggcccactagacaggga

SEQ ID NO: 390187 - DNA, 1000 bp, Homo Sapiens
ctgagggacaactgaagggacccagcaccccagaacagcccccccccatagtcccgccgtctcaaactgaggtgccttttcattcagccttgggaatctgagggatggagactcagttccgcagagggggtctggggtgcagccctgccagcatcaagaggaagaagaagagggaggactcaggagactttggactccaggtcagtagggaccttggcccttggagttccaaggcacagtggccacatgtggtgcatcctcactctgcctttggggtgtcagcaaggagtgggttgtggtctgaggagtggagcctcaggtcaacccagggaggagtcccagagggaggactcaggcaaccaattatccctgaggtagaaaacctgcccctgccatcggtccttggaggccccaagcaggactctaggaaagagaggcagctccccacttcctagttggggttctctgggagatggtggtcgtggcctgcaaaactcatccacagttcagcaggagagacatggataggccttgtcaggagtaaatctgaatacctggaggaaacccagagagaggaggcacccctgaaatctgcttcatctgtcagcctttggcatcccatgaggggtgtccatgtagtgccccttcactttctgcctcccatatctcagagaggtggggcccttggtctgaggcaggtcctcaggtcagcagagggatacacacctggtcagcacagggtggagtccaggatctgccagtagtcaaggagaggaaaattgatgaagactgaaggtaagaatgtaccctcccacatgccaaagaaaaagggacctcaccaatccttgcttcctctgttttcatccctcggaggcccaagttggggaggcatgtgccatgctcacatttctgccacgaggttgggggtggcaccttgctcagggaggtgagcaccttgtttcaagggggtgatgacaggtcagcaggtggagccacacct

SEQ ID NO: 390188 - DNA, 1000 bp, Homo Sapiens; identical to SEQ ID NO: 281321

SEQ ID NO: 390189 - DNA, 1000 bp, Homo Sapiens; identical to SEQ ID NO: 281322

SEQ ID NO: 390190 - DNA, 1000 bp, Homo Sapiens; identical to SEQ ID NO: 281323

SEQ ID NO: 390191 - DNA, 1000 bp, Homo Sapiens
tcacctgaggccaggagttcaagaacagcctggccaatatggtgaaaccctgtctctactaaaatacaaaaattagcctgggtgtggtggtgcaggcctgtaatcccagctactctggaggctgagacaggagaattgcttgaactcaggtggcagaggttgcagtgagccgagatcacaccaccgcactccagcctgggcaacagagtgagactctgtctcataaaaaaaaagacaggactaagtggccacttggatgaaccaagggagaggtcaagaagagacacccagcttttgtaccagatatgtagagtgggatgccattcactgctagagggaagaggaggaggaagaagtatggcatgggaggagacagctgagctctgtgttgagtgtatttaatttgaagtcctcaaggagagacaggcctgccagcaccttcgctgcttcagccagccctaagggcacctgtgctccctctcagctctccctgctgccacaggctgcagtgggggtcaggtgcacaagggcccagcaggtctgactgtgtgttttctcagggaactgccgcgtggccaatgcggaggaaaagctgatggacgaccttctgaacaaaacccgttacaataacctgatccgcccagccaccagctcctcacagctcatctccatcaagctgcagctttccctggcccagcttatcagcgtggtaggtgcagagggcagctgtggctcaggctcaggtggagaggccgctcatgcccaagccccaggcgatcattggtcaaaggaatgaaactactatagttgacttagacttaccagtacgtgtcagggaggctgcagaagggtccatgaagttcataggtgtccaatatttaatgaagtcatgattttgttataacaaagaagaaatgagggtaggagcaggatgaccattgggtaggcagccaatgggcctgctgtagactctgctcagctgggtctccagcatgaccat

SEQ ID NO: 390192 - DNA, 1000 bp, Homo Sapiens; identical to SEQ ID NO: 195024

SEQ ID NO: 390193 - DNA, 1000 bp, Homo Sapiens
caagttcttgagggattggattatgcccagccacttggggagggcagtccaccttcctgagtccacaattcaaatgctgatctaatccagaaacactctcacagacacagtgtgtagtctgggcaccccacagtgcacttaagtggacacataaaattaaccatcccagggagtgagatgggtaagggaagatgggccacagtgggtgtgtctccatgcctacccccactgtgggcagctgctggagcacacgcctcaaagtcttccctgagggagagggagctgaggtgtttatatcccagctctgtcaggcattggctgaatgtccacactcctggatcaccgcctctcatcctcatgatgtcccatggtcctcatttcacaagtgagctctgggtacatggggagcatcagtcacaccctgggtcagtacctcagctgtctctcacatgacatcctcattatccacactgcaaagccaaccatccctatgatgggttcattgtggatcatgacttagtgggtcaagagtttggaagtggctcagctgggcggttcttctgctccatgtggctgccagatggtaccctgctggtgggcagtctggtctagagggtccatgatggctttactcacatgcctggcatcttgacagggacagctggaaggcaaggttcagctgggactgtccacagagctcctccctgtggcctttccagcatggtggtctcagggtagctggacttcctgcatgacagctcagggctcccagagctactgtcccaagagatagaaggtggaaactgccagtctcttaggctaggaccagaaaccagcacccctgcacccacagccttttggtagtgatgaaataaacataagatttatcattttaatcattcgtaagtgggattaaatacatttacaacattgtgtaaccatcggcactgtctatatctaaaactttttcatcatctgcaataaaaactctgtatgcatt

SEQ ID NO: 390194 - DNA, 1000 bp, Homo Sapiens; identical to SEQ ID NO: 281324

SEQ ID NO: 390195 - DNA, 1000 bp, Homo Sapiens; identical to SEQ ID NO: 195025

SEQ ID NO: 390196 - DNA, 1000 bp, Homo Sapiens; identical to SEQ ID NO: 195026

SEQ ID NO: 390197 - DNA, 1000 bp, Homo Sapiens; identical to SEQ ID NO: 281328

SEQ ID NO: 390198 - DNA, 1000 bp, Homo Sapiens
aagagttcaagaccatcctggccaacaaggtgaaatcccatctccaataaaaatgcaaaaattagccgggcaaggtgctgtgcgcctgtaattccagctactagggaggctgaggcaggagaatggcttgaacccagaaggtggacattgcagtgagccaagatcacgccagtatccagcctggccaacagagcaagactccatctcaataaaaaataaataaaagctaatgatgacagctaatatgtatggagcatgtagtatgcaccagtccagtcatccttctaagtgatccatattagtgtaacgaacaaaatcttcacaatcactgtgtgaggcgggtagtaactattaacacctccactttgcagatcaggaaacttggacgcagacaagttaaacaaggtgcccaaggtcatacccttagtagatgccctgctagaactggaatctaggcatgcctaaccattttttcttaaggaagagaacagtatcttcaatgacaatgagtaagagtacttattctacccacttttctgcttcttgtcttcgggtttatcgttctggacccacctatctttcctggccccccacttaacttaacccttttcacccaccctggggcggggagacagaggtgatcctagaagagggctacagggatggggccaagtgggaattctagcgaggcgcctactatttgatggaggagggatgggctaggtaggtcccccgctccgacagggctcttacgccatatgtgacgcaaattagcttacgagccgggggtggaggtgtcgtcagcacccgcctgcggttggccgcgttgcagcgagaggggcatgtagaccccgcctcgtagggaggtggggagcggcaagccccgcctcagcccctctggcaggctcccgccagcgtcgctgcggctccggcccgggagcgagcgcccggagctcggaaagatgcggcgcccgcggcggcctgggggtctcgggggatc

SEQ ID NO: 390199 - DNA, 1000 bp, Homo Sapiens; identical to SEQ ID NO: 281329

SEQ ID NO: 390200 - DNA, 1000 bp, Homo Sapiens; identical to SEQ ID NO: 281330

SEQ ID NO: 390201 - DNA, 1000 bp, Homo Sapiens; identical to SEQ ID NO: 281331

SEQ ID NO: 390202 - DNA, 1000 bp, Homo Sapiens; identical to SEQ ID NO: 281332

SEQ ID NO: 390203 - DNA, 1000 bp, Homo Sapiens; identical to SEQ ID NO: 281334

SEQ ID NO: 390204 - DNA, 1000 bp, Homo Sapiens; identical to SEQ ID NO: 281335

SEQ ID NO: 390205 - DNA, 1000 bp, Homo Sapiens
atatgagctttttcttcctaccacttatcagttactgacagagggtcaacttcactactgtgtcatatggttggtccaatgttgggttcctcagattcatggaggaaataggaaaatagtaaagattaaggagtcatagttaaaaaattacaaacaggtcacaaaccagtactctttcttgattatttaggaaccaaatagccattctatgaaatgtcttcctttcctttttctctcttgctcaccaattgactcgtaagcacttccgttctcttatggttgggagccatacaaggtagagtgttggagtaaaaactacattgactctgaatcatggtgtgtgacctcgggcacatgatgtaacctctataggactctattttaatgtataaaacaggaataatcctttattattatctatgcaatacatattccattatctattacatgggataatggaatgggaagtcccttgaagatggtactaacctcaatgtattactcctttctagcttctttgggtcaaaagtttggtggaggagttacaaattctggtttgaatgatatatttggatactttatcaacacatcaaagctctacctatcccttcccccattctcaaaaccaagctgaattaacatctttacatttattatgcagtttatggaggattttagcattaattattgcttgatttactcaatgtccccatgttatagatgagaactggaaaacccattgaagttgtgactcctggtctagaaatgaagtctacttccagttaatgttctttctggtatgtctttgctttcttgaaatttcccttttttgtccttactgggtaaattttgaaccaaccaaatcacaaagatgtccggctttcaatcttctaggccacgcctcttatgctctctccgccctcagcccccccttcagttcttaaagcgctgcaattcgctgctgcagccatatttcttactctctcggggctggaagctt

SEQ ID NO: 390206 - DNA, 1000 bp, Homo Sapiens; identical to SEQ ID NO: 281338

SEQ ID NO: 390207 - DNA, 460 bp, Homo Sapiens; identical to SEQ ID NO: 281339

SEQ ID NO: 390208 - DNA, 1000 bp, Homo Sapiens
  misc_feature (180)..(180): n is a, c, g, or t
  misc_feature (403)..(403): n is a, c, g, or t
  misc_feature (702)..(702): n is a, c, g, or t
ttaattactatacattgtatttgtgggccatcacatcactttatgcttacatgttcattaattattactttctattccatttaaagattcaaaacatgaaaattcaacaaaaagcaacttgtcagccaataaaaaaatgcagtaaccagtacttagactgtactaagatagaaagaaccncctccgttatgtctgaggtaacacattccatccccacagttacttttgcaaacctggttcccttcgcttctgccacatcacgcagagctagtgatcgagtttgcacaattacaccaacagtctgccccacgtgggaaccattcccaaccgttttcttgaaaagacaaaaaaaaagacgacatacctcttctttttaacttctttcttgggcttcttttcatanactggattctctcgtatagcagcatgagctttcttatacatctcctccatctgaaacaaaggaaagcaaacagtacttggtttcatttcatgtgccctactatattaatgcaaccataacttactcttgtccttctaagccagattctcaaaaggaactaaactaaatcaatgttggtaaacactttaacttctaaatgtaactcaccttttcctaacaaattcccaattttcaccttatgcaatgtgaattatcactacagaactccatcttactccagaaaaaatcaggccagtgtngtggttcatgcctgtatctcagcactttgggagtctgaagtgggaggatcacttcagcccaggagtttgagaccagctaagcaacacagtgagacctgtctccataaaaaaactaattagccaggtggcaattattaatggtggcatgcacctgtagtcccagctacaggactacacgtgagtccaggaggtcaaggctgcagtggcacaatcacagctcactggaccccagcctagatgacagaatgagacctcatctctaccaaaaattaaaaaaaaaaaaaaaaaattagcaggg

SEQ ID NO: 390209 - DNA, 1000 bp, Homo Sapiens; identical to SEQ ID NO: 114755
  misc_feature (449)..(449): n is a, c, g, or t
  misc_feature (451)..(451): n is a, c, g, or t
  misc_feature (460)..(460): n is a, c, g, or t
  misc_feature (462)..(462): n is a, c, g, or t
  misc_feature (478)..(478): n is a, c, g, or t
  misc_feature (493)..(493): n is a, c, g, or t

SEQ ID NO: 390210 - DNA, 1000 bp, Homo Sapiens; identical to SEQ ID NO: 281342

SEQ ID NO: 390211 - DNA, 1000 bp, Homo Sapiens; identical to SEQ ID NO: 195553

SEQ ID NO: 390212 - DNA, 1000 bp, Homo Sapiens; identical to SEQ ID NO: 281343

SEQ ID NO: 390213 - DNA, 1000 bp, Homo Sapiens
ggtggccagaggcaggggtagctgagttcctggagaccccttttttgcccccaggttccccagagggcaacgccatcagtagcagtgtggtgtttcaggcagagctctggccaggctgtgccagtgtgtcccggacgcatcactaaggaagagagagtttatttagtcaactggcccaaggcagcgaggcttctacagtcccacaccccatagccgcctgggctggggcttactgggggctgaaggttctggacatgaacaagggtcaggtagaagagaaaggcttcccctacaccccagcctcctgctgtcccctgaagcccaggactgcgttgtatgctttccatccactcaccttaccccatagcatcttgcggcccagaaaccagagccatttgtctcagaccctaaatcaataatcacaaaccccaaaacgggagagagcagtgaaaacatgcagggctgtggacgggggaagggttgtggcgggtgttctgaggctgagaggacacctatatgcgtatttcctctacacacatcaccccccttctataatcttaagccatgactagcctggtggcgtgttagtttctgcccagttctaccccctcatgtgcttcttctgaatactgaatgtgactgtttgaaagctggtagaattcatccctcttactgtagataacactgcaaatcttggaattttgttttttgctgtttccagatgtatctataaatatctatacattatatgtgtgtgtgtgtgtgtgtgtgtgtgtgtgtgtgtacatcgggtcctcccatgtgtggtgttcttctggaggttgtctctttggtcaaggtgaacttttaatgtttattattttcttctccgcacaaagtaaagagcctaattttgtgtattctggtggctgctgtcatgagatgataaaatgtaaaacaaaactctagtcaacgtagaaagagttaactgtgctgaaaaactaataaagaacctaagaag

SEQ ID NO: 390214 - DNA, 1000 bp, Homo Sapiens; identical to SEQ ID NO: 195022

SEQ ID NO: 390215 - DNA, 1000 bp, Homo Sapiens
tggcagaagttcatggggtagtggcctctcaaaggctgggcgcatcccaagacagccagcaggttgtctctggaaacgaccagagttaagctctcggcttctctgctgagggtgcaccctttcctctagatggtagttgtcacgttatctttgaaaactcttggactgctcctgaggaggccctcttttccagtaggaagttagatgggggttctcagaagtggctgattggaaggggacaagcttcgtttcaggggtctgccgttccatcctggttcagagaaggccgagcgtggctttctctagccttgtcactgtctccctgcctgtcaatcaccacctttcctccagaggaggaaaattatctcccctgcaaagcccggttctacacagatttcacaaattgtgctaagaaccgtccgtgttctcagaaagcccagtgtttttgcaaagaatgaaaagggaccccatatgtagcaaaaatcagggctgggggagagccgggttcattccctgtcctcattggtcgtccctatgaattgtacgtttcagagaaattttttttcctatgtgcaacacgaagcttccagaaccataaaatatcccgtcgataaggaaagaaaatgtcgttgttgttgtttttctggaaactgcttgaaatcttgctgtactatagagctcagaaggacacagcccgtcctcccctgcctgcctgattccatggctgttgtgctgattccaatgctttcacgttggttcctggcgtgggaactgctctcctttgcagccccatttcccaagctctgttcaagttaaacttatgtaagctttccgtggcatgcggggcgcgcacccacgtccccgctgcgtaagactctgtatttggatgccaatccacaggcctgaagaaactgcttgttgtgtatcagtaatcattagtggcaatgatgacattctgaaaagctgcaatacttatacaataaattttacaattctttgg

SEQ ID NO: 390216 - DNA, 1000 bp, Homo Sapiens
ccctgccatataagccaagggcacggggtggccgggaactctctaggcaagaatcccggaggcagaggtgagtcctcaggttgggcagggactcctcctctctgtggggtctctatctgggcacctagaggggactccaaggataaggagggactaagtggtacatcttcctgctgagccaggccatgctgaccgcagcggtgctgagctgtgccctgctgctggcactgcctgccacgcgaggagcccagatgggcttggcccccatggagggcatcagaaggcctgaccaggccctgctcccagagctcccaggtcagtgtgagcaagggtgggactgggcggggcctgaataccctctggccacaaatagtctcccctggcataaaccctctttctcccttcccaaaccctcccctgggaggtgggtgctttgtgcatgggggttcctgccctcacatcctctgccccaggcctgggcctgcgggccccactgaagaagacaactgcagaacaggcagaagaggatctgttgcaggaggctcaggccttggcagaggtaactgctcagggaaaagggtaaggtggtggcccttgggagggggcattgggtattagctcctctccccagctccaaactccctcaccagcgacgacactaccgaccaccccttcccatgctccactgccatcctgcacaggttgggacaggtaagatccctggatctgtctttagaggcctgtgctggttccccacccctgcaggtactagacctgcaggaccgcgagccccgctcctcacgtcgctgcgtaaggctgcatgagtcctgcctgggacagcaggtgccttgctgtgacccatgtgccacgtgctactgccgcttcttcaatgccttctgctactgccgcaagctgggtactgccatgaatccctgcagccgcacctagctggccaacgtcagggtcggggcaaggaaactcgaataaaggatgggaccaa

SEQ ID NO: 390217 - DNA, 1000 bp, Homo Sapiens
  misc_feature (919)..(919): n is a, c, g, or t
  misc_feature (928)..(928): n is a, c, g, or t
  misc_feature (977)..(977): n is a, c, g, or t
taaagtcaaggccataagcctttttttcccttttaaaaataagtgtcatatctttgttaaatatagtaaaatatcagtgtgcatgggacataatgtacttatttgcccctctagtttggcttgatggtaataaaatctttttaaactgagattttaaaagtcaccagattagtttcaaatgaacaaccttgagaatcttagaatatcttgagggtaagttaacgggtgtcattgtaggaggtgatagagaagtaggccaaactcatcaccatgctctgggcctaatacagtcttttcctattgaaaagtgacggttggggaagaaaaaaatctcggcctgtttgtgttactgtagtagctagcatttatgaattggcaaagtttcagagaccctccctcctctatgtcaaatactataatatcatacaggattaaaggtgtaatatgcagatcaagacctagagattaaatacagacttcaggtaggctgctgcttggaatacttatatcatttttatacttattttttaatatatttccaggaagaggaagatcaaaacgttgtaccagaaactacctctgaaggctacactttccaagttcaggatggggctcctgggacctttaacttttagatcatgtagctgagacataaatttgttgtgtactacgtttggtattttgtcttattgtttctctactaagaactctttcttaaatgtggtttgttactgtagcactttttacactgaaactatacttgaacagttccaactgtacatacatactgtatgaagcttgtcctctgactaggtttctaatttctatgtggaatttcctatcttgcagcatcctgtaaataaacattcaagtccacccttttcttgacttcaccatgcctatgtgttgctttctaatntggggcctntaatgttgctagtgaaaggtaacctgtccaaactgatgggattaaccanaggtagtcctggctgcagttttt

SEQ ID NO: 390218 - DNA, 1000 bp, Homo Sapiens; identical to SEQ ID NO: 281346

SEQ ID NO: 390219 - DNA, 1000 bp, Homo Sapiens
ccattctttccttctctgaaagtggtgctataagttttagaatcttttaaatacattccctgggccaacagacccacacacttagccattgaaatgtcaaattgatgtgccctagatcaacagatcaacaataccttttttttcagtgttaaggtaatggttggtttttgtgtccgctaaatatttaccttgaaaaaaagaaaagtgtgtatctagcttcttcagagatcaagtcctctggtaggaggcaaaggttctatctgcttagcaactagttaataagtggtatctgacacactctaaaccccgtgttcaaacgggggccttctggttttaggaaacttgtagaaacgaagcctgctgattgatttttttctccttttttttttttttttttttttaactttgaaagttaactcttcaaatgggagactctttgaaatgacatgttcctttaaggtactgaagctttatttgcatatttatttcagatgtttcgagtaaacttgaaaagggtaggcacgaagcaatttgttgctgcttgtcacccccaagtccccgtggaggttctgtattttaagaaacagtgcgttgagtgtacagattttatttatgcgtaatttaatggggtctgtaaatactggtgcacttcttacgacttttttgagacatgggatccaattttaatattaacttttaatggtgatggggtaatctataacacatcataaggttttattcatatatatacagggtattaagaattaagaggatgctgggctctgttcttggcttggaagattctatttaattgaaactctctgttcagaaagcaataactttgtctcgttcctgttgggctgaaccctaaggtgagtgtgcagtacagtgtgtgtgggtgaaatggagatttggaattgaactctctgcctgtaaatgttccccaaataattgttgtgtgtatgatacgtgtataataaaagtattcttgttagaattg

SEQ ID NO: 390220 - DNA, 1000 bp, Homo Sapiens; identical to SEQ ID NO: 281347

SEQ ID NO: 390221 - DNA, 1000 bp, Homo Sapiens; identical to SEQ ID NO: 281348

SEQ ID NO: 390222 - DNA, 1000 bp, Homo Sapiens
aaattggagtctctctctctctgtgctgagctgcctgaagccgagggatgagtaacacaatcaccactgtggccaccactactgtgactgcagtgtggatgacctcaagccagcacagcactgggttttggccaaggcctgctgtaaccactacctggctaccacctatgattacttaaggctgtagggctctacaattaacaggtgatcaagccagccagtgttatgttattctctccagggtggctagtttcctgaaccccacgtgggtccagatatgctttctgggggccagggcctggaattggcaactttagaaagccacctggtcctctattctactgtggcttagttggcaccaaaatcacaagacagtatcttgctcttccctttcttccctcccctttctccaggcagaggaatctcgccctttgtccaccaccaccatggtctcatgaagattacagccggggtatcactgatgtttacttaaggcccaacaactcagcagtcatcttgtcatgaatgttaccaggtctgggactcacccttcaaggtagtgggctcctctctggcccagaacaggtccagaaataccatccaaggctaaagcccttgagtgggggaccccaagatccctttaggtgctctttctcactctggctgagcttatacataaagctgcaaaacaaattcatttttaatcctttcctcttttctcaagcagaagaattctctccttgttaatgcacacttcaagccagcgagtctcagaatctcacctgaggcccacagcatgtactacctgattaccactgctgatttttcagggcccaaaggatctttatttagcatataatgacttctccaaggacttgatccttcttttagaggcaatgggttcccctctgtcccagggtgtgtctatgaatgttttctgggagctagggtctggattgggggccttatgattctgcccagttccctattctgccatggc

SEQ ID NO: 390223 - DNA, 1000 bp, Homo Sapiens
gcccggctaattttgtatttttagtagagatggggtttcatcatgttggtcaggctggtctcgaattcctgacctcaggcagtccacgcaccttggcctcccaaagtgctgggattacaggcatgagccaccgtgtcgggcgaatgtcactttctgatagttttaatgtgttagctgtgaaattgtgtgagtgcatttgtgtatgtccctgtgggagtgtgatttggatttggccgtgtatccaggtatccctgtaacaggtgtctgtgtgtatgtgtgtgtcccctgtgcctatcagcaagtttgtgtttcctgataagcactccgcctatgtctgtgtggttgcaccaccgtgtgtgtggtgtgggtgcctgttcggtagggttgtttgtgaacacagtttgtgggcccaggtgtgatcatcagtgtgggtgtttctgcaactgtgtgtggccctgtcattgtgtccgtctgcttgtccaggggaccctgttagtgagtctgtgcatttccgtctgggtgtgtgtaagtgtgagccccatcagtatgtgagtgtgtgtgctcatgcccctgtccatggtgtggatttgcgagactgtggccttgtgtctgtgagtacatcctctgggctctgcctgcacgtgactttgtggaccctggaacgcccgtcggtcggtctgtgtacgcatcgctgggggtgtggatctgtgggtcccagtcagtgtgtgtgtccgactgtcccggtgtctgggcgatctccccacaccccgccgcacagcgcctgggtcctccttgccttgggctaggccctgccccgtcccccgctgcagggaaacccccggcgcggaggtaggggggggcgcggcgcgcgcctgcaagtcctgacttgtccgcggcgggcgggcggggccgtagcgtcacgcgggggcggggcgtgggacccgccgggcgggggcggggcggggcggggcggggcggctttggagcgggcccgggatcc

SEQ ID NO: 390224 - DNA, 1000 bp, Homo Sapiens
gcaggaatgtggccacagggagcagaggtttgtactttccccaagaggtcctcatcctgagacggtctctacccatgtttaacccaaagagtgcaggccaggttccttatccttctgatgaaggatgagagagctcatttagaagtcagagcaaactagggtctcagtattgagaaacgcagcctgccagggaatcacagagacatcggggtgcccgcgatggccctcatgaagccatgcctcgacggcattcaggaagccctgcaaacgtgctttttgaactcattggccaggtgtgatttttacacaaggtaaacgtggtcaagggcatcggggaatttgctccaagcagatagctccctctgaggaaccaaaggaagcaagtttccacgatttctgaagagctggtataggaagtttctttcttccttttgtgttacatgtgcattaaacagaacaagctgtgtgtcatcacagattgtactgtgggctcagaaaccgtgagagagcccccaccgtggacaccggctctagggccacaggaaaaggaacgtttccaggcattttgtctccagggctcccgctggacaggcacgtactgccctggggagtaaatgcggagagttcacgaactgtgcccaacgcatgttatagccagggtcctactaactactcagtaaaagaacgtattgttgtattcctccagtgttaagctatagccatgttaaaagtcactgtgcatttattctcagcatcaaataccttgtaacgtcttctctgccttgttagtgcatatttttacttttctgatactgtaaagaatatatccagtatgtaaatgaatgttctataaatcttttgtatagtcattttctctgctccttaaatatcatctctattcagagtataataaaattatgaacttggtaaaaaaaaaaaaaaaaaaaaaaaaaaaaaaaaaaaaaaaaaaaaaaaaaaaaaaaaaaaaaaaaaaaaaaaa

SEQ ID NO: 390225 - DNA, 1000 bp, Homo Sapiens; identical to SEQ ID NO: 281349

SEQ ID NO: 390226 - DNA, 1000 bp, Homo Sapiens; identical to SEQ ID NO: 281350

SEQ ID NO: 390227 - DNA, 1000 bp, Homo Sapiens
ttccttccaagatacaatggtggtacatgtattggataaacagtcccatcccaaaagggagaaatcattccaaaaaaaaaggagtaacagtccccatcaagtccaaaacccagcaggacagatgttaaattttaaagctccaaaataatccttgactgtatgtcttgcatcctgggtacactggtatgaggagtggactcccacagtctcaagcagccctactcccaaggccactggctgctctcacaggttggagttgaatgcccatggcttttccaggctgaggctgcacactgctgatgactataattcttgggtccttgcagcagcagccccaatcccatggctcccctaggcattaccccagagaggacactctgtgttggctctgccccgcagcagacttctgcctgggcatccaggctttccaatacatcctctgaaatctaagtggaagctgccaagcctccatgacttttgcattctgggcacctgcagacttaatactgtgtagacaccagcaagacttatggcttatgccctccagagctgtgacatgactcacacctggggccactgaggccatgtgagccatggctgtgccatctggagtggtggggatacaggaagcagcagactggtcacaggggagcagtctctaggcctgtcctctacccaaaccattctgtcatcctaggattctgggcctatgatggaggggtcagcctcaaagttttctgaaatgccttcagggcctttttcacatcgtcttgactagtaacacttggctctggtttagtcacactaatctctttagcaatggttgctctgtagcaccctcagattcctcaaactcttggattccttgcctacaaatgctctttccttctctatcacatggccaggctatgaaatttccaaatttttacactttgcttcccttttaattataaattccactttctagtcattccttagctcccataatttagcataggct

SEQ ID NO: 390228 - DNA, 1000 bp, Homo Sapiens; identical to SEQ ID NO: 114756

SEQ ID NO: 390229 - DNA, 1000 bp, Homo Sapiens
tataagaccttcttcactgaaagagttcacatagaagctgaacttgaatccagccctcttaaatttcagttcaatattccctgcacatctgcacatctttacatgaattctcagtgatattccttcatccatccattcatgcatgaggattacagagatgaagaaagttccagctcttatcctcttgtgctcacagtttaacacgggagatgaaactgctgctgaatggctcccattctgaagtcagccaacagtgtttgccaatagcccccactgaataccccaccatattctcaagtaactcactcatttaggggaaaacaataatataattgtctctagaaattttaggtattctccactctaagattactcagtgttttgactgatctcaaggcgactccgtggtttgcttctgtcaaaaagaaaacacagttcccactgggaaatgtgtggagagtaatggttcaaaacgccagctgtacattagtgtatatccaggatgctttaaaaagtgatggccaagactcataagatgaattaagcggactctctggggaacagaaccgaacatcacaataccttcccttccagttccttgaatacttccaaatcgcacttaggattgaaactcaccaaattagagagatggaataatgatttccatggttggtctgattcactaggaacaggtatgctcaagcagtacttctcaacctttaatgcatttagaaatcatccagggatcttgtcacggagcaaattctgactcgggaggtcaggggttaccgcctaagattctggtgcaaacaggttccacaggaggcctatgttgtgggtgcatgaaccccattttgagtaacaaggctatcaagtcagagaataaatacgcattgcttttacccacacagaacttgcgactgaaatgagaaaataggcatgagtgtgatagctcatgcctgtaatacctgcactttgggaggccaaggcaggaggatcc

SEQ ID NO: 390230 - DNA, 1000 bp, Homo Sapiens
gtgtgagaccagcctggggaacacagtaagaccccatctgtatacaaaaattttaaaaattaggcctcgcacagtggctcacgcctgtaattccagcactttggggggccaaggcaggtggatcacgaggtcaagagatggagaccatcctggctaacacagtgaaatcccgtctctactaaaaatacaaaaaatcagccagacgtggtggcacgtgcctgtagtcctagctacttgggaggctgaggcaagagaatcgcttgaccccgggaggcggaggttgcagtgagccgagatcgcgccactgcactccagcctgggcaagagtgagactccgtctcaaaaaaaaataataaaataaaataaaaattacccaagcatgatggtatacacctgtagtcctagttacctgggaggctgaggtgggaggactgtttaagcccaggagttcgaggttacaatgggctattgcaccactgcactccagcctgggtgacaaagtgcaaccctatctttaaaaaaataaaaataaggactcagatgagatttaaaagaggcagtggatgcgtcactgtgcccgtgaagtacgcctaatcaagaatagccttcctgctctttgaggcctactctcaaaataaggaaaaaaatcaacagccaaaaaatgaagagcctgatgataaacttttttttaaatttttttgagatggagtctcactctgttgcccaggctggagagcaatggcatgatctcggctcactgcaacctccgcctcctgggttcaagcaattctgcctcagcctcaagagtagctgggactacaggcgcatgtcgccacacccagctaatattttatattttagtagagaggggtttcaccatgttgcccaggctggtctccatctcttgggctcaggtaatccacccaccttggcctcccaaagtgctgggattacaggcgtgagccaccgcaccaggccaggtaaacatttttaatggatc

SEQ ID NO: 390231 - DNA, 1000 bp, Homo Sapiens
cgagggggccagtgaagggatcccacacccaccgcccctatgtagggcagggaagaaattgcaaaggacttgggggatagatgggaatgggagggcaaactgcagcacttgttaaattaattaaagaaacaaaccagaagcacaaaaacggggaaggagaggggagaaggagcaggtccagtgttcccaggcccccaattctgggggcaaatgttgccacttttagctggaccttcccagggaagtccccctttcccccttgtccaaactgagtccaactgctcacaccactggtgcaaacctaaagagaatgggagtgtgttgtgtgagggaggggaaaaccccagatgccctggaggcagagtccttgccccctcgctctgggcaggggtgagggcaccacgcaccctccttgtgtcctctctccaggcctctgcttgttattgcttgaagccccacagtcttatgcccatggagcaggtggggaggcaggagaagggcagaggaaggatccagggttgtgactagattccggggatggagagcgtgggggtctgtgtgagccagaagtctgaggtcctgggtctgaagacaccagtccaaccctcactgccggctggcctcagcctccactttcacgctgctcctgcgaccctccaccagcgcgggatggggtcctggggcaggacatctgtccagcagcccttcctcgaactctgcagggaaaagggggcagttaggagactgcagggtgactggctgcagacagaggtggttgggaacagaagcaggggcaaagaaagctgtgaagatgggctcagtttaggtttattgaattactgcctcctgcccactgcatgtgtatggggggttccattcccatgtgtgtgagccccctcccctccctggctgtgcgtagctctgtctctgtctgtctctctctctttctctcccgcctcctcggttgcgctggaatttctggttctgtcaggagctgcgg

SEQ ID NO: 390232 - DNA, 1000 bp, Homo Sapiens; identical to SEQ ID NO: 281353

SEQ ID NO: 390233 - DNA, 1000 bp, Homo Sapiens; identical to SEQ ID NO: 281354

SEQ ID NO: 390234 - DNA, 1000 bp, Homo Sapiens
ggactcaaagttcttcagctttgggactcagactggctttccttgctcctcagcttgcggacggcctactgtggaccttgggatcgtgtgagttaatacttaataaactctcctatgtgcgtgtgtttgtgtgtgtgtgtgtgtgtgtatgctgtccctctagagaatgctgagtaatacaatattgctgtgttcatcttaataatttcaaaacatttttcaaaaatttaatcccaactgttagaaataacctacaagaaatccagtgaggcctacctacccagagataagtgattcacctgacaatatgcatcacaagtcttaactctcatttcattagtcctatccagagaccacattttctacttaagcaatacttagaggcacatctctcagcaaacacaaaccaattggacaatttaaactagcactattcaaccataatgaactctggttgaaaaacagtctgtccctacttgcatattgtagtgagatgaagattccactcttcatgtcagaatggcacttacatgagtcaaagtgtctaaatgaaataatttaaatggaacaaagtcaaatacttacattttatttttaaattctcctctatttgcagttatactttaaagtgtactcccttctctatcctatcatgaggactggacagcctccacagagatggctggacaaagcaagggaatttacttaggtaagacaccatttctctttactctgaaatccctgcaaatgtagttattccagaggagactgtgcaatgactgatgggtttagcatcctacatgaggggaaattgccgattcccaggctgggtaaaatgaacaaatatccagttattttttttagccgatcttacaggattagctaatataacaggatttacagccgaattatacatgaaagtttaattctgtgtcagataaaggcatatctttgatgcagaaatagaggcaggcattaggccttacctggttaaaagctt

SEQ ID NO: 390235 - DNA, 1000 bp, Homo Sapiens
  misc_feature (321)..(321): n is a, c, g, or t
agactctatctcagaaaaataaaataaaataaaataaaatactaagttgtccaacatagttctcattttcctgtgtttactactgtcgtactttgtttaaatatcaggcttcaaattatttcaataaatggatctccttttgagggccactgttttgggggctccttaaacgcaggactctgcctcagtacaggagctggggtctctgctgtttccggggaggaccttgcaaattctcgagtggcagcttccatgggtggccactgttggaggggactcctacttcacccaccctttgtttactggtgcctgcctttcccnacccacacagagggccgggcctgcgcggtggtctttgactgcaagttcattgagacatcagcggcattgcaccacaatgtccaggcgctgtttgaaggtgtcgtgcgccagatacgcctgcgcagggacagcaaagaagccaacgcacgacggcaagcaggcacccggaggcgagagagccttggcaaaaaggcgaagcgcttcttgggccgcatcgtagctcgtaacagccgcaagatggcctttcgcgccaaatccaagtcctgccacgacctctcggttctctaggtcccacccgctcccactatggtgggagacgaacggaagggttggtgggctggcccagccaactgccccgggtgcctcagagcaggctcagactctgggtccctcggagctgccagccgggcacccccaacctcatggtcatggacagatagacagtgctgccctgcgaagtggctctcaggggccagtgagggctgggcccacagagatgcatgcgcaggctcatatgcgtcccaagcagccgcagcgcagccgccgggcaggcctgcgtgccgggagaggactctgccttttttcacagcccgggtgtgcctgccctggagggaggctcttcagtgcggtagctacttgtttacatgcagatttttgtaataaaggctatttcctgata

SEQ ID NO: 390236 - DNA, 1000 bp, Homo Sapiens; identical to SEQ ID NO: 281357

SEQ ID NO: 390237 - DNA, 1000 bp, Homo Sapiens; identical to SEQ ID NO: 281358

SEQ ID NO: 390238 - DNA, 904 bp, Homo Sapiens
ggaccagacaactgtatccagtgtgcccactacattgacggcccccactgcgtcaagacctgcccggcaggagtcatgggagaaaacaacaccctggtctggaagtacgcagacgccggccatgtgtgccacctgtgccatccaaactgcacctacgggtgagtggaaagtgaaggagaacagaacatttcctctcttgcaaattcagagatcaaaaatgtctcccaagttttccggcaacaaattgccgaggtttgtatttgagtcagttacttaaggtgttttggtccccacagccatgccagtagcaacttgcttgtgagcaggcctcagtgcagtgggaatgactctgccatgcaccgtgtccccggccgggcctgtgttgtgcaatgctgcacatcacaacaggagggtagggggacaaaagagcacaggtcctggcagctgccacagtctccaggggcttttgcgtttctctccagatttctaaggttaacatggggattagctgttttgcaatgaataaaaggtaacattgcctggaatgttgcttaaagacacttttttaaagctagttgattgttaagctgttgctacttaaattaaaactactttgggccagacgcagtggctcacgcctgtaattccagcactttgggattccaaggcaggcagatcacttgaggtcaggagcttgagaccaggctggccaacatggtgaaaccccacctctactaaaaatacacctgtagtcccagctactcaggaggctgaggcaggagaattgcttgaacccgggaggcagaggttgcagtgagccaagatctcgccactgcactccagcctgagcaccaagagcgaaactctgtcccaaaaaaaaaaaaaaaaaaaaaaaaaaaaaaaa

SEQ ID NO: 390239 - DNA, 1000 bp, Homo Sapiens; identical to SEQ ID NO: 206208

SEQ ID NO: 390240 - DNA, 1000 bp, Homo Sapiens
taccatataaaatagagtttttcagctgtgtaatatataagggctttggttatttgaagtcacaagtgtttaaagaaggagtctttaaatgttgctcagttaaataaatcattttttctgctcaaagtttgctaaatcatgagagcaactcatttttgggacctcatgttaagaattttggagaacattagggttgagtatcatgtaaattatttaaaaaaataaaaaaagaattttggagaacacactttttataaaacaatacacagagattactgatgttaaaacagaggcgtgaatagactttgtccttttattcaaggaaatatgctcacaacagtgtcagtgatacctattaattattgggtgtcgtatttgtggtgccacgctagaagctctacattccttacctgtaatcatcacagcaccctgcttggtgggtatcagtagccttcaatttacaagtgaattaactaaagacataggtgagttagtagtccaagatttctcatcccttaataagtccaggtctatctagaccaaattcattcattcatttattcattcactcattcactcattcttacatttaacaaatatttgagtgcctattacagtctaggcacgtatttaggcactgaggattattgaaggtaaataaagccaatactagttaaagtggtcaggacagattttaatcaggagtatattattgcagtggggaaaagagttcatcatgaactgaactcaacttcagtttgtgcagaggtgactgggcattttaaaaggagaatgagggaatgggggtggtaaacaggggttcagtagcatcaggaaagcacaaaattaaaaaaaaaaaaacaggaaagggagttagtccaagtaaaacccatccaggtttgctaactggtgctattgcagcctcccacagaggctggagacaggggccccatcttcaagtgtttgctggaactaatagtgaattctcttggcagccttg

SEQ ID NO: 390241 - DNA, 1000 bp, Homo Sapiens
aattggaagggtccttgaaagtcatttaggacagtctccctattttatagcagtagaatttttggaccctgctttgtattatggtcagaagtctctttgtttcattaatgctgcttaattttcatctagcttacctttggtctctttatattgtgattccagtgctacctgaagaaagctttctgcactgaataatggatttttttctgaagggccagacctgactttggtccaaagggaactaaactgcaggacctcctttgattttaaaggtcgctaactttagtgatgctaattctgaacctctgagggatgaattgttacccccagctgcaatttttgatcagtctaacagccaagccaccatcatggccaagactagggaacactcacagtaagcagggtggccatctgctccatttggccagctctagctttggacactgagaggtggctcatatactgattgcatcttggtttaaccactgagagtgaaaagagaaaaggacaccaagggcatttatcttttccagccccacatgctcctcccaatctcagcggtaaagagcaggaactctggagtcaggcagaactcagtgtgacttactcaatctttgtagggctgactttcctatctgtaccaggagatcttaacagcactataattacctcacgggtaactggcaggtttaggtggggaactgcctgttgaccatttaggacaatgtctggtacacagaaaatccttaataaatgccagctattactattatcaaggggtagcaacattaacatacccaatcaacgtgaataagatcctcttctctgtataaccttttccatggcatttcattccctccctgagtcagttatgataccaatactgtctcctaaaactctgtctttagcccagcttctttcctgagctcaagaccaggcttcacaactcccaagatacctggaagtgcccttggaacctaaagtgaaccccaaaccagat

SEQ ID NO: 390242 - DNA, 1000 bp, Homo Sapiens; identical to SEQ ID NO: 205513

SEQ ID NO: 390243 - DNA, 1000 bp, Homo Sapiens
ttaggatgtttgcagtaaactcacagagttgaacatacctttccgtagagcagttttgaaacactctgtttgtgggatccgcaaggggatatttggaccgctttgagacctttgctggaaatgggaatatcttcacatataaactagacagaagcattctcagaaacttcttcgtgatgtgtgcattctactcccgaatttgaatcttccttttcatgaagcagttttgaaacactctgtttgtgcaatccacaattggataattggaacgctttgatgcccatggtagaaaaggaaatatcctcatataaaaaccagacggaaggattcacagaaaatgctttgtgatgtgtgcattcaaatcacggagttgaatctttcttttgtcagagcagttttgaaacactgtttctgtggaatctgccagcggacacttggagcgctttgagggctatggtggagaaggaaatatcttcccataaaaactagaaagaagcattctcagaaacatttatgtgaagcgtgcattcaactcacagagttgaaccttccttttgatacaacagttttgaaacactcttttgaacaattgcaggtgaatctttggagcgctttgaagcctttgttggaaatgggaatatcttcacacacaaactagccagaagcattctcagaaacttctttgtgatgtgtgcgttgaacccagagagatgaacctttccttggatagagcagttttgaaacgtgtttttgtaagatctgcaagcggataattggcttcgctttgtgtcctttggtggaaacgggaatatcttctaataaaaactagacagaaatattctcagaatctcctttgtgatgtgggcattcaactaacacagttgaacatttcttttcacagagcagttttgaaacactcttttggtagaatctgccagtggatatttggagcgctttgagggctgttgtgccaatggaaatatctgcccctaaaatctag

SEQ ID NO: 390244 - DNA, 1000 bp, Homo Sapiens
gaaattggccttacagtttcgcgccacagacaagggccctgaggcactgagcggctgggtaacgtgtcccctcctgcgtgtcacacccaggcaggctgagacccacccgcctgcagctctgagctgcaccccccgtgcagcctctcacctggtggtccaccgtgctcccatagagcccgttgaggttggcatagtggcagttccgataccaccaggccccacggtaagagacggcacaggagatgagcaggttgttggggtctcggtcacgggcggagaagacactgccgctgtggtagctcatggagtcccctgggtagagggcggacggagcagtgagggcctctcctcccgcctcctgacccctcccgcctcctgccccctcccgcgcctcccaccccggccctcacctgcggtgccatggtagccttccaggtggaggcggtagtgctcagcggccgagtcgacttggaaggactcgtactgggcaaacacggcctcctccccggcccgcaggtccacccgcaaggagtagtcgccggctttggtcaggctgtgcagggcctcgttgcctgggagggacacgtgtgctcttaccagcgtcctggtgtccacagggcccccatctcttccctggccccctagcccccagtgaggcactgacccagccagaactccccagagatgttcccaaaaccgtgggcgtagtcctcccagtccctccagaagtccgtttttccgtccatgcggcgctggaacacctgggaagcaggcgggggcaccgtcggcctgcggctcctggcacagcagccctgccctgtgccaccccgtgcagaccccccggcttccggctgccacccaccagccagccgcccccatcggtctccatgtcacaaaacacgttcagaggccgctcgcggttgccgttgaggaagatggtggtggtcctggaggtgctgacgccgttctgcatctcctccccacagtcccgggggaaggg

SEQ ID NO: 390245 - DNA, 1000 bp, Homo Sapiens
ttcccaatgcctggtatagaattctgatgcatgaaacagcaagatatctgggggccagtctgccctcacaggcacaagcacagggacacagctacacccatattcctagggagggcttggggtgcacacctgcttctacatacagggtttctgggccataggttttgcagctaatactggcctaccaaccttcccatgacagagaagttggttccttcagcaaaaccacttcaccttaggggtgcccatggtgcctaggaagcgggggagctctcctacaaaggaagtagtttttctgcttctatgacctcttcttttctgaatccaccctagaaaaaggcctagacggagcaaaaaaagctgtggggggactcggaaaactaggaaaagatgcagtcgaagatctagaaagcgtgggtaaaggtgagtatatgtccccactcctccctcaggaccagcctcagtctccaccccttgcatgagatctgaaactgccacagcccccccattgaagacccctcactttgtgctttcaaatgtctccaattcctcatccagatttaaattgccattcttgtctgatattgatacttcctggggtctaacttgcttttttttttattgctcttgccccctgcccctgccaaggtggggaagagaggttggtctttggggctcctgtgaatctaacctccatccctctgacttctgtgtaagcacctccaggcctcccttccccttccccttcccctacctctccttccccaattccctggctctctttcccttccttttttcttcctacccctttaccccatttttttctgtggctgtcctaggagccgtccatgacgttaaagacgtccttgactcagtactatagctgtaaggagaagctgagaaatgatacccaggagcagcaggctttacgtcttcagcctaaaacctaaaaaaaaaaaaaaaaaaaaaaatttaaaacagctattaaactgaaagcatc

SEQ ID NO: 390246 - DNA, 1000 bp, Homo Sapiens; identical to SEQ ID NO: 281363

SEQ ID NO: 390247 - DNA, 1000 bp, Homo Sapiens; identical to SEQ ID NO: 281364

SEQ ID NO: 390248 - DNA, 1000 bp, Homo Sapiens; identical to SEQ ID NO: 281365

SEQ ID NO: 390249 - DNA, 1000 bp, Homo Sapiens; identical to SEQ ID NO: 196664

SEQ ID NO: 390250 - DNA, 203 bp, Homo Sapiens
taactactctttgtcacttctctttcacagtttgtggagatgagtgcactggccttcttctcggtgacttggctcgcctggagcagatggtcatgagcatcaacctcactggtccgctgcctgcgccatataaaatgctgtatggtcttgaaaatatgactcaggagctaaaggtaggttggtgcagtcacaagcagggcagg

SEQ ID NO: 390251 - DNA, 1000 bp, Homo Sapiens
tgctgccctaattccccgaggatgattgtcattccatgcagcataatgtgccgtgaggagttttctcattccagttctttggacttcgtaacattggaattgtttttccataatttccggcattccataaatatttgtcaaggacaaagaaaaggaatgtggatgtttattcttttcatatgaatgactttgtacacatgacttcctgctttcattatgaaggaggggaaactagttcccttgtatggtaactccaaagttaaaaaattgtgcatgtctgaggggttgaatatattttgtaaaactctaaatacatttgtatttctgtgctgttctaaagtttacctttttacttatatgaaagataactatatatttaaatcatgtaagtggaacacagtgtagggggtttttccaatcttatttttcatcaggttctcacacccacgtagtatgctgctcaaattttttcgtgtgtgcaaatgtgaacatttgaacatttcagttaggtactgagccagaaaaggtaattgaagttttcagaaagcttctgtgcttagaaaatattttgttgttttcttaaaatattagtattttgtagctggaagaataagatcaaggcttacatgtttcaggccacttggtcactggttcctgaatttagaaaacattggattaatgagttggtgaaggcatttagtggttacaaaaacagtttaaatatttatgattaaaggcttttcacaaacctttttaaagaaaatttagctgagaaaacttaaaaagttttctaaggaagtttaactgtggcacatgttttgatcagaaaggtagttctctttgctctggtagttttaaagtttgtactagttctttatttctgttgtttttttaaattgttaaaattataaatcacgtctaatcatactgaattgtaaaacttgaattgtatctttattttaagcataaatgagaataaaatgatcctgttcaccctgcc

SEQ ID NO: 390252 - DNA, 360 bp, Homo Sapiens
ttctttcatggggaagcagatttgggtaccacccaagtattgactcacccatcaacaaccgctatgtatttcgtacattactgccagccaccatgaatattgtacggtaccataaatacttgaccacctgtagtacataaaaacccaatccacatcaaaaccccctccccatgcttacaagcaagtacagcaatcaaccctcaactatcacacatcaactgcaattccaaagccacccctcacccactaggataccaacaaacctacccacccttaacagtacatagtacataaagccatttaccgtacatagcacattacagtcaaatcccttctcgtccccatggatgacccccctca

SEQ ID NO: 390253 - DNA, 1000 bp, Homo Sapiens; identical to SEQ ID NO: 281368

SEQ ID NO: 390254 - DNA, 1000 bp, Homo Sapiens
aaggtgggaagctctgggaatgggtggagggggagaaacagcttaggagccaagggcccttgcaattggtagtgctgccttcaggaattagatgatccaggcccctgtcccttagccagggaaagaactggccatgtctccaagcttgctgcccaggagacaggagagagctgtttttgtctgtgggggtcttgttggctgcaacaggctgggagtgggagggggatgctgctggagggctgtgactccagggtgtaacttaattttacatagttttacaccctggagttccttgagcctctggaagatggacccataggtttggtcaccactgatgggactccctgccccagcttgccataagctcttctctcacgtcctgctcctgggtaaggtggcacctatccaggtctttgacactgaagggcagtgcttccaaattcacttcctctagcctctcatttattcttgcaaaccatagatatggcttgaataaatattgagccagtcattgtgctgctatgaataagacacaattccacccctcaaggatctggtgaggatgggtgggtggggagacccaaaactataaatccatgagcagaaaaatacataaaatgtgctgggggcatctgatctagcttgggagtgggagttgtattgggggtggtggctggggggtggtgtcttatgacattatctctaggctgccacttaaagtatggtttgaagacagggagaacggggcggcggagtgaaagggttgaggacatcccaggcagaagggatagtgtgagcaaggcatgaaggtggcacttgggcaggggcagggagtgggtgggcagggtggaggctggagacacgggcaagggttagctccaagggagcctgcagcaccatgccaagagcctagggcctgtcagggatgagcagcagccgaggggttttaaacactgagcggctcagtcagatagacttttccataggtgcctggcaacag

SEQ ID NO: 390255 - DNA, 618 bp, Homo Sapiens
  misc_feature (416)..(416): n is a, c, g, or t
ttcccaggcagcagggagtgcatgtgagctttcccggtcgttgttagacagaagtagcttgcatcatctacagtgaagcttgttttgtctgttccctttatttcaggttccagtgggatgggagcttatcacggaaaacatagttttgatactttttctcatcagcgtccctgtttattaaaaagtttaaagagagaaggtgctaacaaactcagatatcctcccaacagccagtcaaaggtggattgggggaaattttttctcttgaaacggttcaacaaagaaaaactcggtctcctgttgctcactttcctgggtattgtagccgctgtgcttgtcaaggtagtccctataacccatgagtgccattcagtctggtcctggcctgatggctgccagatgcatattctagcagnactctacattaacttgtagagtctaagacagggtcagtgaaccacagcctgctggccagctacccgtttttgtcactgaagttattggaacacagccacacccacttgtttaatcatccacagctgtttcatgggacagtgacagagctgagtagttgcaacagaggctgaatggccctcagagcctaaattattacagaaa

SEQ ID NO: 390256 - DNA, 1000 bp, Homo Sapiens; identical to SEQ ID NO: 207088

SEQ ID NO: 390257 - DNA, 1000 bp, Homo Sapiens; identical to SEQ ID NO: 206987

SEQ ID NO: 390258 - DNA, 1000 bp, Homo Sapiens; identical to SEQ ID NO: 201572

SEQ ID NO: 390259 - DNA, 1000 bp, Homo Sapiens
tgggaccagagttccaaggcctctgctcaggatgcaggggaccatgtgcagccgcctgagggccgggacttcaccctgaagcccaaaaagaggagagggaagaaaaagctgcaaaaaccagtagagatagcagaggacgctacactagaagaaacgctagtgaaaaagaagaagaagaaagattccaaatgaatccttcccagccggggccttccgaccactcagctgtcagggcactgcgggggcagacacctctggcctgaagtcacagcagagttcaccccagagcgcctgggcgcatcttgtggcatgcccatgggctgccgagtcctgccctctcgccacatttcccccaagttacattcccaggaggacctttttaatgttctcaatcgtggctctcagacacaaataaattctcgtgccgaattcggcacgagctcgctctcattcctgatgtggacatcgactccgacggcgtcttcaagtatgtgttgatccgagtccactcggctccccgctccggggctccggctgcagagagcaaggagatcgtgcgcggctacaagtgggctgagtaccatgcggacatctacgacaaagtgtcgggcgacatgcagaagcaaggctgcgactgtgagtgtctgggcggcgggcgcatctcccaccagagtcaggacaagaagattcacgtgtacggctattccatggcctatggtcctgcccagcacgccatttcaactgagaaaatcaaagccaagtaccccgactacgaggtcacctgggctaacgacggctactgagcactcccagcccggggcctgctgcctccagcagccacttcagagcccccgcctttgcctgcactcctcttgcagggctggccctgcctgctcctgcggcagcctctggtgacgtgctgtccaccaggccttggagacaggctagcctggccacagaattaaacgtgttgccacaccaaaaaaaaaaaaaaaaaaaa

SEQ ID NO: 390260 - DNA, 1000 bp, Homo Sapiens
taccagactgtttataatatggctgctttctccttcacctagctggagccaagaggggtgggggaagactgagagagacagagacagggagagagagagagcctgcctaactgcctatttatcccaaatccatatattattttggaacattcagtattgcagaaatacatggagggataaatcatttcttctgccatctggtctcggagaaccttcccaagaactgtagcttcgtttaattttgctgcgttcctttcccaccctctttgtgctttccatcatcttttcttggctgtatttttgggtttgttttgcttcagtttcttgctcttttagctgtttctggatttcaatttttaaaaagaaataacggatcgcacttatccaagtcgtgccagattctttatttgggataatgctacctcatggctattttttaactttaatccggaaccttggagtgacgtgtggatttttttttaatgccccaaccagatgcactaagcagcttgatggtcagtaatgaggcagcaccaggaccctgtggtcctagagtttcttggcagtgccttcatggcaaatgtttcagtgagatgagcgtggcagacccagcccagccattgctctatggttccaaagtccttttaaatgaacaaatgggttggcattcatctagtgggactgcaactccagtgaggttactcaaaacatactgggcaaaggtttctcactgtttgagtgggaggttacaagggaagaagtctagagcgatccatggcatgatggatgggggttggcatcagaatgaatcatgtttagcttaattgggacacagatggttaagtatagaaatagctacagacatacatacatccctgggttactgtacacatagatcttcttgttccgtcagtttagaggtcctggaagccacaaccccccagcagcaatgagcatgcctactacccagatctcagtttctaataccattctccaaaaa

SEQ ID NO: 390261 - DNA, 1000 bp, Homo Sapiens; identical to SEQ ID NO: 281374

SEQ ID NO: 390262 - DNA, 1000 bp, Homo Sapiens; identical to SEQ ID NO: 206990

SEQ ID NO: 390263 - DNA, 1000 bp, Homo Sapiens; identical to SEQ ID NO: 281375

SEQ ID NO: 390264 - DNA, 1000 bp, Homo Sapiens; identical to SEQ ID NO: 281376

SEQ ID NO: 390265 - DNA, 1000 bp, Homo Sapiens
cctaattccagcctttggggcttcgggcaccgtgggcggggcagccggctcaagtttctccggctagacgcggaagcacgccccgccctaaccgtcacccgcgcgaccgttggctctcgcagcgcgcggagaggggcgtggccgagcgtggattggcttctcgggttctctaggggcgtggccaggtggtttctccttaaaatggctccaagtctgcaggcagccagagcaagcggaagggcaagctgtgatagtgtttgggtggctgttcggctggcccagaccaggccgaaccggaccagacttgagtagaagcgcgtggagcatcaccttgtcctcgttcactctgctcgcgtcctgggagtcccccgtcccccgtcttgatccaagtcaagggcctactggcgcgagagtcgctggccccgacgcggggtttgggcatctgcgcacgccggctctgtcgtggcctcaggggaacattgtgctttgcctaccgcggggccgggcgagcgggaagctcggcacagtgggagcctggtggtgggtctcctggggccggtcgcaatgggtttccgggggtccgcggctgctctgtggacccttcggcccctggtgctccgggcgctggcagcgtcaccggacaaaggccaccgagcgcgggggtgtccccgaggtggacgcgcgggtttacttcctctccgcgcccacgggcgcgcttccctcctgacggattccgaagcccgccccaccaccgtcaccgcaccagtggcccaggcttcgtgggaccaacagggctaatcctgccccacggatctaatccggatcgggacccggtcccaggggaggcccccacctccccttctattgttctgtggcccaggtgagcgtcttgttccctctagactccgtttcacaacctactcccgggtcttcctcctgggactggggatgggcgggttctgatgtggccccagggcgagtgacctgggggcaggagctc

SEQ ID NO: 390266 - DNA, 1000 bp, Homo Sapiens
gcacctgtcctctggcatctctctctcctgccatgctgactggctcttgctctctacaggataacctggtggctctgtgccattccctacagtattctcatcttcgtctatgatgaaatcagaaaactcctcatccgtcagcacccggatggtgaggctcccctgggccccgctctgactgagtggtcaccagccccctcactagctctcccatcccacctagtccctccagacccaccactgactttctcccctcctcgctgccagccttgactgcgcctggagccgagacctctctaccccttggctgcacccctctgctccatctgaccctcagtgccctgtgttccagacctcccacctccaaccttgtccctgctttcccttctgcctgtctcccctggatgcctctaattccttctcccagttcacgctggcctcttctcttccacaggctgggtggaaagggagacgtactactaaactcagcagatgaagagcttcatgtgacacaggggtgttgtgagagctgggatggggccagagattataagtttgacacaacatctgagacactaggatgaattatcttggatgagaaagatgggcaatcctgggctggcttgagggaatcatgggcagaggatgaggtgggctgaagggaagcccagcctgcatctagctggagccccgcagggaggggcatggtcctgctgaatcccgtagccagtctagacagtaaatgtctggaaaagccctcaccagctggatgtgtcaaatctgatcttgggggagtggggattactgtgaagctccctccacaggtcttcatgatgaccaggctggggaagtgttttaaggaccagagtcaaggctgggataggatcagtatcaagcatccttgccctttaaagtcactctccgagccactggacagcaaggacagggcaaatgactgcctcaaaattccagctgagatcagagaaatggaaggtggggg

SEQ ID NO: 390267 - DNA, 1000 bp, Homo Sapiens
ttccctgactctcttccccacccttttttgaagaaaagcaaataactctctctgcgtattcttccatactatttgatcatattgctcctaaagttctttctcactggtttatggttaagacttatttgtcattctttcagctactacttactaattggatgatcttgagccattcacttggattctctgaaccttgtttttttttaatctatgaaagagagataatagctaggtatgttcaagtacctagcacagagcccggcacatagatgacacttaaaaataatggtggcatttgagtttgaattcccagcaaaaaaaaaaacaaataagtttcagaaatgagtgatattttacaagaagaatgttaaagtcacattaggagaaaaaaaactgcataagtgtgactctcaacttgaaggaaataaagaagtgtaacataatgaaaccagaatcaaatgcaatagttttttttttttttaataatagagatgaggtctcgctttgttgcccaggctggtcttgaactgggctcaagcaatcctcccacgttggcttcccaaagtgctgggattacaggaatgagccactgcacccagccaaatgcaataatcttaatttcaatgtgtttctttttctggcattcttatcactacttgtaactgttatataaatgggtaataataaacttgtgttaagtactaattgcttaataatatttgacatatgtgttgttcacaatttcaagcagcttacaacctagaaaaagtaatcacaacaataataaagctagcgcttactgaacacttactatgtaataagtattcaactcatagtaattcaggattcattacaattttttttttttttttgagacagagtctcgctctgttgcccaggctggagtgcggcgatgcgatctcggctcactgcaagctctgcctccagggttcacgccattctcctgcctcagcctcccgagtagctgggaatacagctg

SEQ ID NO: 390268 - DNA, 949 bp, Homo Sapiens
gccaaagacaccttcaagaatgatgtggtgggtgacagtaagaaaggggagtaaggaggagggagaccaataacagaaggttttaggctaagagtgggatgaggaaagccaaaagttttggaaatgatcctgcactatcctctcatagcaagctctggtaattcgaggaggagagaagatgcaaattaatgtacaagaggtggtgttgggagacctggtggaaatcaagggtggagaccgagtccctgctgacctccggcttatctctgcacaaggatgtaaggtgaggggatgccgaaagctatgtgagggacccaagcgtgatctcatggcagggtagacacctgggccgttagagaaagtataagcttattactcagaatcttgagaagttacaagtgcagatttgatgttagagacaacagatgtgtaaatttgtttctctcagtctgtcagtgatgatgttggtgaccagatgaagacatactatttttgtaaataaatctgccttttttcctatgctcaccttacaacgcgtcccctctcccatcccaggtggacaactcatccttgactggggagtcagaaccccagagccgctcccctgacttcacccatgagaaccctctggagacccgaaacatctgcttcttttccaccaactgtgtggaaggtgaatatcgaaccataagtagcatagattcaaaagcaggcaccaaaacataaagattttaataactgtcttctaaaggtagcgaggtaggtaagagccagtaaaaagtcgagcttctccatcacgagctgtatgacctctggtgaaaggtcaaggtcatcatttccacattcgcacagtgatgacagtaaaagtcgttactctgtagattttcgtgtgaattgagataatatatgtaaaatgcccagcacaagacctaatacattgtaagtgacc

SEQ ID NO: 390269 - DNA, 1000 bp, Homo Sapiens; identical to SEQ ID NO: 281378

SEQ ID NO: 390270 - DNA, 1000 bp, Homo Sapiens
aatcgcgctcccgggccggggcggcagaaatgagtcggcgggcgcggagccctgactcaccgcggctccgagcgcccgccccgcccccgccgtgtctcagaccgagtcgcggcacccacggactcaagactccaaaaccaaccgagcaaacgaaactgccgagttcgcttgggggaggtgcgggcagggccggcccgggcggggtctgccccgggcccgcgcccgcgttgacgcgcgtttggttccccaccttccccccgcagcctcagccccggaagccgagcgagcggccggcgcgctcatcgccggggagcccgccaggtggaccggcccgcgctccgcccccagcgagccggggacccacccaccaccccccgcaccgccgacgccgcctcgttcgtccggcccagcctgaccaatgccgcggtggaaacgggcttggagctggccccataagggctggcggcttcctccgacgccgcccctccccacagcttctcgactgcagtggggcggggggcaccaacacttggagatttttccggaggggagaggattttctaagggcacagagaatccattttctacacattaacttgagctgctggagggacactgctggcaaacggagacctatttttgtacaaagaacccttgacctggggcgtaataaagatgacctggacccctgcccccactatctggagttttccatgctggccaagatctggacacgagcagtccctgaggggcggggtccctggcgtgaggcccccgtgacagcccaccctggggtgggtttgtgggcactgctgctctgctagggagaagcctgtgtggggcacacctcttcaagggagcgtgaactttataaataaatcagttctgtttaccagtggctcctatcacctacacttcccaggtgacggccagacttccgtggtcactactcctcaaaccctgctgcctcctccgtagggtgggtctgggtgagatctgg

SEQ ID NO: 390271 - DNA, 1000 bp, Homo Sapiens
gtaagtctgattggaatggggcagcggcagggtgggtttgtgtccctcctgtttgaggaggcactgcatcctctggggcctcagtttgcccatctgtgcagtgaggacgctgggccagctgccaggcctgctggaacacatctcagttctgggagcagggcttggtggctgggggaggggagagatgcaagggctgacgtggtcagggagggcctctgctgacccgctcctgcctgtctcccctagtgtcctctatacctgtgtccgatgctggaggccctcgaggaaggggggccgccgctgaccctgggcctggagggggagcaccagcggtccaacgccgccttggccttgcagctggcccactgctggctgcagcggcaggaccgccatggtgagtgggcagctgagtgggcaggcaggtgggtggcacctgtggagcctgcctaggagggtcccggacacacttggtctcacacaccccgcaggtgctggggagccaaaggcatccaggccagggctcctgtggcagctgcccctggcacctgtgttccagcccacatcccacatgcggctcggtgagttagaccttcctgcccagctgggaccactgcgtgtgtctgtgccccttcagatttttttttttttttttttggttttctgtttgggagataagagacaatttgaagtggtgcttaagagaaaggactctgatgtcagcaaacctccctgaccttgagctcatgaactctttctgagcctgtcttctcatctgccaaagtagatgatgataggagccactgccacgggctgtggtggggattcgctgaggtgacatcactaaggtgctgagtgcagagcctggccaatgtgggataaagtgccagccagtggtagctgctgtcactgtcactatcatcatcatcagaccctgaggttctggaggatggtgatccagtcatctgcttcttgcctcccccaaagctttcagcacccagca

SEQ ID NO: 390272 - DNA, 1000 bp, Homo Sapiens; identical to SEQ ID NO: 281379

SEQ ID NO: 390273 - DNA, 1000 bp, Homo Sapiens; identical to SEQ ID NO: 281380

SEQ ID NO: 390274 - DNA, 1000 bp, Homo Sapiens
agcatttattatttctcaaagacaaccttttatttaatgcagattagagagttaaaagaatttataatggtaggaatttgacatttctgcctttcattctgaaaagatacattgattaaagtgatgtcaaactcagttaatggaggcggtgcagttatttgaaatatacagggtatataatttgaaggcacgccaaatcacaatgacaaggaataatgatgaccttggtttatttttatacagtacattcaggttttgattggattcagagagaggcaatggttttctttctcacaaagtcctgctatagtcctaggaggtttgtgttctgttatcaaggcagttggttcgtattggaatattttctggggaaggtcatgggctgcagtgtgggaaataaacgtttttattaaatgcaaccaggtttcatgaaaatatttccccttgtagagtgtgctcaatgcagtatactgatcttcaaaaaacaaacaaaccaagcaaataaatagtttgtagtcttcaccttttccctacgtaaaacatctattagttagacttccttggggtttcatgctataaaatattgacatatgtttggagttctgaagtttcattttaatacagatatcaaagttaaaatggcaacaccatgggataatttattattttaccaagtttggagggttttttctatttatgtcacttatagaattgtccctaaaatccttgcaaaatttcaagctccctctacttaatactaaaagtgaatgtgtcttccagagattctgataaccccttcgaatgggagagtaactctgctatttgtgaatcactcctatactaaatatagttccaagattaaaagctaaaatgattttgtttattttttcatgaaattttttcatgaaaggcttgatagtataaaaagtctgtttccctcatatattacagcatattatagcattcaatgtgccttcttaaaccagatggctcctctaga

SEQ ID NO: 390275 - DNA, 1000 bp, Homo Sapiens
tcccctgtcccgcggcgggttcccctgtctccggcctgcgctcacccctgaggctccaccgacccgcggggcgccgagactctgtcgggccgcgaggggctggctttttttttgagccgccgccttgccctccccacccgcgccccggcctcactgctcttcttctgcgctgtaaaccaaaaataaaattctaagccccccagccagccattggaggcctcctctcggccaagggcgtcctagagggaacctgaaccgcgagttcgggctctgatgggaaaggccgggtgggacccgcctcactagaccctcctcctccctttggaattcggaccagcattaacgtcaaaacagacttaagactgtctaggcggactctccgtagcaataggataccgacatgacagatggcaggccctgaaagatatcgaagtattttacagtattttaatttaatttaatttttaattaattaaatttttttgagatggagttttgctctgtcgcaggctggagtgtagtgggcgcgacctcggctcactgcaaccttcacctccaagattcaagcgattctcctgcctcagcctccctagtagctgcgattacaggcgcccgccaccaagcccagctaatttttgtatttttagtagagacggggtttcaccgtatttgccaggctggtctctcactcctgacctcaagggatccgcccacctcagcctcccaaagtggcgggattacaggtgtgagtcactgcccccggcccagaaaatctttgaatccacctatgacctggaagccccaccccaccttcgagttgtcccacctttccggaaccaatgttacatcttacatgtattgatttatggcttatgtctccctaaaacgtacgaaaccaaaagctgtagcaccaccagtttgagcacgtgttctcaggatctcctgggactatgacatgaataaatatcttcaaatcttttacagtttgactccaagcata

SEQ ID NO: 390276 - DNA, 1000 bp, Homo Sapiens
  misc_feature (823)..(823): n is a, c, g, or t
  misc_feature (825)..(825): n is a, c, g, or t
  misc_feature (866)..(866): n is a, c, g, or t
  misc_feature (953)..(953): n is a, c, g, or t
aaagtctctgcttagcctaacagtgacgtgcttgtcacaaagccagaggccggtgtactcgggttagagagggcctttgtcgttgggttttattcttattgtattattcgggctccaccgacccaaatattagtcaactgggttgggcgaggtaggacggatgaagcccaccgtctaacaatctggacatctataggagcagatccgccgctcgaaacaggtgacccagcgacgactgcggaaccactagcagcgtctgcacagatcgaccccgccatcccgccgtcccgctcggtgaccggagacacagccgggaacgcgactgatcaggctaccgagccgggccgcagggcgaagcggtgcggtccgaggcctcagaaagggacacgcagcagcggaagtggcgctgactcagcccggcctccctgcagtcccctggcagcggtagcagccacaggggcgggcggctgggccacacgcctccccctccctcgccccacccggccgcaccctaagccgcggcgtcacagagcgcatcgtgccgcgggggatgccgggagcgcgcagtggcggcagcggcggcgacggcagtaacagcggcagctacagcggggacgcgagcggggcggtgacggtgtgggaggtggtctcactcttgggaaaactgctgggcaccgtcgtcgcgctgaaggtggttctgtacctgctccgagtgtgcttagcgatggcctggaaatccggcggcgccagccactcggagctaatccacaatctccgcagtaagtgccacctccaacccgttgtaagggagctgggcaggctngnctgacgggtcccctggccagtccggaacgtatctatctgtncccgcgcgcctgttggagggttcggcgcagagttgccccggtagtcccggaacggcgtgcgcttgcagtcgccgccctcgggacctntcactcgtcgacgacgtggactggaagggagaggaagagccagggcc

SEQ ID NO: 390277 - DNA, 1000 bp, Homo Sapiens
tggggtataggagaagaatgacagcttcctgagaggtttcacccaagttccaagtgagaagcaggtgtagtccctggcattctgtctgtatccaaaccagagcccagccatccctccggtatcggggtgggtcagaaaaagtctcacctcaatttgccgacagtgtcacctgcttgccttaggaatggtcatccttaacctgcgtgccagatttagactcgtctttaggcaaaacctacagcgccccccccctcaccccagacctacagaatcagagtcttcaagggatggggccagggaatctgcatttctaacgcgctccctgggcaacgcttcagatgcgttgaagttggggaccacggtgcctgggccaggtcagcagagctgcctcgtaaatgctggggtatcgtcatgtggagatggggaggtgaatgcaacccccacagcaggccaaaaccttggcctccatcgccacagctgtctacatctagggccccaaaactccattcctgagccatgtgaactcatagacaccttcagggtgtggggtacagcctccttcccatcttatcccagaaggcctctcccttcttgtccagcccttcatgctacacctggctggcctctcacccctatttctagagcctcagaggacccatccaccattcattcattcattcattcattcattcattcattcattcatcaacataaatcataacttgcatgcatgtgccaggcacaggggataccctctagagacaatctcctcctagggctcatggcctagtggaggagacagattaaaacttaattagaaaaactggctgggtacagtggctcatgcttgtaatcccagcactttgggaggctgaggcgggtggatcacctgaggtcaggagttcaagaccagcctggccaaaatggtaaaacctgtctctactaaaaatacaaaaatgagctgggcgtggtggtgcatgcctgtaatcccagctatcag

SEQ ID NO: 390278 - DNA, 1000 bp, Homo Sapiens; identical to SEQ ID NO: 281386

SEQ ID NO: 390279 - DNA, 1000 bp, Homo Sapiens
  misc_feature (802)..(802): n is a, c, g, or t
  misc_feature (868)..(868): n is a, c, g, or t
tgcgactgtcagagttctgtggatccatttgtcagtctccccacccccaaccttgactatcctgggcctgccttcaggacagaacatgggaatgagaagaggacctgggaaggggtaatcctgggaaaaaaaagttcttattagtcacccctggctctgaggatactttccaggagtggcctgccaagccgtgtgaccttggacaagtcccgtccattcctcaggcctcagtttcctttgagggaccctgaatgggcgggggttgctgtagctttcctcagctgggagacccgggaggaggtccggggtgccagggtgggaggagggcctggcttgtcgctgaaagccggccagcgactgtcggcgctcagagctggtggcgcctcctgcgcttcctgattcccagcgcgctcgctcggagagcagtgcccgctatctcctggcccgggaccggcagaggggtgcggcggggcgggcccaggggtctctggcggccggaagaaccgggaccctgccaggcccctcccgcgggcagggcggcccctcgccggctcctcccccaccgcccgccaccagcccgggatcagtctccgcacgcggttccgcaggtggcagcgatggcccagtcctgaactccccgccatggccggcgcccccggcccgctgcgccttgccgtgctgctgctcgggatggtgggcagggccggcccccgcccccaggtgagatccagggaccccgacgacaccgggggaggcgggtggctactgcgggctgcagggcgcagtgtcctggtggagggcnccgggacttgaacgaaactccgagacgctggcgggggcatccgaaagcctcggggggagtagggantggagacttggtgccctgggctggaaggcccaggtgagggcttggactacagaggattccccccaaccccacggaggcgccctcttcctcgccacccgggtccctctgcccgggcaccgctgccgccggccg

SEQ ID NO: 390280 - DNA, 1000 bp, Homo Sapiens
agttactgcagacagcatcagcctctaacattctaattaaaatttgaagataaagggatgctataactggtatttaattttatttctaaaaagaataagtcacatgtttgggcaactgtaatatattcacatgcaagttagtgatactatatgattctttgtttgcctctgacaatttgtagatgcaaacttggggttggtgtgtcttaaattttctgaagtttttagcattgtcaaatataatgaatggtacagttagtatcgacagaaaatgttagatagattataatacattataaaattaaatgtgcccgatgttttaataaatgccggttttacaagttacaagttatctaatgatctgtcatgtttttgctatccagacagttacagacaaagggataattaactacatataacccatttgcggaagtaatttctgttttaattaaagtaatgcaattagctggccttcttgcatcaagatacatttggcatattttagagtttaatttttagcattgaatttaaaaaacgctaattgtgccagttaaacggtggcattatgcagtgtaaagaagattaagcagcatcagttgtttgtgtttgtaatctttcctctgcaggaccaaagaatgagttgttcctcttttatgggaaaggacgcccaggaattgttagaggaatggacttgaataccaagatagctgatgaatacatgatccccatagaaaatctggtaaaccctcgtgctttagactttcacgcagaaaccaattacatctactttgctgacaccaccagtttcctaattggccggcagaagatagatggcacagagagagaaaccatcctgaaagatggtaagtgacactgtgacattaacatcaaactacccagagatgaagcactttaaaaggataaatccagtgtgtgtcagactagctttaaccagaactcaagttcttctggttggttcaaaaataccagcccgggccgt

SEQ ID NO: 390281 - DNA, 1000 bp, Homo Sapiens
  misc_feature (730)..(730): n is a, c, g, or t
actttcagaaattttaggggaggcaagaaacatcattttatcggactattaatgttatttaaatgaattagaaaatactagagtatatttatacttattaaccatctaaagtaaaaatgtattctctctagcattataataatgcctgaagaaagaaaaaaatgtgaaataaaaactaccaacaagtaaaatcataatttctctcctgtcttgcccccctccgcttctctcttcctcatttcaaattaagagattcattctcctgctggttgtaacggaaatgaatttcagtgccaccctgatggtaattgcgttcctgatttgtggcgctgtgatggagaaaaagactgtgaagatggtagtgatgaaaaaggttgcaatggtaccatacgattgtgtgaccacaaaaccaagttttcctgttggagtacaggtaagtgaacattgcttttggcttctattgggtctccctgagtgtggagtccttttggctcaggctgaatctgtatctcacctttgtaaaaagtaatcttatatttttggcagatgtgctcatgtataataatagtagttaacatttagggagaactatcaatggggctagcataattctatgaatgttctccgcattggattcatgaggcaaggagaagtttttaacttgcttacgctcacagagccaacatgtcagacttaggatttaatttaattaattaattaatttatttgnttatttatttctgagatttgggatttttaaaccaggcaatctggaatacagaatctggaaattcagaatcgagagagataagcatgccaaaccagctggcagcatttctctttccgtagataaggcctccaccctaaaatttaaatgaagatgacttagaaaagaaagatagaattatatgtatttattttcaactaatttcctaaatgttactggactattgcttatttctattatgaggaggatgctgactgccatttaaagctttga

SEQ ID NO: 390282 - DNA, 313 bp, Homo Sapiens
gcttttcttgcttaatgctaaagagatatccaaaagtaaaagacagtgacaatgatatgaattgattatgctcatttttcttttcccagtgcaaatgctggcctggattccaactgaaggatgacggcaaaacatgtgtagacattgatgaatgctcttcaggctttccctgtagccagcaatgcatcaatacatacgggacttacaagtgcctctgtacagatgggtatgaaatacaacctgataacccaaatggctgcaaatcgctctcaggtatcgaattgaacttgcccactgatccaacctcagttat

SEQ ID NO: 390283 - DNA, 954 bp, Homo Sapiens
  misc_feature (314)..(314): n is a, c, g, or t
  misc_feature (453)..(453): n is a, c, g, or t
cggccgggctggatctcttcctgaattcctgaagcttttagccctatttagtgtttgccaaatttttcctgtaaagggccagatagtaaatattgtaggcttttcaggccacagggtctctgtagcaactactcatctctgctgctgagtgtacaagtagccctttagggctggggccgtgatttatttacacctgtaatccagcactttgggtggcctaggtgggaggatcacttgagcccaggagtttgagatcagccttggcaacatggtgaaacctcatctttacaaaaaatataaaaattttctgggcnaggtggcatgtacctatagtcccagctactctggaggctgaggtgggagaatctcttgagcccaagaagttgaggttccagatagctgagatcacatcactgccttccagcctgggcgacagagcgagaccctatctcnaccaacaagccaactaaccaaccacaaaaaccaagtagctctgcagaaaacatgtaaatgtgagagattgtctgtgtttgcaggtcatctcaagaggttttcctgagcagtatcctctcctggaagatcacgttgtggctttttgtgtatttagttcctattgtggaattttccaaaatcaccattgttcacatctgcagcaaaaaagtagactaggctgtgttgccaaattttaaattatccattatatatgcactgggttcttcaacatttttttttctttttttcttttttaagtttcgttgcaaaactgacaaatgtattccattctggtggaaatgtgacaccgtggatgactgtggtgatggatctgatgaacctgatgactgtcgtgagtatactggcaaatattgaaatttagaatttagagttccttatatcccagacctggaaaattgaatctacacctaaagtattgccttctgacacttttccaaaatt

SEQ ID NO: 390284 - DNA, 1000 bp, Homo Sapiens; identical to SEQ ID NO: 114757

SEQ ID NO: 390285 - DNA, 662 bp, Homo Sapiens
tcagtctgaggggaaggcatggccctgaccttagagaccccaatttggcgatgggcatcacatccctccgggcatctcagagctgcctgcccgagggaggcgaagcagatggaaagccccccagccacgtctctcagtcagaggaaacgggtctcctcttcggccagccgggtcctcttcccccgggtgccgcctggctgtgcgacccggcagtcctcccgcctctccgggcctcagcctcctctcctggacagtcccgtgggcttccgggagcccggtgtcacaccgccccgcgtgtcgcaggtggtcatcgtggtgacagacgggaggccccaggacagcgtgcaggacgtgtctgcgcgggcccgggccagcggcgtcgagctgttcgccatcggagtgggcagcgtggacaaggccacgctgcggcagatcgccagcgagccgcaggacgaacacgtcgattacgtggagagctacagcgtcatcgagaagctgtccaggaagttccaggaggccttctgcggtgcgcgggcaggcgggggcggagccagggcaggggcggagaaggggagagcggcggggcggggccagggctggaggcgggaccgaggctgaggcgcagacggagccagctccggcgcagggcaggggcggggccg

SEQ ID NO: 390286 - DNA, 1000 bp, Homo Sapiens
cgcagtggctcacgcctgtaatcccagcactttgggatgccgatgcgggtggatcacctgatgccaggagttcaagaccagcctggccaccatggtgaaaccctgtctctactaaaaataaaaaattagctgggcgcggtggagtatgcttataatcctagctacccgggaggctgaagcaggagaattgcttggacccaggaggcggaggctgcaatcagctgagatcaagccaatacaatccagcctgagcagcaagagtgaaaatttggtttcaaaaaaaaaaaaaaaaaaaaaaaaaaaaaaaaaaaaattagcctgaggtgggaagatggcttgaggccgggaggcagagaatgcagtgaactaagatggcagcaccactgcactccagcctgggccatagagccagaccttgtctcaaaacaagtaagtgtaaaaataaagagaaaataattcaaaatggaaagctgaaggacaaaagggcaagggcattgcctcatgaataggaggaagtgatacgtgtgaaacttggtgagattattgacaatctcacatttgaacacgggagtcatcagaaggactttgccttgctcttccttgccatacttcacccttgccttggtgttttctggagggtcctgatgtttcttcctctgcccaatacaaaggggagtctagtgattcaagaacttaagagcacagagaggtgaacagtaactcgtagcagaggcactcaggaatcctgtgcacacacagatgaacatcatgggttacaaatgaagtcttttggtcaaaattaactttatttttcaacttcatagggatgtgataacaaaattggcacacacaaaaagaatactgatattgggcctgatttaaaaaatgcctctggccaggttgtaaaaaagtgaaagtaacaaagataaacatagaagttggagttgtaaaaaagtgagttggaattcatgctgccatgatccctttagtgagggttaat

SEQ ID NO: 390287 - DNA, 1000 bp, Homo Sapiens; identical to SEQ ID NO: 281391

SEQ ID NO: 390288 - DNA, 1000 bp, Homo Sapiens; identical to SEQ ID NO: 207060

SEQ ID NO: 390289 - DNA, 1000 bp, Homo Sapiens
caaggatagttcaaaatatgcagatcaaccagtgagatacaccatatcaacagaatgaaagataaaatccatataatcatctcaatggatgctaaaaagggtagtggccagccccacagggtctgtgcgtttttctccacatgtgcagagatgagagatcatagaaataaagacacaagacaaagagataaaagaaaagacaactgggcccgggggaccactaccaccaagatgccgagaccagtagtggccccgaatgcctggctgcactgttatttattggatacaaggcaaaaggggcagggtaaagagtgtgagtcatctccaatgattgataaggtcacgtgagtcacgtgtccaccagacagggggcccttccctgtttggcagccaaggcagagagagtacagcttatgccattatttattctatgctcttttcagaaagatcaaagactttaatactttcactaattttgctactgctatctagagggcagagccaggtgcccagagtagaatatgaaagtgaaacaggagcatgaccgctgaagcacagcatcacagggagatggttaggcctccagataactgcgggtgggcctgactgatgtcaggccctccacaagagtggtggagcagagtcttctctaaactcccctggggaaagggagactccctttcctggtctgctaagtagcaggtgcttttccttggcattgatgctaccgctagaccatgtccacttggtaatgggcatcttcccagatgctggcattactgctagaccaaggaaccatctagtggccctgtctgggcatgacagagggctcacactctcgtcttctggtcacttctcaccatgccccttcagctcctatctctgtatggcctggtttttcctgggttatgattgtagagtgaagattattataatattggaataaagagtaattgctacaaattaatgattaatgatattcatatataatcatatctat

SEQ ID NO: 390290 - DNA, 1000 bp, Homo Sapiens; identical to SEQ ID NO: 281392

SEQ ID NO: 390291 - DNA, 1000 bp, Homo Sapiens
tgtatatatatatatacctatatagatacatagatatataactacaacttgcgataggtgatataaaagaataacaaatgcatagggagaaaaatacttttggggcatttgaatacacgaagaggacagagaaagatttgcccaatattgggaacttaaggttgagacataaaagttcaaagaattcacttatgggaaggaagaaaaaccttccaggcagaggggacagtgcacgtgaaggtaccaggatagcaaagagtaagctcacacggaacagaagggaagccggcgagagtttcatggacagagtgagggccacagtggaaaagcatgagtctgaaaaagtggcccaagatcagatcacgattgctttggagaccaagtaaggggcttggagagatttaataaagaaaacaatagtaaacttgtagggattttgaaaataagtgtgacatggaatgatgtacattttcaaataaaatccatgctggttgggaatcagaaggtcaaatcaatcatctaggaaagtggaggaggatgggggtccaggaaaacctctaccaccatgcactagcattctctatccccctccgaaaacaccttctaccaaagccttgccttttggtgccagtaagcaatgaatgacagtgccatatcctgttatctagtgagaagcgaatttgaattggacagaatatgtggttatgggactgcccgttgccggaagaaatgtcgcagccaagaatacagaattggaagatgtcccaacacctatgcatgctgtttgagaaaatgggatgagagcttactgaatcgtacaaaaccctgaaacgcagtagtgctggtccctagagtcgctggaagtaggacctcagtagctttccttcctgcggcctagcagcaaggacatccccattgcaaccacgggttcagttatcaaagaaggtttgctgagcttccactcaatgcaaagccaatacaggagattgaagaagaatac

SEQ ID NO: 390292 - DNA, 1000 bp, Homo Sapiens; identical to SEQ ID NO: 281397

SEQ ID NO: 390293 - DNA, 1000 bp, Homo Sapiens
ttcaccagttgctaattgttttccctctcttataaaaatataaaagagagtatcattatgggcttctatatttgttattaccattattctttatgatacttaacgttttcccaaatgtggtcggtgggagcctcttcaagctgtctcctgtggctttttgacatgtcttcctcagcataagagcacttttggaacttaagatatttgtggcacaataatgtatttccttgtcccctatctgaaatcagctatttatccaaggagtcccacttttagtggggaatgatatttagaaaccaaatctggacactagatgagctactggagtgtcactacttttaggttctttttaatagatagtgttaggaaatatatgtgtatgtttcttatatcataaaatcatactgatagtctagtctcaacgcaacaccataggaatcttcctcctttccacatttgtatcttcctttcctgtagggagaaccctagttcccagcaactttaatatatttacttatttgttttattctacaataaatataagatagttttagaattacattagtatttctaccaataacaaacctgctaaataaaattgaagatttctttggatttgtttttgtccttagcctatgacccactatgtactgtgttcaaaaattacctgaattattttttctgtaatttcttatataattagatttgtttctatttgtattcaactttaggactttatttttctacctttgttgattaaacttatttttaaatatgtaaagcattaacataggtcaaaagttaaaactcttcaaaaagttatactcaaggtataggaagtgaataaggatatattctcattgtctttcctgtctcttccatcccattttcacccatccccatagtaacacatttcaggtttatttttttctattcctttttaccaaaatgaacatacacacacattcttattctccattcttccttacaaaaaagaagg

SEQ ID NO: 390294 - DNA, 1000 bp, Homo Sapiens
agcaaagagtgaacagtggttgtgtgatgatggaaaacaagctggaggggattggccagtttcactgccgggtccgagagatgttctctcaattggcagacctggatgatgagctagatggcatgggtgctattggcagagacactgatagcctccagtcccaaatcgaggatgtccggctattccttaacaaaattcacgtcctcaaattagacatagaggcctctgaagcagagtgtcgacatatgctagaagaagaggggactctggatttgttaggtctcaaaagggagctagaagccctgaacaaacagtgtggcaaactgacagagagggggaaagctcgtcaggaacagctggaactgacactaggccgtgtagaggacttctacaggaaattgaaaggactcaatgacgcgaccacagcagcagaggaggcagaggccctccagtgggtagtggggaccgaagtggaaatcatcaaccaacaattagcagattttaaagtaagtctgaaccttgtttttctttttcttttacatgtatttatttgcttgtaacttggaaaccagtcaagtatacattttaacttctgtccctagttttattattgtcacttccatcaccatgaaagcacactgtctgaagactaaatagtctctcggacttctgagcaaactggtttgagcatttttctttttctttttcttcttcttcttcttttttttttttttttttttttttgagacagggtctctctctctcacccaggctggagtgcagtggtgcgatctcggctcactgcagactcgacctcataggctcaagcgatcctcccacttcagtctcccaaggagctgggaccacaggcgccaccatacccggctaattttttgtattttttgtagagacgaggtttcaccatgtctcccaggctggtctcaaactcctgagctcaggcaatccgcccacctcagcctaccaaagtgttgggattaca

SEQ ID NO: 390295 - DNA, 1000 bp, Homo Sapiens; identical to SEQ ID NO: 281398

SEQ ID NO: 390296 - DNA, 1000 bp, Homo Sapiens; identical to SEQ ID NO: 201617

SEQ ID NO: 390297 - DNA, 1000 bp, Homo Sapiens; identical to SEQ ID NO: 281401

SEQ ID NO: 390298 - DNA, 1000 bp, Homo Sapiens; identical to SEQ ID NO: 201548

SEQ ID NO: 390299 - DNA, 1000 bp, Homo Sapiens
tgagcatccttgtcttgttccagatcttagaggaaaggctttcaacttttccccattcaatatgatgttagctgtgggtttgtcatatatggcttttattattttgagatatagaaccacagctttttttttttgagacagagtctttctctgtcactcaggctggaatgtagtggtgcaatctcagctcactgcaacctctacctcccgggctcaagcaattcacctgcctcagcctccccagtagctgggattacaggtgcctgccaccacacctagctaattttgtgtatgtgtgtatttttagtagagatggggtttcaccatgttggccaggctggtctcaaaatcctgacctcaagtgatccacccgccttgacctcccaaactgctgggattacaggcgtgagccaccgtgcccggccagaaccacaacttttgatagaaggctcaagacagataccctaacctaccctcttttttcacttttttattttattttttaaccttttattatgaacattttcaaacataaacaaaagcagtatactgatcagtagtaaacctctgggcacccattactcagctttacttattcttttttttttttttttttttttttttgagacagcatctcactctgttgccccggctagagtacagtggcgcgatctcggttcactgcaacctccgcctcccgggttcaagcgattctcctgcctcagcctcctgagtagctgggactacagggacatgccaccatgcccggctaatttttgtatttatagtagagatggagtttcaccatattggccaggctggtctcgaactcctgacctcgtgatctgcccacctcagcctaccaaagtgctgggattacaggcgtgagccaccgcacccggctatttacttcttcttttatgaagctccctcctccaaaacacccccatcacctgttccttccagctctctgaccactccttggattctctgtgaattc

SEQ ID NO: 390300 - DNA, 1000 bp, Homo Sapiens
tgggtgaatctctgtgagtaaaaaggaagtgggctgttctccggagggcagggctgcagtggtggcctgggctggacttctggagccttcttaccccatggggccctgttattctacactcagttagcaatttgtggtctgggcagagctaaccgggtgtggacatgcaaatcggacaggtggagagagaacaaaaataaacccgtggggccaggccagaggctgagaggcctggaggaaggtcagggggacacacgatgaccaggcagaaaaaggctgagagagtagggccacagggagagccgaactaggaagctgacctgggacagaagcagggaagaaaagcattgccacagcttgcctgatgcgtcgtcaagagaacacaatttccccttcaagacttgagtcagggtgctttctagaattctaaagattctttctgccccttcaccctgcttggagcaccagggctgtggcagtgggtgacgttcccagccaggtgccagggggcaggcagcaagagcagctgggcaggggagggacgtgcccagggcttgccctttgtggaagccatatctgtttcacaagccctgggcacagggtaaccagagttgtattctgagcagagccttgatgatactaaatgaacagcatgcaaatgatgtgtgaaataatatgcaaattggcatctgttatttttgagtcagcttgttgggcatttttcttaaaggacaggagtgctgctcagtgtcaaatgaacaggaaagtcagcttaaaggacactccttacagggactgagctggcacctactccttagagcttgctgataccaggcctgccacgcgacatctgcaaggacagttgtttggtgttttgcttcaggttatagatggagagacctataaaggtgggtgccctgcccaggttacccagtaggtagggaggaggaagcagatgacctgttgcctggcttgagccattgaaccttgctgacctgtc

SEQ ID NO: 390301 - DNA, 1000 bp, Homo Sapiens
atgaaattgggataacagtacctattttgtgagactgttgaaggattacagttaacacaggtaaaaggcttacaagactacctggcaatgctgtcctgattttacaaattctatacactgtgtggcattagccatcaggaaaatataaataaatcagtgagataccacttcacacacttggggggctataacaaaaaagacagataaaaaatgttgtcaaagatgtgaagaaactaggacccttattcactgctggtggaaatgtaagaagtacaatcatttgaaccatagtctggcagttactccaaagaccacacctagagttgccatatgaaccagcaattccactcctatgcatatatccaggagaaaggaaaatatacgctgcacaaaaacttgtacatgaatgttcattagcaggatttttcatggtagccaaaaggtgtaaacaacccaaatgtccaacaactgatagagatggataaataaaatgtggtttatccatacaatgaaatattatttgtcaataaaaaggagtgaaggagtgaagtactgattcatgtggaacatggatgaaccttgatccaaaatagccaaatcacaggtacaaaaagcatattagtggctgctgggagatttaggcggaaatgtggaataactgctagtgggtattgagattttagagtcatactcatgttacaaaattaatagtgctgatggttgcacaactctgagtacatgaaaaatcaatgaactgatactttgagtgagctgtatgatactggaattacacctcaataaagcatggtaactgttttaagataggctggaaagagaaagtttgaaaacaacaataatgatattaataaattagtttacttctctagtctcatatacttctgtgcccacacttgctcctgttctattcataatggtccccttgcagttgccatattatatcctgccatttgatgcccggtgaacattctatacctgcttc

SEQ ID NO: 390302 - DNA, 1000 bp, Homo Sapiens; identical to SEQ ID NO: 207052

SEQ ID NO: 390303 - DNA, 1000 bp, Homo Sapiens; identical to SEQ ID NO: 207065

SEQ ID NO: 390304 - DNA, 1000 bp, Homo Sapiens; identical to SEQ ID NO: 281405

SEQ ID NO: 390305 - DNA, 1000 bp, Homo Sapiens; identical to SEQ ID NO: 281406

SEQ ID NO: 390306 - DNA, 1000 bp, Homo Sapiens; identical to SEQ ID NO: 281407

SEQ ID NO: 390307 - DNA, 1000 bp, Homo Sapiens; identical to SEQ ID NO: 114759

SEQ ID NO: 390308 - DNA, 1000 bp, Homo Sapiens; identical to SEQ ID NO: 195208

SEQ ID NO: 390309 - DNA, 781 bp, Homo Sapiens
ctgcagagtagaatctcccttctacttttgtgctcctggggacgtcctactcttcttccccagttggctctaaggttatcacatcggtgaagtgtttcattatcactttttagagaaactgagtcattttagagagttagtgactttctgcattcatacctaatactcaagaaatctaactccacaataaccaaaaataaaaggtagaaaaaaacccacaagtgatgagaaaaaaaaaaatcaaaagttataaaaaataaatgaaaaaatgaaattaaaggaaaaaagattttttaaaaaagtaaaaaaaagaaaagaaatctaactccagagctctgacacaaaatgccttaggtgttattctcaatgagagaaaagggacgtgaatctttaagtgattaagtgaatctttaagtaaatctgtcgtactagtgtttcaggcggctcaaacaccacacgctcccgactacggcggaatggagagaatgtgcgcatgctcggcgggaatctgcgcatgctcggcgggaatctgcgcatgctcggagagaatctgcgcatgctcggccggaatctgcgcgagctcggcgggaatctgcgcaagctcggcgggaatctgcgcatgctcagagttccggggcacggtttccccgcccctttcaggcctagcaggaaacgaagcggctctttccgctatctgccgcttgtccaccggaagcgagttgcgacacggcaggttcccgcccggaagaagcgaccaaagcgcctgaggaccggcaacatg

SEQ ID NO: 390310 - DNA, 1000 bp, Homo Sapiens
cacagcctgtctatcagttggcctttcaaacaaatatggtgttccatggaaaagcagatagttgagctcacagctcaaacaatcatgaagtgcctttcctcaggagcctgcatttattcatctaaaatgtaagtttctgcttgtaaaacatgttttaatagctgtgagaaagtcatgacggatgagttgaagcaagacgatactcacaaattatattgccactgtctggtggggaaaaatacaatgagcattagcacagtttagtgccactgcctcaactggtcctaaggcaccaaaaattgcatccaatatcggcagtccaactccttgcacacctgctctctcacagcttctttctcagtctaggccagcatcaccatggtagatgccttcctgtgcacctggaagctctcagacagcaagaattttgatgactacatgaagttaatcggtgcaagttttgctatcaggcaggtggctagcatgacaaagcctaccacaatcatcaaaaagaatggggacattatcaccttaaaaacacagagcatgttcaagaacacagagatcagctttaagctggggatggggttcgatgagacaacagcagatgacaaaaaggtcaagtccattgtgacactggatggaagcaaactttttcacctgcagaagtgtaacgggcaagagaggacacttgtgccagagctaagtgatgggaaactcatcctgacactcacccagggcactgcggtttacactcgcacttatgagaaagaggtatcgtctgcctgcgctgtcactgactgttcctctgttaccctttgactcagcaccacattgcctcatttatttcccctgcattttgtataaatccaccttgttgaagaattcttctgaggtcatgtgcctcagaagacttcagatcaataggtcccaagacgttacattttccaatgaagtaacaacagacgacatattgtgatccgttgacctgcaggtcgac

SEQ ID NO: 390311 - DNA, 1000 bp, Homo Sapiens
gacgcgtcccaaaccccaggctttcaccccaacctccactccccgctcatttttaatacccgtgcagtggggaattgatactgtggttttcaatgtcacccacactgcagcacggccacagtcaccatcccgatttttgctacaaatgaaaattactgtataatgagctccttaacacttttctttaaacctgtgtttggaagacttgtgttggtgtggccctgtgccctaatacctgtgaaatcacagcaccgatgagctggttccaatttttaaaatatatacatgcagtacttccatgactattcaaagaaaaacaattccttccatttgccacctgagatgaccaccagggatgtgaactacctcctgccccatccccagccccaggatcctgggacagggcttatgaacgcaaccactgtagtcagctcacttgatccacagcctggcacctccactgtctggctagggagcctcgaatgggtcccaaggccaccctgctcctcagttacatcatctgcatagtagtggtggttgtgaggaattcaggagctgcagcataagggccctgcaggtactatgtgctcagtaaatgccagtggttcttaagggtctgagctcccattgtagaggcaagtaagctgaggttcagagacagaaaatgacttgcccaagatcacccagctgggaagtgacagtgccagggttggagccctggttgagctggttccacaggccagagctcattctgccctctccccggaagacctcccaccctgtccccatgcctctgcttctccctcaccccaattccccgctgccttctaggataagtgtgagccactggagaagcagcacgagaaggagaggaaacaggaggagggggaatcctagcaggacacagccttggatcaggacagagacttgggggccatcctgcccctccaacccgacatgtgtacctcagctttttccctcacttgcatcaataaagctt

SEQ ID NO: 390312 - DNA, 1000 bp, Homo Sapiens
tcccgatcctgtgtatctcactccaggaaaagtccttggggaacatcctccaggccaaacccacctccagtcctgccaaggggccccctcagaaggcagggcctgtagccgtccaggtcaaggctgaaaagcccatggacaactcggagagcagcgaggagtcgtcggacagtgcggacagtgaggaggcaccagcagccatgactgcagctcaggtgaggcctggggaaggaggctgctacatggcctgatctgccacaccacagtcagcacccccggggagctgtgctccctcaggcagagcatgggttttggctggtggggcagaacagatgggggactctgagttcaggaaccttctccagcctttctttggtgtcccctcaggcaaaaccagctctgaaaattcctcagaccaaggcctgcccaaagaaaaccaataccactgcatctgccaaggtcgcccctgtgcgagtgggcacccaacccccccggaaagcaggaactgcgacttctccagcaggctcatccccagctgtggctgggggcacccagagaccagcagaggattcttcaagcagtgaggaatcagatagtgaggaagagaagacaggtcttgcagtaaccgtgggacaggtgaggcctgtgttttctgggcgggcctcagggcccgcccctacgtggtcctttggactcctggagacacctctcttccccttgtcatcccaggcaaagtctgtggggaaaggcctccaggtgaaagcagcctcagtgcctgtcaaggggtccttggggcaagggactgctccagtactccctgggaagacggggcctacagtcacccaggtgaaagctgaaaagcaggaagactctgagagcagtgaggaggaatcagacagtgaggaagcagctgcatctccagcacaggtgaggcctagaaggagcaggcccatcccacccacacctgttcctgagccagggctgaggatgggcttgactg

SEQ ID NO: 390313 - DNA, 1000 bp, Homo Sapiens
ccttccaagaagaccatgatctcaatagtcagttactgatgctcctgaaccctatgtgtccatttctgcacacacgtatacctcggcatggccgcgtcacttctctgattatgtgccctggccagggaccagcgcccttgcacatgggcatggttgaatctgaaaccctccttctgtggcaacttgtactgaaaatctggtgctcaataaagaagcccatggctggtggcatgcagcaggtggcatgtaatttggtggtcttgggcgggccgatgtgggcaggatgagcatggagggagctgggtcagcctgctcagcagcagggcctgagcctaagggtggctgtgaatgccaggccagagatcccaatgctgtgggccaagaggggtccagaggctgtcctccttccagaagaaataaggcttctctggttgttgctcaaacattccctgaactctcagcccctcctaactctaggttttaaggagtaaagcttccttttgggttcctgaagctggcagttggggtgagagcagatgagatggaagagggctcatcagacactggccttggagggtgctggcctctgcagaacgccagcatcttctcagaatcgtatgttctagaagcctgggcgaagtccggctaattgtggacttggggaaaataaggcccaacccctgtttttgcaaggttaaggagaaataatcttaaaccagtcacacaaatcatcggcatttatttcctgggtcctaggtgtcacttatcctggtggacagggcagaggtggtcagatcgttttgagccaaaatcccttccctaaaaatggatctgtggagctccatgagggaacctcagagatgcacaatgacagtttagctaaaatggcttaaaaaatgtgaattgattgtcagctctctccatatctgctgaaaaaaggtttaaaatttttaaaaagtttaaaagtgttttctaaaaaagggacaagcaggtctggacc

SEQ ID NO: 390314 - DNA, 1000 bp, Homo Sapiens
gtgtgagggaagtaggagtgggtaggaagcaagaaatatgggtgcaaagtccttcacctttccttgggatactaaaatccctactcatctaggcacacttcctcaaaccacacttctgaatattaggtttccactctccgtctttcaagttccaacttaactggctcagagtccagctgttttcctttagcctcttaagttcatcactctccttcctcttccttatgggaaaggatctcttgattcagaccccacagtaatctagtctcaggaatagtgagcaacaacaatggtgcggtgagggctttcaggggatggcagctagcccagattaagaaataaagatgaagtctggctgggtaaggcatgccacagcaacgactgttcacccatatcccgatgctggctttgcccaaggagcccctgggcccctcagcccagcccgtctcctacgcagccaacttgccgcctcagtccttaaattccaggcacaaccctggagcttgggattctcacctcagtcctcactgtctcatccccattcacggctcccgcctccgccgcccacagcccccacacctgcccccgccctgactccagctccagcgcccggctgccggtgctgcagccgctgccatggtgatgggtctcgcgagaactgccgctagctaccgcgcagctctcgcgcgatcggggaggtgggaagtatcccgggctgggggtgggggtacgccgcacagctccagtcgccgtcgcggcttccggtgctaggtggagggaaggaaggagggagccggggagtgggccagggcagcagccgggctgaagtcggcttggggagccagagggagcggagcggaacctgcggggcagaggcggcggccgcagcggcgcagctgatagcaggaacaggtgagaggctgggaagggaaggcgggtcccggtagagaagaggctcggtcagggtgagggctgaggagatagagcgcctcccgggccc

SEQ ID NO: 390315 - DNA, 1000 bp, Homo Sapiens
cccctcatctacagggaaactgaggtgtaagggggtcggcctggtaaaaacagggagagaagaatccagggcagtggaccagcggccacagcaggctcagccgacagtctgccaagaggcgtggggtgtctgtgtgcgtgcgtgcacgtgggtgtagattgtgggcacaggatggccagggtggtatccagccacctccctcccttccccttttgttaccccctctcaggcctctactgcagcggctgggtgaagagaggacctacaggtgtcatagccacaaccatgactgacagcttcctcaccggccagatgctgctgcaggacctgaaggctgggttgctcccctctggccccaggcctggctacgcagccatccaggccctgctcagcagccgaggtctgggccccgatgctgaggtcctgggaggtggggtgggtggtccttctctgggcctcactctttgggagggggctgttctgggacccctgaaggaggaggtgttgacaatctcccctctgcttcaggggtccggccagtctctttctcagactgggagaagctggatgccgaggaggtggcccggggccagggcacggggaagcccagggagaagctggtggatcctcaggagatgctgcgcctcctgggccactgagcccagccccggccccagcagggaagggatgagtgttgggaggggaagggctgggtccgtctgagtgggactttgcacctctgctgatcccggccggccctggcttggaggcttggctgctcttccagcgtctctcctccctcctggggaaggtcgcccttgcgcgcaaggttttagctttcagcaactgaggtaacttagggacaggtggaggtgtgggccgatctaacccatctctctacgctggactgtggagggtcaccaggttgggaacatgctggaaataaaacagctgcaaccaagagccatggttgatgggggacttttttcgaaggttgggt

SEQ ID NO: 390316 - DNA, 1000 bp, Homo Sapiens
tgggcatgcaccaccatgcctggttaatttaaaaagtttttttattaagatggaaatcttgctatgttgcccaggctagtcgcaaacccctagcctcaagtgatcctctcgcttcagcctggattacaggcgtgagccactgtgtctggcctgccttctcatattattacacaagatgtttaagaccacaaaatacagtctggtcctgccagctagactgagttactggaaggcagaaatcgtgttgccgtcctgcacggcccaggcacagtgctgggcacatggggagggtggtgtccctcacacatgtgctgcttgatgacagtagtggtagaggggtctggagggtgagttgcttcccccagctgcagaaccatcatctgcacactcagaactagcttgttgcctctgaggttctattttatttcttcagtgagacacatcatttctctgttgggagttgggtatagtcaaaatcacctcttcaaaaagcaactgttttctcctttctcctgacagctgtacctcccacaaggattaccccttccatgaagagttttgaagctgtggttgcctgctcgtccccaagtgacctatacctgtgtttcttgcctcatttttttccttgcaaatgtagtatggcctgtgtcactcagcagtgggacagcaacctgtagagtggccagcgagggcgtgtctagcttgatgttggatctcaagagccctgtcagtagagtagaagtctcttccagtttgctttgcccttctttctaccctgctggggaaagtacaacctgaatacccttttctgaccaaagagaagcaaaatctaccaggtcaaaatagtgccactaacggttgagttttgactgcttggaactggaatcctttcagcaagacttctctttgcctcaaataaaaagtgcttttgtgagcttggttttgtgagctttggttttttaaaacaatagcaaccttctatctcacttcaaccattcac

SEQ ID NO: 390317 - DNA, 1000 bp, Homo Sapiens; identical to SEQ ID NO: 114760

SEQ ID NO: 390318 - DNA, 1000 bp, Homo Sapiens
  misc_feature (901)..(901): n is a, c, g, or t
cgtctgtcatcactgcagctggactcaggacccagatgttctttttcttcaattgttcagaaaattcctctcaactacagtggaaacctccagaaattcttttctaggagtttgttaagttagttacgcttaatgcttaatgaactttgccttaagtatttggtagtcttagagtcacggaattacggcgtgttcaagctaaaaaagcattagagatagtactatttgcgtaatgttgtcatctcttaatttgccagagggtctctcatgcagattttctgagcccattacttgacacttgtcactccttcctgtgcctcagatgagatattcaagacatgccagccaattaaacattagcctcagcaaaaacataatggagaagtcaaatctataaaggaaaattaagtataaagtcaattaaaaaataatttgagttgaattaccatttttaattctctatgccactgcccctctctgcccagaattggctgtccttgggagagctatttctgctatgtggctgacgtatttctccccacgttagaagatgcgacccgattcaagcacctccggaagtacacatacaactatgaggctgagagttccagtggagtccctgggactgctgattcaagaagtgccaccaggatcaactgcaaggtatggaggatgcaggcaggagggacctagagcccacagctttcccccagccctgttccagcgggcgcccaacacgcgaccttcccggagttgtgtactgagcaaacgcagcaacatcccagaactgttgtaatctgatcaaagcactgggactttgcctctgtttgtaagtcagccacattgctgagatgtggtctgccccaccaaatttcgcaagtcagaagtattttccgttatnttccagatgcaataggaatcatgatctagattagcagcagtgtgggtctgtagatttcagcgtgagagaggccagtaggtgagctatggagcagcactg

SEQ ID NO: 390319 - DNA, 1000 bp, Homo Sapiens; identical to SEQ ID NO: 114761

SEQ ID NO: 390320 - DNA, 1000 bp, Homo Sapiens; identical to SEQ ID NO: 281419
  misc_feature (47)..(47): n is a, c, g, or t

SEQ ID NO: 390321 - DNA, 1000 bp, Homo Sapiens; identical to SEQ ID NO: 281420

SEQ ID NO: 390322 - DNA, 1000 bp, Homo Sapiens
acagcaaggacatagggaggaacttcttggcacagaactttccaaacacttttcctgaaggatacaagaagcaagaaagtactattcactaggaccttctctgagctgtcctcaggatgcttttgggactatttttcttacccagagaatggagaaaccctgcaggaattcccaagctgtagttataaacagaagttctccttctgctacctagcattcaaagatcttaatcttctgggtttccgttttctcgaatgaaaaatgcaggtccgagcagttaactggcgggggcaccattagcaagtcacttagcatctctggggccagtctgcaaagcgagggggcagccttaatgtgcctccagcctgaagtcctagaatgagcgccggtgtcccaagctggggcgcgcaccccagatccggagggcgccgatgtacagacagcaaactcacccagtctagtgcatgccttcttaaacatcacgagactctaagaaaaggaaactgaaaacggaaagtccctctctctaacctggcactgcgtcgctggcttggagacaggtgaggtcctgcgggccttgtcctgattggctgggcacgcgtttaatataagtggaggcggtcgcgctggcgggcattcctgaagctgacagcattcgggccgagatgtctcgctccgtggccttagctgtgctcgcgctactctctctttctggcctggagggcatccagcgtgagtctctcctaccctcccgctctggtccttctctccctcgctgtgctctctcgctccgtgacttccttctcaagttaatccttggtggacccgccgtcgggctagtccagggctggatctcggggaagcggcggggtggacctgggagtggggaagggggtgcgcacccgggacgcgcgactacttaacccctttggcggggagcaggggagactttggcctagcgaacgggagggtcgggacaagtttagggcgtcgataagcg

SEQ ID NO: 390323 - DNA, 1000 bp, Homo Sapiens
gttgtagcctactacacgcataggctacatggtatagcctattgctcctagactacaaacctgtacagcctgttacttgactgaatactgtggcattgtaacacaatggtaagtatttgtgtatctaaacatagaaaagttgcagtaaaaatatgctattttaatcttatgagaccactgtcatatatacagtccatcattgaccaaaacatcatatcagcattttttcttctaagattttgggagcaccaaagggatacactaacaggatatactctttataatgggtttggagaactgtctgcagctacttcttttaaaaaggtgatctacacagtagaaattagacagttttggtaatgagatctgcaatccaaataaaataaattcattgctaacctttttcttttcttttcaggtttgaagatgccgcatttggattgagtgaattcaaattctgcttgcttgctttttaatattgatatgcttatacacttacactttatgcacaaaatgtagggttataataatgttaacatggacatgatcgtctttataattctactttgagtgctgtctccatgtttgatgtatctgagcaggttgctccacaggtagctctaggagggctggcaacttagaggtggggagcagagaattctcttatccaacatcaacatcttggtcagatttgaactcttcaatctcttgcactcaaagcttgttaagatagttaagcgtgcataagttaactttcaatttacatactctgcttagaatttgggggaaaatttagaaactataattgacaggattattggaaatttgttataatgaatgaaacattttgtcatataagattcatatttacttcttatacatttgataaagtaaggcatggttgtggttaatctggtttattttggtttcacaagttaaataaatcataaaacttgatgtgttatctcttatatctcactccactattagccctttattt

SEQ ID NO: 390324 - DNA, 1000 bp, Homo Sapiens
taaatgctcgttctgaaccaattttctcctatcttctctaggggtttcaaaagactcagttaattgatttccaggaagtactcatagcaagttcataaaagttcttgagacctaaatttcttcacaaaaaaagaaaagatcttaagtcatacattttaattgtgtagaggttgttcaactgaaggaataaatgaagaaaaaaataaaaaaaaaacaaaaacaaatagaccttctgttattttttgtcatcttacagtgctaatgtactttaaagcaaaccaaatgccctaaccagcaaaaaggcatcaaaatgtgattatagaaataatataatttgagatagcataaaatgtacttattctctcagttctttgatcattgcatgaattaggtttttatctaaaactgttcagctgggtgtggtggctcaggcctgtaatcctggcactttgggagacaagctggaggatttgttgaggccagcctgggcagcatagtgagacctaaaaacaaaaaaaatccttaaacatgactaatttgggaaggagagaaagggttcgggccaaaggtcagcattgtctctacaagaaaaccttgttcctgtccttgctacccaacagttttatctccacacagtagtccaagggatcctattaaattgatcatggcactcccgtgcaaaaaaatcaaaagtcctcatgatagctttcatgatcttcccactttatgtgtgacctcatgtcctactgcagtccacaccccaggctccttgctgtttgttcttcaaatacaccaaacacttcctaatgcctttatgatgggaaagctttactccaatattaagggtcactttattagctataccctgaccgccccacaagctgttcccatttgctttactatttctatattggcatgtaattcacacagcaacattgattattgagttgttttttttttttttttttttccagatggagtctcactctcactcaggtgg

SEQ ID NO: 390325 - DNA, 1000 bp, Homo Sapiens
tctctacaaaaacattcaaaagtgagccaggcatggtggagagtgtatatagtcccagctgggaagctgggagtgtggaaggtggaaggatcgcttgagccagggaggtcaaggctgcagtgagctgaaatcgtgccactgcactctagcctgggtgacagcaagaccctgtatcaaaaaacaaaagtactttttaaatgattttcttgttaaattaccttttcccatgataggcaaatgtagtttatattggtttccttgtagtcattggtatctcgcctaccatttgctaatagctgagttgaaggtgctaaaaactctcagctgtattaatctactcttgctttcagaaagtaatatctaaatgaaaagcactactgcttgaataaagagtatccttagctaaattcctggagtagtttgttgagctgggggcatgccagagctgtgttaaactacaaaaatgtctgaataaactgatactcaagagattttgagatagtctctcttgttgcccaggctggagtgcaatggctcgatctctgctcaccgcaacctctgcctcctgggttcaagtgattctcctgcctcagcctcccaagtagctgggattacaggcatgtgccaccatgcctggcttattttgtatttttagtagaggcgtggtttcttcatgggcaggctggtctcgaactcccgacctcaggtgatctgcctgccttagcctcccaaaatgctgggattacaggcgtgcaccaccacgcccagcctgagatttatatatttaagatgtgataaaatagtaatcaaaacttacatgtgaagaataggcttctacttctacagaaaggtcatttttacctgccaacctgtgccaagttgcaaggatgcaactggacaaatcagagtcctctttagggaaacatgattttacacagaatactaggtgagagtatatagtcaatgtcaacattttcctccatcactatcctatccaagg

SEQ ID NO: 390326 - DNA, 1000 bp, Homo Sapiens; identical to SEQ ID NO: 114762

SEQ ID NO: 390327 - DNA, 1000 bp, Homo Sapiens
  misc_feature (927)..(927): n is a, c, g, or t
catctgttaagctaggggtgacacacgtcattgtaccctttttaaattgttggtgtgggaagatgctaaagaatgcaaaactgatccatatctgggatgtaaaaaggttgtggaaaatagaatgcccagacccgtctacaaaaggtttttagagttgaaatatgaaatgtgatgtgggtatgtaaattgactgttacttcctttacagatctacagacagtcaatgtggatgagaactaatcgctgatcgtcagatcaaataaagttataaaattgccttcatgtttttgttctttttagttgcaacataatgtacttgtataccctatcctaattatgggatcatttgaagagcttttcccaaattgatggcctgtgctgccttctccccatcccctggggttttaaagtgatttcaaactgcaacctagttttagaaccactgttctgggtagttgggatactgaaggcatattgttaattattctacttgtatgttttgctaattctaagataagcatttttccagaaaccaggatgtagaatccagttgccattgacatcttaacattttaggaaacaactttaaaatgatatactatctatctatctatctgtagcatcttaaaggtaatgaaattaatgtggcagtaggtcttttaagcttctgcctacatccatattgagtatagttgttgtcttctaaaataattaattgatttttggtgagataaccagattcatattttaagccttttgtaatggccccgtggtacctggagtcaaggttcagaagtaaaaagttccttaaggtatcaataacaaaaatttgtattaatagttcagtcctaaagcagtgttgctgagattatgtttcaccagcatttacaagctgtatgttaaatgctgccataaagaggtctcttnaagccgtagggcacaccccaaggcaagcctgagaagtaactaatagtgttgcaccaaccaaaaaactatggat

SEQ ID NO: 390328 - DNA, 1000 bp, Homo Sapiens; identical to SEQ ID NO: 281421

SEQ ID NO: 390329 - DNA, 1000 bp, Homo Sapiens
tagtttatcttgactcagaaggaggacagataactactggcatgaaattgaaggattatcctgctttaaatgaatttcaccttttaagttttactctgtatttgtgtatcctgtagtttcctgggttccctgattgctttgcttggttctttaccatgtttgccttctctgtgctaaataaaaaatgaagttcattttaaagaaatgattaatttggtattttcctttctaggatcaagcgtgctttccttatcgaggagcagaaaatcgttgtgaaagtgttgaaggcacaagcacagagtcagaaagctaaataaaaaaatgaaacttttttgagtaataaaaatgaaaagacgctgtatgtatgactttttttttttctgttgtaatgtgttagtatacagattttgtttctgtatggtatttggggaccctatagtttttagcagattactttttcttgttttgtttgttgtttgtttgtttttggtttggtttggtttttttgagacggagtttctctcttgttgcctaggctggagtacaatggcaggatctcggctcaccgcaccctctgccttccaggttcaagtgattctcctgcctcagcctcccaagtagctgggattataggcatgtgccaccatgcctggctaattttgtatattttagtagagacgaggtttctccatgttggtcaggctggtctcaaactcccgacctcaggtgatctgcccacctcggcctcccaaagtgctggtgttaaggtgcgagccgcagcacccagccagtgggttactttttctgaagaaacagttggtggtcactgatggccagaatttttttggtgacagctctaccgctgcattggagcataatgtccttctctttgtgggctgagacttcagggtggtttgggaggaatggcccttctatttgaaactttaatatccctttgatccttattatggtatctcctttacgtcagcaagtttcatag

SEQ ID NO: 390330 - DNA, 1000 bp, Homo Sapiens
ggttgagaaagtcatctgaagcatttttggggattaaggtgataccctaaaaccccggagggcgcacgtaggatcaggtgcacccttcctgcagcgccttggtgtctgcagccgtggcggcctcacggggtgggtggagaggaaagagtggtgcggtagctggggttagcgtccgtttctcctccagtccacctcaccttgtcgcttcttccagggtccgcaagcaggtggtgaacatcccgtccttcattgtccgcctggattcccagaagcacatcgacttctctctgcgctctccctacgggggtggccgcccgggccgcgtgaagaggaagaatgccaagaagggccagggtggggctggggctggagacgacgaggaggaggattaagtccacctgtccctcctgggctgctggattgtctcgttttcctgccaaataaacaggatcagcgctttacaattggtgtgtgggggtctctcatccttgactctttcccctgctctaaacatgcagccttccctgggaggctcactcacttgggagtgcctaccagctagtggtccctggcctctcagtactattctacagtagtgaacacacatctttaccagaaacttctgtcatcaggggagagacgagtggtatttttggaaaaactgtgtcaaaaccagaaggaaattccaagtaagccggtgtttgcatataggggtgggagggagccggtcattgctaggcagggcaggcgccgagtggaggtgggggccttccctgcctgctggccctgggaccctgaccccgccaggcaagagacaggtgggacgggagctgaccagaggctgacgggttgctggggaaggtgaactgttggtgattgttggggaacacttcacagaatttgcttgctagtttcaaagcttgtgatgcggttgatgttgggcaagttcccagttttgtcttcacatgtaggggaagtgggttagcgtaggagaaggggc

SEQ ID NO: 390331 - DNA, 1000 bp, Homo Sapiens
atgactgcatcatggggcaattcaaacctggacagccttagcaaagataggtctgccatgcagtgttggtgatggccaggattacttagctatgggcatttatccctcactagactagcctagaatctggagagagaggttgtgtttttaatagattgcagtctatgaaaggacagtgagtagacttgctgggcaggttagtagaaagtacacagttgggccaggatcatatcttgcatgtgggacaagtgttatgatacccaggaatgcttgtggacattcgtttgacttctttggttggagacggagtttcactcttgttgcccaggctggagtgcaatggcgcaatcttggctcactgcaacctctttgtcctgggttcgagcgattctcgtgcctcagcctcccaagcagctaggattacagatgcctggcaatttttttgtgtttttagtagagatggggtttcaccatatttggccaggatggtctagaacttagacagcaggtgatccaccagcttcagccttccaaagtgctgggattacaagtgtgagccaccattcctggccttttgtgcaggagcgagaggggcttgaatgcaccccagtccctagaaatcgcagtgagagaagccatggctggtgtttggtgtattttaaacttggataaaggtaccgttaaaagaatgttgtgaggccatatacttggccaatcctggttttgaagactataccaaggtttttctttgcgtcttaaaccttgattgagaatctcggagtagggtctcccgtactggttggtttggtagttatagctaaagctggttgaccttagcatggtagtgacattgagtaccctcatggaaagcaaggagctctgagagaatttttctgaagtgtgtataacctggaactgtgtgttaacattgaaattgtcaacctcatgtactctggcttttctgaggaaagttcactttgaattcgagctcggtacccgg

SEQ ID NO: 390332 - DNA, 1000 bp, Homo Sapiens
gctcaggagatccacccacctcagcctctcaaagtgctgggattacaggcgtatcttgtaaaagtctggccttgggtttcctgtctagtgttgtccttctaagcctttcgtggcgaggcccagtcggccttgtgtggaagtagtcaagtacgtttacactgggatgttgtctcatagtatgtatgtaaatgggatttgttaccatttttaaaaaagactgaacatttaagaaaccgatattagggccaggtatgctggctcacacctgtaatccccacgctttgggaggctgaggtgggaggatcacttgagcccaggaatttgagaccaatctagccaacatagagagaccccttctcttaaaaatggttaagccaggcgcagtggctcacgcctgtaatcccagcactttgggaggcagaggtggacgaatcacctgaagtcgggagttggagaccagcatgaccaacgtggagaaaccccgttcttactaaaaatacaaaattagctgggcctggtggcgaatgcctgtaatcccagctacttgggaggcggagcaggagaatcacttgaactcctgaggcgaggttgcagtgagccgagaatcgcccattgcactccagcctgggcaacaagagctaaactccatctcaaaaaaaaaaaaaaaaaattgtaaagtcagctggggccaggtgggatggctcatgcccgtaatcctagcactttgagaggctgaggtgggaggatcacttgagtctgggaggtcgagacttgagcttgggaggttgagactgcagtgagctgtgattgcgctggtgagactctgtctccaaaaccaaaacaaaaaatgatattagttcagtgttgggagacagataaaatattctgttgagacagatgaacttgtcacttcattggtcaatttaatgatttctacaggagcagtttttgcaagaaaggatcaaagtgaacggaaaagctgggaaccttggtggagggg

SEQ ID NO: 390333 - DNA, 1000 bp, Homo Sapiens
tgtagcaatgataactggtgagaatttagggtgctttggtttgtaagcaccaaaaccaccagtattacacagttaaaagcttaaatattttgagtcacttaaattagacttcagaatgtgttgtaaaattatcttaacagcaggtttgtgcttttcaggtggatgagaatggcaaaattagtcgccttcgtcgagagtgcccttctgatgaatgtggtgctggggtgtttatggcaagtcactttgacagacattattgtggcaaatgttgtctgacttactgtttcaacaaaccagaagacaagtaactgtatgagttaataaaagacatgaactaacatttattgttgggttttattgcagtaaaaagaatggtttttaagcaccaaattgatggtcacaccatttccttttagtagtgctactgctatcgctgtgtgaatgttgcctctggggattatgtgacccagtggttctgtatacctgccaggtgccaaccacttgtaaaggtcttgatattttcaattcttagactacctatactttggcagaagttatatttaatgtaagttgtctaaatataagccagtttgtgtttctgtccatttcttgacctcaacacaacagacatttggggccaggtaattctttgttgtggggtgcctgtaatccctatgctttgggaggatcacttgagtgtccaggagttcaagagcagcctgggcaccatagcaagacccccatctctgtaaaaaaaaaaaaaaaaaaaaaaaagtaggctgactcctatggtcctgcctactgggaagtctgagacaaaaggatcccttgagcccaggagttgtaattaattatgcattgcatttcagcctggacaaaaccctgcttccaaaaaaaacaaaatgcatcctcagtctctgggtgtttcagtggaatgcttgctgtctgttgtacaacgcttgggaatttaatgtttgttcaggatggatccctataaagg

SEQ ID NO: 390334 - DNA, 1000 bp, Homo Sapiens; identical to SEQ ID NO: 281423

SEQ ID NO: 390335 - DNA, 295 bp, Homo Sapiens
gagggatgcacaattcagtccataaacgctgtatatatttatttgatgtagttttgttttaaataaaaagtgtgtgtgtgtgtgtgtgtgtgtgtgtgtgtatctaaagtaggcttcacaggtcttctcggctccctcctgaaactctcatgaaataaaggaagaagcgggtataaccccagaaggaaagacagaagtgagaagtgatgatactagatgagagatggtcacatttgagaaagtggaaaggagacagaggggtctgctggagcaaagtcgagaagcaggaagtaga

SEQ ID NO: 390336 - DNA, 1000 bp, Homo Sapiens; identical to SEQ ID NO: 114764

SEQ ID NO: 390337 - DNA, 1000 bp, Homo Sapiens
tcctgatacaagcctgaaatttgttttccctgccccagcctcaggttactcactggggaaagcccctttgtagaatcagggttgtattcttggaggtatagtgtgtcccaaaaggcacccactggaattgcccctgcctgggaaagggaggagagacgaggcagccaggtgtttgatgagggttggggggacctcctagctgagtcccctcccctgctccccagggtggaccggctgcgccatcacctgctccccatgtacagctatgacccagctgaggaactgcatgaggctgagcaggagctgctctctgacatgggagaccccaaggtgagcacttgggggccagggggagaatgaggcaaggtgggagtcagccctgttcccagccatactcgtccacactgaaaccagagcctggttctgcttacttgggctgtaactgggtgctgcagactcccagggaacacagcccagccttgtggtgtggtctcctccccgacaggtggtacatggctggcagagtggctaccagcacaagcggatgccactgctggatgtcaagacgtgacctgacccccttgccccacccttcagagcctggggtcctggactgcctggggccctgccatctgcttcccctgctgtcacctggctccccctgctgggtgctgggtctccatttctccctccacccaccctcagcagcatctgcttcccatgccctcaccatcacctcactgcccccaggccttctgccctttgtgggtgttgagctcaccgcccacccacaggcactcatgggaagaggctttccttctgggatggsggcggctggtagacacctttgctttctctagccctcctgggctgggcttgggcacaaatccccaggcaggctttggagttgtttccatggtgatggggccagatgtatagtattcagtatatattttgtaaataaaatgttttgtggctaggggttttgatttcatcaaga

SEQ ID NO: 390338 - DNA, 1000 bp, Homo Sapiens; identical to SEQ ID NO: 114765

SEQ ID NO: 390339 - DNA, 1000 bp, Homo Sapiens; identical to SEQ ID NO: 281428

SEQ ID NO: 390340 - DNA, 1000 bp, Homo Sapiens; identical to SEQ ID NO: 207063

SEQ ID NO: 390341 - DNA, 1000 bp, Homo Sapiens
aggcagggcggtggggggggcagctcagaagcctctaaggccccaggtgcagtcctggacctcgtggagccgcatggagtgaggagaggtgcggatgcccagaaacagatgtgggatgagggcactgggcagccacagggtccatgtggaggaggacaggtagtcaaggagggcttctggaggtggtgtggagggcccatctgatggccagaggaggccaggcagagctgccagtgccagcctggaggtggggccaccttcgtgcaggtgtctgggggtggagagcaggtgtgatgggggctgggtacagtgggctgcctcagaggactttgggcaggagtgacaggtacccgccagcaccctgagcagccatgctggccaccatcctggaagagaccagacgcaggtgcagaggaggacgggagacccttgggggctttggagcctccagaatggctgaggagaggagggttgggcacactggcccccaggttgggtgtgtggggctgaggtgggtggcgggtgaccacttcttaggactgtggcctgtgcaacctggcggggggcaatgggttgccattcactgacttggggggactgggccagcagtttccaggtgacaggcaggagtttggttttggctgtggcgactctgagattccccaggggcctccaggtggatgtgcagcattggcagcgtcggccggcaggcgggagggcctccctgatatgccccgacccgtggttgacaggatcccgctgcacaagttcacgtccatccgccggaccatgtcggaggttgggggctctgtggaggacctgattgccaaaggccccgtctcaaagtactcccaggcggtgccagccgtgaccgaggggcccattcccgaggtgctcaagaactacatggacgtgagtatgaggtcttagccctgctgcaagcggagccactgtcaggagagctccgtggcagatggggaacattcccacctcctgttct

SEQ ID NO: 390342 - DNA, 1000 bp, Homo Sapiens
aacagatactcaccagghggccagcggcagagatgccacatggcatggagctcgccttggccaacaggacaggtgtggggttgggaggccttcccagggcactccttgaagcagagctgtggggaaaagttggggccaacctcagatctccccgtcaacaccgggtctcctgccctcctgggccacagaaaactaagctccgtggatactgcggctgggtggggccgtgggggagaagaaatcacaacgagttaaaagatcattttttaaaactgttatgatcaggactcacataaacatatgacgacacatttcagagatgctctttatcttattaactaaggtgttgcaaccagttcaaagtggaattgcggccgccaccgcggtggagctccaattcgccctatagtgagtcgtattacaattcactggccgtcgttttacaacgtcgtgactgggaaaaccctggcgttacccaacttaatcgccttgcagcacatccccctttcgccagctggcgtaatagcgaagaggcccgcaccgatcgcccttcccaacagttgcgcacctgaatggcgaatgggacgcgccctgtagcggcgcattaagcgcggcgggtgtggtggttacgcgcaggaccgctacacttgccagcgccctagcgccgctcctttcgctttcttcccttcctttctcgccacgttcgccggctttccccgtcaagctctaaatcgggggctcctttaggttccgatttagtgctttacggcacctcgaccccaaaaaacttgattagggtgatggttcacgtaggggccatcgccctgatagacggtttttcgccctttgacgttggagtccacgttctttaatagtggactcttgttccaaactggaacaacactcaaccctatctcggtctattctttgattataggatttgccgattcgcctatggtaaaaatgagctgattacaaaatttacgcgattttacaaata

SEQ ID NO: 390343 - DNA, 1000 bp, Homo Sapiens
cctgttaagttgtgctacttctaaggctctggttcaccaggacctcaaagggcagctcttccaaatctcacctgactctactcagccaaaattcgaaggcaggaatgaacttcttcatgcaactaccaccacactttctatgcgtattcctcttagaactcataccagtaactgtctctcatatgaaaattttctgctccaaaatccctgcaaatttggcattcacctctctacgggattgttgcacacctttctacataatgctttgtggtgtatcttagggagagtggtgaacgtatctagcatcatgagcgtcagagcccttaaaagctgcagcccagagctgcagcagaagttccgcagtgagaccatcactgaggaggagctggtggggctcatgaacaagtttgtggaggatacaaagaagggagtgcaccagaaggagggctggcccagcagcgcatacggggtgacgaagattggcgtcaccgttctgtccaggatccacgccaggaaactgagtgagcagaggaaaggggacaagatcctcctgaatgcctgctgcccagggtgggtgagaactgacatggcgggacccaaggccaccaagagcccagaagaaggtgcagagacccctgtgtacttggcccttttgcccccagatgctgagggtccccatggacaatttgtttcagagaagagagttgaacagtggtgagctgggctcacagctccatccatgggccccattttgtaccttgtcctgagttggtccaaagggcatttacaatgtcataaatatccttatataagaaaaaaaatgatctcttatcaattagcactcactaatgtactactaattgagcaacctacgcactcagttgactacgtaaatctgtcaggtcttttgtgatttcctctgatgcaggagaggaaaaattgtaattgatgaaaataatgaatgaaaatcaacagatgaataaatggttctttataagtg

SEQ ID NO: 390344 - DNA, 1000 bp, Homo Sapiens; identical to SEQ ID NO: 281431

SEQ ID NO: 390345 - DNA, 1000 bp, Homo Sapiens
ccattttctggtatgcccccgaatccctctcggacaacatcttctctcgccagtcagacgtctggagcttcggggtcgtcctgtacgagctcttcacctactgcgacaaaagctgcagcccctcggccgagttcctgcggatgatgggatgtgagcgggatgtccccgccctctgccgcctcttggaactgctggaggagggccagaggctgccggcgcctcctgcctgccctgctgaggttcacgagctcatgaagctgtgctgggcccctagcccacaggaccggccatcattcagcgccctgggcccccagctggacatgctgtggagcggaagccgggggtgtgagactcatgccttcactgctcacccagagggcaaacaccactccctgtccttttcatagctcctgcccgcagacctctggattaggtctctgttgactggctgtgtgaccttaggcccggagctgcccctctctgggcctcagaggccttatgagggtcctctacttcaggaacacccccatgacattgcatttgggggggctcccgtggcctgtagaatagcctgtggcctttgcaatttgttaaggttcaagacagatgggcatatgtgtcagtggggggctctctgagtcctggcccaaagaagcaaggaaccaaatttaagactctcgcattttcccaaccccttaagccctggccccctgagtttccttttctcgtctctctctttttattttttttatttttatttttatttttgagacagagcctcgctcgttacccagggtggagtgcagtggtagcgatctcggctcacagtgcaacctctgcctcccaggttcaagcgattctcctgcctcagcctcccgagtagctgggattacaggtgtgcaccaccacgcccggctaattttttttatttttaatagagatgaggtttcaccatgatggccaggctggtctcgaactcctaacctcaagtgatcccacc

SEQ ID NO: 390346 - DNA, 1000 bp, Homo Sapiens
ctctggaattgctactgctgcctctgtcactcctggtgaccagcattcaaggtcacttggtacatatgaccgtggtctccggcagcaacgtgactctgaacatctctgagagcctgcctgagaactacaaacaactaacctggttttatactttcgaccagaagattgtagaatgggattccagaaaatctaagtactttgaatccaaatttaaaggcagggtcagacttgatcctcagagtggcgcactgtacatctctaaggtccagaaagaggacaacagcacctacatcatgagggtgttgaaaaagactgggaatgagcaagaatggaagatcaagctgcaagtgcttgaccctgtacccaagcctgtcatcaaaattgagaagatagaagacatggatgacaactgttatctgaaactgtcatgtgtgatacctggcgagtctgtaaactacacctggtatggggacaaaaggcccttcccaaaggagctccagaacagtgtgcttgaaaccacccttatgccacataattactccaggtgttatacttgccaagtcagcaattctgtgagcagcaagaatggcaccgtctgcctcagtccaccctgtaccctggcccggtcctttggagtagaatggattgcaagttggctagtggtcacggtgcccaccattcttggcctgttacttacctgagatgagctcttttaactcaagcgaaacttcaaggccagaagatcttgcctgttggtgatcatgctcctcagcaggacagagactgtataggctgaccagaagcatgctgctgaattatcaacgaggattttcaagttaacttttaaatactggttattatttaattttatatccctttgttgttttgtagtacacagagattatagagatacacatgcttttttcccaaaattgtgacaacattatgtggaatcttttattatttttaaaataaaaagatataattataaaaaaaaaaa

SEQ ID NO: 390347 - DNA, 1000 bp, Homo Sapiens
tcagacaagtctcagtcatcacagagcttatgctgtcatgaagaggaaaacacacacacaaagagatatagaatgtgaggtcaggtgttgacaagagccctggaaggaacagagcagggaaaggtcagaaagaaaagacccagggtctgtagagggggtgtcagggaagggatctcccaagaatgccctgatgtgagcaggacctgaggccagtggggagggagccatgcagacccctggggaagagcattccacacagggaaatgccaaggtcaaaggtgctgaaggaatgggggtgtcacactgctgactttgactcagtaggacacacacacacacacacacacacacacacacacacgctccaacgtggaggggtgaagagacctgctcaggacccagggccctgtttttccaccctaatgcataggtcccaatattgaccgatgctctctcctctctcctagcctcacttctaaccttctggaacccacccaccactgccaagctcactattgaatccacgccattcaatgtcgcagaggggaaggaggttcttctactcgcccacaacctgccccagaatcgtattggttacagctggtacaaaggcgaaagagtggatggcaacagtctaattgtaggatatgtaataggaactcaacaagctaccccagggcccgcatacagtggtcgagagacaatataccccaatgcatccctgctgatccagaacgtcacccagaatgacacaggattctataccctacaagtcataaagtcagatcttgtgaatgaagaagcaaccggacagttccatgtataccgtgagtatttccacatgacctctgggtgttgggggtcagttctacttcccacatacgggattgtcaggcctgggttgtgcctgtggccctctctgcattacatcctgtatcagggtttggacatttagtgcaggacacacacgggggagacaaacttccacagatcagaattc

SEQ ID NO: 390348 - DNA, 716 bp, Homo Sapiens
  misc_feature (551)..(551): n is a, c, g, or t
tgtgatttttaaagccatcacttcatcttccagcctcatgcgatcccactgattatgacatagtttcagtggtgccccttgctgcgaaggaggctgagaagggctgtcttgatttggggctgccatctgttaaactaacaaccaggaatctgtttgtaggaaagacaggatctgggggaataaataacaatctgtagccgtggtggctccatgccctcctgacaagattctttgtggtctttcaggccagcatatctttgtgaatttccacctcccggatcttgctgtgggcaccatcttgctcatactctccctgctggtcctctgtggttgcctgatcatgattgtcaagatcctgggctctgtgctcaaggggcaggtcgccactgtcatcaagaagaccatcaacactggtaggtacactgccctcacttgtaggccttgtgggatggtcactgcatggggtgtgggggtcctttagattcccatctagcaatggcctctgcatggagtttctctctcagattggatcagcaccagaagtgaggatntcattcacctggaaatgttcttggcatcctgggtggggtctagggagcaggcccaagtttccattgcatcttggcaaggtcctgagcaggagttcatatctagagagctgtgagtcaggccttccttcttagcgggtttcctgtatgctcagagctttactggct

SEQ ID NO: 390349 - DNA, 1000 bp, Homo Sapiens
ccgaaaccctggaatgggcctgcgcagaaaccacccaacccgatactatacacgacccgattctatgcccatcgacagcttcaccataagcagcaacggtaagacctgcaatggccagcgtgggaaggacgcatggataaggcctgtggttctttcacccatgcattgttgtatttgctgtatcacagttagtgaggggtgggggacactggcaaggtctgccttccattctccacgaaattattcaagtaaacttactttcctgtttctggaataccaacttttctatgtcataaatagctggtgaccattccttggaaaaaaagagatctgaagatagtccgacccccgccactctccctccccgccaaacaggcgtatcggtgcgttcctgacagtgtctgtcgggagtcgggagtctccacgccgtgtgacctacatgctaagaggtgaggagcttgcctagagtcagtccaggagaggtgcacgcagcctcccatcccaggattcatgttttcatggtaatcagtggtaagaaatctaattgcatctggaaagaatcctcttgaggttaacaataatattctaatttcagactgtacaacacagaaccaaatgagaaacagttccaacatgacttaaataaatacactgactgggctgggtgcggtggctcacacctgtaatcccagcactttgggaggctggggcgagcggatcatgaggtcaacggattgagaccatctaggccaacgtggtgaaaccccgtcactactaaacatacaaaaattagctgggcatggtggcgcacgcctgtaatgccagctacttgggaggctgaggcaggagaatcgcttgaacccaggagattgaggttgtagtgagctgagatcgcgccactgcactccagcctggtgacagagcaagactccatctcaaaaaataaatagatacaaataaataaataaatacattaataaaaaaaaaaaaaaaaaaaaaa

SEQ ID NO: 390350 - DNA, 1000 bp, Homo Sapiens
cccagattgatgccagcatggggtgtgctttctggggagctgcttgactttgggaagctccctgtgttgaagaggcatacaggccaggacatggaggtctctggtcctcgacagcagagggaggctcagagcatcctcctgagtgggcctgggcagtgcatagccccggggttgcggccagtgggacagctggcccgttctctgcctcaggctcctgtacagctaggggcttggtgcctcccctgggacccaggcagggaccacggaatcagtggccctcctgaggccccccaggaggtctctgtttccagaaggagagccctgtgggtcaccttggatctggctgttggctcagacacagcaagagaccgagagggaaggcagtttgatgcctggagagggacccgtggcttccagctgccaggccagccccagaatggagccccccgcatgggcgcttctctgttgaaccaatcctggcatttcctgggcctgagagttgggtcaagctgaatgctgcgatggccgcacgtgctccaccaagccccagccccctcctcttcccagaaacccccgctcacgggaaggtccagttgcttgccatctggccacctctgcatggagcccccaacagctgtgcctcagaacagatccgaagtgactttcaggggagctggacacatgtacgctggtgcctgctgtccccaccctttggcactgctgctctttctttttctgagatggagtctcgctctgtcgcccaggctggagcgcagtggtgtgatctcggctcaccgcaagctccgcctcccgggttcacgccattctcctgcctcagcctcccagctactggggaggctgaggcaggggaattgcttgaacccgggaggcagaggttatcgtgagctgacattgcgccactgcactccagcgcggaagacagagtgagcaaaaaaaaaaaaaaaaaaagaaaaagtgaccaaaaaaaaaaaaaaaaaaa

SEQ ID NO: 390351 - DNA, 1000 bp, Homo Sapiens; identical to SEQ ID NO: 281435

SEQ ID NO: 390352 - DNA, 1000 bp, Homo Sapiens
tctgggaaaaacagacagtatccactggatgcattggaaccccaacccagcattggggatattaaggacattaaaaaagcagccaagtctatgctagacccagcacataaatctcatttccaccctgtgaccccaagtttagtattcttgtgtttcatatttgatgggttacaccaggcattactgagtgttggtgtgagcaagaggtctaatactgtggttgggaatgagaacgaggaaaggggtactccttatgctagcagattcaaagatatgcctaactttattggccttgagaagtcatcagttctccgccactgctgtgaccttttgataggcattgcggctggatcaagtgataagatttgcaccagcagtcttcaagttcagagacgattcaaggcaatgatggcatctattggaagactttcacatggtgagagtgctgatctgctaatcagctgcaatgcagaatcagccataggttggatcagctcaagaccatgggttggagaattaatgttcacacttctatttggagactttgaatcccctctacacaagctacgcaagtcaagttagttgccaagaaagcacagatgacaacctattaatgctgtgagaatgtttctagatcagtgcatggatggctccattgctctacgggccattgtgtctgagatcccagtctttgaggagaaaaaaaacaatggttaaaaaggcattggggaaatattttgagtttgggggtgtactttgccaccccattattggggagctgtcaccacgaatgttcccaaacttagcaacagcggcaaactactgggccaagatgagcaaccccacatttttgggatttaaagctcctgatgttataccaggatcaaccatcacactccctttgcttcaaatggcgtctaccccgtaagatcttgaggggggagtgttgggtggaatcatagatccatgcactcctaacatgaactaattctcattattt

SEQ ID NO: 390353 - DNA, 1000 bp, Homo Sapiens
atctcattgaatctttacaacaaccctatgagataggtactatcatcctcattttacagatgagggacctggagctcagagaggttaagcaacttgcccgaggtcacacagctggtaagtgtggagccagaatttgaacccagatccacctgactccaaaccgtgctctaaatgcatatgctgccttccaatgaatgaatgaaaggtgagattttactgggccatgtaggggctagagaaacaagcctggtaggcagagagagcgcaaagaagaaggctttttctgaattagggaaaagctctgagaactcacgctcgtggaacagacacttactgaacatctactacaggccagacagtctgctgagattaccaagatgagtgagaactgcccccaaggagctcactgactaagaggctgggagagctggtcaagtgacaggcacatcaagtaacaaacatgctggcataggagaggtgctatggaaacacaggggataggcagccagctcgggctgtagtagtgggagttttcctggagggggcgagacagtggccactgtgattacagaagaggaccagggtcttctacagctttgatcccctctccacgcccatccatgagatgtgtggattttcccacgcctttcagaagaggattgttgcctctggtactttgatattagtggtggtcgtttctagggggacgggatgagagggatgggttcctgccggggctataagggttgttcctccatcctaacccaatcacactgagtaggggctacctatttcactgatagccatggctgctcctaagaattttgggggtacctctgttcactgcagcctgactaaaaattcctccccacctcactgcaggttataagacccttctcaagtgcctctcaggtaaattctgccgccgggagctgattggcatcatgggcccctcaggggctggcaagtctacattcatgaacatcttggcaggatacag

SEQ ID NO: 390354 - DNA, 1000 bp, Homo Sapiens; identical to SEQ ID NO: 281437

SEQ ID NO: 390355 - DNA, 1000 bp, Homo Sapiens
gttctctggcttggtttgatccgttttgcttagctttgcttggtctctggggtagactttagtataaagacacagaaatgttttaattatttgttctatttgtaccaaagctggttttattttttcttatgaactgcatttcaactccctgtgtcagagtgtttaaatcatcatcttagacattttatacgaaaatatcttctgatttcatctccaaaatatttcaaagtatttcaacaatgttagccaaagtttttatagaaaaagatgcttagttggagaactaaaattaatgtgagaatactttttaacctgcaagtttacaatgttcacagatttacgtcagagtaggactatttcttccaagctcttcgagcttggtaccatgatacctgatacatgaagtaatgtatctctgcttaggaaattgaagggacatgatggtgatgcagttggccctcagtttacccaaaatatacatttgccattgtattgtttggtttttctttttttcctaataggcctgatcagatttgaggcagcctgtgtttgactggggccatgagggtttagctaagccgttctccacctgagcagtcttatggctgacattagataatcagagacattacaaaaaacatatttcccccatatattataagtattgtgatagtatgtccaaaagagtcagaaaaaataaccatttagaatatattttctaaatatgtatgtgtatctatagaaaataaagtagtttttttttctcccactacatttgtaaaccaaaaccacattttatacatgggagtaaattgcaccaatgtgaataatttaaaaaaaatagaaatttagaaatttacttatacaagaaatgtttacataaatcataagttgattgattcagtaattcagtctatcacactatcttttataactaaacaaaatgccgatagttacattattgctttctggtgttcttttccaccctccatttgaattc

SEQ ID NO: 390356 - DNA, 1000 bp, Homo Sapiens; identical to SEQ ID NO: 281438

SEQ ID NO: 390357 - DNA, 1000 bp, Homo Sapiens; identical to SEQ ID NO: 281440

SEQ ID NO: 390358 - DNA, 1000 bp, Homo Sapiens
cctgcagagccagtgtccttgggtgggctagataggatatactgtatgccggctccttcaagctgctgactcactttatcaatagttccatttaaattgacttcagtggtgagactgtatcctgtttgctattgcttgttgtgctatggggggaggggggaggaatgtgtaagatagttaacatgggcaaagggagatcttggggtgcagcacttaaactgcctcgtaacccttttcatgatttcaaccacatttgctagagggagggagcagccacggagttagaggcccttggggtttctcttttccactgacaggctttcccaggcagctggctagttcattccctccccagccaggtgcaggcgtaggaatatggacatctggttgctttggcctgctgccctctttcaggggtcctaagcccacaatcatgcctccctaagaccttggcatccttccctctaagccgttggcacctctgtgccacctctcacactggctccagacacacagcctgtgcttttggagctgagatcactcgcttcaccctcctcatctttgttctccaagtaaagccacgaggtcggggcgagggcagaggtgatcacctgcgtgtcccatctacagacctgcggcttcataaaacttctgatttctcttcagctttgaaaagggttaccctgggcactggcctagagcctcacctcctaatagacttagccccatgagtttgccatgttgagcaggactatttctggcacttgcaagtcccatgatttcttcggtaattctgagggtggggggagggacatgaaatcatcttagcttagctttctgtctgtgaatgtctatatagtgtattgtgtgttttaacaaatgatttacactgactgttgctgtaaaagtgaatttggaaataaagttattactctgattaaaaaaaaaaaaaaaaaaaaaaaaaaaaaaaaaaaaaaaaaaaaaaaaaaaaaaaaaaaaa

SEQ ID NO: 390359 - DNA, 1000 bp, Homo Sapiens
cctcatctgtctggcttggccctgtgttcctcctgtcccctgctccactgcctatctggtgccccaggtgctgcttgccactccagctgtcacattgaacagtttcaattcagctcttaatgctcctgcttccgaagcctgcccaatttcttttttcttggcctctgtttttttttttctgtctttttcccttgtttttgtagaagactcagaggagaatctttcttatggctccctctgttgagattggaattggaagagaacttaattttttgtatttaaaatgcagtgtcatgcctataagcatttctcctatataggactgctttgctagtgtgccctcttgctgtgtcttacttcataaggagttgtatcttcccacctccatttcaatactgccggttaggacctaagtagaagagcagtaaaggctgattgacacacagggggatggagttggtccttgtccattctttcacccttgctgtgcatgtatcaatccttatcccagaaggtactatttagactgtatagactgatttagattacatactttagaggattaaggaaaccatagagtttgggccttggaactgttactgccttgtcctagagttgtcctgatcaggcttggggcctagttacagattagtcttaaagaattgcattaacttaaaaaaaatcaaaccttggcaagagctaaaataatttggagatatctttgcccttgacttgtagacgacatctaagaggatgaagaaaggagagtctaagtgagactctggcctacttcctaacaatgtcttggaagtgggatgatggtaaaggagaaaggccacagtccaatccctctgccttcagatagggaactcaaatcctgaaattactgttttctttctggccttttctcctggttagaggaggaagcggaaagtagttttgagtaatactttgttcatattaccccccttttgttttgtttctggcccctctaccaata

SEQ ID NO: 390360 - DNA, 1000 bp, Homo Sapiens; identical to SEQ ID NO: 114769

SEQ ID NO: 390361 - DNA, 974 bp, Homo Sapiens; identical to SEQ ID NO: 206985

SEQ ID NO: 390362 - DNA, 1000 bp, Homo Sapiens
atcatcagctgaccaagacacctgaggacacatcttggcacccagaggagcagcagcaacaggctggagggagagggaagcaagaccaagatgaggaggggggaaggctgggttttttggatctcagagattctcctctgtgggaaagaggttgagcttcctggtgtccctcagagtaagcctgaggagtcccagcttagggagtcactattggaggcagagaggcatgcaggcggggtcctaggagcccctgcttctccaggcctcttgcctttgagtctttgtggaatggatagcctcccactaggactgggaggagaataacccaggtcttaaggaccccaaagtcaggatgttgtttgatcttctcaaacatctagttccctgcttgatgggaggatcctaatgaaatacctgaaacatatattggcatttatcaatggctcaaatcttcatttatctctggccttaaccctggctcctgaggctgcggccagcagagcccaggccagggctctgttcttgccacacctgcttgatcctcagatgtggagggaggtaggcactgcctcagtcttcatccaaacacctttccctttgccctgagacctcagaatcttccctttaacccaagaccctgcctcttccactccacccttctccagggacccttagatcacatcactccacccctgccaggccccaggttaggaatagtggtgggaggaaggggaaagggctgggcctcaccgctcccagcaactgaaaggacaacactatctggagccacccactgaaagggctgcaggcatgggctgtacccaagctgatttctcatctggtcaataaagctgtttagaccagaactctggtgtccaatcctgtgtctgtggagctgggagggaactcaatgggagcaatcaaattagcaggggctttgggaggccgaggcaggcggatcacctgaggtcaggagtttgagaccagcctggctaacatg

SEQ ID NO: 390363 - DNA, 1000 bp, Homo Sapiens
  misc_feature (902)..(910): n is a, c, g, or t
gcttttaccaacaatgctgcaaagaataacattgtacatatacgctaatcctgacatgccataattttaaaaagatagcgacctagaagtgagactaccggctcatagtgcaagtttattttattttatttatttattttttgagacatggtcacactctgttgtccaggatggatgcagtggcacaaacccagctcactgcagcctcgacctcacaggctcaagcgatcctcccatctcagcctcctaagtagctggggctacaggcgcgcaccaccatgcctgactaattttttcacttttttgtagagaaggggctcactatgttgccagggctggtctcgaactcctgggctcaagtgaccctcccaccttggcctccgaaagtgctgggattacaggtgtgagccaccacacccagccacaagtttattttccatttcaatagcctccaattattagccactagagactcttaacttccttgagttaggatccttaccaatttttgagcacctaccatacgcctgctatatgtagcaatggggatgaagaaaacaatcaaaacaaaacaaaagaaaaaggtatttccctaccaccgtagagctctatatagaaagaatacaaaaaaaaaaaagcagccagaaaataagaattaaaataatttgtattgcacatagttggtgtttaattcataaataccacttacaaagatttatgactcaaagacaagacaaagtacttccatgggttgacacagggctgtaagcaattctttaaacatgaaagaagctggacacataggtcatattccactccagtactcttcccagtccatcaaactgctctcttccaggccaataagtactttctgaagtcttcctcgagtccaacttctagannnnnnnnnagctcccctttgtgttcatgcattaatttcgtctgagtcaaaggccttgtgtactctcgctcgttcaggggtaaaggtgtattctagatc

SEQ ID NO: 390364 - DNA, 1000 bp, Homo Sapiens
ttgagagtcaggagaacctgtggctctttcccctcctccacatactcctggggtctgggtggctggcagagccagagcaaggctggtgaagacatgtctcctttcacccacaagggaaagtaagaactgaggagaggtcttgaaagcacactgttgcaggggctgggtgcaggggctgggtgcaggggctcacacctgtaattccaactctttgggaggacaaggtgggaggatctcttgggcccagggatttaagagcagcctaggcaacatagcaagactcttatctctacagaaaataaaagaaattagccaggcgtggtggcatgcaccgtagtcccagctactcaggaggctgaagtgggagatcccttgaacccaggaggtcgaggctgcagtgacccatgattgagccactgccctccagcctgggcaacagaatgagaccctgtctcaaaaaaaaaaaaaaaaaaaaaaagggaaagcactctgttgcagagcgcaaagtatcagtagacttaggcctttgcccaagaagattgatagttttcttcccctttccttgagttttccagcctcctctcagtcattacttgggtgggagaagaggagggagttagcaggtggagctgtctcaggtgagcaggtgagtcaagagattaatctcctgtctcctttctttgggttgcagccgttccagggtctatcttcagggattaatagactactatttatttggaaacagcagcactgtattggaggactcgaagtccaacgagaaagctgaggaatggggccggagtggcaaagaccccgaccgcttcagacctgacggcctgcctaagaaatactgagcttcctgctcctctgctctcagggaaactgggctgtgagccacacacttctccccccagacagggacacagggtcactgagctttgtgtccccaggaactggtatagggcacctagaggtgttcaataaatgtttgtcaaattga

SEQ ID NO: 390365 - DNA, 1000 bp, Homo Sapiens
ccatccttgtttccagctgtgggtcaggtttcgggccctgactgtggcacttctgcttcacctgcccactgggttccccctggccagcctttaaacacactgtatttttgacagcttcagcctgaagttgaaatagtttatgactctaaaactgggagactgcagggcttaactgaagatatcatacacgtaagagatacatgcacaatctcaaatggaatttgagaggacagaagggaagaatcagtcttcagctcctccctgaattacgtgtcgcaatctgagtctaataaatgtgtgtgcacatcagcatgtacagagagctgtcatgggtgctgttcgaaactttggaactctagatagaaaatatctcttggcacttaatctgctactaatttttgctgttaaatcagatggatcaaactttgtgtttaatagctaaatgttgaatctgaaatggtaattactgaattataattttaaaaagtctcaaagtcagcattttggaagtggtactttcatagatttttaaattccataatgtgccttatcttttcattgcaggatgacagaccaaagttaaacaagcctccggaaactcttatcactactattgattctagttccagttggtggaccaactgggtgatccctgccatctctgcagtggccgtcgccttgatgtatcgcctatacatggcagaggactgaacacctcctcagaagtcagcgcaggaagagcctgctttggacacgggagaaaagaagccattgctaactacttcaactgacagaaaccttcacttgaaaacaatgattttaatatatctctttctttttcttccgacattagaaacaaaacaaaaagaactgtcctttctgcgcccaaatttttcgagtgtgcctttttattcatctactttattttgatgtttccttaatgtgtaatttacttattataagcatgatcttttaaaaatatatttggcttttaaagtat

SEQ ID NO: 390366 - DNA, 1000 bp, Homo Sapiens
gaaaacccaggaccgagccaccgccctcagcctgtcaccttgtgtccaaaattggtgggttcttggtctcactgacttcaagaatgaagccgtggaccctcacggtgagtgttacagttcttaaagatggtgtgttcagagtttgttccttctgatgttaagacgtgttcagagtttcttccttctggtgggtgcgtggtcttgctggcttcaggagtgaagctgcagaccttcacagtgagtgttacggctcttaaggctgcacgtacggagttgttcattcttcctggtgggtttgtggtctcactggcctcaggagtgaaactgcagtccttccagtgttacaactcataaaggcagtgtggacccaatgagggagcagcagcagcaagacttactgcaaacagcaaaagaatgatggcaaccaggttgccgctgctacttcaggcagcctgcttttattcccttatctgacccccacccacatcctgctgattggcccattttacagacagtggattggtccacttacagagagctgattggtgcatttacaatccctgagctagacacagagtactgattggtatatttacaaaccttgagctagacacagagtgctgaatggtgtatttacaatcccttagctagacataaaggttgtcccagtccccactagattagctagatagagtagacagagagcactgattggtgcgtttacaaaccttgagttagacacagggtgctgactggtgtgtttacaaaccttgagctagacacagagtgctgattggtgtatttacaatcttttagctagaaataaaagttccccaagtccccaccagattagctagatacagagtgctaattggtgcatgcacaacccggagctagacacagagtgctgattggtgcatatacaatcctctggctagacataaaagttctccaagtccccacctgactcagagcccagccagcttcgcctagtggatcc

SEQ ID NO: 390367 - DNA, 1000 bp, Homo Sapiens; identical to SEQ ID NO: 281443

SEQ ID NO: 390368 - DNA, 1000 bp, Homo Sapiens
caaggaccagctttgagggcctccacctgccgtcctgtcttcctgacccccgcttctgtccccttcctgtctgcccatatcctgttttctgtctgcccaccttcccttcttcccacctgcctgctgtcccccagtctgcctgcccttctctctctcacctttctccaggctccctacctgcttgtctacctgtctcctacccacctgtatctcttgttgggagaaaagctgagtgttgggagaagctgaggccgagcttgcatgtctgacataatgtaaaagagtcttgaatcatgtccaggatccagggtctaaaaccccttgtggcctttggaacaccaagctctgtgctgaagggtggaaggctaccctgacgcaccataatctaagcccggggcataaaacccctcgtggcttggatagaatccagggctcgtggctctggaatgtgtctggacttgctggctccttgctccttgctctcccaggatcaattgtatcttgagttaaaagaacctgctctccattatctcaagtaacagagcagatgctaaaccgtcacagctgtaaattgtgtgcttaatgcaacatgccctttcgacccaccccccattctcaccacctgtttctttgtttgatcaccaataaataatctgcacttccagagctcggggccttcacagcctccatccttagctttggcgccctggacccactttctctctcaaactgtcttttctcactgctttgactctgccggactttgtcacccccacgacctggtgttgggtctgaacaccccaacatccctgaatctccacccacctcccaaactcctgcctgccctccagactgtctgcccatacacctgtctccttcttcctgcctggcttgtctgttcctatattagtttcctattactgctgtaataaactatcacaatctcagtgattttaaataaaaaaaaaaaaaaaaaaaaaaaaaaaaaaaaacggaattc

SEQ ID NO: 390369 - DNA, 1000 bp, Homo Sapiens
catttctccctcccctgccctccccttgccggcaccggagtgacaggctcggggccctcctcgccgaagctcggggctccagcgctggcgaatcacagagtggtggaatctattgcctttgtctgacaagtcatccatctcccggcgcggggagggggaggaggtctggagggggctttgcagcttttagagagacacacaccgggagccgaggctccagtctccggccgagtcttctagcagccgcaacccacctggggccagcccagagctgccagcgccgctcggctccctccctccctcccggcccttcggccgcggcggcgtgcgcctgccttttccgggggcgggggcctggcccgcgcgctcccctcccgcaggcgccacctcggacatccccgggattgctacttctctgccaacttcgccaactcgccagcacttggagaggcccggctcccctcccggcgccctctgaccgcccccgccccgcgcgctctccgaccaccgcctctcggatgaacaggttccaggggagctgagcgagtcgcctcccccgcccagcttcagccctggctgcagctgcagcgcgagccatgcgcccccagtgcaccccggcccggcccaccgccccggggccattctgctgaccgcccagccccgagccccgacagtggcaagttgcggctactgcggttgcaagctccggccaacccggaggagccccagcggggagcgcagtgttgcgccccccgcccccgcgcgcgccgcagcagccgggcgttcactcatcctccctcccccaccgtccctcccttttctcctcaagtcctgaagttgagtttgagaggcgacacggcggcggcggccgcgctgctcccgctcctctgcctccccatggatatgcactgcaaagcagaccccttctccgcgatgcaccgtgagtacccgcgcccggctcctgtcccggctcgggctctccgtcccaaccctgtccagt

SEQ ID NO: 390370 - DNA, 1000 bp, Homo Sapiens; identical to SEQ ID NO: 281446

SEQ ID NO: 390371 - DNA, 1000 bp, Homo Sapiens
tgaggaatggccacactgtcttccacaatggttgaactaatttacactcccaacagtgtgaaagtgttcctatttctccacatcctctccagcatctattgtttcctgactttttaatgatcgccattctaactggcgtgagatggtatctcattgtggatttgatttgcattcctctaatgaccagtgatgatgagctttttttcatatgtttgttggccacataaatgtcttcttttgagaagtgtctgttcatatccttcgcccactttttgatggggtttttttttcttgtaaatttgtttaaattccttgtagattctggatattagcccttcgtcagatggatagattgcaaacattttctcccattctgtaggttgcctgttcactctgatgatagtttcttttgctgtgcagaagctctttagtttaattagatcccatttgtcaattttggcttttgttgccattgcttttggtgttttagtcatgaagtctttgcccatgcctatgtcctgaatggtattgcctaggtttccttcttgggtttttatggttttaggtcttacatttaagtcattaatccatcttgagttaatttttgtataaggtgtaaggaaggggtccagtttcagttttctgcatatggctagccagttttcccaataccacttattaaatatggaatcctttccccattgcttgtttttgtcaggtttgtcaaagatcagatggtgtagatgtgtggcattatttctgaggcctctgttctgttccattggtctatatgtctgttttggtaccagtaccatgctgttttggttactgtagcctggtagcatagtttgaagtcaggtagcatgatgcccccagctttgctctttttgcttaaaattgtcttggctgtatgagctcttcttttattccatgtgaaatttaaagtagttttttctaatttggtgaagaaaatcaatggtagcttgatggggatagcatt

SEQ ID NO: 390372 - DNA, 1000 bp, Homo Sapiens; identical to SEQ ID NO: 281447

SEQ ID NO: 390373 - DNA, 1000 bp, Homo Sapiens
tatttattaatttaatttaatttttttgagacgaagtctcgctgtcaccaagctgagtgcagtgctgatctcagctcactgtaacctcacctcctgggttcaagagattctcctccgtcaggcctcccaagtagctgggactacaggcgcataccaccatgcccatgctaatttttgtatttttagtagagacggggtttcactgtgttgggcaggctggtctcgaactcctgaccttgtgatcagtgctgggattacaggcatgagacactgggcctggctgtaatttattttttatatgacacctgtaaacgtcttcagttgaggaaggctgaggtgcagctaaatgtccaagctgacacaggctatatatatggcagctgttttccaccctgctcctggttttccctgacagttctggagtagtgaaccatgcaatcactgatcaggagagctgggttaacctccatccctggggctatgttgggaatgagcagggagaagggcatggagcctgccatggtgggcttctgtactcatgtggctacctctgtccctcaccaggtggtctgagctcggcctatgggggctcacaagccggcctcagctacagcctgggctccagctttggctctggcgcgggctccagctccttcagccgcaccagctcctccagggccgtggttgtgaagaagatcgagacacgtgatgggaagctggtgtctgagtcctctgacgtcctgcccaagtgaacagctgcggcagcccctcccagcctacccctcctgcgctgccccagagcctgggaaggaggccgctatgcagggtagcactgggaacaggagacccacctgaggctcagccctagccctcagcccacctggggagtttactacctggggaccccccttgcccatgcctccagctacaaaacaattcaattgctttttttttttggtccaaaataaaacctcagctagctcgccgaatgtccttgctt

SEQ ID NO: 390374 - DNA, 1000 bp, Homo Sapiens
  misc_feature (913)..(913): n is a, c, g, or t
  misc_feature (953)..(953): n is a, c, g, or t
aagagtatattctttgtccagtctgccttctttcactcaacactgtctatgagattcatgcatgctgttgcatatagatgtagttcattcttatttgtttcttttgctatagaacagaagtcagcaagtcacagctcttgggctaaacctgacctgtcacctgtttgattagaacacagccatgtccattcatttacatattgcctatggcagttttcatgctacaaaatggtagagtttggtcatgatagagaccatctgatccccaatacctaacatatttgctatgtgtcccttcacagaaagagattgccgattaccactatagtgtctaaatattcttatacatgtctttttgtgcaaaaaattacacacattctttcaagtatctacctataattgcaaattgcaattgttgggtcatagagtgtatatgtgtgtgtgtgtgtgtgtgtgtgtatgtgtgtgtgtgtgtgtgtgtgtgtgtgtgtgtagttcagctttattctgccaaaaagttttccaaactggctataccaatttatcctcctaccagctgtgtacaaaagtcccacaaataatttaacactcaatgattaacttaagtaaaagttagaatgcataattcatcatttgactcaataaaaacagtttatgtaatagcctgtaatgaagatcatgattatcatttaagtaaacaaatcatcaggtgttaccatcaggttgatgatggtagtaataaaatgagtaaattttatttgctgattatccatgagcattaaagagttgatgaagtttgttgcataaactgaattaatagttattctttgttgaacacttgaaaataaatgtcccacaaatgatcctagtaagtgcttactcacccacagggaactataaacaaaaccctggntcataaataaaaactgttttctgtcgacctaattaatttncattttttctttctcaacaaaatatacaactaactatattttacaga

SEQ ID NO: 390375 - DNA, 1000 bp, Homo Sapiens; identical to SEQ ID NO: 281450

SEQ ID NO: 390376 - DNA, 907 bp, Homo Sapiens
cttatcccatcttgttttgcctttgttttttcttgaataaaaaaaaaataagtaaaatttatttccctggcaaggtctgaaaacttttgttttctttaccacttccacaatgtatatgattgttactgagaaggcttatttaacttaagttacttgtccaggcatgagaatgagcaaaatcgttttttaaaaaattgttaaatgtatattaatgaaaaggttgaatcttttcattttctaccatgtattgctaaacaaagtatccacattgttagaaaaagatatataatgtcatgaataagagtttggctcaaattgttactcttcaattaaatttgacttattgttattgaaattggctctttagcttgtgtttctaatttttctttttcttcttttttcctttttgcaaaaacccaaaatattttagctcctactcagactgttactctggtgacacaacctgtggttactaaggaaactgccatctccaaactagaaatgccatcttccttgatgttggaggtacctgctctggcagatttcaaccgggcttggacagaacttaccgactggctttctctgcttgatcaagttataaaatcacagagggtgatggtgggtgaccttgaggatatcaacgagatgatcatcaagcagaaggtatgagaaaaaatgataaaagttggcagaagtttttctttaaaatgaagattttccaccaatcactttactctcctagaccatttcccaccagttcttaggcaactgtttctctctcagcaaacacattactctcactattcagcctaagtataatcaaggatataaattaatgcaaataacaaaagtagccatacattaaaaaggaaatatacaaaaaaaaaaaaaaaaaaaagcagaaacc

SEQ ID NO: 390377 - DNA, 1000 bp, Homo Sapiens; identical to SEQ ID NO: 201589

SEQ ID NO: 390378 - DNA, 1000 bp, Homo Sapiens
gcactaatcagaatctcacgcacctttacctgcgaggcaacactctcggagacaaggggatcaaactactctgtgagggactcttgcaccccgactgcaagcttcaggtgttggaattagacaactgcaacctcacgtcacactgctgctgggatctttccacacttctgacctccagccagagcctgcgaaagctgagcctgggcaacaatgacctgggcgacctgggggtcatgatgttctgtgaagtgctgaaacagcagagctgcctcctgcagaacctggggttgtctgaaatgtatttcaattatgagacaaaaagtgcgttagaaacacttcaagaagaaaagcctgagctgaccgtcgtctttgagccttcttggtaggagtggaaacggggctgccagacgccagtgttctccggtccctccagctgggggccctcaggtggagagagctgcgatccatccaggccaagaccacagctctgtgatccttccggtggagtgtcggagaagagagcttgccgacgatgccttcctgtgcagagcttgggcatctcctttacgccagggtgaggaagacaccaggacaatgacagcatcgggtgttgttctcatcacagcgcctcagttagaggatgttcctcttggtgacctcatgtaattagctcattcaataaagcactttctttatttttctcttctctgtctaactttctttttcctatctttttttcttctttgttctgtttacttttgctcatatcatcattcccgctaactttctattaactgaccataacacagaactagttgactatatattatgttgaaattttatggcagctatttatttatttaaattttttgtaatagttttgttttctaataagaaaaatccatgctttttgtagctggttgaaaattcaggaatatgtaaaactttttggtatttaattaaattgattccttttcttaattttaaaaaaaaaaaaaaa

SEQ ID NO: 390379 - DNA, 1000 bp, Homo Sapiens
cgtctggactctttctctcctactgagacgcagcctataggtccgcaggccagtcctcccaggaactgaaatgtgagtgaatgtgaggaggagtgagcgggcttccagagggtcaggcggcgtggtctgtggcctcagagagtaaaaagcttccaggtcataaggaaggtgggccgcggagtgaaggggagccagatgaagatagggtgaatgctcggggtgctgttggaggtatctgagtcccgaaagtgcctggaactcccaatgggacagattccagacttcttggtagggacccaggaatgggctgtgtaagcggtaagaaaggggcctgggaagtgggaatgctatgagctggtgaccgcgaccccgaggtctgtagagctccgggtagaaatgtccagcgaggagcgtccagtgatgtgtcacaacttctcaactccaccctggaggttcgaatgggcgggactgtgctttccaacaaaaccttgattttagggagggaaatcgtccaaacaaatgggtgtgtgacgaaagccgtggtcactgcagttttaattctctagctgtataaacttaaatgtctccactatggagaatccaactgtgaaaccaaatctcatcagaaatatcctgtatcttttgccaggagcattaagacattgctctgctagattgcccaacttaagtggctatgcaagcattcgattcagaagatgtacacacttctagttgccctgggacttactttcaaattatttccaaacttttttaaaaactgaaatttaacatttggccatgaaagtggtcaaatacagctatcctctcaaacacactttcccaatcacagtattctgtttgcagagtgaaatatgagttggcgaggaagatcaacatataggcctaggccaagaagaagtttacagcctcctgagctgattggggctatgcttgtgagtgctttaatattttgatgttttttattagcagaaatttcttt

SEQ ID NO: 390380 - DNA, 1000 bp, Homo Sapiens
cggccccaggtccaggagaagtgctccctggaggcacggaccactgcttcccactggggccggcggggcccacgcacgacgtcagcctcttaccttcccgcctcggctaggggtcctcgggatgccgttctgttccaacctcctgttctgggaggtggacatgcctcaaggatacagggagccggcggcctctcgacggcacgcacttcctgttggctgctgcggctgtgggcgagcatgggggctgccagcgtctgttgtggaaagtagctgctagtgaaatggctggggccgctggggtccgtcttcacactgcgcaggtctcttctgggcgtctgagctggggtgggagctcctccgcagaaggttggtggggggtccagtctgtgatccttggtgctgtgtgccccactccagcctggggaccccacttcagaaggtaggggccgtgtcccgcggtgctgactgaggcctgcttccccctccccctcctgctgtgctggaattccacagggaccagggccaccgcaggggactgtctcagaagacttgatttttccgtccctttttctccacactccactgacaaacgtccccagcggtttccacttgtgggcttcaggtgttttcaagcacaacccaccacaacaagcaagtgcattttcagtcgttgtgcttttttgttttgtgctaacgtcttactaatttaaagatgctgtcggcaccatgtttatttatttccagtggtcatgctcagccttgctgctctgcgtggcgcaggtgccatgcctgctccctgtctgtgtcccagccacgcagggccatccactgtgacgtcggccgaccaggctggacaccctctgccgagtaatgacgtgtgtggctgggaccttctttattctgtgttaatggctaacctgttacactgggctgggttgggtagggtgttctggcttttttgtggggtttttatttttaaagaaacactcaatcatcctag

SEQ ID NO: 390381 - DNA, 1000 bp, Homo Sapiens
gaaggcgtcggcgcggggctggcgtagggcctgcgtcagctgcagcccgccggcgattggggcgcgcgcgcctccttcggtttggggctaattataaagtggctccagcagccgttaagccccgggacggcgaggcaggcgctcagagccccgcagcctggcccgtgaccccgcagagacgctgaggaccgcgacggtgaggccctacgtccgccagcacacccgggcccgcttctccccgacgcccgccctcctcacacttgccttcttctcttccctctagagtcgtgtctgaacccggcttttccaattggcctgctccatccgaacagcgtcaacgtgagtgaatttgcccgaagcttgtctttgctgagcgggtttggggacgtctgcccgccctctttcccttcacatttcattgcatgggttccccaacagcgttccctggttcttctttgtgaccccagtcaatgtcctgcctcccccggctcccgctctctcgcccctggtctgcggcgttctctccggaatcttgccctgggccgcggacgcccaggaaaagagccgggtgccccaggcagcctcgcgttgggggcgaccgcgccatcccgggaaccgcgaggcgatctgagtcgcctccacgtctacctaaaagctgtcggccgggagggcggggccccagaaaggagcattcctgcgggcttttgctcgacgatcccctgctgaggctgtcgcggcgagggtcctgccgagggaccccgttctgcgcccaggcaggctcgaagcacgcgtccctctctcctcgcagtccatggcgcggttcctgacactttgcacttggctgctgttgctcggccccgggctcctggcgaccgtgcgggccgaatgcagccaggattgcgcgacgtgcagctaccgcctagtgcgcccggccgacatcaacttcctggtgagtgttgcgcgcggcgagtgttgcgcaccttgtgagacagagtttccg

SEQ ID NO: 390382 - DNA, 1000 bp, Homo Sapiens; identical to SEQ ID NO: 114771

SEQ ID NO: 390383 - DNA, 1000 bp, Homo Sapiens
ccagaactgtttatttcaccccatcaagtataaggttactgattgattggtccttttataaacattggtatatttccattcatgccaaagcaaaagaagtaaaagctaattaggatttaatttgttttatattctctaagatatatatttactaaaagaatttgtgacattttaaaaaacaaaaataaatattgcatccatgttgctttatatgtagccttgccttttaaaagaaaaagtatgtgaatatgaattgacagattgttttcgtagagagagggtcttactctttcactcaggctggaatgcagtggagagatcatagctcactgtaacctcaaactcctggactcatgcaatcttcctgcctcaggcttctgagtagctaggactatgggtacattccacagtgcccagctaatttttgttttgttttctttttattttttttagagatggggtcttgctatattgcccaggctggtcttgaacccctggcctcaagcaatcctcctgcctcagcctctcaagttgtttttttctttacatttgataaactaaaagcataggctgcatatgagtctttaacatcttgaactggttgtgaataattttctggcactggttgtaagtaatatctattattataaaaataatatatgctcaaccagaaaacttagaaataagaaacacaaatgtaaaataagtatttccataactcataatccagagataattgccattctgattttgatagatatcctctcagctctcttccctgggggcagatatttcccaatacataccactttgaataggatgataggaaataaatgatgtactacattaaattaaattattgtattacatttttgtacacatcagtcattcccaggcttggctgaaaatcaggatcatctgagaaacttaaacaatttctgcattcttaatctccactgttattctattatatcagaatcgctaatagaaccaagaattc

SEQ ID NO: 390384 - DNA, 1000 bp, Homo Sapiens; identical to SEQ ID NO: 281456

SEQ ID NO: 390385 - DNA, 1000 bp, Homo Sapiens
cacgcagccaccgccgccgcagcctctccttagtcattgccatgatgactgcatccaactcgcaggtgcgccagaactaccaccaggactcagaggccgccatcaaccgccagatcaacctggagctctacgcctcctactttaacctctccatgtcttactactttgaccgtgatgatgcggctttgaagaactttgccaaatactttcttcaccaatctcatgaggagagggagcatgctgagaaactgatgaaactgcagaaccaacaaggtggctgaattttccttcaggatatcaagaaaccagactgatgactgggatagtgggctgaatgtgatagagtgtgcattacatttggaaaaaaatgtgaatcagtcactactggaactgcacaaactggccactgacaaaaatgacccccatttgtgtgacttcattgagacacattacctgaatgagcaggtgaaagccatcaaagaattgggtgaacgtgaccaacttgcacaagatgggagcacccgaatctggcttggcagaatatctctttgacaagcacaccctgggagaaagtgataatgaaagctaagcctcaggctaatttccccatagctgtggggtgacttccctggtcaccaaggcagtgcatgcatgttggggtttcctttaccttttctataagttgtaccaaaacatccacttaagttcttttgatttgtaccattccttcaaataaagaaatctggtacccccccccaaaaaagaatgacaaaagatagcacatgtgaatacaaataaaaagtaagctactgtggctacattcatgtcagacaaagtaaatttcagagtagagaatattaccagtaataaatgattatttcatagtgataaaggggtcaattcatgaaaaagacataatcctaaacctaatacaacagttcaaaataaatgcagcaaaaactggaaggagaaagaaacagatcctctagagtcgacctgc

SEQ ID NO: 390386 - DNA, 1000 bp, Homo Sapiens; identical to SEQ ID NO: 281458

SEQ ID NO: 390387 - DNA, 1000 bp, Homo Sapiens
gcctgtagtcccagctactcagaaggctgaggcagaagaattgcttgaacctgggaggcagaggttgcagtgagccgagattgtgctactgcactccagcctgggcgagagtgagactctgtcttaaaaaacaaatcagtaagccactggctattaaaatgaccccagcaaagaaccccaaggaatctcactccatttctactctttctcacagggccctcccaattctgaggactcagactgtgacagcactgaattggacaactccaacagcgttgatgccttgcggcccccagcttccctccctccatgaaagccactcgtattccttgtacatagagaaatatttatataaattatatatatatacatatatatatatatatgcgccacataatcaacagaaagatggggctgtcccagccgtaagtcaggctcgagggagactgatcccctgaccaattcacctgataaactctagggacactggcagctgtggaaatgaatgaggcacagccgtagagctgtggctaagggcaagccccttcctgccccaccccattccttatattcagcaagcaacaaggcaatagaaaagccagggttgtctttatattctttatccccaaataatagggggtggggggaggggcggtgggaggggcaggagagaaaaccacttagactgcacttttctgttccgtttactctgtttacacattttgcacttgggaggagggaggctaaggctgggtcctcccctctgaggtttctcaggtggcaatgtaactcatttttttgtcccaccatttatcttctctgcccaagccctgtcttaaggcccagggggaggttaggagactgatagcatgtgatggctcaggctgaagaaccggggtgctgtttaagtccctgcttttatcctggtgcctgattggggtggggactgtcctactgtaacccctgtgaaaaaccttgaaaaataacactccatgcagga

SEQ ID NO: 390388 - DNA, 1000 bp, Homo Sapiens; identical to SEQ ID NO: 281460

SEQ ID NO: 390389 - DNA, 842 bp, Homo Sapiens
tgaatagcaaaaggaccaggggacattttgagaggagtcagtgggccagagacggcaaaaagttattgctgaggtcctaagcacagtcggtgttacgatctcagatgtgagacgtgaacgcgcccaggccggatagcttgttcccattccattgatctgagataaccccaacggaggcagtgtcccataccttgggtaaggggtcccgagtctccacagccagagatcaaaggagttttctggcaggcgagaaattaccagcagatcttcccgcgcgggatgtaggctttaatttagaaatctccgccccaaaactggcatcttgaacgcgggagggcattatgagttcgcggccccggtttttctccatttatccaaatcaggtagccgaaaggtaaatgaggcttcaagttgggcggcgggcagcgaacttgacagaacctcgaaactctgcagatccgccgccaacccagccgccagctccccgtgacttccgctttcggtctcaactcctctccctgaggagagtggtttaaacggtgaaggctgcggggcgtcgccggaagtgtcgtaaacgtcggatatccggttcttctgggcgctaagggagctgacggagagggccaccgcccagcaatagacggtgtctcagcctgccgagccgcagtttccgtggtgtgagtgagtccgggcccgtgtcccctctcccgccgccgccatgggctgcacgttgagcgccgaagacaaggcggcagtggagcgaagcaagatgatcgaccgcaacttacgggaggacggggaaaaagcggccaaagaagtgaagctgctgctactcggtgagg

SEQ ID NO: 390390 - DNA, 365 bp, Homo Sapiens
tcatcattacccgctgtccactgaaactagctctgccacctggggctagagtcactccccaccttgatctcactcctgtaaaatggaaggatggaattgcctcttatctgttatataaattaaaatgacctctttggcagtaaaaatgatttaagtaaacagtcaatattttgtgactcacaaaactgagataatttctttaaaattgtcctaggtattccttgtggagaaggcagggcgacgttctctctttctaattggaatgagtgggatgtttgtttgtgccatcttcatgtcagtgggacttgtgctgctggtaagtttggtgcctgcactgaggtttttcattaacatatgatggtacc

SEQ ID NO: 390391 - DNA, 1000 bp, Homo Sapiens
tttctaaggattaaaaagaaactttaatgcattgtagacctctgtacacagaaaaatctttgtaacttttgggcttaattttcattcttaaaaaatctggtaactttttcaaatgcaaccactgtcagtttgctgtgaggctaggcaaacaacacaaggtatagaatttcccatcaccaccaccctgaccccgcgagaagattgccttttaattagagacttgtagaactagtgccttttaagttctacactcatcttttccaaagactattagtaaacttgccatgtaatttgacatggcagttccttgctcagctactctaaataaagttggaaattaggtggtctcttagtttgggtaaagtcagtactattgccagtaatatacatggtaattgaaagcccttaaagtggttcagattatttgccaaatattagactctataaaaatttctgaggttttttttcttttacctttgagtgtacatgtgattgctataatgtaaataccagtcccttaaagactgtttctataagcagaatgatgcagcacaaagtggaaaggttttcctcttattccagcagtattcttgccttcaaagagtagtccatcttgccttagtttttaaggttgttttcttggatggaaagcttaactggatagtaatttccatatgttctttataaccactctgtatattataagcaaagttttttcatattgtatctttttctgttgagcactttatgcattttagtctattgcatttgagaatgtagtttagaaattcactgtttaaagccatgtgaaaactgatagaggataatgaaaatgagtgtacattattttgaatttaacttaactgttttgtggtgggtgtgaacaaaacattagaaatatattatctttttgtgataatactctctgacctcacttaaagtgatctgccatgaggtatccatgatcaagtttatgtttattctaatacctaaggaattc

SEQ ID NO: 390392 - DNA, 770 bp, Homo Sapiens
gaattcttaacatcagtgattttttttgaatcattaatgctttttttaattttttttttttagacagagtttccctctgtcacccaggcttgagtgcaaagtggcgcaatctctgctcactgcagcctctgcctccctggttcaagtgattctcgtgcttcagcctccacagtagttgggactacaggtgcgggccaccattcctgactaatttttgtatttttttaatagcagagatggggtttcgctgtgttggccaggctggtttcaaactcctgacctcaagtgatccacctgccttggcctccaaagtgctgggattacagatgtgagccactgcgcctggccccaattagggtttttataaagccaaaagaacttggcaacacccctaggtaccctttagaagcctccaattggctacaccctatgaaggattggcctgtgaccaatcagaggctgaagtggaggcgtagctcatggtcaagcagaggctgaagtggaaacttctgtctttttatcacaggcatgaggatgtggcctgcatgctgcctgatcttgcctagaaccagctgcacctgctgttctcttgtttatgcaaactggctgcacctgctattcctttgcttatgccccaacccttggctatcctaactccctgttctcctgcctattactgtattctctacttctaaataaaaataaaacaaaatacaaattatttgcatgtagtatagtcatgatttgttatttcaagctatgtttaaaat

SEQ ID NO: 390393 - DNA, 1000 bp, Homo Sapiens
aaaaaatctttttagtttgtactagaaagagctgcagacagaactgaccaccatcccatagctcatggaggttttcctgggacggcacgtgagcatgcacgtgtgtgtgtgtacacacactcacacatgtccagatgggagcttggtttgggagtccctccttttgaggatagccccggggtgttcctctcagccccatttctgagaacaggtgaatggcagaacagccctggccttggcccagccagctctctgtgttgcgcccttagagcctctgcgccctcagttccgtcctgctcttggcaaattccagaccctttcagaaatggccgaagccctaagcctctcctcactctgcactcccaaaaacagaacaatttaaggatgcttctctttcggggtggtggtggttgttaatttcaggaatttagaagaatcgattgctccgaccaatccactgtctcctgagttttctttattcatgttaagatggcaagaatcagagaacagggagacttggtctgctttctaaaagcagctgacaggaggggactcaagttcacctgcagagttgaaaccagccccgctccaagagggcatgtgggaaggtggggagcgaggggaacaggcgtggctggggagggccgtacttgtgggcctgacccgagtcagggtctccaggggggggccaggcttccccaggagcccggggatgggcttcaatggggttcctgacccctcgtgctgctgccccatctcgcccaaccccagcagtagtcaaaatgttctagggttttttggttggttggttggtttttaaaatcaaagaaaatggtcagactggaccccttatctctctctctacagactgcttcacggactctttgctgttgacgttgatctcctggtagcatgaccttttggcctttgtaagacacacagcctttctgtatcaagcccctgtctaacctacgaccccagagtgactgacggctgtgta

SEQ ID NO: 390394 - DNA, 1000 bp, Homo Sapiens
cccgccctcccagccgccgccgccgccgcggccgctcctcggccctcctcctcctcctcctccttccacccccctcgccgccgccgcctcctcctccccccgcctccccccgcccgccgcggcgcttttggctcggggcggcggcgggggcccggccgaggcaataagagcggcggcggcggcagcggcggcagcagctcccgcagctcctgctctggtccgcctcggcccggcggcggccatcagccccctcggcctcggctcgaggggcggggagctgcgcgcgcccctcggtccgaccgacaccctccccttcccgcccgtccgcgcgccccgcggcccgcggcccgcagtccgccccgcgcgctccttgccgaggagccgagcccgcgcccggcccgcccgcccggcgctgccccggccctcccggcccgcgtgaggccgcccgcgcccgccgccgccgcagcccggccgcgccccgccgccgccgccgccgccatgggctgcctcgggaacagtaagaccgaggaccagcgcaacgaggagaaggcgcagcgtgaggccaacaaaaagatcgagaagcagctgcagaaggacaagcaggtctaccgggccacgcaccgcctgctgctgctgggtaagggcgggcggggggcgccggccccggcccgggggccctcgaagggcgccccgcaggccgcgcgcgccgagcccgccccccgccccgggcgcgcgctcccgagccccccgcccgttcgcgggctctgtctgtggggggcgaggccggaagggggacccaggggcgcggattcggccgggcgggggctcaaaaacggggcggggggccgtggcgacgcgggcgcgggtgcccctcccccggcctgcccgctcatgtctctctcttctctcgctctcgctctccccctctttctctttttccgcgaggcctacacgacgccaggggtttgggtgctgttggggagggggagggggagccctg

SEQ ID NO: 390395 - DNA, 1000 bp, Homo Sapiens
atctgcaaacagggacaatttgactccctcttttcttaattgaataccctttatttccttctcctgcctgattgccctggccagaacttccaacactacgttaaataggagtggtgagagggggcatccctgtcttgtgccagttttcaaagggaatgcttccagtttttgcccattcagtatgatattggctgtgggtttgtcatagatagctcttattattttgagatacgtcccatcagtacctaatttattgagagttcttagcatgaagtgttgttaaattttgtcaaaggccttttctgcatctattgagataatcatatggtttttgtcattggttctgtttatatgctggattatatttattgatttgtgtatgttgaaccagccttgcatcccagggatgaagcccacttgatcatggtggataagctttttgatgtgctactggattcggtttgccagtattttattgaggatttttgcatcgatgttcatcaaggatattggtttaaaattctcttttttggttgtgtctctgccaggctttggtatcaggatgatgctggcctcataaaatgaattagggcagattctctctttttctattgattggaatagtttcagaaggaatggtaccagctcctccttttacctctggtagaattcggctgtgaatccatctggtcctggaatttttttggttggtaagccattgattattgcctcaatttcagagcctgctactgatctattcagagattcaacttcttcctggtttagtcttgggagggtgtatgtgcaaaggaatttatccatttcttctagattttctagtttatttgcatagaggtgtttatagtattctctgatggtagtttgtatttctgtgggatcagtggtgatatcccctttatcattttttattgtgtctattttattcttctctcttttcttcttcatcagtcttgctagcagtctatcaattttgttgatc

SEQ ID NO: 390396 - DNA, 1000 bp, Homo Sapiens; identical to SEQ ID NO: 114772

SEQ ID NO: 390397 - DNA, 1000 bp, Homo Sapiens
  misc_feature (197)..(197): n is a, c, g, or t
  misc_feature (482)..(482): n is a, c, g, or t
  misc_feature (493)..(493): n is a, c, g, or t
  misc_feature (516)..(516): n is a, c, g, or t
  misc_feature (521)..(521): n is a, c, g, or t
  misc_feature (537)..(540): n is a, c, g, or t
gatgcctgcccgccgggcttccttatcccaccccagagacatcggctgtgaccagcacaccagctgcccggtggggcagacctgctgcccgagcctgggtgggagctgggcctgctgccagttgccccatgtgagtgcctccctgcctgcccctggataggggagctaagcccagtgagggagctaagcccagtganggacaggaacataatgccattctgtgctcccttcccgccaggctgtgtgctgcgaggatcgccagcactgctgcccggctggctacacctgcaacgtgaaggctcgatcctgcgagaaggaagtggtctctgcccagcctgccaccttcctggcccgtagccctcacgtgggtgtgaaggacgtggagtgtggggaaggacacttctgccatgataaccagacctgctgccgagacaaccgacagggctgggcctgctgtccctacgcccaggtcagtgccaacncatcctggggntggtatggccaggaccaggtccnacctngtccaaccctctcgcnnnnctctgaccatccagggcgtctgttgtgctgatcggcgccactgctgtcctgctggcttccgctgcgcagccaggggtaccaagtgtttgcgcagggaggccccgcgctgggacgcccctttgagggacccagccttgagacagctgcttgtgagggacagtactgaagactctgcagccctcgggaccccactcggagggtgccctctgctcaggcctccctagcacctccccctaaccaaattctccctggaccccattctgagctccccatcaccatgggaggtggggcctcaatctaaggcccttccctgtcagaagggggttgtggcaaaagccacattacaagctgccatcccctccccgtttcagtggaccctgtggccaggtgcttttccctatccacaggggtgtttgtgtgtgtgcgcgtgtgcgtttcaataaagtttgtacactttctt

SEQ ID NO: 390398 - DNA, 1000 bp, Homo Sapiens; identical to SEQ ID NO: 281465

SEQ ID NO: 390399 - DNA, 1000 bp, Homo Sapiens; identical to SEQ ID NO: 281466

SEQ ID NO: 390400 - DNA, 1000 bp, Homo Sapiens
tctatttgagcaagttggaagtttaattagctttccaaccaaccaaatttctgcattcgagtcttaaccatatttaagtgttactgtggcttcaaagaagctattgattctgaagtagtgggttttgattgagttgactgtttttaaaaaactgtttggattttaattgtgatgcagaagttatagtaacaaacatttggttttgtacagacattatttccactctggtggataagttcaataaaggtcatatcccaaactagttgtgtattaaatttgcttggttgtaataggaacttgttttgagtatctcatctagcagcaataactaagcacatttctttgtgactgaactgtcaaatctgtagatcaacaaagtgagatagcccaagtatatttttttaatgttatatgagctactaaagttttaatttaaaaagttggcaggagctggagtgggattgtcagtttcttaggctaagtgtgaccatttcagtttgtacattggcttcgcttgctgtgtgacagcactgcactagtatgctgttagcatggtggacttggggagggagagaataggtaggaatgtcctgtatatccacagaatgaactccgaatttaaactttaaagataatagtgctacgtgccaggccctgctttgaagtctgaagttgttaagtactcagtaacatcattggggatatactatctccattttatcgaagagaagcagggtttcttatttgaaagtaccgagttatggtagttagcagaattaacagcttgctcacagcattatgtaaaattgttaccttgtggttgggttgagcaggtcattttgacagtttgtcatgtttttttttaaaaaatttgcacatagcaaacattccccccacccccacggcaaggactaacaagacacggtacttccaagtggtaatgttatccaaatgggacggaaaaggtgaaatcaaaagtttgctttcgttagggcagccc

SEQ ID NO: 390401 - DNA, 1000 bp, Homo Sapiens; identical to SEQ ID NO: 281467

SEQ ID NO: 390402 - DNA, 420 bp, Homo Sapiens
cacggtgggacttggcctccactgggcagcaggaccagctccaagcgctagtgttctgttctctttttgtaatcttggaatcttttgttgctctaaatacaattaaaaatggcagaaacttgtttgttggactacatgtgtgactttgggtctgtctctgcctctgctttcagaaatgtcatccattgagtaaaatattggcttactggtctgccagctaaaacttggccacatcccctgttatggctgcaggatcgagttattgttaacaaagagacccaagaaaagctgctaatgtcctcttatcattgttgttaatttgttaaaacataaagaaatctaaaatttcagatgaatgtcatcagagttcttttaattagctctttttattggcagtttttattgaagtcaagagttggt

SEQ ID NO: 390403 - DNA, 1000 bp, Homo Sapiens; identical to SEQ ID NO: 281468

SEQ ID NO: 390404 - DNA, 1000 bp, Homo Sapiens
ttctgatgtgaaaaagatggtgtttggctcttatagagcctgtgtgaaaggcccatggatcagctcttcctgtgtttgtaatttaatgctgctacaagatgtttctgtttcttagattctgaccatgactcataagcttcttgtcattcttcattgcttgtttgtggtcacagatgcacaacactcctccagtcttgtgggggcagcttttgggaagtctcagcagctcttctggctgtgttgtcagcactgtaacttcgcagaaaagagtcggattaccaaaacactgcctgctcttcagacttaaagcactgataggacttaaaatagtctcattcaaatactgtattttatataggcatttcacaaaaacagcaaaattgtggcattttgtgaggccaaggcttggatgcgtgtgtaatagagccttatggtgtgtgcgcacacacccagaggagagtttgaaaaatgcttattggacacgtaacctggctctaatttgggctgtttttcagatacactgtgataagttcttttacaaatatctatagacatggtaaacttttggttttcagatatgcttaatgatagtcttactaaatgcagaaataagaataaactttctcaaattattaaaaatgcctacacagtaagtgtgaattgctgcaacaggtttgttctcaggagggtaagaactccaggtctaaacagctgacccagtgatggggaatttatccttgaccaatttatccttgaccaataacctaattgtctattcctgagttataaaggtccccatccttattagctctactggaattttcatacacgtaaatgcagaagttactaagtattaagtattactgagtattaagtagtaatctgtcagttattaaaatttgtaaaatctatttatgaaaggtcattaaaccagatcatgttcctttttttgtaatcaaggtgactaagaaaatcagttgtgtaaataaaatcatgtatc

SEQ ID NO: 390405 - DNA, 1000 bp, Homo Sapiens
tagttacttgtctttctagaagtgtcaacactgacagtttaaaaaaaaagccataagctaacaaccattccagtttaagaaatgtagcatgggttagctccttgaagtgtattcatttgtataaatgcttctgaagctgtagatatgtggtgttatttctgaggtctctgttctgtgccattggtctgtatgttgttttggtactggtaccatgctgttttggtaactgtagctttgtagtatagtttgaagtcaggtagtgtgatgccttcagctttgttcttttgcttacaattgtcttgggtatatgagcttttctttggatccatatgaaatttaaagtagttatttctaattctgtgaagaatgtcaatggtcatttgatgggaatagcattgaatctataaattactttgatcagtatggccattttcatgataatgatttttcttatccatgagaatggaatgtttttccatttgtttgtgtcctttcttatttccttgagcagtggtttgtagttctccttgaagaggtccttcacatcctttgttagctgtatttctaggtattttattctctttgtagcaattgtgaatgggagttcattcatgatttgggtctctgctcgccatctgatattcaacaaacctgacaaaacaagtaatcaagaaaggatctcctattgaataaatgatgctgagaaaactgggtagccatatgcagaaaaccgaaactggaccccttccttacaccttatacaaaaattaactcaagacagattaaaaacttaaatgtaataccccaaaccatgaaaacctgagaagaaaacttaggtgataccattcaggacagccgttggcaaagacttcatgtaaaaaaatgccaaaagcaattgcaacaaaagccaaaattgacaaatgggatctaattaaactaaagagcttctgcacaacaaaagaaactatcatcagagtgaataggtaacctagagaatgcc

SEQ ID NO: 390406 - DNA, 1000 bp, Homo Sapiens; identical to SEQ ID NO: 281470

SEQ ID NO: 390407 - DNA, 1000 bp, Homo Sapiens; identical to SEQ ID NO: 281471

SEQ ID NO: 390408 - DNA, 1000 bp, Homo Sapiens
agtcttgccttgttgcccaggctggagcgcagtggcatgatcttagctcactgcaacctctgcctcccggttcaagcgattcttgtgcctcagcctcccgagtagctgggattacaggcgcccgccaccacgcccagctaatttttgtatttttagtagagacggggtttcaccatgttggtcaggctggtgttgaactcctgaccttgtgatctgcccgccttggcctgccaaagtgctgggattacaggcgtgagccaccgcgcctcaccgaatctgatcttttactgtagcctcctcttattatctccttgacttttgccagggtactctcactttgagaaaggaaaaagatcctagtctttaacatgccttttccagatttctggggatagacctattactaaggctgtagaggcctcccttttctcttggctgcacttcagagcaccatgcccgtgtggcccattggaagcaagcccccttccagctgctagggaggtggtccattatctctttgctcttgttaagtttgattaggggagttccacgtagggcctgagaagaggaggtgcctgcaggacaataggtagctgatgagggatctgactcagctgcagctgaacctaggcgccacttgacgttccctgggaacatttagaaccttggaacatgctgcttgcacctgggagtggaatgtttgcagacagcccctctgttgttacagggctggattttgttgatttattgatatttattggaccctcccatgtctgagtcaattttttaggtaccagaggaggatgcagagacacgtttgagaagctcccagcctgtgagaagcttacacatcagtaagggaaacatgaatagggcattatttgagtatctaactgctatctctttctcattcccagctaccagcagaaatatgagatctagtatggatgatttttgatgggggcgggcgttgatgtgccttttaaatattgtagaattc

SEQ ID NO: 390409 - DNA, 1000 bp, Homo Sapiens
caaaggaaaagcagaaatacacagacatggccaaggagtataaggatgcatttatgaaagcaaatcctggctacaaatggtgtcctaccacaaacaagcctgtgaaatccccaacacccactgtcaatccacgaaagaaactttgggccttcccatctgactcttcaagagacttgccaagccccaagaaagcaaagactgaagaaatgcctcagcttaactttggaatggctgatcctactcaaatgggaggcctgagtatgctgctgttagctggagaacatgctcttggcacaccagaggtatcctctggcacatgcaggcctgatgtttcagaatctcctgaattacgtcagaagtcaccattgtttcagtttgccgagatatcttcaagtacgtcccactctgatgcttctacaaagcagtgtcaaacatctgccttgtttcagtttgcagagatttcttcaaacacttcgcagttgggtggtgctgagcctgtaaaacgctgtggaaagtctgcactctttcaactggcagagatgtgcctggcatcagaagggatgaaaatggaagaatcaaagctaataaaagcaaaagaatccgatggtggaagaattaaagaattagagaagggaaaggaagaaaaagaaattaaaatggagaaaacagatgaaactaggttacagaaggaagcagaatttgaaaaatcggctaaggaaaatttaagagattctaaggaattgagaaattttgaggcattgcaaatagatgacataatggctataaaaatggaagatcccaaagaaattagaaaggaagagttagaagaagatcacaaatgtagtcattttcctgatttttcttattctgccagtagcaagataataattagtgatgttcccagtagaaaggatcatatgtgccatcctcatggaattatgatcattgaggatcccgcagcattaaacaagccagaaaagctaaaaaaaaaaaaaaaaaa

SEQ ID NO: 390410 - DNA, 1000 bp, Homo Sapiens
tagtgagtttccatgtaggttgtatgggtggggtgatgccttcaggaacccatttgcatatgtgtgttcatttgtctctgtgtgtgagttctgggtctattttcctttgtattcattgagtgggtctgtgtttgtgtcttaggagttgcccgtgttgatcttgcttatgtatgtaagtgtgtatgtgtgtgtacttgtgtctgtggatgtttgtacatgtgtgctgtgtgtgcgggtcatagagcacatgcgtttgtgcatgcggacctgttggagtgccctgttcttcctgcatctttatcctgtatgggcgttttgtcgtgtgcccatatttgtacctgctgtgtatatatgcagttccctgtgctgcgggcgggggtcagcggtctctggtgtgcacgactgcacagacccaaatgcaggactctgttgttgccactcaccaagtgagattcatatcagcaacatgtccgtttgtctctgagcagattttgttgccgctgcgtctcgccagattgaggcatcccctccgacatcactggagcatatctggaggggtggacagttctccacagggaggtaggggaaaagaggaggcccggaaacccctcctggagggaagagccccatcggtcccaggccagcctcagaggagagggggcaggcagctggctgaggtcagcctgccaccctgcttccttctgtgtcttggagccactcagccagtatgaggctgcagctccagctgaggtctggaatcttgtggtcagctcagctagggtgaggaggcagctgctgggcactgcttgttgtcagctcagcaggtgctcacctgcccctgccgtccagtcacgtgtgaccttgggcatgtcacctcccctatcctggcttctgtatcttctacaaaacaggcttcattcccccaggcctgctggctggacggcttttaggcctgtctgaggaccacgccaggagcgcaaggcaaaaacacaccagagat

SEQ ID NO: 390411 - DNA, 1000 bp, Homo Sapiens
agataattttagtttcctcactccctgagctattttatgtatatgcaagtagatatgtacatacatatttctgccttgtaacacaaatagtagcatactatacaactgctctgcttcttcctttttttagctaagaatattaaaagagtgaaaaagatgtacgctaacaaaaatcaaaagaaaactagagtgacattataagaactgatgatgtagatttcagagcaatgattactgctaggaaaaaagggtcattttacattgatcaaagaggtcaactcatcaggaagacataataatcctaaacacttatgtacttaacagagcatcaaaatacatgaagcataaatgaaagaaccgtgggagaaagtagacaaattaatgactgtagttgaagatttcagtatccctctatgaaaatcagggtagtacaagtacacagaaaattggtaaagatatatgacttgaacaacattatcaaccaaattgacctcatttacatttgtggaatgttccaactaagaacgtcagaaaacatactcttttcaagtgcacatggaacatttaccaagatagacaatattttgggtcaccgcaagtctcaacacattgaaaggattcagatcatataaagtatgctccatgaccatgatggaattgaattagaaaccaataatgtatctctggaaaatacacaaatatttggaaattaatatgcccttctaaaaaatttatgcatcaagaagaaatcaaaaagggatatttgaaaagtactatgaaactgatggccaggcatggtgctcatcgcctgtaatcccagcactttgggaggccgagaaagatggatgaagtcaggagttcaagaccagcctgggcaacatggcagaaccccgtctctactaaaaatacaaaaaattagccgggcgtggtggtgggcgcctgtaatcccagcagtccacgtgtcgccgcccctggtgatggaccagcggggcttcgacga

SEQ ID NO: 390412 - DNA, 1000 bp, Homo Sapiens
aaattgaaaggttatgttaatttctgaagaattataatgataaaaaacggtgcagacacaacctgcactttgcaagcattgcagacttaagttttttgggggaaactatacataattaaatagtttcccagtgagctcagccagcccattcagggcagtgcagacatatgcttgtggcaaactctagccaagcaacttacctacaggagaaaaaaagactcactgtttcaagaggagctctggtgcttctctcctttctcctctttttctgtataaaccctacattcacctgtattcaacaaaatcagccaactaattggtttctgtgtgtgtattcaagaaaatcagccaactaattggtttctatgtgtgtattcgagaaaatcagccgactaattggtttctatgtgtgtgtattcgagaaaatcagccaactaattggtttctgtgtgtttgtgttcaagtgaaacgtccacattcactcagctgtgctgtgtctctgagctactctctgactctgcaaccctccccttttaaatggttgcatggactctgtattcttgtgcgtcatacccattaccaagctcaaagggacccacggaagaagctcagaactcttatgagaaataaaataccgccgtgtgtcgtgactaattatgatggcagaaaagcatcaagccggtttccgtagtgtagtggttatcacgttcgcctcacacgcgaaaggtccccggttcgaaaccgggcggaaacagttccttctacttttcacttaactgcttcaaatttattacaccgaagactagcctagaacatcccaccaatatctccacccacttaaggagaaaaggctatcaagggtatttataccgttgcctttccgccgcaatcattggcatctgggaagaacggaacccacctcacttgctgttgacaccagcatgacgaactccccacaaagcccgtccagtggatggatgcacaatgccaaatggaattc

SEQ ID NO: 390413 - DNA, 1000 bp, Homo Sapiens
gaagtgtgaaaacagaccaatacagtgatgttatctttggtagttggggaagttatgaattttgtgacactggttgtgtgactggggcagtaagcaacttatagaaaaacaaactaagccatggcaggacattgtttatgcctattctttagcaaagtctaagcccctaccataattccaaccttgccttatgaatgcgcctttaagctccaggcaaggagggggatcattttcccttgactccaagtttaactataaactaaatccctctcataggtttcttggcctttgtactagaataagcaaaaagccaaccaaaaaaaaaaaaaatcccctagaaaacataatttagcctgggaggttagaagcaagatggagtcagtcttgttagatttctcttatttatagttctgcaaaggcagttcaagagtcaccagactgttaaaggatttccatactgcaaacaagcttaaggacaccttaaagaagaaagaagaaaactatttttaaaacatttttaaaacaacttccttccatcacaatcatcagattgtgctactaaacgtcagtgagttcctgagagattcggagtcagtgcaagagaccagggctcttttggaatactggggtcatttattttttgctctttatcatctacaaattgtgtctgtgttctcttaccagacatacagggtgtcctcaccaccgattaaacattcagtgcctggaggggatggagtgggtcatgggagctggcttttccttccaaaagtcttaaggatgtccttcttagagcaagaccacgattactaattaactaaaaattctgatcctggaaataaaagctggccattcatttgcatttgaaagccattaacattttcttgataggtcggtaaatagttaccagatctttggttgctttggtggactgtgctcctctgcttttattgctaagccatccttcagacagagagggagcggctgcaagaggtaatga

SEQ ID NO: 390414 - DNA, 1000 bp, Homo Sapiens
ttgtttaaaaaatatgtatctaagaatgttctagggcactctgggaacctataaaggcaggtatttcgggccctcctcttcaggaatcttcctgaagacatggcccagtcgaaggcccaggatggcttttgctgcggccccgtggggtaggagggacagagagacgggagagtcagcctccacattcagaggcatcacaagtaatggcacaattcttcggatgactgcagaaaatagtgttttgtagttcaacaactcaagacgaagcttatttctgaggataagctctttaaaggcaaagctttattttcatctctcatcttttgtcctccttagcacaatgtaaaaaagaatagtaatatcagaacaggaaggaggaatggcttgctggggagcccatccaggacactgggagcacatagagattcacccatgtttgttgaacttagagtcattctcatgcttttctttataattcacacatatatgcagagaagatatgttcttgttaacattgtatacaacatagccccaaatatagtaagatctatactagataatcctagatgaaatgttagagatgctatatgatacaactgtggccatgactgaggaaaggagctcacgcccagagactgggctgctctcccggaggccaaacccaagaaggtctggcaaagtcaggctcagggagactctgccctgctgcagacctcggtgtggacacacgctgcatagagctctccttgaaaacagaggggtctcaagacattctgcctacctattagcttttctttatttttttaactttttggggggaaaagtatttttgagaagtttgtcttgcaatgtatttataaatagtaaataaagtttttaccattaaaaaaatatctttccctttgttattgaccatctctgggctttgtatcactaattattttattttattatataataattattttattaaaatgttccctgctttcccttttagcaa

SEQ ID NO: 390415 - DNA, 1000 bp, Homo Sapiens; identical to SEQ ID NO: 281474

SEQ ID NO: 390416 - DNA, 1000 bp, Homo Sapiens
tagactacatgctagttaagtacatagaggatgtgtgtgtatagatatatgttatatgtatgcattcatatatgtacttatttatgctgatgggaataacctggggatcagttttgtctaagatttgggcagaaaaaaatgggtgttggctcagtttctcagaagccagtctttatttctctgttaaccatatgcatgtatctgcctacctcttctccgcagctcttgggcaatgtgctggtgtgtgtgctggcccgcaactttggcaaggaattcaccccacaaatgcaggctgcctatcagaaggtggtggctggtgtggctaatgccctggctcacaagtaccattgagatcctggactgtttcctgataaccataagaagaccctatttccctagattctattttctgaacttgggaacacaatgcctacttcaagggtatggcttctgcctaataaagaatgttcagctcaacttcctgattaatttcacttatttcatttttttgtccaggtgtgtaagaaggttcctgaggctctacagatagggagcacttgtttattttacaaagagtacatgggaaaagagaaaagcaagggaaccgtacaaggcattaatgggtgacacttctacctccaaagagcagaaattatcaagaactcttgatacaaagataatactggcactgcagaggttctagggaagacctcaaccctaagacatagcctcaagggtaatagctacgattaaactccaacaattactgagaaaataatgtgctcaattaaaggcataatgattactcaagacaatgttatgttgtctttcttcctccttcctttgcctgcacattgtagcccataatactataccccatcaagtgttcctgctccaagaaatagcttcctcctcttacttgccccagaacatctctgtaaagaatttcctcttatcttcccatatttcagtcaagattcattgctcacgtattacttgt

SEQ ID NO: 390417 - DNA, 1000 bp, Homo Sapiens; identical to SEQ ID NO: 114773

SEQ ID NO: 390418 - DNA, 1000 bp, Homo Sapiens; identical to SEQ ID NO: 281477

SEQ ID NO: 390419 - DNA, 1000 bp, Homo Sapiens
aggctgacatcgctggctgcccctttgggcggagaggggacctcaccagtttttttagtatcgcccacgcccagttccctggccaactccgcagggccctcctagagccaggtgggagtggggagcgacccgcagctgctcactccaccttgcgcggcccatactgggcgtgtgcatctgaatcccgctggagagcaaacacgaacttctgttcgttcgctgcaaaatggttagaaagattacattcctctaagctggattacgttcctctaaaaaccacctgaacataaccttcgcagggcgtcaagtcatcttttcttgccttcggttgtggcttctatggctgtcccgatttgcacattgtcatctttgaagattagtgacatagcattcatcttctgttgtcaccttttccgtcattccctgtatgcctgatggacaggtttcactgaagttcagagaacagcatgcaaaattagctaccaattaatctttatgaagtgagctgcatttctagccacactgagcttatgttttagcaggaagcatttttgggaaatgtttatgttagagtttgcccttcttgacaaggtgagacataaatgtctactttagagacatgaattaagatgggaagatatttgggggaatcatttactcaaacgctaagtaataaaggtacacaaagggcaaattatactagatttctttcccacttgttttctatgtctcttgcaattcaccttgattcccttcagtttctgtttaatgtagaaagtggcattttcattattttaagcttctagcacaatgaaagaatttctctttttcatgaacaggatcataaatgaaagggaggaagagtgtcctatatcatatttattgttcaacaaaacactgctccacggcttcaattcagtttaaaaaagagaatttattgaacatttaacacatacataaaaggcagtaaagacaaatgagaagaggggaggatattgaa

SEQ ID NO: 390420 - DNA, 1000 bp, Homo Sapiens
gtagctatagatttcactgcctcaaacggggaccccaggaacagctgttccttgcactacatccacccttaccaacccaatgagtatctgaaagctttggtagctgtgggggagatttgccaagactatgacagtgacaaaatgttccctgcctttgggtttggcgccaggatacctccagagtacacggtctctcatgactttgcaatcaactttaatgaagacaacccagaatgtgcaggaattcaaggagttgtggaagcctatcagagctgtcttcctaagctccaactctatggtcccaccaacattgcccccatcatccagaaggttgccaagtcagcgtcagaggaaactaacaccaaggaggcatcgcaatacttcatcctgctgatcctgacagatggtgttatcacagacatggccgacacccgggaggccattgtccatgcctcccacctccccatgtcagtcatcatcgtgggagtagggaacgctgacttcagtgacatgcagatgctggacggtgatgatgggattctgaggtcacccaagggagagcctgttcttcgagacatcgtccagttcgtgcccttcaggaacttcaaacacgcatctccagctgccctggcaaagagcgtgctggctgaagtcccaaaccaagttgtggactattacaatggcaaaggaattaaaccaaaatgttcatcagaaatgtatgaatcttccagaacactagcaccatgaactccccacacagttttacagagttctgaaatactattcctgctaatatttcatatttaatacttctactactcctgtactttaaaaaaccaacaacatatacacatttaaaaatagcacgttttggtgatttttaactatctgacaatttttttttgcatgtgtagccctgaggcctggatctgttaagcccttgtattgttaactttttacaaagaaacacagataacaataacttactatttacattaca

SEQ ID NO: 390421 - DNA, 1000 bp, Homo Sapiens
actttacccccaagtattttagcatgaaccacctaagaacaaggatagtatataaataaccaaaataaaattattcacaatcaagaaatttaccattgatagactacatattgagatttgtttttgttatttccataatgccctgcgggaattttttttaaccctcattcaggacccagtcagggattgtacgttatattcactcctcatgttttatgagttttcagtttcctttaatttagaatcccctagaattttatttttttttggttttttgatgtttttggtatgtatagttttattgtattatgaaatagatgctatttaaacattttgccttttaatgagtcaaataaattttttgtttttaaggtgggtcatgataactgggtacgtggagttctgttccattctggggggaagtttattttgagttgtgctgatgacaagaccctacgcgtatgggattacaagaacaagcgatgcatgaagaccctcaatgcgcatgaacactttgttacctccttgggtatgtacgcctcgcgaggtctctgaacattagattttggagtgccagacaaactgtgttttacataatcgtgtggactttgccaggtaagaaatgactgtgctttcagggcagaatagagaagacatgaaaatcttgtggattcctaccatttgttttaaattctcctttcccgttaactctttccatcgttagccttataataaaaacattactttctccactgcacaacattggttttggaaaccacaatttgtgaagaggttacttaccactctgatgggtaatttttctcccctattagtttgtttctcaaacaaaatcttcctcaacctttcccactggcaggtgtatactatcatatactagaaactcagaaaattgtatttgatttgagtaaacatcctcactatcatctggacttgaatctggaatttaagagagtgaatacagtcaagtataataaatgca

SEQ ID NO: 390422 - DNA, 1000 bp, Homo Sapiens
agaattttaaggacctggatggatgcggtggctcacgcctgtaatcccagcactttgggaggccgaggtgggcggatcatgaggtcagttgttcgagaccaacctggtcaacatggtgaaaccctgtctctactaaaaatacaaaaattagccgggcgtggtggcaggcacctgtagtcccagctgctcgggaggctgaggcaggagaatcacttgaacctgggaggtggaggttgcagtgagccaagatcatcaaaatcatgccactgcactccagcctggtgatagagcaagactccatctcaaaaaaaaacaaaaaaacaaaaaacaaaaaaaaaaaactttaaggacctcttagagattaccgcatccacattctcatccatgtggcatcccctctgcagcttccccgtggcctgagcacacacagtggagacctcatttggaaggttggtcatcgagacagcctcacattggagacatcctcttgctgtagagactccagtgagatgcacgttatccacatgaaactgcgggtcagtctttagagactaccttgactcttttttttgagacagagtctcagacggagtcgcccaggctggagtgcagtggcgcaatctcagctcactgcaacctccacctcccgggttcaagcgattctcctgcctcagccacccgagtagctgggactacaggtgtacggcagcacaccggactaaatttttgtattttcagtagagacagggtttcaccatgttaaccaggatggtctcgatctcctgacctcatgatccgcccacctcggcctcccaaagtgctgggatgacaggcgtgagccaccatgcccggccaggatttttttgaagctccacatatttctactgtgcagctgaggttgagactcactgcagtacattttcatagagcatcagcgaggaatgaatgcccggtggatttcctaacatctttacaaagaaagaaaaacacgatgcaggaa

SEQ ID NO: 390423 - DNA, 1000 bp, Homo Sapiens
ttgctgcctatgagccaggggccactctcagctcctatagccagtctaccatgtacttccacatggccctcgccacaacacggcatcttgattcaaagcccagaggaaagcatttgctgcagcttcaaatctctctgattccttctcacattgtagaacctgttttaaaagggctcacctgataaggtcaggccagcatgtgccagcagggagtagaaatcttgaggccatctcagagttctgcttaccatagaaaccattcacccttatatttaactgtgaaatatctgatttaaaattatttacttctttgtttccacagcctggtgagagtcaaagaggccccaggggaccatatccacctggaccactggctcctcctcctccaccacgttttccttttggaacaggatttgttccaccaccccatcctccaccctatggtccagggagatttccaccacccctttctccaccctatggtccagggagaatcccaccatcccctcctccaccctatggtccagggagaattcaatcacactctcttcctcctccttatggcccaggttatccacagccaccttcccaaccaagaccctatccacctggacctccatttttccctgtaaattctccaactgatcctgccctccctactcttgcaccctaaatacagacaactgcaacaggtgccaccacccacaaaagacaacactaccctcgtaactactgcttctactacccaaaaataagaatttcaacactacttccaagagacttttagataaaatcacttccatttttggatgagaataaagatttccaaagcactgagcttttgggagaaatatcttagaaattgtgaaacgatccccatgaacctttatatcagtaggggaaaataaagaattgagcaacaatatgaagtatccactgttatcagagccaatagtttacaccccagttatgtcacctaaatgaatattagtgctaacag

SEQ ID NO: 390424 - DNA, 1000 bp, Homo Sapiens
cagaagatcgtcttcattttaccttggccggtgatctgactctgttctcgcgcccatctgtggttgattctctgtcgccttggaatggagcatcagatcttgaaggtcgctcattgcttttccacgcatagaactgagccacatggcaagagcttcctaatgaaatggacggaaactctctgcaaagggctgccccagaagcacgggtgatagaaatagagtccaaggcactaagggccgctgagccacagtcctcctaggcaatgctccctgctggcttagtgggtttatttcataagttgagtactaatgtcctgttttttaaatgaacatatttcttctaacatttctaacaattatgaagattttctccctaagtgtgactttttcttatgtcttggggtatcagatttacagcgtaacatgtgtacttcaaattgtagtagtgactggaaatttaggattctgttgtttcataacacttaaatctgcagcagattttcaggaaaatggtcaagattcacagataattccttccttattccttacagattttacaattgtatggttatttctgaatttggttaatttgtttataagtgtagtggacatttaacagaacagatgcacccgattatctgattagaaatgtgtttcaacacacgggtccctttgcgtgtttccaatctctgttttcggatctgggattctccacctgttacatcgttcactggaactttcctacaaaatacagcctcgctgagaggcgcatcgtggaaaaatgaagcagcctgaagaaactctaatattgggaccgagtggagagatggaagagcatcatcagagtggtgccgcgcacatgcgggaggcgtcccaggcagcattgctctttgtacatgagacaggataccactgtcttttatgcattagactggtaaccagataaaataaccttgtaaaacagatcttttatgtaagaaaaatacaactctcacctcgc

SEQ ID NO: 390425 - DNA, 1000 bp, Homo Sapiens
gacaagctcccgctccccagtaccttaagaagccacctcaagtccttctccatggctaagggcctgaatgccaggatgatgcgaggcctctcctactccctcaccaccagctccactcacaagagcagcctctgcaaagtggagatcgtctgcccaccccagagcccacccaaaaactgcaccagaaacagctgcaaaatttcttaaggaaggcaccaaaaggaaacaagctggaatcgctccaggaaaaactctggttacacctggaagatggaagtcgcattgtagattcaagaaattagttttcagtttctcacgggaaccatgctgcttgggaatgtgtgtgatgccttctgtcaataaaaacacattacacagtttgactttgaatttctatttggatgtgcatgaagctcttgttttaaacgtgtgtttataaaggggaaattagtactttgctcaactcttgataacgtgaaattttgaatgttacttatatcataatcacgctgcaactttttccttaaaataaccgcctttgttagaatggtgatatggcaatgatgagtataaattcaaggaaatttgagaagcaatgatagtgagataattcagtcatcgatagtacaagaggggcctttttgtaaacctcctttttaatgtcaaagcaccaatttataaaacactgcagatgcatatagagattgtatataacagatctgtccagcttgtgcatgaaatggatttgataaagtttttgctatgttatttactacatttggggattaatacgtgatttatatgtatgtttttctgtaaatctactttttttgtacgagatgttctacaagatatgaagctaagggaggaaaacaccaaagatatctctagttatgttgaacatagccaatatggtttcaatggatcaataagaaaaaaccatttcagtaaggaatgaaatacgtacttatttgagaaaatgtttcttaacagtaaaaaa

SEQ ID NO: 390426 - DNA, 1000 bp, Homo Sapiens; identical to SEQ ID NO: 281480

SEQ ID NO: 390427 - DNA, 1000 bp, Homo Sapiens
ccgtcagacctccttgtctcccaggtggaggtgacccctgcccagctcttccacagccttctctgtagggcccgagagtgaccatgcacatatctgtcccacagtgcccccggaggccgtgaacatgtccctgggcctgtccctggcgtctaccaccagcccttcccagctgctggtgagtggccctgggtcacaggaggcttctgagggagggagggaggagccggggccgccgggggctgggactctcctgtagggtggaggttccggcatctgagggtgggaggtacatgccagggagtgcccccagcagcccgctgtgtccccaggcctgcggccccaccgtgcaccacgagtgcgggaggaacatgtacctcaccggactctgcttcctcctgggccccacccagctcacccagaggctcccggtgtccaggcagggtgagtgtcgggaccaccaaggctttgaggagctcacgcacatccaattgggggtgcggtgggctagagacagtcttgccagagtggatcagaaagaagggatctggaaaaagagttacctcgtgttgcagtggttcctgacgctgctgcccgcacatcctgccgatcgccgcacgctgccggacctttcctgtgaccttaacctctccaagcctcagtttcttcatctgttggatggggataataacacacccagcactgaaagcaacacaggatgattcatggccaggggttagcacagcagctagcaccaggcgacacccatgccggccagctgttgttatttttagaggagaggactattttcatccaatgggtcctgggatatgaccaattggtttgtgccgtagtttaggaaaggtcagtgaaagtgcagtgtgagcaacgtgtgtgtgtacatgtgtgtatatgtatgcatgtgtatacatgtgcacatgcacatgtacatgcatgtgtgtgcatgtatgtgtgtgtgtgcatgtgcatgcaggttgagacg

SEQ ID NO: 390428 - DNA, 1000 bp, Homo Sapiens; identical to SEQ ID NO: 281483

SEQ ID NO: 390429 - DNA, 1000 bp, Homo Sapiens
ggacagaagcaatggccgaggcagaagacaagccgaggtgctggtgaccctgggcgtctgagtggatgattgggggctgctgcgctcagaggcctgcctccctgccttccaatgcatataaccccacaccccagccaatgaagacgagaggcagcgtgaacaaagtcatttagaaagcccccgaggaagtgtaaacaaaagagaaagcatgaatggagtgcctgagagacaagtgtgtcctgtactgcccccacctttagctgggccagcaactgcccggccctgcttctccccacctactcactggtgatctttttttttttacttttttttcccttttcttttccattctcttttcttattttctttcaaggcaaggcaaggattttgattttgggacccagccatggtccttctgcttcttctttaaaatacccactttctccccatcgccaagcggcgtttggcaatatcagatatccactctatttatttttacctaaggaaaaactccagctcccttcccactcccagctgccttgccacccctcccagccctctgcttgccctccacctggcctgctgggagtcagagcccagcaaaacctgtttagacacatggacaagaatcccagcgctacaaggcacacagtccgcttcttcgtcctcagggttgccagcgcttcctggaagtcctgaagctctcgcagtgcagtgagttcatgcaccttcttgccaagcctcagtctttgggatctggggaggccgcctggttttcctccctccttctgcacgtctgctggggtctcttcctctccaggccttgccgtccccctggcctctcttcccagctcacacatgaagatgcacttgcaaagggctctggtggtcctggccctgctgaactttgccacggtcagcctctctctgtccacttgcaccaccttggacttcggccacatcaagaagaagagggtggaagccattaggggacagatct

SEQ ID NO: 390430 - DNA, 1000 bp, Homo Sapiens
ctgtgcagagatagggaatgtgtgttgaaaaagcatgttttccatcctggttctcaaaggtgtgtgtgtcgggtcccttggagggtttgttaaatgccgatggctgggccccaccccagagcctcctctccaggaggccaacaggcctgagaatgtgcatttctcacgaattccccagtgatgcggatgctgctggctgtgggacccaggaccacactgagaatcactgctctgttaaaaatccaggcaatgtgggacggacttacagtctttatgtgagaggaacaacttttaaaaaaaatttttaatatttttaatagagtttcactctgttgctcaggcaggagcgcagtagtgccgtcatggctcactgcggccccaaactcctgggctcaagtgatcctcccatctcagcctcctgagtagctgggactgcgggcgtgtgccaccatacctggctaatttttaaatttttttgtggagatggggtcttgctatgttgcccagtttggtttcaaactcctggccttaggtgatctgtccacctgggatcctaggcatggattgcaggcgtgagctactgtgcctggctgacttatttatttttattatttttaattaggggtcccagcagtggcagcggtggtgggggtttgtgtgtgttagggggtttgtcaaagtgagattcctgtgtgcagcttcaagaatcaagtctcgggccgggtgcagtggctcacgcctgtaatcccagcactctgggaagccaaggagggtggattacctgaggttgggagggcaagaccgtcctggctaacacggtaagacccgtctctactaaaaatacaaaaacttagccaggtgtggtcgcacatgcttgtggtcccggctactcaggaggctggtgcaggagtatcgcttgaacccggaaggtagagattgctgtgagctgggatcgcaccattgtattccagcctgggcaacaagagcaagactccatctc

SEQ ID NO: 390431 - DNA, 1000 bp, Homo Sapiens; identical to SEQ ID NO: 202048

SEQ ID NO: 390432 - DNA, 1000 bp, Homo Sapiens
aggagagacagtgtagaaatgccacgtgggaccctggaccctgcacaggagagatggcgtcagggcgttatctggacggttggtgacatttgcacacgggccacggaccaggtcacgtattgtgtacacccacccaagtactgaggtgtgacgcggcactgcgtctccagcctacctcctgtagtgcaggaagccagtgcagggtgggtgaggaagtgcacaggggtccagggactgtcccacagcactcctgacgaaagctggtccccttccacggccctagccaaggagccaggtctgcaaagctgggaccaggtgtgtgcggaggcacgtgttcccacttctcccatggcagagggagagcctgtggacaacagtggggcactctgctcccaggcaggtcccactgggctgagccgcacagcctggctttgggcttccctgactgcaccacccacatcagctgcctctagcccttaaaatacaaaacttcccccagtcactggccgccagggctgagttgggggatgtgttacatccctgggtccactggggggcagtgttggccatggtgttggtgctggctctgcagagaggcgttggagtggctgtgtggggcggtgagcgccggcccagcctgatggaacccactgtaccaggcccaggcctcagcctctgagaaggacttccctgtgtcactcactcatacatgtcctcaggacgtgaagacatttcagcagaccaaagtttccttcgaattttcttcgaatcgtccagatacttggagacatctcctcctcacctgtggggtgctggggcagtcctaggcgtgggggcagatgggtggacagctgctgctgccctgctgggggtgggcagcccttggagcacacagtggtgaagacattcctgaatatttctcaggctgtagaaatcttattttgtggaaagattttagagaatcatcaaaataaacttttaccaaataacattttaccag

SEQ ID NO: 390433 - DNA, 1000 bp, Homo Sapiens
gttcagttctgctgccaccgacggcccaactcacctgcacctattctcagaccatttaaaactgacctgaggccgggcacagtggctcacgcctataatcccagcactttcggaggccgaggcaggtggatcacgaggtcaggagatggagaccatcctggccaacatggtgaaaccccatctctactaaaaatacaaaaattagccaggcgtggtggtgcgcgcctgtagtcccagctgctcgggaggctgaggcaggagaatcgcttgaacccgggaggcagaggttgcagtgagctgaggtcacgccactgagactccgtctcaaaacagacaaacaaacaaaaaactgacctgaacacccaggctctgtcttcttgtggaatccctttaggattccctttgtggaattcctgtgtgaacgctaacacagaggattattactgtcagagcccatgcctgtggtcatcagagggaggtgcagtgagcgctcagagaagagccctggatgagatgctgttggcggagaatgaaaagccaatatgatcattgccttcaaattacagagtctaacaggagggcccagtcacagaagccacaagaagactgtttctccatctagcagaaagacatccccgtgttgtctgaggatctgaaggatgcatacaagaagaatctgcgttcctactctctaatgaatgtttccacttattggaaaaataaaggccacgtgtggtggctcactcttgtaatcccaacactttgggaggccaaggtgggcggatcacatgaggccaggagtttttgagaccagcctggccaacatggcaaaacccgtctctactaaaaatacacaaattagctaggcgtggtggtgcatgcctctaatcccagctattcaggaggctgaggcacgagaattgctgaaggaggcagaggttgcagagctgagattgtgccacctcactccagcctgggcaacagagcaggactctgtctc

SEQ ID NO: 390434 - DNA, 1000 bp, Homo Sapiens; identical to SEQ ID NO: 281486

SEQ ID NO: 390435 - DNA, 1000 bp, Homo Sapiens
cgccaccgcgacacgcaccccggcagccccggcagccccgggcccgcgctgcgccctctgcccgcccgtgagaagccccacgcgtgctgcgagtgtggcaagaccttctactggcgcgagcacctggtgcgccaccgcaagacgcactcgggagcgcggccctttgcctgctgggagtgtggcaagggcttcgggcgccgcgagcacgtgctgcgccaccagcgcatccacggccgggcagcggccagcgcgcagggggcggtagctccgggcccggatggtggaggccccttcccgccctggcccttgggttagccgcctcccggccagcgccatctcccgcccttggtgctgcccccgggcggtacctgctctctcccagcgccacttggcctcttcctctcctccttccctcccatcgtcctcctccacctgcgcctcccttgtctgaacttcccaacgccttcctattcctttccaactccttttcccccaaatttcactttccttctcaggtctcacctcagccccccccttctccctgatttctcggcctctctctctgtgtgaaggggcctctccctaatgtctcctccttcccccctcttctctctcctgcggcccagcctccctctccctcctccattcctctctccctgcccttttcctgcctgaagagcagaggtgaggacctgggacccctgaggggcaggccaggaggagctcgggcgcaggccaggcccccttggtgaagcagaggctgaaggaaaggggtctgggtcttgtccctaggaattctcctccctcaggagattgggggttgggggaggcagcgggtgatggctctgaagctgaacccagggcctggctgtggtcttcttggtcttgctgccccctgtgacccaaaggcatgggatggacagagatgcctgcccccgtgaagctggttggggagggcagttcaccagcatccatagagtaataaattcactttttttag

SEQ ID NO: 390436 - DNA, 1000 bp, Homo Sapiens
tgggctggctggctgggtggaccgggcctccagctgggggtggggggggggcgggtatcgggtccccccctcagccttggtgacaggacaggcaggttcaccctgagggtgagagctccctcccgcccctaagagagccaggggcagctggtgaccgtgtggtcatggtggggaccagccctccggggcacccagtcggggcaggttctcacgtgggagggcacagggcttcctgcaggctcggaggcccagggcggattgtggccagtggaagggaaggatgtttctggcagggggacttgtgtgggccacggctgtgcggctgcggcgttgagcacggcctcactgtccacctgtcccctaggcctccagaggaagaagtccaagttccgcttgtccaagatctggtcaccaaaaagcaaaagcagcccctcccagtagtagccagtagggccgtgggctcggcccggacctggcatccggacttggactcggggccatgggcttggcccggacccggaacccggacttgtactcggggccgtgggctcggcccggacccggcattcggacttggactcgggaagggcctcctgtccctacaaggggcatgtggacagcagggacctgcgctaccgtctgtggtctcaataaagaaaccgaccacatggccccggactcctacgtgcctccgtgtttgcctcggtgcccctgggcggccccgcacctgcctggggtctcgcctgcctcccagctcttgcctgcaggacggacgtgctctgtggcctcgggcaggagccgaccctctcagggcctggccctcgaaggtgtttccccccgggccggcctgccgtgacgatcacagccctgccgtctcaggtcacggttttggattctgcgctaacgaggtctcccaggtgggctggaaacactgatgaagacggatagaaaaaacaccagcccaccggattattaataaagataatcacacacacccctt

SEQ ID NO: 390437 - DNA, 1000 bp, Homo Sapiens
ttgatgacttcagctgctgcttggggagctacggctccgacaaggtcctgatgacattcgagaacctggctgcctggggccgctgtctgtgcgccgtgtgcccatccccaacaacgattgtcacctctgggaccagcactgtggtgtgtgtgtgggagctcagcatgaccaaaggccgcccgaggggcttgcgcctccggcaggccttgtatggacacacacaggctgtcacgtgcctggcagcgtcagtcaccttcagcctcctggtgagcggctcccaggactgcacctgtatcctgtgggatctggaccacctcacccacgtgacccgcctgcccgcccatcgggaaggcatctcagccatcaccatcagtgacgtctcaggcaccattgtctcctgtgcgggagcacacttgtccctgtggaatgtcaatggacagcccctggccagcatcaccacagcctggggcccagaaggagccataacctgttgctgcctgatggagggcccagcatgggacacaagccagatcatcatcaccgggagtcaagacggcatggtccgggtttggaagactgaggatgtgaagatgtctgttcctggtctgcagatgggtaggaagagagaggcagcagaggctctggcacaacagtgccaggctgagggtggcagaggtgactggggcctgagctctgcctacagaagaaacccccagggcctccttccccacagttctcaaggaagggcctctggcaatcacagctctgcagcccaaccctctccatggccgatgggacttctatgaaaaggatgagcacacacactcggagggctgagcagcacgctggaaactgtgacttggtgatgcccagctgcacacgaaattacacatgactcaccttattaagggctattgcactgaaaaaaaaaaaagatgggtcgcttactggaaattattgtattgtctttattttattaaagcaactatgttttaaatgc

SEQ ID NO: 390438 - DNA, 1000 bp, Homo Sapiens; identical to SEQ ID NO: 281489

SEQ ID NO: 390439 - DNA, 1000 bp, Homo Sapiens
caagcataccagagggatgcgacacatgccggcagtaacagcggctcacttggcatcttcaaagccatggggcagggcctgccagacgaggagcaggagaagctgctgcgcatctgttccatttatacccagagtggagaaaacagcctggtgcaggagggctctgaggcctcccccattgggaagtctccatatacactagacagcctgtattggagcgtcaagccagccagctccagcttcgggtctgaagcaaaggcccagcaacaggaggagcagggcagtgttaatgatgtcaaggaagaggagaaggaggagaaagaggtcttgccagaccaggtagaggaggaggaagaaaatgatgaccaagaggaggaagaggaggatgaagatgatgaagatgatgaagaggaagacagaatggaggtggggcctttctctacagggcaagagtcccccactgccgagaatgctaggcttctggcccagaaaagaggagctttgcagggctctgcatggcaggttagctcagaagacgtgcgatgggacacatttcccctaggccgaatgccaggtcagaccgaggacccagcagctcatgctggagaattatgacaccatgtatcttttggaccagcctgtgctagagcagcggctggaaccctcaacatgcaagactgacaccttgggcctgagctgtggtgtcggcagtggcaactgcagcaacagcagcagcagcaacttcgagggccttctctggagccaggggcagctgcatgggctcaaaactggcctgcagctcttctgatggccatccctggtgcaagtgttcatccagccgtgccagggcaacagcccaccccctagtacaactgatgctccctgagacaacctgggagacagcctggatcagccacatcaactcagttgtccaccacaggggaattttgaatgtcttttgtttttgttttgttttgaaaaataataaacaggcaactgt

SEQ ID NO: 390440 - DNA, 1000 bp, Homo Sapiens
aaggggctcctctgggaagctccatctctgttctggaaagcccctcaggaagcgctcaccctgtagccggtctgtgcctgccccaggccagagcaggggacgaaggtttacctcttcccctcctggccttccagcctcaccttctccctgcatcacagagagaagcaagcagaaggcccggaggagaacaagatccagctcctcctcctcttcttccagttcttctagctcctcttcttcctcctcgtcctcctcctcttcctccagtgatggccggaagaagcgggggaagtacaaggacaagaggaggaagaagaagaagaagaggaagaagctgaagaagaagggcaaggagaaggcggaagcacagcaggtggaggctctgccgggcccctcgctggaccagtggcaccgatcagctggggaggaagaggatggcccagtcctgacggatgagcagaagtcccgaatccaggccatgaagcccatgaccaaggaggagtgggatgcccggcagagcatcatccgcaaggtggtggaccctgagacggggcgcaccaggcttattaagggagatggcgaggtcctagaggaaatcgtaaccaaagaacgacacagagagatcaacaaggtgggtgtggcccctctgcctgccatccgcccccagctctgtttgtgatgtacccctcctcctgtgtgctttcttccccagcaagccacccgaggggactgcctggccttccagatgcgagctgggttgcttccctgagggcccccgctggccaaggcctgtggacgacgctggcggcccagcctgggcaggtttcagggtgccagtgggaagcctgatgggtgctggtggcctttcccccgtggattggtctctggcccagcccagtctcttctcaggggcagggggtggaggttggggtcaccggcctgcttggcacccccatctgaaagagcagcacttctcagctattaaaggccccctggatag

SEQ ID NO: 390441 - DNA, 1000 bp, Homo Sapiens
gatgcgaagcctctgggccacaggccagtgtgagattgggaagccccttttcccagagctgtccagggcaggtgcggcaggcctgatgggtgcttttggcacccccttcctagtcaggaccacaggcacctcagagactgagatgtcggctatctgccaggaatacaggagcacctcagccaccgccgtgacattctctgactcgtcactgttgaagacgcaatcctcggactctgggaacaacagggaggcactaagccatggtcccagaaaaatcaaggccacccagggccagaggcagagccttagcaagactgagcccacccagagccagaggcggaactccagcaagaccaaggccactatacacaagaggaactccagcaagaccaaggccacccaaagccagaggcggaactccagcaagaccagggccacccagggccaggggcagagctccagcaagactgaggccactcagggccagaggcagagctccagcgagattgaggccacccagggcccaaggcaggagcccagcaagaccaagaccacccggagcccaaggcagaggcccagaaaggtcaaggctgctcgtggccggagctggagacccagcaaggttgatgccacccagggccgaagcaggggactgctccgaagttccaccaagactgaggctttctatgactcaaactggagcctcagcaagactgagtatgcccaaggccagggccagaggtccagcaaggctgagggtgcccagggcaagagccagggcatgagctcaacttccagcaaggccgagtccacctggggacccagcccaagtctcagcaaaactgaggttgatcaggacctcacctactatgaagctgtctgaagggaccatccagaccctcccttcttgctggggaggggatgagttctacccacctccccacactggcactcagccagctgcctccttccagagcaattaaaagtcttagcaacagtc

SEQ ID NO: 390442 - DNA, 1000 bp, Homo Sapiens
ggctgctgcagcggatggagcacagcaagaagtaccccggcttcctgctcaacaacttccacaacctgctgcgcttctggcagcagcactacctgcacaaggacaaggacagcacctgcctagagaacagctcctgcatcagcttctcatactggaaggagacagtgtccatcctgttgaacccggaccggcagtcaccctctgctctcgttagctacattgaggagccctacatggacatagacagggacttcactgaggagtgaccttgggccaggcctcgggaggctgctgggccagtgtgggtgagcgtgggtacgatgccacacgccctgccctgttcccgttcctccctgctgctctctgcctgccccaggtctttgggtacaggcttggtgggagggaagtcctaaaagcccttggtccccctgggtctgagggccctaggtcatggagagcctcagtccccataatgaggacagggtaccatgcccacctttccttcagaaccctggggcccagggccacccagaggtaagaggacatttagcattagctctgtgtgagctcctgccggtttcttggctgtcagtcagtcccagagtggggaggaagatatgggtgacccccaccccccatctgtgagccaagcctcccttgtccctggcctttggacccaggcaaaggcttctgagccctgggcaggggtggtgggtaccagagaatgctgccttcccccaagcctgcccctctgcctcattttcctgtagctcctctggttctgtttgctcattggctgctgtgttcatccaagggggttctcccagaagtgaggggcctttccctccatcccttgaggcacggggcagctgtgcctgccctgcctctgcctgaggcagccgctcctgcctgagcctggacatggggcccttccttgtgttgccaatttattaacagcaaataaaccaattaaatggagactattaaataactttatttt

SEQ ID NO: 390443 - DNA, 1000 bp, Homo Sapiens
tagcttttttcattttttctttccgtctttcttcttgagttcacggttcaatattgcctcctcgccctggtgaggggaggtgctgcttttctgccccacctgccggctggttccagcagcgctggggcccagctggggggccgggatgggggcttctctctctgggaggggtgcaggtgccctccccaggctgggagggttccttccctagctccccatctgcccccgctggtgagagttgggcttcttggtcttggaactccctggcattgggaacagagcatttccagcatttgttgttgttgttttactcacctaacccttagaaaatgaatgttagaaggtgcctgccgaggcgggacagagtgtttgctcgcgctggagaaggctctgctcagccctgagagtcccttcctgccccaccgatactggcactttaaaaaggaagctgaccgcacagtgtccagacgaattggcccccagaagatggggagttctgtcctgcccttctgtgtctgcgtgacctcacccagcctaggagggaggtgcattcagggtagatttgcctctcattcaaagttctggggctttgggcggaaaacagccagctttggcgctgttggggagactcctccagaccaggaaccccagaaggagacagagcctgccacatcctcccacgccaggccctgggccagggtgattggactgagaatttggccacaaccaaattgatgctggctggaaccagaggccagaaagcctggccttgtccccatgtgggagccctgtcctcagccctcttgtccccttgagctcagtgaattcccaccaggtgcccacagctcctggacttcaaattctatatattgagagagttggagagtatatcagagatatttttggaaaggagttggtctatgcaatgtcagtttggaatcttcttgaaagtttaatgtttttattaggagatttaaagaaaataaaggtctacaatatc

SEQ ID NO: 390444 - DNA, 1000 bp, Homo Sapiens
tcatctatcagattgttaaggattttttttaaatttgacaacatccagtgtcaatgagggtgagggcaaaaaaaggactaccttggtgagaatgtaagttgtttaatcctttgggagggttaagctgtagatatctaaattttaaatatatatttatcctcttccatgttaagaaccctaagaaataactggacgagtgtggtatgatgtttgcatgtgatattcattacagtattattttaatagtagaaaattgttaaaaatctatatgtccattaataggaaattggttaaataaaatgaggcttccacaaactgaaacactctaaatctatattctattatttacataagaaaattattttggtaaagtaagtaagtcaaaaacacagattacaaaataatatgtactgtataaaattatataactcaagtcaagtgaatggttcagccaaaatagtgtttctctgaatgatgaatttgggggtgatttttacttgcttatactttagtgtccaaattttctacagtgactataaatttcattttaaaactaaaaagttcttacatttggggaaatgcagtgaattcccacatcatgttttaaattactcagccactaaaaatgaatgtgcatggcgtcattaacataatcattgcctgaaccgtatttttcacactatgtactctaggttcctggaggtgaaaggaatctggacttagagttcttggctacctctggctgcccccgaattagaacagcccatgggggtatgtgtattgggagtggaggagtggacgggtagattgactttttctcaggcatcaatctgttacaaggttcatggtttctatggggccagatgcatgagaggtcaaagcatgggcaataggggttaactgaacgagttgaatgctaggaagtcctcaggggagccaacgttccttgtaaagtgtgtagattttttgttttttaactaaataaaatcttggcactgac

SEQ ID NO: 390445 - DNA, 1000 bp, Homo Sapiens
tgatcaagcagggccgctgcacgctggtgaccacgctacagatgttcaagatcctggcgctcaatgccctcatcctggcctacagccagagcgtcctctacctggagggagtcaagttcagtgacttccaggccaccctacaggggctgctgctggccggctgcttcctcttcatctcccgttccaagcccctcaagaccctctcccgagaacggcccctgcccaacatcttcaacctgtacaccatcctcaccgtcatgctccagttctttgtgcacttcctgagccttgtctacctgtaccgtgaggcccaggcccggagccccgagaagcaggagcagttcgtggacttgtacaaggagtttgagccaagcctggtcaacagcaccgtctacatcatggccatggccatgcagatggccaccttcgccatcaattacaaagtaaggcctgggccctgcccaaacattcactgtctgcccacccagccccaccccatgaagccatctgtccctcatccccacagggcccgcccttcatggagagcctgcccgagaacaagcccctggtgtggagtctggcagtttcactcctggccatcattggcctgctcctcggctcctcgcccgacttcaacagccagtttggcctcgtggacatccctgtggagttcaagctggtcattgcccaggtcctgctcctggacttctgcctggcgctcctggccgaccgcgtcctgcagttcttcctggggaccccgaagctgaaagtgccttcctgagatggcagtgctggtacccactgcccaccctggctgccgctgggcgggaaccccaacagggccccgggagggaaccctgcccccaaccccccacagcaaggctgtacagtctcgcccttggaagactgagctgggacccccacagccatccgctggcttggccagcagaaccagccccaagccagcacctttggtaaataaagcagcatctgagatttt

SEQ ID NO: 390446 - DNA, 1000 bp, Homo Sapiens
gagatcttcctgacccccaacctctccctgcccctgtgggagtggaggccagactggttggaagacatggaggtcagccacacccagcggctgggaagggggatgcctccctggccccctgactctcagatctcttcccagagaagtcagctccactgtcgtatgcccaaggctggtggtgagtgtctgtcttcctggctaatgtgttcatcttgaccagagggcctctgggaagaagccaggaggaagcctggcactggggaagggagataaggagcaagggagataactccactgtccttcagcttctcctgtagattactcctgaaccgtgtccctgagacttcccagacgggaatcagaaccacttctcctgtccacccacaagacctgggctgtggtgtgtgggtcttggcctgtgtttctctgcagctggggtccaccttcccaagcctccagagagttctccctccacgattgtgaaaacaaatgaaaacaaaatttgagcaaagctgacctggagccctcagggagcaaaacatcatctccacctgactcctagccactgctttctcctctgtgccatccactcccaccaccaggttgttttggcctgaggagcagccctgcctgctgctcttcccccaccatttggatcacaggaagtggaggagccagaggtgcctttgtggaggacagcagtggctgctgggagagggctgtggaggaaggagcttctcggagccccctctcagccttacctgggcccctcctctagagaagagctcaactctctcccaacctcaccatggaaagaaaataattatgaatgccactgaggcactgaggccctacctcatgccaaacaaagggttcaaggctgggtctagcgaggatgctgaaggaagggaggtatgagaccgtaggtcaaaagcaccatcctcgtactgttgtcactatgagcttaagaaatttgataccataaaatggtaaagacttg

SEQ ID NO: 390447 - DNA, 1000 bp, Homo Sapiens
cagccctggggcatctagcaggatgcataattgtcatctggtgagagttgggactttgctcaattttaataccaatctctcctgattgtaattacctccactactttcatgatccccctacaatatttttttaaatgatatatttattcactgaatcaaatgtcattaatgagttatcttctgtggaggatgactgttctctttgttaatgttcacaatcaagatcttgggctgagaagaggcccttcacccaaggagtttgaagtatcacagcgtgtgggaaggtgggaaccaggatacccattcatttccaaccgagacacagagaagtgagtcacagaatttgagcccgctctcttgactgcccagccagagacactgatttctgtaacctcttcacttgatcctgcctcttaagcattaaaacattctcctaaacctctgagtgttttgtgggttctgggtgttttgtacattttagccaagctaaccacttgtctgcaagtactgactttcctatgaattctttgaagattattgagtcagaaaggaaaaatatagccccaaattcccaggcttttaatgcattacattaactgcctattgaaatgagaagttcttcacaaacttgtatacccactaacaagattgcacataaacatgcattaaagtatatactaagaaaccctctgtccaacggctcatgcatatgaagtccgaacatgggagtttgccaattgcattcatcaagtcgttttgcggagtcagatccctgatggaagagctcacaggctctgccttccaagtcctgggttcctaactggtgaccttagcctggggtctgtggggagaccaaccctggcttccaagaaaaccacattccatggactatcagaaatagacacagatttgggtgacaaagctggctctgtatttgcattttatttttgtgttcttgtcagtttgggaatgattaatattaaacatttatttgagaaac

SEQ ID NO: 390448 - DNA, 1000 bp, Homo Sapiens
accaagcaaatgtctgtgccaaaaacttctattattttttctccagcgagtatcagaatattgaagtcaccaggaaaatacaacaaaataatccaacagataattttctgtctaaacacagtgttgccatattattctcaatttcaacacaggaattacatacagcaacaaaaagtatctcttctttcctactacaaaactgtgtaatatcaggttctgtcaccatgtttaggttagtaaatgctcttaaagtctattactattgagtgaattgctaaaaaaaataattattgctatcatcctgggcagacttaatcatgtttggtagttagttttagtagagacatgccccatctttggttaaaatcaaacagggaactatcacctagctttgtttaaacagtaaacttatagaactatgctttcactactggttatgaatgcctgacagagctttttagtagttttatattcagtttacatttatttagacagaacaaatgataattttggaatcgagagttctaaagtctgtaaacatggccctaaatgtggaccaacaaatatagaatcctgtaaacatcatccccaaagtgaaataacaaatatagaatgaggtaaacatggttattcttgggaaattggcttttcctctttcttactttcttgtggtaccttcaaggtcaattcatgagtcagtaggaagataacagtcggaggaagcaagcattcatcatctgcagctaatccataggatctgtccttttaccaactccagaggcctctttagacccacaaagctagtttgactgtgccttgccaaaccacattaagcagctgtgtaaaatgaatttaaatggcatgcatcagagtgaaatctcttccactggggcagaaaatcgatgttagctaaccagcacgaggagatcaaatctgtatttcagccagcagcatccagatagcttccttagagtacaacacctcctccttaattaaaaat

SEQ ID NO: 390449 - DNA, 1000 bp, Homo Sapiens
caaaaacaaacaaacaaaaacctttccctttatcatgtgacagaagatttattgacttcatatcagcatttaagcagtgttaactttatgtaatagtgtttgggttggggattggtgcatttccggttgtacgaaggatagttgtattatgtgaattgtaattatgaccttgttattgtctttatttgaatattatgtatgatctcaggagatgtgtatgggttcaagttgacaagcagtagacttgtgatggttaatactgagtgtcaacttgattggattgaaggatacaaaatattgatcctggctgtgtctgtgagggtgttgccaaaggagattaatatttgagtcagtgggctggaaaaggcagacccacccttaatctgagtggacaccatctaatcagctgccagcaaataaaagcaggcagaaaaatgtgaaaaggagagattggcctagcctcccagcctacatctttgtcccgtgcgggatgcttcctgctctcgaacatcagactccaagttcttcagttttgagactcagattggctctccttgctcctcagcttgcagacatcctattgtgggaccctgtgattgtgtaagttaatacttaatgaactccctaatatcctattagttctgtccctctagagaaccccgactaatgcagcaggtattcttaactgcctttttcagacaagcaaatagacttcaaagaagttaaataacttactataggtcatatacttaataagaaagggtggtaagacttcaactcaggtgtctttattataaattctgtatcacttctaaattccttcatcttcatttttaggtcagagctgctataaatcatatactttcagactgtattttttcattctagttgcaaggaaattgaagttaagggttatcacatcccaactccaatgtaacttttagtgtgtatgtataaaagtttattcatttaattaaaacctttgtgtctaaaattgctg

SEQ ID NO: 390450 - DNA, 1000 bp, Homo Sapiens; identical to SEQ ID NO: 281496

SEQ ID NO: 390451 - DNA, 1000 bp, Homo Sapiens
gggcagcgagtcctccgggaggcccacaggttactgcctcagctgcagcagtgacatcgctgacgtggaggtggacatgtcgggagattcggggtggctcttgaacctcttccacaaccagattgagtccaagttccagaaagtactggagagcaggatttgcgaaatgatccagaaatcagtgtcctccgatctacagccttatctccaaactctgccagttacaacagagattgacagtttcgccgacattgattatagcttagtggaagcccctcgggcaacagcccagatgctggaggtgatgtttaagggtgaaatctttcatcgtaaccaccgttctccagttaccctccttgctgcagctgaggaacacaacaaaatggtctactttgccatctcggattatgtcttcaacacggccagcctggtttatcatgaggaaggatatctgaacttctccatcacagatgacatgataccgcctgactctaatatccgactgaccaccaagtccttccgacccttcgtcccacggttagccaggctctaccccaacatgaacctggaactccagggatcagtgccctctgctccgctcctgaacttcagccctgggaatctgtctgtggacccctatatggagatagatgcctttgtgctcctgcccagctccagcaaggagcctgtcttccggctcagtgtggccactaatgtgtccgccaccttgaccttcaataccagcaagatcactgggttcctgaagccaggaaaggtaaaagtggaactgaaagaatccaaagttggactattcaatgcagagctgttggaagcgctcctcaactattacatccttaacaccctctaccccaagttcaatgataagttggccgaaggcttcccccttcctctgctgaagcgtgttcagctctacgaccttgggctgcagatccataaggacttcctgttcttgggtgccaatgtccaatacatgagagtt

SEQ ID NO: 390452 - DNA, 1000 bp, Homo Sapiens
agaatgccagcaatggagtactaagcgaagttactgaagacaacttactagacctgggccccggatcccccgctgtggttagccccatggtggggagcacagcacccccatcttccctctcctcccagcttgcaggcttagacttggggacagagagcgtcagtggcaccctcagttcactccagcaatgtaatccccgtgacggctttgacatgtttgcccagacgagaggaaactccttggctgagcagcgccagacggtaacctatgaggatcctcaggctgtcggaggacttgcttctgcactagacaatcgaaaacagagttcagaagggatccccgttgcgcagccatctgtcatggacgacattgaggtgtggctcaggaccgacctgaagggtgatgatctggaggagggtgtcacaagtgaagagtttgataaattcctggaagtaagagccaaagctgctgaaatggttcacgacctcccctcgccccccatggaggctcctgccccagcctcaaacccttctggccggaagaagccagagcggtcagaggatgccctcttcgccctgtgagcagctctgtggtttgcctccccagatggcgggtccccgctcgcaccccgtggacaccgggcactggccactcctacatccccagctccacacggcctgcacacctgtgtttccatggaaatgccaccgtgtctgctcccaggcctcccactagtcaggaccagcttcagccacttcttttctctgagtggtgggacaactgcagccagagactctctcccctcccaccatgggcccctctgcccatgtttcctcccaggaagagcgggcagagtggcccagccccccctgggcagggagagggccaaggacaattgggagggcagcaggcagcccgcagatggtggccatgtggcacgctgctgagacgacactaccaataaaccaaactgccacgcacacactgcaggctcacaccc

SEQ ID NO: 390453 - DNA, 1000 bp, Homo Sapiens; identical to SEQ ID NO: 207054

SEQ ID NO: 390454 - DNA, 1000 bp, Homo Sapiens
tccagccagtgaagaagcccgcgcctgaaggagcctctgtgctccagaatccatcctcagtatcagcgctggggtggcctcctccaggaagcccttctgattctctcatgggtcgctcttcctctgcagactcccggagcaccccctgctccaagtaccgcaagtggcactgagaacttggggagagcagaggctgtgcctagatttgtagggagtccccgcagctccaccccagggcctacaggagcctggccttgggcgaagccgaggcaggcaggcagggcaaagggtggaagcaattcaggagagaacgagtgaacgaatggatgaggggtggcagccgaggttgccccagtcccctggctgcaggaacagacacctcgctgaggagagacccaggagcgaggcccctgccccgcccgaggcgaggtcccgcccagtcggcgccgcgcgtgaagagtgggagagaagtactgcgggggcgggggcgggggcgggggcgggggcgggggcagccgggagcctggagccagaccggggcggggccgggaccggggccagggaccagtggtgggaggaggctgcggcgctagatgcggacacctggaccgccgcgccgaggctcccggcgctcgctgctcccgcggcccgcgccatgccctcctacacggtcaccgtggccactggcagccagtggttcgccggcactgacgactacatctacctcagcctcgtgggctcggcgggctgcagcgagaagcacctgctggacaagcccttctacaacgacttcgagcgtggcgcggtgagcgcgggcggggcacgggtggagcgcgggctgaggtgcgtccgggacccggtttggacggcagaggcctgggcgggggcgccgagggcccgtcggggcggcccggacaggactgggggtgtccaggaccctgtcagggagggcagaactgcggtggggcgtgccctgggctcccagtggccggtgggtacc

SEQ ID NO: 390455 - DNA, 1000 bp, Homo Sapiens; identical to SEQ ID NO: 281500

SEQ ID NO: 390456 - DNA, 1000 bp, Homo Sapiens
tagttgctatacaactatgacttcatcactgcacactttcaaggagaaattaccattgccccaatttatatatttcttctgtgcctaattttgttgaaaacatcacctgagcttttaactgtattctaccataatgaacatagaagagcagcagctatctctaattgagagctttctgctgaaaaaggctgaagaaacttgtgcccagggaaggtaattcacaccagcccccagcgcattagagctggggttgaattagaactggagtgtatctggctccaagtcatggctgcttctgatttattactcctgtggccttgggaaaggacaaggaagtaaacaaggcttagaatattccagtgggctaagtctgttacaatctggcatgtgtgtgcaatgttaatctgtagtgactatgatacaagagacattgaagcagccctgtaaacatgagaggcaaaaacatttaaaacattctgtgaatctataatacattagaagaggcaggagctatatggatggggagcagactgtggtctcatccacctatgtcttctgcagccattcctaacaccaatgacccatgtgcagataactatcggggctctgcaccagagtccgagaaagagacgaaagctgtcactaatttcattagaagccacctgaatgaaatcaaggtttacatcaccttccattcctactcccagatgctattgtttccctatggatatacatcaaaactgccacctaaccatgaggacttggtacgtagacaaaagtttgcacttcatgcatcgacaataccattgactttcagtctgttcttcattaacttgggtatgttgaaagaatttcacattttaatgtcaaagaaaagaactaatgaaatttgccttgaagttaaaatcatgatctttagattgatttttcattgataaaagtatatagataataaattcctttaatgtgattctcaggaggaaaaaaaaatcaggaagaa

SEQ ID NO: 390457 - DNA, 1000 bp, Homo Sapiens
acgtgctaccatgtccagctatttttgcattttttgtagagacggggttttgtcatgttggccaggctagtcttgaactcctgacctcaagtgatccacccacctcagcctcccaaagtgctgggattacaggcctgagccaccgcacccagcctctccctgttctttaaatatctcttaatataggggggcatggagagaaagtctctccaatattttcttcttcttttccatttttgtatttttccactttatccttctcaattttggcctcttcttccactttctaggatccgagaacgctctaagcctgtccacgagctcaatagggaagcctgtgatgactacagactttgcgaacgctacgccatggtttatggatacaatgctgcctataatcgctacttcaggaagcgccgagggaccaaatgagactgagggaagaaaaaaaatctctttttttctggaggctggcacctgattttgtatccccctgtagcagcattactgaaatacataggcttatatacaatgcttctttcctgtatattctcttgtctggctgcacccctttttcccgcccccagattgataagtaatgaaagtgcactgcagtgagggtcaaaggagagtcaacatatgtgattgttccataataaacttctggtgtgatactttcatcttgtaaatctgctttcttttgggaagatattgagatatttaaatcatggcccaccttacccaaaataggagattctgttcatctcatatctagtattaattagaaaaataactacataaaaagaaggaagctaagaaggcactcactcagccataaattctctaaaccctctctaccttggaatccgtgaatggaatctggtatgttttttgcaggattttcctattgtaaattgtggcaaatacagggctcccttcatttgcttttcatctcttatgcatcaaagtcaaaaacatttctgaatcaagataatctaga

SEQ ID NO: 390458 - DNA, 1000 bp, Homo Sapiens; identical to SEQ ID NO: 281502

SEQ ID NO: 390459 - DNA, 1000 bp, Homo Sapiens; identical to SEQ ID NO: 281505

SEQ ID NO: 390460 - DNA, 1000 bp, Homo Sapiens; identical to SEQ ID NO: 281506

SEQ ID NO: 390461 - DNA, 1000 bp, Homo Sapiens; identical to SEQ ID NO: 281507

SEQ ID NO: 390462 - DNA, 1000 bp, Homo Sapiens
ataaatatcatcatgtctacattattgttagtgtattttaaatgattgctgcttgtctcttacatccatcctactaatcttcatcagaccaacatgctcctcactactgattggtatttgccatcttcttatttgtctcacgtgggatgtttgttgaaaatggagattcctgagcgtgccttcagttttagtaccaggtgtttccactaaatgctggagtggtacttctccaattatcagtgtgttcaagaatcctatggggatcttgtcaaaatgcagaatctgattcaagaggttggagtgggccctgagaatctgcatttctatcttttcccagatgatgttgatgctgctggtccatagatcacacttcgggcagcaagagatgagagtgtctacactagttactatggcattttagtccctctatgtctttggcccattttcaactccccaaatgacttctccaagctccttatataatgtctctgaggcagtcaaaccaggctctggagtgttctccaatagtgctacctaggttctgccttggaacttttgctccaagttattatcactgttgttctttctgatccacattcgttgaacacagacacttcttgggagactttcccagtctcatctcataggtaaggctttttccaacagccccagccctctaatggttcctgctctctgacctcctgtgcaaatgccagtcatctgtcctcagtgatgtgtcaggagcagcaagtcccagaacttcactcttggacgtatgagaagtttagtttagtaaaacgtcttgttgaaggaaactgtcccattttcccttttgattttctacaaaggcccgctactaggcaagagccaaggctgacatggagacagctcagccctatttcaaaagctgaaactctctttactatcccactggatgcacaggatgctctcactggcccatccctgtcattatctcagatatgtgctgatgattcagaat

SEQ ID NO: 390463 - DNA, 1000 bp, Homo Sapiens
tacccagagagagtgaaacattagtaaccttactttacctgtgttcccacagaaccttaggtacatctttgccctgtatttttcaaattgtcagaagtgctgtaattgggtgagttaatgcctgtctctctcccactaacctggaacccgaagttagaaactgtggccttcatgggtaaacccccacacctagtactgtgcctgggccagaaggggagggaggaggcagagggaaaaagggagagcaaatgaatatgaatgagagagtgtgagtctggagctcagatgagacatcagaactgaagatatcatttggggagtcatcagcatagagacgacaattgaaactgaaagcttgtatgagattgccaagaacagtttctttagaaatattcaccatcacgggtgggaggaggtaaaggtgcagagagagaagcatgggagaaggaattctgagtgctgataaaggagacaatttctgaaggtatcagcagtgctggaggatgcaaaggggtcaagaaggaaggaagccaggaaaaggccttggacttggcctcagaaagaacctctaagaaagtaatagtaatttcaccagagtgagtagagaggaagtctagtggcaggggattcaagggagagtgaacacagagtcagtgggtacacactgagcccacactgctcctgcagatgctcaccagaaaaggaagagaacaaactataccgctctttgccttctttcattccatattcacatgggctgataatcctgaaaacatttttatttaattaaaaaatacaatgcctttatatattttggtctgttcaggaataagctctttagggattttgccaaaggggatataaaatgtagtccattctgccagggctggtgtggcagcctggggattggttatgtggtatggattcaggggtgggcttccttgttccaatagaccaggaacaaggaaacctgagtccctggtgctagtctttccttgta

SEQ ID NO: 390464 - DNA, 1000 bp, Homo Sapiens
aatttgcaagcaacctttccttgaaggagaatcttttccctgagcaatgaatttcactaagtgaaagagaatttcaaatcaacattacagcaatgttcactactttattcctactctttaggcatcacctctatctccttatcgctcaccccaacattagatatgattcaatacaactaactagctttttcaatgaaagaaagcttagtttctcatgtttaggaactgattcctttgatcttccctcaagttacgacttacataggcaattccctttccaaataggctagtttgtagattctgtctttgaatgtgctcagtcatttcaacaatattaacatcataatattgatgaactatgcctacaaagggcgactgattttgactaatttattatttactacaaaatatttccaatgtacaaaaaatatactcaccatcaatatgtatttttaagttttactaatttgcacactcaaatcagcagaccaagttaaaatggcatcttctaccttgtgatttgtgacaccatatcacaagcttgagggttccatgctcctttttaggcacttggtgagtgtgatatggtaggaaacatatttaatgtatggttttagctctaaaattcactgactaagtggttttaggaaatcattcaacatctcttggcttcagtttcctaatctatgatatagacaaaatggactttgttatttacaaggtctccccatctttgaaaccccttggttctatggaatgacctaacaaatccattgatctggcattgtggccagtctcagtctaagttttgaactcttttggttgagaaatgataaactcattaatgagatgcaagctagattcaatgcagtgtgtatatgtgtgtgtttatacttacttatattgattatatacatatatgtgtatttcatttaacagaaggggctggatgcagtggctcatgcctgtaatcccggcactttgggaggccgtggcaggc

SEQ ID NO: 390465 - DNA, 1000 bp, Homo Sapiens; identical to SEQ ID NO: 281508

SEQ ID NO: 390466 - DNA, 1000 bp, Homo Sapiens; identical to SEQ ID NO: 281509

SEQ ID NO: 390467 - DNA, 1000 bp, Homo Sapiens
ctcagaacacagtggaataaaactggaaatcaactccaaaaggaaccttcagaaccatgcaaatgcatggaaattaaataacctgttcctgaatgagcattgggtcaaaaacaaaatcaagatggaaattaaaaaattattcaaactgaatgacaataatgatacaacctatcaaaacctctgggataaagcaaaggcggtgctaagaggaaagttcataaccctaagcacctatatcaaaaagattgaaagagcacaaactgatattctaaggtcacacctcaaggagcaagagaaacaagcgcaaaccaaacccaaacccagcagaagaaaggaagttatcatgaaagatcagagcagaactaaatgaaattgaaacaaacaaacaaaaaagataaatgaaacaaaaagctggttatttaaaaagataaataaaattgatagaccatcagcaagattaaccaagaaaagaagagagaaaatccaaataacctcactaagaaacaagacaggagatattacaactgacaccactgaaatacaaaagatcattcaaggctactatgacgcatttacgcacatagctagaaaacctagaagagatggataaattattgtaaagatacaacccttctagcttaaatcagtaagaattagataccctgaacagaccaataacaagcagtgagattgaaatggtaatttttaaattaccaacacaaaaagtccgggaccagacggattcacagcagaattctaccagacatccaaaaaagaattgttaccaatccttttgacactattccacaagacagagaaagaaggactcctccttaattcatcttctgaagccagcatcaccctaataccaaaatcagaaaaggacctaaccaaaaaagaaaactacagaccgatatccttgaagaacattgatgctaaaatccttaacaaaatactagctaaccgaatccaacaacataccaaaaagataacccaccat

SEQ ID NO: 390468 - DNA, 1000 bp, Homo Sapiens; identical to SEQ ID NO: 281510

SEQ ID NO: 390469 - DNA, 1000 bp, Homo Sapiens
ctgcagaaatattcacaatcgcaaaaaaatacaaaacctaaatattaataaataagcaattaataaatacatggtggtatattccaatttatagcattttatttctttataaaaggaaaatctctatgttacaaatatttctattacttaatcagagtgatggatatagaagtttttatttgtgttttctgtattttaaaacattattttatacaggttgagcatccctaatctgaaagtttgaaatccaaaattctccaaaattcaaaactttttgattgccatcatggtgtcacaagtagaaaattccacacctgacataagacaggttgcagtcaaaacacagtcgaaactttgtttcatgcccaaaattgttaaaacatactgtataaaactgccttcagtctatacatataaggtggacatgaaacaaatgaatttcatgtttatacttgtgtcccatccccaagatatgtcattatgtatatgcaaatattctaacatttgaaagaaattgaaatccaaagcacttctggtcccaggcatttcagataagggatatacaacctataattaacatttaaataaaaatatattataaagtctacctagagctatacattttgtcaagggaagttatatctccccatccctatgtagagatgcacacataaaggcctggaagaatacacagaattattaatagtgtaacttagggaagaaagtagaacagtagaagaccaaagaggaaattttccctttactctgcctaattctgtgtttttcacatatttatgaacacatattcatgtgttcaatgtgattgcagtgaagcctcaattaatgtccttcctacatccacaccctttgccctgtaattttgcattcttccttctgattctggctggccctgtgagttggtttggcctacagaatacaaatgaaatgttgatgtgccaactacaaggttaggtctcaagagactgtcatggttttcctt

SEQ ID NO: 390470 - DNA, 1000 bp, Homo Sapiens; identical to SEQ ID NO: 114778

SEQ ID NO: 390471 - DNA, 1000 bp, Homo Sapiens; identical to SEQ ID NO: 281513
  misc_feature (56)..(56): n is a, c, g, or t
  misc_feature (857)..(857): n is a, c, g, or t
  misc_feature (922)..(922): n is a, c, g, or t

SEQ ID NO: 390472 - DNA, 349 bp, Homo Sapiens
cagcctagttttcamccacgacttccagatcctacatttwacatccgacaggcaactataatccwctttcctgaacctccggggaagttgcctccytgtccctttcmgcaaaggatgtcattgttttacaatgtctccagtgaaaaagtcctcctctctacatcttcctcccactcctacaacccttgatccccacgtgagatctcatttcctccagctgggtcttctgcagagtgattagagcttctgccctccttgcagcatctctattgtaaaaggattgctgaagcttattaagccttgcagctcctaggaggaaaggtaccatatagaaataaaacaaatcaac

SEQ ID NO: 390473 - DNA, 1000 bp, Homo Sapiens
  misc_feature (888)..(888): n is a, c, g, or t
  misc_feature (892)..(892): n is a, c, g, or t
  misc_feature (900)..(900): n is a, c, g, or t
  misc_feature (906)..(906): n is a, c, g, or t
  misc_feature (911)..(911): n is a, c, g, or t
tgcagtgagccaagatcgcgccactgcactccatccggcctatgagactatgtctcaaaaaaaaagagcatttattatttttccctctcaaaagaatttcagatattctggttaaatctcaccccatattttctcttcccgtttttgagggaggcaggaaaacaggattcagtatgggcatagcagaagactgaaatctcattccaagctcatagttaaaaagaagtctgcatatgaacccatcagtagagaagtggctaagtggttgtgggattcataattaaccatgactttctctcttaggctgtatttttgtctcgtcccagctcttctgcctgttactgacctcacctgtagctgtttcttccagcttcctttgctctaacttccagctcatctctcatcttgttattttattcatcaggatatctcctcaccttgcttacgaacaggaatttcagcaacatcaccccagagccctgacttaaaatgtgaggctctttttcatgattttttttccccttcctcgtcttcagaacttaactcaaatgccagccgggttaggactttttcagaaaataccaagaagtttcttagtattttcgtagtgtgatataattttcctctaatatttgggtgaattaacacccattgccaaaggtatgggaaaatatttgtgaatttaactagctgcatgcattatgggttattatatgttgtttggcattctgatcatgggattcctggacaaatgagaagtgtgcttttccttcttggtttgtagttactcattatagtttataagcataacagtccaatataaacacagaagacatggtgtgccgattcttcaacgcaccgtctttgagagagaccatgatccccacnggangggcattncattgngctgnaatgtccatctcacatctgtattagtgagcacactgtcttcatttagacaggagtgtagatctttaatggcccccccagttaccaaaaa

SEQ ID NO: 390474 - DNA, 1000 bp, Homo Sapiens; identical to SEQ ID NO: 281515

SEQ ID NO: 390475 - DNA, 1000 bp, Homo Sapiens
gcaacctctcgtttgactggtacatcaagacctcgcataaccacctcctgatcgtgagcacagctgagatcttgtttaacgattccgtgttcaccctgctgccgggacagggggcgtttgtgaggtcccagacggagaccaaagtggagccgttcgaggtccccaaccccctgccgctcatcgtgggcagctctgtcgggggactgctgctcctggccctcatcaccgccgcgctgtacaagctcggcttcttcaagcggcaatacaaggacatgatgagtgaagggggtcccccgggggccgaaccccagtagcggctccttcccgacagagctgcctctcggtggccagcaggactctgcccagaccacacgtagcccccaggctgctggacacgtcggacagcgaagtatccccgacaggacgggcttgggcttccatttgtgtgtgtgcaagtgtgtatgtgcgtgtgtgcgagtgtgtgcaagtgtctgtgtgcaagtgtgtgcacgtgtcggtgtgcgtgcatgtgcactcgcacgcccatgtgtgagtgtgtgcaagtatgtgagtgtgtccaagtgtgtgtgcgtgtgtccatgtgtgtgcaagtgtgtgcatgtgtgcgagtgtgtgcatgtgtgtgctcaggggcgtgtggctcacgtgtgtgactcagatgtctctggcgtgtgggtaggtgacggccagcgtagcctctccggcagaagggaactgcctgggctcccttgtgcgtgggtgaagccgctgctgggttttcctccgggagaggggacggtcaatcctgtgggtgaagacagagggaaacacagcagcttctctccactgaaagaagtgggacttcccgtcgcctgcagcctgcggcctgctggagcctgcgcagcttggatggagactccatgagaagccgtgggtggaaccaggagcctcctccacaccagcgctgatgcccaataaagatgcccactgaggaatgatg

SEQ ID NO: 390476 - DNA, 1000 bp, Homo Sapiens
catgggtatgtaggaggagaagcagtttgtgggattgtttgagagaatgggatatgattttatttgaagtcccaagcctggggtatgatgaatgtgggctttcgagtgagagttgggttcagtcctagttctactacctactagggatgtgatcttaggtaggtcacttctctctctggggaactgattgattacatcatcaatgcaacggggatggtaatgcctccctcatggggtttttgggaagatacaaatagataatataagtgcctggcatgatgtctggcatgtagtaaatgctcgatacatgtggatttctttcccttgttgaggggtggggaccacacgggagtaggaagcagttggggaggggtcagcagcctgtccctgcccctgccctcagctgagctcgggctcacgtgagagccctctgcccaatggggctgcgtctccaggtacagggccctgccagtcccatgctggctacttgcagcacccctctctcacccctagggaagcgctgcgaaggcagctgatggctgcagaacaggaggatgacgtggagggtgtgtgcaagcctctgtcctgcggctgggagatcacagacaccctgtgcgtgggccctgtcttcaccccagcgagcatcatgtgagtgggcctcgttccccccggagaatcccagcggggcctcagagatgcatctgggagaggtggggaagatggcaggcaagggtacccttggccaggactctggtgcccaccctgccacccccgcgctccacctgcagtgtttctgccctgtaaataggaccagtcttacactcgctgtagttcaagtatgcaacataaatcctgttccttccagctgtgtctgcctcctctgcagtgcaaggggcctggtcagccaggtgtgggggtgttcttggggtctcctttggtctccttcccacctttgtaaatataatgcaaataaataaatatttaggtttttaaaaactgc

SEQ ID NO: 390477 - DNA, 1000 bp, Homo Sapiens
tttttaaaaatgctaaattgtcaatttagcattttgaggcaatcccctcaaattggctcctgtgtccttttatcatgaccactccaacctttgagcttttttttttcctgaaccaaatgcattgattagttatggagcatactagagcattattaacaaataaaggaaaagaatggaatatttaccttgcctatcctttacaaactatatttcaagacaaccaaaagttggtgaaggaaagttgttgattagagaattccaactggttaaaaggtcaaaggaggccaggcgcggtggctcaagcctgtaatcccagcactttgggaggccgaggcaggtggatcgtgaggtcaggagatcaagaccatcctggctaacacggtgaaaccccatctctactaaaaatacaaaaaattcgccgggcgtggtggcaggcgcctgtagtcccagctactcaggaggctgaggcaggagaatggcttgaacccgggaggcggagcttgcagtgagccgagatcgcgccactgcactccagcctgggtgacagaccgagactctgtctcaaacaaaaaacaaaaaacaaaacaaaacaaagatcaaatgaatgatagaatttgaaaactacgctctttaattttacaaaatcatggattttcgtggtgatagcaatggatgcgaagaccattaggtgaaaaatggataggaagcttataatgcatggagcagaatgacaggacactaatctatattaacatctctaaatgagatcagccagatgaacttgatgtgatgaaatggatacacacagtggacacctgtgaagttttcttggctcccccaaaactgagaagtacaagttagtctccaaacctaattaccagtttacaggaaacatggggaataaaagaacaaattaacaacacaaagaagcaaacaaccaaatgcacaatttgggaaattctgcagaagtaatggcctagttttttaaccaatacatgtc

SEQ ID NO: 390478 - DNA, 1000 bp, Homo Sapiens
taggctaacacagtccacaccattaccacttaaataaagtaaccgaatgctaaatattatccttatcaaacatccatcactttgttgcttttatgagatgtagattgctaaaaacttttgagctagtagacgttacctttaagcatcaatgaatgcaaacagtgaagacctcaaagaagagttacctcattttctctacatgatctccaatgtagtctcagataaggcccatacatagttaaaagctggtaacagctctgaacagaagtatgtattaaatgtttcaaacttgtatatatttttgaatgcttttgtttttggagtgaatttttaatactctgtgttaaaagaaaaacattccatcttgtaggcagtgttcctcagtaaaaatctttgttgcattttcccatataaatgaatcacccttattaaaacaggaggagggagggatttgtggtgacctaccgctgccctccctttctaagagaagaggaggccatggggtatgataactaaatgaacatctctggaagttcctccgtctgatatgtgtattctgacataacagaatttcccaagacttctttgaggaaggctgtccacgcttcaggcaaagtttacccattattattatgattttgaatattccttgttcattacagtccagaaaatctgcagaagttctccatgttcagtggttgaccagaatctgattgttgcgctcaattaaagtgcttattatttagctaaaacaacttatatggaagttaattatttcaggaaatacataataagaccaaaaaaatcactggataatatgtagatatattttagttccattactattaatagcaattagataactctccctccccccattgaggtgagaaatggctcctagatacttggtggtcaatagaactgatttgattaactttcatttaactgtggttattgttacatctactgattttttcaaataaaaatttctagaaggctc

SEQ ID NO: 390479 - DNA, 1000 bp, Homo Sapiens
gggctgctgagcttgcggcaggccaaacttactctgggggtgcacccatttgtcccaccattcctccttgggggccaacaacgttctgaggaagtggcatcacaccagtttgtgcatttcccataaacccattgggcatgggcatgcccaccatcatgcttggactctgtcccatcacatttcctataaggccaggagctgcaggcacaggcacgcccatcgatggaaagccctgaaatgcagctggtgcttgtgaggtaaatggtatatttgtgggtcccataaatacacctgcaccacaaaaagaaaatgaatgaagacagagctatcacgtgtagttgcactcatctctataatcacagaaaaattgcctttctgaactactcacagcaaacattttaattccagtttggctgctcctactactcagaccaacccacacctaaaccctgagagctggttgtttctaggatgcagacaaatcagttattaacctgagtaaatttaattaagaaatgtaaatcatatgcaacagccacacaaaatatcttccactgtgaagaccaaactatgtagcatgacatcatacactgttttattgctgatttgtaccactggtcccccagtacgaaacagggaagtgagagctgactatatctcgcttcaataggtgtagtgggctgcccaacaattttagctcacatgtgaaatgcagctcattattttaaaggaaatggtgtgaaagattaaaactctgtaaacaataaggcttatgctaatattttgttatgattacaaaaaaattcatagattttttttaatccatgtggtaactcaagactgtttacctgcagagaaaatacactgtacgcagtcataaacttcatgcaaatcgtttcaataattcatcaaagataatccatgttctataagcttgtgaaacaacatttagtgatctatgaacagcttgttaattccaaataaagttctgtgaatcctg

SEQ ID NO: 390480 - DNA, 1000 bp, Homo Sapiens
agctgggactacaggcgcccaccaccatgcccggctaatttttttgtgtttttagtagagacagggtttcatagtgttagccaggatggtctcgatctcctgacctcgtgatccacccgcctcgccctcccaaagtgctgggattacaggcgtgagccaccatgcccagcctgaaatcacagctttttatcccggaggcccatgggtagaaacaacacatagggctatgttctctcagcccaaagctaagggcaggaaaaaaggcatgggccataggagcctgagtgacttggtttgggacaggagggttggggggctttagaggggtcaggcaggtcctgtgtcctctcagtttccctggaaaggggcttggaggcaccagtcatggacctgaaaggatcagggggtcagggaatgggtaagttccagaggatgagaagagggggaatgggaagtcttaaacacagctactggggcccagcaacttgccatgttaaaatgcacccctagtgactcaaagaaccacccggccagtggtgcaggaggagagatgtggcacctgggcacagtgggaaggcacggggcctgcacctccaccagaggagccactgctgacctggaccaagggggctgctctgtgcccagctagggaagcctgggccggctcctgtgctgaggtgctcaggtgctggctgagagcccagttgctgctctaacttggagtgaacctgggtcaatagcagctcgtctctggcgggtgggaagggtctgacaacatcaagtttgccctggaagaagggcagccttaaaggaaggcctttggaagctggcctggtgctgtgggcttgagggactttgtgtccaagccctgtcgtcctggctccagcctaggctccagcactccatttcttccactgccacctgctgaccaggaataccaggacagaaggttttgttcagctgctttctttattagaaacaagtgagatgtattgagcag

SEQ ID NO: 390481 - DNA, 1000 bp, Homo Sapiens; identical to SEQ ID NO: 281516

SEQ ID NO: 390482 - DNA, 1000 bp, Homo Sapiens; identical to SEQ ID NO: 223883

SEQ ID NO: 390483 - DNA, 1000 bp, Homo Sapiens
gcggtgtcggcgccatggcggagctgacggctcttgagagtctcatcgagatgggcttccccaggggacgcgcggagaaggctctggccctcacagggaaccagggcatcgaggctgcgatggactggctgatggagcacgaagacgaccccgatgtggacgagcctttagagactccccttggacatatcctgggacgggagcccacttcctcagagcaaggcggccttgaaggatctgcttctgctgccggagaaggcaaacccgctttgagtgaagaggaaagacaggaacaaactaagaggatgttggagctggtggcccagaagcagcgggagcgtgaagaaagagaggaacgggaggcattggaacgggaacggcagcgcaggagacaagggcaagagttgtcagcagcacgacagcggctacaggaagatgagatgcgccgggctgctgctgaggagaggcggagggaaaatgccgaggagttagcagccagacaaagagttagagaaaagatcgagagggacaaagcagagagagccaagaagtatggtggcagtgtgggctctcagccacccccagtggcaccagagccaggtcctgttccctcttctcccagccaggagcctcccaccaagcgggagtatgaccagtgtcgcatacaggtcaggctgccagatgggacctcactgacccagacgttccgggcccgggaacagctggcagctgtgaggctctatgtggagctccaccgtggggaggaactaggtgggggccaggaccctgtgcaattgctcagtggcttccccagacgggccttctcagaagctgacatggagcggcctctgcaggagctgggactcgtgccttctgctgttctcattgtggccaagaaatgtcccagctgagggcctttgtcccattgtccctctgtgaccccttcatctttgataaagcactgacatctccttcctaataaatagaccctgagttctgt

SEQ ID NO: 390484 - DNA, 1000 bp, Homo Sapiens
cactgaatctcagagccgtgacttgcccttggggacatgctggacaggtgccaaacgctccactgggagcttcacacgcactcctcctcttatttcagatttttgggccatccagtgcaggagagggacatcgtatggagtgttcctgtctaagaagtgcagtgtggctggaaaactcactgagaagccatgggacgcggctgccgcgggtggagtgcgtcccagctgccaggcacggtgtgagcatcccctacgtaaatcgtgccgtcctcacaagaaccctatgagggaacttccttatggtcctgattctacagctgaggacacacggcttggggagaaatatagccgagagtgggcgaggcctgacctgaatccaggtgtgtctctgtgtgtccaggggatgggggaggcctatgatcctggtgtgaccaggggccttgaaatccctgggtgagattcatcagagttgcaaaaggaaggagctggtgccacagctttccccacggtgttcccgagaaaggacgtgtgggattggcagtgggatgtgtggcccatgggttctcctgggcaagccaaggctgtggccagcaggacaggcagggaggcctgggcaggacaagcccatccccacccactccttcctctacctccatgtctgggcagccacctgctagaccctaggacacctcggggtgcagccacagtaagcaagggccaggactgggtggtgaccaagtgaggctctgtggggacaggcgggacatcaggcagggcacggggaggtcctgggggctccaagttgggccctggaggtgatgggctggccaggtgggggcagagtggtgaggaggtgggaaggcatcgggagtgagggctgctgcagggctgaggatggcattgggagagacttggagcggatggagggaagttcaaagaacgtggcgggaggagggtctccagtcaaggtgacccccagacttgcacttggcatgaattc

SEQ ID NO: 390485 - DNA, 1000 bp, Homo Sapiens
ccgccagacttaagggacctggtcaccacgctcggtgagggggacggggtgtaggggagcggaggcggcggggggtgcttcccgctggggccgccccgacccggccgcgcctaagacccgtccccgcccgcagggggcgccctgctctggctcagcggacacgcggggactcaggctcagggcgctgcccgggtggccgcggcgctggacgacggctcggcccttggccgcttcgagcggatgctggcggcgcagggcgtggatcccggtctgacccgagccctgtgctcgggaagtcccgcagaacgccggcagctgctgcctcgcgcccgggagcaggaggagctgctggcgcccgcagatggtgagcgtcgggggagtccccgtccttccgcctccgccatccccttcccttcccgaggccccgccccttcccgagcccgcgcctctcagcccctctccccgcaggcaccgtggagctggtccgggcgctgccgctggcgctggtgctgcacgagctcggggccgggcgcagccgcgctggggagccgctccgcctgggggtgggcgcagagctgctggtcgacgtgggtcagaggctgcgccgtggtgagcgccgcccccgccctgctggccccgcacccccgcccagctccggccgcgcggcctctaacagcccctcgctctgcagggaccccctggctccgcgtgcaccgggacggccccgcgctcagcggcccgcagagccgcgccctgcaggaggcgctcgtactctccgaccgcgcgccattcgccgccccctcgcccttcgcagagctcgttctgccgccgcagcaataaagctcctttgccgcgaaaccttgtcagtgcttgggcgggagcggagggatccagggctgcggaggcgggggccgtctcgatgaacacgtgacccccggcgggctccgccttccgcgcacgcgctgagagcctgtcagcggctgcgcccgtgtgcgcatgc

SEQ ID NO: 390486 - DNA, 277 bp, Homo Sapiens
gaaatgcaaaacattttcttctaggcctgaagttaaatcattttggaaagtgatacaggtacattctgaattttctttgtcttgctacatattcttgaaaaccaggttaagtgtttataagagatgtgtatgtgtgtgtgtgtgtgtgtgtgtgtgtgtgtgtgtgtgtattttgagtggcatcagttgcattcttttcttcctctgcctgtctggagggcacttttaatgtacctgtcctcatactctccattatgagttttaatcacaatagaaa

SEQ ID NO: 390487 - DNA, 349 bp, Homo Sapiens
atccagagattaaaaggcacactgagaccaggcgagatggctcatggctgtaatcccagcacttttagatgctaaggtgggaggattgcttgagcccagggattcaagacaagcctgggcaacatagtgagacctccacttctacaaaaaataaaaaagttagccagatgtggtggcatgtgcctgtagtcctagctacttgggaggttcacttgaggccaggagtctgacgacacagtaagctatgatcacaccattgcactccagtctgggtaacagaatgagaccttgtctcaaaacaaaacaaaatgaaacaaacaaacaaacaaacccccatactgttagtgtc

SEQ ID NO: 390488 - DNA, 1000 bp, Homo Sapiens
ccatcctatgtgcatgccgtaagatcagttggatattaaaccatcaataaagtttcacaagatttgaaaacaaagtttctgtagcttcgatacctaagacagacgatagtgatcttgaaaagagaaaagggggaggggggagctacttatcagccaaaagcatataaagtgttcttttcaccagacttctttgggtgggtgaggggaggggcaagagggtgttttatagcatcactaagacattctcattcccccacctggaaaacagtgttatggcaatgggtgcctggttgatgttcttaaaggaaacgaattattaaaacactatgacatcctccagagggaagaaagagtaggagcagggggctatggagaataaatttctcccaattgccgcctcagatttcaaaatccagaatttgtattgtgtttcgaatcacaaacatagaattcttactgtgttggttaaagtaaaattcatttgcagttttgattttcatcaatgagctgtactttcccccatgactgtatgtagttttaataaaatcatttagagtgagtgagtgccaaccgatgttgcagaatcttttgtctaggcactccaagatgccaataagtcattttaaaatgtatgtcagagatgtaaacaaacattttggattttttttaaacagtatttatttggaatgttttcatttatctaaataactattgctattatgaattatggaaaattaatattatgtgtggcatatagtgacttcttaacacacacatcacgcaatctgcaaacccagaaaatgtgtatatctgtctttagaaattagtgtttatatcacttacagtggtttgtgaataaagaaaactggtttgtaatatcaaaaaaataaaagcttagtctgaaaaggtacaagttggtgttctgagttatttggcttccatgggttttctctctcagtgggtagatttgttatccacagctgtgattgcacttgggccc

SEQ ID NO: 390489 - DNA, 1000 bp, Homo Sapiens; identical to SEQ ID NO: 114779

SEQ ID NO: 390490 - DNA, 1000 bp, Homo Sapiens
gaagtgagagaaatgaataaaaggagttagaatttgggagtgagattagagcattttccctctgaaaggatttggagttgtgattgagaaaatgtaactgaagaaccaattataatcagaaaattgagaaatatatcactatgcttatgggtttggtgcctctgttgattaaatacagaataattttaggggatagtctgaggatgtgtgtaaaatattgggatgcatttatgagttggtgtgcattggtgggtaggagaggtttcctgtggaatgtgggaggaggtcataaagagaaaggtagggtatctgtcctggcagtcatgtgtggagtagaatgggagtgctcgtgggaagaggagaaggtgataaattgttgttggcccttaaacttaaaaacttaaaataaaatacttaaaataaacttaaaataaaacttaaaataaaacttaaaaaaagttggatccttactagttgccagtctagctagacacacgcaggcatttcttttctgactggttacagaggtgggaagggagagttactcttggggaaagagagagaaattgagactaatccccatgggtctccctgaaaaaggataccactaggttcttcatgcaggatctgatcagtggctttgctgggcgaggaagacctcccaatgtccaaactgtcgacagtctgtgtcctggtgtgggacagtaagtgtatgtctgtaggtgtgcaaagagggggtgagatggagggggtctttggtttgttgtgctggtaggtccctgtgctaccagggaccaaatgaagtgggacactaaatttaagacagcttgttgctatttcagtctcactctcacaagatgccaatgattattttttattatcaggcattccctcacaaatacattttaatgagctaataaaattactataaaaattgttctataagcatggaatggaactagaaaagaaattttccatttaaaatttgttcaggtggcag

SEQ ID NO: 390491 - DNA, 1000 bp, Homo Sapiens
agatcaaggtcatctgatggcaaatcatcatctcaagtgaacaggtcaagacatgaaaatacaagccaggtaccattgcaggagtccaggacaagaaagcgtaggggatccagagttagccaggacagggacagtgagggacactcagaagactctgagaggcactctgggtcggcttccagaaaccatcatggatctgcgtgggagcagtcaagagatggctccagacaccccaggtcccatgatgaagacagagccagtcatgggcactctgcagacagctccagacaatcaggcactcgtcacgcagagacttcctctcgtggacagactgcatcatcccatgaacaggcaagatcaagtccaggagaaagacatggatccggccaccagcagtcagcagacagctccagacactcagccactgggcgcgggcaagcttcatctgcagtcagcgatcgtggacaccgggggtctagcggtagtcaggccagtgacagtgagggacattcagaaaactcagacacacaatcagtgtcaggccacggaaaggctgggctgagacagcagagccaccaagagtccacacgtggccggtcaggggaacggtctggacgttcagggtcttccctctaccaggtgagcactcatgaacagcctgactctgcccatggacggaccgggaccagcactggaggaagacaaggatcgcaccacgagcaggcacgagacagctccaggcattcagcgtcccaagagggtcaggacaccattcgtggacacccggggtcaagcagaggaggaaggcagggatcccaccacgagcaatcggtaaataggtctggacactcaggttcccatcacagccacaccacatcccagggaaggtctgatgcctcccatgggcagtcaggatccagaagtgcaagcagacaaacacgaaatgaggaacaatcaggagacggcaccaggcactcagggtcacgtcatcatgaagctt

SEQ ID NO: 390492 - DNA, 1000 bp, Homo Sapiens
tcaggctttcaggtccagtattcctgctaagtggtccttgaactttcagttgtaaaatggtatctcatttttagtatacttacatttaaagtcatacatgcttaagctaacaaaaactaatctcactgaaccgaaatgtacagagctaaatagtaagagcctaactcatctttcctcccttctatccttctcaaaacccccaccttttactctttggaatctactttttgaaatatatattgctacataaatatatataatgcttttattacaagcacttataccatactgtatattcagatttgtgtcttactcactggaaaaatttattgtttagaaaactttctcctgagttcatttagatctcttcagtgtttactggctagcttgcttttacaattgtatactattctattgtttggttgttccgtaatctatttaaccaatccctgtcactggatattaaggcgggattcacattctcactattatatgatatgttgcagtgcccatctttgtaaaaatagcccttacataaccaacagcagcaaagcatgaacacataacaataattgtttctctttctcatctaagcaacactttaaatcacattatgtgcaatggcttaaagagtgaacaaagaaatattactaaggagaagggggccgtagaagggatagagggcaagagtaggggcttgcatctccatcactgcagtaacccccagtgagggattagacatttcctgccatgtcaagtgttgtctgtaatcttccttgtttgcttgtctttttcaggaagtgaataagaagataacagtgtttcaaatgccgtgaaacacggcatcatgctctaacttcagtataccaataaaacaatcagcttgcaatttctgctggtggtgtctctttctgagtgtttgggactctagaatctgagacccatgttcacattgtaagaatatccaggaccccttctccttgatgtttccagcaagctt

SEQ ID NO: 390493 - DNA, 1000 bp, Homo Sapiens; identical to SEQ ID NO: 281524

SEQ ID NO: 390494 - DNA, 1000 bp, Homo Sapiens; identical to SEQ ID NO: 201416

SEQ ID NO: 390495 - DNA, 1000 bp, Homo Sapiens; identical to SEQ ID NO: 201414

SEQ ID NO: 390496 - DNA, 1000 bp, Homo Sapiens; identical to SEQ ID NO: 201415

SEQ ID NO: 390497 - DNA, 1000 bp, Homo Sapiens
agctacttgggaggctgagataggaggatcacctgagcccaggaggttgaggctatggtgagtcatgatttgattgggccactgcactccagcctgggcaacaaggacagagcaagactctgtctcaaggggaaaaaaaaaaaaattaagaacttgccacagtggctcatccctgtaatcccagcactttgtggggccaaggcaggaggattgcttgaggtcaggaggtgtagaccggcctgagcaacatagagagacactctctctacaaaaaaaattaaaaattagccgagcgtggtggcacacacctgtagtctgagctacttggggggctgaggtgggaagatcacttgagccctggaggtcgaggctacagtgagccgagatcacgccactgcactccagcctgggtgacagagcgagactctgtctcccaaaaaaaagaattaatggccgggcgcggtggctcaagcctgtaatcccagcactttgggaggccgaggtgggcagatcacaaggtcaggagatcaagaccatcctggctaacacggtgaaaccctgtctctactaaaaatacacaaaaaaattagccaggcgtggtggcgggcgcctgtagtcccagctactcgggaggctgaggcaggagaatggcgtgaacccaggaggcggagcttgcagtgagcggagatatagcgccactgcactccagcctgggcgacagagtgagactccgtctcaaaaaaaaaaaaaaaaaaaaaagaattaacattcaccaaaagatatcttagaatgataatgtggctatatatttagatctatattttaaaaggtcattattacttagcgatatgtacttcctacaaatttgggaggtgaaataataagacgtctggaaagtgttaaaagcaatccaataaagaagaagtaggttcaggtagagagggaataagattagcacgaattgacaattattaaagctggcaataagtctatgggaatt

SEQ ID NO: 390498 - DNA, 1000 bp, Homo Sapiens; identical to SEQ ID NO: 114781

SEQ ID NO: 390499 - DNA, 1000 bp, Homo Sapiens; identical to SEQ ID NO: 281528

SEQ ID NO: 390500 - DNA, 1000 bp, Homo Sapiens; identical to SEQ ID NO: 201418

SEQ ID NO: 390501 - DNA, 1000 bp, Homo Sapiens; identical to SEQ ID NO: 114782

SEQ ID NO: 390502 - DNA, 1000 bp, Homo Sapiens; identical to SEQ ID NO: 201417

SEQ ID NO: 390503 - DNA, 1000 bp, Homo Sapiens; identical to SEQ ID NO: 201419

SEQ ID NO: 390504 - DNA, 1000 bp, Homo Sapiens
gggagagcctggttagggcccagactgtaggcctaggagacctcatgcagggcaagcagggagattctgcccaaagggataccactttttgaccttggcctgaaataatccagagtacactgagatccttgaaaagactcaagacaggtaagatgagggggcaactgaagatgccactgtggaacaggaagcaactggattccagtgtttccaaaacatagctttcatgggttggatcaacagtgcataccagttccaagcaaagtcctatataggcctacaaaaggcttggcatttgcccctgccagtaacctctaagtctagattaggaacagctctggggttctcactcagtaaaggattaccagagatcccctcagtaacctgtaagggagaagcaagccaggaaccccaattggcagattccaggttcccagggtagagaggtcttacccagggaggccacattcccataattctccagcatcacatccctgtacagggtcctctgtgcaggggacaggccatcccattccgcctgggtgaagtacacagccacgtcctcaaaggtcaccgacttctgaaacaataggttcctgctgccctagggccaattccatagctcaggccctaagtgaggggcagagcgcagtataagggcttggggagggtgcttgtgagagcacaaaattagtattaacaacaaggggaagatctcagaaaaaaaatatcgagaaagtaaactacaaagtatccacattctcccacagcagggaaacctcatgccatttttcacacaaataagaggtcacattaagacaggctgaaagaaaaaaatttccataagcaaattctctaaagccaactccactcttttagataagctgctccctcccagcaaactcggggctgatccaccagcaggtcccacaccactcccctgcgcctaacctcagccctgttctgctgcccaccccctgaactcccatttcagtggatc

SEQ ID NO: 390505 - DNA, 1000 bp, Homo Sapiens
tctgtattctttcactttgatgtatttatgaatactgacaccattactactgttttaaaattactgtagctttaaaatcaggtttgaaatctagcagagtaagtccyccaacttattgcttcttcaataccgacttggcttattctaggttctttgattttcaaatacattttgaaactagctttcaaatttctctaaaatctcctactagaaatattaagcagaattgtgttgatgtaatatgctaacaaaattgagtcttccaagcaatgaacatgatatatatttatttagccttctttaatttttctcaccaattgcttttaggggccttgtacctgcttcattgcatgtattgttaagcatgtaatgattctggctgttaatcyctattatgttttattgaatttcattttctagctgctaattgctagtatggagaaattaagatgatgaaatcaactttataaaggcataatttcggtacaacagactgcaccactttaaaatgtgtaattcaatgcacgtttacaaatggatacactaacggaactactgccacaacccaagatagaggaaatcccctatgccccaaagtttcttgtacccctttgcagttcatcagcctttcaaccctcagccccaaggagccactgtcacttcaggtccgtttgcatttttaaccattttctataaatgaaatgatacctgtgttcttttgtgtctgccttctttcatgcatcaatgtaattttaaaatccatctgtaatgtcttgtaaatactgagtagtattccttcgtgtggctataccatgtatgtttgtactttcacttattattggacatttctatcattccacgtttgggctattatgaagaaactatcatgagcatccatacgtggcaggccaggtctcactaacacaggcctccctaacaactgtttcagtaccgactgagtggttcaattaaatattaagaggaaaaaaaaaaaaaaaaa

SEQ ID NO: 390506 - DNA, 1000 bp, Homo Sapiens; identical to SEQ ID NO: 281533

SEQ ID NO: 390507 - DNA, 1000 bp, Homo Sapiens
ctgccaacgcctcctgtccccacctaagcctggtgggggtgaggggctccgggtcactgctgtatataactcccctcccccagaaaaataaatgtcactgccaacgtcaggaggtgctttctaaaaaggtaatgagggtcgggcactgtggctcactcctgtaatcgcagcattttgggaggccaatgcgggaggaccgcttgagtccaggagtttttgaccagcctgggcagcatagcgagacccccatctcttaaaaaaaaagggtgggggaatgaactctgggaaggtgaacgaattcatgccacatagcgagaccccatctctacaacaaaatgaaaaattagccaagtgtgcactcgtagtcccagctacttgggaggctgaggcaggaggattgcttgagcccaggaggttgaggctacagagttgtgatcacgcgactgcactccagcctgggcaacacagtgacaccctgtctcaaataaataaataaaatgtaaaaaacgaagtgttcctaggacacagatgggctttgggtatccagactgaagtgtgtcatccatttacccactgtggccttaagacacccaacacttctgcttctcccaggacagaatagggggttggatgggggatgtccacactgaccccaaattggattaagtgtttagattcagatttcagtgctactgggaactttctgaaaatgaggacttgccagacggctgcttggacaccattccacccacctgtcccttctcgatatacattgaaggtgagagtgggacaggcagggtttgtagcagttgctccctgtctctatttttgtagacagagtctagctcttgcccaggctggtctcaaactcctggcctcaagtgatccacccatttcggtctcccaaagtactgggcttacaagcgtgagctaccacacccagcagctgagttgctgcctgtctccaatgtcctagaacgttctattggaatgttctaga

SEQ ID NO: 390508 - DNA, 1000 bp, Homo Sapiens
gcaacgtagactagctaatactacccattggaaagcgttgtttcttagctaatgcatgcaaggcttaaaacctagatgacgggttgataggtgcagcaaacctccatggcatacgtatgcctatgtaacaaacctacacgttctgcacttgtatcccggaacttaaagtaaaaaaaaaaaaaaaaaaaagaaagaaagaaaaagaaaaaaaaggctgtttctggggattaaataagacaattatgtaaggtggccagcacagttcctggtacatagtaaatgtcaggcctgcctgacagacttctattcagcagctactgctcccctgaaaatcttcctcagacgtttccacggtgcttcccgttcttacaccactacaatcctttattacactactatccgttcattccccacagctccctcccttcctttccctaaccagtgatcccaaaaggccagcaagtgtctaacattttctatcttctaagtgactggtaaagttccgcacctatcagcgctccaagtttgtttttgttttggccgactttgcaaaacggattgggcgggatgagaggtggggggcgccgccaaggagggagagtggcgctcccgccgagggtgcactagccagatattccctgcgggcccgagagtcttccctatcagaccccgggatagggatgaggcccacagtcacccaccagactctttgtatagccccgttaagtgcaccccggcctggagggggtggttctgggtagaagcacgtccgggccgcgccggatgcctcctggaaggcgcctggacccacgccaggtttcccagtttaattcctcatgacttagcgtcccagcccgcgcaccgaccagcgccccagttccccacagacgccggcgggcccgggagcctcgcggacgtgacgccgcgggcggaagtgacgttttcccgcggttggacgcggcgctcagttgccgggcgggggagggcgcgtccggttttt

SEQ ID NO: 390509 - DNA, 1000 bp, Homo Sapiens
tgctatgctggatatgagggtcctgggccacaaagacaaaaaatcaggaaccactttttaagtgagatactttgggtctctgtcaaattcataacacttatttcttggtggaatacagttaatgagttggacagttcaggaaagaagtttagagcaatagcaaaggaaaggaaacaatatttagcaaggtttattcttcctttgtgtcttagcatgtttctgagtgtgcacacaggcccagtgattccatgtatttttgagtgaccactgcctctgttctggcccttccccatctagaaccgccgctggcactggagcagtgggtccctggtctcctacaagtcctggggcattggagccccaagcagtgttaatcctggctactgtgtgagcctgacctcaagcacaggtgagaggcagagaatccatccacctgtttctgttctctcctgcttagctccagggatggaactgggactgggatagaggaaaggtgaactcctcattaaggaaatggatgtttggtttttgtcctgagtcctaaagccaggagggtcatactctttcgggtctcccagttgtaactcttctcattgacttataggattccagaaatggaaggatgtgccttgtgaagacaagttctcctttgtctgcaagttcaaaaactagaggcagctggaaaatacatgtctagaactgatccagcaattacaacggagtcaaaaattaaaccggaccatctctccaactcaactcaacctggacactctcttctctgctgagtttgccttgttaatcttcaatagttttacctaccccagtctttggaaccctaaataataaaaataaacatgtttccactattgtgctgtcttactgtgtctgctatttccacagctgatgcctgggtggttgagatgagagtgattacaacaaagcttgctctggcctatccacttcttaaaagtccatccgcataccatgcatattggaattc

SEQ ID NO: 390510 - DNA, 291 bp, Homo Sapiens
tcctctggtccttcctcccacaggtgggtggaatcacggtgacacagatgtttggagaggtcacggagatgcccgccttacccttcatgctggccgagtttgatggggttgtgggcatgggcttcattgaacaggccattggcagggtcacccctatcttcgacaacatcatctcccaaggggtgctaaaagaggacgtcttctctttctactacaacaggtggggactgggactccaagggctgaggtggggggacaggaggggagaagagatggggagtggaaggagag

SEQ ID NO: 390511 - DNA, 204 bp, Homo Sapiens
cttgctgggtcctggaggttatgggtttccaagagcttctgatctttcctttaggaattcccaatcgctgggaggacagattgtgctgggaggcagcgacccccagcattacgaagggaatttccactatatcaacctcatcaagactggtgtctggcagattcaaatgaaggggtcagaaatcctcaaccctggggcccctcc

SEQ ID NO: 390512 - DNA, 1000 bp, Homo Sapiens; identical to SEQ ID NO: 114783

SEQ ID NO: 390513 - DNA, 1000 bp, Homo Sapiens; identical to SEQ ID NO: 281535

SEQ ID NO: 390514 - DNA, 1000 bp, Homo Sapiens
gattgggtttgttgtgaagttgcggtgatccagcgcagagccccgtcctgattgatcgcatcgcggggctcagatgactgtaaaatgaatagatgaaattcttgcttctcgaagattttcttgggcatctcccggaaagtgccttttaaggcgaagtcatgatgtattctcccatctgtctcactcaggatgaatttcacccattcatcgaggcacttcttccacatgtccgtgcaattgcctatacttggttcaacctgcaggctcgaaaacgcaagtactttaaaaagcatgagaagcgaatgtcaaaggatgaagaaagagcagtcaaagatgagcttctcagtgaaaagcccgaaatcaaacagaagtgggcatccaggctccttgccaaactgcgcaaagatattcgccaggagtatcgagaggactttgtgctcaccgtgactggcaagaagcacccgtgctgtgtcttatccaatcccgaccagaagggtaagattaggagaatcgactgcctgcgacaggcagacaaagtctggcgtctggatctagtcatggtgatcctgttcaaaggcatccccttggaaagtaccgatggagagcggctcatgaaatccccacattgcacaaacccagcactttgtgtccagccacatcatatcacagtatcagttaaggagcttgatttgtttttggcatactacgtgcaggaggcaaggtaagaatttcttttcttcaaataaatgcatcaagatataggtgtccttgcattaccaacaatccatagtaaaacaatcattttacaaagccgcataccaaaagtagactaaagtttgagctgtcacagatggtaggtcatttccaaacttggcctggtgggaggaaaaatggcctgcagatagccaggtgacagactgttacctgaggtttgttatataaatgtgggacttaataaactgctatgagctttattattcaaaaaaaaaaaaaaaaaaaa

SEQ ID NO: 390515 - DNA, 1000 bp, Homo Sapiens
gtttcttgtttttgttgcttgctattcgtttttctctttttgttttacctttattataaaaaacatcaaacttttatgaaagtaaacagaataatatactgaccccatatacccctgggttcaacaattatggacatgagccagggtcacttcgtctattactgctgcacatttgcccgcccccgtatcattctacagcaaactgtatatatcataacatttcatttgtaagtcttttggatgtttatctaaaagaaaacagaaactttttaaacataaccataataccattatgacaccttagaaaattagtgccatctccttgacagtctcagaaatctagtgtaatgggttaagttgtgtccccaccccccaacagaaagctatgctgcagtcccactccccggacctcagaatgtgaccttatttggagaaagggtccatacagaggtaaccaagcttaaatgaggtcattagggtgggccctgatgcaacatgattagtgtccttatcaaaaagggaaatttagacagaaacagacacgcacagagggaagactagcaaagtgacacagggagaacgccacatgagaaacgatgctgccacacgctagggaaagtctgtggccaccagaagctgggggaggcaaggagggaccttcccaagcgcctttccaggaagcgtggccctgccaacagctgatatctaacttctagccccagaatggggagaaaataagtttttgttattctaagaaaccactcagtttatggtactttgccctagctaactaacctggtcagtattcaaatttccaattatctcacaagtgtcactttttttggaatcatgattcaatgaaggacccctgctgcaactggttgatgtgtcttaagactgttttaatctccttccttcctttctttcattcttttttttttttttttttttgagacaaagtctcactctgtcacccaggctggagtgcaatgatgtgatc

SEQ ID NO: 390516 - DNA, 1000 bp, Homo Sapiens; identical to SEQ ID NO: 281538

SEQ ID NO: 390517 - DNA, 1000 bp, Homo Sapiens; identical to SEQ ID NO: 201613

SEQ ID NO: 390518 - DNA, 1000 bp, Homo Sapiens
acagcgacttttaacagtcttggggcagtttgcatatgaaaagcgagctggcaggttgcctggctaccacttaaggaaggtgggtttggctgcccaggactgggagctgagcacccaggagtctggtgtttaatcagactgctgttggtggtggacggccggtaaacaattagctctctgcaaagctatcttttactttgattgttcatacgaaaagagttttaaaagacctttgcaaattcaaactacattctgctgcagacaggcaccgaaatctttcttttggaaaaacacaagcataaacgtggatgtgtggcgtgcagaggctggggcaggggtgagcggcactggctcatccgtggctccatccatgcatgcccggtgtccctggatgggctgaggccaggtagcctggctgctcatccttcctgtgggatggagcctcactgtcctttgacaatccgcagcaggggatgctttgttagcctcctgctcttgtaagaatctacctcaaggcagagacagtaggatctggtttcgtcaaaggagtttgatttagtttttctaacctgtccttatgaagctgggcatccagaactttcgcatttaccatcctgttcttggctggcctctgcagggccagccccacacagctgtccttaggggactgcgacgtacccggcagtgtgggctgatgaggtggggaggtgggaagagcctgccaaggctgtacctgagctgtgtattctaacaccgttctgtggtgcttactgcatgcaggtactgttctaagctcatggccaagtgttcgctcctgtcattaaaccctcttaagagctccatagaaaggccctatcagcaccaccattattactgcagctgcctcgggcagttagagtagaaagcgccccagacccagaggcacattctgctccggtaacccatgcctgtggctcgctgggctaagtcagcccctggtgaagtttcatttgccgaattc

SEQ ID NO: 390519 - DNA, 1000 bp, Homo Sapiens
ctgcaacatctgctttcccggttcaagtgattctcctgcctcagcctcctgtatagctggaattacaggcatgtgccaccacgcctggctaatttttgtatttttattaaagacagtgtttcaccatgttggccaggctggtctcaaactcctgacttcaagtaatccacctgtcttggcctcccaaagtgctgctgcctggctggatgtagcagatctccaattgccttaccaaacctgcagggtctctgttaagtgtctgttaggggtcttatatgatactctggacaccgtgagaaacaggtgatggggcagatgggaacctggtatccaactcattttttatgtctgctgaatggttgactgggtgcccctttggtaagggctgggaaagtgaaccaagttgggagcagagcaggtcttgagaccaccttaatgaggaacacatggtctacttcctatctcctgggacacaggtcatttccagcttccagaattagtaagatttttcatataaatcctcccctacttcattgtataataaagaatttggcctttgtcttcagttcctgagaaggagactctaaatccttggaatttcccaagtaataggagtatctttgtttttcgtggcaggtccctgaaactacacctgaatttatgttgagatttgaccttaggctgcacctaattttatattgaatttgatctcagaccacacctgagtttgctgtaagatttgactgaggatggaggctgaccatgccagaatgaccaaccatatagttacagggctgggactttgagctggatgataccagcttgatccccagggaggggagaggggctagagattgagttcagccacatgccgatgattttaaccaattatatctatggtaaaactctagatataaaaacttctgacacaggttttggtcagcttcctggctggtgaacacatggatgtgctgagggatgtgcattggtatcctgtttc

SEQ ID NO: 390520 - DNA, 1000 bp, Homo Sapiens; identical to SEQ ID NO: 195086

SEQ ID NO: 390521 - DNA, 255 bp, Homo Sapiens
cccattgacctcttctgttattattcagacatatgttaagctctgcagcaggactggctagatcatatgcagtgcccagtgaaaataaaaattcagggcttcttgttcaaaaagtattaagaatttcaaaactcaccagtggggcattagcccagcatgggcctggtgcaactgatgccacatgccatgaagcagtcctgctttgcagtctaaatcatgcgtatgatctgagctggggttctttctctccgtccc

SEQ ID NO: 390522 - DNA, 1000 bp, Homo Sapiens
tcaactggactgaaccccccttcaatcatttcttccctaaatgtatgtggaccaaccaaagactgacgtatggctcagtggatgccagatctggagaccagatcctaaaataaaatctaaacttctccagaggtaaaaataaacaaggcccatatctaggccaggcatggtggcatacacctgtaattccagccacttaagaggctgagttgggaggatggcttgagcccgggaggtggaagctgcagtgagctgtgatagcaccactgcactccagcctgggtgacagagagagaacctgtccccaccccctgctcaaaaaagcttacatctaatgcatggacaggttctatcttcagaacgtatctagaatttgcccattctttttaccccctcttgcattaaccttgtcttggctactataacctctccctgaactcttagcaggtatcctgcattcacactgaacaacaacaatccactctctaccctacagtcagaatgtcaatgaaacacaaatcaaataatatccctcttcttgatatccttcaatggcttcccatttcacttagaataaaactcaaaggcttatcatggcctttaagtctcttatttatctgatcttgctcattttctgtactccttccaacctggtcttctttctgtttgcaagcacatgaaggttgctctctctcagggattttctgttttctcttcccagtgttcttcccgacttgatcttctgactggcttctttcattactcgtatcccacccaaaatatcaagagaggcttgtcggatcaccatatctaatttagcctgatttctatccctgtcattcactattacacacattattgccttcatagtacttttaaatatctaaaaatatttggtttgtttaactgatcgatataaatcgctggatgatatgcctgtgattgtggaaaatatttctatcacattctccaccatatatatagctcagactattggatg

SEQ ID NO: 390523 - DNA, 1000 bp, Homo Sapiens
  misc_feature (75)..(75): n is a, c, g, or t
  misc_feature (805)..(805): n is a, c, g, or t
  misc_feature (819)..(819): n is a, c, g, or t
  misc_feature (973)..(973): n is a, c, g, or t
attgcatttattgtaaaattaattttacttttcatacgtcactagacagagcattttgaggttaggaattgggtntgaatcaatgatttctccagcacccacatggcatttggcacagaatacatcaataatgattttggattaaacaggggaacaagcacaaggaaccatggtggtcagaaacgggttgatctgcaccagagaaagggagactaggggagaaaggtcactctagatttcgttcaattattgaaaatacggtgtatttactatgtgctgggcacttttctaggtgctagaaagactacagtgaccaaaacaaaaatccacatctgcagggatcttgcattctagtgagaaagtaagatggtaaaaaagataaatacgtaaattttatacaatgcttcgtaacgacaaatgctaaggagaaaaacagcacagaaaagacagaaaggaaaagagaaggggcgcatgtggtgcaattttgttaggatgccagggagggctgagcgtagtcgtaaatgaccacattatttgatggatcaagccagggactgcaagtctgtgtttctgagagacacataaagaaaagaaggcttaaggaatccagaaagatccagagtggggaaatgaaacgaaaagaaatccagccagtgggaagtcgtgaagggatagttaaacgcgttttgggaggaaagaaaaaagcaaaagtgcggtacagcctttcgttacacgtgaaaagaatcatgtttctttttctagttagaaaaagccaaagattgtgcgatttatgccccaaaccccnttgtaaggggattntcacctcaagttgtgttctgtggtcagtgtttcccgcccctgaatcagggttactgtcactatggctttcaattggcccggcataggcgcatgctctgcgcgtattggcctccgctcctgtccccagacaagcggccatgttgggtcccgcccntaccgtggggtgttgtgggaattgcag

SEQ ID NO: 390524 - DNA, 1000 bp, Homo Sapiens
aattgagtgcatatacaaagttttatcatccaccaaaacagtgacaatccacatgaggctctaatagaagtttagaaagggggttaagtggttaaatgctggactcagaaagattggattcaaatcccaggtcctttagcttaatagttgtagaatcttgtgaaaatatcttaattcttttcatgtctctgatttctcttctctaaaatggaaatataaatgagatgtgtataaagccacttggaatagcattttgcacaaaataattactcattaaatgtaagcccctattataactaatcactctttataagtgattagttcatatcaatacaaactaagacttatttactgaattatcgtctctaaacatccacactgcagaaaaaccaacctggaaatttcataaaaccttatttttatgtagtataatttcttctcaaagcataagggctcttggattaggaattgaggaaaattccaattcagccaaacgcatctgtttcagatagctgacacttctgcctactcatttcctagctaacaagaagaaatgttaatgggagttttcaaaggaaaagctgaacaccatgaaggaaagtgacacaaataatgttagctcatatattgacagggtgaatttgtgtgctttcaagtcccttcagtgaaaataggaaagtagaaattataaaatgccctaacatttaaagctagcatgttcttggagactaggaaaaaataagttttaaaacatgggctatgatagaatgagatggaaaatgtttgtagttgccagtagaaacaataacaattaccattagattaagtatttaaaccagctgaatatttttattaatggaaatggcatctgttttatgaaataatgctgctgaatgaaccatattaaaaatgaccagtatttcctgcagaacgttgtcgcagacatacaagcctgagaccctaaaatcttaaggtattccatttgaaatcgaccttaaga

SEQ ID NO: 390525 - DNA, 1000 bp, Homo Sapiens
gactaagctgctctgggacactctcctaggatgtctcatttaattcttacacaaaatttgcaactccccgggaacaggctgagtggttaagtaactttccaagggtcacacagctaggaggtggtggagctgagtccggagggcctgtcctgctgtgggttctccatcaccagctcccttctcatggggattggagtctagaagaagatgcaagtcagtctcctcttgctaacaacatgccctgggcacagagccatcattttctcccagagccagtctcttgtccctggaggcacctcatgccccgagagatgttgaagcccgcccatctgcccagggtcctctcccttcccctccgtcacctccacctcccctgcctcctgcgccctctgtttgtattttatgactctataaacccttttaaatggcccagaacaaacagggcttacatagtggcctcttcatttctcctattgccagttaaacgctttgtcttcaacaatgacaaacaatgttttccccctaagataaattaattacattatcctgattggagggcaggaggggccagggcgggagagggaatagaaaaaaaggcaacttcacacacatcttaacaaacagctgccccagccaccccagctctgcctgaattaattgaacccagtgtgtgttgttattgttaatttacatttttctttgttttgaatctggtttacaggctgaaggaatatcatcgtctccagagcaaggtcactgccaaatagacccgtgtacaatgaggagctggggcctcctcaatttgcagatcccccaagtacaggcgctaattgttgtgataatttgtaattgtgacttgttctccccggctggcagcgtagtggggctgccaggccccagctttgttccctggtccccctgaagcctgcaaacgttgtcatcgaagggaagggtggggggcagctgcggtggggagctataaaaatgacaattaaaagag

SEQ ID NO: 390526 - DNA, 1000 bp, Homo Sapiens
tggtctctctgcaggggagttccagctgatccggcagacactcctcatcttcttccaagacctgcacatccgagtatccatgtttctaaaggacaaagttcagaataataacggtcgctttgtgttgccggtgtccgggcctgttccttggggaactgaagttccaggactcatcagaatgttcaacaacaaaggtgaagaagtgaagaggatagaattcaagcatggtggaaactatgtccctgcacccaaagaaggttcttttgaactttatggagaccgagtcctgaaactgggaactaacatgtacagcgtgaatcagcctgtggaaactcatgtgtctggatcatcaaagaacttagcctcatggacccaggaaagcattgctccaaaccctcttgctaaagaagagctgaatttcttggccaggctgatgggagggatggagattaagaaacccagtggccctgagcccggattccggttgaatctctttaccaccgatgaagaagaggaacaagcagcgctaaccaggccagaagagttatcctatgaagttatcaacatacaagccacccaggaccagcaacggagcgaggagctggctcgaatcatgggggagtttgagatcacggagcagccaaggctgagcaccggcaaaggggacgatttgctcgccatgatggatgagttatagctgttctgaccaggcgtcctctgcccccagggagaggctgctggatggtgacccctggggaatgccccatggcccagaatgatgctgctagttttctactgagtgaagccattacgtctatttcttatttatgttgtaaggaactgtgtgagtctcccttgaggagcactcactcttgaaggcacacacatacacatattttcagtgaaatatattctgacttttaaacttgaaaaaaaaaaaaaaactctccagcgctggatccggccataagggcctgatccttcgagggggggcccggta

SEQ ID NO: 390527 - DNA, 1000 bp, Homo Sapiens; identical to SEQ ID NO: 281544

SEQ ID NO: 390528 - DNA, 1000 bp, Homo Sapiens; identical to SEQ ID NO: 281545

SEQ ID NO: 390529 - DNA, 1000 bp, Homo Sapiens; identical to SEQ ID NO: 281546

SEQ ID NO: 390530 - DNA, 1000 bp, Homo Sapiens
taaagagatgtggatggtgtcagagaaggcaaaggcctgcagtggattgaagaggcttgcaagcagttctgtttctaggatgtgggcttcatcagaagacactcggtcaccacttagctagtctaaacctcagggttcctcagcccatcataccccaacttggaggactgacatcaaggagtagactggagaaacagccctcccatcaagtaacctcttgttctctcctgctccatctgcactatagaagtgtaataattagacatacttggcaaaatggctaattgatttggtaacagaagcatgagccataacaatggaagatctagttatcatgactgaacagcttaacattcaattcccttctctaagagaagctgtgaaatcctacatattatttaaagttaaccaaatcaatgtaaagggagttaggagacagtgtgtacctatgcacgtatatttatgttttgcttgtgttccagtctcggtcatttgtttccattttcaagcaatttatttgaagagccattgcactagcctgatgtatactgcaatgagcttctttgataaaatgaaacttaaatttttctcgaccatttcaccgtgcctcctacttcattttttgccagaaaatctcacatccaacaaaacaaaacaaaaaccctgaattagtgggctttgaaaaggaaaaagcagggctttgaaaaagtagatcacacatcagttaagactcctgcttctctattagtcaggttgtcttggattcagtctggagtaggcagagcttaagggtttttaagtcctgacccaaagaaatgatctagcctgaaagtttagagcaaaggactaatgtttacttttaaaggaatttcttgatttttttaaaaaacttcattaaagtttaaatccccaatggacaaattcataatcttgttaatcgttattactaaactttttaaaaaatgtcccaatttacaattaaataaattactttctcagt

SEQ ID NO: 390531 - DNA, 1000 bp, Homo Sapiens
tatattgatctctgactacaactactatccttgcagttttactccattactccctaaatacctgctttcttacctaattttgatacccattcctcatttcttcaaactacaatctcatttcttcaaactacaatctcccacatgctttgtgtcttttcctatccagcctaggttctcaggtacatcaccctcttctgctaacaaccttcctccctcattaattccctctcccattacctagagcatatattttgtaccatcttacttcaactcaaacttgctacttcagctctacccttatctcttttatgactcctttatcagaaaaaaaataaaaactaaaactattagctatgaattcgaattccctcaacttcctgctctagatttacaagttatacataaaaccatcttacctgttcccttctagtctcagaggaaaaggtatcctttctcttttctgggttaattcctttacctgcacccttatctcctactagatctcactatacctttctaatttctcctctctgatgactctgtccccatactttataaaaatgttaagttctcttctcttgtagatctcctactctattctgtaacctctcctaaattatcatctttgtttagaatgtcaagagctgaatataccatatgtacatctcttttttttttttgagacgggctcgctttgtgccaggctggagtgcaatgcgcaatctcggctcacacaacctctgcctcccaggttcaagcaattctcctgcctcagcctcctgagtagctggattacagcatgtgtcaccatgcccagctaattttgtatttttagtagagacagggtttcttcatgttggtcagactggtttcaaactcccgacctcaggtgatctgcctgcttgggcctcccaaagtgctgggattacaggcaagagccactgcacccagcccctttccctattttaatatacttttcaactcaacacaaacagaattc

SEQ ID NO: 390532 - DNA, 1000 bp, Homo Sapiens; identical to SEQ ID NO: 281547

SEQ ID NO: 390533 - DNA, 1000 bp, Homo Sapiens; identical to SEQ ID NO: 207000

SEQ ID NO: 390534 - DNA, 1000 bp, Homo Sapiens; identical to SEQ ID NO: 114785

SEQ ID NO: 390535 - DNA, 1000 bp, Homo Sapiens; identical to SEQ ID NO: 281550

SEQ ID NO: 390536 - DNA, 1000 bp, Homo Sapiens; identical to SEQ ID NO: 201619

SEQ ID NO: 390537 - DNA, 1000 bp, Homo Sapiens
cccttcaaaaatgtttgccaatttataaccccattatttgtgttccattttgaaagatataaatatgtgtccaaaccacctgctccgcatgggtagttccttacaatttctgtaatggaaaacatagagggaaaacctacttgcagtttcagtgggagaaaaggttcccgtttcaagaaaagaaaatttcagtaggagaaaatattgtgaaaaacaaggtaattttctactttaagtttctgtcctatgggtataaaaaatagctggacattatcttcttcccaggctcttctcccctcttctccgtcaggctgcattgctggtcatttttggctcctgttggaagcaaactgctctaatgcctttggataagattttaaccaggaattatcctttttttttttttttttttttttttttgagacggagtctcgctctttcgcccaagctggagtacagtggcgctatctgggctcactgcaagctctgcctccgggttcacgccattctctgcctcagcctcccgagtagctgggactacctgccaccgcgcccggctaaattttttttgtattattagtagagacggggtttcaccgtgttagccaggatggtctcgatctcctgacctcgtgatccacccgccttggcctcccaaagtgctgagattacaggcttgagccaccgcgcccggccgaccaggaattatcttaaacagaaaaagaatactctaaggaggggtataccggccagcagaacagtaacccctccccggggttttcacaaggacacaagctggtgtgtaatagacttatctataaagcagactcaactcctaactggaattgttcctgattggttagcagaaacagaattgaggactgacgacagctgcacaagaagatgaaaccatttccttcctcttttctaagcttgtctcttaaaacccactggacgttggcacagtgctgggatgactatggagacccaaatgtctcag

SEQ ID NO: 390538 - DNA, 1000 bp, Homo Sapiens
aaacaggagcatacttgagataagacagtgcagcagctgaagtcttgccttccaaggcgataacagtgacctgtgcctcccctccccctcctcggccctcctccccctccctcctacagctgcttatctgaacagcttgcaggaggcctcaggctttcctgcacaatgagcattgccttctgcaggccctgccctttgtggtccctgaggatggtggcagactgctcctgctcttggggactttttcctcttaaatgctctgacacaaagcaatgctacaaaggtactaataccaaatatgacattgatgactgcatttaagtatgagtcattactttgtcatggctgtgatagaacttggaagatctgagaaaaaattggaaggcagcatctatataaataggcatgagcaattctgagggggcctggcatctgctatctactattttcagtgttctctgcccacatcagagttacgaggattgctgctattcacaattccgtttaaagactcataggaaaaaaaaattaaatattttaagccaagactttctttaaaaaggaactagggggaaatgtcctgatcgaatcaatcttttttatgagaccaatatgccttgagttcgttctgtgtctaactagctgctttcagcaggggaaatacatgtgggacccttgtgctgtcagctagactgccaagcaggctgagccttctgggcaaaggaggcatgatgtgctgtcttcagtgcttggggtggctgatttacctcattgagtgccacgtcctaaaattccgtccaaattacgggaggattcttgaggcaacaggaaaactgtactgaattactcttcttgtaatgaaagcgtccttgttttccatttatcagctcctaaaaacatctactcctcaatgggacagaagcctagataaaaaattcagttgtatttgtgcccaattttcattactattttacctatttgctgcttgaaatcttaaggt

SEQ ID NO: 390539 - DNA, 1000 bp, Homo Sapiens; identical to SEQ ID NO: 201627

SEQ ID NO: 390540 - DNA, 1000 bp, Homo Sapiens; identical to SEQ ID NO: 201605

SEQ ID NO: 390541 - DNA, 1000 bp, Homo Sapiens
cttgctctccaccgcagtcctggttgccgtccatgtctcatcccgaccccttctgtctccatgcctccctcctctctttctcgtccccctgtctccctgtctcctcttgtctctctcttaacctcatctcctgtctctgccctgtccccgctccatcctgtctctctcttaccctcatctcctgtctctgacctgtccccgctccatcctgtctttcgctgtgtatgttccgtccttgtctccctctgtgtacctgtatctcttgtccctgtctccatcactgtttctgcccctttctctcccggtctctgtttcctctgtctatccacgtcccttccctgtccccatcccaggttccgtctcttcccggtctccatcccccttcctgggccgcctccgcagtctccgccgggatgggacctcgctgggggcggggctgaggggccagatcggaataactcggttatcagagcgaattgaattaacttcttcacacgagcgccgccaggcctgcctcccctcccttccgcggggccgcaggtggggaggcccgggaaaagggtcgggaccctctggcctcggacgctgtgtagagaccgaaggtctggtccggattggggcaggatagggactccggggatagggtcccgcgcatcccagctccacacctctgagccctaagacggcggcggggacccttcggggtgggggtcggggcggctttgggcggtgtctggcctcctaggccccgcccttcggagctcgccccgccccgcccccctccgcggggtcctgcgcgttaaaaggcgcgcgggccgggctggctgcacttgcgttgcacccgggctgagtgcggccgcgacggggcgggcggactctcgggcgctcagagctggcctcgggtcctcggagcctggcgctcgaacctcccttccgacctccacccggaccccgaccccgacccggcctggcccggcccccgcccccgccccccgggccg

SEQ ID NO: 390542 - DNA, 1000 bp, Homo Sapiens; identical to SEQ ID NO: 281557

SEQ ID NO: 390543 - DNA, 1000 bp, Homo Sapiens
cctctgtgcctcggttttcccactggttacacaggatggtcgcattttccctgcctacctcacagagctgttctgagggtgcatggaggagcactctgtcccgccaaggacaactagaaaccaaagccatctgacagccagtgcggtaagggcgggggatgtgtgtgtgaggtgtgcacaccccccgagaacctggccctggactggcctcacaggacaggagcagccccttgtagagctagggctcagccccatcagtctcaaaggttaagccaccagtcaccaccgaggcacccctcaggcctggtggccactgtccactattacgtagacagaccccaccctcacccaggccagctgtgggccagtcccgccctgcaatctggtctgctgccttcctcttccatgttggtccccttggccactgtctctgggcatgcaagccagtgtcctggttcagtgcctcggccagagctggggcaggagaggggcctctgggtgagagctgggggtgtctctgcagggtactggcagccttgccacactgtcctcattcccagatggaaagacctgagtgcctctcgccttcctccgggaatgaattcctcatgaaaatgaccaggccattttccgagggccaggccgcccctccccgagacctgtcctccgtccgcgggtgttgcctgtaggggatgagagctgggcttgtgggcaccttggaatctgaccctgtgggccaaagaagcccactgtagtttctgcagacccccatgcggttcattgtgcattgtttggtttctaggatgtatgtgttgctagttttttttaatgaaaccctggattaatgtaaatagctttttggggaacggattctaatgtcacgtatgtgaccgtgtggactatttcaaggtgctgatgcaacactaataaacctggaggggccggcaaaaaaaaaaaaaaaaaaaaaaaaaaaaaaaaaaaaaaaaaaaaaaaaaaaaaa

SEQ ID NO: 390544 - DNA, 1000 bp, Homo Sapiens; identical to SEQ ID NO: 281558

SEQ ID NO: 390545 - DNA, 1000 bp, Homo Sapiens; identical to SEQ ID NO: 281559

SEQ ID NO: 390546 - DNA, 1000 bp, Homo Sapiens; identical to SEQ ID NO: 281560

SEQ ID NO: 390547 - DNA, 1000 bp, Homo Sapiens
ggcttactgtggcttcacaccacattagaatttggtctggaaatcaaactttagaaacaagagatcgtaagccattttatactattgacctgaattccagtctaacagttcctttacaaagttgcgtaaagcccccttatatgctagttgtaggaaatatagttattaaaccagactcccagactataacctgtgaaaattgtagattgcttacttgcattgattcaacttttaattggcaacaccgtattctgctggtgagagcaagagagggcgtgtggatccctgtgtccatggaccgaccgtgggaggcctcgccatccgtccatattttgactgaagtattaaaaggtgttttaaatagatccaaaagattcatttttactttaattgcagtgattatgggattaattgcagtcacagctacggctgctgtagcaggagttgcattgcactcttctgttcagtcagtaaactttgttaatgattggcaaaaaaattctacaagattgtggaattcacaatctagtattgatcaaaaattggcaaatcaaattaatgatcttagacaaactgtcatttggatgggagacagactcatgagcttagaacatcgtttccagttacaatgtgactggaatacgtcagatttttgtattacaccccaaatttataatgagtctgagcatcactgggacatggttagacgccatctacagggaagagaagataatctcactttagacatttccaaattaaaagaacaaattttcgaagcatcaaaagcccatttaaatttggtgccaggaactgaggcaattgcaggagttgctgatggcctcgcaaatcttaaccctgtcacttgggttaagaccattggaagtactacgattataaatctcatattaatccttgtgtgcctgttttgtctgttgttagtctgcaggtgtacccaacagctccgaagagacagcgaccatcgagaacgggccatgatgac

SEQ ID NO: 390548 - DNA, 1000 bp, Homo Sapiens; identical to SEQ ID NO: 281561

SEQ ID NO: 390549 - DNA, 1000 bp, Homo Sapiens
ctccagctagcaagatagacactaagcagctgcccctgtgaccaaagcacacggtaggccgggccctgctgggtgggagaattccacttcgtttgaaaccaggcaatcccagcttcccattcggctgtcgctgaccaaataacctttggtttgcttatctttgtcaagcctcaggcttcttgtctgtagaaatgggcacagacccctgattgcagacagagtgggatgggtggctgcactggcacccttctttcttctcattggaggctgctgcctcctctcccatgcccagcagcacccctcacctaggctgcatgagcatttcagtgctaagggcccgtgcatgctgggaaatgccgcaggtccttgatcttcacctacatctcaggaagctgaggcccagcctggttcaggaccgctaaacgacaagcctgcaactcagatccacaaagcgtgttcttgttggccactgttgcctctctaaataggatgccatctcaccaggcagagttccctgggctcacggccccgttgttcccgttgtccctcctcagtcgtccaaaataggccgtaagggcgacaccccagaccagggtaggtggacaaatgcccttcctgtccttgcttctcccgcagcccagcgggaagagcaaagactgcgtgttcacggagatcgtgctggagaacaactatacggccttccagaacgcccggcacgagggctggttcatggccttcacgcggcaggggcggccccgccaggcttcccgcagccgccagaaccagcgcgaggcccacttcatcaagcgcctctaccaaggccagctgcccttccccaaccacgccgagaagcagaagcagttcgagtttgtgggctccgcccccacccgccggaccaagcgcacacggcggccccagcccctcacgtagtctgggaggcagggggcagcagcccctgggccgcctccccacccctttcccttcttaatccaaggactgg

SEQ ID NO: 390550 - DNA, 1000 bp, Homo Sapiens
gaacctatgggctaagcaatgccctgctggagacgccctggaagaagctgtgctttggcaaacaactcttcatggaagcagtggagcagagcgaagcactccctaaggacgtccttgtcactcagctcctagatgtcctcaacaatgaggaggcacagctgccagacccagccattgaggaccagggccaggagtatgtacagccaattctgaacaagtatgcagctgtgtggtgccggtgtgcctcctatggcaccagaaccaacaccatcatccttgtggatgcaaatggccacgtgacgttcactgaacggagcatgctggacaaagacacctctcgctgggagaccaacacctatgagttcacactacagagttagcccctgccaggttccaaggatgctgttcctgaagggccagcgtggacaggaacctttcacggccactctgcaggtctgtggctcagccagcacccctaggaccaggttgttctgatttgtgtcctcatactcagctcagggtctctctttgtaccaatggagaacgacagagttaaatactaggcgtgagtcaggcctgggtatgccgtatgtgaacacacagacctgtttgttgctcaaccccactgccactgtgtgcacctgactgatgagtaggatcatgcctctcaccccacacgtttgggcagtgggtctcatccatggacgggtaacaaaagcagactctttacagaaactggagatcctgtatttgtttgtgttcatatgtgttcggtggttcttcatatacgaggaccctgtgtgcattttctcagtcctgtagtgtggaccctgggatctcttagacccctgcttgcccaggattgtgggttctgagcaagacatcttcaaccagtcccgtccatctcccattgcccttgttatggtatacaccataggaatgtgaacttgaatgtgcacagttgataataaatctttgaagttgtaaaaaaaaaaaaaaa

SEQ ID NO: 390551 - DNA, 1000 bp, Homo Sapiens
agaaatttacaggtattaaacatgagtggcaagtaaatggcttggatgatattaaggaccgttcgacacttggagagaaattgggaggcaatgtagtagtttcacttgaaggaaaaccattataaaatgacagtcaagtgccatctggatcttaaggagcttccatttctccagctcagtccattggaatagtattaggttttggttttttgttgtatttccccctttccactgggcccttccaacacaatgaatgaaggaaatatcatttatttaagcagcctatcagtgattgccattagactgttgaatactgttacttttatatagaacccaaggaatgccttcctgtcatattttagccaaaacaactggttatatgcctcccttgcagcaagcactacaatgtatgtgatcgtcaatgtgaatagcttagaatactgcaaaggataagctaattgaatgccttgaaagtattatccactggtcagatggtcaacttttttcagtattatttatagttggcacttgattgcagttctgtgaggcttgagcattcatacacctcacctgccttggcaagcctattttagtgatatggcagcacggatataacactatgcattaaaagcactttttgtaataagtttaatatcctaaaaggaatgccaattaagttttgttaactgtgtcatcaacttatcctagtacctcagtgttcattcctgttacctgcatatcttcttaaaagaaatagctgttattaatgcctttttgttttccattgagtgtacactactgaataagtgtaggagttttatgtttaccatgtgagtcctgcaacactaaagatattttgaatatcagtcatgatggcaatttctgtataaaagagccttaaatggaacattgttttgagatcaaactccccaccctcacaaaaatggccacgttgcaataaaaattgtggcatattacaaaaaaaaaaaaaaaaaaaaaa

SEQ ID NO: 390552 - DNA, 1000 bp, Homo Sapiens
aagaggagaggcacccgatatatgttctctaggccttttagaaaaaatggagttgctcctttggccacatatatgcaaatctataagaaaggtgatattgcagccataaaaaatgatgagttcatgtcctttgtagggacatggatgaaattgggaatcatcattctcagtaaactatcgcaaggacaaaaaaccaaacaccgcatgttctcactcataggtgggaattgaacaatgagaacacatggacacagtaaggggaacatcacactctggggactgttgtggggtggggggagaggagagggatagcattaggagatatacctaatgctaaatgacgagttaatgggtgcagcacaccagcatggcacatgtatacatatgtaactaacctgcacaatgtgcacatgtaccctaaaacttaaagtataataataataaaataaaaataaaaaaaagaaaggtgatattgtagacatcaaaggaatgcgtactgttcaaaaaggaatgccccacaagtgttaccatggcaaaagtggaagtctacaatgttacccagcatgctgttggcattgttgtaaacaaacaagggcaagattcttgccaagagaaataatgtgcgtatggagcacattaagcactctaagagccaagatagcttcctgaaacgcgtgaaggaaaatgatcagaaaaagaaagaagccaaagagcaagggacctgggttcaactcaagcgccagcctgctccacccagagaagcacactttgtgagaaccaatgggaaggagcctgagctgctggaacctattccctatgaattcatggcataatagatgttaaaaaataaaataaaataaaggacctctgggctatttaaaaaaaaaaaaaaagaaagaactgctcctgcttcaaaacaaacttgtggctgggcacagtggttcatgcctgtaatctcagcactttgggaggcccaggcaggagaactgctcgagcccag

SEQ ID NO: 390553 - DNA, 1000 bp, Homo Sapiens; identical to SEQ ID NO: 281562

SEQ ID NO: 390554 - DNA, 1000 bp, Homo Sapiens
aaggctgcctcttcttgccaacttctagatggtgaggagcagaggtgggtgcagcctgcagagctgggcccagagctcatctgcatagacctgccccactttttagcaccatcacttacccagccctcactactacttctgttttcatcttggaacccttttaggacctctactggtattgagcacagtccaaggagcggagtcttagttgagtccacaggccgatttccaataggctccttgcatgatctattagggacaatggtttgtctcagagaacttgttctctgagataaacaatgccctaatttataacacttaccgatttcagagttgtatatacttctgtcatggctgatttcaggctgttgctgtgacttcatgtagaattggctagaaatgtgcacaataggctcttgtgagctggtgggagctggttcaagaacaacattggttggggctaggatggaatggtgtctcacactgaaagacaaataggaagatatttgtctcttctcttagatgaaaaacctgaggcttagggagactgtgggggttggggagtccgcctggtgtggagttattgggacagttggagagttcttttgtgtcctgctgcattttcacaggctccacttcctggggggatctgggagagcctggcacttgtgttgttttgggacagggttgggacgatgctgggcctttgagggtgctagacccaggtcttccctcctctcactttctgggaagggcttgggtgacctcttggttgactgagttcagagctggtgaccacatggtctctggtgtcattgtcaggaattaatgcccagtgctaaagctgaccttttctctcctgcaccaggctgtgtgatggcatcagtgctgtgaatatctgtgagtaattctggccctgaagggagactctgaggtttgccagtgggacgaattttttagctctgagggtggaaataccaaggaagtggttccattcatt

SEQ ID NO: 390555 - DNA, 869 bp, Homo Sapiens
tttaaagaacagattttgttatgtctctgtggaaacatttagtacctgttaagataaaaactaatcagaaagaaaacatcaatcctgggaaagcaaaacagacgggtgtgtgtctaaacttatggtctgcaacttggcctacagagggaagctggaggaggtgaaggagaggattctggccaataaacccctggctatgagaactgaccaggacagaagtgcattgcattgggcatgctcagccatacatacataaattattgaatttttgtttcaacttggagtgccagtgaatgataaagactatgcgagattggtctcctcttcagactgctgtttgtgctggccagaatgagactgtaaaagcccttctgggaaaaggtgctcaagtgaatgctgtcaatcaaaatggctctactcccctacatcatgcagcttccaaaaacaggcatgagattgctctcatgttactagaaggtggggctaatccagatggtaaggatcattatgaggctacagcaaagcaccaggccacagccaagggtaacttcaagatgattcatatccttctgtactacaaagcatccacaatcatccaagacactgagggtaacactcctccacacttagtctgtgataagagtggaagaagcaaaactgctggtgtcccaaggagcaatatttacatagagaataaagaagaaaagaaaccccacaagtggccaaaggtgccctgggtttagtactcaagagaatggtagaaggttaaacagcttggatttcttcttactttctatgttgtgatgctgtccccagtgtcctggaaactaacatacttgggcacaggacatcatctacaaatgttttct

SEQ ID NO: 390556 - DNA, 1000 bp, Homo Sapiens; identical to SEQ ID NO: 201629

SEQ ID NO: 390557 - DNA, 1000 bp, Homo Sapiens; identical to SEQ ID NO: 206698

SEQ ID NO: 390558 - DNA, 1000 bp, Homo Sapiens
ccgtcccagggctccgggcgcacccggtggccgctgctgcagcggagggagcgcggcggcgcgggggctcggagacagcgtttctcccggaagtcttcctcgggcagcaggtgggaagtgggagccggagcggcagctggcagcgttctctccgcaggtcggcaccatgcgccctgcagccctgcgcggggccctgctgggctgcctctgcctggcgttgctttgcctgggcggtgcggacaagcgcctgcgtgacaaccatgagtggaaaaaactaattatggttcagcactggcctgagacagtatgcgagaaaattcaaaacgactgtagagaccctccggattactggacaatacatggactatggcccgataaaagtgaaggatgtaatagatcgtggcccttcaatttagaagagattaaggatcttttgccagaaatgagggcatactggcctgacgtaattcactcgtttcccaatcgcagccgcttctggaagcatgagtgggaaaagcatgggacctgcgccgcccaggtggatgcgctcaactcccagaagaagtactttggcagaagcctggaactctatagggagctggacctcaacagtgtgcttctaaaattggggataaaaccatccatcaattactaccaagttgcagattttaaagatgcccttgccagagtatatggagtgatacccaaaatccagtgccttccaccaagccaggatgaggaagtacagacaattggtcagatagaactgtgcctcactaagcaagaccagcagctgcaaaactgcaccgagccaggggagcagccgtcccccaagcaggaagtctggctggcaaatggggccgccgagagccggggtctgagagtctgtgaagatggcccagtcttctatcccccacctaaaaagaccaagcattgatgcccaagttttggaaatattctgttttaaaaagcaagagaaattcacaaactgcagctttct

SEQ ID NO: 390559 - DNA, 333 bp, Homo Sapiens
  misc_feature (332)..(332): n is a, c, g, or t
atatgtggtgaagccagactgtggtcacagatgtgagcagccaccagtagctccaggatcaggtgcactgaccctgtgtcctcctccttgcagagacctgtgccggcaggaccgcagctgcacctactacttcagcgtggatgctgacgtggccctgaccgagcccaacagcctgcggctgctgatccaacagaacaagtgaggctgctccgtctgcacccagcactgctcaggactggcctggtctggggtggcagccctccttgccttcctcctcctcctcctcatccacctcctcttcctcctctttttccttctcctgctcctctttnt

SEQ ID NO: 390560 - DNA, 1000 bp, Homo Sapiens
  misc_feature (320)..(320): n is a, c, g, or t
  misc_feature (322)..(322): n is a, c, g, or t
  misc_feature (359)..(359): n is a, c, g, or t
  misc_feature (361)..(361): n is a, c, g, or t
  misc_feature (366)..(366): n is a, c, g, or t
  misc_feature (373)..(373): n is a, c, g, or t
  misc_feature (382)..(382): n is a, c, g, or t
  misc_feature (400)..(400): n is a, c, g, or t
  misc_feature (410)..(410): n is a, c, g, or t
  misc_feature (414)..(414): n is a, c, g, or t
  misc_feature (440)..(440): n is a, c, g, or t
  misc_feature (451)..(451): n is a, c, g, or t
cctggatagttgccagaaagggttgtgaggattggatgcccccctttgtctttgtcttttcattcattccttcgttcctttcttcccttccttccttccttcctctctctctctctctctttctttctctctctctttctctttctctgtctctttttctttcttttctttcgcacttgtcacccaggctggagtgcagtggcgcaatcttggctcactacaatctccgcctcccagattcaagcgattctccgcctcagcctcccaagtagctgcgattacagacgcccaccaccatgtctggctaattttttgtaatntnagtagagatggggtttaccatgttggccaggctggtntnaaacncctgacntcaggtgancagccaccttggcctccnaaagtgctgnaatnacaggcgtgagtaccatgtccggccnccttccctttnatttcttctcttccctttcatttcttctcttcccttttcctcccttcctccctccctcccttcctttcttccttcccctctgttctcttccttccctccctctctcccctctgtccatacatttttgttgagaaccttttctgtgccaggtagttgcaggcactcgagcatagagccccatgtagacctggcccctgtaagctgacctgcagcaggccagaccaggccccatgtgtgcaccctcctctcctggcctttgtgtcctccttaactaacacgggctctcttgtccccctgccttggtacaggcccagtttgacctggcctttgtcgtccgctacaagcctgatgagcagccctcactgatgccacaccatgatgcctccaccttcaccatcaacatcgccctgaaccgagtcggggtggattacgaggtgagcaggagccagccgggtcaaggggccggcaatggggatgaggagggctagctggggagagcttcaggtggttgaggcagaggggccccaggtaacagtgccagagaccaga

SEQ ID NO: 390561 - DNA, 1000 bp, Homo Sapiens
accagggcagtagctaagaaaattatgacacattaactgaaatgaacattatgtaaccactaaaaatcatgattttggagcctgtgatatgtggggaaaaactgacaagtaaaaaagtgggttattaactgcacctgcttactctaacgtgaacgcatatgtgaaaaatctgaaaggaaaagcacagaaaatggacgttttcattgaaattgtcggtgatcttaattttcctttggtgaatatattgctctcactaagggcgtttaaaaaatagttcacaggttttaattttttagatgaaatggacccacagttttctgtaagagaaaggagagattgttatatttgctacttagaataaaagatttttagccaacgttgtttcctttttcaaatatttttccatttttttagttgattaatgatttagtaatttgtgtattgggtttttttaagaatcagttcttagattcatttatcaattctagttttttgttgttgtttttaaggactcctgaatatttttcaaaactgaacaatttcagccatgtctgagctttccgtcttcctggaggcacaaatctagtttagctgaaccacaacagattgtacatatcctgcagaacctctgtggtcttaggaaggttgaaagtcaccaaatgtcacagaaaatgagggtcaggaaaggctgtgatcacaagctcttgatccagaggccactcgggtgcatctgtgtgactgacacctcattgcatcatcatttcttgtaaaatcagcttaattttgcagagaaatggccacagatttttagaattatgctgaattatgtaagggagcagccattttaaaaataatgtaatcaaataacaataataacataacagaagtttctgcaccacactgacactgaacatggctgtcaaccaactagccaaaccaaggtgaaagattctctgaacttcagttttaacttacttcgtccattctcccttttcagatc

SEQ ID NO: 390562 - DNA, 1000 bp, Homo Sapiens
gaactgtactaaaagttattgaatgtcttaagtctttacactagaaaaggtagaccaactggaaaactagacatactctcttgatgattcagttgttttcatcctttacccatgtcccgtccaccttggtgcctagtatttctgctttaaaacaaaataaggacaactttttttttttttgaagattaagcctgaaatttcagtgtgaatttcccttaatgtccaatcttccctttttctcgacattaagtcaaatagttgaaggacagagttcagaagtagcaatctgaaaacatattttagctctaaagttttaaaagaaaatgccaccttaaaaatgcttaccactaatggatttttaatcacaaaatgaagcaaatggttaaataatacacttcccaaaattatatcataaatacactaagtgtaatgtggactttttctccctgagtgtaagaaatgtaaaattacaaaatgtttaagcattaaagtgcaaatatcaatctttaggcaatgaaaaacagcgagacaaatgtataaattacatataaaggtcataactatttcagaatttgcagaataataaatgtagaaagttttaaaataataaatgagcaactcccacaaatggtacttaatttccacaaaactttttagtaaaagagtatacaatctttttaggagcacatttacctaaaaaaaattttttaatttttaaattttttttaaggaagtagaaatattaaatttccaagacaattttctagcatctactacttggtcattttaatttacacttttcaacaacagatttcaatacagttatcatttgcaaattcatacatactttattcatcatctaccacatgatcaaagatgttttatgtgaacgttccctcctacttcataagctctctgccctcactccaaaaagaataaaatgcctcaaggtttattgaaggacatggttctgatgcctgacctaacaaggattggaatg

SEQ ID NO: 390563 - DNA, 1000 bp, Homo Sapiens
  misc_feature (849)..(849): n is a, c, g, or t
  misc_feature (857)..(857): n is a, c, g, or t
  misc_feature (874)..(874): n is a, c, g, or t
  misc_feature (912)..(912): n is a, c, g, or t
  misc_feature (921)..(921): n is a, c, g, or t
  misc_feature (942)..(942): n is a, c, g, or t
  misc_feature (974)..(974): n is a, c, g, or t
  misc_feature (984)..(984): n is a, c, g, or t
  misc_feature (992)..(992): n is a, c, g, or t
acaaaaagaagagttgaagcttcatttggttgttggaattaggagagcacaattggttggaaggaaatcaggttctctaagcatcaaaaaaaattcgtattttaagtgatgtgagttatggaaggcagagagttcttggtatatggaagttactgaaacagagcagtggacaaacgggcagtctgcagaagaggaaagctgaatagccagcaaacatggggccagatgctcggtctcaaccttaacaagagaagtcaggtttaaacaacgagataccatcacaccctatgagattggcagaattgaaaagactgacaaaaccagaaataacaaagctcgtgggtaaatgaaaactcctccacagctggtgtgagtgtggactggaaccatgacttcggagaaaaatgtatcaaaagctatgggacacatctttcgaatcagtcatttctcacaaggttgccatactcctcaagtcattccttttccaggaaaacaccctagagaaaatcttgtacttggactctagggaatgtgtacaaggatgtccattgtagtttagcttataacagcaaaacccagcccaaaagtacatcaacaaaggaatgaataaatgaaagtggcagttgtcattaaacctttttccttttcttgtatcacccctaagtatgaaagactatggactccttcactcattaaaaaaaaaaatttaggccaggtgtggtggctcatgcctgtaatcccaacacttaggaaggcttaggcaggtggatcacttgaggtcaggagttcgagaccagtctggccaacatggcaaaactctgtctctactacaaatacaaaaattaaccnggcatggnggcgtgtgcctgtaatnccagctactcaggaagctgagtaggaaaatcatttaancccagaggnggagcttgcagcgagcttganatcccaccactgccttcaaccctgggggacanaccgagactnttgtcttnaaaaaaaa

SEQ ID NO: 390564 - DNA, 1000 bp, Homo Sapiens; identical to SEQ ID NO: 281570

SEQ ID NO: 390565 - DNA, 1000 bp, Homo Sapiens; identical to SEQ ID NO: 281571

SEQ ID NO: 390566 - DNA, 1000 bp, Homo Sapiens; identical to SEQ ID NO: 281573

SEQ ID NO: 390567 - DNA, 1000 bp, Homo Sapiens; identical to SEQ ID NO: 114788

SEQ ID NO: 390568 - DNA, 1000 bp, Homo Sapiens; identical to SEQ ID NO: 281575

SEQ ID NO: 390569 - DNA, 1000 bp, Homo Sapiens
tttaggttcttattaatacttggactgtcagctgtcaactgtgcctaatactgtggtaattagagctctttaggatttttcaaaaccattttatgttggtgaattcatttcattgacaaccctagagggtggggagtggcagtggttagggaaacagggcaggagttaccatccctgcctacagagagggaaactgcagtccaaagaggtcctgtgacctggtcctcatggctcagcttgtaagtaacaagaggcggaattagagcacagatccccagacaccaatttagagatcttttcatgatgtggctcttctccaactctgtggcttggcagttctccaactataggaaacacaactgaccaagatcccagctgcaccctcaaatccactgctgtgattgcactgaagctgccctacccaatggctgagcacagcagaaatactaaggcaggccaattcctgggagtcatgggactcctctgatgactgactttggctccagaaccccttagggccttgctgaaacttccttaggctccatggcacccagggtcgttccacccaaccttccctccctccctcgttcacgtggggttatacttgcaacacagtctgctggttcacccgccttccctggctccctccccatttcctctcatgggcatttctcctaataaaatctgcagaccatattgggtctaatcccatctccagtctgcttcttggaggaaccagactaacatgactctgccctatataatacaaataattattttccatatatctgatttttagctttgcatttactttaaatcatgcttcaattaaagacacaccttctttaatcattttattagtatttctaagtatgatggaaaggttcagagctcaggggaggatatggagatccagggaggcttcctgtaggaagtggcctgtgtagtgcttcaagggccaggctgccaggccatgttgcagctgaccacccacctgcag

SEQ ID NO: 390570 - DNA, 1000 bp, Homo Sapiens
agtgcagtggcatgatcatagctcactgtagctttgaccccctggactcaagcaattccaacctcagcttcctgagtagctagtactatggcatacacaccacactgagctaattttaatttttttttttaatggaggccaggcataatggctcatgcctgtaatcccagcactttgcgaggctaaggtgagcacataatgaggtcaggagtttaagaccagcttggccaacataaggaaaccccgtctctatgaaaaataaaaaaaaaatttagccaagcatggtggcaggcacgtgtaatcccagctactcaggaggctgaggcaggagaatcacttgaacctgggagatggaggttgcaatgagccaagattgcaccactgcactctagcctgggtgacagaccaagactcttgcacaaaaaaaagaaaaattaccttttagccctatgaagatgccattcaccagcaaggcaccctatttctctatgccaactctgtaattattatctttccaccaggaggaacaatgtggaactccactttgtgacgcctgtgttccagccagagggagccggtgcctgctatggaagaaaggtctgcctgtgctttggggaaaaagtagtccaccacgatctacctttgctctttgacctctcaagagacccttctgagacccacatcctcacaccagcctcagagcccgtgttctatcaggtgatggaacgagtccagcaggtgatgcgggaacaccagcggacactcagcccagttcctctgcagctggacaggctgggcaatatctggagaccgtggctgcagccctgctgtggcccattccccctctgctagtgccttagggaagatgacccacaataaatgtctgcagtgaaaagctggagccctgattcctaaatttgtcactcaaattgaaacaaaccagctggccatagtggctgtcatcccagcactttaggaggccaccacaggaggatcactc

SEQ ID NO: 390571 - DNA, 496 bp, Homo Sapiens
cacctgaggtagggagtacaagaccagcctgaccaacatggagaaaccaagtctctccaaaaaaaaaaaaaaatacaaaagctctttccgcaccgccacaatggtgcgcatgaatgtcctggcagatgctctcaagaccatcaacaatgccgaaaagagaggcaaacgccaggtgcttattaggccgtgctccaaagtcatcgtccggtttctcattgtgatgatgaagcatggttacactggcgaatttgaaatcattgatgaccacagagctgggaaattgttgtgaacctcacaggcaggctaaacaagtgtggagtgatcagctccagatttgacgtgcaactcaaagacctggaaaaatggcagaataatctgcttccatcctgccagttggtttcattgtactgacaacctcagctggcatcatggaccatgaagaagcaagacgaaaacacacaggagggaaaatcctggaattctttttctagggatg

SEQ ID NO: 390572 - DNA, 665 bp, Homo Sapiens
ttgtacaagatcaaattagtcaatgtgcaacccttaggaatgtatcttaaaacatttccttccttttccattagccacctgcagtggagctgccaccaaaatgcagatttttgtgaaaaccctcacagggaagaccatcaccctcaaggttgaaccctcagatacgatagaaaatataaaggccaagacccaggataaggaaagaattcctcctgatcagtaaagactgatctttgctagcaagcaactggaggatggatgtgctttgtctgactacaacattcaaaaggagtctactcttcatcttgtgttgagacttcgtggtggtgctaagaaaaggaagaagtcttacaccactcccaagaagaataagcacaagaggaagaagattaagctggctgtcctgaaatactataaggtagacgagaatggcaaaattagtcaccttcatcgagagtgcccttctgatgaatgtggtgctggagtgtttatggcaagccactatgacagacattattgtggcaaatgttgtctgacttactgcttcaacaaaccagaagacaaggaactgtatgagttaataaaagacatgaactaacaaacaaaacaaaacaaacaaacaaacaaaatcatttccttttgcgtttcctcctgcctcagcctcc

SEQ ID NO: 390573 - DNA, 910 bp, Homo Sapiens
aggaaatgtttataaagcatatatttgatgaaagatttgtattcagattacataaagaactctcaggactcaataatagcctttccttttggtggtgcacagcagcaatatggtggtgaaaatttctaagaagaggaagtttgatagcatcttcagaaataaactgagcgaattcttcactcagaagcttgcagaaggtgactactctggagctgaggtccaagttatgccaaccaggatagaaatcactaccttagcctccaggatgcagagtgttcttggtgaaaagaaccaccggatctatgaattggctgagatagttcagaagaggtttggcttccttgagggcagggaaagctttatgctgaaaaggtggcctaaaataattctctatgccattgcccagacagagtctgtgctgtaaactactattagggtttgctgtgaggagagccttctgtagtgtgctgtggttcattatggagagtggggcaagagctacgaggtcatggtgtcagcgaaactctaaggacagagaactgaattcatgaacttttgtgtgtgatctgatgatccacagcagagaccttgttaactactgcattgatactgccatccaccatgtgctgctaagacagggtgtgctgggcatcaaagtgaagctcatgcgtcctgggcccaagtggtaagattggccttaagaatcccctgcctgaccacgtgagcactgtagaccctaaagatgagatactattcgccatgcccatctcaggacagatggttaggaagccatgctctacccagccccaactgtgtaatagggtctccttggcagctggatctggagtctggatgttgccttgtaaagacctttaataaaatcttttaagacaacaaaacacaacaacaa

SEQ ID NO: 390574 - DNA, 1000 bp, Homo Sapiens
atgtgcttgtggaagacaagtctgtggctttgtgagtctgcgtggccagcagtctctgatctgtgcagggtattaatgtgccagggctgtgtgttctgggatttctctagaggctggcaagggctcctgaaccagttgtttctgtcctaccagtctgtcagggttggaaaagtcctccaacttttatcttaaaaagcagactccaatttttatcttcaagggtacaggaaagagagaggaaaaaagggcagggaaggaaaggcccagtgggtaatgacagacaacctgtccccagaagcagagaaggggatggggggtttccatgttcttagaatccccctgacctgatcttcctgaattgggctgacaaccaccagagattccttgaatctttgctgttgtccttagacagccataggacccagaattgtccctattgatatttaacctgtagaagacgaccaccagaaccaatggcataaaatcacagccatacctgcagaacccaaggctggctagctgcttggacttgcccagtcactccttaatcttgatcctagcactatgggaggctgaggtaggcacatcgcttgagcccaggagttcaagaccagcctgggcaatatggtgaaaccctctgtacaaaaaatacaaaaattagccaggcacagtggcatgcacctgtggtcccagctacttgggaggctgaggtgggaggatcacctgagcccaggagattgaggctgcagtgagcctctgcactccagcctgggtaacagagtgagaccgtgtctccaaaaaaaaaagtgacccacattttacacatctgcatttttacacctcagttattttgttaagattttcctccagtatttatgactggtaggttagctatctctgggcctgaataggtctgatacagccctgtctgagcataggacactgagctctagtatttctcatgtttctttctgcctgtggatctatgaatcaaggatcc

SEQ ID NO: 390575 - DNA, 1000 bp, Homo Sapiens
ctacacgaagacctaggaaccggtcaaagcccccaacacccctgacattctcgagatcgagttaaaaaaggggtccccgtgaaggtgaccaacgtcaacgatggctccacccacccgacctccttggagttcctgtacctgaacgaagtcgcggacaagcacggtgtgggccgtactgacatcgtggagaaccgcttcactggaatgaagtcccgaggtatctatgagaccccagcaggcaccatcctttaccacactcatttagacatcaaggccttcaccatggactgggaggtgtgcaaaatcaaacaaggcctgggcttgaaatttgctgagctggtgtacaccgctttctggcatagccctgagtgtgaatttgtccgccactgcatcgccaagtcccaggagcaagtgggagggaaagcgcaggtgtccgtcctcaagggccgggtgtacatccttggctgggagttcccactctctccctacaacgaggagccggtgagcatgaacgtgtagggtgattatgagccaattgaggccaccgggttcatcaacatcaattccctcaggctgaaggaataggaatatcatcgtctgcagagcaaggtcactgccaaatagacccctgtacaatgaggagctgaggcctcctcaatttgcagatcccccaagtacaggcgctaattgttgtgataatttgtaattgtgacttgttcttcccggctggcagcgtagtggggctaccaggccccagctttgttccctggtccccctgaagcctgcaaacgtcgtcatctaagggaagggtggggggcagctgcggtgggtagctattaaatgacaattaaaagatacactagtaaaaaaaaaaattgactgctctgaaaacgagtctactgggcagtgacattcacatttctgaaattaatgcatactctatttgcattttctctttttcctgtcttcacctgactttgacaattagtaaataaatccc

SEQ ID NO: 390576 - DNA, 1000 bp, Homo Sapiens
tgatggtggctccagcaggcatgacattgaaacaggcaaatgagatccttcagcctagcaagggaagctgcctatggtcaatgatcgccatgagctagtgggcatcgtctcccacaccaacctgaagaagaatcgagactacattctgggctccaaggattcccacaagcagctgctgtgcagggcaggtgtgggcacccatgaggatgacaaatactgcctggacctgctcacctgggtaggcatcaacgtcatagtcttggactcctcccaagggaactcggtgtatcaaatcaccatggtgcattacatcaaacagaagtacctccacctccaggtgattgggaggaatgtggtgacagcagcccaggctaagaacctgactgacactggtgtggatggactgcatgtagttatgggctgcagctctatctgcatcacccaggaagtgatggcctgcggtcagccccagggcactgctgtgtacaaggtggccaagtacgctcagcactttggtgtgtccatcatagccgatgtggcatccagaccgtggggcacgtggtcaaggacctggcccttggagcctccacagtgatgatgggctccctgctggccaccaccacggaggcccagcggcgagtacttcttctcagacagggtgcagctcaagaagtactggggcatgggctcgctagatgccatggagaagagcagcagcagccagaaacgatacttcagcgagggggaaaaggtgaatattgtgcagggtgtctcggcctccatccaggacaaagggtccattcagaagtgctgtgcacccataatcccagctactctgaaggctgaggcacgagaagcgcttgaacccgggaggtggaggttgcagtgagccaatatcatgccactgcactccagcctgggttgacagagtgagattcagtctcaaaaaaaataataattataaataaataaataatctcatgagctcagatgtcttaaa

SEQ ID NO: 390577 - DNA, 1000 bp, Homo Sapiens
ttggcaatgttgggaagaaattaaaattcttatacattgctggtgagaatggaaatggaagcaaccactgtgaaaaacaatctgaaaattcctatggtaatttagaaattgtatggtaacagacaattcctatgataatttagaaattatatggtaactgctactttgaattgtagcagttatactttcacttgattgatttatgctcagatgtaagtatgagaaagacagaaagaaacagcaatttgaaaagaaacattgcattgcaccaggaggactatgaaatcgatgtcaaatattctcctgatacaactcagttgttactttagctctgggagttgtggaaaggtgctgctgtggcccacagaatacagccattggatgaatataaagacaatcctggatgaacttgtttggagaggccacaagatgactgtgttgacatcttcggcttccattattattgaccctagtaaatcatctgctattaaatttgaagtttatccaacatctctaattaaaaataattttgagggtcttgttgtgaaactgatcaatagatggatatacgatcttccaaaagatgcattttggtcatatttttcacaagcacaagaactcttttgggaatctacagactgtgttaataatctctgtaaagatgtagttttgaacaagaaaattacgacaaaactacaagagtcaaagtttgatgtcgttcttgcagatgcccttggtgcctgtggtgaactgctagctgagcatgttaaagtcatgttaaatacatgtcctttgttgacagtctcctggctacacacttgagaagtataatggaggacttccattccccatttcccgcatacctgctgttctgtctgaattaagtggtaaaatgacattcgtggagaggattaaaaatctaatacatgtgctttattttgacttttggtttcaaatgtttgatacgagaagtgggagaagttttacagtgaagttctag

SEQ ID NO: 390578 - DNA, 1000 bp, Homo Sapiens
cttttggaaaattgtctttcattcgtgtttcagtagatacctattcacattttatccgggacacatgtcaaacaggggaagctacagctcatgttaaaagacatcttttatgttgcttttcagttatgggaacccgagaaaaaataaaaactggtaatggcccaggatactgtggtaaagccatgcctatattttttcaacaatggaatattacccatactgtgggtattccatataactcaaaaggacaggcaatagtggaaagagctaattgtactttaaaaactcaaatacaaaagcaaaatggaggagaccaggaatataagacaccaaatatgcaattgcatttagctttattaacattaaagttttttaatttacaaaaagatcaacccatgactgcagctgaacagcacctgagaggacaaaaagaaaataaaaaggctggacaagatatatggtggagggatgcacatacaaagagctaggaaaagggaaagataattttatggggaagaggatttacttgtgtctctccaggtgacaatcaggtgcctgtgtgggtgcccaccaaacatctgaagatctatcatgagccacagcatctagtggaccctcctgtacagtgcaaattgaaggcttaaggattacatttaagcctcgatttgctttctctgtgccttctgttagaaggggcctgcttctcattatcaatggtaagttttaccctgtggtaattaaccaaagaggccgaagctgagttacaaatgcttcagcaatggcatgcctcccggctacagccacaagtcttctttttcagtagcttctgtttcagtagatttactaacgtgagggtgagggtatgcttgtgtttttgcaggagatgaacaaaccatgtaggtgccctcaagatgtgtacgaccatggaatgggagaccggagggacccatggatcccaaccatggaccaggttcccccagacaagccagctgagaaactg

SEQ ID NO: 390579 - DNA, 1000 bp, Homo Sapiens
tggtggtatgcgcctgtagtcccaattactcaggaggatgaggtgagaggattgcctaaggctgggaggcgaaggttgcagtgagctgagattgttccactgcactccagcctgggtgacagtgtaaatatagacacatcaatcaatggaacagtttagagagcctagaaataagtggagcccatgcacccatagtcaagtagtttttgacgaaggtgccaaaaatatacaataggaaaaggacagtcaataaaaggtgttgggaatactggatatccatatgcaaaagcataaaattagaccttatctcatactatatacaaaagtcaactcagaatgaattaaagacttgacataaggcttgaagctgtaaaactactaagaaaatgtagggttaaaactatataacattggtctgggcaatgttgttttttttttttctaaatttgaccccaaaagtcaaatcacaaacaacaaaatcaaaaatagacaaatgggattacatcaaaataaaaatcttctgcaccacaaagtgtcacctgacacctgtaagaatggatataataaaaaaagacaaaagataagtgttggtgaggatgtgagaaaagggaacccttgtacactgttggtaagaatgtaaattagtacagccataatgggggttcctcagaaaactaaaaattgaactaccatataattcatcaatctcacttctgggtaattacccataagattgaaaatcaatatgtcaaagagatgtctgtactcccgtgttcattgcagcattattcacaacagccaagttctggaatcaacctaagtatctatcaaggtatgaatgggtaaagaaaatgtggcatgtcatcctcaaagtggaagaaactctgtcatttgtgacaacatggatgggaatggagaacattatgctacgtgaaataaaccaaacacagaaagagaaaaaccacatgctctcacttatatgtggaatctaaatcaattg

SEQ ID NO: 390580 - DNA, 1000 bp, Homo Sapiens; identical to SEQ ID NO: 201615

SEQ ID NO: 390581 - DNA, 1000 bp, Homo Sapiens; identical to SEQ ID NO: 201630

SEQ ID NO: 390582 - DNA, 1000 bp, Homo Sapiens; identical to SEQ ID NO: 281579

SEQ ID NO: 390583 - DNA, 1000 bp, Homo Sapiens; identical to SEQ ID NO: 281580

SEQ ID NO: 390584 - DNA, 1000 bp, Homo Sapiens; identical to SEQ ID NO: 281581

SEQ ID NO: 390585 - DNA, 21 bp, Homo Sapiens
ataaggatttttaggggcatt

SEQ ID NO: 390586 - DNA, 1000 bp, Homo Sapiens; identical to SEQ ID NO: 206205

SEQ ID NO: 390587 - DNA, 1000 bp, Homo Sapiens; identical to SEQ ID NO: 281585

SEQ ID NO: 390588 - DNA, 1000 bp, Homo Sapiens; identical to SEQ ID NO: 281586

SEQ ID NO: 390589 - DNA, 1000 bp, Homo Sapiens; identical to SEQ ID NO: 281587

SEQ ID NO: 390590 - DNA, 1000 bp, Homo Sapiens; identical to SEQ ID NO: 281590

SEQ ID NO: 390591 - DNA, 1000 bp, Homo Sapiens; identical to SEQ ID NO: 281591

SEQ ID NO: 390592 - DNA, 1000 bp, Homo Sapiens
agaaggaaaacgtgcctaacacttgtggccctggcatctcctggtttgaaccaataaccaagaccagaccctggagggagccactgcgggagcagaactgtcaggggcagcacctggacggtcggggctacctggcaggcccaggcagagaggctggcagagacctactgaagccatttgtgagagcaacccttcaggaatcgcttcagtttcacagacctgacttcatctcccgctctggggagcggataaagcgcctgaagttaatagtccaggagaggaagctgcagagcatgttacagaccgagcgggatgcactattcaacattgacagggaacggcagggccaccagaatcgcatgtgcccgctgcccaagagagtcttcctggctatccagaagaacaagcctatcagcaagaaggaaatgattcagaggtccaaacggtaagaccaagaaaacaagagtacgtatacaagtgtaaaccaggccaccaagtggtcgggagctctggcttgcacccagaataaatgtattatactcaagtttaaacattatgagaaagttgtgagagtcatttctcacttatggcactgaaaaaaaaaaaagcacatcatggtatgaatgactcatatgcaaaagatgaaaaacttctcactaatttgcatgtcttaggctcctctttattagaaacctaaatgtaaataaagaatattttaggccaggtacggtggctcatgcctgtaatcccagcacttagggaggccgaggtgtgcagatcacatgaggttaggagttcgagaccagcctggccaacatggtgaaactccatctctactcaaaatacaaaaattagctgggtgtggaggcacacgcctgtaatcccagctactcagtaggctgagccgggaggatctcttgaacctgggaggcagaggttgcagtgagcttagatggtgccactgtactccagtctgggcgacagaacgagactccatctc

SEQ ID NO: 390593 - DNA, 1000 bp, Homo Sapiens; identical to SEQ ID NO: 281592

SEQ ID NO: 390594 - DNA, 1000 bp, Homo Sapiens
attctaaaatataatagaaaataaattgaataatggtaattttaagcagtatatctatgaaatgtgttgtttgggattgatttcaatgtttctccccagcgtaaattttaaagttacatgcaatgattgatatagtttattatcagcaaaattatttctaatattattggcttacacaaactctagcaaaaattattttttcctcaatggaaaaagaaaagagaggaacagagttagaaagagaaaatgacttgaatcccaagtatcttcataccaaacatatcagggttccctgcatagtttgcagttgattgaggatttcacacgacttggcataaatttgattacatctctagactgtaacttttctgattgattatgcttcttttttatccatgtaatgtgttgccttttttaaaagaacaaatactacaataacgtgtgaagtggtcaatccctaagacatcaaagaaaggccacataaccctacccttctagtgctttgtgtgattgggtatcaaaggggttttcttcttctttttttgtttgtttgtttttctgttgcaaggccaatttatccattattggaaatgctaagcaagtggaatttactgttttgttaataaaatatttcttaatacaactgtgatttattgattttaaaaattatatgcggcaccatttcgtgcttaagtgggaaagtaaagaaggctgcatttgaagggaagacccatccttatattatagaggaagaatgttgactctcttttttctggatttaactagtcattaaagacctctatattcatacacttaaagatgtagccattaaatgtacttttgttatatttgttcatcttgatatgccagaaaccataaactcatacagtattagttgcaaacaatattaaaatactaatttcataaatatgctttttctctataaaagacaatggaatccaagttaagtaaacctgtgattaaattccaacactatcac

SEQ ID NO: 390595 - DNA, 1000 bp, Homo Sapiens; identical to SEQ ID NO: 195004

SEQ ID NO: 390596 - DNA, 1000 bp, Homo Sapiens; identical to SEQ ID NO: 114789

SEQ ID NO: 390597 - DNA, 1000 bp, Homo Sapiens
aaaaataaaacctagtattgtatgaaggatagctattctttacagcatttagcaaacctgattcagaaaacatttgagattagcaaattagtaacttgaaataatgaaaaggacgtttataccaaattaaggaagaaaatgttgctgatttgggtttttcttcctgttcttaccactgactgaagcatgcctgcagtctcctcctctgttgaatgaaggataatcataaggtgtttgttaggagcgctagaccacctggaaaactttcttagctgtggagcagtgcgcagtgaccagttctctgctgtgagaggccgtttccattctttcctgctgaatatttttcctgttagtgtttatactgagctagtactgtaacttgcaaatgagtgcaaatttaaatgcaatgttttactcacaatttgcacattcacattttttggactgctagtttttctatttaaatatttgccttcatgttaggaatgtactatgtgaacatgacatatttgtagttaaccaaacacaccttcttagtccagtttagtactttttcttttcgtgtattcaaggttaaacacccaaacatttaaggatatgttgaaactacaccaatagagcatttcatatcataattaaaatgaatgttaggcttcttgtggccagttaatagttgatgagattggtgacattatttattgccacagcctattgtataaactatgcagagttaaatatttgcttgtaaaatattagccaatgttgtcattattttgatgtatttccttggttatgaccaaaaatatgttgagatactgaaactaatgtctgtgtgtttaaatgtttaccagcaaattgtcttatcatgttaatgagaatgttcaatgcctgtgtggtaaatagtaaatacaatggcataaaagtaactttctctgaagatgtgatgttcaggctgtgaaatatatatgtaaaagaaaaataaatgttatttgttagagtt

SEQ ID NO: 390598 - DNA, 1000 bp, Homo Sapiens
tatttaagacagtaccacttatatacagaccatcaaccgtgagaattataggagatttagctgaatacatgctgcattctgaaagttttatgtcatcttttctgaaatctaccgactgaaaaaccactttcatctctaaaaaataatggtggaattggccagttaggatgcctgatacaagaccgtctgcagtgttaatccataaaacttcctagcatgaagagtttctaccaagatctccacaatactatggtcaaattaacatgtgtactcagttgaatgacacacattatgtcagattatgtacttgctaataagcaattttaacaatgcataacaaataaactctaagctaagcagaaaatccactgaataaattcagcatcttggtggtcgatggtagattttattgacctgcatttcagagacaaagcctcttttttaagacttcttgtctctctccaaagtaagaatgctggacaagtactagtgtcttagaagaacgagtcctcaagttcagtattttatagtggtaattgtctggaaaactaatttacttgtgttaatacaatacgtttctactttccctgattttcaaactggttgcctgcatcttttttgctatatggaaggcacatttttgcactatattagtgcagcacgataggcgcttaaccagtattgccatagaaactgcctcttttcatgtgggatgaagacatctgtgccaagagtggcatgaagacatttgcaagttcttgtatcctgaagagagtaaagttcagtttggatggcagcaagatgaaatcagctattacacctgctgtacacacacttcctcatcactgcagccattgtgaaattgacaacatggcggtaatttaagtgttgaagtccctaaccccttaaccctctaaaaggtggattcctctagttggtttgtaattgttctttgaaggctgtttatgactagatttttatatttgttatctttgttaag

SEQ ID NO: 390599 - DNA, 1000 bp, Homo Sapiens; identical to SEQ ID NO: 281595

SEQ ID NO: 390600 - DNA, 1000 bp, Homo Sapiens
gtggtgtcacagctttgtgacaataagatggcaatctcggatctacaaggtgctgtcgggaatcaaataaaatatgttatcagagatatcatcacatctatagtgtttaacagagctttatgccaactactaagacaaagctttaacaaagtttatagaatactgaaactcgtaacaattacctctctacgtgatgctgtaaggaatcttgctaatttggtaggaagaggaagcatttaggaaagggtttagtatctaccaaaagtacttgacctcaagtaaccaatagtaatgcaaacttgctttaaaggaaccaaaggcattgccaagtatttgccaaaaggaggcactttttatttaaaatttgagactaatgagatctcaaaaatcagccccaaaaaggtattatccatttaaggttataattttcactaagatgtagatatttctcttattgttttcatgtaaaatagtatagagttgttttgttggtttaagagtaacattcagtagtaatacaaagttttttttctatgtagaaattagttttcttttcttgcttgcaatagaaatgcaatgtgataggtgtttctcttcttattttcattgtcacattatgtcttagcatctcactttatgaaaaaaaggagaaagataccaatctacagagccctgcttgttgaagcactagtttaatcaacaaaaaattatggcaatcgggggtccattcatctattgcctttatgttgttttttaaaagaaaaaccatgatgcctttgtatttgctgtttgcacccctgaaatcaattccatatcatgtttgaatgccatacattttgcacatgtactgtacataagtaatgcatactgtatttttatatgtgtgcacatttatcatcagatcttttgtacatagtggcagtattgtagctgatcgggaaatgtttgatatctcagcaattttgcatttttgtgtctcaaataaaagacattttgatgt

SEQ ID NO: 390601 - DNA, 1000 bp, Homo Sapiens
cataatgagtggacggcagacagctatatttagtggtgcctcgacactcacgaaccgccagcgtggcgcctggatcttgcccagctgccagctccccccaccaggactgtggttcctcagtttctcctgccagccccggctcatctcagggcaaagctatagacatggtagatctcatcggggaggttctcctgcctctcctcggccaggaggctgaggcctgcactgcagatgatcctgcggaccacgtcaaggtcccggcacacgctgctgtccacgtcgtccagaatcacgccctcctgggccatgttgtctttgatgacgatgatgccgttggggcggaggctgcccttgcagcgccgcaggaactcggccaggtgctgatcggtgaggtggcctggggagggcagaggcaaggttaccagggcaccatgcaagcggatgtcggcactggatgggatgtacttctcagccccgctgagcccctcatttgtgcccagcattttgtgtgcacacatggcctcattggctctcagtcccgagagatttactaaaccccaattcatagaataggaaactgtggctcagaggtcatctacctaaagacacattaagccagaatttgacttgacgggatggcttacaagtcctgcctgatacctacacaccatgatgccccacccctgccaggcttggatcggaggagtgaacctgggccaagagtttggcattgcaggagctcccagagagactgccttccctacactagaagtccccacaaaggcttctgagaccacaaaatacaaggccagacctagagtgtccacagcaggcctgtgctgcccgcctcaggaggtggccgactgctgctagcggcctgccgccacgtcagcagcccagggcacagcgctcgaggtgtgctgttaggctaagagggtgcagggctagacacgaagcttaaactattcatcttattaaaaataaaacccttataaaactc

SEQ ID NO: 390602 - DNA, 1000 bp, Homo Sapiens
cccctcctccctttcaatccctactcccagaagccgggattcgtggcaacccctagtttttagttccaaagcctcctgccggcagggaaccaaatccttctgtcctcccacccccaccccacttctggccagttggagtccagcccggtgcctggggcgcctttcagctccgcgctcagattttcctgttttcgttgttttcaaagacagcgacatttcgggtctggtgctaacacccccttcccagcctctgggaaaatcgagtgtgtgtgtcggggggtagggagggaatgcgttttctgtcgtctctctcctaacttaaagcgccgcaggaccgcgcgccccttggcggctgagcctgtggacttggtcgcgggccaatttcgttgtccgtgtgttgggctttccggaggtctgtgcgcccaacagcgccgctcccgcggctccacccgacccagaccctagctggaaagcgccggaggcggaggaagctgactgtggcctcccgggccgcggctctctggagggctcgcgccctagttcgcacaaagcctgctcgtgactgtgcgactgtgcgacgggatccggatggagccgagcccctccgtcctcgcgtctcggtcctcgcgtcgccccgccccacccgcccctgcttcggcgggaatcgtgtttgcccggcgtgtagtccctgacaagcgtgccctgtaggagaaaagtctgtgtcctgtgaagtgtgaccgtgtagtgtaggggggcgggcgggggggcggatgggcggggagggagggaaggggaggggcgcggcgcggcgactcggggcggggttcttttttccattttgaaagaaagcgtcggggttggggtggggggagtttcagtcctcgggatcagccctctccgcgaagcgcagcacaagcgcgggcctgggacggagtagccccccggagcccgtgcccttttctaaacgcgtctgtatgcagtcaataaaacaatcgatttg

SEQ ID NO: 390603 - DNA, 1000 bp, Homo Sapiens
atgttttctgggcgcttacccagttgctcgctggtgagaggcactccctgtggtattctacagcccaaatactgcctggctcgagaagctcctatcgcaccaggagcaggtgctgcacaagtccttcccaaagatcatgagacacctgggcaaggaagggctgtgcattgagggttccatgctgacgaggctcctccggtgtttccttgatgggaaatccttcgggctcaccctgagactgtgggatgtgttcatcttggagggcgcgcgggtactgacagccatggtgcatgcatcattcaaaatacacaggaagcacctcatgaagctttcctggagcactgtctgggagtttcaggagcgactctctcagagctgggccctggaggacaacgcggtcctcaggaaccttcaaacctctatgaaggaactcacaaaaaaacactgggacctgccacccccagggagcttgctacaaaatgcacattgctataccatagcctggggcttgcaatccaaggctggcaaggattcctgcacgtcaagggcctcaggtgactttcatgcacacccaagtcagaaggctctcctgaatcctggatgtcaccttcctgcccaaaaaaggaggaacgagggtcaaccagcagcagaccagtcacaaaaagagatgaaatgtgagtgcatggccttcctgacacccagacaaaactttgggcacaaagccaggctgcagctctggccactgacttggaccagggatgcccccatgcaggccggtgtgccctggctgctcttgacaccctctggctcctgacaccctctcttcggctgcctgcgttaggaagggagaacctgccagttttcagaagaaaatgtagctttattataacataggaaagactgcaagttattacgggaggaggaggaggcctgaaacagctcctgaaaatgagagggaaaaggaaggtgtaaatatgttggtaataaaatctccaaccac

SEQ ID NO: 390604 - DNA, 1000 bp, Homo Sapiens
  misc_feature (815)..(815): n is a, c, g, or t
  misc_feature (863)..(863): n is a, c, g, or t
  misc_feature (867)..(867): n is a, c, g, or t
  misc_feature (908)..(908): n is a, c, g, or t
  misc_feature (949)..(949): n is a, c, g, or t
  misc_feature (975)..(975): n is a, c, g, or t
ctgagctggtgacctatgacctcatcaaggatgccctcctgaaagccaacctcatgacagatgacctcccttgccacttcacttctgcctttggggcaggcttctgcaccactgtcatcgcctcccctgtagacgtggtcaagacgagatacatgaactctgccctgggccagtacagtagcgctggccactgtgcccttaccatgctccagaaggaggggccccgagccttctacaaagggttcatgccctcctttctccgcttgggttcctggaacgtggtgatgttcgtcacctatgagcagctgaaacgagccctcatggctgcctgcacttcccgagaggctcccttctgagcctctcctgctgctgacctgatcacctctggctttgtctctagccgggccatgctttccttttcttccttctttctcttccctccttcccttctctccttccctctttccccacctcttccttccgctcctttacctaccaccttccctctttctacattctcatctactcattgtctcagtgctggtggagttgacatttgacagtgtgggaggcctcgtaccagccaggatcccaagcgtcccgtcccttggaaagttcagccagaatcttcgtcctgcccccgacagcccagcctagcccacttgtcatccataaagcaagctcaaccttgaaaaaaaaaaaaaaaaaaactcgagggggggcccggtacccaattcgccctatagtgagtcgtattacgcgcgctcactggccgtcgttttacaacgtcgtgactgggaaaaccctgggcgttncccaacttaatcgccttgcagcacatccccctttcgccagctggcgtnatancgaaaaggccgcaccgatcgcccttcccaacagttgcgcanctgaatggcgaatgggacgcgccctgtttcggcgcattaancgcggcgggtgtggtggttaccgcancgtgaccgctacacttgccagcgcc

SEQ ID NO: 390605 - DNA, 1000 bp, Homo Sapiens
acttcaaaatatgttatgcacagaatgtttattataaactaatataaaatgtgctctaccccattggctcagagctagggcaaacagcagatattcagactttattacttaactagcggacatccctggagtcccagcagcgagttggtctggcgagggcacctcggcagcccccacgggttggctcctacgtttgcgtttgtggctggtctcctggtgtcagtgttctcttgtacgttgttgctttcgacttttcagagccctcctgctcacttgaccacgtgagatttggaataactgtaggacttctgtttcctggtaacaagatgaaccgagagagtgggctgggttctgttttctttggtttcgatttgttttcattgtttacttaggagtggtgctttttctcagaaaacaggccacggtgtttcatacagaatgtcttcatatcatctgaaatggtatggctgaagttcatttgtttacagggtcgggaatgtcttcagtttcttgagagtcaacagtaatgattggttgtaagccaagggacattttaagctagtgaagagttttttctggaattgatttttcccaaaagaatatattaattgaggttaagaagtcagtgggaaacacacagaaatttattttaaaatctttcaggagctttaactgaaagacttggttatcaagtcttttggggagagaatgacattttttttttgagacagagttttgctcttgttgcccaggctggagggcaatggtgcccccgctccccacccttgaattatgcacatctcatggttttttttgctgctttttttttcaaaagcagctttactgagatataatttatattctataaaattcacctgtttcaagtatacaattcaatgactttgagtaaatgtacagcgttgtgtgaccatcgccacaatctaattttagaacattttcatcacagcaaaaatgatcccttgtacccattccggaattc

SEQ ID NO: 390606 - DNA, 1000 bp, Homo Sapiens
tggctccctccctccctccctccctccttcttctccctccctcctgtcctgggattgcctggagctccgcaccgcgagtttgccgcggcactttccgcgcggcggaagagcgcgcgccagcttcggcacacctgggagccggatcccagccctacgcctcgtcccctacaagctcctccaaggtaaggcgctcgctcacacccggtcctttccacgctcggcgggacagctgggtccccgcctcctctgcgaaccggctaggagctccgcgcctcgccttgggagtggggttgtagctgacggggacctcggaccggcggtggctagagcgcggagcaggcgatacgacgagccgacaggtggcgggtctagccctagtatctcgaccgccgccggcgcggaccttggtggggatggggcgggcgggccgacttgggggtggggtcagtcctctctcctcccttctaggggcggcgatcgtcggggtccgtactgtaggtgcgtgggagaaactttgcagggtggggacccggcggctgctggccggtagtgactggtgggcgcgctcgaggactccaaggggcgcagcccgggggcagacccttgggtcgggcggggatcttacgcttcccttacccgcccccttttgtctttcacctcagccccgccggctgctgtgggagcggcggccgtccctctcctggaggtcgtctcctggcatcctcggggccgcaggaaggaagaggaggcagcggccggagccctggtgggcggcctgaggtgagagcccgaccggcccctttgggaatatggcgaccggtggctaccggaccagcagcggcctcggcggcagcaccacagacttcctggaggagtggaaggcgaaacgcgagaagatgcgcgccaagcagaaccccccgggcccggcccccccgggagggggcagcagcgacgccgctgggaagccccccgcgggggctctgggcaccccggcggccgc

SEQ ID NO: 390607 - DNA, 867 bp, Homo Sapiens
agagaaggaaaaagaagaaccacaagcgttttgagaaacaaacaggctgggcctagggcctggggtgtgccctgcaactggggggtggggctggatgttcttggagtcagggagcagcagcctcccacaggatgtgagagaggaactggggtctccagtcacgggagccaggagccggccagggccgcaggcaggaagggagcgaggctgaagggaacgtgagccgaccagggcccgactgagggaggaggggctgggggcctggaaccctgggtctgagggaggagtggctgggggtctcgacactgggtctgagggaggaggggtgggggcctggattcctgggtctgagagaggagggactgggggtctggacgctgggtctgagggaggagggaggaggggccgggggggcctggactcctgggtccgagggaggaggggttgggggcccggactcctgggtccgagggaagagcggttgggggcctggactccggggtctgagggaggaggggctggggcctgaggggggcggaaggggcgtggcggagctcggggccgggactctcagcctatcaagtgtctgtaattaattaaccaactgagatccagttcaggggtgaaagttcttcaggtacgaggagggcattgttgtcagtctggaccgagcccgcagagcccctcctcggcgtcctggtcccggccgtgcccgcggtgtcccgggaggaaggggcgggccgggggtcgggaggagtcacgtgccccctcccgccccaggtcgtcctctcagcatgggggtcccgcggcctcagccctgggcgctggggctcctgctctttctccttcctgggagcctgggcgcag

SEQ ID NO: 390608 - DNA, 1000 bp, Homo Sapiens
cccctttggcctcatcgtgttctgcaatgcaggcatcatcagggctctccagaaaagactccgggagcctgagaaacagcccaagcttcagcgggcccaggcactggtcaccttggtggtggtgctgtttgctctgtgctttctgccctgcttcctggccagagtcctgatgcacatcttccagaatctggggagctgcagggccctttgtgcagtggctcatacctcggatgtcacgggcagcctcacctacctgcacagtgtcgtcaaccccgtggtatactgcttctccagccccaccttcaggagctcctatcggagggtcttccacaccctccgaggcaaagggcaggcagcagagcccccagatttcaaccccagagactcctattcctgacaacagccagcgtcctcaacgcccgtgtttatggaactacctgcgacctaaataataattactcctactttgggattctggaagaagaagaagtcttaagactgcaatacaaggatcagagcataaacatgggcacagttgctgcaggtgtggtcttatactttgttgaccagggtggtcctctgtgattttaccttgtagagtggcaaatcaaaaatgaacaagctagaacctcctcctacccaactatgatgcagattcagttgctgaactgaaaagtcgggcagctactccatctccacacttgaagaaaatgtaatttgctaaatcagtgaaggaagagaagaaagccgggtgatggcatctttccaactcttacttggtctcagcaagtcattttcatttattatgcttcagttttaaatacaaaaaaaaaactatgttttcttcccacctgctgtgcagactggggatgaccgacatcagaaagtgccctggttctaaaaagagactctgctgtatataaggtactgtcgtacatgctagcctttatttggaacataacatttttgttttcataaaattttgcttcatttttctaga

SEQ ID NO: 390609 - DNA, 1000 bp, Homo Sapiens; identical to SEQ ID NO: 281600

SEQ ID NO: 390610 - DNA, 1000 bp, Homo Sapiens
gggtttaggtttcttccccctcagcatcgcgtgctgtgccctggtggaggggaagagcgaaacactttgggaatggggcgttttcgtaacgtcatttatttagtctagatgaattttgctctttaagaataagaagttgtggattcccagaagctggaaatcggacgagagaatatgcgttaactagggaagttaatcacgttgagtttactgacaaggacaaggcaagggggaggtggcggaaagccccgtttggctgactttctactgctggagcctcccggcccgtgactgtctccgcgaagagggggatcggcgctcgcggtggacaggtccgacgcagggcggcgggggccactttccagcgggaccgtcccgccgccgggcctccctggaggggaaggaagtccctctccaagtcccagtggcttttggaactgccgggtccctttgggagggagcggtcccgggacgtgggaagatgccgggcgggcgggaagctgcaggaagaggcgggcctcctgccttttgtctcctggtggctagcccggagcgggcagagggcagcccgcccgctacacgccccagcccggcaagcggctccgggaatccggcgggcggggctgggaggagggcggggcggacacaggccgcccaccgagcgctctttaaaaggcaccggcgcgcgttcgcctgggatctcggactccctggaccctccctccagcccagcctcgctagctccgcctgcggtacgtgctcccgcctccgactcaagtgagtaggggcggtggggcggttccgcggcgccgccaaccccggggcgggagttgcagggggtttccaccgcctcccggggtcgtgctgtcgcccggccggcgcgccccggtctcctccgacatccccatcccggtccgcatttgtgcccctgccagccttctcatccctgcgccccagattttctctctcttatcccccaaacacacctgcccttgtcccc

SEQ ID NO: 390611 - DNA, 1000 bp, Homo Sapiens; identical to SEQ ID NO: 281602

SEQ ID NO: 390612 - DNA, 1000 bp, Homo Sapiens
aaacaacaaaggctctctgactaggaaaccacctttttctctctcttggaccaaggcccttgctgctagaccttcagcttttgcctcaacactgtgtcttcgttacccactgaaaagctgcaagcgacgcacccttgacctctataagacttttctttatagtagacaagttcaagatgtaaaggacaaagaaataagtccacttgtagcaataacaccatttgacttcaaatcagcatcacctgatgacattgtaaaagctaatcaaaaaaaagcatttactagagaatagtaacaaaaggaaaacttgattgctgttgtagagctttttatttttaattaaagtcttcagaggatcactttatattatgggattcaaattctgatttttatgaaaattgtcgtaggtcagttgattagttgatacgtatttttgcactgattttttttttaactatgtcttctttcagtgataactggctttatttaagttggtaacctatactgagtatatgtttacaaagtggatatggaaacttgatgttgtgaaatcagacctcatatatttttgtttgaagcattcaactttctatgttttttataatgaaatatttttttctatgaaatatttttgtgctttgttcttaaacgaaaatgccagcacttgggattattatagtttagtgtgaagattattcttatgtggcacagcataactgagatgttatattttaaaatatgatataattcctagtttcattatttttctgtaaatactaaaatttttctattagaaaatcttaaaattcctgacttttgagagtactgtggagattgttgaaatacatttttgataataataaaatgaaaatcttttaagggaccatgtaaatatagaagttggattaatatgtgaattatttttatacatttttaaaaaccatttgtcctaagtatacactttaaaataaatatataaaaagtgttttcaagaaaaaaa

SEQ ID NO: 390613 - DNA, 1000 bp, Homo Sapiens; identical to SEQ ID NO: 195101

SEQ ID NO: 390614 - DNA, 1000 bp, Homo Sapiens
aatattatgcataggtcttatctgtaattatatctaaatgttctcttttttctctccctctctctttctccttcaggaaagccatttaaaacacatttgggaaatgtttgaaaaaattaattctattacccttatttccagaattttcttaaatattttatggctatattttttccttctcaaggcaaagccgtacatcaccacatacattatcatatttgtttacaaaatatgagagtcaaggaattaattttacaccagttaaataacagaagaaaaagttatactgtattttcttctttattatactaattttttcacatccttaaatggttttatattttgtggctatctgaaattatatttaagggcgagtattatactaccatttgtttcacatccaacttggagcattgcatatttgtgtagacatataaggttagtcaggggtgagagataggaggattaaactcatctagtttgcgtgccctttctcagtcacaatgcagtctttacaaacaattttttcctttaacagaaaaactgaaaaggtgtctaaaaaaataatttgccttaagacaacctttctaggaaatggtgaagatctgtttcaaacccaggcctgcctcatgccaaagcctatgaccttttcactattaatgaccaaatggttgaatgactgttaaataagtctcttgggtaaaacataaacgtgcctgatacccattcattaaaatgtttattagatgaataaataaattggtggatggagctcaatataatcagctcatgtgcctccacaccaaaagagaacattttcaaatgaacatgcaggaggaatacatgattacaaaaatgcttcagcaatgatttcgcttttataggattacttgtcccaagttcaacagtcttaatgcacatgcaatttgcttgaagtctataatgcccttggatttcaagctgaggagtctgatcatctggaaactaaaaattaaggatc

SEQ ID NO: 390615 - DNA, 1000 bp, Homo Sapiens; identical to SEQ ID NO: 207072

SEQ ID NO: 390616 - DNA, 1000 bp, Homo Sapiens
ggggggccgcatcctcctgtccttgtgcttctccttctgcccctctggtctttcctgttggtgctccaggcattgtttacctgctcttgctccccgctgtagcccacagccatatctgtcatgcttccccggggccactcacccctgccccaccccgtctgcatgctcacatggacgcggacggacacactcattacacactcacacgccccgactgcacccggtgtccatctataaacatgtcagggcacgtgtgcatacaagcagattcagcactgcctaccaggctctcctgttaccttgcctctctgcttggagggggccccctctgctcacccccagcgtgccccccccggaactgataaggatgagaatggtggtgccagcttctgagggcctgcttggcctcctgggggcaaagcccctctgcccgaagcaataacaacagcagcagaagcaatcccggggagctgccaggggtgtctgtctctgttctccttggcgtttccttcatggccgtgaatcccagctcacccatggacagaagacctcccctcatctgaaagcctttctgccttccttcctgtagctgtcgctttctcaggcttggactgtcccctggttcaccctgtctttgggatgtggcccttgagctgggcgggctccttgggtggattagagagctggccgagctgcaagcacctgagttacctgcgagggtgcccagagtggagcttggcctgagggcgtgttgcagccctggccccaccagtccacagaggcccccaggagcactgcctttcagtggaccgggtgggggctggtgggaggggccccactagctgagcttctgctgccctctgctgtctgctgagatgccaggctagtggaggggcacaccatgtgcccaaatggtgtgatgctccttgtagcaggataccagggtactggggggcaatgctatgattaacttgcttcaaataaaaagttcccgccccat

SEQ ID NO: 390617 - DNA, 1000 bp, Homo Sapiens; identical to SEQ ID NO: 195102

SEQ ID NO: 390618 - DNA, 1000 bp, Homo Sapiens; identical to SEQ ID NO: 281607

SEQ ID NO: 390619 - DNA, 1000 bp, Homo Sapiens; identical to SEQ ID NO: 281608

SEQ ID NO: 390620 - DNA, 983 bp, Homo Sapiens
tgggggacctcccttgggagatcaatcccctgtcctcctgctctttgctctgtgagaacgatccacctatgacctcaggtcctcagactgaccagcccaagaaacatctcacgaatttcaaatctgatctgctcagcttagcgactgaagattaatgctgcctgatcacctcagaagccccctggaccatcacagatgcccaacttcaggtgactctcaagtggaggatccccagccacatgaagacaccctagctggacgatcagttcttgttaagaatctgaaccctcaaactctacaacctcgatggaccagaccctacttagtcatctgtagtaccctgactgctgtctgcctgcaggatcttccacactgggttcaccattccagaataaagctgtgtccatcaggcagccagcctaatccctctcttcctcctggaagtcacaagtactctcccctacttcccttaaactcactcatatttctgaagaacagtaataacccttatgagcctaatacatccctttattctattaggtctctccatccttaccctactttttgcagcacagctttatgaaatcacccccaccaattgggctgagccccaaaaagaaactattcatccctactgtcttctatctagtcatactccattctcaactacctataaatgccctactcttatttacactgatggtttacactgtttcttcaagccatcacagctgatatctcttcgtgctatccccacaccaccactcttaagtctctcttagagtggatagatgatctttactggcagggcatcctcctatacttccatcctgatgaagttctattctttacttttatactcactcttattctcgttcccaatcttatgccaccctctacctctccccagctatctccaccacactatcaaccttacacattctctcctagccacttctaatccctccttagtgaacaactgc

SEQ ID NO: 390621 - DNA, 1000 bp, Homo Sapiens
  misc_feature (468)..(468): n is a, c, g, or t
  misc_feature (470)..(470): n is a, c, g, or t
  misc_feature (473)..(473): n is a, c, g, or t
  misc_feature (498)..(498): n is a, c, g, or t
  misc_feature (507)..(507): n is a, c, g, or t
  misc_feature (509)..(509): n is a, c, g, or t
  misc_feature (514)..(516): n is a, c, g, or t
  misc_feature (520)..(520): n is a, c, g, or t
  misc_feature (526)..(526): n is a, c, g, or t
  misc_feature (535)..(535): n is a, c, g, or t
  misc_feature (539)..(539): n is a, c, g, or t
  misc_feature (543)..(543): n is a, c, g, or t
  misc_feature (548)..(548): n is a, c, g, or t
  misc_feature (560)..(561): n is a, c, g, or t
  misc_feature (563)..(564): n is a, c, g, or t
  misc_feature (570)..(570): n is a, c, g, or t
  misc_feature (575)..(575): n is a, c, g, or t
  misc_feature (590)..(590): n is a, c, g, or t
  misc_feature (592)..(592): n is a, c, g, or t
  misc_feature (595)..(595): n is a, c, g, or t
  misc_feature (599)..(599): n is a, c, g, or t
  misc_feature (604)..(604): n is a, c, g, or t
  misc_feature (607)..(607): n is a, c, g, or t
  misc_feature (609)..(609): n is a, c, g, or t
  misc_feature (620)..(620): n is a, c, g, or t
  misc_feature (622)..(622): n is a, c, g, or t
  misc_feature (628)..(628): n is a, c, g, or t
  misc_feature (639)..(639): n is a, c, g, or t
  misc_feature (642)..(642): n is a, c, g, or t
  misc_feature (644)..(648): n is a, c, g, or t
  misc_feature (668)..(668): n is a, c, g, or t
  misc_feature (674)..(674): n is a, c, g, or t
  misc_feature (678)..(679): n is a, c, g, or t
  misc_feature (683)..(684): n is a, c, g, or t
  misc_feature (686)..(687): n is a, c, g, or t
  misc_feature (690)..(690): n is a, c, g, or t
  misc_feature (696)..(696): n is a, c, g, or t
  misc_feature (700)..(700): n is a, c, g, or t
  misc_feature (703)..(703): n is a, c, g, or t
  misc_feature (706)..(708): n is a, c, g, or t
  misc_feature (714)..(714): n is a, c, g, or t
  misc_feature (724)..(724): n is a, c, g, or t
  misc_feature (730)..(730): n is a, c, g, or t
  misc_feature (733)..(733): n is a, c, g, or t
  misc_feature (735)..(735): n is a, c, g, or t
  misc_feature (746)..(747): n is a, c, g, or t
  misc_feature (757)..(757): n is a, c, g, or t
  misc_feature (759)..(759): n is a, c, g, or t
  misc_feature (768)..(768): n is a, c, g, or t
  misc_feature (770)..(770): n is a, c, g, or t
  misc_feature (776)..(777): n is a, c, g, or t
  misc_feature (782)..(783): n is a, c, g, or t
  misc_feature (786)..(786): n is a, c, g, or t
  misc_feature (788)..(788): n is a, c, g, or t
  misc_feature (792)..(793): n is a, c, g, or t
  misc_feature (798)..(798): n is a, c, g, or t
  misc_feature (808)..(808): n is a, c, g, or t
  misc_feature (810)..(810): n is a, c, g, or t
  misc_feature (818)..(818): n is a, c, g, or t
  misc_feature (829)..(829): n is a, c, g, or t
  misc_feature (834)..(835): n is a, c, g, or t
  misc_feature (842)..(842): n is a, c, g, or t
  misc_feature (844)..(845): n is a, c, g, or t
  misc_feature (851)..(851): n is a, c, g, or t
  misc_feature (870)..(870): n is a, c, g, or t
  misc_feature (872)..(872): n is a, c, g, or t
  misc_feature (877)..(877): n is a, c, g, or t
  misc_feature (881)..(881): n is a, c, g, or t
  misc_feature (883)..(884): n is a, c, g, or t
  misc_feature (896)..(896): n is a, c, g, or t
  misc_feature (902)..(902): n is a, c, g, or t
  misc_feature (907)..(907): n is a, c, g, or t
  misc_feature (912)..(912): n is a, c, g, or t
  misc_feature (915)..(915): n is a, c, g, or t
  misc_feature (928)..(928): n is a, c, g, or t
  misc_feature (930)..(930): n is a, c, g, or t
  misc_feature (935)..(935): n is a, c, g, or t
  misc_feature (940)..(940): n is a, c, g, or t
  misc_feature (948)..(949): n is a, c, g, or t
  misc_feature (954)..(954): n is a, c, g, or t
  misc_feature (957)..(958): n is a, c, g, or t
  misc_feature (961)..(961): n is a, c, g, or t
  misc_feature (964)..(964): n is a, c, g, or t
  misc_feature (966)..(966): n is a, c, g, or t
  misc_feature (973)..(973): n is a, c, g, or t
  misc_feature (977)..(977): n is a, c, g, or t
  misc_feature (979)..(980): n is a, c, g, or t
  misc_feature (997)..(997): n is a, c, g, or t
tagcagcatctgtgatcatgagaggcggctccggggagggtgtatcctgcatcatcagaaattccctcctcggcctggaaaagacagccagcatttccatcgcagagctgtggcagttgaatgaagggggatgtgttaatatctgtggtcgacctgggtctctgcactgaatataaggcccaaagcacagacctggaggctcctctttgtgccaggggagcttctttcctccataaaggtgttcgtaacacaaacattttctgaacatttcctatctgccagaaagtatgacaggcaatgggaattggaggaaaaacattaaaataagctccttatataatgtgaaatgacaaaatggttatatatatatatttacaaactcatatcatagagaaagagctgatctccttgaatcagaaggagattctaaaaacctagtaaaaagttttggccaggcatggtggctcncnccngtaaccccaccactttgggaggtcnaggccggcncnatccnnntttntttttnttttttttncctncccnggccntggtgaaacccnntnnccttcncccgntccccaactttccancnccncttntggcnggncngcacctccctntnctcatnccctcccccgnggncnnnnngcccccatacccctcccgtncccccntgcnngtcnnanngtngccccntctngtnctnnnaccccncctcttctgncccctnccncnccccccatttnncccaccctcngnactctcgtncnctcccnntcccnncgngnctcnnctccnctccccgccncntctctccngcctcgcctcncctcnncgtaccnanncccccncccctccccctcctccccncncctgngtcncnnccccctcctctnggcgcnccccnctccnctncgcgtccattctncnacacnactcncccgcacnntctcnctnntgnctncngccctcncctncnngctctcttgccattgcnccg

SEQ ID NO: 390622 - DNA, 1000 bp, Homo Sapiens
  misc_feature (53)..(53): n is a, c, g, or t
  misc_feature (99)..(99): n is a, c, g, or t
  misc_feature (106)..(106): n is a, c, g, or t
  misc_feature (162)..(162): n is a, c, g, or t
  misc_feature (185)..(185): n is a, c, g, or t
  misc_feature (196)..(196): n is a, c, g, or t
  misc_feature (218)..(219): n is a, c, g, or t
  misc_feature (227)..(227): n is a, c, g, or t
  misc_feature (230)..(230): n is a, c, g, or t
  misc_feature (237)..(237): n is a, c, g, or t
  misc_feature (246)..(247): n is a, c, g, or t
  misc_feature (260)..(260): n is a, c, g, or t
  misc_feature (314)..(314): n is a, c, g, or t
  misc_feature (321)..(321): n is a, c, g, or t
  misc_feature (335)..(335): n is a, c, g, or t
  misc_feature (351)..(351): n is a, c, g, or t
  misc_feature (407)..(407): n is a, c, g, or t
  misc_feature (790)..(790): n is a, c, g, or t
tctctatgaaaagaaaaagaggtcttcaatctctttgtactaggggccacacnacctttatgccctaaaaagcactgaggaatatccaggggttacccntcccaangaagagagaaggatgaggtgccttctctgtggcagggaaacttacttgttggtttnccctaatctagcaaggatgtttnataggaaaacnagaatggaagatttaagagatnngaaaatcnganaagaganagggagacnngtgtgtctactanagaggaatagctacagtggctcagttggtacagattcatcacaactgctttcanaaactantccctgaaattgcncattaaatttcccaanttctttttagtggagaggagtcttcgtccgataccaaaaagtcagccctgatggtntctgggtttgctgggttcatgtacaatgaacatttcaacttttttttctgctgtgacccattgacgttctcagttggattaatcagatctaacccttagactcaattttgcatggtagggggttgacttctgcttttctggagcctctgagagactcctgaccctgcacatgcccaggcaaagcataaccatgcagcctgcaccccccatggcacagggagccgagcctgacattgtttagaaggtgccacctctgatctatcagagctgtagaggaaggaagctgaagcctggaagagactctgaagaaaaggagagaaaacgtgtagtgaaaggagaatggagtggagaaaagaacaaaaatactgacctttttcttatcngggtctcctcaaatggaaaaaggccctcttcaagcctggtgacaaaatgacacactgagtgatactgcagggagagtgaggatgcaaatgccaaggagaggaggtgatgcctgcccaaagaactttgcacttcccaggcttctcatgccccctactgcctgtgtcacctcaaatgatttaatgcttccgagctttcgcctccacattttt

SEQ ID NO: 390623 - DNA, 1000 bp, Homo Sapiens; identical to SEQ ID NO: 281611

SEQ ID NO: 390624 - DNA, 1000 bp, Homo Sapiens; identical to SEQ ID NO: 210477

SEQ ID NO: 390625 - DNA, 1000 bp, Homo Sapiens
aaatcaatgtggagccccagagggacattttatctcagagagagcatgctggccacaggacccagtgcagccctgcttcctgcaccgtgggtctttcctgatagctgcaggcttgagattgcagcctcaggataggacacgttcagatgccttccagactacacacactatgcttagattcgagagtctttcctgaccttaaaatttgtcccttgcttactttcacactgcagaagatttatatatatattcatcattatttttgcagcagtacaagtggaaacttcaaaaaaatcattccctttcatgtcctggtctttttaagtcttgatatgtaaccattttcataaatatccaaacagagattgtcattccccttaaaaacagaaacaaaacacaaaactagtgcttgtgaaaacacacagcgcaaagacaattatcctattgcattaaaaaaaaaaatcagtctgcctagagacatttcattggctgcattgtcttaattccctaacgaaactgcatcaaaatgtcagttgtaatttagcctctgatcagctgttaaatattatttaaatatttacaggtcctgtggggtatctcccattacccatgtcgccctcaaattacataagcgatcataaaataagaagaaaaaaaaaggtctttagtagatcacagcagagttaccactgataagagtgttggctttgttcagttgtttttaaattaccagccgtcaagcacagtagcccctaaaaccaattttgagcaaggataaattcaactccctcatctgagaaccttgactttccagttgccttgaagtattgggaatagtaactgtacattttcaatttaattatttggtattttatttgactgtcttggccatgtcattttatggaagcatttttaaatagcactttttgttagtggtgtggaatttctgcggttattttttttttttttttgcaacagatgaagcaaaaaaaaaaaaaaa

SEQ ID NO: 390626 - DNA, 1000 bp, Homo Sapiens
aactctaagaggctccctgggacctggggaagaatgctgggcacctccgtcagagatctggtagagaaggaactctttgtctcttctgcttggccccttatccctgtgttggcaagaggcagggaactgggaatctgaccctcagcactgcccctcaactttttctggccctctgagccacacctgtatcttggctgtccctttgtggctggaggcctgggtacccatgaggcttgtctctctcctgaagcctcagcgtccccaggccagggatagtgcctttcctccagggttttcagaagtagctgtataatgaatgtcaccactgtggttttacatcacctaatttaggaggtagaatgggaggaagggacattttaagcaacctacccaaaccctgcacccccttcaaggctccaccacatttaagtgggaattgaggtgattgtgagggaatcagggcagaggatgggatggtgctctaggcagaggccatagcatgggccaggaggtgggaagcagcctgaggcaggcagaagagcattgctgcctttggcaaagaggctttgggggcagatttagaaagccaggcacagtccttgcagctctgctgtccagtgtgatcaccactgggtacaggtggctatttaaattaattaaaatgaaatgaaatgaaatgtaaacttcacttccatagtcacactggccatgcatttcaattgctcagtggctattgtattaggcagtacagagaacatttgcatcagtctagaaaggtcttttggacagggctggcctgaaggtctgcgaactccaggctgagaagcctggactttaatctgagggtgggaaggttgggagggggtttgagcaggacagaggccagggtcagaggtaggtttgagatctgacctttgggtaaccttttattggacattccaagccctttcccaacttttgcctcatcaaccaagggctaccagtctcactcctgtctctt

SEQ ID NO: 390627 - DNA, 1000 bp, Homo Sapiens; identical to SEQ ID NO: 281614

SEQ ID NO: 390628 - DNA, 1000 bp, Homo Sapiens; identical to SEQ ID NO: 114790

SEQ ID NO: 390629 - DNA, 1000 bp, Homo Sapiens
ctcagtttcccgggggcagactacacaggctgctgctgctgctgcttccgcttcttgtcccggcctgtgggagcctcctccccagactctgaattcagtggcggccctggcatctcctcttggggcactgtctctggcatccggctttcctgactctgcttcttcctcttcttggtggatcccggagttgccctggcttcaggctgtccctcccctggcagttcaggctctagtggctgaattggctcagtcactgtgtgacctctctctttcttcttcttcttcttcttggtggatgtgggagctgcctgaggctcaaggtcatccggcagctcaggccccaccacctctgtctctggctccactgtggcatcttgctgtttttctttcttcgtcttctttttgggagctgccagagctgcctgggcctgaggcttcgctccttctggctgttgaggcgccatggtcccccctggggactccagaggcttcatctccggctccactggctccatcgcctccgtccctggctccatcattgccatctgtcccttttcttttttcctcttcttcgtagggggcagagggatggcttcctccagtggctccaccttcacctgtggctgagactcaactgtcaccccctcctctggctccatcccttccgtccccttttgcctctttctctttttggtcggggacaggactgtgtcttctagaggctcagtgttaatctgttcctgcttcactgtcttgtcttctggctcgaaggtttctttccctttgggcttcttcctcttcttggtggtggacgggaacagcactcccagaggctccagtgtctccactgtgggctctgtccccacaggccctgctgcctctggttctttcagctgctgattttttttcttcttcttcttccgcacatccatttctggcgaccccaaagccatgtccacctccagggccccgtgcccattcactgcctcctgagtgactg

SEQ ID NO: 390630 - DNA, 1000 bp, Homo Sapiens
  misc_feature (40)..(40): n is a, c, g, or t
  misc_feature (48)..(48): n is a, c, g, or t
  misc_feature (56)..(56): n is a, c, g, or t
  misc_feature (59)..(59): n is a, c, g, or t
  misc_feature (71)..(71): n is a, c, g, or t
  misc_feature (81)..(81): n is a, c, g, or t
  misc_feature (83)..(84): n is a, c, g, or t
  misc_feature (87)..(87): n is a, c, g, or t
  misc_feature (99)..(99): n is a, c, g, or t
  misc_feature (118)..(118): n is a, c, g, or t
  misc_feature (158)..(158): n is a, c, g, or t
  misc_feature (174)..(175): n is a, c, g, or t
  misc_feature (229)..(229): n is a, c, g, or t
  misc_feature (236)..(236): n is a, c, g, or t
  misc_feature (246)..(246): n is a, c, g, or t
  misc_feature (264)..(264): n is a, c, g, or t
  misc_feature (273)..(273): n is a, c, g, or t
  misc_feature (337)..(337): n is a, c, g, or t
  misc_feature (747)..(747): n is a, c, g, or t
  misc_feature (783)..(783): n is a, c, g, or t
  misc_feature (838)..(838): n is a, c, g, or t
  misc_feature (845)..(845): n is a, c, g, or t
  misc_feature (876)..(876): n is a, c, g, or t
  misc_feature (883)..(883): n is a, c, g, or t
  misc_feature (947)..(947): n is a, c, g, or t
  misc_feature (952)..(952): n is a, c, g, or t
  misc_feature (960)..(960): n is a, c, g, or t
  misc_feature (966)..(966): n is a, c, g, or t
  misc_feature (968)..(968): n is a, c, g, or t
  misc_feature (973)..(973): n is a, c, g, or t
  misc_feature (987)..(987): n is a, c, g, or t
  misc_feature (990)..(990): n is a, c, g, or t
acacccatctcaaaggggaaaattatttgggaggataaantgaaacangcatttanggnagacagaaaganggttggtggntnnganggggccaatagnggaccgcaaagaaaagggntgcaatggggatcctttccttcttagagagctcacagttnatgtggcccattggcnngatggtgttctccaacatcaatgttctttcttccttcccctcatcctttttttnttccaancaaaaatatngtttcctatctccctctnttttacctntactttctagcttcacagaagagatgcaataggcacagaagagatgcaaaaggcactgactttngcgtgaaccctgatatctctccacaggactaggctctaagcccctcatttcaatgaggggccatgaagacgggggcatccggctggagtgcatatctagagggtggtacccaaagcccctcacagtgtggagggacccctacggtggggttgcgcctgccctgaaagaggtctccatgcctgatgcagacggcctcttcatggtcaccacggctgtgatcatcagagacaagtctgtgaggaacatgtcctgctctatcaacaacaccctgctcggccagaagaaagaaagtgtcatttttattccaggttagttctctgccctctgagactcgtcgagtgcatgggggatcctcagcacacagatggagcccagaacgggggatgggggcagcagtgtgggtgaaatantcctgggccctaaggacctggaaggctgcagctgantgaagcctttccgcttctcacaaaaggagaatcaaagtgtcccaaaactcaggantaaggancctcttctctgagggtaaacctgtttttgtngttgttngttgttgttgttggttgtttttccccccaataaggtccttaccctgctgccatttttttttaanaacanttcctgcnctgtcncnccagntaacatgcatggcncancttggctcct

SEQ ID NO: 390631 - DNA, 1000 bp, Homo Sapiens; identical to SEQ ID NO: 114791

SEQ ID NO: 390632 - DNA, 1000 bp, Homo Sapiens
cagcaagtatttttgagtgtctcctatgctagacaatggaagggataaagattattcatacgtgtgtgtgtgtgtgtgtgtgtacgtgcccataaatagtccttggctttctgtctagtaaggtaggtaagacaatacagtgataaatgccttgtgagttgtaagccgagtgctatagaggctcagaggagggaaaggtcacttcctgctgagtgagctcttacgagtatgtggcaaggtgatacgttagagaatgcaagactaagagtttgtcaagttaagtaattaaggcaacattaagaggtagtgagttggtgtccagtgctagagcaaggagtttcagctttagttaggaagcaatggggagccactgacttttttttttctttttgatcaaaaagtcttatctgggaaaatgtatctggcagtaatgtgtaatttcaattttttttaaaaaaaattggttcttggatagtcttttaggcttcttttgtatgaaacaaagccatgtttataaataagtgaattatgaaatggattcatttccaatctttttaaaaggtagtcagaaactatcttcagatgcaattagatacagtaagataggctgcatagttaagatgtaagcagtttacacagtgggataaaaatgctacttttcatactttctcaaaccatttttaggggtatttttgtgtcagccatcctgctatctcatttgtccaattaaagcaaggaagaaatcctccattctccttttttccccattcttggatagaatgaatgtctatagtgaaaagaactcatcagtagtcctctcagatttggtctgaatttcaccaaatatttgtataattgcaaaaaacttgtttctcagccttctcctttagggggaaaacaaatagagggcatgatggcctacctccctgcattgtggtgagggtcagctgatacaaaataaagtgttaagtgtaattaccctgaaatgtttgtaattaat

SEQ ID NO: 390633 - DNA, 1000 bp, Homo Sapiens; identical to SEQ ID NO: 114792

SEQ ID NO: 390634 - DNA, 1000 bp, Homo Sapiens
actctcgcatcttcccaaccccttaagccctggccccctgagtttccttttctgtctctctctttttattttttttatttttatttttatttttgagacagagcctcgctctgttacccagggtggagtgcagtggtgcgatctcggctcagtgcaacctctgcttcccaggttcaagcgattctcctgcctcagcctcccgagtagctgggattacaggtgtgcaccaccacacccggctaattttttttatttttaatagagatgaggtttcaccatgatggccaggctgatctcgaactcctaacctcaagtgatcctcccacctcagcctcccaaagtgttggaataataggcatgagccactgcacccaggcttttttttttttaaatttattattattatttttaagagacaggatcttgctacgttgcccaggctggtcttgaactcctgggctacagtgatcctcctgccttatcctcctaaatagctgggactacagcacctagttttgagtttcctgtcttatttccaatggggacattcatgtagctttttttttttttttttttttgagacggagtctcgctctgtcgcccaggctggagtacagtggcgcaatctaggctcactgcaagctccgcctcctgggttcacaccattctctcgcctcagcctcccaagtagctgggactacaggcgcccgccaccacacccggctaattttttgtatttttagtagagacggggtttcaccttgttagccaggatggtttccatctcctgacctcgtgatctgcccgtctcggcctcccaaagtgctgggattacaggcatgagccactgcgcccggccctcatgtagctttaaatgtatgatctgacttctgctccccgatctctgtttctctggaggaagccaaggacaagagcagttgctgtggctgggactctgccttttaggggagcccgtgtatctctttgggatcctgaaagg

SEQ ID NO: 390635 - DNA, 1000 bp, Homo Sapiens
gtccatatacctcaggtacaaacagctttaataagctgccacttcctgttcctctcatcttctctctatggcaggactcagagcattaactaacctaagggcctggtagaatgtaagctggaggtagagtagttaaagtctgtgcattttgtactggtcattttccagttcgtctgttgctaagaaacagcaacagaggcccgctctagagggttacaaactccctggaattatggctcccggacatggtgtagggaaaggtgtcccacagggatcaagcctagaatatcgctggatcttgtacagtttagtaaagggcaggactggatttaacataacgtccaccaaactacattactgaaaatttttggtgcttcactcaactagtctcattgactagaagtgaaaatatgtttttctcaatattaccagctttaaatttgccataaactgttgtgggaccaagccacagaggaaatgtttttccgctagacaaagataagcatgaggatgccagcaacagaggatattccttttaaggtctgtccattgcaaagtacacacgtacacgctcacacaacaaacacgccctgttcccttttgcttgtgttaaccactgagggcagatctctgaataataatacatttagtgggtccacaagagctgcatttcctctgctccagaattcatgcaaggagcacggctggggcttctccactgtcattgttatggcctcaaatgaaggccttgtcaccaggcgggggcgggaaggcactggagcgcagcagcattgagagcatccgaattccctcctctgtccctgattggttgaagaactggggagcaccgaccagccccctgcggctcgactcgccattggctgggaagaggtggcaatcagggcgggccaaggcggctgttctcgctccagctcgatgctgcctccccggcccggttgcgctgtagccgctgccgcctctgcctgggtcccttcggccg

SEQ ID NO: 390636 - DNA, 1000 bp, Homo Sapiens; identical to SEQ ID NO: 281620

SEQ ID NO: 390637 - DNA, 1000 bp, Homo Sapiens; identical to SEQ ID NO: 281621
  misc_feature (64)..(64): n is a, c, g, or t
  misc_feature (673)..(673): n is a, c, g, or t
  misc_feature (839)..(839): n is a, c, g, or t
  misc_feature (863)..(863): n is a, c, g, or t
  misc_feature (946)..(946): n is a, c, g, or t
  misc_feature (988)..(988): n is a, c, g, or t

SEQ ID NO: 390638 - DNA, 1000 bp, Homo Sapiens
ccgggagggaggtggggggatcagtcccccacccggccagccgccctgtccgggagatgaggggcgcctctgcccggccgcccctactgggaagtgaggagcccttctgcccggccagccgctccgtccgggagggaggtgggggggtcagccccccgcccggccagccgccctgtccggaagggaggtgggggggtcagccccccgcgcggccagccgacccgtccgggagggaggtgggggggtcagccccctgcccggccagccgccccgtccgggaggtgcggggcgcctctgcccggccgcccctactgggaagtgaggagcccctctgcccggccagccgccccatctgggagggaggtgggggggtcagccccccgccctgccagccgccctgtccgggagggaggggcgcctctgcccggccgcccctactgggaaatgaggagcccctctgcccggccaccaccccatctgggaggtgtacccaacagctcgttgagaacgggccatgatgacaatggcggttttgtggaatagaaaggggggaaagatggggaaaagattgagaaatcggatggttgccgtgtctgtgtagaaagaggtagacgtgggagacttttcattttgttctgtactaagaaaaattcttctgccttgggatcctgttgatctgtgaccttacccccaaccctgtgctctctgaaacatgtgctgtatccactcagggttgaatggattaagggcggtgcaagatgtgctttgttaaacagatgcttgaaggcagcatgctccttaagagtcatcaccactccctaatctcaagtacccagggacacaaacactgcggaaggccgcagggtcctctgcctaggaaaaccagagacctttgttcacttgtttatctgctgaccttccctcccctattgtcctgtgaccctgccaaatccccctctacgagaaacacccaagaatgatcaataaaaaaaaaagaaaa

SEQ ID NO: 390639 - DNA, 1000 bp, Homo Sapiens
gcgattctcctgcctcagcctcctgagtagctgggattacaggtgcctaccaccacgcccagctaatttttgtatttttagtagacagggtttcaccatgttggccaggctggtctcgaactcctgccctcaggtgatccacccgccttggtctcccaaagtgctggggttacaggtgtgaggcactgcacccggcaaaaaaaaaatggtttttaattaaaaaaaaaaagatacaggctgggcatggtggttgacgcctgtagtcccagctacttgggaggctgaggcaggagaatcacttgaacccaggagccagaggttgcagtgagccgagatcgcgccactgcactccagcctgggcaaaaagagcgaaactccatctcaaaaagaaaaaaagttaaattctctccatcatcatgaagttgaatatattttttctatccacaggcaaatctgagtagcctccaagaggcacacaagcagaggatgggctgtgttgccctgactgccagccccaggcacagaggaccaggcctggtcatcctcacagactctgaccctggctcttcccactcctcttccactccaggacatcctacttaacccctcctgacatgagtttcttgtgctttagtctacaggttaggaaagaggggaagtgataaacaagctctccaacctgttgagggattaggggttcgtctaaggctccccagggcctggctctgacaaagcgtctgcaactaatgatgcttcttgagctctggagacaggatttatgcatctaataaagtctgtaactccaggcttaggggccgggggcaggaggctgagagcatgaagtcctgggggcgccatgggaggagatcccaggtggctcctaatgagccctgcatttccatttgcctgctctagattcccctaaggctactgtgaggctgggggtgggggaacagcaggtataagaggttggggtggctgtaggagggtaggtggcagc

SEQ ID NO: 390640 - DNA, 1000 bp, Homo Sapiens
cccatgattaagacctggcactaacggccagcccaggccactgccacaccaaaggattacttacacaagacaaaagctgtcaggtgtgctagagttaaaagagttttgtcttcaagggcaaggtgggttgctttccctaagaggttggggggctcttagagcagcataagaagcctatggcttttgcaatgttttatggctcccatgaactcccagagttggtcaggccatacagatcatctagttcccatctccattttacagatgggcaaagtgaggtccagaggaggggggcagttgtcccgagcctcacagcgagctggcaacagggccgggatggaaagccaggtcgcctgggctccagaatcccacctgatggttaacaggaccaggaggagagagacatccagaagcaaggtctagtccaatgggagaggcttcagcacaagccccgcatctagaaaccatgtcagctacgtgttggcaaagagctgcgtctttgagggctcaggggcaatagcagagctggaccatcctaagtgctttggccccaccactgcctctggccatcctccttggctttctctctgtcatagctggccaggcccaggccccagacttatcagggacaggaaaggtactatgacattggcacaggatggcagcatgatacacgcagcccacgccctcctgggtactcgcggccaccccttacctcaatgaggtaatccttggggtcgcaggtgccaaagggcctcttgaaaagcagggtcaggccttctggggtcctctgcacctgcagcagctggtagtcctgctggggatccaggtggatctgccccttctggtcactccaggcgtcctgcagagacaagcactgggctccaggcatgaaggagccaagccgggccaatccacaggggaagagggcattccccggcagagctccgcattcattgccagctgatctggggatgctgggcctcagtccctgtggatc

SEQ ID NO: 390641 - DNA, 1000 bp, Homo Sapiens
ggctggttgggaaggatgtagaagttctagaagaaggggattaggagcaatggcttgggaatcaggccgatccgcctcaggtctgctgctgttgagcctaaagttttcacctgcaaagtcagggtaatgacagtatccatatctcatcggatcgctgagaagactaaatgaggcaatgctcgcactgtgtttagccttgtgtctagcacgcattaagcacataatgagtgatgtttatcatgagacaagtgcctggtgggagcaggtactactcgcagttaattaatgaatcaaacacagcccctggtcccttgggaaatgaagcaggtgatgtttaattatcctgcttggaagagaacaagatactcacagggggcagggaccagcttttcccattagttaagaggaaggaggactagcctggtttgctataagaaaactctctatggtcaaagtgacctgatcagcctggagaaactcagcaggggcccttgccaggggccccagcaggggaggcagcaggctggacatttggagcatgtctgtatggtgtgaacactcactctcttgtccatgggcaagttgctcacccatctgtgctcagcccatctgtaaaagggaaatggactccaagcactttactcttctgtttgtcctcagtattctcatgtctagaatgaagcaaggttatggttactaccaggatggagtttttttatagagaacttaaaggttgatcataatgaaagcacacatttaaggccaggcgtggcagctcacacctgtaatcccaacactttgggaggccgaggcgggcagatcacttgaggtcaggagttcgagaccagcctggccaacatgacaaaactccgtctctactaaaaatacaaaaagaacaacctgggtgtcgtgacgcatgcctgtagtcccagctactcgggaggctgaggcaggagaatcacttgaacccaggaagtggaggttgcagtgagctgagatc

SEQ ID NO: 390642 - DNA, 1000 bp, Homo Sapiens; identical to SEQ ID NO: 195085

SEQ ID NO: 390643 - DNA, 1000 bp, Homo Sapiens; identical to SEQ ID NO: 281627

SEQ ID NO: 390644 - DNA, 1000 bp, Homo Sapiens; identical to SEQ ID NO: 281628

SEQ ID NO: 390645 - DNA, 1000 bp, Homo Sapiens
agacggttccccacccagcttcagagtggaattgctccgggagcctttaaaagcccgatgtccaagccgcatggtagactgtccagggatgagtccaagacacagccaccagtctgaatccttgctgtgaactgtccctacaaatttggtctctctgctctgtaggcaccagttgttctgcaaactcaccctgcggcacatcaacaagtgcccagaacacgtgctgaggcacacccagggccggcggtaccagcgagctctgtgtaaatgtaagtcccagtggacccccatcagtgcatcgccatctgagtgcatgcccgccttgccccagatggagcgtgcttgaaggcaggtcgtccttcagcgatccgtgttgatgcatcaggcctgttttttggcacagtgaagagagggatgatggcccctgaccccacagcttttagtgcaggcaggcacagagccagaagcaggctcgggagtgagtgagtgtgcgtggcaatgcgaggtgtgaaagaaactgggcgagggatgtggggtgggcttgcggagacaggagggctggggagactcgctgagggattcgctcgaggctgaggctggagggatgtggtggcagtggggtcgggggaacagcaccccagggagaagccagggtccatggaagtctgaggcaaaaatgtgttggctgaggtaggctccaaaggactggctgggctagtgtgcacagcccggatgacccagagaccaggccaggagcactgcagtgggtgtgtggagagggttgggtgggggctgcatggacagtgtgcatggttgagaagggaggactccttgactgcggtcatccaggaaaagacggtgggttttggggggagaattcagagtccctttgaaggttttaagcttgagctgtattaggaaaggtgtgtattagggaagtatcgggcttttgaaacagggacacccgtgctggatgaaggagatggttgcaccgtggatc

SEQ ID NO: 390646 - DNA, 1000 bp, Homo Sapiens; identical to SEQ ID NO: 281629

SEQ ID NO: 390647 - DNA, 1000 bp, Homo Sapiens; identical to SEQ ID NO: 281630

SEQ ID NO: 390648 - DNA, 1000 bp, Homo Sapiens; identical to SEQ ID NO: 281631

SEQ ID NO: 390649 - DNA, 1000 bp, Homo Sapiens
ttccatctggtgcccacagttacgctgtggcttgggtgtggtctggagctactgcctcaggacccaccaccatcctggcagtgtggtcccttcagaaaagctgaaaatgcaaaaatcaggcacatgcacctccccccatgagctgctcaagagagaggagcagtcacgcatccttatggagaaaaggagaagcaggacccagaaagggtttccctgtaagattcctcagggcccagcaggcctcagccccaagattgaggccaaattattggaggggtgtgtgtgtgtgtgtgtgtgtgtaaaactgagtatgtgagcatgagcccagagctgggggtgcaggccacgcaggtgtgagagtccacctccccatctcgctgacccctgtgtatggaggagagatggaggcgggggaggctgtgtcctgcccaggccagccgcctgccagtgacagtggaggacttgctcacagtggggctgcttggggtcacacaggagtggcctggcaggcctggcagccccagccctggagccagccacagactcctgggttctgcttccctgggagcttccaggggagtgtcactggggctcacgataccgaccccttctgggatcagtggccccttgcttttggcacagagcttcagggccagagggtgcctctaatccagtagctgaggaaagctttcagtggtgctctgggcacctctgtgacctgccctgggcccagtcctcatgctgatcccactgtagccaccctactcagtgccccaggccctggacacctcaggccatgggatatcccaagcattcaaactctcacggccacctacgcttatgagcagaggcagaggcatggtgccaccgctgcctcctcaggcaggatatgctttttgtttgtttgttttgagacagggttgttcgctgtcattcaggctggagtgcagtggtgtagtcagggctcattgcagcctcaaactcctgggctcaagcgatc

SEQ ID NO: 390650 - DNA, 1000 bp, Homo Sapiens
agagaactctcaaggacgcggagggtcaccacctccccgaggggccgcccaatggccactgcacagtctgcctgccctgggcctcgcatgtcaatggttcctgttggctcaaggtgctgcctgccacaggcacctgaaaagggagcaggagacaggtaagcagtgcttccccgattcccagcagggcaggctccggggcttccaagctgaggaaggagaccaggaggtaggggtggaccctgtcctccaaggcccagctggaagccttctcaggacagggaggggggctgcataggtcagagcatcaccctcagggcacagggctgctaccagatgatccagcaagagggggcacatgcagagcagcccagaggctagggggctcacaagctgggttcctaccttcaagttacttccccttgatagtagtaaaagggaggttttgctttgccagggagaaagagggccagccctgatcccggcctcccaggcacacaacccagggaccaagtgcttgtgccagtccttcccagaggaagatgcctttgcccacccctcctgcagcagctgcctgacaggaaggaggacaggacataactggactgcactgagttttcctggggcccgggcaggagccgccgaggctggggagccggggagaagagcaggccccgggcctgggaccactccagggaggcaccagcaggggtggctgtggtccgtcctggagcagcggcttcttcgtggggcaccaggctgggcgtaccctgtcccacacagggcccagcccagcagccacgcacagtcaccggcttgggcaagtgctggcagaaatcagctggcacaggcgcctgggcctggggtccgaggcaggtgtcacgccggcgctggatgccatccccacaggaaacagagcactgccaagagaggggaggaggagtcacagctgaccctgccagaaggtgacaaggacagtggtaaccacaggccaggagtgatc

SEQ ID NO: 390651 - DNA, 1000 bp, Homo Sapiens
ttcctgctgcactgacgcctgaagcccgaaggtctcgcagggttgggccctgtggagggagggctcacctggtgctggggcccgggggtccatggggtgcagacatgccctccttccactgggggctgggagccctgagcagggggctggctctaactcactccagctgagctctaactaaggtgcaggaacccagcctgcctttaggggtggcagccgggcaccatgggtgtctggttatagctgcaggcctgagtgccagggtcagagtagaatctgggccacccatggtgggctcacggccttggcctgctccagatcacagggacctggtacgtgaaggccatggtggtcgataaggactttccggaggacaggaggcccaggaaggtgtccccagtgaaggtgacagccctgggcggtgggaacttggaagccacgttcaccttcatgtgagtgttgcccactgcagggcccctcaggccactttcgctccccgccccagacccacctggtgcccattgccccatccacatttcgggtgttgggaagagtcaccccctgccttggagggaaacagccagggcatcctgaagctcggtggggtgggggggcagtggaattttcaggttgccgggtcagggccatgcaccaggtgagctgaggatgggccaggtgtgtcctgggagccgctgcccgcgtgtctcctgttttccaggagggaggatcggtgcatccagaagaaaatcctgatgcggaagacggaggagcctggcaaatacagcgcctgtgagcccctccccgaccccccactccccatgcccaaccccggatgcaccagccccactgcaggtggagagtgcccaggccacacttctgccagggtcccagccctgcccacctccaaggaggggctggcctctccttcctggggggctggtggccctgacatcagacaccaggtgtgacaggcttgtccacagtagagatggaccagatc

SEQ ID NO: 390652 - DNA, 1000 bp, Homo Sapiens; identical to SEQ ID NO: 281633

SEQ ID NO: 390653 - DNA, 1000 bp, Homo Sapiens; identical to SEQ ID NO: 281634

SEQ ID NO: 390654 - DNA, 1000 bp, Homo Sapiens; identical to SEQ ID NO: 195084

SEQ ID NO: 390655 - DNA, 1000 bp, Homo Sapiens; identical to SEQ ID NO: 114794

SEQ ID NO: 390656 - DNA, 1000 bp, Homo Sapiens; identical to SEQ ID NO: 281637

SEQ ID NO: 390657 - DNA, 1000 bp, Homo Sapiens; identical to SEQ ID NO: 281640

SEQ ID NO: 390658 - DNA, 1000 bp, Homo Sapiens
gtgtatgcagagctctcgtttcacaaactttgtagattgtgaagaatccaacagtgaaagtgaagaagaagtaggaatcccagcttcactgcaaggagatctgggctctgtacttcacctgcaaaaggctgatggggatgtaccccagtgggaagtattctttaaaagaaatgatgaaatcacagatgagagtttggaaaacttcccttcctccacagtggcagggggatctcagtcaccaaagcttttcagtgactctgatggagaatcaactcacatctcctcccagaattcttcccagtcaacacacataacagaacaaggaagtcaaggctgggacagccaatctgatactgttttggtatcttcccaagagagaaacagtggggatattacttccttggacaaagctgactacagaccaacaatcaaagagaatattcctgcctctctcatggaacaaaatgtaatttgcccaaaggatacttactccgatttgaaaagcagagataaagatgtgacaatagttcctagtactggagaaccaactactctaagcagtgagacacatatacccgaggaaaaaagtttgctaaatcttagcacaaatgcagattcccagagctcttctgattttgaagttccctcaactccagaagctgagttacctaaacgagagcatttacaatatttatatgagaagctggcaactggtgagagtatagcagtcaaaaaaagaaaatgctcactcttagatacctaagaattcaaagcgtttcaacctagagcaaccactaaaaaacctgcacagagatgacagtcaatattacaatagagaaaatacagtacttaaaaatgttcaaataacctggttgggtgtggtggctcacacttgtaatcccagcactttgaggtgggcaatggcttgagcccaggagttcgacaccagcctggccaacacagtgaattgtgtctctacttccaaaaaaaaaaaaaaaaa

SEQ ID NO: 390659 - DNA, 1000 bp, Homo Sapiens; identical to SEQ ID NO: 206212

SEQ ID NO: 390660 - DNA, 1000 bp, Homo Sapiens
tgaatgagaatttttttttttttaacatgttgtggatctatctatctgatcaccttattgaactgagaatggttctatggacttgacttttcttggactgacaactgtactgtctggaaatgacagtttctccttcctttcagtatttgtgcctgtctatcccacatccctgtactggtcaggatttccaggacaatagtgaataatagtcgggacaacaggctggttctgattccactgttcctaacattctaccaagaagcatgttttttttctattttggtagttttatgttaggtagccttatcaagttaggactttttttttttttaacccaagctaaagaaagtacccaaaataaagaaattttatcaggaacaggtataaattttaagaaacgtatttcaacgcctgctaaaattaccacttatttttctattatggcaacaaattacattaatagattttcactgttattgtttatcctgggagaaagcatacttgtgaacttttttaggtactgtgctttggaaccaaatttggaagtgagatgaaatgtcagctgtactctcctggttaggtatgatttcagggtcaggtatgcctgataaatgaagtgagatgctttaactttgttctagaatagtttctactgcatgggaatgatctgttccttgaggatttgtcacagtctgcccacagtggactggatttggcatgtaggatgttaatttctatttactttgcaagaaaaatacagtttagcaagcaacagaaacatactgaacatgaacctcaccgtccctctctcagctgtagctccttctgcgtctgcaacctggcttgttcccacgacaaaggaacatcatattttttcaaatcgtttttaaaaaaatacacacatatctgaccatcttcactcagcgcctctgagaaaacaatacaaaaacagataaagaggccagcctggccaaccctgtctcaaaaaaaaaaaaaaaaa

SEQ ID NO: 390661 - DNA, 1000 bp, Homo Sapiens
agggatggcaattcctggcattcataaagccacactcatggcagacattactaatcaattgcacccatgcacggcagacatttctaattgaacacagctctcctcctgcagagcctgggtgcagcttcagattctgcaatgctgcgctataggcagcccccagttggtcacagctgatagctgatgacatctctggaccgcataattcctcaggttcctaacacaaaaggagctcttaggtttcccaactccgatttcccaggcagggaaaactgaagctgagaggatggagactggaaagctgagagggacctgtgagaggcaagcccagggagcccagctgtccccaccatgtctggtgagagacttgagctggcagggagcagagtcagggccaccttataccgggtgcagatgaagggatgggccagcggtcactgtgtgtcatgcccagtgtggatccgagtgtggatcttgggagaggagacaaagaggaagcagctggaggcaggggtggtggtcagattgcaggaggggcctgggtcagattcaggagacaggagcggcaccagctggggaccgggcagccgctggggccctggagaaccgtcaggtacagagcgggaagcaggaggcagccagggcagatcttgggggtaagagaaaaaggaggagaggtggggggaggggggggccttccagcctctcatgtttcctctttgttgaactaggtttgttattttgcttcctccgttcccccacctcccatctctcattcgaagcaacttcaggtgcctgcatttcccaagtaaattatggtggaaactgtaggcccaggtccaggatgaagcacccaccactgtcctcctcattactgacagctgaaaaaacagaccaaggaggacagtaagaaggggcaagagaaccaatacttccactctacacattgtgccagcatggcctgggcgtcatctctcatcatctggaaacaaccttgaga

SEQ ID NO: 390662 - DNA, 1000 bp, Homo Sapiens
tctgagacacaggccacaactacctttgctggagtctggagaagcagagcctgggaatgggatgtgacagtctccgtactgctgaaatgaattgccaggccctaggcccagctgctcttggaccttagctcagaccagcttctttcccgagagtgatgggtgtgcagaagacaagggcctaatgaacacttttttgtgtgttttgtttagaaacagggtcttgctgtgtcccccaggttggagtgcagtggcacaatcccagcttgctgcagcctcacactcctgggctcaagcaatcctcctgcctcagcctcccaagtagctgggattacaggcgcccaccaccacgcccagttaatttttttattttttgtacagattttttgtatagctttgttgcacaagctataacagacattttgatgttactgtaaaattaattttttccaaagttccttgtctggaagtcatcgaaggctgttttccattttaattctgacctgagttgtaaacaagatttaaaactggccgttggggaagtccagattaagatattccaggctgatctcaagtaacttcacttaataggacttttaagcttacaaggaccctagaaattcccctttgttcccattccccttgacatccgccattcttagcgacaaatgggggtaacttttttcttgggtttctgcctagtgaagtctgctggcctcctgggagtttcaagggcctctggttgccattcttaaccatccttggaattctctttggcatgacataatgtccaactgggttcctctccctccctttccctatctttttgctctgtaggatcaatgctatatctgtttatagcatgacaactccactccctctctcaaatgccacccagcaacactgctgggcttcccccattctgaacaatggatgttttaagggcgggaagagcagatgaagcacacagccgagcagtgagaaatctgactgtcccatctac

SEQ ID NO: 390663 - DNA, 1000 bp, Homo Sapiens; identical to SEQ ID NO: 201637

SEQ ID NO: 390664 - DNA, 1000 bp, Homo Sapiens
tccactcaaccactgctggttgagaattagatactagctgactttgcacattttagaatataaaaagaccttaaagaccatctactttaaactctgatttacccactgttagtctacatttcagctcatcaacttggtgtggacggcaatttctcctgcaaatttgagatgcctaggatgttttctaaacgatgcatacgtgagccctcactccctgagattctgatataattagactggaatgtggtccaggcaagagtagtttgaaaactttcccaggtgattctaacatgtaaacaaggttgagaaccactgtgttagggaccgcaaagatgagacccatgtgttcacagctgttgtactggtggaatagggaaaaaggagaaaaaggagatgagaggcctgggccagttgtggtgccacctgctcctaattccaaccagtcatctaaaaagtgtttatcatgagccagtcacaaaaagacaaatactctccgattccagtcagatgaggtactcagagcagtcaaattcatagagacaaaaagtaggatggtggctgccagtggctgtggggagggatggaatagggagctatttaatgagcacagggtttcagctgtgcaagatgaaaagggttctggagatggatggtggtgagggttgcatgacgatgtcaatgtacttgacatgactgaactgtacacgtaaaatggttaagatggaaacgtttatatcttctcacaactaaaaattgttaatactttatttttgtttttgtttttgagacagaggctggagtgcagtggtgggatcttggctcactgcaacctccgcctcctcccgggttcaagtgattctcatgcctcagcctcctgagtagctgggattataagcgtgcacacagggcagatgtttttatttttggtaaagacagggtttcgccatgttggccaggctggtctcaaactcctggcctcaggtgatccacccttcttggc

SEQ ID NO: 390665 - DNA, 1000 bp, Homo Sapiens
aagcgtctggagacattcagctctctcctcaggagggcctgggggaatcgaactccactgcacacaacagtgacatcactcttttttttttttttttttttgagacggagtctcactctgttgcccaggctggagtgcaatggtgcaatctctgctcaccgcaacctccgcctcccaggttcaagcaattctcctgcctcagcctcccaaatagctgggatgacaggcacatgccaccacgccaggctaatttttgcaattttagtagagacagggtttcgtcgtgttggccaggctggtctcgaactcctgacctcaggtgatccacccacctcagcctcccaaagtgctgggattacaggcgtgagccaccatacccggccaacatcattctcttaaactggcctttcctccttcaggatctcacactccctatagcctcgcttctgctttctgggatcacctaaattaactacctatggccaagtcctgtctcaagctctgctgtcagggtcaccaaaattaagatcatccctttccatcctcctctccctataaactactgcccttcttccacaaactccttccacgccagcaaacccagactgtaacattaacacagagttataatccatccatatactggtctctccacattcctggagcacaaactgctaaagggtaggaacgctgtgacacgtttggttcccccactgtccagtgggagagagatatgtgagccagtcagcgctacaccgagttgaggcagccattgaggctcttcatgaattttcccgttttctgccttccaggcacatgataggatggaattcctcagccctcctgaagttaggccactgcaagaggcctaactggcttgctttggccagtgaaataagagcagaagtcacatgtgttgttactgtcaggcacaagtatttaactgccaatgtaacacaagacactccagcaccctcttttgatggagcctcctttgatc

SEQ ID NO: 390666 - DNA, 1000 bp, Homo Sapiens; identical to SEQ ID NO: 201638

SEQ ID NO: 390667 - DNA, 1000 bp, Homo Sapiens
tctcgccaggcgtggtggctcacacctgtaatcccagcactttgggaggctgaggcaggtggatcacctgaggtcaggagttcaagaccagcctgaccaacatggcaaaaccccgtctccactaaaaatataaaaattagctgggtatggtggtgggcgcctgtagtcccaggcacttgggaggctgaggcaggagaatcacttgaacctgggaggtggaggttgcagtgagccgagatggcaccactgcactccagcctaggcgacagagcgagactctgtctcaaaaaaaaaaaaaaaaaaaaaaagtcaaatctccagcaagccaaaagctgaagacagcgtgtctgaggctctccgggttgtgaagctgggtgaagccctcccaaacctgacctcacagatctccagcatcattagcgctccatttattgaagggcctccttctcatcctgcattctccaggctctgtcctcccccagccagaagtgagggaatggccgtcagccctgtgctgagtcccttcactcctgctggcaagttctgctgggaagagtccacgagggtaggcctgcgtaagggaaaatttggaggtggcttcagagtcccagatgcttctgatcctttggacctgtgtgaggtcagagaagggcatcagcgttaagtcctaaatcttaattaccagtctgggcagaatttaagctggattagatccacagcatgacattaataccaacctcaaaccacgcatggctggccctcctatctcctcctgggatgttagatttttgagccagaggccctatcttgttccttgtacccctaaagcctctcaagtagttaacttgtagattataaaaaatagtagctgactgtaggcatgaagatgggaacctgggggagagcagagcagtggggaaaagtgaatgggtttggggcctctggacttgttatcagcacaggaaaataacaagaagtgggtgtcagatgcgtcaagctt

SEQ ID NO: 390668 - DNA, 1000 bp, Homo Sapiens
agcagagatggaagatcaagtggtgacaccagctctgaagtaagcacagtagaactgctgcatctgcaacaacagcaggctggagtgcagtggtgcaatcataactcactgcaacctggaactcctgggctcaagcagtcctccgacctcagcctctgaagtagctaggactacaggaggatgttgtctcttacacccaggttatttgttaaagtctttggatctatacttaactgatgacctagaagagcgattctcaaaagtgtgagtcctggaccagcagcaacagcatcaccgggaacttgttagaaatgcacattctcaggccactccctagacctactgaatcagaaaccctggggttggagctcagcaattaccctgcaggctctccaggcagcaagacaacttcttttacagcagcaaacaagtggattgaaatctcctaagagcagtgataaacagagaccactgcagccatgagacagacttgtggttcttcaacagctgtgcagagcagagacgtaaatttaaggtgcctgtgtcagtggccatgatgactccccaggtgatcacccctcagcaaatgcagcagatccttcagcaacaagtcctgtctcctcagcagctacaagcccttctccaacaacagcaggctgtcatgctgcagcaggattttttggattctggattggaaaatttcagagctgccttggaaaaaaattcaaaatggtttattcagcaacaactacaagagttttacaagaaacagcaagagcagttacatcttcagcttttgcagcagcagcagcaacagcagcagcagcaacaacagcagcaacaacagcagcagcaacaacaacaacaacagcagcaacaacagcagcagcagcagcaacagcagcagcagcagcaacagcatcctggaaagcaagcgaaagagcagcagcagcagcagcagcagcaacagcaattggcagcccagcagcttgtcttccag

SEQ ID NO: 390669 - DNA, 1000 bp, Homo Sapiens; identical to SEQ ID NO: 207003

SEQ ID NO: 390670 - DNA, 1000 bp, Homo Sapiens; identical to SEQ ID NO: 206995

SEQ ID NO: 390671 - DNA, 1000 bp, Homo Sapiens; identical to SEQ ID NO: 205654

SEQ ID NO: 390672 - DNA, 1000 bp, Homo Sapiens
aaataacaggatgagattctgaaaatcagtcattaaagggctgacacatgagtcttgggctgttcttggagacagtgagaaccacgtggtggaaacagaccagcattcacacaattatatttccaagcattttttaaattgaaggtaaacagcatgattcttggaaccttcctgtaagacaggcaatagcattaactttttgttttattttcgttttatagtttaaaatgttaacagaatttgaatcatgtagattgtggtgtgtgtttaggagtttttactaaggtgggattaaaagaaaacacatttattaaattcatacgtttgcgtgaagatggagcctgcagacggccctggaatgcaggcagggggtggtgccctccgccaggctgggacgtggcctgttttcctggctctgcaggggacacctccgaggagacacccagcatgggaatatgggcagcctgaaggcatgccctggggagagccagcccttcccagtggtggtgagccccagaggaattgtggaaccctgctcttgccatcaccagagcctccccacatggggaaagacagaattggatgttcaccaaatatttgtacttggggcctacccaaaggaaatatgtctgtatgcaggaggagggaggcaggcaggggaatttccacctggaggcattgccaaaggcaggcgggagtagacgctaggggtgtgtgcagggctcctggagtccacatgggtttgtatgtttattgcggcattattcacaatagcaaagacttggaaccaacccaaatgtccaacaatgatagactggattaagaaaatgtggcacctatacaccatggaatactatgcagccataaaaaatgatgagttcatgtcctttgtagggacatggatgaaattggaaatcatcattctcagtaaactatcacaagaacaacaaaccaaacaccgcatattctcactcataggtgggaattgaacaatgagatc

SEQ ID NO: 390673 - DNA, 1000 bp, Homo Sapiens
  misc_feature (406)..(406): n is a, c, g, or t
  misc_feature (616)..(616): n is a, c, g, or t
gtgacccttgaaatgcccacagtatagacgagaaaactgaactccttagaattgacgtatcttgcccaaggtcatacaatgagtgaatggggcaacctggacatggacttcagtcttcctgagctcagagctgaccaaagactctgtctaaacttccaagacccttttctcccattggttgatgcacatggtattgaaaaatgtcgagcattctctttctctgttgaaaagttctgcctcccattagttatgaagggaatcctacagaaaggggtgagtcccttaaattcttcaactgattatgggaggttagcaaaaaaaagagagtttatgaacccatgaaaccttaggttctatgtatcagctgtgtcttactgaaatcacctcttgaaccaggacccttcanacatagcaattcatgtcctcagtctccggacacaatggaatcctcattataaggccttccacacaaagataataatagtggtgcctctcccatgtgtgttcacatttttgagaaaaaatattcttgcagctatcaaagcacctgctaatcaaagatttcctattccctgtaatttgtttttaatcttgtaaagccgactactttcaaatnggactcatagtgtcaaaggctgaaattcatttccttgaacttcatttaaactgggccacagaatcattctgagagaatcatttaaattaatatgtggcattacggtgttaaaaagaaaaaaattttgtcctaattcccaatttcagagtttctccagacctccaatctgggctctgaccccataattgtgtgcagctgagctgctgacaagtccacacatattctgaagtcacattttctggctctggggctccaaggactcacaaagaggaggaatttttttttttttaatccctgcttgttccgtcaactagttcaccggttaaaccctgattgaatgtagaaattttagaaatgaaaaaaaaaaaaaaaaaaaaaaaaaaa

SEQ ID NO: 390674 - DNA, 1000 bp, Homo Sapiens; identical to SEQ ID NO: 195100

SEQ ID NO: 390675 - DNA, 1000 bp, Homo Sapiens
ggtacttcaaaggctcatcaagtcccgaggaaagtctcagtccaaacacctcaatgtccaaatagcggcctcggaaaagctggcacagtgcccccctgtgagtgcctagatcccagagaagggaatggagggagaacatttgggttgtcctggtttcctctggcctacatgagagacagggtgaccaggaacacctgggtcaggcctgtgggtgcagactggtcttctgggaagagcgcaggtcccgtcagtcaaagactggttcaagccccagaagcacccttctgcgtggagagtcaagccctgtctcccagccttggttgccttatctctagaatgagggagttggactgagtgccaaaacttcttgcagttctgccaatctgtagatctgagagctctccttcccttctacatccagaggcctctttttaaccttgtccttcaatcccttgactctacccactgcacccaggccacaccctcaacccccttggccatgcccactcatcccagccctgccccctaaccccgccttcacaggaaatgtttgacatcatcctggatgagaaccaattggaggatgcctgcgagcatctggcggagtacttggaagcctattggaaggccacacacccgcccagcagcacgccacccaatccgctgctgaaccgcaccatggctaccgcagccctgcgccgtagccctgcccctgtctccaacctccaggtacaggtgctcacctcgctcaggagaaacctcggcttctggggcgggctggagtcctcacagcggggcagtgtggtgccccaggagcaggaacatgccatgtagtgggcgccctgccgtcttccctcctgctctggggtcggaactggagtgcagggaacatggaggaggaagggaagagctttattttgtaaaaaaataagatgagcggccagttctggtgtctgtgggttttttgatgggtctggggcttctggtgctgtcttctggg

SEQ ID NO: 390676 - DNA, 1000 bp, Homo Sapiens
tgctggatttgggcgttgttaggcagctttttttttttttttttttttttttttgtctcagtctcactttgtggcccaggctggaatgcagtggtgcaatcttggctcactgcaacctctgcctccctcccgggttcaagcgattctcctgcctcggcctcccgagtaggtgggattacagacacccgccaccacgactgactaatttttgtatttttagtagagacgaggttttgccatgttggccaggttggtctcaaacttgtggcctcaagtgatccacctgcctggcctctcaaagtgctgggattacaggcatgagccactgtgcctggcctttgttagacagcttaactggcaacaggtaactgacaaggagcctggcaggcacaggtgtgcattggtcagcacgtccccttgcccacgaaggagctagactcaaatcccggggtccctgaaattgaattgtcaactctttaacttcctgaggaatccttccccatttttcctttatttgtttcttttttgtttgtgttttggcatggccttccaatgaaattccccatttttcctttttctttctttctttcttttttctttctttttttttttttttgagacggagtctcgctttgttgcccaggctggattgcagtggcgcgatctcggctcactgcagcctctgcctcccaggctcaagcgtttctcctgcctcagcctcccgagtagctgggattacatgtaccaccatgacccactaatttttgtatttttaatagagacggtgttccaccgtgttggccgggctggtctctaactcctgacctcgggtgatccgcccgccttggcctcccaaagtgctgggattacaagcgtgagccaccgtgcccagcgccccatgttttctttccttggtatatctctcattgcacctcctctcctctctctctcacttccgtccagccacatcagcctcctagctgatctctacttctccatg

SEQ ID NO: 390677 - DNA, 1000 bp, Homo Sapiens
agttctggaattcaggcccctccttctcggatactaagaaatgcagactccgggttcctcatcctccagatttgggttgggggttccggactccgagacccctcaggggaaaccggctgcatatctgggacacttccctcttgcctcagtttcctccgccaagccccgccccggtcggccccgcccccgtccctccccacccgagggcagggcgaccaggacgccggaatcccgagggaggaggagtggagatcttacctggggcgccctcttcggctcccgcggctgccctccgcccggcagcagctcctcctcctgctcgctggctgcagggacgctcgctggcccgccgggtgctagctgctcacgctccgcagggcccgggtcgggggcgggggcggggcggcgccgggcggcagaggaggggccgggggatcctgccttgcactcgcgtgccgggaccttggaagccaggcctggctcgttcaacgcggccgccttggtcacaggagtcccagtttccagctgcctcctcctttggacctagcagtccaggcccccagcccctcctcccttcagacccaggagtccaggcatccggcccctcctccctcagacccaggacttgcgaccccagccacctctccccccagccccaggcgcctgagtactaagcccacagttccccccaccacctcccaaccccgccccgtctcagactcaggagtccagcccccagcctcctcctccattagccccaggagtctgggcctgagattcctttgccgtcttttgccaattgcgtgtcaatcccggggcagattcccaccctctgctctcctccccacttcccaggagctccacgccagacattaaccagctgggcttgggcagtgataaggccccaggcccggggagacagtggatgtgggggctcccgcatactcctctcccctggaatttcctggctggggaccggggagaaggtcttgtcctgagc

SEQ ID NO: 390678 - DNA, 1000 bp, Homo Sapiens; identical to SEQ ID NO: 281647

SEQ ID NO: 390679 - DNA, 1000 bp, Homo Sapiens; identical to SEQ ID NO: 281648

SEQ ID NO: 390680 - DNA, 1000 bp, Homo Sapiens; identical to SEQ ID NO: 281649

SEQ ID NO: 390681 - DNA, 1000 bp, Homo Sapiens; identical to SEQ ID NO: 281650

SEQ ID NO: 390682 - DNA, 1000 bp, Homo Sapiens; identical to SEQ ID NO: 281651

SEQ ID NO: 390683 - DNA, 1000 bp, Homo Sapiens
atgctgctgctgagactgaagaccagtatttcagaactttgagaattggagagcaggcacatcaactgatctcatttctagagagcccctgacaatcctgaggcttcatcaggagctagagccatttaacatttcctctttccaagaccaacctacaattttcccttgataaccatataaattctgatttaaggtcctaaattcttaacctggaactggagttggcaatacctagttctgcttctgaaactggagtatcattctttacatatttatatgtatgttttaagtagtcctcctgtatctattgtatatttttttcttaatgtttaaggaaatgtgcaggatactacatgctttttgtatcacacagtatatgatggggcatgtgccatagtgcaggcttggggagctttaagcctcagttatataacccacaaaaaacagagcctcctagatgtaacattcctgatcaaggtacaattctttaaaattcactaatgattgaggtccatatttagtggtactctgaaattggtcactttcctattacacggagtgtgccaaaactaaaaagcattttgaaacatacagaatgttctattgtcattgggaaattttgctttctaacccagtggaggttagaaagaagttatattctggtagcaaattaactttacatcctttttcctacttgttatggttgtttggaccgataagtgtgcttaatcctgaggcaaagtagtgaatatgttttatatgttatgaagaaaagaattgttgtaagtttttgattctactcttatatgctggactgcattcacacatggcatgaaataagtcaggttctttacaaatggtattttgatagatactggattgtgtttgtgccatatttgtgccattcctttaagaacaatgttgcaacacattcatttggataagttgtgatttgacgactgatttaaataaaatatttgcttcacttaaaaaaaaaaaa

SEQ ID NO: 390684 - DNA, 281 bp, Homo Sapiens
agtagagacggggtttcactgtgttagccaggatggtctcgatctcctgaccttgtgatccgcctgcctcggcctcccagagtgctgggattacaggcatgagccactgcgcctggcgcttttcacatttcttatgctaacttgatatatttctgacgtgagaaaaaattttaaatggtccattttcaaggcatgataaatctaagtactggcagctgtagctctgatttgatccctagcctgggaacctccatatgccatggttgtgtctctaaagaggc

SEQ ID NO: 390685 - DNA, 1000 bp, Homo Sapiens
aacagaaggtggagtataccctgggagaggagtcggaagcccctggccagagggcactcccctccgaggagctgaacaggcagctggagaagctgctgaaggagggcagcagtaaccagcgggtgttcgactggatagaggccaacctgagtgagcagcagatagtatccaacacgttagttcgagccctcatgacggctgtctgctattctgcaattatttttgagactcccctccgagtggacgttgcagtgctgaaagcgcgagcgaagctgctgcagaaatacctgtgtgacgagcagaaggagctacaggcgctctacgccctccaggcccttgtagtgaccttagaacagcctcccaacctgctgcggatgttctttgacgcactgtatgacgaggacgtggtgaaggaggatgccttctacagttgggagagtagcaaggaccccgctgagcagcagggcaagggtgtggcccttaaatctgtcacagccttcttcaagtggctccgtgaagcagaggaggagtctgaccacaactgagggctggtggggccggggacctggagccccatggacacacagatggctccggctagccgcctggactgcaggggggcggcagcagcggcggtggcagtgggtgcctgtagtgtgatgtgtctgaactaataaagtggctgaagaggcaggatggcttggggctgcctgggcccccctccaggatgccgccaggtgtccctctcctcccctggggcacagagatatattatatataaagtcttgaaaattttgaaatttggtgtgtcttggggtggggaggggcaccaacgcctgcccctggggtccttttttttattttctgaaaatcactctcggactgccgtcctcgctgctgggcatatgccccagcccctgtaccacccctgctgttgcctgggcagggggaagggggggcacggtgcctgtaattattaaacatgaattcaattaaaaaa

SEQ ID NO: 390686 - DNA, 1000 bp, Homo Sapiens; identical to SEQ ID NO: 114796

SEQ ID NO: 390687 - DNA, 1000 bp, Homo Sapiens
agagaaaaccagaacagaaagttgatgtctttcactgtgaatacctggaattgaaggtgtcatcattttcactctttttaactccatttctttcagttcctattatccttgccgtaaataaatgtgacaaagctgaggctgatcctgagaaagtgaaaaaagagctgctggcttacgatgtggtatgtgaagattatggaggtgatgttcaagcagtgcctgtctccgcacttacggtaaatgcggggacctcatataaatatgcctggatgggaatgctgtacataatgcacacagtatattacatctaaagaacattttgatgtacataatttgtgttgtttttaaaaagttttcttggtgccaggcaaagatggtattatcttggtttggcatgttaggagttaggctcagagaggtcagtcaccagctaatcagtgtggagtcaagtctaaatggaatatattttttattatgagatacttaggatgagaataaatggtgaataagggaaatagtaggacaaagacgtggtgccatcacagctcagtgcagccttgacctccaaagctcaagttgtcctcccacctcagcctcttgagtagttggggctacaggcaggtgccaccccatgcctagctaatttttaaattttttttgtagacatagggtctcactgtgttgcttaggctggtcttgaacacctggcctcaagccattgtcccaccttggcctcccaaagcaccgagattacaagtgtgagccaccgtgcctgaccaaagactgtcttaagcagaaatgaaatccagttgttaacaaaaaagtgcttatatttcatgcctcttacaagtggaaaacaggtcttacagcatttaagagatttaaacaaaaagttcatgaataccaagattaaatattaaggttgattttgttattgattgactgaatgtttttgtggattaaattgctacatgttttaaaatgttatttataatgaatt

SEQ ID NO: 390688 - DNA, 1000 bp, Homo Sapiens; identical to SEQ ID NO: 114797

SEQ ID NO: 390689 - DNA, 1000 bp, Homo Sapiens
taatttagtgctaaagcagaagaatcagcaagaattggtgaacttttttggaaagggctatccaaaaaatagcaattaaaaatacacacattggaatgtattagtgaactgagaattagacccaacttcataacaacatgtctgaaaatagaaggaagggcattaaaagaattgtagacaaactgaataaaatgtacccagagcctctttcatatcatataccaaaaataaaatccagatagataaatgagttcaattaaaaaaaaaaaaactccaatggcaggaaaatcagcacggctggtgactccacctttcaggtctctgttcaaatgtgaccttcccagagggaaggtccccagagaggaccttccttcctctctgtcccctcaccctgctttgtaccattgtagcttttatcaccaccagaccttccagtatagatttgcttgttgattttcaatttatgtttcccacccaaatggaagacccatgaggtcagagagattattttggtcccagctgtatttccagtacctcaaagcaggcatttaatgaatatttgcagaataaatgaagatgggatgaactctctcttgttcattaccaaaagacttgcaagagtaaaggtgagtaggcttaattacattataatttctgcacaacaaaataacaaaagcaaggtttagacaaaattgtgtcagacaagttcaaggaatgagtaactatcatgtgtagagttattcaaagtcatagaaaaggcatgtgtcttagtctttttgggctgctacaacaaaataccataactagggtggcttgtaaacaacagaaatttatttctcacagttttggaggttgagaagtccaagatcaaggtgcgagcagatttggtgtctggtgagggcccacttcctggctaatagacggcagccctcctgacttaatcacctcccaagggccacaactcctaataccattgtattggaggttagggtttcaacat

SEQ ID NO: 390690 - DNA, 1000 bp, Homo Sapiens
agtctcctccctgagccagccagtggggcagctatcttacttaatcttgcttgaattctcctcttcattgtctctgtgagggaagccaagtcagcatctctcttcacccactgtggagaaacaagcttctttgacctcccaaaggggtctgtgatgtgggatggtaaacagcccagagagggtgactgtcagcttttgcctctccctcccccagcgccagtggcctggtgatgcagtggagatggagatggccaccgtgctagagcagtgtccctctattgtccgctttggctaccactttacacagcaggggccacgagctcgggcagcccaggccatgacccgaaacaatgaactacgtgagtaactgcagacatgatgtgtggagtggtcagggaagtgcagaaattggtggatcctcctgaaagcagacctaatgactaacagcccagggtgctaccaaagagctattcatatgagaatttcaaatcccaagagtgatcagaaagtaaacagaaaactccccctgccccaaatatggaccagtagagaggtagaaaggatgccagagataatcatacttgtttagaggtatcgtaattttatttgtggtgtggtttcttgttttgttttgttaatgtgggatgggcctgtaaggtggcctaagacactaccaatttatgagtttggctaagggactggaaaggagaagagtgcctttgcagaaagcaggagctggaacaaacacttatgtttaatattgctcctttacaggtcgccagcaaaagaagagataacactgcatttccctttaccaactagcgctgggagcactggacacttaaatcctcatctgtcctcctttcctgtaaataaaagcccttctatccattttgcctgcctccttccttgggctttggggtgagaatcttggcgctaacccccaagggttactgccagttcaccaggggattatttatactctggggatcagcaagca

SEQ ID NO: 390691 - DNA, 1000 bp, Homo Sapiens; identical to SEQ ID NO: 281654
  misc_feature (981)..(981): n is a, c, g, or t
  misc_feature (996)..(996): n is a, c, g, or t

SEQ ID NO: 390692 - DNA, 1000 bp, Homo Sapiens; identical to SEQ ID NO: 201623

SEQ ID NO: 390693 - DNA, 1000 bp, Homo Sapiens; identical to SEQ ID NO: 281656

SEQ ID NO: 390694 - DNA, 1000 bp, Homo Sapiens
agtatctgctgaaactgaaattcaattttaagacctccctgtggtaattgggagaggtagccgagtcacacccggtggctctggtatgaattcacccgaagcgcttctgcaccaactcacctggccgctaagttgctgatgggtagtacctgtactaaaccacctcagaaaggattttacagaaacgtgttaaaggttttctctaacttctcaagtcccttgttttgtgttgtgtctgtggggaggggttgttttggggttgtttttgttttttcttgccaggtagataaaactgacatagagaaaaggctggagagagattctgttgcatagactagtcctatggaaaaaaccaagcttcgttagaatgtctgccttactggtttccccagggaaggaaaaatacacttccacccttttttctaagtgttcgtctttagttttgattttggaaagatgttaagcatttatttttagttaaaaataaaaactaatttcatactatttagattttcttttttatcttgcacttattgtcccctttttagttttttttgtttgcctcttgtggtgaggggtgtgggaagaccaaaggaaggaacgctaacaatttctcatacttagaaacaaaaagagctttccttctccaggaatactgaacatgggagctcttgaaatatgtagtattaaaagttgcatttgaaattcttgactttcttatgggcacttttgtcttccaaattaaaactctaccacaaatatacttacccaagggctaatagtaatactcgattaaaaatgcagatgccttctctatttgtgtattgcgtgtctggtctcattctgactacagatatggttaatcttcacagtgcaaggtcccaagagactttggggggattgtttctacccttaatctgtgaaaccccagaacgtgccaggcagcaaatagcattgcttaatgggaatgccccacctaagggtgggccaagcaccaggc

SEQ ID NO: 390695 - DNA, 1000 bp, Homo Sapiens; identical to SEQ ID NO: 281657

SEQ ID NO: 390696 - DNA, 1000 bp, Homo Sapiens
caccagttccaaggggagtgaatggaagaaggtggcgaaagtcatagaccgattcttcatgtggatttttttcattatggtgtttgtgatgactattttgatcatagcaagagcggattagtcacagatattggctttgctatctgggtagaaattaatacaattccctgtgatctattccaatgttcttccaagatttttgttcatctataatttaggggttatgttgtctgtgctttttatttttagcttcaaatgaatgtcgaagctatctgctctgttaaattaagcagaagatccaaaatttcaagggtaggaagatggaagaaatagggaaagagcccttttatagcccaccgtagtggtgggtgactggcctctagtttatataattatttacctctttggcagtacagataacaaaatacactttactggtaaaatttaaaacaaaaaaggcaaaacaaaacaaactcattttccccttagttcccattaaaatatgcatttgaaaaatgaaatagtcatatatatattagtgtgatttaagtctcaatggtaccttattcaggcatagtgcatttgaagtcatatctcaaatagtggaataaaaggttttgtcccatgtaaagaaagtctaagcatcagctgtttaatggggaaaagaactttcttcataatggtgatgtcgtatatgttggttatgttttatataaacccaaaagatgaagtcattcctgcatttaccctttgattaaaatatgatagatgaagctgttcctgcatttagtcttgtattaaaataaggtgattagcaagctgggctcatccattcattcattgaacttttcaccaaacatggatcacgttttttcctgcatgtaataaaagcaatatgattcacatttgtatggggtgtcacagcaattcttatgcacaagcctgatcactttgatcctcacaacaactctgtgagttgggaaggcgagcgttactattc

SEQ ID NO: 390697 - DNA, 1000 bp, Homo Sapiens
gtaggccctggcggtaaaatccagatttttccacccctccctctcttgtcccatatccgcaagatagtttttctcagccccgttcttcccagtttgtggtctccagagtgaccttcaaacgctgttgcctcctagtagggttttataaagttagttcttctaaatgtaaagaaatctgtggaaagctcaagtttaagttaggtgttttaaaacaaacgtagttaacaatcggccagatagattggctaccctccagcacgcctcaagttttaagatcacgtgattggcccaaacctcagagcctggaattttaccggcggactccagagggacggaacgccaccgccatttcctgtccctcgattgtggcgtgaacgtcacttccttagcaatgcgctttaactcttgctgtccacattttccacattgtactttataacatactctttgtgaaaatttatcttttatttctttaatccaagaaaattaatagtcaagggatccgtaaaattcaggcccccgagatgtagagcgctgggatggaggaggcagggcggagctcgacgtcatgtgactggttgggcccgccccccccccccaacctgtgcagctgaggacttcccctccgtggtgacagcctctgggtcctcggtcggtacagtctctgcacctcgcgccccagcaggtgagcggcgaccggtaactggcgagtggtggggatagagggggtggaaggaggcagaggaaggagagaagggagagtgtgaacggcgacttttctgcctgaggcttcctccccgctgtcaccctgcaccggcaaggagctcatttctccttaacccccgctcccccaagtgtggtcgttcccgctacttggggattcagatgtccacctttcccagggttggaagtgagtgcggccattatggttccctactcagagcctttggggcttcgggtagcagattgtttcagcaatttcacagggtctgcagtagac

SEQ ID NO: 390698 - DNA, 480 bp, Homo Sapiens
ctctgaggctcccaggggaaaattgggcctagtggagcagggtgtgtgcccggtgcatgtgatcaaatttgagggaggggacctctgtctaggagctgaggggttgaaaggaggaggagcccttggcagcctgagaaacaggagctacttggactgcagtgcatgtctgtagagactggcctgtggggccaccagtgtcacttagatgtgtctgtgaagggtggcagtgagctgagagaaaaatgcacccgacattggggagctgctcagccagggtgctgctcatctgggggcatggatgttgcaaacagcactcccgaaggtcatgcagcacctcagagtgatgaatgtcactgccactgatgacaaacaagttgccgaagcctgggaagctaagacccgcttttgttttttttccttcctgtatagacactcctatcttaaagccagtatctcttttgcgaaaacgtgatgtgaaga

SEQ ID NO: 390699 - DNA, 1000 bp, Homo Sapiens
cgttggtcaggatgttcattctttcacattcttgaaaggcgactaccacgtagggggtcttttccgctgcctttgccatgatctcagccatgttgaaagtctccggaatcttctccaggatgtcgtccagcacggccttcacctggaagccagtccccggacagcccctgtcactgcaaagagcccaccccacccactgcagggtcagggagcctgcccaaaatgttcccagccccaagtcctggagaggagggaagaggcaagtagagttgccagaaatgcagggtcatgggtgcagccacacatttgacgaggagagggagccttggccagcggctccgagcattctgatctcactacaagtccctgcagccgcggccatgagcgcatcaggccacctggctcggtgcctcatctgttcattcccacgtaccagcctctggtcaaatgtagccagcggttgagggattgcgactttgtcctttacgtgggctttctgtagggaccatgctggtcacaccctgttaaggagtggcccacacagtgcagtggtcacctgcaccaccgtctgtcagccaattcctgatttcagtcattagactaagagaaagtcctggacctaatagcaataagggtctcacatcaagaattcagtctttaccgggaagtcctgtacttagctagtacgtaatagagcctttccacattctattaagaagtacaggccaggtgcagtggctcacgcctgtaaccccagcactttaggaggccgaggcgggatggtcacctgagatcaggagttcaaaaccagcctggccaacatggtgaaactgtctctaccacaaatacaaaattagccaggtgtggtggcaggcgcctgtaatcccagcctgggaggctgagccaggagaatcgcttgaacctgggaggcggaggttgcagtgagccgagatcgtgccattgcactccagcctgggcaacgagagcaaaactccatctc

SEQ ID NO: 390700 - DNA, 1000 bp, Homo Sapiens; identical to SEQ ID NO: 281662

SEQ ID NO: 390701 - DNA, 1000 bp, Homo Sapiens; identical to SEQ ID NO: 281665

SEQ ID NO: 390702 - DNA, 1000 bp, Homo Sapiens
gtttcggagacgtaacgatttggattgccaacaagtcaagaaatgttcaagcccttggatgtagggtaaagaaagagagatcagactgtcactgtgtctatgtagaaggggaagacataagagactccattttgaaaaagacctgtagtttaaacaattgctttgctgagatgttgatcatttgtagctttgccgcagccccttcctttgacccaacttggagctcacaaaaacctgtgttgtataaaatcgaggtttaagggatctagggctgtgcaggacgcgccttgttaaccaaatgtttacgagcagtatacttggtaggagtcattgccattccctagtctcaataaaccaggggcgcaatgcaccgtggaaagccacagggacctctgcccttgaaagcagggtattgtccaaggtttctccccatgtgacagtctgaaatatggcctcgtgggatgggaaagacctgactgtcccccagcctgacacccgcaatgggtctgtgctgaggtggattagtcaaagaggaaagcctcttgcagttcagatggaggaaggccactgtctcctgcttgcccctgggaactgaatgtctcggtgtaaagcccgatcgtacatttgttcaactctgagctcggagaaaagctgccctgtggcgggaggcgagacatgttggcagtaatgctgccttgttattctttactccgctgagatatttgtgtggagagaaacataaatctggcctacgtgcacgtccaggcatagtaccttcccttgaacttaataatgatatggattcttttgctcacgtgtttgtttttgttgttgctgttgaacttccccttattatcaccctgctcccctactgcattcctttgtgctgtaataatgataatcataatcaataaaaactgagggaactcagaggccggtgccggtgcaggtcctaggtgtgctgagtgccggtcccctggacccactgttgtctccctat

SEQ ID NO: 390703 - DNA, 1000 bp, Homo Sapiens
gcactgcagcctcccgggtggggttttagggccctcccagctcacccagaccccctcctgtgggtcctgctttctggcaccaccttcccttccttgggggcaaccacagtggagagaggaggggctctgcctgtcccgctaatgcaggggtgctggccttctagggtcctttagagaacctgatgaaagctatgagtttacacccaagaaattgtctggaaccgttttcaccaacagtgtgccctgaacgcggacccaggccctcaggttgtgtttcataagccttgggagcgctcaggatgcatctgactccccaactctgccctgacccagggcattcttcctggagggggcccccattacagacaggcgagcagaggcttccagaggccgaaggaggggccaggggtcctgctgcagggatggaggcagagctgcgcctcgacatcaggccctgccatccttgtcccctcacggctgggctctgcacaggtcatcaccatcttcagcctggtggaggtggtcctgcaggcagagtccacagccctcaagtacagcgccatcctgaagcggccaggcacccagggccacctgggccctgagaaggaggaggaggagtctgacggtgagcccgaggactcaagcaccagctgagctccaccagccgcctgccccgcctgccccgcctgcctgtcccgccacactggctttaggacctgttgacacggaggggggtttttaatttggtttttaacaactcaggggtttgtttttatttttatttaatttttgcagctcaacttttaaacaaactgcaggggagagggtggggctggaaggaaggctgaggcctggtcagcagtgaccccagcagagcaggccccagtcctcctgggaggctggccccccttttttctgggccctactgccctcctctgcccaggaaatgggggggtttcagcaactcagtgtcacagaataaaatcaagtgtggagtgcc

SEQ ID NO: 390704 - DNA, 1000 bp, Homo Sapiens; identical to SEQ ID NO: 114798

SEQ ID NO: 390705 - DNA, 1000 bp, Homo Sapiens; identical to SEQ ID NO: 281668

SEQ ID NO: 390706 - DNA, 1000 bp, Homo Sapiens
cggggtggaggtggaggccccttctcgaaagcggaagttatcccctggccctaccactcttaaacggacctgcatcctggagcccactggaaaagggaaaccctctggctgtaggggcctctcggccaaaactaaaacagccctgagcatggggcttaatgggacaatggggccaagagtgaagcgggcagggcccctggactgtcgtggctcccctcatcagctccccacaccagtcaaggcttctcagctggagaaccggggagcagctggacacccagccaaggccctgccaaccaactgcctctctgaggaggaggtggccaagaagcggaaaaacctggccacttattgccggccagtgaaggccaagcactgtcaggctggtgcccctgctgatgtggcctgctctgtgcgccgcaagaagccaggcccggccctggcctttgaggagaagtgctctacactgaaggtaccagccaggctccctgaagattgatgagggtggggcacacagggggtacctgatacagagaagatgctacattggtgtttgtgcagggaaagggaggaaggggaagttgagagagttcctggactgttttctttaggaagaggtaggtcagttcttagcaaagtgactccagctttttgcctggtgaaccttcccctatccctaaccctttcccttgggctgaggagatgcggcacccctccacccctgcttttgctataatcaaagggctacttctttctgaattggctgtgaccctcattccaggtactggagctacctctgttccctgaaggaaagggagtttgagtccctgggtcacagcctaacatgccgagcagcaagtcaaaagcccattaacgagaaagtgcctgcccactgcaacggagccgccagcacctcctcccctccagatccgggccccaggctgctgccgctttttataactttatattattttttttaagaaaaaaagctctttaaaat

SEQ ID NO: 390707 - DNA, 1000 bp, Homo Sapiens
cacaggctgcctgggacctggggctgctgcaggcggcttccgcctgggacgtgtgcacgttgcgggggtgggggctcatcgagccaggtgtggccaagggcttgggctgtggggccactctcaggctcagccaggccactctcggaactctcccgtggccttcgagggaaggccgtgtgccggcaacgctgcggacggcagcaccccaagctgggatcccccagctctgtgctgagtaggcaccatcctggaccacgcctgtgttttgagctcaggccacgctgtgcctggagctggcctccctgttcctctgtgtgtggcccagagtcccaggagcctcctgtcctttccactgcgtgtgtaaaatggctgagagtgccacctggtgggcgtgagggtcacgccgatgatgcgtccacacctccgtggatagggtggttacaagtcaagtggactttgggggacggggacagggaggctggctggctggggcgggggtggggctgggtccttactgctcagggaggctcacaggtgagaagccactcccaggagggtgggactgactcaaagccggcagcctgttgtgggggtgtctccaccccaagcacctccttctcttccctgctcttggtcccctgccagctccctgtggctggctctgcctcttcccaccccaacctctcagcagagccaatgctccagagctggacaatggccaaatagacattaactttgaaactggaggccaaggcgggaggattgattgaacccaggagtttgagaccagcctggacaacatagtgagacctgtctctacaaaaaaatgtaaaaattagcgggtgtggtggtgcaaggctgtggtctcagctacttgggaggctaaggtgggaggattatttgagcccaggagtttgaggctgccatgagccgtgattgcaccactgcgctccagcctgggtgacagagcaagattctgtctcaaaaaaaaaaagaaaag

SEQ ID NO: 390708 - DNA, 1000 bp, Homo Sapiens; identical to SEQ ID NO: 281670

SEQ ID NO: 390709 - DNA, 1000 bp, Homo Sapiens; identical to SEQ ID NO: 281671

SEQ ID NO: 390710 - DNA, 1000 bp, Homo Sapiens; identical to SEQ ID NO: 281672

SEQ ID NO: 390711 - DNA, 1000 bp, Homo Sapiens; identical to SEQ ID NO: 201639

SEQ ID NO: 390712 - DNA, 1000 bp, Homo Sapiens
caagcatgggaaacgtgactggggcctgcatgcatcagcgaacagaacaaagttttgcaatgctttttcatacaatgtctggaatttacagataacacaagtagtttaggttaggggttgatattattattattacttttttttaactcctagggccgggtggtggtgccaaggttgtctggctatttatcttacttctgtttatttctaattttttgctttctctctttcctcctgtcttgtgaactaggcaaagttgggggaggagggcagcagaagtagtagtggtctccttattgacagtgggtggaaagagaactaacctgagagcacgtgttacagattgcattgtgccccaccccccatcttgaaactcttaactctcaatacctgtaaatgtgatcgtatttggaaatagggtctttacagatgtaatcaatttaagatgaggtcattagggcggaccctaatccagtcttaccggggtccttgtagaaagggggaacttggacacagagagagacctgcacacagagagaacactgtgtgaagatggagacagagattgggatgacatatctacaagctaaggaacatcaaagattgccagcaaccacccggcactaagggagaggcatggaacagattctcccctagagcctccagaaggaaccaaccctgccgacactcatatcttggactttgggcctccagaactatgagacaacaaattgttgttccagccatggagtgtgtggtactttgtactgcaccagtaatatgatgtgcaactctgatttgacacctaagaaggttccagcctgaaattacacttcctttggttcgaaaaacctggagctaagagtttaaagtagaatacggggatttttggctctcctgggtgcctggaaaaaggaaatgcaaatccactttcagcctcaaataatccccagaggtaatgttctaagaaatacacattaactgtcaaaaagcatagatc

SEQ ID NO: 390713 - DNA, 1000 bp, Homo Sapiens; identical to SEQ ID NO: 281674

SEQ ID NO: 390714 - DNA, 1000 bp, Homo Sapiens; identical to SEQ ID NO: 281675

SEQ ID NO: 390715 - DNA, 1000 bp, Homo Sapiens; identical to SEQ ID NO: 206213

SEQ ID NO: 390716 - DNA, 1000 bp, Homo Sapiens
aattcaaggtcaagggagagtcccttttctgtcccctgccatccaaagcagttaatggagggagaggaaatggcgtgtgggggaggggaccgcagagtgaggccaaacgaggagcaagggcgcgtcaggacggagtggtgccgggcgccttctgcctgaatggtcgatagaggaacttggggaggttgattttgggtgctttccttaaatgctaaaccgaaagaacttccgcgtttcttgtccctgaaaagcttgcaacggtgaaggattcgcgttgctccttgaggtgaccctatatggggtcaatcccagccaaaggaatgattacgattaccaggggccagatgcagggaggtgggcggggcgtgggaaacgcgggaaggccgggccgggtaggtccacacagcgactcacgtcgctgcacgactctgcacagcccactggagggaacaagcagttctacacactttgagacccctatggaggcgagccccaggacactagtggaagtgcgctcttttcgccggccaggagcgctgcctgccaaagggcagtactcgtctccgccccatgccatgcagctggatggctctgctgtccgctcgccgggcccccacgtgacctactgcgcgggccgccgcctccaccgcgcccaggccccgcccccgtgacgtctcatcgccctctgcctgtccgagcgttcggctcttttgcgtttgctgattggccagcccaggtgacagcgcccacccccaccccccctgacacgcccctggagccttgggggtacgcggtggggggcggggcctgggccggaggggcggggtgagaaggctgcgcgcgggtaaaggggccgcctcgagcgcggtccgagcgttcagcggacgcgcgcggcctcgatctctggactcgtcacctgcccctccccctcccgccgccgtcacccaggaaaccggccgcaatcgccggccgacctgaagctggtttcatggcagcctca

SEQ ID NO: 390717 - DNA, 1000 bp, Homo Sapiens
caaaggcgattttttcccccaatgcgacttaaaggcaataggcccaggaaatggagcttttattggcacccgatttccaattttaaaacacaaatatttttttttcaagggagggggtggccattttccaaatcgttgcgattgggggcattcaattcatgaagccttaatgttttcctagatgccaaagccagggatttccttacgggttaaattaacagaaaagggtgggccaaaatgattggaaggaaatttttttaggggtaggaagaaaacttgttataaaaaactgttacttacagaggaattatgcatattgggaatataacttaattagggtgtgagttttattgttactggactataaagttagattttataaggcaaagagggttaaaatttgtactgaccagccttattttctatcaaccccaacaacaagtgtgggccaatgccaaggcaacataaaggaggatagctttgaaatgactgactactggttctaggctgaacggcccaagagttgaatagaagaacaagggccaaagagcacagatttatgaagatttaccaagcgaatgagaaggcacaaattttgtccggaaccaaggtagggaccccagagttttaaatacccagaagaagttgccaaccagaccgttgggaactgcagtctaaggtgatgaatgggtttgtggggggaagatgatagtcacagggagttatgaaggagtcttcacgtgagccaagcagtatagatttctgaaggcgtttatggcaggagaaacaaaatacgcagggaaagataatactcagtgttaaagacagatgtatgcctggaggccaagacagaaaatgagctgcagagagaacgcagtagcctgtagccagccagtaaagaagtgagggtagttcagcggactcgcgcggcgtcgcttctttggattcgtcaccctcccctccccctcccgccgccgtcacccaggaaaccggccgcaaa

SEQ ID NO: 390718 - DNA, 1000 bp, Homo Sapiens
gaggtgtggccctgttcttcctcaccccagttccatgacattggctggtataggagccacagtcaggaaagcacttgaggcagcatctgttgggccacccccggctcagtgctggaatgttgcagtgtaggtttcccagggaaggggggtgggggtaggtgggctccacaggatgggggaggagcatgtccactgagtatcttccttatgttgctgtgatattgatagcttttattttctaatttttaaaaaatggtcatattatgagtcaaagagtatcaaatcagtgttggatggaccacccaagggtgaggagaggggctggaagccctgggcattaggagaagggagtgggtgctggcatggacatgactggatagaattttctcaggagggagcttggtggattttgaaggtaaaactttctgggtttatcatgttttaattttagagacagggagtgatgaatcatcaccggttgtccccttatctaactccataaaagtgggaatttcaaaagaacacctcatccaaggagctggggcagacttcattgattctagagagacctgtttcagtgcctactcatccctgccctctggtgccagcctccttaccatcacggcttcactgaggtgtaggtgggtttttcttaaacaggagacagtctctcccctcttacctcaacttcttggggtgggaatcagtgatactggagatggctagttgctgtgttacgggtttgagttacatttggctataaaacaatcttgttgggaaaaatgtgggggagaggacttcttcctacacgcgcattgagacagattccaactggttaatgatattgtttgtaagaaagagattctgttggttgactgcctaaagagaaaggtgggatggccttcagattataccagcttagctagcattactaaccaactgttggaagctctgaaaataaaagatcttgaacccatgctctctgcctagttcttgatgg

SEQ ID NO: 390719 - DNA, 1000 bp, Homo Sapiens; identical to SEQ ID NO: 201643

SEQ ID NO: 390720 - DNA, 1000 bp, Homo Sapiens; identical to SEQ ID NO: 201641

SEQ ID NO: 390721 - DNA, 1000 bp, Homo Sapiens; identical to SEQ ID NO: 114799

SEQ ID NO: 390722 - DNA, 1000 bp, Homo Sapiens
tggagggttgattgatggggcagatacttgaggcaggatgaaagctctacagcattccaggctaagcctagctagatcagtagagtcggggaaagggagagaggacaaggagaggattctctgctccccctcccccaactacaaggcctccctccttccattttttcacagggttccaaaaggtcccaggtgtcctctccgtgcagtcggaaaaagccccgcatgggccagcaagtcctggataatttctttcggtctcacatctccactgatgcacacagcctcaacagtgcagcccagtgacacctctgaaagcccccattccctgagaatcctgttgttagtaaagtgcttatttttgtagttattttatgttgtatttttttgagatgggggtctcgctatgttgctcagactggtttcgaactcaggtgattctggcctcaagtgattctcccacttcagcctcctaaagtgcttggattacaggcatgagccaccacgcccgcccttttgtagctattttggacagccttccaccctctccctagccccctcaccccttatatctgagggagggacccagaaaagtggtgacgttctgcttggttctgactttctctggctgaactcccagccagccccgggcagatggggttggagtgggggtgttctgtccagactgatctgccctccaacccccaggagaaaggcaaggcagctacagggagaacctgccagtggctgacacacaacaccctctgtttacgtctcaggtcagctctaattggagtggtggcatcactctggagtaggtagttgggctcaactctcacccagcccctccccacctgcagtggtcgctccctagggggagaggaagcacaggagaagatttgttctgttttaaattcctacctcaaatacgaaataatttatttagggttatgttacatacggagtgaaacaatacagaaaagcaaagggctaataatgacag

SEQ ID NO: 390723 - DNA, 1000 bp, Homo Sapiens
agctgtggaccctaccctatgaactggggagctttttcagccactctggggcagtcactaatgttgcctttttctcttttgccctcaggctatgtgaaggcattggggctgtgaatgtctgtgagtatttggggtccagtgtggacagatttactaactacctgtgatggagggcagagtttggaaaaaggagtgttactgagaatgtggaatattaaagagtgggctggcatcacaacaggagggatttggggtcagacatccaaaagaccccagctcttggactagatggacctagaattgtccacaaagatgcttctgacttttcataccagagctcaggtcttgggcaggggcggttgtcaggaaggcaggatggcttgcccttcagaattttgactcagccttcggggttcacaggtgtcagcagctcccggggcggggtcgtgtgcggggacctctgcgtgtcaggctcccggccagtgactggcagtgtctgcagcgctccgtgcaacgggaacgtggcggtgagcaccggcctgtgtgcgccctgcggccaattgaacaccacctgcggagggggttcctgcggcgtgggctcctgtggtatcagctccctgggtgtggggtcttgcggcagcagctgccggaaatgttaggcaccccaactcaagtcccaggccccaggcatctttgcctgccctgccttgcttggcccatccagtccaggcgcctggagcaagtgctcagctacttctcctgcactttgaaagacccctcccactcctggcctcacatttctctgtgtgatcccccacttctgggctctgccaccccacagtgggaaaggccaccctagaaagaagtccgctggcacccataggaaggggcctcaggagcaggaagggccaggaccagaacctgcccgaccaactgccttcctgcctctccccttcctcctctgctcttgatctgtgtttcaataaattaatgtagccaa

SEQ ID NO: 390724 - DNA, 661 bp, Homo Sapiens
cataagaggggcatgatttgacttgcattttaaaaggaatgctctggctattatacttaactttcaaaggagttgatgattatttctgcgattttaggtatattacagctaatactgacacagaagaacagagttttccagtccctaaggcatttaacacacgtgtagaggaattaaatttagatgtccttcttcagaaggtagatcatttacgtatgagtgagtctggcaagtcggagagttttgaactacttcgtgaccacaaagaaaaggtaagagacataacaatagcacttcgtatagttccattttttaatttaatctgccatctgtttcagttataactataataattgtgtcatggttcccacattttgatgattgatgtaaaatttctctataaaatgactaaaattttttaaaatttattttttatttaagatgcataaaattttaaaaaagtaaatgtaaaagtttattagactctaaggtcataaaaatgagaaccagagctataattacgcagatttacttttatttgattttttttttttactaatttatatatttaacaaatattttgagacagatatgggtattcaaagctatttctaccaatggtcatttgttgattttgcagtgtttagtgttgggtctgaat

SEQ ID NO: 390725 - DNA, 1000 bp, Homo Sapiens; identical to SEQ ID NO: 281680

SEQ ID NO: 390726 - DNA, 1000 bp, Homo Sapiens; identical to SEQ ID NO: 281681

SEQ ID NO: 390727 - DNA, 1000 bp, Homo Sapiens
gaggagggaagctggccccgaagccgggccctgtggagtgtttccaccaccacattccctcgctcggaggccccatcttcttcctcagaccaggttggtgggtcttcctggggaagactgcctccttttaggattccttccggcagttcgggggcgcttcggcgttgaggagcttgggggtcgggagggtggggacgcagagggatgtcccggagttccagggtggagaaggtgaggcgagggtcccgccgaagggctctttggcgtagacggctcagtggggagcgggaccccgtgggggtgcctgggatcaaagtgccgtagccagagtctgaggtatcatctggcacaaggggagcatcttcatctgtgtcttctgtcaccaccaggtgggggataatggtcgagaactcaggagtcctacagttaatggcaaagagtcagatgcgtaggggtcaagttcaagtccagggagtttcccttgatcactacatccagaaatggcccctcctccaaacttattttggtatcatctttccatcgcactgtgattgtttttctcatctggctggctagattttaagctcctaagagagtacgggctgcctctatactgttttatccatagcatctggtccaggatcttgtatcgagtgggtagtcaggtttttgctgagtggttcctgaacttacctgatattatcctcaatgatcgattcttcttttctccttaagctgctgccaagcagtggtgctatcctagacgaacctcacactccccggggatttggcagctctaatattctgcagatccacacctaccttcactctcgagcttgctcctctcacagtgctcctgtgtgactctaggcaggctaactctgtaggctgtctgtgccctatcccccacctccaacccaacacggctggtaccaaccttccgacccaacacagctggtaccgagcttccctaccctgccctacgcctgcgttcctctat

SEQ ID NO: 390728 - DNA, 1000 bp, Homo Sapiens
cccaggagtttgagaccagtctgggcaacatggtgaaacccatgtttcggtctcaacaaaaaatacagaaattatccaggtgtggtggcacgtgcctgtgttcccagctgcctaggaggctaaggcaagaggatcacttgagcctgggaggttgaggctgcagtgagctgtgattgcaccacttgcactccagtccagcctgggcaagagtgagaccgggcccaaaaaaaaaacaaaaaacgtgtactcacttcagatctaaatagcaatggcagagcatgatggaaaattaagaagttcaagtctaaagaatttggtacaaagtcttgagttacttatctcattgttataaattaaccaaaaaatattaataattttcagaagagccagtctatcttatttgctttgcaggtatttgcatttgatgtcaacagaaatcgagtacttaattcttatccaaagaggattactgaagtttttccagcagtaataccacaaaatcatcctttcagaaatatagattccgcttattactcctatgcatacaactccattttctttttcaaaggcaatgcatactggaaggtagttaatgacaaggacaaacaacagaattcctggcttcctgctaatggcttatttccaaaaaagtttatttcagagaagtggtttgatgtttgtgacgtccatatctccacactgaacatgtaataagaaaaagtaggaaatggagggtcataggacttcgctaaaattctgatactgtttacaaagaaaaccggattttcagtagctgaagaaaatatggcactgtaagttaaaacccaatgggaaaagccttagttgaacttttaaaatacttgatttaaaaacaattgctcaggcaaaacataattcataaactaaaaggtttaaaaaaacaaaaaaacaaaaactaagcatccaatgatctttgcctgctttctactctgtggggctctgcccatcccaactgcttggc

SEQ ID NO: 390729 - DNA, 1000 bp, Homo Sapiens; identical to SEQ ID NO: 281682

SEQ ID NO: 390730 - DNA, 1000 bp, Homo Sapiens
ccaggccccagttacatctggggcaatgacctcgccactctgcctcggtctcctcctgacagagcgggaacagcgtaccgccaccctatctgttagcagggatgcgcggagttcgttcgggcgatgcgctagtctggtgcctggcacccgagcgctctcggcgggcatcagctattgcttttattatttccgttactcagaagaaaatgcacagaagaaaatcgcagaatgaacaacgacaaaaggctggcatccccaccccagcggcccggcgcacccagctcacctggcgaggcgctccctcccgcgggtctccggcagtccaggccgctcgcggacggcgccccgggacccagtggccaaggggcccgagccgcgtagggctggtcccagaagcccagacgaggctgcacgccgcccactcgctggagaggcccggatccaccccggcccggaagagaccactgcgagcgcctcaaccccaggccggcaatcctagccaagcctggatggcccaagccaggagaacccccgaaaggccgcgagctgtccccgaaaccccgccaaccgcgggagaactaccactcccggcatgcctccggccccacgccgactacacttcccaggggacgccgcggtgcgcgctgcgaactccgggagaggaaccgcctccgccaacgagagctctcaaaggcgacagtgcgcggaggggctgcagtgcgagggagtacgcacgccgcacacgaggcaggaggtctccagctgctggccgtgctgcctacagcccgcgcacttgttaagcaagcggagtagtttgaaaaaacaaaaccggaaattagattcatttaggaggatcagtgtgctgtagctcccaccgctggttgtgattacttttctgttgatacaaaataatttacataatgtatagggtccatgtgagtgcttgttacgtgcatagactgtaatgatcatcaagtcacagtatttggggtatccatca

SEQ ID NO: 390731 - DNA, 1000 bp, Homo Sapiens
tacaaaacagacatatagtgaagtgggaaaaacatgagggagaagcaaagaagatatggtaggaattagaattggaggtgaaggaatagtggggatatggcaagggaggggaattaaaaatggaagtgataaaggtaggaacatgactatggaggcgaagacttaaagtagaaaaaaatataaaatatacttgatgcctataatttttcgcataaagatacctccctttactacatttcagtcgctgtctcttgcacacatacatgcacacacacagacatgtggctttcatccattcccacaatgtaatgggtgtgaagaaggcagaggggcagggaactcaaactttctgataaaagcacatagaatctcctctcttttaaagcacattaagcagctctccctcagctttgtgtgagccccatttccttccccagcaatctcctgaatgccctggttacctccttgttcctcagggtgtatatgagagggttaagtgaaggagtgcccactgcatagaagagaccaaagaacttgcccctctcttgggcatagggatttttgggctggaggtagacagcaatgactgagctgtagaagagggtgaccacagtgagatgggaggagcaggtcccaaaagctttcctccgcccttttgcagagttaatcctcagcactgcccaggtaatggctccgtaagagacaaggatgaggctgagaggcacaaccaagatgaagacactggcaacagccacctggatctcattgtaggaggtgtcttcacaggagagtcgaattagagctgggacctcacagacaaaatcatccacctgccgatcggggcagaagggcaggtgcagggtggatggtgtctggaccactgactccactagcccaatgacccaggccacagatgccagctgccagcacaggcgggggtggatgatggtggcatagtggaggggctggcagacagccacgtagcgatcaaaagccatca

SEQ ID NO: 390732 - DNA, 1000 bp, Homo Sapiens
taggcaacctgggcatgataatgttaatgagactggactctcgccttcacacgcccatgtacttcttcctcactaacttagcctttgtggatttgtgctatacatcaaatgcaaccccgcagatgtcgactaatatcgtatctgagaagaccatttcctttgctggttgctttacacagtgctacattttcattgcccttctactcactgagttttacatgctggcagcaatggcctatgaccgctatgtggccatatatgaccctctgcgctacagtgtgaaaacgtccaggagagtttgcatctgcttggccacatttccctatgtctatggcttctcagatggactcttccaggccatcctgaccttccgcctgaccttctgtagatccagtgtcatcaaccacttctactgtgctgacccgccgctcattaagctttcttgttctgatacttatgtcaaagagcatgccatgttcatatctgctggcttcaacctctccagctccctcaccatcgtcttggtgtcctatgccttcattcttgctgccatcctccggatcaaatcagcagagggaaggcacaaggcattctccacctgtggttcccatatgatggctgtcaccctgttttatgggactctcttttgcatgtatataagaccaccaacagataagactgttgaggaatctaaaataatagctgtcttttacacctttgtgagtccggtacttaatccattgatctacagtctgaggaataaagatgtgaagcaggccttgaagaatgtcctgagatgaaatattgtcatgaccatggtgatgcctttgtttcctaataaacattaaatcgaaatctttggctcacatgtcctagcgttctgatggtgagttttaatattctctgtgagtctatgttgagtgtctcagctaaaaagctcatgctgggtaaaaatgagatttttctaggctttgctcctccacatatattccatgaatca

SEQ ID NO: 390733 - DNA, 1000 bp, Homo Sapiens; identical to SEQ ID NO: 281685

SEQ ID NO: 390734 - DNA, 1000 bp, Homo Sapiens
cagatgacagcagttctgtgtgatcagtgcagtagtgacagtgcatgccaaggcctgtgggggtccagcgagtgctgactgctgggccagggagttcagggacagcatcacacagggggctacttgggctgggtctggaaggctgaaggagagtttcccctctgtgaggaggagggagtttcaggcagaaggagtggtgcatgcacaggcatggaggtcagagagatgggccagaggagggaggcaagggccacatcaccaagggccttgaactctaggctaattccaggatccacagaaggcatctgagcagtggcctggccagatctgcattttggaaagatcacttgggccatgtggatgaagggctggagactggaggcagagaaaatgagggcaatgatgtgagaaatttgagtccaggaaagaaatgacaggttgttagatattagctcaaatggaagggagatcgagccaactcattttacagatagggaaacccatgtcagacagggtccagtggcctgtccaaggtcacgcagcaagtcagtgcctgggggagcagggactgagggcaagggagggacaaagcccccaccccaggaaagctaagtggctggtctcaaagccagcagaggcctctgcaggtagctgtggtttgtgtttgagcagaatcaacaaggtaaatactaaacttcctcttcaaccagatgcaaagcaagaatggacaggagggcagggacgtgcacatcacacctcagccccagagggccccagaggtggtgaccagcggagcctaagaccaggaaggagggaggtgcgagcacaggacaaggcattaagagggcctttaggtgatggtcagaggaaggaatgtggagtaggatctgctggtacatggtcgggctttgtttgtgcaaacccccttttaggaacaggcccccctttctcagagacctgctccctctcctccctctccctctcccccatggttcctgat

SEQ ID NO: 390735 - DNA, 1000 bp, Homo Sapiens
agtgccagtggccactccacctccgccaggccctgcccagcctcacccaccttcccaaacacacagtgtcagaactcaggggcagcggcctctgggacggggctggggctcctcggtgggcatcagaaaatgaaccatgcggagccagcggtgtggctgcggccccgcccaggccccgcccccagtcccgcccccagtcccggccccgcccccggcccaggctcaagtctgcttggcttgcagcatttcgatgagcaggttgttgcggggcatctcgttgcccaggtgcttgtggtacaggtactccttggcctgcatgctcagggcccgcacctccaccaggcacagcagcagctgctggaatttgtccccgcagtgcgggtagtggcacagggtgtagtcaagcagggcggcgttggccttctcctgagcgtctttcaccaggatgtggttattcaggaacttcaaatctgcaaagggaggttctcggtcaccatcgcgtcaccatccatgcccatcagggctgggccaacaccgtcaccagcatcaccaataccaccttccctatgaccatcaaagacatgggcattgctgccaccaaccatgcaacatggtctccccgttggcaccgtgtcgccatcaccattgctgtcaccctggttgacaaacaccaccatcgtcaccaatacccacatgcctgtgtttttcatgaacatggccaccgccaccatcaaccacccaaccacagtcacctgtcaccatcatcactgccatcatcatcaccacagtggtcacaatgaacaagaattatgaagcccatcaccagcctccctcggggaggatccctgggcagttattgaacctctcggtcccccatctgtaaaatgggcgtgacgacagtaccaacttcacaaccttgtcctgagaatttagggagccgctgtgtggaaagtgctctgaagaacagtgtctggcacgtgagaagctcggtgggttgggt

SEQ ID NO: 390736 - DNA, 1000 bp, Homo Sapiens; identical to SEQ ID NO: 114800

SEQ ID NO: 390737 - DNA, 1000 bp, Homo Sapiens
acactttcgaccgctaccgcagccagtccacggccaaggtgagggctcctcccgtggctgcccctgccctgaagctcagggcctgacctggtgcagtggcccctggggttggagcctgaccggtggcccccgttgcagagggagaagcggtggagtgtgtcctcgggtggggcagccgagcggagcgtgtgcaccgtgagtccccccgggctgggtggggtgaggtgggcctgagggacccgtgccctccctgccctcctgcccctcccaggcaaccccagcctgtctcaccaagggcctcccccacggcatgggcaacagtctggggccgcctgggggtggggaaggtgctgcagatggcgaacaggggtggaggtcctccaggattgggagggagagtggtcagcaggagacatgtcctgggggccactgagaacaggggtcaggagccccaccctggaaccaggcaggtctgtatttgaattctgcttgacacctgattgctccataactttgggcattaccagccctctctgggactcctcagtttgatcgtctgtacaatgggtaaggatattggcccatctccacggcccctcccgctccctccacaggataagcccagccctggggagcgccccagcttgtcccaacatcggcgccatcagagctggagcaccttcaaatctatgacactgggctcgctgccccccaagccccgagaacggctgactctgcaccgggcagcagcctgggagcccacagaaccaccggatggtgacttccagacagaggtgtgagtgccacgctggactgcccactgcatataaatatatatatctctctattttcacactccactttggaactacccaggagccagcgccctctcccctctcccgagggctgggcagggaggcgccgtggactcagccaggctgggggagccggacatggcttggcctggggtcccagggcccttccttgtttctcagaggcc

SEQ ID NO: 390738 - DNA, 1000 bp, Homo Sapiens; identical to SEQ ID NO: 281688

SEQ ID NO: 390739 - DNA, 1000 bp, Homo Sapiens; identical to SEQ ID NO: 281689

SEQ ID NO: 390740 - DNA, 1000 bp, Homo Sapiens; identical to SEQ ID NO: 281690

SEQ ID NO: 390741 - DNA, 1000 bp, Homo Sapiens
ccatcttggattctcgcctccatactcccatgtatttctttcttggaaacctctcattcttggacatctgttacacatcctcatccattcctccaatgcttattatatttatgtctgagagaaaatccatctccttcattggctgtgctctgcagatggttgtgtcccttggcttgggctccactgagtgtgtcctcctggctgtgatggcctatgaccactatgtggccatctgcaacccactgaggtactccatcatcatgaacggagtgctgtatgtgcaaatggctgcatggtcctggatcataggctgtctgacctccctattgcaaacagttctgacaatgatgttgcctttctgtgggaataatgtcattgatcatattacctgtgaaattttggcccttctaaaacttgtttgttcagatatcaccatcaatgtgcttatcatgacagtgacaaatattgtttcactggtgattcttctactgttaattttcatctcctatgtgtttattctctcttccatcctgagaattaattgtgctgagggaagaaagaaagccttctctacctgttcagcgcactcgattgtggtcatcttattctacggttcagccctttttatgtacatgaaacccaagtcaaagaacactaatacatctgatgagattattgggctgtcttatggagtggtaagcccaatgttaaatcccatcatctatagcctcaggaataaagaggtcaaagaggctgtaaagaaagtcctgagcagacatctgcatttattgaaaatgtgaaaaaccttgggcatgcgatatcctcaatggggcaagagagcttgtcttttgtatttagatactgcaaaacctactgtcacgagagcttgtgtgtttgcaaaaccaactattagattcccattcttttcaacgtagaattttcatgctcatgtaaccttcttaatagtgccttgtctgctgggtttgtagctgtaagcagt

SEQ ID NO: 390742 - DNA, 1000 bp, Homo Sapiens
agcttcacacacccatgtacttcttcctctcacacctggccatcattgacatgtcctatgcttccaacaatgttcccaagatgttggcaaacctaatgaaccagaaaagaaccatctcctttgttccatgcataatgcagacttttttgtatttggcttttgctgttacagagtgcctgattttggtggtgatgtcctatgataggtatgtggccatctgccaccctttccagtacactgtcatcatgagctggagagtgtgcacgatcctggttctcacgtcctggtcatgtgggtttgccctgtccctggtacatgaaattctccttctaaggttgcccttctgtgggccccgggatgtgaaccacctcttctgtgaaattctgtctgtcctcaagctggcctgtgctgacacctgggttaaccaagtggtcatatttgctacctgtgtgtttgtcttagtcgggcctctttccttgattctggtctcctacatgcacatcctcggggccatcctgaagatccagacaaaggagggccgcataaaggccttctccacctgctcctcccacctgtgtgtggttggactattctttggcatagccatggtggtttacatggtcccagactctaatcaacgagaggagcaggagaaaatgctgtccctgtttcacagtgtctttaatccaatgctgaaccccctgatctacagcctgaggaatgctcagttgaagggcgccctccacagagcactccagaggaagaggtccatgagaacggtgtatgggctttgcctttaaaacatgtggtttgctgaagcaagaattttgaatatattttgtagaagaagtttaatataaaaatggtgagtgattgaattcaagctttgaaaatagggcaatattcaatggaatgtatgttctctaaaatcgaggaatcatctcagtagataggagagcaaaattatcagaatatttagcctttcctttaaaagtgttag

SEQ ID NO: 390743 - DNA, 1000 bp, Homo Sapiens
catttattctgttcgaaccatgtgcaagctaggatgtgagagacaccatccaatttccaaaaaaattcaattaccaaacaaatgaagcttaaatggcaccgggtagagccaactttagaaatgaccaagacagagagctttccctttcaggcagtaaatgccatggttagtcaggcaggggagtctagcaggaggtagagaaggtggaggggtgcagaggggacggtcttcaggagggaggaggaggcgcaccaggtgtgtgagctgggcgcacaccaccaacgccctgcaaggagcaggggcccaagaaggctgagggggccaagtctccaagctgcgctctctggtcccaagatgctaattttgaggtggcagagtgagtcagggaagggaaggcagtgtgtccagaggaaactggatgatctgggaggacagtgtggagtaaaggaggtgtggagtcaagcttctccaggaaaaggataaggaagaggcccctggagagaggcaacagcatcagggaaggacctgttttggaagcagacagttccttgtcatgagggtggcagtcgacccatgagagcagaaagcagaggaggggatggtcccagaagcccagggttggtccctgggagccagctgagcctctgccttccccacaggtgcgctcagccgtgaggaagaggtggcaccgctggcaggaccatcactcccttcgagtccccatggcccgggccatgtccatccctacatcacccacacggatcagcttccacagcatcaagcagacggccgctgtgtgacccctcggtcgcccacctgcacagctcccctgtcctcctccaccttcttcctctgggttctctgtgctgggcaggctctcgtggggcaggagatgggaggggagagaccagctctccagcctggcaggaaagagggggtgcggcagccaagggggactgcaagggacagggatgagtgggggccaccaggctcagcgcaa

SEQ ID NO: 390744 - DNA, 1000 bp, Homo Sapiens; identical to SEQ ID NO: 281691

SEQ ID NO: 390745 - DNA, 1000 bp, Homo Sapiens
acttcacagcagctgttggtcactgagagccagtgcaaccctacccactgggcctgctcctgtaattaatgacacacgcggaccaagtaggaatggtctttgaagatattgcaaaagggtgacagtcataggagctagtcagtcaaatgtgagaaactcatatgtgtttgggatcattttaaccgtttaaaaatacagaaagatgtctgtttgattgttttcctagccaattggcttgctggctttcaaataatatgtataaatctgtgtgttttcttccagggtctttcttccctgatttcaagccctctgaaacagtttttaaaatagtattttggctcggatatctaaacagctgcatcaaccccatcatatacccatgctccagccaagagttcaaaaaggcctttcagaatgtcttgagaatccagtgtctctgcagaaagcagtcttccaaacatgccctgggctacaccctgcacccgcccagccaggccgtggaagggcaacacaaggacatggtgcgcatccccgtgggatcaagagagaccttctacaggatctccaagacggatggcgtttgtgaatggaaatttttctcttccatgccccgtggatctgccaggattacagtgtccaaagaccaatcctcctgtaccacagcccgggtgagaagtaaaagctttttgcaggtctgctgctgtgtagggccctcaacccccagccttgacaagaaccatcaagttccaaccattaaggtccacaccatctccctcagtgagaacggggaggaagtctaggacaggaaagatgcagaggaaaggggaataatcttaggtacccaccccacttccttctcggaaggccagctcttcttggaggacaagacaggaccaatcaaagaggggacctgctgggaatggggtgggtggtagacccaactcatcaggcagcgggtagggcacagggaagagggagggtgtctcacaaccaaccagtt

SEQ ID NO: 390746 - DNA, 1000 bp, Homo Sapiens
atcaggatcgattcccggcttcacacacccatgtatttcttcctggttaacctgtcctttgtggacatttgttactcaaccaccatcaccccaaagatgctggcagatttattatcagagaagaaaaccatctcttttgctggctgcttcctacagatgtacttctttatcgccctggcgacaaccgaatgcatcctctttgggttaatggcctatgaccggtatgtgaccatatgtcgcccgctgctttactccttgatcatgtccaggacagtctgcctaaaaatggcagccggggcttttgctgcagggttgctgaactccatggtcaacactagctatgtcagcagcttgtcattctgtggctccaatgtcatccatcacttcttctgcaacagtcccccactttttaagctttcttgttctgacacacacttgaaggaaagcatattttccacttttgctggtgtgaataaggtcggggctctgcttgtcatcctctcctcctattcctacgttctcttctccattttttctatgcattcaggggaggggaggcacagagctttctccacgtgtgcctctcacctgacagccataatcctcttctacaccacctccatctatacctacctgagacctagttccagctactccctgatcaggacaaagtggtttctgtgttctacacagtggtgatccccatattgaatcctctgatctacagcctcaggaataaggaagtaaagaaggctttagcgaatgtaattagcaggaaaaggatcccttcatttctgtgatttttttgcctaaaaatctgagctaaagagcatattttagttactttcaaagtctagttcatgcctacaatttttgttagaatattttctcattaaacacattctgccaatactcaaatatttgtatgcagttagggataaagcaaattacccaaaatgataaaagaccaaggggcctttactttataatcattctaaat

SEQ ID NO: 390747 - DNA, 1000 bp, Homo Sapiens
ttcacacagaaacctgtctatgcacatccatgtactatttcctgggcagcctttctgggattgaaatatgctacactgcagtggtggtgccccatatcctggccaacaccctacagtcagagaagaccatcactctcctgggctgtgccacccagatggctttcttcattgcactgggcagtgctgattgcttcctcttggctgccatggcctatgaccgctatgtggccatttgccacccgttgcagtaccctctcctcatgacattgactctttgtgtccacttggttgtggcatcagtcatcagtggtctgttcctgtccttacaactggtggccttcatcttctctctgccattctgccaggctcagggcattgagcacttcttttgtgatgtgccaccagtcatgcatgttgtttgtgctcagagtcacattcatgagcagtcagtgctggtggcagccatactagccattgctgtgcctttcttcctcatcaccacctcctacaccttcatagtggctgctctgctcaagatccactcggctgctggccgccaccgggccttctccacctgctcttcccacctcactgtggtgctgctgcagtatggctgctgtgccttcatgtacctgtgccccagctccagctacaaccccaagcaagatcggttcatctcactggtgtacacattgggaaccccactgctcaacccacttatctatgccctgaggaacagtgagatgaaaggggccgtagggagagttcttaccaggaactgcctttcccagaacagctaggaaagacgaggggacagcctatcaggcaagtatttggttccagcccaccaaatctgtatgaaactgagatttctatcatttggtgttaaaactcatctaaaagatggtataaattatatggatactgtttatgtgtgccaaagatttttaaatatttctacaatttgactctgtaatttctcttcttggaaagaactaca

SEQ ID NO: 390748 - DNA, 1000 bp, Homo Sapiens
ccaacttaggatctagggataaaaccatctcctttgccggatgtatcacccagtgctatttctactttttcttgggcacagttgagttcctcctgctgacggtcatgtcctatgaccgttatgccaccatctgctgccccctgcggtacaccaccatcatgagaccttctgtctgcattgggaccgttgtattctcttgggtgggaggcttcctgtctgtgctctttccaaccatcctcatctcccagctgcccttctgtggctccaatatcattaaccacttcttctgtgacagtggacccttgctggccctggcctgtgcagacaccactgccatcgagctgatggattttatgctttcttccatggtcatcctctgctgcatagtcctcgtggcctattcctatacgtacatcatcttgaccatagtgcgcattccttctgcaagtggaaggaagaaggcctttaatacctgtgcttcccacctgaccatagtcatcattcctagtggcatcactgtgtttatctatgtgactccctcccagaaagaatatctggagatcaacaagatccctttggttctgagcagtgtggtgactccattcctcaacccctttatatatactctgaggaatgacacagtgcagggagtcctcagggatgtgtgggtcagggttcgaggagtttttgaaaagaggatgagggcagtgctgagaagcagattatcctccaacaaagaccaccaaggaagggcttgctcttctccaccatgtgtctattctgtaaagctccagtgttagaaagagaggagctgccttagtgaaagagtgagctagctaaggaattctgaatagtctatagtggaaagactgactgcggagacagagacttgaacgctggccttggttttcactttaatctgtgaccgcagctgtgtcaccagccattctgactctcagtactctcagctgaagtgcaacagggctggacttgatgatct

SEQ ID NO: 390749 - DNA, 1000 bp, Homo Sapiens
tgtacattgaggtgcacacacaggcatgcacacccctctgttcctggccgtgcagaatggaagggggttgtatggccaggcccaggggctctcatggggttcaaggccagcctcccatacagggtcaccctagaatgggagctgggagttggtggtggggagatgttaccacatttcggttatttaacattcaagccttcattcctgcctgtgagatgaggggactcaggattgtaagtgaggcccatacattcacacagacatttactaagctgtggatacatcatagtgctattaatttgaggggtgcaaaatctcacagtgcttaagtgggtggacttcagagcctgttcaccacagtttgagccctggctcagccacgtccctttacctgagcctcctgggcctcagtttccttgtttacaaaagagaatagtaatgaataggatgggcctaggaagtttgtgacagtgagaggccacacggggacgcagcacagtgcccggctcataggaggtgctcgctgggtctcatgggtgcccgacagcacgtgcttggcaaacactatggagaggtggggcagacccgagtcacaatggctggggagggaggaggagggatggggtggggctcccccacctgctgaccccgtgccctcactgcccgcaggcttcctcatcttcatctggtactggtccatgcggctgcaggcccggggtggcccctcccctctgaagagcaactcagacagcgccaggctccccatcagctcgggcagcacctcgtccagccgcatctaggcctccagcccacctgcccatgtgatgaagcagagattcggcctcgtcgcacactgcctgtggcccccgagcccggcccagccccaggccagtcagccgcagactttggaaagcccaacgaccatggagagatgggccgttgccatggtggacggactcccgggctgggcttttgaattggccttggggactactcggct

SEQ ID NO: 390750 - DNA, 1000 bp, Homo Sapiens; identical to SEQ ID NO: 281693

SEQ ID NO: 390751 - DNA, 1000 bp, Homo Sapiens; identical to SEQ ID NO: 281694

SEQ ID NO: 390752 - DNA, 1000 bp, Homo Sapiens
tcccctagtgcatccagggcccctcttcaacctgaccagcccctttctgccctgcagagcaccccttgggaggccgggaagcctgtggcatggacaccctgcccctgaacggcaacttcaataacagttactccttgcgaagtggggatttccctcccggggatgggggccctgagccgccccgaggccggaacctagccgatgcggcggcctttgagaagatgatcatctcagagctggtgcacaacaacctgcgggggagcagcagcgcggccaagggccctccaccgcctgagccccctgtgccacctgtgccagggggcgggggcgaggaagaggcgggcgggcccgggggtgctgaccgggccgagattgaacttctctataaggccctggaggagcctctgctgctgccccgggcccagtcggtgctgtaccagagcgatctggacgagtcggagagctgcacggccgaggacggcgccaccagccggcccctctcctcccctcctggccgggactccctctatgccagcggggccaacctgcgggactcaccctcctacccggacagcagccctgaggggcccagtgaggccctgcccccaccccctcccgcaccccccggcccccccgaaatctactacacctcgcgcccgccagccctggtggcccggaatcccctgcagggctactaccaggtgcggcgtcctagccacgagggctacctggcagccccaggccttgaggggccagggcccgatggggacgggcagatgcagctggtcaccagtctctgagggcacctcatggaccaggggctggtggcccaggccagggagggaaccctgggcagggctctggtgggagagggagacagatggaggcagtggctggtgggccactctctccaggtgcccctcagccatgggccctacagtcccctcaggggactctaacctgggggcctgaggtgccagggttcacagacagggtttcc

SEQ ID NO: 390753 - DNA, 1000 bp, Homo Sapiens; identical to SEQ ID NO: 281695
  misc_feature (831)..(930): n is a, c, g, or t

SEQ ID NO: 390754 - DNA, 1000 bp, Homo Sapiens; identical to SEQ ID NO: 281696

SEQ ID NO: 390755 - DNA, 1000 bp, Homo Sapiens; identical to SEQ ID NO: 281699

SEQ ID NO: 390756 - DNA, 797 bp, Homo Sapiens
aagcttttaccgctcacctttacacggggggtcaaagccatcactattatgagaggagaatttggggaaaagcatcagttctgcaggaaatttactgggttagtcagggctctaagttagaaacaatagacttcgactctgggtaactaaacagaaaagagtttgtcaaaggatatagagtaacttacagaattttcgggagggctgcagggccaagccagaggtaatcaacatctcaaaccctgagtcagaactggtttttagctgccaccaagacatagacccaaacatttgtaccactatgcaacacgagaatcacttagcccagccaaagtgacaaacatccccacccgagcaccccaacttcttgtgtcaacgtactaaccttcgtagccatgccctctgctgcattatgatagagagggcgagagagagagagagagagagacagagaacactccattttcctagcagtgtgatggtcttttgttgaaaccttggttacaaatttgattctggctataaataatgctaggagagcaagtacctatcatttattttcagctttgatagcaagttctttagataagaatgcaccaaacatagaagcagccaaaatgaatgtcaaatattcacctaggcagaaagcagccgtgctgagaccaccatgtgtaggaaggctgagagatttgtgcctaagtgaatagaaagtgttcagaaaggagaatcaagaaaacctctttcctcgctttgggaaggaggaaacctacagaatcgcccaaagctggagggaattc

SEQ ID NO: 390757 - DNA, 1000 bp, Homo Sapiens
ctaatttttgtatttttagtagagatggggttttaccattttggtcaggctggtctccaactcctgaccttaagcaatccaggcagctcagcctccaaaagtgctgggattataggagtgagccactgcaccctgctggtaaaaccttgtttctacaaaaaatgcaaatattatctgggtgtggtggtgcacgtgcctgtagtcccagctacctgggaggctgaggcaggaggatcacttgagccctgggaggtggaggttgcagtgggctgagatcgcaccactgcattctagccttggtgacagaccaatacacacacaaaaaattgattctttacagcaaaaataataacaatatttttataatatagacccctagctagggttttataacctatgtagaagtaaaatttatgacaacaatagcacaaaaaacagggggcaggaaatagaagtgtatagtttattttattttatttatttatttatttttgagatggagtctcactctgtcgcccaggctggagttagggtggcatgatcttggctcactacaacctccacctcccgggttcaagcgtcagcctcccaagtagctgggactacaggtgtgtgccaccatacccagctaattttttgtatttttagtagagacagggtttcaccatgttagccaggatggtctcaatctcctgacctcgtgatctgcccgcctcagcctcccaaagtgctgggattacaggcatgagccaccgtgcccggcctattttatttttgagacgggatctcattccgtcacccaggctggagtacagtggtgccatgtcagctcactgcaacctccgcctcccgggctcaagcaatcctcctgcctcagcctcccaagtagctgggactacaggtactcgccaccatgcccagctaatttttgtattttcagtagagacactgttttgccatgttgcccaggctggtctcgaactcctggactcaagtgatc

SEQ ID NO: 390758 - DNA, 1000 bp, Homo Sapiens
tctccttggatattaccttcacctccttttctctattccctccttttagatatgtgccattttcttcatctctcctctccctctcttaacttctctttcctatatttaattcgtttcctgtctttcagatcgatcgttgttgtttctaacctactatttaacttatgcattgacttttcaatttcaatgtttatatttagtacattttcagtctccttggtcttttaaaaatataacatcttatttctttgtaatgttttacatttcattttaagtctttgagtggtataaacatacttgttttatatttatgtatcataattcaattatatgtagttcttgggggttaaatttctgctgtttgtgatttctggtggtttgttttctcatatgctttatagttctgcattgtgagtttacatttgtcagggttttatttgtcagaatcctaggtagcttgtgttgaggatgtgggtctccagaggggatttatgtttccttctgttggatgtctttgggtgctaccaacctgggaatactgtatgttactatcctggcttggagcttcctagaccatgctggtggtataaattcaaaccccagatggtcataaagcttgattgctatgaactgaatgttcatcccctcccacacctccttcatatgttgaagtcctaatccccagtgtgatgattattggaggtggggcctttgggatgtaattaggtcttgagggtggaatcctcatgagtaggattagtgccgtgacaagaagagacacagatgggtctttttatccaccatatgagaatatagcaagaaggtaaccctctgcaaaccagaaaaagagcccttatcaggaacgaaattggccagcacatagatattggatttcgtagcctatagagatgggagaaataaattcctgttgtttaagccacccagtatgtggtattttagttatagcagcccgaactgaataagatatgagtgttaaaga

SEQ ID NO: 390759 - DNA, 1000 bp, Homo Sapiens; identical to SEQ ID NO: 281700

SEQ ID NO: 390760 - DNA, 1000 bp, Homo Sapiens; identical to SEQ ID NO: 281701

SEQ ID NO: 390761 - DNA, 1000 bp, Homo Sapiens
gaagggccccagtgtagtgtccatatactccttgatggcctgacatgattcctaggtgggaagggaggatagcgtcagggacaccatggccatgtatggacccacccagggcactgaggcactcacctgctggtcagccaggactttgcaggtagaaagggtaagtcagggtctaccccgtcagcttaatggccccacccctcccccacccccaccctcatgccaggcctaagctcaccttggttcttgtattttcccagctcacccagagcaccactccagctgccccctgggccgcactctcccccaggctgtgctccagctcatcctgggaaggagacagcacagctctgtggggcctccttcccaccatgtggcagactgctggaacaccattagatgggacaaataattcataaccttcacctggggctgctctggccatgggaccagaggcaaactgcttcctcctctagcctatgaattccatgcagacagggactacatcattccaataaatgttgaattgcctgtgcctggcacagaacttggcaccaagtgcacactcaatggatgtgcccatgcgccaggcgcggtggctcatacctgtaatcccagcactttgggaggctgaggtgggaggatcacctgaagtcaggagttcgagaccagcctggccaacatggtgaaaccccatttctactaaaaatacaaaaattagccagacatgttgatggcatgcctgtaatcccaactacttgggaggctgaggcaggagaatcacttgaatccggaaggtggagggtgcaggagctgagatcttgcccctgcactccagcctgggtgacagagcaagactccgtctcaaaaaaaaaaaaaaaaaaaggatgaatgaatggatgaaaatgtcccaaggttgggggccgggcgcggtggctcacgcctgtaatcccagcactttgggaggccgaggcggatggatcgagggggggcccggatc

SEQ ID NO: 390762 - DNA, 1000 bp, Homo Sapiens; identical to SEQ ID NO: 281702

SEQ ID NO: 390763 - DNA, 1000 bp, Homo Sapiens
gggtcagaggcagtacgtctgggtctggaggagactggggacagggtggagggaggtgaccgcggccaccggctgggactttcacaggtgtgggctgggggcttttccggacgctgtggcaagaggaggcccgcgcgccgcacattttgctgggacccttagtttcgcccaggattggtagggagatcctggaagaccagcgcccggaggggtgaggccccgtcttgggggcaaggccgcgaaaccacggcctgcagcttcacgccaggggtacaaagaaaagcgtcgccgggaacccaacacctgcagacgacgcgcagccgcagaggaggcggggcgtccgaggccccgccccgtatgctaatgaagcacacaccacaccgccccgccccggcgcgagaccggtccaacgctgcggagatccagaggccggcggcgcccggaaacacccgcggaggccgaggcagggcggggccgggcgccggggccgggtcgctgggcgggcggcacagcccggggggaggtcaacgggccggccgggcgtcccggggacgcgtctcccccacggtgcgaagtggtacggctcgcaggggcggggcccaggtcatgtgacgcggccgcggccgccattttgttctgcggtgctggtatttagagcgcagcggctgacgggccggatcgccttcgccgccgcccgcccgcaaaccttcgtgcccggcccgtcctcgcccccgcctccgccaccgcctcggcccgcagagcttgccccctccccacccgcagacatgtccgagtccaagagcggccccgagtatgcttcgtttttcgccgtcatgggcgcctcggccgccatggtcttcagcggtgagcgcggcggcgggagggactcgggggcgggggcgcgcgcgttgctcatgcccgcagctcgccggggtccggtgtgtgacgtcactctgacataatcccgaactgtcgggggcgcccgggcctcgtgtgacaa

SEQ ID NO: 390764 - DNA, 1000 bp, Homo Sapiens; identical to SEQ ID NO: 281703

SEQ ID NO: 390765 - DNA, 1000 bp, Homo Sapiens
taattagattttcttgcagtttttttatggcatttttttaaagatgccctaagtgttgaagaagagtttgcaaatgcaacaaaatatttaattaccggttgttaaaactggtttagcacaatttatattttccctctcttgcctttcttatttgcaataaaaggtattgagccattttttaaatgacatttttgataaattatgtttgtactagttgatgaaggagttttttttaacctgtttatataattttgcagcagaagccaaattttttgtatattaaagcaccaaattcatgtacagcatgcatcacggatcaatagactgtacttattttccaataaaattttcaaactttgtactgttatcctgagaatctgttctttgtccagtccacagcttacctgcacatttgcacattcccaggcctcaacaaggtgaggagaccttctgcagagagttcttcctgttgtggggaagcaggtggggaggagctggaggaggggaggggagtggaggtcagaggctattggcttaacagtgagccctaactcccttcttctagctaaactctactccctctgctcatttgcttctaaaatggattaaaatgtgagccttgtcaataactgtttattaacttcttatcaatttactattaacttatcactttacctgtccaaaaaatgataaagggaatatttgtatagacttttacattttacaaagcgcttttattttttcctttgacccagaaggtgggcaaaattggtgaacttgctgtccaaaatgcatgctctaaagcttgttaactctgatggtcagagatgacacccagtcagtgcctccttcttacctcacagcaatgctaaggggcaggtgactctctcagtacctggggagaaggggcaggtggcaggttggcttagagtctgagtccagtatgagcactgcctccaccagctacctggagtgaaaccttaggcaaagtatttgagcc

SEQ ID NO: 390766 - DNA, 1000 bp, Homo Sapiens; identical to SEQ ID NO: 281704

SEQ ID NO: 390767 - DNA, 1000 bp, Homo Sapiens; identical to SEQ ID NO: 206699

SEQ ID NO: 390768 - DNA, 1000 bp, Homo Sapiens
ctgtgctctgttcactgtcatcgctgtggcagcgctaatttttcacatacgaggtgtcgttagtcacacacaaaaaagccaactgatcacagaattctaaacagcacaattctgtctgcagccttgaaaagcctgggacatttagaggtctaggaaaatatccaaagatagcaaaaatatgtgttggttctaattttttgtttgaagacagttgttgctacagaggagatggaaagcagatttagctgtaaaatttatcgatgttccaaagcaaagagaataaattggaaattgcctcatcctacaacaccaactggaagaatccaacctgttattctgttagatgttagagacacttgggaggaggacctgggaggggctgtggctgggggcaccgcccagggccagctggggtggcaggctgtgcgggttgcacacagtagataggccctggcctctgggtccaccctctgctctgagcaccatctggcacagagtgaggggctctacaagcatccagtagaagtattattattattattattccaagatgaggtttcactcttgttgcccacactggagtgcaatggcagatctcagcttactgcaacctctgcctcccgggttcaagtgattctcctgcctcagcctcctgagtagctgggattacaggcatgtgccaccatgctcagctaatttttgtatttttagtagagacgaggtttcaccaagttggataggctggtctcgaactctgacctcaggtgatccgcagcttcggccccccaaagtgcttccccagggatcttctgacctagcaatccagctatgacgggcaggtacctgggccagtgaaagctgagtaacgttagctgcggctcatctgtggaatggagacagacgtggctgtgcaaaggcctcaccaggcagtgcctcccatgctgcctaagaagaggtgtgaggcagagagagcagtgccagggtcctcgagtctggatcc

SEQ ID NO: 390769 - DNA, 1000 bp, Homo Sapiens; identical to SEQ ID NO: 114801

SEQ ID NO: 390770 - DNA, 1000 bp, Homo Sapiens
agaaggtagaatatatagttttattagacagatgcttctgaaatattaattttgtatgtttttactatatcctttttgtgtatctacagatacaacagacatgcaagagaatggactcagaaatatgcaatgtaaaaatcaaaaacattttcatatataccagagtactgtaaaatctaggtttttttcaacattagcagtaaattgagcactgtttactgtttcattgtaccatgaaaccatttgatttttacccattttaaatgtgtttctgaagcaagacaaaacaaacttccaaaaatacccttaagactgtgatgagagcatttatcattttgtatgcattgagaaagacatttattatggtttttaagatacttggacatctgcatcttcagcttacaagatctacaatgcagctgaaaagcaaccaaattattttttgctgaaactagatgtttttacatgagaaatactgtatgtgttgtctaagatgtcagttttataaatctgtattcagatttcattctttgttagctcactttataatttgtatttttttactgtatagactaaatatattctatttacatgtatgtcaactcattacttttttcctgtgaacagtattgaaaaaccccaacggctgataattaagtgaattaactgtgtctcccttgtcttaggatattctgtagattgattgcagatttcttaaatctgaaatgatctttacactgtaattctcagcatactgattatggagaaacacttgttttgattttgttatacttgacttaactttattgcaatgtgaattaattgcactgctaagtaggaagatgtgtaacttttatttgttgctattcacatttgaattttttcctgtataggcaatattatattgacaccttttacagatcttactgtagctttttccatataaataaaatgctttttctactatttgtcttgattacttaaaaaaataaaaatataa

SEQ ID NO: 390771 - DNA, 1000 bp, Homo Sapiens; identical to SEQ ID NO: 114802

SEQ ID NO: 390772 - DNA, 1000 bp, Homo Sapiens; identical to SEQ ID NO: 281710

SEQ ID NO: 390773 - DNA, 1000 bp, Homo Sapiens; identical to SEQ ID NO: 281711

SEQ ID NO: 390774 - DNA, 1000 bp, Homo Sapiens; identical to SEQ ID NO: 281713

SEQ ID NO: 390775 - DNA, 1000 bp, Homo Sapiens; identical to SEQ ID NO: 201673

SEQ ID NO: 390776 - DNA, 1000 bp, Homo Sapiens; identical to SEQ ID NO: 281715

SEQ ID NO: 390777 - DNA, 1000 bp, Homo Sapiens
gtctccaccaccaaaagcagttagaagccaaggagattcctttatctacctagggttcattttcaaaagaaaatttaaactataatttaaacaattaacgttcttttctacaaaaaaaaatgcagggacttgatttttttaaagagcttcactgaattaggatatttttattgcttttaaagaaaatacaaagttgcagtttctgcagggtgtggcgtggaccagtgctgccgaccatagctcagagagccctgcccctgcctcactgcactgcagcctcctcggaggccgcacctccactccactccccacgcgccccctgcctcccacccaggtccacctgccacctggtgaccaccttgagtacagaagtgaaagtggggagagtattttattcaagtcacagcagaactggaaaaaaactcttctgttttaccaacttcttgtgtttcagaaacatattctgttcaaaacttttgaagccctttcggtgtctagtctgcagatgtttttgtatgtgtgcacctctgaccatgtgtgtacatatgtgtcttgctggaaaggacatattcgctgtccccgtgctgctgggagggccgcctcacagcctcacggttcccagccccagcacagtggaggcaggcgtggctgcattcccctcacgctaccctcccagcggcttgtagccgtcactggccagacctccagggtgcggaatcaaataggaagcatgcagagactcggcagcttttcctctgatgtgtaagttatttggaacgcgtgctgtgtcccgcgatgtccctgatgtactgtgcaggcgcggtgcctccgtctcgtcgcacagctgcgcgcccttgtgtgaccctccccataaaggcactttacagcttcatgtttcatccactgtcacttttttttaactgctgatgtaaatggaattttaaaagcagagttctttattgtatggatgacgtttgaataaatatcagcaactcctgcc

SEQ ID NO: 390778 - DNA, 1000 bp, Homo Sapiens
tgtgttctgatcatttgagtgaaaaaaaggtacctgtcaagcaagctcctggacaccacaagaaggaggaattattttaaaagctgtactcttaaattgttagtatctttaaaatcagttgtgaacaatgaaggatttgaaagagcattgactttgccacttaaaagtatttttaaaatactttgtgcttcccccttgcattctgaatttatacacttttcctcctgctgttctcagacccagtggaaagaaaatctcaaggaagaaggctgagtttattctctcagggctctgttgggtctacctcatctgaggtggcttattcttcataggaaattaatttttcttctcaagtatgcacttaaatataattactgcttccttggtcctctagcagatttctcacttttatttatttttttttttgagacagagtcttgatcttttttcatctaggctggagtgcaatggtttgatctcagttcactgcaacctctgcctcctgggttcaagcaattctcatgcctctgcctctcgggcagctggaattacaggcatgcgccatgacgcctggctaatttttgcatttttagtagagacgggttttcaccatgttgccccggttgctctcaaactcctgacctcaggtgatccacccgcctcagcctcccaaagtgctgggattacaggtgtgagtcaccccgcacagcctgaaatgaggcatctctatctatagtccagcagccctacaggaggcaggaggggagcaagaataagaaaggaaatttgtaaaaggcacttaggagtgagcagaaaggaaataggaccagcttttacctgcccagtcctggccagtgacaagcagtctgcttgagtctgtgctaaataaacaaaggaagttccatttagagctctacagaggggaagccatagaaattaacaggatgaaaatacaagagacaggaacacagatgaataaatgtaataaaatttgagaaat

SEQ ID NO: 390779 - DNA, 498 bp, Homo Sapiens; identical to SEQ ID NO: 281717

SEQ ID NO: 390780 - DNA, 1000 bp, Homo Sapiens; identical to SEQ ID NO: 206042

SEQ ID NO: 390781 - DNA, 1000 bp, Homo Sapiens; identical to SEQ ID NO: 281719

SEQ ID NO: 390782 - DNA, 1000 bp, Homo Sapiens; identical to SEQ ID NO: 281720

SEQ ID NO: 390783 - DNA, 1000 bp, Homo Sapiens; identical to SEQ ID NO: 281721

SEQ ID NO: 390784 - DNA, 1000 bp, Homo Sapiens
acggccccaggcactgtgcactgatacaatctgccagattgggtctggtcagagctctcaaatactgaatatacctgtagtatcaacatctgagttattttttccattctggtctgcagacaggtaagacaggtaaaacttccagggcacacagaccttgtcttgcccatgccctgtgtacttctttaagtcagctttcacagcttgaccttgcactgtgtcatggttaagtcttcttgaggtcaactccagctctgctagatgagtgaccttgggcaagatactcattcctcccacagtcactaaaagccagagtctccttaatgcaccctgcagaggtgcccaaattgctggccccattagcctaccattgatcctcccagtcctaccaatcactgcccacacagaccccactcattaacccagccccacagctgagcagtcccaggaccccatctcactcccagctagcccctcctcactgccccccccagactgcttattcattttggtcccacaggtacccttgggtgcttactctgtgctaagcacctgggatacatcagcagacaaaatagacaggaactgcttccctcataggacttgcaccctagtggtggagacacacaataaacaacatacaaaactaaccaataaatgacactgtatgttaaagggtgatgtgctgtggacaaaagaaaacagcagagcagggtacagagaatggggcagctggcgggggatggctgcaattttgaatagggcaatccagtacaggcttcatctgaaggaggtggggagtgagccatggggatatctgggggatggggtcctgcaggcggagtggcaagtgcaaggccaagggcaggggtcggcctggtgtttggggaccaagcaaagagagtggcatggaggagtagggtgagcaggggagaaaatgtgaggaaggcagcagagtggagcagtcagggctctccagagaacagagcccaaaggatcc

SEQ ID NO: 390785 - DNA, 1000 bp, Homo Sapiens
ggacttgatgaatataatccattctcggattctagaacacctccaccaggcggtgtgaagatgcctaatgtacccaatacacaaccagcaataatgaaaccaacagaggaacatccagcttatacacagattgcaaaggaacatgcattggcccaagctgaacttcttaagcgccaggaagagctagaaagaaaagccgcagaattagatcgtcgggaacgagaaatgcaaaacctcagtcaacatggtagaaaaaataattggccacctcttcctagcaattttcctgtcggaccttgtttctatcaggatttttctgtagacattcctgtagaattccaaaagacagtaaagcttatgtactacttgtggatgttccatgcagtaacactgtttctaaatatcttcggatgcttggcttggttttgtgttgattctgcaagagcggttgattttggattgagtatcctgtggttcttgctttttactccttgttcatttgtctgttggtacagaccactttatggagctttcaggagtgacagttcatttagattctttgtattcttcttcgtctatatttgtcagtttgctgtacatgtactccaagctgcaggatttcataactggggcaattgtgggttgatttcatcccttactggtctcaaccaaaatattcctgttggaatcatgatgataatcatagcagcacttttcacagcatcagcagtcatctcactagttatgttcaaaaaagtacatggactatatcgcacaacaggtgctagttttgagaaggcccaacaggagtttgcaacaggtgtgatgtccaacaaaactgtccagaccgcagctgcaaatgcagcttcaactgcagcatctagtgcagctcagaatgctttcaagggtaaccagatttaagaatcttcaaacaatgacgactgttacctttttgcactgtacctttttcctccagttactgtattctacaaatattttt

SEQ ID NO: 390786 - DNA, 1000 bp, Homo Sapiens; identical to SEQ ID NO: 281722

SEQ ID NO: 390787 - DNA, 1000 bp, Homo Sapiens
taaaaagatttaatgcagatgaacatgcacatgttaatgggcaacaaatgaacacctgtgtacagaacattaagagcaagagatagtaaaactattcttcagagccttttatataccacatagtgatggcagcactcttccctcactgagcagtaacccataaatattgtgaatcatacattgatcatttccatgcttcctttggagtttttttttttttttttttttttgagacggagtctcgctctgtcgcccaggctggagtgcagtggcgccacctcgcatctcggctggctgcaagctccgcctcctgggttcacgccattctcctgcctcagtctccctagtagctgggactacaggcgcccgccaccacgcctggctaatttttttgtatttttagtagagacggggtttcactgtgttagccaggatggcctcgatctcctgacctcgtgatccgcccgcctcggcctcccaaagtgctgggattacaggtgtgagccaccgcgcctcgcccctttggaggttttatacctgtctatgtatccctaagtagtacattacttagttttgccagattttgcattttatataaatacaatccaattatacatttgccttgtaactattctttcactcaaagttatgtttttcataatacatttgtgtagttataggtcattcatttttctccacttggaatggattttttttaacttttaagttaaggggtacaagtttaagtttgttacatgggtaaacttgtgtcatgggggtctgtgttgtacagattattttattacccaagtattaaccctagtacccattagctgattttcttgatcctctccctcttcccaccctccttcctccaaaaggctccagtgtgtgtgttcccctgtatgtgtccatgtgttctcatcatttagctcccactcatgagtgagaacatgtggcatttggttttctgtgttagtttgctaaggataatggcctc

SEQ ID NO: 390788 - DNA, 299 bp, Homo Sapiens
ttaaatttttttgcttatttccttggttgacttttgttgctgattttaaagaaattatttgttttgatcattcatttttttcttttcttttcaattgtttgtttttcagacctgagtcagaactccatcacaggggaacacagccaactgttaggtatagtattactgtggggattgactttatccaaagtcacccttaactcatttatcctaacagacattactcccttctctgattctattttctatcccctccttttctacttcccacccaacaacttttttcctgctgtttctat

SEQ ID NO: 390789 - DNA, 409 bp, Homo Sapiens
tagggcctgagaatgttgtttaagtgggtccttgatataaccatgaccagtactgaccatttagttactataacttttgataaggattgtttaggagagtaagagaggcttcaattgttaagagttgtgattttttcgtaaattttctttattgtaaaataaacaatttttattttttctgtgtatagacattaatgtttttgattcgagattggagctatccttatgaacattcatatggtttggaaggtggaaagcaatttcttgaaaagagattacaggtaagaccctaatgcttaaagaggagaacataagcaccaagctaggcaaacgggtgggctgtccggactgctggtcacattaccagtatttacgtgtcgttggaataaagtattccaggttagcccaa

SEQ ID NO: 390790 - DNA, 1000 bp, Homo Sapiens; identical to SEQ ID NO: 114805

SEQ ID NO: 390791 - DNA, 1000 bp, Homo Sapiens
aggcaggagaatcacttgaaccggcaggaaggaaggaaggaaggaacagagggagggaaagagagagacagaaagaaaagaaaaaagaaaatagaaaaaaagagcattgactgtggcgtggaccctaagggctgggtgacatatcgttgtccccaccccaacacgcactagtgtagtgggtctgagagtcccttggctagcagtaccatcaccagggaacttgttacacataacaaattctcgggctacactttatactgctgaacagaaagtctggggtggggcccagcaatctgtttaacagccttgcgggggattctgatgttctctcatgcttaagaaccacaatctgggggttgaatggttggttcccttacaagtgaaggtctggctgtccagacacaacatccttttttcacaaaaccagctttttaaaattaaaaatagattggccagatgcggtggttcacgcctgtaatctcgtcactttgagaggctgaggcgggaggattgtttgagctcaagacttcctgacccgcctgggcaacatagtgagacctcatctcaaaaaaattttttttaattaaaatttgtttttgcttttttagagacggggcctcgctctgtggctcaggctggcgtgcagcgacacgatcctataatagtttactataatctcgctactgagttcaagcgatccgcccgcctcggcctcccaaagcgctgggattacaggagtgagccgctgcgctctgccaaacccatcctacaggataaccttagaactgcgacagcactaaacgcccacgccccacgtgccccagcctgggtggtcgctccgggacggcgccttgtgtgacgtcacagccccgcccagcctgcctcacagcgccgcaggccttccccgcgtggcgcctctatatttccccgagaggtgcgaggcggctgggcgcactcggagcgcgatgggcgactggaaggtctacatcagtgcagtgct

SEQ ID NO: 390792 - DNA, 1000 bp, Homo Sapiens
aaatgcattcaaatgctttctaaaaaaattttaaaggcctttctactcaggctaatgacaaacacaataaaggcagatatgctagtttaacataattggctgattttatacagcacttatatcttttagtccacaagtatattattaaatgatagagaacatctaatacaaccatttctacagaactaggaaataaatttctaagaaagaaagattttacagaccccatcttttatacccaccccaacagtctaactctaaagaggataaagccaatgactttcctcacaagagctcacgactaacgtcgctttgctatcaaaatctgtatttctgatccgttatgagcattgagacaagattcaaatattcccaaagaaagaagcacaatgcacgttgtgatcgcctattcagcaacagcgagcactgcatccaaaactctcatcccaggaattaaataaggtcagccacattcatgggcatctcctccactgtagtattgtagaaagtctcaatgtcacgaagaatcctcttgtcttcttcagtaacaaagtttatagccacacctttcctcccaaatcgaccccctctgccaattctgtgtaagaaaaagaatcagaacgttacttctcacataatgtataaactactgaacatgacgatccacttgttaaccaccagctgctgtttacttatcaaggttatagttcgtgcttctaactggagcactagctgctaatgcatatctagagaaaaaaatcttcctttgcagttagtgccaaaaggattcaaggcttgtctggctgcaaaatgagatttttatcaggcatcttgagcattattataaagcagatgacagtatcgtgtttggggtagtgaaattaaagcccataccaaagtgggccagccaagagcaggtgtcagcctgggacagatgtgaacaccaggaataaaagagcagttatgtaatccatttcgacgcacttctggaactgtaaac

SEQ ID NO: 390793 - DNA, 1000 bp, Homo Sapiens; identical to SEQ ID NO: 281728

SEQ ID NO: 390794 - DNA, 1000 bp, Homo Sapiens; identical to SEQ ID NO: 281729

SEQ ID NO: 390795 - DNA, 1000 bp, Homo Sapiens
tttttacttcatctttcttgggcctgcacctccaagataacaaagaagaagcaatggtcgtgccaaagaggtccacaaccaggtgtgcactgttcactgcagcccatttgctgtatgaactgtggttgttgtgtgcccaatgacaaggctactaagaaattcatcatttgaaacgtagaggccgcagcagtcagcgatgtttctgaaatgagcatccttgacgcctgtgtacttcccaggctggatgtgaagctacattaccatgtgagttgtgccattcacagcacagtggtgaggaattgagctcatgaagcaggcaaggaccgaacacctccaccccaacgtagacctgcaggtgctgccccatgacctccaccaaagcccatataaggagcggagttgttaaggactgaagaaaaacttctctggagaaaaataaaattgcaattctacttaaaaaaaattttttttttttttttacttcataggccaggcttgaagttctgaacactttgaagtctccaattatgagagatccagtctaagcctctggcctgctaattagcaataagtgctttatttggaaggagggagtcatccactcttgagccactgcagtgaagtcacttgatctcagtctgggggaaaacacttcaatagctaaacattctagctttgatttttctgaagggaatacacttgttttcaattttggggtttttctttggggcacttgcttgactctgtatgaacttgtgatccaaggaaaaaggagaaagaacagtgttggcttttaaaatcaggatggttttatgtttgctacgaaataaggcaagaataaaaaattcttatttttatttatttatttattttttgagatagagtctggctgtgttgcccaggatgcaatggcgcaatcttggctcactgcaacctctgccttctgggttcaagtgattctcctgcctcagcctcccaagtagctgggattacaggtacc

SEQ ID NO: 390796 - DNA, 1000 bp, Homo Sapiens; identical to SEQ ID NO: 205326

SEQ ID NO: 390797 - DNA, 1000 bp, Homo Sapiens
tgtttctctttcagttcctcactgatttaaaaacaaaccttaatactagcaataggtaaaaactactcttaaaagttgaatagttcaatttttatttgtatttatttatttatttatttttattttttatttttttgtttttgtttgagagagggtctcactctcacccaggctagagtgcagtggtacaatctcagctcactgcaacctctgcctcccaggttcaggcaattctcccgcctcaacctcctgagtagctgggattacaggtatgtgacatcacacccagctcatttttgtatttttagtagagacagggtttcaccatgttggccaggctggtctcgaactcctggcctcaagtgattcacccacctcagcctcccagagtgctgggattacaggcgtgagccaccatgcctggccctagttcaatttttaaatggaacatgcagggatttttttttaatgcttgatattattctcagtaatttcatatggcattattccccatactattcccaaattggtactctttagaaaataaatgattgtttttcaagacaaaagctttggtgctgatagtgtaaaagtgattttttgttgtatattaatttatgcaggtaacatcactgttgttgttggtattaatctattaataacacaaagctcattatataaactttacctttaccttgttatgctagtgaagctttctttcattttatagctggcttaagtcctgctgagattcagcagttatggaaagaagtgactggagttcacagtatggaagacaatggcattaaacatggagggctagacctcactactaacaattcctcctcgactacctcctccaacacttccaaagcatcaccaccaataactcatcattccatagtgaatggacagtcttcagttctaagtgcaagacgagacaggtaaatctcatgagctttattctatatttatctattttcagattttattttcacca

SEQ ID NO: 390798 - DNA, 1000 bp, Homo Sapiens
gcgctaatgcaaacagacagaactgagagcaaagaacacaacggtcgagaatccagatgtttcacattcgaaagctttcctcagatttttttattattatttttaagtggctgtataccctgagtctcttgaaagcacatttagctgcaagaagaaatgcaatttataagatgctttctctctgtctctcttttttttaaccccctctagcaggtgtatttttaaagaaatccgcttatcgttcacataaacccccttggcccacttactctatgttacagggcgcctgagtcttgccaatgtcccagtcctttataccatttcatgcacttcggggggtaggcttgctgttaaattgagcgtgtaacactcttacaaacaggttttctatgacatcaaggtttcttctccctaaccgagggggaaaaaaagaagaggacgaagaagggggaaaacacacacactatctcaatttatgcctaaggtatatgatcagttaaaaaggcttaaaagctcggggaaattggatcagggagaatcgtcacccaactttcattatttccaagtagtgtgattgaattaaagggcagggagctggttagaagggaggatcaggggctcggtgcgtaatggtgtggtattaaattctaattagagatgcaggaatcaatgatagggaggttggacagctcagttccccagtgccagcccaatagacggatgagttattgtcatgtaaaaagcgccagcaataagaccaaccgctttgctattgtccaagtggaaagagccaagtttattatgaggactatatgctctagagacctcagacaaggcatctcataggaggctttttcataaaactaggctctgctggtagtaaggaggccagtttggaggcaggcgttgagctgcgcacatctccccactccagccaccttctccatatccatcttttatttcatttttccacttggctgagccatccagaaccttttca

SEQ ID NO: 390799 - DNA, 1000 bp, Homo Sapiens
cccactgactggctgacactagaggactacagagaacctattgaagtgaacctgtttggactcatcagtgtgacactaaatatgcttcctttggtcaagaaagctcaagggagagttattaatgtctccagtgttggaggtcgccttgcaatcgttggagggggctatactccatccaaatatgcagtggaaggtttcaatgacagcttaagacgggacatgaaagcttttggtgtgcacgtctcatgcattgaaccaggattgttcaaaacaaacttggcagatccagtaaaggtaattgaaaaaaaactcgccatttgggagcagctgtctccagacatcaaacaacaatatggagaaggttacattgaaaaaagtctagacaaactgaaaggcaataaatcctatgtgaacatggacctctctccggtggtagagtgcatggaccacgctctaacaagtctcttccctaagactcattatgccgctggaaaagatgccaaaattttctggatacctctgtctcacatgccagcagctttgcaagactttttattgttgaaacagaaagcagagctggctaatcccaaggcagtgtgactcagctaaccacaaatgtctcctccaggctatgaaattggccgatttcaagaacacatctccttttcaaccccattccttatctgctccaacctggactcatttagatcgtgcttatttggattgcaaaagggagtcccaccatcgctggtggtatcccagggtccctgctcaagttttctttgaaaaggagggctggaatggtacatcacataggcaagtcctgccctgtatttaggctttgcctgcttggtgtgatgtaagggaaattgaaagacttgcccattcaaaatgatctttaccgtggcctgccccatgcttatggtccccagcatttacagtaacttgtgaatgttaagtatcatctcttatctaaatattaaaagataagtcaaacatt

SEQ ID NO: 390800 - DNA, 1000 bp, Homo Sapiens; identical to SEQ ID NO: 281733

SEQ ID NO: 390801 - DNA, 1000 bp, Homo Sapiens; identical to SEQ ID NO: 206216

SEQ ID NO: 390802 - DNA, 1000 bp, Homo Sapiens
gcagcggagctggggcgtcgccgactcagaaggtgctttccgagacctccagggatctccgaggcgaggaaacccgggccccggacagaccgaccctgggtgggtgcgcccggcttctgccgtcggacggagacgcgcgtgtttgttcctccagctgcgaccacctttgaggaacggttcccactttgtgccccaacgcggcggggcgaccccggacaggctgcgctgggccgggtggcttctctgcggaagccgcgccacgtcgctcccggtcggggccgctgagggtcgggcgcccaggtctttccggagtcccgggctgcgcggcccgcgtggtgcgggtgaagctggaggggcgcggggtggtgccagtggaagtcaggagggtcggccctgccccctcacgctccccaaccgggcacaactgcacgcctgtgcttttctgaagtcttttttaaaagttaaaagagaggaagtgtgctccaagtgtcaggattctttccaagaaaaacccacagttgtccaatggcctgggcttcgtgggacctccggggctgcacgcccacgtcagcctcagccgacccctgccaggaaaccagggaggcccctcctctcccagcctccttgggataagggtgccttggggaactgggtcagggcaaggacacgggattttcctgggaaggaccctgcgacacccgtgtcgttgcggggcagggtcagcatgactttcctcttccaaggtgaagagttggggggcatccagagaacaaccgtaatcacttcctccttcaccttcttactgccaggctgaagctcagggccctgtctgctctgtggactcaacagtttgtggcaagacaagctcagaactgagaagctgtcaccacaggtaaatacaatgtttaatttactgtttccagatggaaatatttaagtgttttcagtgtttacttctgttgcactacagaccatcaatctgggggttattactttgtta

SEQ ID NO: 390803 - DNA, 1000 bp, Homo Sapiens; identical to SEQ ID NO: 281736

SEQ ID NO: 390804 - DNA, 1000 bp, Homo Sapiens
  misc_feature (440)..(440): n is a, c, g, or t
ctcttgagaccggagtcttgccgatgcccctggcctaataaaccccttccttctttaactcggtgtctgataagttttgtctgcagctcgatttcttggttccctgactgggaagcgaggtgaatggcggatggtcaaggcagctccttaggcggcttaaacctgccctgtggaacatccctgcaggggactccaaccagcccgagcaacacggatcctgagggcgctcctggttaggcatttgccccactgggacgcctcgccagagcactgtatggcaggcccccatggaggatcaacgcagtggctgaacaccgggaaggaacgggcacttgggagtctggacatctaaaacttggtaagagtagtctttgaaacttgcccactccattttgagtggaagcatggcctgatcacccatggcgttgcctttattggcnctttggtttttgggtttgaattgcttgacaggattggtcttgggaacttgcctactccatttgagtggaagtgtggcctgatcacccatggtgtgcctctcctggcactttggtttttatttttgacttgacttggattgcttgatactttggttttggttttgacctggcttggatttctggatactctgattttggtttggtgcaaactgcaaaactgtgtgtgcgccctttttaccggttctttgttttgtggtgtgtttgtggtgtgagcgtggtgttttgtcttgaagaagcataggtcaggcacgaataagcccaccccactaggaactatgttgacaaatttcaaaaaagaatctgagggagactatggagtgctatgacaccaggaaaacttaaaactttgtgtaagatagactggccagcattagaagtaagttggccattaaaaagaaacctggacaggtcccttgtttcaaaggtatggcacaaggtaacctataagccaaggaacccagaacattcccttacagaaacacttgattagagctggtttt

SEQ ID NO: 390805 - DNA, 1000 bp, Homo Sapiens; identical to SEQ ID NO: 281737

SEQ ID NO: 390806 - DNA, 1000 bp, Homo Sapiens
taattagccacagactaaatccttcgtccagataaggagtagctgataagaacctcaaatggggtacctaaagcccagagaactttgtaactgggcctttgagttccttgctccggcccactcccaccctgaggagtgctttctcactttaattcctgctttcactgcttcattcctgcatttcattcccctgctactctttttatttttactttttttttttttagtagagacgggtttcaccacgttggccaggccggtcttggactgacctcaagtgatctgcccatccaggcctcccaaagtgtggggattaccacgtctgcccctctgctactttgttcaaaacgccaaggacctggaaaattcctagtcaagaccctccaccagtaacacaggtaccagaagcctcacctgtgccttcctctgcccctaactctgctgtgaactcttctgagccacccaactgcctgagggaagcagccccgactcttcagccctacagtttgtcttgactatctccttgaacccatccctatagctactcccagagctcaggcctcatccctgccccctgcacccctacatcctcactcggctccctgccttctgtccaccttcctttctggtctgcagactgaccttcctgaagtaccgtccctgcccaaccaccttcctctttccctctcatgtctaaccctgccctccacgcacgccagacgccactgagtcagtctccttcatgctgacacctgccctgcctttgctgtccctagaccacccctgtctaccttctctaccctctctgctgtctacctttcaggcccagcctatgagtcatcacctctgtactactgtccccagatctccactaggttaacagctctcctctcagggcttcctggtgccttgcacaaccccctctggcagcacccagcattccacctgcagcgatctcctttgcacatggccctcttccctggctatctcaaaatgcaga

SEQ ID NO: 390807 - DNA, 1000 bp, Homo Sapiens
tgtgtttgaaaaagattttgatccccttggaatattaagaggtcaacacgtgattgttgtacgtacacattgtgctctggagtgcctatttattgaaatcattgtaagacctgttataaatttaagtctatttaaaactaaacttgtaatatacatcctgaaaatcatttagagagtcttttatttataaattaaaaatcacttcattttcacaaaatgttttggtgtgggattatttgaaagcaaaagaaatctaattttgttttctccattacctcattttagtattaatttttacttggtataatatacatggttaaaatgcttatgtgacttcgagtaggtgaatcttaaagaaataaaattcaagtgaccacaaagtctggagacaatatatatatgtatatttaatagattgaacctcttgattactacttgttgggtgtgccgaaggcataagtggattcagtgaaaattagacacacaaatcatgtgaggcatctgttgtggatacacgtacaaatattgatggaaatgctgctttagagcacatcattcattacaattttgcacagcgtattgaactatgaattgctagtgaggaacaacacattaaacatatcatggaatatcagtaaattattcagtatactcctctgaatttctgaacctgatgggcacttgaataatttcaactcagaagactgcagaataatcatattttaaactctaaaaaatagtcagcataaaaaggatcaactaccatataaaatatttcctgtatatagtttttcctaattgatcccattttgttctgattattaaacttactatatgcttggcattcttctctgggatcttttcctcgtgactaaatccacaagaaagtatttgcttactttgcacggaagactgttctgtgttcttgtttgttttctaaatgtcttaaacgcagggttctgattttctctccacatagcaactagtatacaatgaattc

SEQ ID NO: 390808 - DNA, 1000 bp, Homo Sapiens; identical to SEQ ID NO: 281738

SEQ ID NO: 390809 - DNA, 1000 bp, Homo Sapiens; identical to SEQ ID NO: 281739

SEQ ID NO: 390810 - DNA, 1000 bp, Homo Sapiens; identical to SEQ ID NO: 195002

SEQ ID NO: 390811 - DNA, 1000 bp, Homo Sapiens; identical to SEQ ID NO: 281741

SEQ ID NO: 390812 - DNA, 1000 bp, Homo Sapiens
gatcacgccattgcactccagcctgggcaacaaaaagcaaaactccatctcaaaaaaaaaatacaaaaaaatgagctgggcgtggtggcctgcacctgtaatcccagctacttgggaggctgaggcaggagaatcacttgaacccagaaggtggaggttgcggtgagcagagaccacaccactgcactccagcctgggtgacagagtgaaccatgtctctaaataaataaataatatgtttgtctgaaagtgcctttttaacaaagtatgagatgtgtacataaagtgcacatagcgcaagtgtcgcacgcagtggattttcacacgcagcacgtgaaatgggaaaacactggcccggcacggtggctcacacctgtcatcccagcactttgggaggccgaggcgggcggatcacaaggtcaggagatcgagaccatcctggctaacacggtaaaaccgcgtctctactaaaaatacaaaaaattagccgggcgtggtggcgggcgcctgtagtcccagctacttgggaggctgaggcaggagaatggcgtgaacccgggaggcggagcttgcagtgagccaagatcgcgccactgcactccagcctgggcgacagagctagactccgtctcaaaaaaaaaaaaaaaaagaaatgggaaaacattgaggatgaagtagcaaatatttgagaattcaacttgattggtggctgttgcaggttcatacgtgagtggttacgtagtgggtagttaaactgacaatgaccagctgaattttggtgacaggactgctcctaaggtttgaaatgtagcgtatcctctgattcacgggctaagctctgccacttagcaggaggagctcatgatagagcaggttgaggggaaaactttgtcccataagggttcttcactgcaagtgagaaggtcttggctttgagcctccaatttcaatcagacagaaagcagaccagtcggcaggacagtatatgcctctggagatc

SEQ ID NO: 390813 - DNA, 1000 bp, Homo Sapiens; identical to SEQ ID NO: 114806

SEQ ID NO: 390814 - DNA, 1000 bp, Homo Sapiens
gaggttgcagtgagccgagaccgtgccattgaactccagcctgggaaacaagagtgaaactctgactcaaaaaaaaaaaaaaggaaaagaaagaaatagaaaatgcgaaatgttaagaaaaaacagcataataaacatttgtatggtgttgatggacaatgcatttgaagataatatttgaagaaatattacaattaatttctgttcttactcattggagcttgatgcccctaaaaattcgtcattggaaccacctctggtgctttaaaagaaaaaaaaaaaaaaaaaatccacatactcacacaggtgcaaggaaaccagaatctcaggtattgagacccaggcctcatcatttgtaagctccccaggtgatttgactcaaaaccaagattgaggaacggcaacatggatctctatacataacctgcctaaatggattctctagaagcagtttataaagaaattccacatgaactctggaagaggatatgaatttgatgtacagtatgtcctcaaaaaacatctttgaaagtctcttggaaacttcaccttgaagcaaaatcatgtatagtgaaccacttatttttcatcaacagtataactacacaactttgaacaaccaatggtgttggaggacctcctgtacattgtttccataaagtcagttttcagggaattccaaaacgaagtgaggacttcgtgtatataaaaagatggttgtgattccacctggatgacagggttattgctcagaaactaaaagaagccgcctaggtatagaggatcctgtcatgaggtttctgctaaataaaggatcccagaatcctcacccattccagtgaaaggcataacgaagaaagcaatattcacaaaggaaaagtggaaaggaataaaagccatcaagccacaaaaataatgtgactaaggggcaggatttgcagatgtagagatttaatgtggttgccctttctcacccacacaagaaaaaggatggaacaga

SEQ ID NO: 390815 - DNA, 1000 bp, Homo Sapiens
ctggaaatgctggggcccagctggggtcacaagaaagtagaatgagggaaggggaaaaagcagagccccttaagcttggaaaaggcagcacaagaagcacagaactgcgcaggagggagacttgaaacttgacttcctcttcagcctctcgtctaatgtgctgtgtgcccttgggaaagtcacttcctatctctgggccaccctttgttcatctgtacatggagaaagtgaccatagcagcatgtcccacagcgaggcctgtatctgggggtgggcccaaatatctgcattttactacagtccttccagttctggttcaaatcccaataaggctttccctttaaaaagcagcacaacctctcaactttatcctgagttaggaggttccaggatctgacccattgcatcagacttggcagcagggaattcctggaccaggaccaggctgggcaaaggctcaagcgcatggggtgctgagggcagagtaagcagctccctggatggagggagagtgcatgaagggtcctgggataaggtatcttagccagtgctacctaagctgtggtccacaagccaccagcatcagcctcacctggaaacttgttaaaaatgcaagtttggggtccccaccccagaccaactgaggagcactctctggaagctggggccaggaatctgcattttaacagcccctccaggtgattctgatgcactttaaagtttgagaagcattgacttaggatggaactagaagggctttgggtgcggagctgagtttgttcagatgttgccgagtaggtggagctgggttactgaaggtgcttatttggagaaattcaatcagacgtgctcaggaagggtgctctgtatacacagtgagaggaagctaagggtggaggggccagtttcttgaagaaaagagtcaaattctgaaatagttgaagagatttattctgacccaaatatgagtgaccaatggcctgtgacacagccccaggag

SEQ ID NO: 390816 - DNA, 1000 bp, Homo Sapiens
cgtgtctgttgttcctctctatgtgtttgtgtgttctcatcatttagctcccacttacaagtgagaacatgtggtgtttggttttccgttcctgtgttagtttgctaaggataatggcctctggctccatccatgtttctgcaaaggacatggtcttattcttttttatggctgaatagtattccatgctgtgtatgtaccacattttcttcatccaatctaccaatgatggcccattatgtttgttccacatctttgcaattaatagtgctgcaatgggcatgtgcatgcatgtgtctttatgttagaatgatttatattcttttgggtatataaccagtaatggggtggctgggtcaaatattagctccatttttaggtctttgaggaattgccacatggttttccacaatgggtgaactaatttacaccccaatcaacgctgtataagcattcctttttctctgcaacctcgccagcacctgtattttttttttactttttaataatagccattctgactgatgtgagatggtatctcactgtggttttgatttacatttctctttttttttattttttttttagtatttattaatcattcttgggtgtttctcagagagggggatttggcagggtcataggacaatagctgagggaaggtcagcagataaacatgtgaacaagggtctctggttttcctagacagaggaccctgcggccttccgcagtgtttgtgtccctgggtactagagattagggagtggtgatgactcttaacgagcatgctgccttcaagcatctgtttaacaaagcacatcttgcaccacccttaatccatttaaccctgagtggatacagcacatggttcagagagcacggggttgggggtaaggttatagattaacagcatcccaaggcagaagaatttttcttagtacagaacaaaatggagtctcccatgtctacttctttctacacagacacagtaacaatctga

SEQ ID NO: 390817 - DNA, 1000 bp, Homo Sapiens
ggctcttggggattcctcacgggagcccgccgcctctaggccaggccgcttgtgctgctctgcgccctccgtttcgcccgccacctgcgcctgccgcccccaccgaccccacgccgcgccgccagaatttcctgagtcgccaggatttcctgcaccgccagccgcctcttccccacgcacagggtcctctcggggcacacggtctggcacgcgaaggccacggcggggctgttagaggctcgtggtcatcctgactatgtggtccagggcgccccggtcctctgggccacgcacggcgcccggcgtcagcgcggacagctcgcagtccctgaccctctgcaggcagtttttggagccctcgggcttctgcgccctctcgtggagcggaggcagctcaagctggtacttttcccccaaccgctcccggcaggggcgctccaggagcctctgcatgaggcggacgtgtaagtggccactcctctggcgacatcccacggcagggaccctcgtgtggacacccgcccctactagctcagggctccgatgtgatcggttcgaccctgcatggcggctttcaacccaaacgcatccctccttcaaggtcaagacccaggacatagttcaacaagtagttggtgatgatagcgtgccctgactgggcctgaacagcctctttagtaaaacagcgcaggaaagtcatgaaacagatgctcagctcctttcttcattttcactttaattccgtgatgcctctgtgtccgtctgacgacatctctcctggggtctgggactctgctggtcttcaatgcctactgagaagggttcctggccattatcaggcatgaaaacctcaaagccctccgtcctcaacgtgggatccctgggccagcggcatcagcctcaccaggaaacctgttcttctgctcattcttgggccccaccccaggcctattcaaagaaagactccaggggcagggcctggcagcctgtttccaccaga

SEQ ID NO: 390818 - DNA, 1000 bp, Homo Sapiens
aaaaaggatgattcaccccctcagcaaaccttctctcaattgtgaaatataaagctaccgattcctaccagctcaacatttcactcatcaaggagtgtggaggtcgagagcacaggctttagagcatcacctcttcagttttatcccagttctgccatttattatatggtcttgggctagttatttaagacctgtttgagactctgtttcctaacatataaaatgggggaaaaaaaaaaaacatctttcctgtagggttgtattaaggttgtatgagatttttttttttttaaatggaaagctcacagaagcatcatgattgtaatttctaaagctcttcccacactaagaacgtgtgtactccagttctcagccccaagcgtcctgcccactgaattggaaagtgcatctccatgctctttggttgtcctgagcctgagggcttttcccactgagtctagccagcccaggcctctgcctcacttttgaggttgtctgtaggtgagccctgttttgccacttaaacgtctacccttgcatggccacatatccctgtcctgaccaggctgctcagctccctcccttcccaaggccctcagtctgatttctgtggcccagtcttgcttctcccttgcctgagaccccctcattatttttttttttctttgagatggagtttcgctcttgctgcctaagctggagtgcaatggcacaattttggctcactgcaacctccacctctgggttcaagcaattctcctgcctcagcctccagagtagctgggattacaggcgcctgccaccatgcccagctaatttttttttatttttagtagagacagagtttcaccatgttggccagcctggtctcaaactcctgacctcatgtgatccacccacctcggcctcccaaagtgctgggattacaagcatgagccactgcgccaggcctgctcgtctctcttgaaatctcagtggactccattctccaaggatccct

SEQ ID NO: 390819 - DNA, 1000 bp, Homo Sapiens
gcattgaatctagcaatatattaaaaggataatacattttgaccaaacgaagtgtatctcatgacttcagggttgaatgaacattggaaaatccctcagcataattcacctgaaattcaagctgaaaatcaatgatctcagttgccatctcgagacgataaaaaaaattaactaaaaaaggaaaaccatggaatcatttcaatggatgcagaaaaagcacttgacaaaatttaacatatattttatccattcctgatttttttttttttttttttttttgagacagagtctcgctctgtcacttaggttggagtgcaatggcacgatctgggctcactgcaacctccgcctcccgggttcaagagattctcctgcctcagcctcccaagtagctggaattacaggtgcccaccaccatgcccagctaattttttgtatttttagtagagacagggtttcactgtgttagccaggatggtctcgatctcctgacattgtgattcacccgcctcagcctcccaaagtgctgggattacaggcgtgagctaccgtgcccggcccattcctgattttaaaatctctcggcaaactagaaatagaagggaacaacttcaatctgatttttaaaaatccacaaaaagcctatagctatgatcaatcttcttttttttttttttttttggacagagtctcgctttgttgcccaggctggagtgcagtggtgcgatctcggctcactgcaacctctgcttcccgggttcaagcaattctctgcctatgcctcccaggttcaagcaattctctgcctcggcctcctgagtagctgggattacaggtgcctgccacgatgcctggctactttttgtatttttagtagagatggggtttcaccatcttggccaggctggtcttgaactcctgacctcgtgatccacccgcctcggcctcccaaagtgctgggattacaggcgtgagccactgcgcccggccagctatgatc

SEQ ID NO: 390820 - DNA, 1000 bp, Homo Sapiens
gtctgaggccagcctgagcaatacaacaaaactctatctctacaaaaaataaaaaaaaaaaataaccagatgtggtggcatgcacctgtggtcctggctactcgggaggctgaggtgggaggatcacttaagcccaggaggtcgaagctgcagtgagctagaatcatgccactgcactccagcctgggcgacacagtgaaaccctatctcaaaaataagtaaaaattaaaaagaaattggagccctgagccacactggcgaccatgtgatgagccatccgccgacccagcctgctctcagaggctctgccgatcagaagagctttctggccccgaccctccgactgtcattagcaatcagtaagcaggaactgcacagacctggccccagccgcagaccttccttatcagccattaccacacatctggaaacacacacgcacacgcagcccaacggagccaaatggcaagattatcaaactcatttgaatatgttgccccggaaactcacctatctgccttggaaatctacagctactattgctgcatattcagaagcaaatcattataaattactttctctaactcagcctgtgttatccttcatttttttttcttttttcttgtggaaagcacggacagaaaaatttggggtacttgccttcagaatgacaagcgaccatcgagtagtgataattacaaaacatgtgcaatcacagcttcacattcaggttttgccaccaggaggaggctggaaaaacaaaagcgagcaggaaaggcacttctcagccagtgcattgggcaatggcagggctgtggggcccaacatcaatatcagaagtttcttctagggggccggcagagtgcaggaagagaggtgggagccgcccccaggccccaagacagctgagcggcaaaatgaaaaatgccactcactcgagccaggcaactagcagcgactctgaaggggaatgcatgaaaggagggtctggttgtcctta

SEQ ID NO: 390821 - DNA, 1000 bp, Homo Sapiens; identical to SEQ ID NO: 114807

SEQ ID NO: 390822 - DNA, 1000 bp, Homo Sapiens
gccaggggtgccccttgcccccttccccaaaaagaagcagtggttcaagcagagaccaccaggattcaaatcctgcttctactacccgtgagctgtgcaccctttgggcatgttgtttctgctcttggagcctcagtctcctcttctgtaacatggggatgatgacccctgcctcccagatgagaattattaataaataagatagtgcatgtctgatccattcccagaggaaatgaacctattctcagatcatagtaggcttataggcttctgaacagagatactctttttgaccatcagcagcttgatatactcttcaagggttttaggaaggagggcatccaggtctatttctgggccactctcccaggcctgctgcttaggaggcaactgcttattggacccccaatccatttcagctcagaccttcaggccagcgttgagctcagtcgcattgagctcagtctcagaggtgaagggcagaatgggtatggctcagcgcaaaaccattaaacgtttccaccgaggataccaggctcagagatccctgggggctaatccgtaggggcgctggcgctttgagacgctcaaactttggaaggcctgcggggagcccgcgagtccagagggccccaaggtcctcctccaaacccctccggacttcccctccctctcctccgggtgccagcccggcccctttaaagacattcctgagggcgggcgttggtgacgtcacgcagggcatgaatgaacaggagtcggttctcacccaacttccattaaggactcggggcaggaggggcagaagttgcgcgcaggccggcgggcgggagcggacaccgaggccggcgtgcaggcgtgcgggtgtgcgggagccgggctcggggggatcggaccgagagcgagaagcgcggcatggagctccaggcagcccgcgcctgcttcgccctgctgtggggctgtgcgctggccgcggccgcggcggcgcagggcaaggaag

SEQ ID NO: 390823 - DNA, 1000 bp, Homo Sapiens; identical to SEQ ID NO: 281743

SEQ ID NO: 390824 - DNA, 1000 bp, Homo Sapiens; identical to SEQ ID NO: 281744

SEQ ID NO: 390825 - DNA, 1000 bp, Homo Sapiens; identical to SEQ ID NO: 281745

SEQ ID NO: 390826 - DNA, 1000 bp, Homo Sapiens
agaataaatgtatgctttgtgtatcaaactgtacactgacctctatactttcaggaatacagtgctctgtccttaaatgttcatttgtaaatacagaaccatattcttgttaatatcacaaaatgaaacttaccaggaagatgaatgacaaccccagaacacactgttttgtataaaataccataggctgaaaagatcacaggaataccgagtgctaggttggaatctttcatgacaccaaatgttcattcatcctctgccagattttacaactgtcctcggtgtgtttttaggttatgtaactttacacaaagtggaatcaataatcagggcaagacttaagagaaagtggatccaatgcaagaggagtaaagaaaaaaaattcctcaattgtatggagcagattgttttaattatctacagaatcttgtgccccaagaaattaatagctcaagtttccagcaagagtggtggatgagatggagagcatttatgtgagagagaaccaaggatattactaaaaatggaagggaagctgggtttctcctgggcaaacagccctctgtggctctatttctcctaactactatgcctgccttcgtgtcatttagtcatttaggggcctgccagaggacagttataaaatctgtggtcattctgccagcagcgtatagttttcacccagagtccagatcccaccggcaaaactctgtctaacacaggatgacttggaattagagtccgtatagcagaaagagcagcagggctgtccttgggtatccgttgctcagccaagtcatcaaataaaaaggatgattgcacaagtggaccatgtgtcaatctgtgggtttctgcatggccagacccaccaagggaagctttatttaaacagttccaagtaggggagaccagctgcccctgaaccccagaacaaccagctggatcagttctcacaggagccacagctcagagactgggtaagtcaacaatccccagagct

SEQ ID NO: 390827 - DNA, 1000 bp, Homo Sapiens; identical to SEQ ID NO: 206220

SEQ ID NO: 390828 - DNA, 1000 bp, Homo Sapiens; identical to SEQ ID NO: 114808

SEQ ID NO: 390829 - DNA, 1000 bp, Homo Sapiens; identical to SEQ ID NO: 281747

SEQ ID NO: 390830 - DNA, 1000 bp, Homo Sapiens; identical to SEQ ID NO: 281748

SEQ ID NO: 390831 - DNA, 1000 bp, Homo Sapiens; identical to SEQ ID NO: 114809

SEQ ID NO: 390832 - DNA, 1000 bp, Homo Sapiens
  misc_feature (84)..(84): n is a, c, g, or t
taatgaaacctgttagccacttctctgtgccatatacttcccatgttaccaaaatacgcccaactctttagccaaaagagaacnctgacctcctgagtttccatgctcctttctgtcaggtttaaatgtagtcttctggagaagtatttttgacattgagctctgggacaggacaccttgggtttgtggactgcagcccactatgatgttattacttctctggccaggcctccagtggaagtgcacaggcactcccaatgttgttaatgctctgtcttccatttgttctggaatcctacgtgttggtctgtggttccatgcattagctgtttgtaaataatgcatttgcatactgaaaaaggaatgccacctgccacagttgatggtgagaagctcctttgacgtggtgcaattttgatgagatgtctctggggacacgaggatgccctaatgatgctgacttgtcatggttgcagcatttgaacttttggtgttaaaaaaaaaaacctgtaagtctgtaacctggcaacattttacaaccctgtatttttaaagatggctttctaataaaaaatccagaaccacacagccctatggtcaaacaatcctacgtttgtgcctctgcttttaaaggtgctgtgctggacagttggcatgccagggttcgagaagagtgaatggcttgacgtccttgcagttaactgtgcaaaattggctggctgcctctgttcctactgtactgtaactttgatcatgtctgttcctattccattctcccaggagcttctctgcagactgacacaccctcccccaccccgggtagtggagatgctggtgtctgggtagtcatggatttctgctgacatttgaatgtgataaacaatccagcattacttaggaaatgctacatgcggaatgtgcacgtttccaggggcgagtattgtcaatcaaaaggtttgcaatgatttccttcctgccaaaaataaacatgtgaaactgc

SEQ ID NO: 390833 - DNA, 1000 bp, Homo Sapiens
agaatcaaaatcactgttcagccatcaacaacagcatcccactgatgcagggcaacctccccactctgaccttgtctggaaagatccgagtgacggttactttcttcctttttctgctctctgcgacctttaatgcttctttcttgttgaaacttcagaagtggacacagaagaaagagaaagggaaaaagctctcaagaatgaagctgctcttaaaacatctgaccttagccaacctgttggagactctgattgtcatgccactggatgggatgtggaacattacagtccaatggtatgctggagagttactctgcaaagttctcagttatctaaagcttttctccatgtatgccccagccttcatgatggtggtgatcagcctggaccgctccctggctatcacgaggcccctagctttgaaaagcaacagcaaagtcggacagtccatggttggcctggcctggatcctcagtagtgtctttgcaggaccacaggtaagccattatacacaaaacttattttggatatggtgatcatagatttcctatctaaatttgatataaggtcttatcaaaggaagtactgtattacctttaagagcttgggttctggaagtcagagagtgaagtttaattctggctctgttctgttaccttgggcaaacttcttaacctctctggtttcagttcctttaccgataaaatgtaacatgggggttaatgcttacttaatactgcttttgtgatgaataaataaataaagtagctcacataatctctattatggtagcaaatgcttccccaaaaaaaatgcgattctcaaacttgaccttatctccatcctattcttttatctgtttttctttttgttttggttgacatggctttaatgtttagttgagataatttttaggaattatgaaatttgcctaggatgaaaatatttataatctttcttatttaccctttcttcagtggaaattttaagaattctgtca

SEQ ID NO: 390834 - DNA, 1000 bp, Homo Sapiens
atggcacataatcaccattgtagaatcacatagaatgttatcactgccctaaaaactcccccatattctgtttattcatccattatccccaccatccccttccagcccctggcaaccaataatccttttgctgtctccatagttttgccttttccagaatgtcatagaattggaatcatttagcatgtaaccttttcagattcaattagtaacaggcattcttcctccatgacttttcatggttgagatagctcatttctttttagcactgaatgatatttcattgtctggatgcattccagtttatccattcacctactgaaggacatcttagttgctttcaagttttggcattatgaataaaactgctctaaacatttgcatgcaggtttttgtgtgaacataaattttcaattcatttgggtaaataccaaagagtgtgattgccggattgtatggtaagggtatgttttagttttgcaagaaactgccaaaccgtcttctgaagtagctgtgccattttgcattcccacagcaatgaatgagagttcctgttgctccacatccttgtcagcatttggtgttgtcaatgttctggatttgggccattcttataggtgtgtggtagtatctcattgttgtcttaatttgcatttcccctgatggcatatgatgttgaacatattttcctatgcactttgccatcatctgtgtatcttctttgttgatgtgtctgttcagatcttttgcccatttttaaatttggttatttggtttcttttttttttcttttgagacagtgtctcactctgtcacccaggctagagtgcagtggtacacttatggctcactgcagcctcaatatctcaggctcaagcaatcctctcacctcagcctcctgagtagctggaactacaggtgtgcactaccatgccaattaatttttgtattttttgaagagacaaggtctcgccatgttgcccaggctggtcttgagctc

SEQ ID NO: 390835 - DNA, 1000 bp, Homo Sapiens; identical to SEQ ID NO: 207068

SEQ ID NO: 390836 - DNA, 769 bp, Homo Sapiens
  misc_feature (37)..(37): n is a, c, g, or t
  misc_feature (93)..(93): n is a, c, g, or t
  misc_feature (689)..(689): n is a, c, g, or t
  misc_feature (724)..(724): n is a, c, g, or t
tcgagatccatgaagtgctccctcctccaacacttcnccagcctcctattcacagctccagcctccccacgtccgatatctacccccaggggnaccgttactattgacagcgagcgcgcggagctgcatgggcacacaaggtggaggggacaccaaggtccgttattccccagcacgttcactgccccagcgacagcgcaagcctgaggcacgcagacgcgggaggaacccgaggcacagcacacagcaggtgaggggcgtggtactccggtaccctcagtcggccgaccatagagcttgtagacctccaggactcctagagagcttccggaagtgcctttggggcaagatgcgtgctggccggtgttgtgcctccgcagatttagaagttagtggccggagggggctggtccgagtacagctttcatcgcctttactccccgaccttccttcgagtctgtttatccgttgcaggctcccttccccacgacggggcgcctctgcaactcacagtgagtacggtcgggctctgggccggaggaaagtgggtgctttgtggctggtccaggccgcagctgaggactggcctgaggggtccggagaggggcctgtgcggtgttcggcgccgcggaccgattctgacgccttagttgctgttgcaggcagagtacgtccccacgaattgcccntgactttttgcgagggaaccttttatgaagctttncttacatagataatcgtgttgtggtatggttttgtagtcgacagg

SEQ ID NO: 390837 - DNA, 1000 bp, Homo Sapiens
tttattgtttaagcaaaacaaagctataatattgtaagattgcttaatttattaaatttttttgtggaatattaaacgaaggtgaacaatctgttttcttataggtggtaagttttcttcatacagttcttttgtgtgacaaactggatttcagcacggcgttagtggtttgtcctcttaatactgctttgaattggatgaatgaatttgagaagtggcaagagggattaaaagatgatgagaagcttgaggtaacttattttaaatgttttctattattaaaatagtcacatgaaattcatatagtaaactatttttaattttttttaatttttaatgttttttaaccagtgatgcatatttcagtgggaatatttaatattcacatgtttttagtagctacttaaaaaaatctttatttccccacaaaaggtttctgaattagcaactgtgaaacgtcctcaggagagaagctacatgctgcagaggtggcaagaagatggtggtgttatgatcataggctatgagatgtatagaaatcttgctcaaggaaggaatgtgaagagtcggaaacttaaagaaatatttaacaaagctttggttgatccaggtaaggtattaatagacagtgacataaagaagcaagttgaataaaaaatgtgtttatattttaacaaatagtaattgcacagctactaagtatctggtctttgttgtgttatccttcaggttttgccttttagaaaattcttagtatttcaatagaataaaatcacccttaatgtcgccagctgttcagaatttatttgctgagtctgaaagtgtttagggttttaggggataccttgtaaatacttaaaaatgcatcaaatgcctgtgttgcaatcaaagattcttccagctatccaaatattaggtgataacaagagctctctccacatcctgaaaacagtttgtgtctttccaaacttcatgtcattagaagaattgctgcttgctt

SEQ ID NO: 390838 - DNA, 752 bp, Homo Sapiens
agtaggcgattcccgtgttagccaggatgtccgatctcctgacctgtatcaccgtctcgtctccaatgctggattacaggcgtgagccactgcgcctgctaccaagaccattggtaaaagactatccttttaccattgaaatgcctggccctacaattaattatcctatgtggctctctatctggactctattctgttctattgatctgtgcctgtccctttactacactgtcttggttactgtaactttgtaagtaatgaaatcatgaagagtcagccctccaactttgtttttctttttcagaattgtcttccctcctctgaggtggcattctcatatacattttacaatcaccttgtaatttctacaataaaatcctgctgggatttttgttacaattgtgttaaatttgtagatcgatttaggaagaagtgatatctttactaggaatctctaatccataaacactaatctgtttttttagccttgttttcagccagtccctcatatctctggacttgattgaagattttcttgaattagctagtagggagaagacagaagataaagataaaccccttatttataaaggtgagctacaaatatttctgtgtcgtaattttaaaaatactgatttaaacataccatacaaacattttagcaacaaaagaaacaaaactacccagtctcacaactctaccatatcaaaatttttttgcaatgtctatttgtccttatccatatatattgg

SEQ ID NO: 390839 - DNA, 1000 bp, Homo Sapiens
ggctctgggggcctgctgtggcacagaggacacctccaagagtggggcgtggcagagctgcaacactgacacgagggatttaggaaggtgctccatttgggagggcatttcagagagaaagccacacttaaccttgagttatatgcagtgcagtatgagcttaccaggcgaattcaaacccctcaccttgtgtaggatataccaggagaagttgaccatggaggtgctatgcaaacctgtgtcttttctcatgtaaattttaaagaaaatcagtcattcctcaagaaagaaggcaggtgtggggcccacatggtgtggtagggtggtggatggactcagctaagcctgctgctcctgggccacggtgagaaaccagctgtggtgactgggtgggttaggcgccttcccacagcctgctgctcaggtggtgcagggcagctacgggctggtagtgacgccctggatatgaaatccgtgagtgtgtgcgggaactgtggctgaccatcctaaggaggtgctgcagggagggaaagcaccggggacagagccataaaggagggaacgtggattggaggagccaggagcaagggaggtttatagctcaaggcggcagatgcactggccccaatgaacagcagctcagaagcagcgcagataaacaggcatggctaggccctaggcaggggatactgcatttacttttgcataaattcatgaagtagttatatgcttttgactggaaacaataggaggcccagtgaaaacaaagagacttagcaatccaggctttttaggattggatgcttgcttgagatgcctaagcacatagaagacactcggatgcccctggggtcaaagtgtctactggatgtagacttacaagggccacggcaatggaggatggtgggggaagtgatccccgggaaaagtcagctgcgggtacacctgccctccctctcaccacaccaggcaccttcttcaagtttgagtccctaagtaa

SEQ ID NO: 390840 - DNA, 1000 bp, Homo Sapiens; identical to SEQ ID NO: 281752

SEQ ID NO: 390841 - DNA, 1000 bp, Homo Sapiens; identical to SEQ ID NO: 201465

SEQ ID NO: 390842 - DNA, 1000 bp, Homo Sapiens
ctcgacatctgttaataaagccgtaggcccttgtctaagcgcaaccgcctagactttctttcagatacatgtccacatgtccatttttcaggttctctaagttggagtggagtctgggaagggttgtgaatgaggcttctgggctatgggtgaggttccaatggcaggttagagcccctcgggccaactgccatcctggaaagtagagacagcagtgcccgctgcccagaagagaccagcaagccaaactggagcccccattgcaggctgtcgccatgtggaaagagtaactcacaattgccaataaagtctcatgtggttttatctactttttttttctttttctttttttttgagacaaggccttgccctcccaggctggagtgcagtggaatgaccacagctcaccgcaacctcaaattcttgcgttcaagtgaacctcccactttagcctcccaagtagctgggactacaggcgcacgccatcacacccggctaattgaaaaatttttttttttgtttagatggaatctcactttgttgcccaggctggtctcaaactcctgggctcaagtgatcatcctgcttcagcgtccgacttgttggtattataggcgtgagccactgggcctgacctagctaccattttttaatgcagaaatgaagacttgtagaaatgaaataacttgtccaggatagtcgaataagtaacttttagagctgggatttgaacccaggcaatctggctccagagctgggccctcactgctgaaggacactgtcagcttgggagggtggctatggtcggctgtctgattctagggagtgagggctgtctttaaagcaccccattccattttcagacagctttgtcagaaaggctgtcatatggagctgacacctgcctccccaaggcttccatagatcctctctgtacattgtaaccttttattttgaaatgaaaattcacaggaagttgtaaggctagtacaggggatcc

SEQ ID NO: 390843 - DNA, 1000 bp, Homo Sapiens
tccctccttcttccctgttgccctgtctgagtcctgggttccctggggcccttgtggtgggatgtatgagcaaaagcaactgccttcagttgcagaaccattctgggcctggctcagcttttggtgcccccagtaggcctacaggtgcttttttgtctgagattcagggcctctcaggctcttgggcttcctcttcctcacgctacctcctctctctgcccctcagcagctcccccaaaggctgtgctgaaactcgagccctagtggatcaacgtgctccaagaggactctgtgactctgacatgccgggggactcacagccctgagagcgactccattccgtggttccacaatgggaatctcattcccacccacacgcagcccagctacaggttcaaggccaacaacaatgacagcggggagtacacgtgccagactggccagaccagcctcagcgaccctgtgcatctgactgtgctttctggtcagtggaggaaggccccagggtggacctgggagggccaggatggatgaaatctgctttcaggcagaggtttgcaggaaaggagggtggcctgcttactgggaagtatcgctgtgagttgcctcagcacatatcagtggttgcttttgcctcagtcctgattgaacagaagaaggttacaaggccaaaaacaggcagccaagtgtgagagaagcagaaggaaatccctactgcataaaatccatttccattttaatggcagaattgaaaagcacagaccacaagtgaatcctagccctggaaatgactcactatacaacatgatgaattcatttaacccttgagtttccatttcttcacctgctccgtggggcactaacgcctccctcagaggcttctggtgagaatcagtgtttccctgcccccgccccggcctccatgccccttctccacgttctcactgtgctaggtgctcttctctgtctttctcttccaccagcctgtgggaaacctgag

SEQ ID NO: 390844 - DNA, 1000 bp, Homo Sapiens; identical to SEQ ID NO: 281754

SEQ ID NO: 390845 - DNA, 1000 bp, Homo Sapiens; identical to SEQ ID NO: 281755
  misc_feature (292)..(292): n is a, c, g, or t

SEQ ID NO: 390846 - DNA, 1000 bp, Homo Sapiens; identical to SEQ ID NO: 114810

SEQ ID NO: 390847 - DNA, 1000 bp, Homo Sapiens; identical to SEQ ID NO: 201440
  misc_feature (999)..(999): n is a, c, g, or t

SEQ ID NO: 390848 - DNA, 1000 bp, Homo Sapiens; identical to SEQ ID NO: 114811

SEQ ID NO: 390849 - DNA, 1000 bp, Homo Sapiens; identical to SEQ ID NO: 114812

SEQ ID NO: 390850 - DNA, 1000 bp, Homo Sapiens; identical to SEQ ID NO: 281760

SEQ ID NO: 390851 - DNA, 1000 bp, Homo Sapiens; identical to SEQ ID NO: 281761

SEQ ID NO: 390852 - DNA, 1000 bp, Homo Sapiens; identical to SEQ ID NO: 201442

SEQ ID NO: 390853 - DNA, 1000 bp, Homo Sapiens; identical to SEQ ID NO: 281763
  misc_feature (162)..(162): n is a, c, g, or t
  misc_feature (207)..(207): n is a, c, g, or t
  misc_feature (667)..(667): n is a, c, g, or t
  misc_feature (720)..(720): n is a, c, g, or t
  misc_feature (954)..(998): n is a, c, g, or t

SEQ ID NO: 390854 - DNA, 1000 bp, Homo Sapiens; identical to SEQ ID NO: 281764

SEQ ID NO: 390855 - DNA, 1000 bp, Homo Sapiens; identical to SEQ ID NO: 114813

SEQ ID NO: 390856 - DNA, 1000 bp, Homo Sapiens; identical to SEQ ID NO: 281766

SEQ ID NO: 390857 - DNA, 1000 bp, Homo Sapiens; identical to SEQ ID NO: 281767

SEQ ID NO: 390858 - DNA, 1000 bp, Homo Sapiens; identical to SEQ ID NO: 114814

SEQ ID NO: 390859 - DNA, 1000 bp, Homo Sapiens; identical to SEQ ID NO: 281770

SEQ ID NO: 390860 - DNA, 1000 bp, Homo Sapiens; identical to SEQ ID NO: 281771

SEQ ID NO: 390861 - DNA, 1000 bp, Homo Sapiens; identical to SEQ ID NO: 281772

SEQ ID NO: 390862 - DNA, 1000 bp, Homo Sapiens; identical to SEQ ID NO: 195122

SEQ ID NO: 390863 - DNA, 1000 bp, Homo Sapiens; identical to SEQ ID NO: 281774

SEQ ID NO: 390864 - DNA, 1000 bp, Homo Sapiens
acatggggaggcccaggccattggcttggactttgcagggaggtgacagggctggagagaagcgagtgagacaggaggggagggctgagctgtgtagaactgggcggcagctgggaagccagtgccagcctgggttgcagggcaggccttgcatctgagagagacacccaggcaatggcagggggcaactggattgtcaaacacagatctcagagaaacctggaatcactggcccagaggtagatgccaggcctggaaacaccaggctggccaggggagacaagatcaagttagaagttggccccatgccaaacgctggttagggccagtaacaacagccacacagaccaggagaatccagcaagcgggggtggccaaggccacaggaagggccagtgggacacctcgagcctgagagatcagttcagaggcagcttcgaaacagccctggctgggggctgggagtgccctggctgaagctgcattaggggattatgggggttgaagacaggagttggtttgagaaagaacaggagactaaaaacacagccagggagtgtgggaccccggccagcctcggagggggggacaaggttcaacttctctttaaattattttattcaagaagtgggggaggacagacaaggggactgagctgagccctgagtccctgaacctcccagctcagcccccacagcaggactggactcaaagtcagagggtggagactccagccccacccagacacggttggggacagacaggacccaggaataccgactgactgtcctccaggggatggcggccgcagcacacagggcccggcccgtggaccgcccgggtggggctatttgggggtgccgccgcccttcttgggagtggtgggtttcttgccctgccagaggtgtccctggatggtgaaggcatcgacgctcatggacatggtcttggcggggatctgggtgaagcgcttgcggtccgagttgtacttgtagatgcc

SEQ ID NO: 390865 - DNA, 228 bp, Homo Sapiens
  misc_feature (98)..(98): n is a, c, g, or t
  misc_feature (127)..(127): n is a, c, g, or t
tgatgaaggctttgaaggcaaatctctttatgaaagttggactaaaaaaagtccttccccagagttcagtggcatgcccaggtaaacaaatgaatgangtttccactgaattcagtgtgggattgtnttgaaaataaaagcacattttctttcaatcattaagtgaaaaattaagtttcaaaatggtctaaaatctgataaagaaaagcattactttggttcacaaat

SEQ ID NO: 390866 - DNA, 1000 bp, Homo Sapiens; identical to SEQ ID NO: 201468

SEQ ID NO: 390867 - DNA, 1000 bp, Homo Sapiens
ttaatctctttaaggcgggaaatacatgtggtgggaagatgttaccagagagagaaacaaaggcagtaaattattttgtgacatgtcttagattttgaggaaaaacagaattgcaacttaggttttatctaattttatctactttatgaccttgcagcagcatggcaaaagagacaggattttacaggactttacaaagtatgttcacaaggaattggaattgggagcatagataaggtccgctggtcacagaaaaagggtcttttaacattccttttagttttaggggagggggaaggaagagagggagagaggacacagggaagcttacagcagaatttttgctgtttatagctttcttggggaaggaaacacatgcacaaatcctggtgttaggaatattttaggcatgtatcttcagtactcttcatccaggaccgaagtaagtcctgatgcaggaaatgagtgtttcacagctttctgaacccctactcgacccaggaagcccagctggaccctcctttcatgagcaggttggtcagcccctgcactgccccttccagcctctgtgcatctcttggggacggggcaagtgctcaggccttctggtttcgggcctcctgccgtgagcagcagctggatccaggaccctgggaggagttcctgtgtcctgcaggtctcagctcctactcaacgtgggctctttccgggaacgtcagtgctgagtccgggacaccctgggcccaaggccacgctcgcggcctgtcggcaatccaggctgtcggctcaggacagagggaagggttaagcccccagcagggccagggaggggcaaggtggcaccggctccccagctgctcccaggccctgctctgtggtgctggggactggctttagttcctcggggtggagggggcacgcgctgctgctccgagctgtctggagcagccagtcctgcagatgtgggcagctcagggcccgtgggagggagggggctttg

SEQ ID NO: 390868 - DNA, 1000 bp, Homo Sapiens; identical to SEQ ID NO: 206211

SEQ ID NO: 390869 - DNA, 1000 bp, Homo Sapiens
acacctctatatttctgtgtgtgtgtctttaattcctctagtgccgctgggttagggtctccctaaccaagctggtctggcatggtggattaaaaattctgaagaattatctgctagaataaataaattttgaaaaaggtgattagatcttagtagaaagatcacttcaagtagattactggacctacaataagtaaagaaaatcttcccattatgatgctgaggaacttttgaaaagtgaagtgtgagctgaaaccagggcagtgtttgcacactagaaaggtcagattgcttcaagggcagacactgataccaagagccccaaatttcaactgaaactgagacagtttggctgtccatatggagatatcagaatgtaaaataatccatatgcatagtaaaaaaaaaatgggttccaacactaagatgatctcacatgacaagtttgaaagtaaccaaatattttataaagacacaaccaaagaaataatattagttagctgaaaattgtagtacagaaagtcaaggatatagaaaaatatagagtttgagatacatgaagaaaaaaggagacgctctgtaatgtgcccatttatatatttaaaaataaattactgtcagtatatttttaataaacactgaaattcccagaaatgaaatgattattcaagtctttctacagtagaatagaaaaaaaatagtgttcacacaatgaaatattacctaacaatgaaaattaataaaagttacaactgtaaccaaaaatgtggacgaattatggtaacgtaatgagtgaataaaactggttgcaaaaggctctatatagttatccaacatgtttacatatttctaaaacaaacaaaaataatcgatacactaatgacacaaatgtatgaaatagaaatagtgatatggtttggatctgtgtccctatccaaatcttatgttgaaatgtaattcccagtgctggagttggggtctagtggtaggtggttggatc

SEQ ID NO: 390870 - DNA, 1000 bp, Homo Sapiens
attgaggaataattatcttgtttctgttgccaaccactcctccctaaggagaaaggattcagcacttatttaagacaattaaaaactatacctggcaaaatattgtaaagcttttagtggcaaatttcaaagagaaaatgctctagtgtagtaaaaagccaataagtttcaatgcaatttgcctttagcgaaaatcacatttaaaaacttcctttttgtactgtaccttgaggattttcataagagtacttaaacatgagaatttgtacacatgagagaacatactgttaacagctgtctttgtatacttacaagggaacaatttatgacagcttttgaaataattttaatagtaaggagggaattaagaagaaaggaaaatcttgcttatgttgtttgtataatgaagaattgaaataagttttgaagggacaacctctttattaatggtaaatacagtctagtaatgttattggagctatcatatgcattattgccaaaaacatagtgagaaagtctaggatgagcattcttttgcatgagatgtatcaaaaacaaactgagatctgggtggagatgacattgtatgatagaaggaggtaattattcattggcctcagtatatctgtcaaaatggttctgcaaatgagctaacaaccagagaaatatacctttccagaaacaaatattacgtgttatgaaacagttaatcaccattattctcctcctccccttcctccccatcatcatcctaatggctatcatttattgagcctcccatatatcaaaagcaaacctcaggataaaaataaagaagtccagtggcagtcagcttatcttaaaggtcctcctccatgaaatttcaacttatcctgtggtcattgtttctacaacactctggagtctttaacaatataatctttatgatttatttggatttttccagttgttctgggagaagtgggtttatcctatccattaactgaagtttgttatgatc

SEQ ID NO: 390871 - DNA, 1000 bp, Homo Sapiens; identical to SEQ ID NO: 281779

SEQ ID NO: 390872 - DNA, 1000 bp, Homo Sapiens
gagaaaactttaaaataattccagggtttcaactctgacattttgatgaagccaagttattggcctgttttattcatttactgaatagactatatcaaattatttggaacaatggaaggaaaccattctgagttatttatttatagttagtcttccacacatttgacagggttggaatcattaactcatactgttaccaatgcttacacagatatatttggagagtaaatggatgtatttgagggctttgtagtaactctcactggctcacactcccctttggtacaatagatccagcacacagcatgcaagtctgagattactgctagacctggcccaaggtgacaaaaccagacaattatgtcagggtcaattatgtttggggtgagaagggtggagaatggaaattatagagtatttgagagcatcagctaggtgaaggaagtaacttcagtagaggcccagaacatggtttttgcacacaaccatctatgcaagtgcaggcttatgtggaagacatttcttctaacatggacatagcctggaaacccacatgctcatatgtgttaataagtatttaagatacaaatggcacattcctaaatgtggtgcccttctgcagtgtacatatccaacactcttaggaggtagccccagaaccagatacaactgcctgcttcccaatttcccttctcaaaatttacactgtaattttttttcttcagaaaagggttttttactcagtctgtgaaaacctttaacaactcaaattttggacaaaattatttttctttttttttttaaataactgtggcttttgtaccaaccacttaaatcaaagccaaagaatcatagatgtgctgttttagagccttcctttccatttatattcacttttcccctctcctccacactacattgaatgaagtgcatatggttcaccacgttaatatctgtgctgaggcaatagaaagaggggaatggaaaggtgtttaggatc

SEQ ID NO: 390873 - DNA, 1000 bp, Homo Sapiens; identical to SEQ ID NO: 195140

SEQ ID NO: 390874 - DNA, 1000 bp, Homo Sapiens; identical to SEQ ID NO: 281781

SEQ ID NO: 390875 - DNA, 1000 bp, Homo Sapiens
caccctctctgaccccaggcacaacccaacccaaagccatggccagcaccctcagtccctggagcctcctcatcatcctctgctttatcctccctggcatctgaggagagttctttagagtgacaggtggaaggtgatatcaagaagcctctgttagcctggtctgggtcctgctctcccttcagggaggccgcctgtctactcaccactgtgcctttctggaaagcaggagttcaagccttagcaagcccagaggcccccagcagatgatgaggacattgtcggctcaacatctcaggccactcattaccttcgctcatgatcccagcagccatttttcttaacaccttctgccactttctctcggtgctaatggatggaacacctgcacaagttttaactgaacaagaaatcccagcaaaaaagcattttctttctacttttttgattgtggaaaagcagacacttctctgaagcatgaccttattcttccaaacagtatcgcttattcttccagtgcatgctggacttcagacctcagggatcctttcgatgcactgaccaagaattgtattaattttttttatttttatggttttttacattttctcatcctgtcaaccatactggagtgaagtggcatagtcttcactcactgtaatctccagctcctgggctcaagtgatcctctagactcagcctctagaaatagctgggactacaagcgcatgccaccatgcccggcacattgttttatttttaggtagagattgggtcttcctatgttgctcaggctagtcttcaactcctggcctcaagcaatcctcccaccttggcctcccaatgctctgggattacaggcatgaaccacagtgcctgttgtagaaattttaaattatttaatacggaaaagtattacattcatgattattttatttagtaatttattagcctagatttatagttaaataaagatgtctattttcaaagaaaaaaaaaa

SEQ ID NO: 390876 - DNA, 1000 bp, Homo Sapiens
cactgattattttaagattttaaaaattattattgctaccttaatgtattgctacaaaaatctcttgttgggggcaatgcaggtaataaagtagtatgttgttatttgttatcttttgacagagaaaatagcattctctgttttagcaggtgaatcctctatgctctccaaaagatcagcatgaccaaaattgatgtccactcatgaaggacttgttcgttttgtttgtttgttttgccacgaggatcggatcttgattctcctcgaagtatctgagaaagtctagttgtataggccagacataggttctgtcttgagtggtaaaagttgtgggaaattattacttatatcattcaaagaacattgtttcttgtgttctaagcacagtaaggggttgggggtttgaagaaactttttgagtttacataataatgaagagcagaattatcatatgccaggtatcatctttctattaattcacttaatctttgtaacaatcctattagatatagacactataatccccatttacctgtgaggaaacagacaaagggtggtaatttccccagcatcacaactagtcattggaggagctgggatttgaaccaaagaagtctggtaccagaatatgtgcctttaactactacattgccctcagtgcaacaatctgagtaagcaggaaaatgatgggcccttagttgagtttctttcctcatgtgaaattaggatgccaaacttagatgatctctcaaaatactaatggaatgcctgttatgtgccaggcatcatgctaggcttgggataaagctgtgactaagacaccctcatcctcatacagcttacattctagaagcagagacaaactggtgaataatagactggtatattctacaaggcaaaaccaaaaactgggcgcagtaatgagaagaataggggaacccgctgtgcatcaggtggttggacctgggttctttgaggtgactgtaaacagagctgttgg

SEQ ID NO: 390877 - DNA, 771 bp, Homo Sapiens
ctctctctctctctctctctctctctctctctctctctctctctctctctctctctctctcctcgtgccgaattcggcacgaggctgcccaccctctggacattcacccagccaggtggtctcgtcacctcagaggctccgcagactcctgcccaggccaggactgaggcaagcctcaaggcacttctaggacctggctcttctcaccaagatgaactcactggtttcttggcagctactgcttttcctctgtgccacccactttggggagccattagaaaaggtggcctctgtggggaattctagacccacaggccagcagctagaatccctgggcctcctggcccccggggagcagagcctgccgtgcaccgagaggaagccagctgctactgccaggctgagccgtcgggggacctcgctgtccccgccccccgagagctccgggagccgccagcagccgggcctgtccgccccccacagccgccagatccccgcaccccagggcgcggtgctggtgcagcgggagaaggacctgccgaactacaactggaactccttcggcctgcgcttcggcaagcgggaggcggcaccagggaaccacggcagaagcgctgggcggggctggggcgcaggtgcggggcagtgaacttcagaccccaaaggagtcagagcatgcggggcgggggcggggtgggggggacgtagggctaagggagggggcgctggagcttccaacccgaggcaataaaagaaatgttgcgtaactca

SEQ ID NO: 390878 - DNA, 1000 bp, Homo Sapiens
ggtaaagacagagttttaagatggaagaaaggataaatcttctcaaattcagcaaagtaaaggtaaacatttaaaaatcaaatgctctttaagatttgttattaggcagtcattagcttgtttgttaaagataatttcaatggatggatagaaaacatggttccagaatgattgggctttgaggtaatgacttcacaaactatctactttttcctatttttcaaatgaaataagatggaaagaggatttttcagttgaagaagagactttttttctaccccagccaaaggcagggaggagttgtgaaatgaggattatgccatattcccagaagggactgtgttggcttcatgtgactgctacaacaaattatcacaaacctagtggtgtaacacaacagaaatttactctctcatagttctgaagggcagaagtctgaaatgagtattactcggctgatatacaggtatcaacaggcccgtatatcctttggaggtcctaggggagattttgtttcttacctcttctaacttctggtggctttgggtattcattggcttgtggcctgagtattcacattctgcccagatacactgtctctgtctctctcaatctgtctcgtgtttgtgtgtgtgtgtgtgtgtgtgtgtgtgtgtgtgtaatcttcctctgccttttacaaggatacaggtgattgtatttagggctgatctgcataaaacagaataatctccccatctcaaaattcttcatcatgtgtgtgaagatccttttttgacaggtaaagttttagggattacgatgtgaatttttttgcctttttgggaggagagggtacatttttcagctcaccacagagatacatattgagattattccaattccacaaggaaccataaatcctaggtttctgtaatagaatcttagttgtttatttctcccattttacccatctctcctcagcagccattcctatttcccctagtatgaagaagaaaga

SEQ ID NO: 390879 - DNA, 1000 bp, Homo Sapiens; identical to SEQ ID NO: 281782

SEQ ID NO: 390880 - DNA, 1000 bp, Homo Sapiens; identical to SEQ ID NO: 195141

SEQ ID NO: 390881 - DNA, 1000 bp, Homo Sapiens
tttggattgtttccaagtctttgctattgtgaatagtgccacaataagcatatgtgtgcatgtgtctttatagtagaatgatttataatcctttgggtatatacccagtaatgggattgctgggtcaaatggtatttctagctctggatgcttgaggaatcgccacactgtcttccacaatggttgaactaatttacacttccaccaacagtgtgagtgtaaaagcatccctatttctccacatcctctccagcatctgtttcctgactttttaatgattgccattctaactggcatgagatggtatctcattgtggttttgatttgcatttatctaatgaccagtgatgataagcattttttcatgtttgttggctgcataatctacttttgagaagtgtctgttcatatcctttgcccactttttgatggggctgtttgtttttttcttgtaaatttgtttaaattctttgtagattctggatattagccctttgtcagatggatagattgcaaaaattttctcccattctgtaggctgttcactctgatgatagtttcttttgctgtgcagaagctatttagtttcattacatcccatttttctgttatggcctttgttgtcattgcttttgatgttttacacatgaagtctttgcccatgcttatgtcctgaatggtattgctcaagttttcctctaggatgttttatataaatgcaactactcctgctttcttttgtttttcatttgcatggaagatatttttccactcttttagcatgagtctgtaactgtctttaccagttaagttggtttcttgcaggcagcatgtaattggatcctacttttttatccatactgccatactgccaatctgtatcttttaagtggggatatttagttcatttatcttcaagattaatataggtgtgtaagcttttgttcttgtcataatctcctagttacttcgtggtatcaattctgtaattgttttagaa

SEQ ID NO: 390882 - DNA, 1000 bp, Homo Sapiens; identical to SEQ ID NO: 281784

SEQ ID NO: 390883 - DNA, 1000 bp, Homo Sapiens; identical to SEQ ID NO: 281785

SEQ ID NO: 390884 - DNA, 1000 bp, Homo Sapiens
aattcagaagagcccgcaacccaagaaggggcgtcctggtcgccgccagctggaggctggggcgggtactaagggggttcccatctcgcgtccagacccaccgagtctgtccgcagcgaataagggcaggtggcgcgcagccgcggcccgggtgtcggctctacagcgccgtccgcccacatccctgttgcgaagctcccctctcggtccctgtgggaccctcgggagccggtgggacgcaggacctggggctagggctgagcattccccccatccccaggtctggttcaagaaccgccgggccaaatggcgacaccagaagcgcgcgtcggcttccgcgaggctcctgcccggcgtcaagaagtccccgaaggggagctgctgatgactctaggagctgcccctgggctcggccaccctttttgggatctttggagttggcgctgagagaagacaggtctacccgaaaaggagctgggagagtacaccggccgcctccacccgtctccacagcccttgcctcctgcagctcgtgctgccgtggcgctggggacgggcccccggtgcttggtgttccacggcagtgggagtggcgagtcccttgggggtgggctggggcatagagcagtttcctcagctccctaccccccgagagacactaactccaccgcaggaggggaaccaccccgtatcaacacgggacccagaatcctacgcagtggagcgtctctccgcaccctgggacatgctggccaccctcttctcaatgtggacattgacctaacttgacctggctcgtcctcccccagcgggagaggggatggggttcgtgtctgtgcagtcctggcgttgcaggcttcccaggccctgggctgggtcttggtatctggacctgtagaataagaaggtcgcaggagcgattccaggagcccctccacagtcccttcaccttcgagcctcgcgctgatactgagaaactagcaacttcaaataccacaga

SEQ ID NO: 390885 - DNA, 1000 bp, Homo Sapiens
taccagcttagactttgattaggtgagtttttcaggagtcaagtcttacaacccatactggtgtggctaaagtgttagtttccttgccttccaacacttttaaatactattgtacttactgggcaatctcaaaaaggagcaataagttactctgtttttcattactctgtttttcatattaatgagaaaattttagaaatacaactcccacatgtataatgcagagtgaaatattatctaagtgtcatttaaaacatgagttggcctttgactgtattcttgcattctaggtatttagtccttgtgctggccttgcaatagctcagataattatggtagtatatacaggagcatgttaagcagcagccactttgagtattagtgctcatgcttgctgagttgaaccttggaagactgacctaggcaattgagccaagccgtccagccctacgttagactgatgctgtggctgccctgcttggttcacactggaccctttgtagcactgaattaggaagaaagaggttcaaatcagtagtgtctgatttgcattccttagaagcaactggaaatcctagcatagcctttataagtaggcttccatgaggaatactttaggatagcggtccccaacctttctggcaccagggactgggactggtttagtggaagacaatttttccatggaccacggcagggggatggttttaggctgaaattgttccactcagatcataaggcattagttagattctcataaggagcatgcaatctagatcccttgcatgcacagctcacaatagagttcacactcctctgaagatctaatgctgctgctgatctgacaggaggtggcactcaggcagtaatgctcgccaggttgcctgctgcctacctcctgctgtgcagcctggctcctaataggccacagactggtactggtcagcatcctggggcttggggacccctgctttaggatatttccctacaggcttttaag

SEQ ID NO: 390886 - DNA, 1000 bp, Homo Sapiens
caacagcttctccagcttaagagcaccgagggagcatgcaggagggatgcttggagctgggagggtctaacagtgctgcttcaagattcattccatccacggctgtttactgagcatctccagtatacaaggcacggctccgggtgctggggatacaaggcagacgccatccctgctctctaagagtttaaattctagttggaagggggatattaaattggtaaacaaataagagatgatttccagcagtggtaaaggctacgaagaaaacaacgtgatcaggaatgcctagcagggaggtcagggagtgtcagggctcattaatgtgatcagatgtgattctgagccaaatcggagctaccagccagataactcatatgtaagcacaggcactgaggaaccagagtgaagacagagcagacaccacacagcaaaagagcgtggacctccgagttgcacctggcctgagactcagtttccccatctctaaaatggagcaggccaggcatggtggctcacacctgtaaccccagcactttgggaggccaaggtgggtggatcatgaggtcaggagatcgagaccatcctggccaacatggtgaaaccccgtctctactaaaaatacaaaaattagctgggcatggtggcacgtgcctgtaatcctagctactagggaggctgaggcaggagaatcacttgaacccggaagctggaggttgcggtgagccgagattgcgctactccactccagccttggtgacagagtgagactctatctcaaaaaaaaaaaaaaaaaaaaaagagccactgatagctacctcacagggttattgagaaaactagggataacatttatactagccacagggaagggttttttgttgttgttgttgttgttgttttgttttgttttgtttttttctgttgagacggagtctcactctgttgctcaggccggagtgcaatggcacagtctcagctaactaaactctgcctcccg

SEQ ID NO: 390887 - DNA, 1000 bp, Homo Sapiens; identical to SEQ ID NO: 281789

SEQ ID NO: 390888 - DNA, 1000 bp, Homo Sapiens
ccccccttttcctcccactgaagccccagttagtcagcagggcctagagtccctgtccccttttgagtacagccaagtgggggattccccagctcttaagtattgggggaggaaccaggggacccagagaggcacaccttgagaggacgcagatctcttcaggggtactgccaggtagcaggctttattgggaagggacaaagcctcaggagctgggtgccccagaggctgctgggtcttgagccacagctgcagccaatgcagcagctcgcgcctccttcttccgtttctgtttttcctccttgaggcgcttgcgctccttcttctctaggtcctggagcagctcctggaagcgggcactccttgggtccacctggtagcccaggagctcctgggcctcagcctgcagtcgggccctcctctccttgtcagcctgggccttctcccagttctcccgctgctgctgctgccagttcacaatcatctgtggcatcttggccatgcactctgcgatgtgctgctccctgcaggggagggagagtgggctgtgacactggcactcagccagggcagagcccacccacccatatctcacccataggcctttgcccacgagcctgcctcctcaactcccccagtagattaactgtcaggaaaagcccttgacaagtgaagaaacaggaagagatgatgagaaagttacctgtgcatgaatttgatcacaagggcatgtcaagccccagtaaaccccaggtgccaaagccaaatcagcatttcactgagctgcctactgagcaagccaagtgccactcccatggataatttcacacctttatttcatagacattgctgagcacttcctgtacagaggccaggcccaattctaggcacaggagtgaaagcaagaaagacatttcccaccaatccttgagtttgtagctaccagtcacagccccatttttttcttttaagttcaggggtacaagtgcaggtttgttac

SEQ ID NO: 390889 - DNA, 1000 bp, Homo Sapiens; identical to SEQ ID NO: 281790
  misc_feature (198)..(198): n is a, c, g, or t

SEQ ID NO: 390890 - DNA, 313 bp, Homo Sapiens
tcacttccagagcttgaaaacaaaaatctgtatgttctctcagagtcagaagtctgtaatgcgccgggcgcggtggcgcgtgcctgtggtcccagctactcgggaggctgaggctggaggatcgcttgagtccaggagttctgggctgtagtgcgctatgccgatcgggtgtccgcactaagttcggcatcaatatggtgacctcccgggagcgggggaccaccaggttgcctaaggaggggtgaaccggcccaggtcggaaacggagcaggtcaaaactcccgtgctgatcagtagaagtctgtaatgctac

SEQ ID NO: 390891 - DNA, 345 bp, Homo Sapiens
aggtactacccaatggttttctaaaatacttgcatctgcacatgccatgtcccagctacccaagaggctaaagcaggtgtattgcttgagcctaggagttctaggctgtagtgccctacgccagtcgggtgtccgcactgtttggcatcaatatggcgacctcccgagatggggggaccaccagattgcctaaggaggggtgaaccagcccagatcagaaacaaagcaggtcaaaactcctgtgccgatcagtaatgggatctctactgagaatagacactgcactccagcctgagcaacatagcaagatcctgtctctaaaaaaaatgaataaaatacttgtac

SEQ ID NO: 390892 - DNA, 284 bp, Homo Sapiens
acagaggaactaccataacaagaaccaaagagaaatggcatacctcagggtgggtgcctgtggtcctggctacttggaggctgaggcaggaggatggcttgagctcaggagctctgggctgcagtgcactgtgcccatcaggtgtccgctgtaaattcagcatcaagagggtgacctccctggagcggggaccgccaggttgcctaaggaggggtgaaccgacccaggtcgcaaacggagcaggtcaaaactcccgtgctgatcctttgcacactcaagactaa

SEQ ID NO: 390893 - DNA, 1000 bp, Homo Sapiens; identical to SEQ ID NO: 281793

SEQ ID NO: 390894 - DNA, 1000 bp, Homo Sapiens
agcagaagttctctaggtttggcatctgtgccttggagatactgaaagagaatctgtcatttgacaattgacctctttgtgggatggactcattaagtatgctctcagagactggtatattaccagaatgcctattaattttcagtgagaggcaacaggtattaagtagaacagaatgctcaggttggcagattagaacgatctttcaggagacaaagcaagttttaatcagttgtttggttaataagtatggggtgttcgctgtgatagggccccgccagcttctggctcttgtggacctcaaaagtatcaggtggttttgcaagtggtggtcctttcccctgccccaccccaataggttccccatctgtctagtttgatttttgtagacctttgttttctctagttagaaaatcaggtacactgaatatggttttcatgtaacacctcttctctggagataggggtatgttttcctacccttctagtggagaatcctacttgaggatgacctttcctctcttactaaataatattagtaaatagtgggcaatatattctgctttcagattttgatttgttgagatgtaaaagttgtttggggcttaccaaatctcaagactctctttagctcctgcaggattgtattgcttttcttactggatatttttcctgggtaagcatctttgtggcttcatctcttccccctgtggttttcagtgtatttagtcgagacctctctgctgagcttgcaacctgtttattcacatggcctgccatgccacttggaggtttctgattactcccaaacctgctggttctttatgtctttctcagcgaataattccatctattcatgttggaaacttaggtgatatgctcatctccttttgcctgtttatggaggtcaccagcctctatcatttgtatgatttcgtttacactgtttatatctctctgtcccccctttttctgccattggcatggtttagacctgtac

SEQ ID NO: 390895 - DNA, 1000 bp, Homo Sapiens
tgaggttgcagctgggggtgtctctgaagggctgtgagcccccaggaagccctggggaagtgcctgccttgcctccccccggccctgccagcgcctggctctgccctcctacctgggctccccccatccagcctccctccctacacactcctctcaaggaggcacccatgtcctctccagctgccgggcctcagagcactgtggcgtcctggggcagccaccgcatgtcctgctgtggcatggctcagggtggaaagggcggaagggaggggtcctgcagatagctggtgcccactaccaaacccgctcggggcaggagagccaaaggctgggtgtgtgcagagcggccccgagaggttccgaggctgaggccagggtgggacatagggatgcgaggggccggggcacaggatactccaacctgcctgcccccatggtctcatcctcctgcttctgggacctcctgatcctgcccctggtgctaagaggcaggtaggggctgcaggcagcagggctcggagcccatgccccctcaccatgggtcaggctggacctccaggtgcctgttctggggagctgggagggccggaggggtgtaccccaggggctcagcccagatgacactatgggggtgatggtgtcatgggacctggccaggagaggggagatgggctcccagaagaggagtgggggctgagagggtgcctggggggccaggacggagctgggccagtgcacagcttcccacacctgcccacccccagagtcctgccgccacccccagatcacacggaagatgaggtccgagtggcctgctgaggacttgctgcttgtccccaggtccccaggtcatgccctccttctgccaccctggggagctgagggcctcagctggggctgctgtcctaaggcagggtgggaactaggcagccagcagggaggggacccctccctcactcccactctcccacccccaccaccttggcccatccatggcggc

SEQ ID NO: 390896 - DNA, 1000 bp, Homo Sapiens; identical to SEQ ID NO: 281794

SEQ ID NO: 390897 - DNA, 1000 bp, Homo Sapiens
aactgatgaacaccaacgatctggaggactccaggcagctcacagaggagatccagcggcatctggatgccaggcacctcattgagaagtcagtgcgcaagatcgcctccttgctggcagcgtccgaggctgaggtggagcagctcctgtctgagagagccccgttcacggggcatagctgctacctggaggccctgctgcacttccagacccactgcttcaactggcactcccccacgtgcgagtatgcgttgagacatttgtacgtgctggccaacctttgtgagaaaccgtatccgcttcacaggataaaattgtccatggaccacgtgtgcctcggtcgctactgaagagctgcctcctggaagcttttccaagtggaagcactcccccgaatgtgtgctaatcagagactgaagaggtggagtgagaagtccccgctgctccgggccctcctggggagtccccactctagggctcgctccaggaccttcctcacaggatgacttgctcgctgttacctacttccccagtcttctctgaaaacctacaaattggagtggggaaagctctgtattgagaagggtcatatttgctttctaggaggtttttttgttttgtttttgttttgcccattagttttaaggagcaggaagttcatgggggcttctgtagccccgctcaaaaggagtctttattctgagaaatttgaagctgaaacccctttaaatcttcagaatgattttattgaagggggccgcaagccccaaatggaaaactatttttagaaaatattatgattttttattgcttttgtatttagttctgccagtgttcaagtactaaaaaataaagatttataacagagtcccaccaaaataaaataaaataaaataaaaagtttttcttccttttatggaaaaaaaaaaacacttactttatagtaaactcaaattgctttttttgagagtcaagcattccattcttgacaaagttttgg

SEQ ID NO: 390898 - DNA, 1000 bp, Homo Sapiens
acactgcctacgcctcctacccaggtgcatctgtggacaactaccagcatctgcccttcacccagaatgcggagaccactgagggctaccagccgccccctgtgtactgagtggctgagtgccgtttggggtgggaaggggggcagagaggaccctcccctctgccctggactttcccacgagcctcctggaactgccagcccccctccttcgcctgtcacgtcctgtgcgattgacacacagctaaggagcctcccagcctcggggtctggcagagccacaccccaagtgcccgcacacagatggcttcagtcagccactcactcttccatgacacttttaggaaagggtttttagctagtgtttctccttgcttttaatgaccccggcccctcctggagtggctagaagccagcaggcacccatgtgctactgacaagtgcctcagcttccccccagcccaggtcaggctgtgggagtcgctgttatctgcgttctctgccaaagactcgggggagccctcacacctgccctgtgcagtggggcgggaccaggctcctgcgtcctcactcaggtttgctccccctatccccactgctgtatgatctgggggccaccaccctgtgccagtggtctctgggctgcctcccatggtgtgggggtggggccggtgcccacaacacttcctccttgctcccactcctggcagcagggaagagctttgcctgacaacacccagctttatgtaaatattatgcagttgttacttaagaagcgtgaggagggcaggggtgccccatggctcccagactctgtctgtgctgaatgtattataaagccttaggggagatgccccgccctgggatgctgtttggagatggaataaatgttttctcattccaaaaaaaaaaaaaaaaaaaaaaacatgaattttatggttttttaaatgtgtttatacccaataaagctgattaaaatttctaaaaatattctgttcatt

SEQ ID NO: 390899 - DNA, 1000 bp, Homo Sapiens; identical to SEQ ID NO: 281796

SEQ ID NO: 390900 - DNA, 1000 bp, Homo Sapiens
gggaggaaagaaaggatgtagcatttcccaaatgtgttaatctgaaagctcacacttcctggagcatcttgggtgggggatgagcacagggcaggaaatgggaatgccaagtaaagctttggaaatggttagagggcctgctccagagcaggtgctgagcgggtttagggtctaaaccagattcaagcgcaatcaaagtataacagttgggaagacagatggctcatgaaggtccatgtgatagggaagctgggcaaccccaggggctcattccagcctggacttgacacattggtctctgtttttacctaaaagagccagaagcacttccatgacgatatctttggtgctgtatttccctacgaggcaaagaaggacagggcggcggtgcagcccagcagcctggagatgtcagcgctctgagggcccacaggaggggttaaagctgccagcacagaacttaacgatggagccagctctgcattatccgaggtcacagggcctggggagatggaggaaagtgatatcccccagcctcacttcttatttctcacctcgttccccatcaagccctttacttgacctcctaccaagtagcaccctggattgatcggagcctcctctctcaagctggggccaccctggtcccttggagacgaaatcttcaatgccaggcctggcaagtgggtgaaagatggaacccgctgctgagtgcaccacttcaagtgaccaccaggaagtgccgtcacaccactgtgtatttaactgccatgggtaaaattatttatgcctctgtttaaaaaacgaacaccctagtctgttcctaatggccccttgggtcttctctgtatgattccctgatggagatatttacatgcattgaattttactttaatcacactgtatgtgtgtttgttgggtgggctggtgggggatgttttgtagggaatgtggccctcagttatagagtggggagctggtgggtgtcgcagcctggaca

SEQ ID NO: 390901 - DNA, 1000 bp, Homo Sapiens
taccaggcccaggataactttatgatgatggatgatgctgtcctctgcatgtgtttcagcagagatacagaaatgttagcaactggggcccaagatggaaaaatcaaggtatggaagattcagagtagacaatatttaaggagatatgagagggcacacagtaagggtgtcacgtgtctaagcttttctaaggatagcagtcagatccttagtgcttcttttgaccagacaattagaattcatggtttaaaatctgggaaaaccctgaaggaattttgtagccattcctcctttgttaacaaagcaacatttacacaagatggacattatattattagtgcatcctctgatggcactgtaaagatctggaatatgaagaccacagaatgttcagatacctttaaatccctgggcagcactgcagggacagatattaccgtcaacagtgtgattctacttcctaaaaatcctgagcactttgtggtgtgcaacagatcaaacacagtggtcatcatgaacatgcaggggcagattgtcagaaacttcagttctggtaaaagagaaggtggggacttttctgtgccctctctccccgtggtgaatggatctactgtgtaggggaggactttgtgctctactgtttcagtacagccactggcaaactggaaagaactttgacagtgcacgagaaggatgtgattggtattgcacatcaccctcatcagaacctgattgctacctacagtgaagatggactcctaaagctctggaaaccataattcaacttttctttttaaatcagcttgaaagcacgtacttaaatgaaggcatattcatgtaatgtgctttttttttttttgccagcttttctaagcaaatagattgtctgaattagtcacaaggataattttgtgaaaattcatgtttaagtagcaagtacccttccttttcttatatatttttaaggtattagtttatcttcttctaactggggcagtca

SEQ ID NO: 390902 - DNA, 1000 bp, Homo Sapiens
tcaccccttcattttaattttacctttatacaggaaaatgttattttcttcttgagtacactcttatgcggctcctattggcaagcaaatctcttagttttaatttttgaaattattttaatttttcttatttattgaagatatttagctatattcaaattctagcttgaataaaaaaatttttaagcataattttaaaatttgtttttaattgaaaataacattgtgtaagtttattatgtatgttttgaattacatatagattataaaatgattaaatctagctaattaacaaatgcatgatctaaaagttattgttttttgtggtgaaaacagttaacatcaactaccttttcatttttcaggactgcaatatatcataattaagtatggctgccgtgctgcatagcagatcttgtaaaatatatttcttctatctaataataattatgtttcctttgaccaacatctttccatcctgtcctccaccaccgcaggctctggtaaccaccattctcctctctacttctaagagataagcttcgtggatccagatatcctgcaggaattcctcgagacgtacggtgcgcgcgatgcattcgaagatctccgctgtattacaaattttaatttctcctggcgtgggagttcacagcagccttatggagggaaattcctccaagcctgcgtgtcataaactgaactacagggtttagggtcctcaggctgcccagggatgctggaggtccacaggtcaactgcagggagatggattccccaaatgagcaagaggttctgatgctcaggaaatagattagtagctccaggcaggtgtggcttcatgaccgtaaggaaatggaagcaaagagttgttgggcatgtagaactttcatttcttgcacatttattcagagacagagcatatgcatttttggtagaaaattcaatattgctgttgatctcaaattcaagtgtagctgggcacacatgcatacagctg

SEQ ID NO: 390903 - DNA, 1000 bp, Homo Sapiens
gcctttcctctatccagaacatacaaatatttgtttttgtgttcttattttgtaatgttgccatcttggtgggaaactttctgatccttatctctatttgatgtagtcctctttttaaccaaccaatgcactatttcttcaggctatatgaatatctactatacctcctgtgtcacacccaaaataattggtgatctagtagtgggaagaataaacatctcctatgataggagtctttcccatgcacttctttggaatcattgaaatcttcatccttacagtcatggcttttgatcactatgttgccatctgcaaacctccccgctacctaattatcatgaataggacaaaatacaatactctaatctcggttgcttggctgttggggctttccattctttgtttcagttttctatgaaaatctggttgcctttctgtggctccaacaaaattgatgactaatattaagatatttttcctttactgaaagtcgcttgtactgatacctgcatcactggtgtcctcgtggttgccaattctggaatgtttgccttggtaaccttgttctgtcgtttggctcttatgtcattatactattccccttaaaaaatcattcagtagagggaagatgcaaagccctctctacctgtggatctcatatcaccatggtaatctttttcttcgaaccttcaatctttgcctaccttagaccttctcacttttcctgaggacaaaatatctgctctgttttacactattattgctccaatgttcaaccacctaatctataacctgagaaatacagagatgaaaaaggccatgagaaaagtttggtaccaaatatcattttcagaagaaaaacagctgatttgtcctacttagtgtactaaagaactttatgcagcaggaaaagtgtacatgtctccaacgactgctgttaggttataaattttttccttttctagtttaaaattttactgtggtaaaatatgtataacat

SEQ ID NO: 390904 - DNA, 1000 bp, Homo Sapiens
cacattccataggtatgcacacggccatgtaatatcagtatatcccaagttaacgaaagtgttcatttacataggcaatggagacctttgcattgtgatccatagaacataggaggatgttcttagtgtgtctcaaagctctatatgtttacatattatttctgtagattgttttcaggagaaagttttgcttccatggtaagagtgagcactttggcttctgtgtaagttagaaataattgttagtttttaatatgtacttcctggggaaatttcttagatgtttgcaagcaagtgaaaacagttagggccagtggtactaactactttataaaattttatttttatttgtaagaagtcatctacttaaggcccagttaatataagtggaatcatcgtagtttaaggaatacccagagattgctgctgttctatttattttacagaaaggatagctagattgaaagctcttcagtggaccttgagctaatagagcttttaccactaaaagagcattattctcatgtcataatgagaataatcatttacatacttggcataataaatgcctaaaagacattttattttctgaatctatcgttttcttgctataatggggatattgtaaattatgcatttgtattaatggtatttcttaaagcaatctatgtaactgtaaactaaaccaatctacaaactattgtaggcatctgtaaattctgtcgtaggtattataaaccttgttgaagtcttaatcagcagattatgttgtgaatgtatttgtacattgttaaaatagtttttaagattatttgtttaattgaataagtgtcttattagagtgatagctttgaaggtgcaaaactttatatttgtataaaattctactgtttacaaggcaaaaaaaaaaaaaagagctagattccttgatattctttaagcaaattaccaaactatataaatactattatctgacacatatacttcctttgcatatgtt

SEQ ID NO: 390905 - DNA, 1000 bp, Homo Sapiens; identical to SEQ ID NO: 201647

SEQ ID NO: 390906 - DNA, 1000 bp, Homo Sapiens; identical to SEQ ID NO: 201646

SEQ ID NO: 390907 - DNA, 1000 bp, Homo Sapiens; identical to SEQ ID NO: 281801

SEQ ID NO: 390908 - DNA, 1000 bp, Homo Sapiens; identical to SEQ ID NO: 207074

SEQ ID NO: 390909 - DNA, 1000 bp, Homo Sapiens; identical to SEQ ID NO: 114818

SEQ ID NO: 390910 - DNA, 1000 bp, Homo Sapiens
agccaccacttcctcatcatgggccgcaaggtgaagagccagtacttgctgacggccatccacaagtgggacaagaaaaacaaggagttcaaaaacttcatgaagaaaatgaaaaaccatgagtgccccacctttcagtccgtgtttaagtgattctcccgggggcagggtggggagggagcctcgggtggggtgggagcgggggggacagtgccccgggaacccggtgggtcacacacacgcactgcgcctgtcagtagtggacattgtaatccagtcggcttgttcttgcagcattcccgctcccttccctccatagccacgctccaaaccccagggtagccatggccgggtaaagcaagggccatttagattaggaaggtttttaagatccgcaatgtggagcagcagccactgcacaggaggaggtgacaaaccatttccaacagcaacacagccactaaaacacaaaaagggggattgggcggaaagtgagagccagcagcaaaaactacattttgcaacttgttggtgtggatctattggctgatctatgcctttcaactagaaaattctaatgattggcaagtcacgttgttttcaggtccagagtagtttctttctgtctgctttaaatggaaacagactcataccacacttacaattaaggtcaagcccagaaagtgataagtgcagggaggaaaagtgcaagtccattatgtaatagtgacagcaaaggcccaggggagaggcattgccttctctgcccacagtctttccgtgtgattgtctttgaatctgaatcagccagtctcagatgccccaaagtttcggttcctatgagcccggggcatgatctgatccccaagacatgtggaggggcagcctgtgcctgcctttgtgtcagaaaaaggaaaccacagtgagcctgagagagacggcgatcttcgggctgagaaggcagtagttttcaaaacacatagttaaaaaaaaaaagctt

SEQ ID NO: 390911 - DNA, 1000 bp, Homo Sapiens; identical to SEQ ID NO: 281807

SEQ ID NO: 390912 - DNA, 1000 bp, Homo Sapiens; identical to SEQ ID NO: 206224

SEQ ID NO: 390913 - DNA, 1000 bp, Homo Sapiens
tgggctggttcccccttcccggcaggcatctcggcgctttggcaccatgagttctatgtctggggccgacgacactgtgtacatggagtaccactcatcgcggagcaaggcgcccagcaaacatgtacacccgctcttcaagcgctttaggaaatgatgcttaggcagggtacttcgttcaagaccggcgcttggcacccttgttggaaagggattttcagcataacattttccttccacctctttgaccttccctccagcgttggccaaattgtgctgaggaagatgcatcaagggcttggctgtgccttcataggtcatctagggttttataaaggaggaggagacaatattttttcaaactttttggggagtggggtcatttctgtatataaaaaatgttaatatttaaggtgtatttatgttaccgttctgaataaacagaatggaccattgaaccagtcttcattgtacaagtgtttttatgcttcgtcctgggcatgggttatgtctggatgaccaacctccatcaaggccctactttgtagcaagcacagatgagtaagatggagcccatccccagggagctaccagagagatgtaccctgagatagaagaaacgttggcaggaaaggcctggggaacggggagggtgatccagccagagggaagagcctgggtagttgactgtggtccctgctcacagcttagcctggtggattcagactggggcttcaaccgcacagcttcctgctgttctggtggtcacagctgttcctacagcctcgtccgaggtagacacccacgtcatgaaggccttccaggttggctcctggtgcctcatcttctctgagagagtgacctcttgtttctccctcaaagtacgtttttagaaattgctgagaggctagattcctcttctaatagcagtttagtgcccttgggtgttttaattgctacttcctttatttttaatggctttgggcttttcttttatgtt

SEQ ID NO: 390914 - DNA, 1000 bp, Homo Sapiens; identical to SEQ ID NO: 281809

SEQ ID NO: 390915 - DNA, 1000 bp, Homo Sapiens; identical to SEQ ID NO: 281810

SEQ ID NO: 390916 - DNA, 1000 bp, Homo Sapiens; identical to SEQ ID NO: 114819

SEQ ID NO: 390917 - DNA, 1000 bp, Homo Sapiens; identical to SEQ ID NO: 206225

SEQ ID NO: 390918 - DNA, 1000 bp, Homo Sapiens
gtgttcttaatttgcttttcccttgtgagtcctgcatcatttgaaaaagtccgtgcaaagtggtatcctgaggtggagcaccactgtcccaacactcccatcatcctagtgggaactaaacttgaacttagggatgatacagacacgattgagaaactgaaggagaagaagctgactcccatcacctatctgcagggtctagccatcactaaggagattggtgctgtaaaatacctgaagtgctcggcactcacacagcgaggcctcaacagtgtttgacaaagagatccaagcagtcctctgcccacctcccgtgaagaagaggaagagaaaatgcctgctgttgtaaatgtctgagcccctcgttcttggtcctgtccattggaatctttgtacactttgctcaaaaaatggtggaaccttcacactcaatgccaactttttgttacagattaatttttccagaaaaccattttgaaccaatcggtaagtttaaggttttgtttgttctaaatgtaagagttcagactcatattctattaaaatttagccctaaaatgacaagacttcttaaattcttatttttcaaaagccccattcttgctcagattaagagttgccaaaataccttctgaactacactgcattcgtgtgccaagaacaccgaacactaaactgtgtaaagaccttcgtctttcagaagactgtagcttctgcagttaggagatgcagacacttgccaagtagttgtcagatgcgtgaagcagaacagcctcctgaatgaagcgttgccatttaactcgtgggctgatttatcagcccattttcatgaggtaacattgtataatggaatgggtgcgacatctcagctctttggataagtctttttgatttcacagtgaattttctaaaaattagttggccaacttttgctgagattttgaacagaactcatgtgtttcctctaatgaagtattctgtttagttgtgggtgtgctgg

SEQ ID NO: 390919 - DNA, 1000 bp, Homo Sapiens
acagagggaaccctggggtgtacgctgtggctcccacctgtccgccaggtcattgtgacgcaaacgctatggccacgtggaacacctgccggagagcaggggcggggtcactctgggcggcggatccgagcgggggataccccaggagatgggggtcgaggagagaccccggggagtagagagagagaaactcactccccgagtccccgaccctccccaagcaaggtgaggtcaacgccacccaccttcccccggtcaccctgggaggggtcgctccggcgggcgtctgctggagggtagaagcggggaagggaggcagcggcggcgcccaggcggcggtaggtagccgggcggcgagggcgcccgcaccccccggccgctgcgctgcgctgcggtgcgcacgggctccgccggttgctattccggctggtggcggccgccgcaggaagggccggttcctgcgctccccccgcccctttccctcgccttcggctgacgctgacgtcggatgagtgatccggagggacgctccgaccgcggccgggaggctcctgggggccggggctccgaggtacctgccctccggggtcggggcgggggcgcgccgggcgggctgcaggaagcagcaggagacgcccggcagccgggacggtcggggacgcctggtaggagctgccttctctgccctccgcgggcggcgcgtgataggcgagtcgcctcctcgggtcccggatcccggtgcgggaaccgcatcagccccttcccctcccctcctccctccggcctgggaaggtctggaggatgcgcgcgccgtgagagcgtgcgtcagccccgggggagcggtagggaagcgttccgcgctccggccccagcgctgggagcaccggcacccatgccagcccaccccacccacccaccgcgcgcctcgccttcccggcggctccggccccaggaccccgagctccctggtgggcagggacttgcgtccagggttgacttg

SEQ ID NO: 390920 - DNA, 1000 bp, Homo Sapiens
caagccattcttgaggggaggcagacagatgaggggctggggaaggttatgtgtgaacaggactctggggagagggagggaagggatggctcccgagagggccaggaggtggaggaaagagtaagtctcctccaactaaacaagttcagcccctttggagttcctgccacagctggattgcttaggcaggcctggtactgtgggccacagaggtcaggggcttgaaaggcactggggctgtcggaccccactgggaacctgggaaggagtggttcaaccctggactggatctcccccaacccaccaaccatacccactcggagcccactcctgctctctacccagctctgagctctgaggactgcggcagcagagccaagggcctaagccggagaaggagaaacactactggacaatagcaggtgacagcagaggagaaaaagggggtagggaggggacaaggaaagaacctgagggggtggcagtggacaaagagattgagcaaccacaggacaaggtaaccagaggaaacagagacaaggaaaaaagatgcaggaaatgaggaggccccagaaagatccgcagcgccgccacctttctcctcatagccacctccattctccttccctaggccaacccagacagagctcctcaaaacagggatgcttccttttcatttatccagctcaattgaaccacacagccccagaggccaaggtaattcagtatctctgtgatttctaggattctttcagtcctttttgtttttgtttttgtttttgtgacggagtctcactctgctgcccaggctggagtgcagtggcacaacctcggcttgggccgagatccctagggccattcctctggctaggaacagacttggacagcaatgcaagagataactagaaacaaaggagagaacccttgaaaagggagctatgcagagagacccagggcacctaagcaaccagagcaagagagaccgcaagagatacagatc

SEQ ID NO: 390921 - DNA, 1000 bp, Homo Sapiens
atttaagagaatacatggttgaaaaaatttacccacaaatacctgatcacctgaaagaaccattcttagaagccactgacaattctcatctgaggtccatgctagcaagcttccttcctccttcatcagtgaagaaacgaggtgttcttcttttgggagacgcatataatatgaggcatccacttactggtggaggaatgactgttgcttttaaagatataaaactatggagaaaactgctaaagggtatccctgacctttatgatgatgcagctattttcgaggccaacaaatcattttactgggcaagaaaaacatctcattcctttgtcgtgaatatccttgctcaggctctttatgaattattttctgccacagatgattccctgcatcaactaagaaaagcctgttttctttatttcaaacttggtggcgaatgtgttgcgggtcctgttgggctgctttctgtattgtctcctaaccctctagctttaattggacacttctttgctgttgcaatctatgccgtgtatttttgctttaagtcagaaccttggattacaaaacctcgagcccttctcagtagtagtgctgtattgtacaaagcgtgttctgtaatatttcctctaatttactcagaaatgaagtatatggttcattaagcttaaaggggaaccatttgtgaatgaatatttggaacttaccaagtcctaagagacttttggaagaggatatatatagcatagtaccataccacttataaagtggaaactcttggaccaagatttggattaatttgtttttgaagttttttgtatataaatatgtaaatacatgctttaatttgcaatttaaaatgaaggggttaaataagttagacatttgaaagaaatgattgttaccataaattagtgctaatgctgaggagaactacagtttttcttttgaatttagtatttgagatgagttgttgggacatgcaaataaaatgaagaatgac

SEQ ID NO: 390922 - DNA, 1000 bp, Homo Sapiens; identical to SEQ ID NO: 195155

SEQ ID NO: 390923 - DNA, 1000 bp, Homo Sapiens
aggatcatgtgggtggtgggtccgcatgggtgacagggacgtggggacatgtcgccaccctgacaggagcagcccaactcaacagccacggcaggtcatgcacggaggctcgaggcgttacgtggggatgttacatcaaggcattacatcattacgagatgtaacgctcgaggcgttacatcgaggggacgatggcatggggctggggcgtccagggtgggcgcagagggaagctcaaccacgtggtgctctcatctgcccacagcccagcccgtcttcctgttggaggcatgtgacccctggaggacaagcatgtgacccctggaggacaagcatgaaacgccataggctccccaagtgctgaattatggcaccttgcagcttcttctccacgacgttttaacaagcgatgcgtacttttgtaagtggtgagtgtaacggaggttcacagatgcactccgctttggaaaccagtgcactcttgcccaggcccggtgagactctgaggacgatgtgtctaacctctgtgtctaacgggggtgtgtgctctccctcctctggcgaccatgaggaaacccccggcaggacaaggtgtgcagagaactagcatggtccctggcacgtagcccctgcccagtgactggcagatgagaagctccattgtcgccccagggagtatggggcacaggcgcctccttgggttgtctgcctcccgggagccccagggtgcccaggcgggcctcagctgagtccaggcctcggggacagtccgtgcacgctcctggggctgggggcgggcacttgtcccagccacgtttctgctgactgagcagccttcttcatgagctcacgcctttccagagaaatcccttaatgccgccattctgctggtggcatatatagggagggctcggccttggctccacactggctgccagaggccccgctgactcctgccagcctccaggtccccgtggtaccaaagctgaacatggacgtg

SEQ ID NO: 390924 - DNA, 1000 bp, Homo Sapiens
gtatcccagaacttaaagtaaaataaataaatacataaataagaaagtctttgcgatagtttgctgagaatgatggtttccagcttcatccatgtccctacaaaggacatgaactcatcattttttatggctgcatagtattccatggtgtgtatgtgccacattttcttaatccagtctatcattgttggacatttggcttggttccaagtctttgctattgtgaatagtgccacaataaacatacatgtgcacatgtctttatagcagcatgatttataatcctttgggtatatacccagtaatgggatggctgggtcaaatggtatttctagttctagatccctaaggaatcgccacaccgacttccactattgcaaggacaaaaacccaaacacctcatgttctcactcataggtgggaactgaacaatgagaacacatggacacaggaaggggaacatcacacaccggggactgttgttgggtgggggtggggggcggggagagcattaggagatatacctaatgctaaatgacgagttaatgggtgcagcacaccaacatggcacatgtatacatatgtaacaaacctacacgttgtgcacatgtaccctaaaacttaaagtataataataaaaaaaaagcagaaaaaaaagaaagtcatggcaagtaaaaactctttagtgttcccattttgacgataaaataacatttattttattcaggtgaatatttagcaagagagagaagatactgtgaaatgtctgtcttgtgaactactgttgcaaggtagtatttgtaagcagcccgttggtctagatctttctaatgaatacagaaacatgctccaatacactcatcttaattttaaaaataaaccctcaattcattgcacatccacccacacctaatattctacattctactctcctacttctttttttgtgtgtttgtttgtttttgagacagagtttctctgttgtgcccacggcatgatc

SEQ ID NO: 390925 - DNA, 1000 bp, Homo Sapiens
ggttcttcctctggggtcctacctcaggacagccacattgactccaggccatccccaggccagagcacttctctctctctctctctcctgcgtacctagcacatgccattctctctcttcttttttttttttttttttttgagacggagtctcattctgttgcccaggctggagtgcagtggtgcaatctcagctcactgcaacctctgcctcctgggttcaagccattctcctgcctcaggctccctaatagctggctaatttttcttgtatttttagtagagatggagtttcaccatgttggccaggctgatctggaactcctgacctcaagtgatccgctcgccccagcctcccaaagtgctgggattacaggcgtgagccactgtgcccagccgacatgccattctcttggcctgaaacactcctaccttccttcccatgtctacctaattccttcctttagtcctccagtctcagctcagacatttcttgttctaggaagcccatgcttccgtcatgacagctcgatcattttgcctgtgttccacccatcacagccatgaccactctgatctgggcttccttatcccacccactatgctgagggctctaccatcacagcccctgtcattgcctatgcctttcccaggcacagccctgacccctctgggtactgtctcatgatctgtcatttttcctttggtgtgggattctgtgaggacagggtccagttctatcctagtgacatgccttgtagcagcaacacagggtgtgacactgaatcaaagcctagaggctgttgggcaggtgagtgtctctctcctgttccctctgcaccttccacaccgacacccctcagcaggcctatatccctccgtctctacctttctctgcctatgtcctatccatttgcctcttatcactgttcctctgtctcactttctctctctcccagtccatgtgtgtctctgtgtctctgcccactcctgtctctttt

SEQ ID NO: 390926 - DNA, 1000 bp, Homo Sapiens
actcaggagacctgggtgggaacctgggagagacccctcttcctcttgggagcctgtctttccttcagtgtatcaaatagattaaactgcatcaatagttttcaaattttccctaagtgaaaatcactgggcaaaatcatttcaggcccttccactccaagcacctggtggttctaggcgtctcctctgcttcctccttgcagggcgggcgccgcagctgagggaaactctcctgcaggacttcagagtggttgcccagggtgtgggcatccctgaggactccatcttcaccatggctgaccgaggtacatagcacccctccgcctcaaattcctgtcccctcttcgtcccttgtgggcgccagagaccatcccagcccctgggtccttactataaccctctgagataaaaaggcgccacagcctcccctccatagtgaatcaggaagccagtggatttgctccaagtctcacagcttattcctagcagagcttagactagaacccattcagtgttcattctactgccatgtgtctcagggaggttgtagccagaatccacagatacctcttaggaggcaaaagagttttgggattaagaaagtgggctcaggaatcagagtgttacgggatctttggggcattgcttttctggctggaaacctctgtggccagtggtgcctttgcctgagttttgcttgggcctgctgggcttgttccacccacttggcctggtagaccgtgcttggctcatgctactggcctggatcccacacctccaagggagactgcaactcaggcatgaagcggcaagggatgtgtgagtgagggtggggtccagccactgcagtcaaacatactggctgctgccatggggtgggcagctccaggtgctggcatggtgccagcactctgtaagggtatggctggaccaggtgcaccacaagcagatttcccagctggcgccagggaatggagtggtgcttggagctcggagatgc

SEQ ID NO: 390927 - DNA, 1000 bp, Homo Sapiens
gcgagcccttatgtatggtacagaggtaggctagaccgcggcgttcgattggatggctatggtagccaatcagaaaaagaacctggcactcctaatttgcgtattcctttcccagcgatgacgtagaacaacgtttgatccaatcagaagtgagcaaatcctgagccttcatttgaatacaaaacgtacaaatagagttactccgagcgccgcgcgtttctgtttggagagactcagccatcatgccagacccgtccaaatcggctcctgcgcccaagaagggttctaaaaaggctgtcaccaaggcacagaagaaggacggcaagaagcgcaagcgcggccgcaaggagagctattctatctacgtgtacaaggtgctgaagcaggtgcaccccgacaccggcatctcgtccaaggccatgggcatcatgaactccttcgtcaatgacatcttcgagcgcatcgccagcgaggcctcccgcctggcacactacaacaagcgctccaccatcacgtcccgcgaagtgcagacggccgttcgcctgctgctgcccggcgagctggccaagcacgccgtgtccgagggcaccaaggctgtcaccaagtacaccagctccaagtgaggcgttcctcggcgtcctgaacccaaaggctcttttcagagccacccacacgatcaagaaagggtttcgaacacggtgaagggttatgtaacctaatgtgtctccatgcaccctagcggttgccgggtgcggccgaatctgagccgtgtgtgtgtgtgtgtgtgtgtgtgtgtgcgcgcgcgcgccggcacagaacgagaaaaactgctcgttacagaaatcggggtagaaactgctcaggtgatgtagctcagtaatgttgggaggcgatcaaggaccccctctccatcccctccctccgcgcagagctattaactcacgacgagatttcttttttttttctttctttctttttttttttttttttttctagaaga

SEQ ID NO: 390928 - DNA, 1000 bp, Homo Sapiens; identical to SEQ ID NO: 206996

SEQ ID NO: 390929 - DNA, 1000 bp, Homo Sapiens; identical to SEQ ID NO: 114820

SEQ ID NO: 390930 - DNA, 1000 bp, Homo Sapiens; identical to SEQ ID NO: 281819

SEQ ID NO: 390931 - DNA, 1000 bp, Homo Sapiens
tttcaagtattcaacggccacttatgactagtagctacaatattagacagtgcaactatagaccacgtttactctccatttttttagcaactcccaaaccagctttatacgtattgtaataaacatagaaaacatttggaagggtacacaagaaatgactaaaaatgatttttttatataaaatgagaatgcagggagggaaggtgatcagggtttaattcacgtacatctctatttgaatttattatataaggatatatcatatttactaaaaatgtaaaagagaaatgcttattctttgcaacacagtccttgtatagaaatctgtcttaaggaaataatcaaatatgtaaactaacatttatgacaaggatgcccttggccaagacgtgaataattttttctagtgtatccatgctatagacgttacctgccattactgtataagaaaaaacatagtgtacctagggctcagtactacccatggtttcagacatccataatttcaggcatccactggaggtcttggagtgtgctccctgtggataagggggactactgtattcaaccccactggaggcttgactccctgaaaagtgaatggagaagaacaaactgatgtgaaaaatctttgtcttccaacaaataaacagacaggatctgagccctggggagatcactgaggcttctcttaacccttcagtgggtggtattttccatctgctcacaggaatgttgagattttggctgtggaccttgtgttttgcttagcaaagttgttttgtgtggatcgcacctgacattttaaattcttccaacaaccataggaggtaaatgaagaattcatgcacagtgcaaggataaaactgcacaggtttcagctgccttggacaccctgtgcttttcagctatttgttgaatggaacttaagtgcccaatttgttctgattggagcaaaactttgtggactgacaaggatgggcgtccaagatgtaggaag

SEQ ID NO: 390932 - DNA, 1000 bp, Homo Sapiens
acttagtcatttctgcctctctagagggaacaccctgaagaacatagagaaggagtgcaatgccaagattatgatccgggggaaagggtctgtgaaagaagggaaggttgggcgcaaagatggccagatgttgccaggagaagatgagccacttcatgccctggttactgccaatacaatggagaacgtcaaaaaggcagtggaacaggtgagcggtgagcccagaaaggaagcctcctggcagaaacctaggtggaggccctaagcacttaactgtccattgcattttcactagataagaaacatcctgaagcagggtatcgagactccagaggaccagaatgatctacggaagatgcagcttcgggagttggctcgcttaaatgggacccttcgggaagacgataacaggtatgtgatcagtttaaaggagagtgtagagacctgaagaacctatggaagtagagattgttcccttgcattgacctctttttcctttaataggatcttaagaccctggcagagctcagagacccgcagcattaccaacaccacagtgtgtaccaagtgtggaggggctggccacattgcttcagactgtaaattccaaaggtgaggggctggctcttgcggtttcctggtagcctgcgatgtgcaggacaacttttctggcacattcattggttgctgttaatcttaccaagagaaacatcctttctgttagtgtggtctgtaatggtgtgatttaaagcccaggatgattagaaataggctgtacagatacccctgtttgtttgtcttgagcccaagaaaactggaagtttccattttgggtatgtttttactggggctcaataggaaattcactgcttttgctgttcagaattggttcaagaagactaagcaatctctacagatttctgaccagttgcaagtcagcactcgatatcaacactttctgactggctggcgaatatgtaaggttttgtttaggaagttc

SEQ ID NO: 390933 - DNA, 1000 bp, Homo Sapiens
ccatgttgggcaggctggtctcaaacccctgacctcaggtgatccgcccgcctcggcctcccaaattactgggattatgggcgtgagccaccacgcccggccctcatcctaaattcttaaaacctgctctcctctcagccatgattttctttgtcctgtgccataaagaattctcagaagcaggatgcagcttctgctgctcaagggtgagcccagccagtgggatctggtgtcgctgcccgcagacccctcagtcaagagcggggtggggggcagcaggagctacagtaacagcccggatggtcctgctcctgaaggcaccccaccctgctgtccagaggagagaccgaggctcagacatttgagccccacataacccagcctgccacacaccgcagactccaacagtgtagcccctgtaccccagaagtcacttcagcaaatcactcagggctccacctcacatctgtccccaagtccttggggacttgctcactcagcagaagaccaagagaagccagatgcagtggctcacacctgtaatcccaacactttgggaggctgaagcgggcggatcacctgaggtcaggagtttgagaccagcctggccaacatggtgaaaccccgtctctactaaaaatacaaaaaatagtcaggtgtggtggtgggcgcctgtaatcccagctacccgggaggccgaggcaggagaatcctttgaacccaggaggtggaggttgcactgagccaagattgtgccactgcactccggcctgggcgacagaacaaggctccgtcctaaagaattaattaattaatttaaaaataaaaagaaaatgtgcactttcatcttgtattattctgtccttttgtttgtttgagataaagtttcgctccatttgcccaggctggagtgcgtgatctcggctcaccgaaacctctgcctcctgaattccagtgattctcctgcctcagcctctcgagtagctgggattacaggccc

SEQ ID NO: 390934 - DNA, 1000 bp, Homo Sapiens; identical to SEQ ID NO: 281820

SEQ ID NO: 390935 - DNA, 1000 bp, Homo Sapiens; identical to SEQ ID NO: 281821

SEQ ID NO: 390936 - DNA, 1000 bp, Homo Sapiens
gctgcctgggggcgaccggggctccagcctgcacctgcaccaggcacagccccaccacaggactcatgtctcaatgcccacagtgagcccaggcagcaggtgtcaccgtcccctacagggagggccagatgcagtcactgcttcaggtcctgccagcacagagctgcctgcgtccagctccctgaatctctgctgctgctgctgctgctgctgctgctgcctgcggcccggggctgaaggcgccgtggccctgcctgacgccccggagcctcctgcctgaacttgggggctggttggagatggccttggagcagccaaggtgcccctggcagtggcatcccgaaacgccctggacgcagggcccaagactgggcacaggagtgggaggtacatggggctggggactccccaggagttatctgctccctgcaggcctagagaagtttcagggaaggtcagaagagctcctggctgtggtgggcagggcaggaaacccctccacctttacacatgcccaggcagcacctcaggccctttgtggggcagggaagctgaggcagtaagcgggcaggcagagctggaggcctttcaggcccagccagcactctggcctcctgccgccgcattccaccccagcccctcacaccactcgggagagggacatcctacggtcccaaggtcaggagggcagggctggggttgactcaggcccctcccagctgtggccacctgggtgttgggagggcagaagtgcaggcacctagggccccccatgtgcccaccctgggagctctccttggaacccattcctgaaattatttaaaggggttggccgggctcccaccagggcctgggtgggaaggtacaggcgttcccccggggcctagtacccccgccgtggcctatccactcctcacatccacacactgcacccccactcctggggcagggccaccagcatccaggcggccagcaggcacctgagtggctgggacaaggg

SEQ ID NO: 390937 - DNA, 1000 bp, Homo Sapiens
ctctgccttggccaacttaccggatttaaatcgcccagtgacagcttttcctccagtattttcaaaatgctcccaatatcctcacgttagaacaatccagaaatagtcttatggtaaaactcttttgggaaatgtgaaagtagagtcctcccaccttttcctttgcaacgcttttgccccaacctcgatcgcccaggcagcacattttttccggcacccccaccaagggaagaacagagacatctccaaaccagctgccctgcgccaagctgttacaaaatagagccacaagtctcccggtttatgcaaacatatttggctcggtgtctaggatcttctttttcaaactcagaaggagatcacaggcacacggccgcggtgctgtgtacgcccctctgaaaggaagttctgcaagtcgaccgacttcactggcttcactgaagtccggtccgaaaccaccggaaagttgcaggcgcacagtatacgttcagctgtgtccaagaaataacctatcaatcactgccttaagctttgtttccttcctgaattttcttattttcacgaatatttatgctttcacaaactgtatgtcatttcctctccagaaccaaggggggctcgccccagcctggcccccgccccgggtgcgtccctgcagggggcgccctgctctggcaatgcccaccgcaccgcagggctgactggccgcgcgcccgggggcgggggccgccgcggaggcatcgtgctctccgattggccgtccgcgtcctcgtgacgtcagaccccgcccacgcgcccctcctccgcatctgagcgggggagcggcggcccccagctgaatgggcgcgagagcggcgctgggggcgggtgggggcgcggggtaccgggctggcggccggccggcgccccctcattagtatgcggacgaaggcggcgggctgcgcggagcggcgtcccctgcagccgcggaccgaggcagcggcggcacctgccggccgag

SEQ ID NO: 390938 - DNA, 1000 bp, Homo Sapiens
tttctgggtcttttgctactaagttcacattagaattagtgccagaattttaggaacttcagagatcgtgtattgagatttcttaaataatgcttcagatattattgctttattgcttttttgtattggttaaaactgtacatttaaaattgctatgttactattttctacaattaatagtttgtctattttaaaataaattagttgttaagagtcttaatggtctgatgttgtgttctttgtattaagtacactaatgttctcttttctgtctaggagaagatagatagaagataactctcctagtatctcatccattcctagcctttaaggggctctatatgctagagatttccaaatttatttcttcagccctgatcttttcacagaggtcaaggcttttatagccaacagaactcttgattcctactcccctctacccaatgtctccaaatataaactaaaatcaaataaataaaaatcttttttttctaccctggtctttctccattttattaaacatttatcaagtcaaaaacttaggagctatctattaattcttgtctggaccactgctaaagacttctaaccagtctccctgttccctttctttctttactgtcaaactccacaaagaacaaaaatgattgtttaaaaatataaattgattcacattgctctctacttgaagtacttaacaggaattataaagcccctactgacttcccatcctcatcttgtagaattttctccttgtcactgtgctttagccacactgaacctttttctttaaaatgccaagcctattcttaccttaggcttttatatttcttcttccttctgcctggaatactcttttcccacagttttgcatagccagtgcctttctgtctttcagaactcagctcagagggcttccttgaccaccaagctaaaatcatcactgtgtattgtatcattctccttcaaaagtgtaacagcatccatctatgactatttc

SEQ ID NO: 390939 - DNA, 1000 bp, Homo Sapiens
tatacttccagagatattccatgaatatgatcgtgtgtggatgtacgagtgtgtggacccatttaagaaaagcacacctgatataatccttacctgtggaggacgacaaaatgatgggccttgaacttttggtgtggccatgtgacttgctttggccaatagcagaggggcacaagtgacagtcgtgtcagttctgagcttaggcctcaagagaccttgaacatttctttttgcatctcagcatcaccatgagacgggcttcccctgagagcttcctctcccctcagcctgcactccacaaggttcccatatgaagcagaacttcccatctgagcccggcctggattggccaactgtcagccaaccccacatccattttagagctattgaccaggcatggtggctcacacctgtaatcccagcactttgagaggccaaggcaggaggattgcttgagaccaggagtttgagaccagcctgggcaatatagcaagatccccatctccacaaaaaaaaaaaaaagttaaaatgagccaagtgtggtggcgcacacctgtagttgcagctgcttgggagattgaggtgggatccccagaggtcaaggttgcagtgagctatgatggcaccactgtattccagcttgggtgaaaaagagtggggcaagaggtaagaacctgtctccaaaataaaattgtaccaaaataaaatgtaaaaaaccatgaaccaaaaataaaatgtaaaaaaataaaaataaaaataaaatggccaggcgcagtggctcacgcctgtaatcctggcactttgggagaccgaggtgggtggatcacctgaggtcaggagtttgagaccagcctggccaacatggtgaaaccccgtctctactaaaaatacaaaaattagccgggtgtggtggcagaaacctgtaatcccagctactcaggaggctgaggctggagaatcacttgaaccggggaggcggaggttgcagtaagccgagatc

SEQ ID NO: 390940 - DNA, 1000 bp, Homo Sapiens
gagccgagatcgcgccactgcactccagcccgggggacagagcgagactccgtctcaaaagaaaaaaaaaatgtatttgattgatgtttcatgcctacctaaaattataaaaccaagctgcaccctgaccaccttgggcaaatgttctcaggacctcctgggggctgtgtcacggggccatggtcactcataataaatctcttcaaaatattttacagtttgactcttttcatcaacactgttcaccaaacatacacagagaagaaaactcaaattactctagcgtttaggtcctgttaactgaccaactactgtgagctacactgagggctaagcacttcacgtccaggacgtcactgaatcctcacaactgggtctggagggagggtattttcattaactcccttcacagaggaggaccctgaggctcaggaatgtgaagtgacctccctaaggtcacataacaacttaggaactcaacttaggcctgactggttcctgagcccatgcgtgtagctacatcagtatgttagcggcgcaggaatgatgacaatgataataacagcagtttacgtgcttgctatgtggcagccctgtgcatttcatgtataatctcatcacatctccatggcaatccccgttttacagaagaggaaactgagcgtcagcagagagaagtcacttgtttgcccagggtcatccagcagaattgagactagaacccaaaccaccggcatccatccagtggctcaggccaaaatctcagtagccatccttgactcctccttcttcttcctccatatctaatccattggttctagttggcttcagttttcaaaatacatgttcacttctcactatctgactactgcaggccccatggaagccaccgccgtctctcttccaggccagtttgaaagacttcctactgaacgccctccctccattcctgcctcttgcccccaccccatccactctctacattgcagtcagagtgatc

SEQ ID NO: 390941 - DNA, 1000 bp, Homo Sapiens
agagacacctttttggcttctctcagagggacgatatgaagaagcacaaaaaatagttgacatcatggccaagtggaacagggcaagctcctgtaaactgtcagaacttttatcactggacctacaaggtcctgttagtaatagccccactgaagttcagaagcacaacctatcatatctgttttataactggagcattacgaaaaggacacttaccgtttggctaatctggttcactggaagtttgggattctactcgttttccttgaattctgttaacttaggaggcaatgaatacttaaacctcttcctcctgggtgtagtggaaattcccgcctacaccttcgtgtgcatcgccatggacaaggtcgggaggagaacagtcctggcctactctcttttctgcagtgcactggcctgtggtgtcgttatggtgatcccccagaaacattatattttgggtgtggtgacagctatggttggaaaatttgccatcggggcagcatttggcctcatttatctttatacagctgagctgtatccaaccattgtaagatcgctggctgtgggaagcggcagcatggtgtgtcgcctggccagcatcctggcgccgttctctgtggacctcagcagcatttggatcttcataccacagttgtttgttgggactatggccctcctgagtggagtgttaacactaaagcttccagaaacccttgggaaacggctagcaactacttgggaggaggctgcaaaactggagtcagagaatgaaagcaagtcaagcaaattacttctcacaactaataatagtgggctggaaaaaacggaagcgattacccccagggattctggtcttggtgaataaatgtgccatgcctgctgtctagcacctgaaatattatttaccctaatgcctttgtattagaggaatcttattctcatctcccatatgttgtttgtatgtctttttaataaattttgtaagaaaaaaaaaaaa

SEQ ID NO: 390942 - DNA, 1000 bp, Homo Sapiens
cagcactggagtacagcccactgttttcctgtgtggggttccactttagttcttgtctgtgtgcatgcatacatttttacagagttgtgaccactgcctttttctgtgaccctggttattgacatctagttttccaagtaacattgacacacatctgttcaaatcagttgaggttcccatcatgactgactcatttggcgggaaaaccaaatttacatgccaattggaacaaagaagtgtgggtatgggggaacagcggggggaaagaaatggtgggagaggattccttggacttacagatcataaaacatttcccaataacatttttaaaggatgtataatattacactgagtgattgattatatattacccttctatttgggacacttgggtggttttcaatgcctagagttttaaaatgcatataaattacagcctttgagagatgattgtattttcttgaaacaggagtcttctgtgtccaggtccccgccaacagtgttgatgtagtgttcctttgttggggggaaaaaaaatcagtactgctaactggagatgctggatgccttcaagaaaaacattcctgtgatttaaatttttaaaaaattatgttcaattctggtttatcaaacaacctgggtatcttgtctcacaacttaccgaaatgtcgaattttagatttagagttagactaagctcttcctagtttaagggccacgtctgtctaataaactttatacaatgccacgtgcacgcagcttcctcactaacaaataacatgtgttggggaaaaaatgagaaaatagtggaaaggtgcctccttggaggtggtaacatcgggtcaattaatcagctgagtataaattgattcactttatacaagtctcccacacattatgatgcacatttagcaacgctgaaaaacaatttaaaagaataccttagggagttgttaaagagaatttatagtctggaacgaattgcaatcctcgtgccgaa

SEQ ID NO: 390943 - DNA, 1000 bp, Homo Sapiens; identical to SEQ ID NO: 195157

SEQ ID NO: 390944 - DNA, 1000 bp, Homo Sapiens; identical to SEQ ID NO: 114823

SEQ ID NO: 390945 - DNA, 1000 bp, Homo Sapiens
agatgagagtgggttatctctggagtgacagaggctggtctgttttccaggctggtagggactgttcctaaagggaggaagggatgataccagcctcctgagcctccttctcctgcgttagtgtctcaggccctgccaggccttatagaccctcttattgacactgcccactggatggggaccggagttggactcagcttctgccgaaccctcaaatcccagccccaactaaagcatataactcaagacctacctgcactgaaagctcttctcaacctgagcagggtggtccaattgaaagggtgggtctgaccacctctcctgcacccatgcgggttggcagaggtgtgcaggatctgccacttaccattcaccatgtggccttgaggaagacgcactcggggcctcagtttcctcatctataaaatggggatgtaattacaccctcacactgtagctgtgagtattcaatgagagcactgcaaagggcctggtgtggagtaggtcctcaggaaaggttggatcccatgtcccatcagagctaaaagccccaggaggagagggtggctggtttgtccccacaaacccctgggattcccggctccccagccccttgcccctctctccagccagactctattgaactccccctcttctcaaactcggggccagagaacagtgaagtaggagcagccgtaagtccgggcagggtcctgtccataaaaggcttttcccgggccggctccccgccggcagcgtgccccgccccggcccgctccatctccaaagcatgcagagaatgtctcggcagccccggtagactgctccaacttggtgtctttccccaaatatggagcctgtgtggagtcactgggggagccgggggtggggagcggagccggcttcctctagcagggagggggccgaggagcgagccagtgggggaggctgacatcaccacggcggcagccctttaaacccctcacccagccagcgcccc

SEQ ID NO: 390946 - DNA, 1000 bp, Homo Sapiens
ctctctcctgtcttctcacaggcaaagacatggcagcagtgcagaggaccctgatggctttgggcagcttggcagtgaccaagaatgatgggcactaccgtggagatcccaactggtttatgaagtatgtggcccccagggagcttgggtctccgcatggggtgggaggtggcttgttctaaggagcttgcgggaaggattaggggaagcagatagccaagaaaggataaagtgagggtctgggatggggaataatgggtccttaatactccttgacccctccctttccaccctcctgcgctcagtctccctagcctatgaggcaagctagattagggaaaaaaagtgcaacaggaaggcaatgggattgggctaggacgtaacagagggatcagaaaacgggtggaaaacacacagttctaccaagtctttatcctggttcctcctcttctaggaaagcgcaggagcataagagggaattcacagagagccagctgcaggagggaaagcatgtcattggccttcagatgggcagcaacagaggggcctcccaggccggcatgacaggctacggacgacctcggcagatcatcagttagagcggagagggctagccctgagcccggccctcccccagctccttggctgcagccatcccgcttagcctgcctcacccacacccgtgtggtaccttcagccctggccaagctttgaggctctgtcactgagcaatggtaactgcacctgggcagctcctccctgtgcccccagcctcagcccaacttcttacccgaaagcatcactgccttggcccctccctcccggctgcccccatcacctctactgtctcctccctgggctaagcaggggagaagcgggctgggggtagcctggatgtgggccaagtccactgtcctccttggcggcaaaagcccattgaagaagaaccagcccagcctgccccctatcttgtcctggaatatttttggggttggaactc

SEQ ID NO: 390947 - DNA, 1000 bp, Homo Sapiens
ccgtgtcttcttcgttttgttctgttcttcccttctgccctgttttctagctgtcagctacatgctgggatgcacgttggaatctggagtaagtgcttccttccctgtgagtttcacctcctttttgtcttatttaaatcctcttatcccagtgaccactggagagtctaagccatccttagcatgggcatccatcttcctaaactgttattcatgcaaagtcatgctcgtggtaagaggtaagaggcaagagaggtgccttggaagccaagctggtggccgtagctgccattttagccttcaagctttgctccccagtgatatttctgtgacttagaagagttactggagtcaaaattgtattgattttttgtttgttttgttttgtttttagaaggagtcttgctctgtcacccagcctggaggcagtggcgtgatcttggctcactgcaacctccacctcctgggttcaagcaattctcctgcctcagcctcctgagtagctgggacaacaggcgcctgccaccatgcccggataatattttttgtatttttagtagagatgggatttcaccatgttagccaggatggtctcgatctcctgccctcgtgatctgcctgccttggcctcccaaagtgctgggattacaggtgtgagccaccacgcctggctaaggcaaagtttttttctttgctttcccatcatctcaagtatttccaaaagaactgctcagataaagagaatgggacagtgtcagtaactatcagaggtttgtgcttgctaatgctccatagagagtttgtgaatttcccatgtggaagggaatatgtggtgttactggtgacaaactaacaagaccatcctgtccacatttgaatcagattagattatgaaataaagatttcaggagaattgcttgaacctggtagacgggggttgcagtgagctgagatcgtgctgctgcactccagcctagcccacagagcaagactctgtctc

SEQ ID NO: 390948 - DNA, 1000 bp, Homo Sapiens; identical to SEQ ID NO: 281827

SEQ ID NO: 390949 - DNA, 1000 bp, Homo Sapiens
agctactcaggaagctgaggcgacagaattgcttgaacctgggaggtggaagttgcagtgagctgagccactgcactccagcagtggggaaggcatgttccctgggtgggggcagaggcacaccccagccagacccctctgagtccttgtctcttcctatgtgcagagtctggaggtgggccccagatgccctttatatgacaggggttggggtccccctctccgtcgatcttctcccggaggacccagaatgcctgaagttgggagggatggctgagggaagagtgccagggcaccaggtgtctatgtgtcaggccaggagttaggcactggaaatacacaggagaacaaaccccacaggaatccctgctcttttggaacatcacttctgtatgggtaatttttattctttcttcctccccttcctcttccgctttctcttcctcctccttcataatagcaggagtcacgagtccccatatatatatgtatatgatacattctcagttgcaaaataccttcccgttcattatcttactgcattctcaaaacaactttatggggtaggcatccacactcccattgtccagacaaggaaactgaggcgcagaatgtggctcggtagtgtggggtgtggcagaaagctccagaccaggctccagtcccagctcagccactaacctgctggagcaccctagataagtcactcccctccctgggcctatactcacccctcctgcccaccccacatccccatgatacaacacaaagcgctccactccagtctccaatctctcccagatttctgttcctgcgactgtgacttgcccagggacctgctggacaggagctagggcagggtgcagaagcccgtccttctgtccccactctgagcctgaccctgctgtgaatccccaggagagggagcgaggctggagggattagggaagggccagtgagtggggctggggaaacttctagacttgaacgcctccaggac

SEQ ID NO: 390950 - DNA, 1000 bp, Homo Sapiens
aggcgacagagtgagactctgtctcaacaataacaacaacaaaagccatctcggaacatggtatttgggatctctgtctgctctctttggatcacctcaagaagtgggttcagagcccacatctgtgacattcctgagtgtgtctcaggtctacaagctgctccttgtatgtcatcttctggtcctgccattgactcagctgcaaacaaccacaaatcttccacttgggacacctgcctctcccacccaaaagactttacttggaaacaggtgactgcagaggacaaaaattaatgagcattatctcctgacttaaatcagagtgtagtttgttaaaacacacttagactgatcctaatataattttcaattttttaaaaaaggcatcccccctccagacctaataccactttccccatgtggcaggaggggaaggcagaacttcgtgtaagttaatgagtccgtatagaacattcctgggaacttgggcactctgccttgtcaccttttgcatttgacaatcaagttcctgtccttgttattttatttattattatttttttttttgagacagagttttgttcttgttgcccaggctagagtgcaatggcacgatcttggctcactgcaccctccacctcctgggttcaagcgattctcctgcctcagcctctcaagtagctgggattacaagcgcccactaccaggctccgctaatttttgtatttttagtagagacggggtttcaccatattggccaggctggtctccaactcctgacctcaggtgatccgcccgcctcggcctcccaaattgctgggatcacagatgtaagccactgcgcccttccctgtccttgtcattttaaaataattataccagcaggaggacgtccagacacagcatgggctacctggccatgcccagctggttggacatttgagttctttgcttggcactgtcctctcatgcgttgggtccactcagtagatgcttattg

SEQ ID NO: 390951 - DNA, 1000 bp, Homo Sapiens
tcccagaaggacctcctgagcgatgactcaagtgtctcagtccacctgagctgccatccagggatgccatctgtgggcacgctgtgggcaggtgggagcttgattctcagcacttgggggatctgttgtgtacgtggagagggatgaggtgctgggagggatagaggggggctgcctggcccccagctgtgggtacagagaggtcaagcccaggaggactgccccgtgcagactggaggggacgctggtagagatggaggaggaggcaattgggatggcactaggcatacaagtaggggttgtgggtgaccagttgcacttggcctctggattgtgggaattaaggaagtgactcatcctcttgaagatgctgaaacaggagagaaaggggatgtatccatgggggcagggcatgactttgtcccatttctaaaggcctcttccttgctgtgtcataccaggccgccccagcctctgagcccctgggactgctgcttcttaaccccagtaagccactgccacacgtctgaccctctccaccccatagtgaccggctgcttttccctaagccaagggctcttgcggtcccttcttactcacacacaaaatgtacccagtattctaggtagtgccctattttacaattgtaaaactgaggcacgagcaaagtgaagacactggctcatattcctgcagcctggaggccgggtgctcagggctgacacgtccaccccagtgcacccactctgctttgactgagcagactggtgagcagactggtgggatctgtgcccagagatgggactgggagggcccacttcagggttctcctctcccctctaaggccgaagaagggtccttccctctccccaagacttggtgtcctttccctccacttcttcctgccacctgctgctgctgctgctgctaatcttcagggcactgctgctgcctttagtcgctgaggaaaaataaagacaaatgctgcgcccttaaaaaa

SEQ ID NO: 390952 - DNA, 1000 bp, Homo Sapiens
gccaggcacagtggctcacgcctataataccaacactgggaggtcgaggcgggtggattgcctgaggtcagttcgagaccagcctggctaacgtggtgaaaccccatctctactgaaaaagcaaatacaaaaattagccaggcatggtggcacatgcctgtagtcccagctacttggctactcgggaggctgaggcaagagaatcgcttgagcctgggaggtggaggttgcagtgagccaagatcgcgccactgcactccagcctggcgaaagaatgagactacatctctaaataaataaataaatacatacctacataaatacataaataaatgaactgctatccttgtctcctaaacctcttcttcccacagccttccctacataagttaacagccactccatcttccagctgctccaggccaaatccccagagtgacccctgactcctctatttcatgccccacttccaatccatagggaaatcccactggcttcaccttcaaaacagccccaggacctgaccgcgcctcacctccattgctacctccccgtcctagtggccaaaagcttggatctggattatggcaagagcctgctctctggcctcccagcttctgtccttgctccctgaagtctatttgcagcacagcagccagagtggccttattaaaacagaggtcagggctgggcatggtggctcatgcctgtaatcccggcactttgggaggcagaggcaggcaaatcgctttgagcccaggaattagagactagcctgggcaacatggtgaaaccccatctctactaaaaatacaaaaattagctgggtgtggtggcgcatgcccgtagttccagctactcgggaggctgaggcaggggaatcacttgaacctgggaggcggaggttgcagtaagccgagatcatgccactgcactctagcctgggcggcagagcgagactctgactcaaaaaaagttaaaacaaaatgaaacaaaaaaa

SEQ ID NO: 390953 - DNA, 1000 bp, Homo Sapiens; identical to SEQ ID NO: 195120

SEQ ID NO: 390954 - DNA, 1000 bp, Homo Sapiens; identical to SEQ ID NO: 195159

SEQ ID NO: 390955 - DNA, 1000 bp, Homo Sapiens
ggaaggatgtaacccactaggcttggctccatatgaaatctggcagatggatgttacacatatagcagcctttggcaaactcagctatgttcatgtgactacagacacttactcccatatgctacatgtcacgtgccaaactggggaaacagctggtcatgtctgatgacattgtctgtcaccttttgcccatatgggggtccctacacaatgaaaaactgacaatggacctgcttatgttagtcatgcttttcaaaattttttacagttatgggcaatcactcataaaacagaaattccttacaatcctcaaggacaaggaatcatagagtgggcacatcaaacattacaatgcatgttgaaaaaacaaaaatggggactaggagaccagctaccacctcaaacaaaattacatttagccttatttactttaaattttttgactcctggtatggatattaagactctggcagaatgacattggcaaatgttagagggaaaaaggaaagtttacccaaaggtattacagaaatccccggaagaaggacaatggaaaggcccggtagacttactgatatggggacgagggtttgcttgtgtttttacaggagatggacaatccgtgtgggtgccctcaaggtgtgtgtgaccatggaacgggagactggagaaatccatggatctcaactgtgggcccagctcctccagtacgagccatgagctagttgaatctgaatgcaaagacagaacaaggaccgactggagtcacactgacatcaacccccataaaatggggacagctcaagaaaaccacacaggaagctgagaaactgctggagcaaaacccctgactccatgtttatggccatgctagctgtaatatcctgtgcggtatgttttccctgtgcagaggcaaaaacttattgggcatatattcctaacccaccagtagtacgaccggtactcgggagcaacactcctcctgagatatatcatgatc

SEQ ID NO: 390956 - DNA, 1000 bp, Homo Sapiens; identical to SEQ ID NO: 281829

SEQ ID NO: 390957 - DNA, 1000 bp, Homo Sapiens; identical to SEQ ID NO: 281830

SEQ ID NO: 390958 - DNA, 1000 bp, Homo Sapiens; identical to SEQ ID NO: 195103

SEQ ID NO: 390959 - DNA, 1000 bp, Homo Sapiens; identical to SEQ ID NO: 114824

SEQ ID NO: 390960 - DNA, 1000 bp, Homo Sapiens
tgctattcccatcaaggtaccactgactttctttgcagaattagaaaaaactactttaaatttcatatagaatcaaaaaagagcctgtatagccaagacaatcctaagcaaaaagaacaaagctagaggaggcatcaggctacctgacttcaaactatactacaaggctacagtaaccaaaacagcatggtactggtaccaaaacagatatatagaccaatggtacagagcagagacctcagaaataacaccacacatctacaaccatctgatcttgataaacctgacaaaaaaagcaatggggaaaggattccctatttaatggtgctgggaaaactggctagacatgtgcagaaaatagaaactgaaccccttcattacaccttatacaaaaattaactcaagattgattaaagacttaaatgtaaaacccaaaaccataaaaacgctagaaataaacctaggccataccattcaggacataggcatgggcaaagacttcatgactaaaacaccaatagcaattgcaacaaaagccaaaattaacaaatgggatctaatcaaattaaagagcttctgcacagcagaagaaactatcatcagagtgatctggcaacctacagaatgggagaaaatttttgcaagctacccatctgacaagggtctaatatccaaaatcgacaaggaacttaaacaaacttacaggcaaaaaacaaccccatcaaaaagtgggcaaaggatatgaacaaacacttctcaaaagaagacatttatgcggccaacaaacatatgaaagaaagcccatcatcatgggtcattagagaaatgtaaatcaaaaccacgatgagatacattctgatgccagttagaatggcgatcattaaaaagtcaggaaacaacagatgctggagagaatgtggaaaaatagtaatgcttttacactgttggtgggagtgtcaattagttgaaccattgtggaagacagtgtggcaattcctca

SEQ ID NO: 390961 - DNA, 1000 bp, Homo Sapiens
attgttgatgctgagtggaacattctctatgacaagttagagaagatccatcattctggagccaaagttgtcttgtccaaactccccattggggatgtggccacccagtactttgctgacagggacatgttctgtgctggccgagtacctgaggaggatctgaagaggacaatgatggcctgtggaggctcaatccagaccagtgtgaatgctctgtcagcagatgtgctgggtcgatgccaggtgtttgaagagacccagattggaggcgagaggtacaatttttttactggctgccccaaggccaagacatgcaccttcattctccgtggcggcgccgagcagtttatggaggagacagagcggtccctgcatgatgccatcatgatcgtcaggagggccatcaagaatgattcagtggtggctggtggcggggccattgagatggaactctccaagtacctgcgggattactcaaggactattccaggaaaacagcagctgttgattggggcttatgccaaggccttggagattatcccacgccagctgtgtgacaatgctggctttgatgccacaaacattctcaacaagctgcgggctcggcatgcccaggggggtacatggtatggagtagacatcaacaacgaggacattgctgacaactttgaagctttcgtgtgggagccagctatggtgcggatcaatgcgctgacagcagcctctgaggctgcgtgcctgatcgtgtctgtagatgaaaccatcaagaacccccgctcgactgtggatgctcccacagcagcaggccggggccgtggtcgtggccgcccccactgagaggcaccccacccatcacatggctggctggctgctgggtgcacttaccctccttggcttggttacttcattttacaaggaaggggtagtaattggcccactctcttcttactggaggctatttaaataaaatgtaagacttcaaaaaaaaaaaaaaaaaaaa

SEQ ID NO: 390962 - DNA, 1000 bp, Homo Sapiens; identical to SEQ ID NO: 281832

SEQ ID NO: 390963 - DNA, 1000 bp, Homo Sapiens; identical to SEQ ID NO: 281833

SEQ ID NO: 390964 - DNA, 1000 bp, Homo Sapiens; identical to SEQ ID NO: 281835

SEQ ID NO: 390965 - DNA, 1000 bp, Homo Sapiens
tctggctgacaaagtttttacttattgctgaaaaatagtgccctgagggaaaggcaggctcccatcactgatgctttaatgactcatctgttctagtctccaggttacagaaagcccaggctgactggggatgaaagtagtaccccagattaaccaaatgaagaaaagaatttcaaggcatgaaaactgtctttctgaaataagacaggcatacaaagccagaccaaaaaataaaaagatagaaaagaaatgaacaaaaccaaaactgggattatgttaacagaccaaaactatgactgatcggtgtactcaagagacaaggagaacagaatcaagttgaaaaacacttcaggatatcatccaggagaatgtccgtaacatagcaagacagaccaacattcaaatgcaggaattccagagatcgtcattaagatactccacaagaagatcatatccaagacacatagtcatcagattcactgaggtcaaaatgaaaggaaaaaatgataagggcagacagagagaaaagccaggttgcctgcaaaaagaagcccctcagtaaaacagcagatctctcaaccaaatccctacaaaccagaaggaactggaggccaatattttacattctcaaataaaataatttttaatttagaattttatatcagaccaaactaagtttcatgagaaaaataaaaataaggtcattttcagataaatgttgaggatatttgtaaccaccagatatgccttataaaggcttctgaaggaagcactaaaaatggaaaaggaaaacaattacttgccactccaaaaacacactgaagtacacagaccagtgacactataaagcaaacacattaaaaaagtctgccaaataatcagctagcatcatgacgacagaattaaatccacacataacaattttaactttaaatgtaaatgggctaaatgcacaaagtaaaagatcctatgtattccctttagtgagggtaattctcga

SEQ ID NO: 390966 - DNA, 1000 bp, Homo Sapiens
atctctatatttttgcgccatgctgagttgattgcaaactcattcgtggatcagtgtcggaatgtgctgaagttgacctcagaacctcagacggaggacaaggaagcactggttacgattcggctcctggatgtcttgtgtgaaatgacgtccaacactgagctgctcggctacctgcaggtttttcctggcctgatggaacgcgtgattgatgttttacgagtgattcattcagttggaaaagatagcacgaacatcttcagtccctccgactctctaaaagcagagggtgatatcgaacacatgactgaagggtttaagtctcacctcatccgtctgattggaaatctgtgctacaagaataaagaaaaccaagacaaagtgaatgagctggatggcattcctctgatcctggacagcagcaacatcgatgacaacaacccctttatgatgcagtgggtggtgtatgccgtgcgaaatctcactgaagacaacagccaaaaccaagatttcattgccaagatggaggagcaggggttggcagatgcgtccctactgaagaagatgggctttgaggttgagaagagtggggacaaactgattctgaagtccaataatgacatccccccgccttaagctatgccctcttcgtctgaacacactcagaattccatctcacggccctctcgtctctgcggtgtatgaactcagaagtatcggaagtgtaggcgccgatgcggggcctcccgtcagttctttaaaattaatgtgtgtaagctacaagtgagcgttttctttagttctctgcagtgagtatcactgtctgcctcacctttgttcctctgggtgggactcttcccagtcatatgcattgtgcttactgtcgtagtgagtaataaacgtttttgtgggcacagccctcactcggcaaaaaaaaaaaaaaaaaaaaaaaaaaaaaaaaaaaaaaaaaaaaaaaaaaaaaaaaaaaaaaaaaaaaaaa

SEQ ID NO: 390967 - DNA, 709 bp, Homo Sapiens
cactagggggctgcttgtagggggatggaaaaaacggaggcttaaaaaaatcatgctgctgaaatttcagcaagaggggaaaagagagagcgcgtgagagagagagagagagagagagagagagagagagagagacagcaaagcagtcccaggcttcctcctctctttcacgtcagaggcaggaaccgactgtgctaaggctgttggctcaacacccagaggagacgggcagacccagggagagtgagagaagggggtcctctctgacccaaggaattaccactagtggagtgaagccacctgactttttgatcttattttggttgcctcctcattctccttccacccgtagccctgacagcttgggtttcatttctttcgtggagccttgtctcttcctcccagaataggaggaagggaagagaagggaaagaggagggctctctaggtgagcgcatcagctggctccagcctgagcaagcaagaattttcttcccaggaagctcctctcgctccccggccgcccacccccagcctgggtggctgtatcgttttaactgcatagagggcaggtctcttttggaattaggattaaagaaagtgcagtaaagagaaagcatcgaagacaccatcacaaaagattcccacaactccatgctgtgtgctgcaggctggtcctgaacccagatctctggctgagaggatgggg

SEQ ID NO: 390968 - DNA, 1000 bp, Homo Sapiens; identical to SEQ ID NO: 198568

SEQ ID NO: 390969 - DNA, 1000 bp, Homo Sapiens
atccaactttataaacattgacaattaggtacaaatgttttaaagcatggcaggatcagagaaaacatatctgtattctggatggcgcctgttggctttcagtttatgaacttaaaaagtaatttctcatgctgctccctctttctggaatattcagctgtaattaacccttctctgagaagcttttctcgaccatcacaccatctattagcagtaggtagtgagtgggaaaaggggagacaagggaaggtgaggatcagatgtagagctggggagagtgtgggaaagatacgctttacattggaagagaaactataattttaatttagatcaacctagacttttttaagcattaaaatgaaaagtctggatcatgcacacttttttaaacatgaaaacataaaagtgataagaaaaaaaaatacctggaaccctctctccctctctctctctatatatatatgtgtgtgtgtgggtgggtgggtgggtgggtgtgtatgcttgtgtgtgtgtgtgtgtataaatgaagcatatctctctctatatatacatatatgtatgtatatatatgaagaaggatatatctttatagatagatagataggatatttattcctctagggctaaagataaagattaggaaaaaattaatttgctcatacctcaaagagtctacctcagtaaagaaaaatagtccacacctcttgttggccactgcacacatagagccccagttgagtagaaactcaatatttgtcaagtcaattctcatgcatttatgagtacacaattcaaaataaaatgtgcatacactactggaataattatttgtttaggtagaattatgaaataatagttattctgaaccagataaaattttagacataattcaatgcagccatatcatataagaaatggagacacaatgaagtaaattaacttgccaaagtcataaacatccctacagcatagctggggcatggccattggaccctagatc

SEQ ID NO: 390970 - DNA, 79 bp, Homo Sapiens
tggtaaaagttgtgtttggttgatggagctcatttctgggtgctttcatggaccagggctcagctcggcatccctggac

SEQ ID NO: 390971 - DNA, 1000 bp, Homo Sapiens
ttgaaggtaaataaagtcctaacaaggaaaattgaggtaaacaaaccttaggtccagtctgccctttctagatgtctcctgccccgctttatataatttttagaagttttaatctgctttttaagaacagcttgttgaagtataattgtcaaataaaaactgcatatattcaaggtgtaaaacttgacatcttgatatagatatacgttttgaaatgatcaccgcaatttagctaattaacatatccatcacctaacatatttaatattttctcttttttattcctgtggtgagaacacttaagatctacgctcttagaaaatttcaagtatataataggtgttgctaactatattcaccatgctgtacattaggggtcaagaacttatcttgcataactgaaacttcgcatcttttgccctgtctccccattcctctcctcctcctagcccctgtcaaccaccatgctactctctgcttctttcagtctgactattttctattccacatataagtgagatcatacagtatttgtctttctgtgtctggcttatttcacttagcatagtatcctccaggttcatctaacattgttgcaaatggcaggcttttcttcttttttaaggctggataaaattccactgcgtatatgtgtatacacacgtatgattgtgtgtgtgtgtgtagacatacgtgtatctacacacacacacatatatatgtcacattttgtttatccactcatccatcagtgagcatttaggttttccctacatgactttatgatgcttctttcaaatgtactccctacaaaactcttaccttcacgatgtggacattagatctactgcctattctgactgcaaacttccagaagggactattctttcccagaaaaccccttcccacctctgaaaattatactcatcatttaagcctcaataatttattcaataaacatttcctccccagcaccttgagaggcccaggcgggcagatc

SEQ ID NO: 390972 - DNA, 1000 bp, Homo Sapiens
gtggcagctgcaggctcctttcctgctggctcagtctgagcccggcagggtgatcccttcctcatccactccgtctctccgtttccctttcttcacggtgcttgacactatctaatattatttggttgtttgaatgtgcgcgtccagctcccaggacgctccctgcacacagtgaatgaataaatgaatgaaataaagcgcccagctcgtagtaagggccaatgaatgttctattagtagtggaacctcggattgggtggctccagccctgcctcccttccctcaggaggcgccgaggtcccagagcagcccgcgcgaccctgcccctgacctttctccctgggtcagttaaaccagccttctttcccgcctgccgggttcatttgaaaaccgaaaaccccgccattgccggcggtccaccggttgccacactctgaccaatcaggagcgacgcgtttcacgccgagcccgaagtttccccggcgacgcgcagccactggttatgcaggccctgtgggcggaacgccgtaaggtcgcgcgccgggcaacgcggtgccgctacacagtagcgagtttgtaagaaaacaaatcagcggcgttcggggcgtggccgggagcacgttggctccgccccctggcggctgcctcagcggcggcggcggcgcaggctcagagcagaccccgcccggcgaggaggagggagggtgagttagggggagacccggcccccaaggggcgggcgccgggcagggccccgcgggcggccgagggttgggcccggctcccagcccctcgccgtcctccggctgacagggggaggagcccgccgggagggccggggtctcgggctggggagccgggacgggagagcagcgcagccgggtgcaccgcggccgcgccccgggagggctgttcgggccagcgcccgccggctgctccgcgctgacagcgccgggctggggcggggcggggggctttgcaggccgccagtgtcgacatg

SEQ ID NO: 390973 - DNA, 1000 bp, Homo Sapiens
gaaaatggctgtcaaaaggcgcccagatttagagagccgccggtgaggcgtccgagcaaggcttgcattcgctccctcctcctggaaggtcctttccgaagagtccgacccgccgaccggccggagacggattggagaatttcacctcccggaggggggacgaagtttgccgcagtggtggcggcgcccctcgcctccgcccccatccaaagggttcagaagaactccgcgagccccgcacgcgcctggctccttcctttgcgcggtggcgctctacggctcgggcttcgggcgcgcacggcgctcgggatgggcggaaggaggcgggaggcatggtgggtgcgcgcggggacctccgccgcggtggccgccgccgctggggcttctccagcccgggctatgcttcggagggcgggggtgtggtgtgagcggatggagagaggcgcgccttcgtcgtcatagaggaaaagtgaaagttgtaccatctgtatatgatttgggattctcttatttcttttcctttccaggggcagcgcgcacagacacacaaagtaaccgtggtccatgcaataatcatttaaggtgccgcgtttacacagagcagcaggggacagttactttcttgagtagcagcgggaaaacgggcgggagaaggcagagagggtgtaaatattgatcccaaacttgcagagtttgtgaagcgacttttaagcagattgtccgaagcggacgctccaccccgcacccggccttttatcctttcctgaactttgtgctcctgtcccccattgcacctccttctgtaagatgccgtcccccgagaggcgctgcaccccaggcttccctgcctgaccccgcgtggaaagaggattaaggaggctccctccgccgctggtcatcctgccccaacttctcatctccccagtgcagactgccgggtagattctggccttgggtacagtgctcatggccctctgccagtttatatgtacatatattt

SEQ ID NO: 390974 - DNA, 1000 bp, Homo Sapiens; identical to SEQ ID NO: 281838

SEQ ID NO: 390975 - DNA, 1000 bp, Homo Sapiens
ggagtgctggtctcagtgcccatcagagggtccacacaggagagaaaccctatacgtgtcagcagtgtgggaagggcttcagtcaggcctcacattttcacacacaccagagagtccacactggagagaggccttacatatgtgatgtctgttgtaagggcttcagtcagaggtcacatctcatctaccatcagagagtccacactggagggaatctgtagaaatgagaggtgtggttcagccttcagttagagctcacatctttgtctccgttgggaagtccatgctgatgattgtgaaaagttcctttaaaactagagcttcgaagaatcttgacaggaaagaagtctctccaaatgctgtgttttagacttggttaggacatgaattctttacaaacgtcatatttcacagatgcgagaaaactttgttctgtaaatatgatcagtgcttatatcagagtaccaggtgtcccggttctcaagatgtaacacagcagaaaagtcttgtcggagtctgcacaggagagaggccttcctttaacaaaagtatgattgacagaaaaaatggatgtcaactaaaatgtaacctctatgtaaggaggtgtttttcaccactctatctctaccatgtagaaattgtgcttggctcataataggcccagcaattactgaggaaagtgaagaaaatacctataattaggacaaatacttgaaaattctagtctgttttctactctaaatttatattaatttatattcaaaaggaatcctgcaagtagccttaataacgttagtttcagtaagtactgaaaagtatataatactgccatccatactaacacaaatttggaaaaaagacatgaatggctcccatccttcagccttagttctttgtacagtgtatcatcagttgtgtacagtatgatttttagtgtcagtttatagactgaacaatactgtttttatctaatgtgtcctgcaattcacattaattctcg

SEQ ID NO: 390976 - DNA, 648 bp, Homo Sapiens
acagcagcaaaacctgagatgtacacattttagtgtacatttttagaatatatttaaaacaataagatagtctgaattggatggttgagtaacctttaaactcatctggtaaacctctaatgtatagtagaaataatttgaaagcttttaatgtataatagtacttacttcaggaaaataatttgatgtttcattgttggtctctttttctatattatttcagcctaagtctatcttcataccacaggaaatgcattctactgaggatgaaaatcaaggaacaatcaagagatgtcccatgtcagggagcccagcaaagccatcccaagttccacctagaccaccacctcccagattacccccacacaaacctgttgccttaggtaatggtggagggtgacagcaaatatgttaccaggttttcatactatggggagaaaaaaaactttcttttaagagattatttgaaattcttttggtggaggacagaaggaaagcagtggctatggagatgttttctgctttttgcctactagcttaaagtgtttttatgacaggattccctatgacacagtctgagatattttgtcctcatttctcatttcatatttagccttctctcttctagagactggttccccattcatt

SEQ ID NO: 390977 - DNA, 744 bp, Homo Sapiens
gaaccacccgaatgtgttgtatcttaggagtctgacaacttcttcccaaatttactttgacccttttatcagaatgttgccacctcaggtaattttcctaccatcataagacgaaaagtccttcctcttaccccacagcctcattataaccagcagtttcatttgtgcatacaaataaaaatcctgcaagttaagagggcatttcctgctattacctgaaacagtatttttttcacccagccctctaattaagaaactgaactggcaaccagcttttgattttgttttatgtttagtttgtttagttttgtttgtttttttgagcatgcaattattgtcataatgactttgttttataagagaactcatttatatttttgctttgacagtaagaaatccttacacgggccataaatacctatgtggagcacttcagactagcattgttctattagaatgggttgaaccaatgcagaaatttatgttaattaaggtaagcataaaagtcagactatcttattcttactataaaagcttgtcaaccttactgttctttaaagaaacatttttttcagttaattttcaagttaatttagtgattttagataatgtggcagggttgtaaaaatctgcccagttgtaagcaacttaattggcctagtaaaagttttataagagactagagaaataattcaagggtatggcggtggggagctggaaatagtgtctcacatacagagcctg

SEQ ID NO: 390978 - DNA, 1000 bp, Homo Sapiens
tttgtttattattattgagaaaagagctgaggttaccacattcattctttgtgttagaaatgtaggagtgtggtggttttctgcaatatttagagcttagtctcataatttggaatttaagataataagtagtaacaaggcaagtcttttatgtaagacagtcaaacagtgtcacttcagggacaaaggcctggaagcccttaaaataagttatcttagatgtgccagaacatattcagagctttattcctttaagcttaaggcttcaatacttgtagaaatgcaaatattcttgagaaatgatacattttttgttctcaatttctcaattctacatacctgattatgagtgaagtatccaaagcaggttttcatcagcatgggggatggaaggtaggtataatatgaggacaatggaaactttgggagaagggagtgaggaaatggataaagagaaatttgaaaattttaggctggacttgagcactattgctgctttcctatgaactatcagaatgtttaaatgctttatcattcatggtccactctcaaccaacatttattatcctttagtaattaaacaatggttttacatacatttttataatgtagaaggaaattcaagattccataatcgtaaaatttttcagatttgtctaatgtgtaatttgtgcatcttcacatgctgctaaatgcagatttaaacattacatctgaggatcatgacttttcctcctttcttggagatcttggtataaaattcatctgctgttataaaatcaggtttctacagagttcgtttcacactaaaggtagtttgttactgtttgcatgaggaaaccatgtatgtctcaatctttaattttaggtggtagtgtttattgttcaccctccctcttgcctccaaaagaatgctgaattatacgccaatatttccatgtgtattctgttgccttgatgcgtactatacttgttgcatgtatattaaaaattttgtact

SEQ ID NO: 390979 - DNA, 1000 bp, Homo Sapiens; identical to SEQ ID NO: 281840

SEQ ID NO: 390980 - DNA, 1000 bp, Homo Sapiens; identical to SEQ ID NO: 281842

SEQ ID NO: 390981 - DNA, 1000 bp, Homo Sapiens
tgccaatacatgacaaagttactttgtgaatgactaagacacactttgtgaatgactaagaaacaccatccctagaaaactacttcatttttctaattcgggaacagcctagtatgaaactgaggaacatggatcattctacagaaaaacagagaaaggattacaaaaaggatgaaattagaaaatagttggctatttgtgatactgtgaaatatgcatttggttttcaaccccatttcctggcacgcaactcctaaaatccttagaaactccaaagtgatgtctttttgtatgctaatgattgactggtgtctagcagcctctaagagtctaggtagcttcaggatggggttgatcacaagaaggaccaagcacacttatacaccaataacagacaacagagagcaaactcatgagtgaactcccattcacaattgcttcaaagagaataaaatacctaggaatctaacttataagggatgtgaaggacctcttcaaggagaactacaaaccactgctcaacgaaataaaagaggacacaaacaaatggaagaacattctatgctcatggataggaagaaccagtattgagaaaatggccatactgtccaaggtaatttatagattcaatgccatccccatcaagataccaattactttcttcacagaattggaaaaaaactactttaaagttcatatggaaccaaaaaagaacctgcattgccaagtcaatcctaagccaaaagaacaaagctggaggcatcatgctacctgatttcaaactatactacaagggtacagtaaccaaaacagcatggtactggtaccaaaacagagatatagaccaatggaacagaacagagccctcagaaataatgccacacatctacaactatctgatctttgacaaacctgacaaaaacaagaaatggggaaaggattccttatttaacaaatggtactgggaaaactggctagccatatgtagaaagcagaaatt

SEQ ID NO: 390982 - DNA, 1000 bp, Homo Sapiens; identical to SEQ ID NO: 281843

SEQ ID NO: 390983 - DNA, 1000 bp, Homo Sapiens
tcatatcctgattcagctcttcctccacaaaggcaagacagattttattctaattctgctagacgctctggactagcagaactcagaagttttaataagcctcctttggataaaatggatgggtcaatgccttcagaaatggaatccagtggaaatgataccaaagataatcttggtaatttaaatgtggctgattcatctctccctgctggaaatgaagtgagtggccctggctttgttcctccacctcttgctccaatcagaggtccgttgtttccagtggatacgaggggcccgttcatgagaagaggacctcctttccctccacctcctccaggaaccatgtttggagcttctccagattattttccaccaagggatgtcccaggtccaccacgtgctccatttgcaatgagaaatgtctgtccaccgaggggttttcctccttaccttcccccaagacctggattttgcccccacccccacccccacattctgaagatagagtgagttccctttagggttgagtgccttcaaatgagcctgctgatgaagatccagaaccacagcaagaaacctgataatatttttgctgtcttcaaaagtcattttgctattctcattttcagttgaagtatctgctgttacttcagtgattacacttttgctcaaattgaaacaataaaattataattctcaggatagtattttgtaaataaggatgatttaaataggaatcttatgagtaaattatttccattttattttattctagatagtgttaactattttaatttgattaatccactattatctaaacagtagtgggagttttatatatgtaatcttgcaggtggtgaggttttaaattctaaagtctttgtccttattccaagaactgtatttactgtggttgtagacaaatgtgaaagtaaatttatgcttaattgaataaattatagttgatttaaaaaaaaaaaaaaaaaaaaaaaaaaaaaaa

SEQ ID NO: 390984 - DNA, 1000 bp, Homo Sapiens
gggtcatgccacttcactccagcctgggcaacagagcaaagctctgtctttaaaaacaacttaaataaataaataaattgttgaggtctgatgagtaagtggacaagttattttccagcagacacacaaaagagaaggaaattacaggttataggaggtatttcagaaaatataactttctaaaacataggaagttgaagaagttgatcacattacagaattctgttgtttagaaaatgacctgtggcgaaatgtccttattcagtgaataggtgattccgcttatgcacgacctgtgtgaagtggatcaggccacccagaatgcacgatgcgcttctcaggcccagcaggagtatgtgtctgtgttaatttcctgtggctattatgactaattgccacaaatgtggtggcttaaaacaacagaaattaatcttcttatagttctggaagccagaagtttggaatcaagatgtcagcagggccacactcgctctgatgctctacgggagggtcctctcttgcctcttccagcgtctggtggctccaggcattccataactttatagcagcgtcccacaaatctctgcctccatcctcacatggccttctccactgtgtctctatgtcttcaatctcttttttttttttttttttttgaggcagggtttcactccagtctcctagactgaagtgcaatggcgtaatttcgggtcactgcaacctctgcctcccgggctcaagcgatttgatctctcctttatcttataaagatactagtcattggatttggggcttaccctaaatccaggataatctcatcttgagatgtttaacttaattatatctgcaaacactgtatttccaaataaggtcatatcacagccactagggattagatacttgaacatatcttatttgggggctcaacccattccagtgtacgaaaaacactcttgttcaaggcccgatgtttctcagggcatagcccactgactacctg

SEQ ID NO: 390985 - DNA, 1000 bp, Homo Sapiens
ggcaagtatgccttgggtgtgtgtgtgtgtgtttgagagagagagaaagagagagagagagagagagaggtgtttttgcagcgggaaacaagcaggaagaggcacagaggccggcgcccctgctccctcggggcctctgagagcggcacacaccgtaattcccttcccagagcctacagattcccacaaacaatgcatcactccgccgccgctggcctgattacagctggggggattttcctgggcgcgcggcgggccaggctgagatgggggagctctccggtgctgaaaggggcgggggcgcgggctcgctgcgctgcgctgcgctgccgtgcgcccccagaaggcggaggcggccgggccgggccgggccgggggtgggcgggggcgggcccggggcggcccagggcggggcccgccgcttcccccgccctcattggccgctggcggactcacgtcacccgagctggtgctctcccccagcccctagggaattggagctgaggaggagctgaaaatgcagatttagcatcaagcacagacctacactcgctctttctctccggtacacacagctccccacattcgcacccctgcccgcgcgccgggccgcctgactgcacggcttcccctccagccagatgctggagaacacacactgattcgctgctttccaagaccctgttcagtctctttctctatacaaagatttttttaaaaactatatataagaattctttatttgcaccctccctccgagtcccctgctccgccagcctgcgcgcctcctagcaccacttttcactcccaaagaaggatgaagggtggttgtgtctcccagtggaaggcggccgccgggttcctcttctgtgtcatggtttttgcatctgctgagcgaccggtcttcacgaatcattttcttgtggagttgcataaagggggagaggacaaagctcgccaagttgcagcagaacacggctttggagtccgaaaggtaagc

SEQ ID NO: 390986 - DNA, 1000 bp, Homo Sapiens
caacaggtcaggcctccatgtggcctcgctggctgtggcccggctggggctggggggcagaacggctttgatttcgagtctctggctgaatctgcaaaggttaaaaaaataatcaccagcaccaaggcgttgccccttcaagacgtcaatcccaacaccaggcggaaaaaacaggccctggggcccctgccagcccacaggcctgagacctgcagaggggcctgatcagaaggccaaaaagctgggtccccacatctctccgggcacaaggggagactcggcttcccgtctggaacacagggcattgctgtagaagcgcatccacgttcaaggtcaagtgcagcatctacctgcctgccaagccctggcccaggcagtggggacccatgaggcgagtcaaggttggccccggtctgtagggctcccaggccagagatggggtttccccatgctggtcatgctggtcttgaactcctgacctcaagtgatccacccacctttgcctcccaagtgctgggattatgggtgtgagccattgcgcccagccccttccttcatatttacataaaatacccttctgtgacccaggacttggcttaaatgtcaacacctcaggagacctttcccaacccatgggcaaaaatacctacacccaggtatttctttcagacacttctcactcttggaaatgatcttctcggctacattttcatgaggttgggaacgtggtttatccgcagtttgtgccattgtacctggcatatactaggtgagattgtctccttggggacaaaggaggatgctggctatcacaacaaagtttcacaaacatataccctctgagacccccagacctcccccagcagtgccccaggatttacaaccagaactttatttatttatttatttatgagctggagtctcgctctgtcgcccaggctgaagtgcagtggtgcaatcccggctcactgcagcctcgaccccctgggcttgggtgatc

SEQ ID NO: 390987 - DNA, 1000 bp, Homo Sapiens
tttttcaggcagacgaggatcttcaaggcagagggaatcatatagataaggacatagaagagtgaaatttcatgaagtagttaagcatctgaagaagcatggaattagtgacaagaaatgatgcggaaaagatatccagatccaatcaagaagggccttgttggcattctatggagtctggactttggcttctgggtcacaagttctcagatggggttttcatatctattattagacctactatgtactggtccagtggaagggaaaccccttgtcttactgctagtggagtaggaattgggtatggaccacagcttgtcttgtttccaagtattccctaagaaatctggtctgctgctgatggagatctatttatggaaatgtctttttccctcaggaattttatgtcggaaacagctgtcataggtgaggaggaggaactggtaaaagtacttaataggagagtgtcatggtcagattggtgttttccaaaagtcagccagggcagattggagaggtccatattggaggcaggaagacttaagagactattgcaaaggtgaagacaaaagacgatagggacttgcactttaattccagcccttagaagtagtagaaggtcagaaatgagaatatgcattacagagatagttagttgctatatcattaggacttggtgatagattggatgaggaggatgcggttgggtgaggcaaagaggagagtccacattcctggtctgggtagtaagaaagaatctagcaagagggcttgtggggaaagatgctgagttacgtagcaagtgcatctgctttatccttgtaatgaatggggctaaaggtgtaaaccaaagagtcatcatcaggatttggagggtagaataaatcagataactcaggaagaaggagcagaagaattactgatactccctggaaggaaaaccggaagtaaatgggagaaacttgctcaagtggacaaagtttaacagacatgaagcacg

SEQ ID NO: 390988 - DNA, 1000 bp, Homo Sapiens
aaaataaatgcagtaccagcgagtgactgagtcaccgccagtccgtgggcaggtgtcagcagcgcggggcacctggcggggctcatgtgtcccgccgcctggcagccttgtgcgtgtgcacacacgtgcagggccgtcgtccagccacaggccctgccatccacaagcccgtttgccatccatggggccaccccagggacaggcctcagctaccgcaggagggccagctgctaccttcattccgttagcaagcaattactgagtgcctattctgtcccagaccatatgttgaaaccaaatcccctctcctctgaaaactgacgtcctagagcaacattctagaactttcccagggatggaaatgttctctatccacgctaatttgaaaaatggctaggacaactgagggacgacgtttttacttttatttcactttaattgatttaagcgtgaatatctatatgtggctgccatatggaacaccagtgctctagggaaagatacagacaagaaacgattgttctaataaaaaaagtaaagtagtgctcgcttcagcagcacatatgctataattagaacaatatagagaagattagcacagcccctgtgcaaaaaatgaagcatttcattcttttttttttttatgagatggagtctcactctgtcacccaggctggaggcgcgatctcagctcactgcaacctccgccttcggcattcaagggattctcctgcctcagcctcccgagtagctgggattacaggttcctgccaccatacccagctaattttttgtatttttagtagagatggggtttcaccatgttggccaggctggtctcgaactcctgacctcaggtgatccacctgccttggcctcccaaagtgctaggattacaggcatgagccatggcacctggcctctttttttttaatttaatttttcaaaaaatttaattccactgggcagtggaatggtcagatgctgccctgacaggatc

SEQ ID NO: 390989 - DNA, 1000 bp, Homo Sapiens
atccccaccttggctatcatcacccgatgaggcaaccagccagaacgcctgaacgcaggcacatacttcctattctacaccctagtaggctcccttcccctactcatcgcactaatttacactcacaacaccctaggctcactaaacattctactactcactctcactgcccaagaactatcaaactcctgagccaacaacttaatatgactagcttacacaatagcttttatagtaaagatacctctttacggactccacttatgactccctaaagcccatgtcgaagcccccatcgctgggtcaatagtacttgccgcagtactcttaaaactaggcggctatggtataatacgcctcacactcattctcaaccccctgacaaaacacatagcctaccccttccttgtactatccctatgaggcataattataacaagctccatctgcctacgacaaacagacctaaaatcgctcattgcatactcttcaatcagccacatagccctcgtagtaacagctattctcatccaaaccccctgaagcttcaccggcgcagtcattctcataatcgcccacggacttacatcctcattactattctgcctagcaaactcaaactacaaacgcactcacagtcacatcataatcctctctcaaggacttcaaactctactcccactaatagctttttgatgacttctagcaagcctcgctaacctcgccttaccccccactattaacctactgggagaactctctgtgctagtaaccacgttctcctgatcaaatatcactctcctacttacaggactcaacatactagtcacagccctatactccctctacatatttaccacaacacaatggggctcactcacccaccacattaacaacataaaaccctcattcacacgagaaaacaccctcatgttcatacacctatcccccattctcctcctatccctcaaccccgacatcattaccgggttttcctctt

SEQ ID NO: 390990 - DNA, 1000 bp, Homo Sapiens; identical to SEQ ID NO: 195184

SEQ ID NO: 390991 - DNA, 1000 bp, Homo Sapiens; identical to SEQ ID NO: 114825

SEQ ID NO: 390992 - DNA, 1000 bp, Homo Sapiens; identical to SEQ ID NO: 281848

SEQ ID NO: 390993 - DNA, 1000 bp, Homo Sapiens
agaagacatgactattggcttctggctgggattgtcctccatggctatgcacggtggcaggacatccagaatgatgctcaatttgccattatcaacgagccatttaaaactgaagccaataaggggaactttctggagatgaaaaataagttcctggcccggaggttcaagctcctggagcaggcgctggtgattgaggagcagctgcggcgggcggcctacctgaacctgtcgcaggagccggcgcaccccgccatggccctccacgcccgcttcgccgaggccgagtgcctggccgagagccaccagcacctctccaaggagtcgctggcggggaacaagccggccaacgccgtcctgcacaaggttctgaaccagctggaggagttgctgagcgacatgaaggcggacgtgacccgcctgccagccacgctgtcccgaataccccccatcgcagcccgccttcagatgtccgagcgcagcatcctcagccggctggccagcaagggcacggagcctcaccccacaccggcctacccgccgggtccctacgctacacctccggggtacggggcggccttcagcgccgcacccgtaggggccctggccgccgcaggcgccaattacagccagatgcctgcagggtccttcatcacagccgccaccaacggcccaattcaccgattttttaaaaaagttccagaaatccagtgacgaatgtggtatacaaaaaaatatataaattctttcaacttagaataattaagtcataaaatacatagggtacaaataccacattccgttctaaaatgatatcttaggatcatcaaaagaaaaagaggatttggattatgcaaaaaatgattcctatatatataatcaattatctaactgacatttttgcaaatctaccacaacttcgccttttattgcatatgctaaacaagcagatgctaagtctgtaaactgtgaattaacctcctttttaattaattgttcg

SEQ ID NO: 390994 - DNA, 1000 bp, Homo Sapiens; identical to SEQ ID NO: 281850

SEQ ID NO: 390995 - DNA, 1000 bp, Homo Sapiens
  misc_feature (621)..(621): n is a, c, g, or t
ggagcatccaagtgagacatgggtattggaagcactttgcaaaccagggtgaggagttcacagccttgtttccccctccacgctcaggcactcccaaaggcgcgaggaaggaggaagaagaggaggaggaggcagctacggtgataaagaacagcaatcaaaagggcaaagccaaaggaaaaggcaaaaaggttggggcccagaggggcagggggctgaggtcccttcagggagcagaggcaggggcctggacttgggagcctagagggtgggggcttggagccacttgaggttagaaccttggctccccctcttgtgacaggatataaggacaaaggaaaccagatttgtgcaaacagaggaggcgtttgtggggtcaccaggctaggactggccatgcaagggccttatgtcatctgggctctctgaggcctcccctctggagcataaccatcagacagccagagatgtccccacgcccccaccatgttttctgtgccagggaggaggagcacacagcagagaggcagatgagtactgactgacattcagctgcaccggttgttaaaatgtttccaccctacagccctgagctccccaggcgctttcattctccttacncaggacctcccaacctcccagcaactaaacactccagcaacgaaagggttaatactgcccatcaggagcctccctgtttctcctccaagcttaccagtatgcatctccatggcgaacaggttgttaaatattttgaatattgcccctgctcccacacaggactcagacaccaacacacaaaagctggagtaagcaggagagggaggtccaactgacagaaagtaacaaaagtcttcaaggaacaggtttctcccagtgggaagatcaccacgaggacagggcctggattttagctttgtaggtttattagtttgtgcaggagtggtcaggtctagggggagtgattcacattaaccaagatcaccagatgctgatgtac

SEQ ID NO: 390996 - DNA, 1000 bp, Homo Sapiens
  misc_feature (179)..(179): n is a, c, g, or t
  misc_feature (203)..(203): n is a, c, g, or t
  misc_feature (256)..(256): n is a, c, g, or t
  misc_feature (714)..(714): n is a, c, g, or t
  misc_feature (886)..(886): n is a, c, g, or t
  misc_feature (902)..(902): n is a, c, g, or t
  misc_feature (910)..(910): n is a, c, g, or t
  misc_feature (989)..(989): n is a, c, g, or t
tcatacaatcagagctccctttttatctaggaataaattatattttccaatcaattcatgagtgggattcattgacaatatactctctttgtaacatatttctgaatgagtagtaaatggtcttcaataaggatatggcgatacattttagctaaactgtttcataccgacattaactncccctgttaacttacttaggagtnctaaagacacaatcaaatagctgtttctgactattattctcaaagcaaagctncaggccgtaatctcaggacatgcatgaaaatatcaagtaacaactcaaaggcccatttcagcttcaaatacctttgaaaattcgtgagtttgaggagcagagtgggatagcaggcgagtggaagaggaggcttctgagaaacttaattatctacattttagaatgtttcagtctttggccttttaatactgtagtatagcctggcttctgtcattctgaagggatttcccagcttaacaaaatcccaaggaaccaacctcagattggtctcttacctaaggaaagattctggcaacacaacaggaaggatttggaaaatttaatgaagattttgaaatacccctaacacacttaaattaaagataatacctatttcacccaaatctcctaaccccctgtggaagatcaattctaatttttgaggacaattattcatgtgttattggcttgaagtacangatgtattagtaagtctcttcagttctaagtaacagaaaccaaatcaggctaggttaaaattgaaggggcatcattagaaggacccaagagtgtctcaaggactcagaggcaaagatgcagccagttccccccagtgccgggaaccagaaggtgggcaggaactcagggaanacagcccccttctatntgtggttntcaattctcatagggaaatatggttgtccacagatctcaggtttacctgtcatagttctagccacatgcaaggaatgantgcatatctct

SEQ ID NO: 390997 - DNA, 1000 bp, Homo Sapiens; identical to SEQ ID NO: 281851

SEQ ID NO: 390998 - DNA, 1000 bp, Homo Sapiens
  misc_feature (738)..(738): n is a, c, g, or t
ctttccttggggcatgtctgtctttgttcccccacctcactcagccccagagatgtctgtatccgtgtgtctgcgtggatctgtaatatttctgtgcattcaggatttgcttgatctccacactttccttgggcagattacctaactgttctgtttcttcatgtctgaaaaggaggtcataatgaacttccttcacttgttgtagggattagatatcatcatccatggaaagtgcttggacagtggccacatcataagctttcaaaaatcagtctgaattccagggcctacactcaacttgcttttcttaggagctaataccttaactgttgcttctgttccaaatgaaagcttcatgcaaccatgagtgcagaggctgggcatgaaggagggtctgtaggaaactggaattgctgttctgtggggagccaggcatccatgcagaggcagaaactccagaaccatttagctttaaccactcccattcttgttattagtactctggtcacactgtgatgccatgaagacccaccagcattagaatttgttgaataccgctctgcaacctgggcagttacttagccacctgattcttagtgtcctcatctgtgatgatatttgagactcatgggcattagactgagtaagatcagtcccataaggggctttgtccagccaggcagagagtagaagttccacccctacccctgtattaatgtgctcaggctgccatgacanaaaaccacaaaccggctggcttaaacaataaaattaatttcctcacaattctggatgcttatggtccacgatcaattttcagcagggttggtttcttaggccactccttggcttgtagatggccacttgttgctgtgtcctcacgtggcctttcctttatatgttgcgttgccctgccactctatcttaagaagacaccagtcatattggattaggtccacccacacttcatgtttacatcatctctttagaacctgcctcc

SEQ ID NO: 390999 - DNA, 1000 bp, Homo Sapiens; identical to SEQ ID NO: 281853

SEQ ID NO: 391000 - DNA, 1000 bp, Homo Sapiens
ggctgagggctgtggtgtgcattattctttagggtcttccaccagcagtgcctcctattaacctgtgacaaacaagtctctcaatgttaaagaactggacatgtgttttttatgttttttgttaggaatcagaaagtataataatatgcttggtttctttttcctatagtaacattttacaaaagagctgctaggcaggtattttattctcaaagtgatctcaaactggatgtaaaattttaaattatttttttaatagtagtataagaattctggctgctattagttattgtttgttttctgggttagaagctattcgaaaagtccagtttctgtcccagtgtagcaaaatgtagttcctcggttgtttttctttaaatgctttataattttacactacctttttaatatacaaacctcattcttcattggataacttgaaggctttgatttctttaaaaatttaaattttagtgtgtatattactttgacagttccctcatctttgagatgcactgatcactgtgcttgaaaaagacaatactgaagattgtactatgaagtttattgaataattttcataaattatttatccaaatgagagatttttagatttttgtattctgcttagttttaaaaaaaaaaaatagtagtttaaaagagaggctagtaagtttgatgctattcttgccaaacaaactcagccaaaatctttaaagtaacaagagggaaaaggatgactaatcgttctgcttctgagtacattttccaaaacgttggaaagaaacttctgaattgaaatcttgaatgtattgaatctgtcaaggtacacagcggtgcctttgtaaatgttcattactttatttaatcaggtgataagtggtgtaatgtagcagagcttaagaatagaactcaattatcactttttgtgaacaagttggaattgtcatgttactgtgtaattgatttgctttacaatgaacaataaatttaataaaat

SEQ ID NO: 391001 - DNA, 1000 bp, Homo Sapiens; identical to SEQ ID NO: 114826

SEQ ID NO: 391002 - DNA, 362 bp, Homo Sapiens
taagctttaaaaacatgtaaaaaggacattaaattgacatcttttttgtgttaggtcaccaaggagcagtgggacaccatagaagaactcatcaggaagacaaaaggttcctaagaccactttggccttcatcttggttacagaaaagggaatagaaatgaaacaaattatctctcatcttttgactatttcaagtctaataaattcttaattaacaaacattcattgaatatgtattatgtgccaggccagtgatagccattgtatattcaaagataaataaaatgaaatatagtcttcaaaacattaaaaaaaaaaggagggcatggggagagtaggtaaaggctcctctttacctattt

SEQ ID NO: 391003 - DNA, 1000 bp, Homo Sapiens
  misc_feature (567)..(567): n is a, c, g, or t
  misc_feature (940)..(940): n is a, c, g, or t
agagaatgttactggtatcgtgttaggaattgcactgaatctgtagattgctttgagtcatatgattactttaacaatattctttctgtctatgaacatgagatgtctttccatttttttgcatcctctttggtttcattcatccagtattttacagttttccattgtagaagtcttcacttgtgtgattaaatttattccagggtattttattatttgtaggtattacaaatggaattgacttcttgatttctttttcatccagtttgttattggtgtatagaaacactactgatttttgtatgcagatttttgatcctgaaactttactgaatttgtttatttgttcaaaggcatgttgtttaattttcatgtatctgtgcagtttccaaagttcctcgttatcaatttctagttttattccattgttgtcagaaaatttacttgatataatattgacttttggaaatgttttgagacttatcacctagcatatggtctgtcctgatgaatgttccatgtgctgataagaagaatgtgtattttgcagcagttggatgaaatgtnctgtacatttagttaggttcgttaggtctatattatagttttactctgatgtttcttttatgattttctgcctgaatgatctgtccattgcttaaaatgtgttgttgaattcccctgcccttattgtattcatctatttctcccttcagatctattaatatttacttaatatatctgagtgctgtaatattgggtgcatatgtatacttataaatactatattatatgtgctgaagtgacccatttgtcattatataatggtcttctttgactcttttttactctttttgacttaaagtctattttatctaagttatagctgtgcctgctctttactggttttcattttcatggaatatctgttttcatcccnatacagtcagtctatgttgttgtttttatgagcaaagtgggtttcttgtacgcaatatat

SEQ ID NO: 391004 - DNA, 1000 bp, Homo Sapiens; identical to SEQ ID NO: 281855

SEQ ID NO: 391005 - DNA, 993 bp, Homo Sapiens
gtgtgactgaagaggagctcacagttcccagcgtctgctcccacggtgtccagcgcccagaatgcggcttctggtcctgctatggggttggctgctgctcccaggttatgaagccctggaggggccagaggaaatcagcgggttcgaaggggacactgtgtccctgcagtgcacctacagggaagagctgaggggacaccggaagtactggtgcaggaagggtgggatcctcttctctcgctgctctggccacatctatgcagaagaagaaggccaggagacaatgaagggcaggttgtccatccgtgacagccgccaggagctctcgctcattgtgaccctgtggaacctcaccctgcaagacgctggggagtactggtgtggggtcgagaaacgggcccccgatgagtctttactgatctctctgttcgtctttccagggagctcccgcccccccatgcagctggactccacctcagcagaggacaccagtccagctctcagcagtggcagctctaagcccagggtgtccatcccgatggtccgcatactggccccagtcctggtgctgctgagccttctgtcagccgcaggcctgatcgccttctgcagccacctgctcctgtggagaaaggaagctcaacaggccacggagacacagaggaacgagaagttctgcctctcacgcttgaatcacagaacatcagagctggatccagatgaagcctttgagatctctagcctgacttttctctcagtttgaagcaaatcgcctttcagaacgcccaggggtcagggagctgttagagatgcactctccagggccccagacccagctgaaccctccaggggtggggtccagggactctggcagtgctacaaactctagtgtgcttttacaaaagatgagactgaggcccagagagggtaaaggtcttgcccatggtcacacagcaggtggtggcccaaacagagaacaggacccagaaaaag

SEQ ID NO: 391006 - DNA, 1000 bp, Homo Sapiens; identical to SEQ ID NO: 201477

SEQ ID NO: 391007 - DNA, 1000 bp, Homo Sapiens
gaggaattcagggctttccccatatcttctctccccccacctttatcgaggggtgctgctttttctccctcctcctcaagttcctttttgcaccgtcaccacccaacaccttccatgacacttccttgctttggccagaagccatcaggtaaggttggaaagagcctctgacctcccttgtttagttttggaaccatactcactcactctccaccagcctgggaaatgaatattgggtcctcagccctgccaccctctgctgtcatcagctgatgcattgtttttagctcaggttttgataaggtgaaaagaatagtcaccagggttactcagacctgccagctctcggagtccttggtggttgaacttggagaaagaccgcatgaagatacttgtaagcacacatgatccctctgaattgttttactttcctgtaactgcttttgcttttaaaaattgaagaagttttaaacagggctttcatttggtcatccttgcaatccattggggtctagtttggaatctgacaactggaacaaaaagaaccttgaatccggtgcatgccttggttttggtgctgctgctgcttcccaagatcctcagcagggattaagaaggaacccggtgtgcacagcagatccccgaaattggtgggcttgacctcctggcaaattgctgcgtctttccacttgctgttcaggaccactaaatgctgaaatgtggatgcataccgaaataaaagcaattcattgtgtactaaaggttttttttttttttttaatttagtatttgtgtaaaaccaccttttgaagcagcaactatcaagtctgaaaagcaattgatgtttccattaatctttttctggggggaaaaccttagttctaaggatttaacatcctgtaagtgaagtttaacataacagtattccataagcagcctttttattgtcagaccattgcctgattttaatataataaaaaaaaagtgtgcgttaatattt

SEQ ID NO: 391008 - DNA, 1000 bp, Homo Sapiens; identical to SEQ ID NO: 281858

SEQ ID NO: 391009 - DNA, 1000 bp, Homo Sapiens; identical to SEQ ID NO: 281859

SEQ ID NO: 391010 - DNA, 1000 bp, Homo Sapiens; identical to SEQ ID NO: 281860

SEQ ID NO: 391011 - DNA, 1000 bp, Homo Sapiens
aggtggccaccggtgacgacaagaagcgcatcattgactcagcccggtcagcctaccaggaggccatggacatcagcaagaaggagatgccgcccaccaaccccatccgcctgggcctggccctgaacttttccgtcttccactacgagatcgccaacagccccgaggaggccatctctctggccaagaccactttcgacgaggccatggctgatctgcacaccctcagcgaggactcctacaaagacagcaccctcatcatgcagctgctgcgagacaacctgacactgtggacggccgacaacgccggggaagaggggggcgaggctccccaggagccccagagctgagtgttgcccgccaccgccccgccctgccccctccagtcccccaccctgccgagaggactagtatggggtgggaggccccacccttctcccctaggcgctgttcttgctccaaagggctccgtggagagggactggcagagctgaggccacctggggctggggatcccactcttcttgcagctgttgagcgcacctaaccactggtcatgcccccacccctgctctccgcacccgcttcctcccgaccccaggaccaggctacttctcccctcctcttgcctccctcctgcccctgctgcctctgatcgtaggaattgaggagtgtcccgccttgtggctgagaactggacagtggcaggggctggagatgggtgtgtgtgtgtgtgtgtgtgtgtgtgtgtgcgcgcgcgccagtgcaagaccgagactgagggaaagcatgtctgctgggtgtgaccatgtttcctctcaataaagttcccctgtgacactcctcctgtctctcttccagttcttggcgatgggctgggagtgggactggaatctgacttagagaccctgactttggacctctgagttagggccctgaactccctaggtggctcagtggcccgcacgcaagactttgagtccaggtgaggccggggtcc

SEQ ID NO: 391012 - DNA, 1000 bp, Homo Sapiens; identical to SEQ ID NO: 281861

SEQ ID NO: 391013 - DNA, 1000 bp, Homo Sapiens
ttatttgagttggaaataagactcatttgccagttcttatttttaaagtggcaccctttaactttgaacctgtgtattttacactggcatcctagattcagcaatgaggtttggtggtgtttcaactaggaagggagaaaatgagtgcatctgaagttccttacagcttggtttctttggaatgctttcatcttctaagcaaagggatcagggtttgatctgtaagagttaaaaagacaaagtcattttgaagaattaactcagccagggatcatgcaaaaagattagaaaccataatgcccttgttaaagccctgctgtcaacctgccttcacccagagcttagagggccacagcagcaaagaggttggggtccatccctctctgatgtgctttttccacaacacatatctggtcctctggcaggattgtggatagagctcctcaccatacccaaaagactcagccccagtgccagtgctttcctggttcaacaacccaccacaaaaccttagtaaaaggatgagccaaaatgaaaaagactcgactctacagtaagtcagtcagggatttcctttttaatggtttaagacatccaaatggcaagccaggaatagataccattaaagggtctcataggactaaccttaccagagccagaaatctagctgtgtggaagagatgcaagattctagaaaagtaaagggaagtgtcggcacatctaaatttagtgaacacaaaattaatttttatctagtctgtgacggagggaataaagtttttcatgtatcaaccacctccccccagtcaggtttctccctttttgagattatgaagaagctgagacatacttcttaaggaggtcgtgttttagaaggaaaaggcagaggctatccatcattatcgctggctagtatgcgcttctgaagaagccggattctgatgttcttaaccaaaatggtgaggtcatggaagtcccatttgcttggagattttgaaaa

SEQ ID NO: 391014 - DNA, 1000 bp, Homo Sapiens
ctacactaaacttgtcattcttaagatttttatatttattgctttttgtttattgcatttatttccatcttcaactcagtagaacataagcttcatgaaacttgggaccatatctatcttgctccttactgtaccctcagtacttctagaagagagtctgacatgtattcattttctatatatatatatacatatatatatatatatacacacacacatatatatatagaaaacaaatgaatctagatgtgaaaataagtgtcagataagggctaaaagagtgctttgcaattctacagcaggagagacatcttgtggctatcaggtaaggtttcctggggtgagtataatttaggtaggtagaaaggtagaacaagtaaagctgtttctacaaattgctgttctttaaagtttctcttctagaaaatagacgtttttgtctgttttgttcattgctgtatcttcaatgtcttgatagtgccttgctcattgtaggtattctctgaatattcattaaatgaataatcatgtatttttctaattaaacatttttaagagtaaaattgagttttgcttgcttgtttgttttttatcaacagtttttattggcacaagggactcctgggtctgagtaatgcaacagtggaatggcatattccagacactgcccagcctggaatctacagaataagatattttggacacaatcggaagcaggacattctgaagcctgctgtcatactttcatttgaaggcacttccccggcttttgaagttgtaactatttagtgaaaagttgatagatcatttaaagaacagctttactctctacacattatataagtgatttcaaatgaatgtgaactagtgaactaccatgttgacttctataatcgtccctgtttggggacagatagtttactgctaatggggtggaggggtgtgtgtgtgtgtgtgtgtgtgtgtgtgtgtgtgtgtgtgtgtgagagagagagagaga

SEQ ID NO: 391015 - DNA, 1000 bp, Homo Sapiens; identical to SEQ ID NO: 114828

SEQ ID NO: 391016 - DNA, 481 bp, Homo Sapiens
gaattcctaaatctgtcgccgtttgtcctgggtgaggtcattctggtcatctgtggcaggaggactacaaatgcctggcttttccctttctagcgggcacacaaagagacagagaagttgaatctttagcaatccattgaaggggaaaccccacaatgcaaagagaagcattgtcgagggcccttcacctgcaccctctgttctcccagacctgttccatgatgcattccagaggaggtggctctccgtcactgtcacttgcgattgccaaggcgtcacaggacaaggcaaaagctcccaaggggtgttacccttcagctgcatacagaactcctagaggcaacaaatccacaaggaaagatacacccatgatcgtgtagttcagccacaatgatggaggtgaggtggaaaaggacgaggaacaagtgggattctgcccgtgtctgtctaatgagcatccacagcaaactccaacggaaga

SEQ ID NO: 391017 - DNA, 1000 bp, Homo Sapiens
  misc_feature (615)..(615): n is a, c, g, or t
  misc_feature (863)..(863): n is a, c, g, or t
ggggagacaggagagtcctgagccattggatggggatggtctgccggaggacaaggtgctgggcagagtctaagggcacagagaagcttcactcaactggaatgaccaatacacaaccggccaacccacagccataagtacagccagcagccctgatcagcctccgtgtgggcttccattgacggagaggccacagactcctgctttcctgcctcttcctgtccctgtcatctccccgtccacttcctttatccagcatgtgatatttccccccaaaatctaatctcttagagcagagaacttgttgcaaagtaggcaatggaattatttttctgattagacctgtgccacttttccttttaatagtttgatgtttgaccactgcttctggtgccttagtgagataccagagtccatttttcaggctgagggagggtaaggtcttcataatataagaaggtatttggtgaactcagaggtgggcaggtgggtgagaaatacacatttcctatttgccagacattgagtgaagcactttctgtatatttctcaaaaatggcgcacagtcattaattatagaaagctaaacaactcgtatatccttaaaagtatccntggcacagacatattttgcccctcaattaaatgtacgtaactttgcttcttcctgtcttcacattccttgaccctcctctctccatacttgcttgacatgaggcatatgcggaataaaaccttgttaatttctactcatctagtttgaaatacattgtgctttggagaggagcttggttgtagttaatttttgagccagctctgatacaaagctttctaaagaacaatggtagcagccttagttgctntctcacaaaaagtagggcataccatcttttaaataaagtgaagaaatatgtgattaagtcattataggattaaatatgtgagtacttgcctggggcctcttgagttcctaataggcttcttttgctttgcagagctc

SEQ ID NO: 391018 - DNA, 1000 bp, Homo Sapiens
ccacacctgcagtggctgtacggcgcgcttgggctggctgtgatcggcgccagctcgtgcatcgtgcccgcctgccgctccttcgcgccgctagtggtctcactatgcggcctctgttttggcatagccctagtcgacacagcactgctgcccacgctcgccttcctggtggacgtgcgccatgtctcagtctatggcagcgtctacgccatcgccgacatctcctattcggtggcctacgcgctcgggcccatagtggcaggccacattgtgcactcgctgggctttgagcagctcagccttggcatgggactggccaacctgctctatgctcccgtcttgctgctgctccgcaacgtgggcctcctgacgcgctcccgttccgagcgcgatgtgctgcttgatgagccaccgcaaggtctgtacgatgcggtgcgcctgcgtgagcgtcctgtgtctggccaggacggcgagcctcgcagcccgcctggcccttttgatgagtgcgaggacgactacaactactactacacccgcagctagcatccccactcctcctccagcccacccaaccgccttgggtcaagggggctgctctgcaagcccactggccagctctggctcagggcccacctcctccagcgagtaccccagccactcctcaaccttgacttctgcccaaatcccctccctgtgacccgttccatatccctttctctcttgtccaatggggcttggagcaccgaggccagcgaagccatcgcgctccttgcggaggtgaagaggaccctgagtccccacctgcggctcccctgtgtagagcctgcatctgtctgtccttccttccattgctcccagtgccaaacttgggccgctgcaccgcggcgcctccgcccaaatcaataaactgtgtctgtcccaggaggccgagtctctttactggtggggggtgcgtggaggcgcgcagggccagagcagaggggagggtgaactgggtctc

SEQ ID NO: 391019 - DNA, 1000 bp, Homo Sapiens; identical to SEQ ID NO: 281865

SEQ ID NO: 391020 - DNA, 1000 bp, Homo Sapiens; identical to SEQ ID NO: 281866

SEQ ID NO: 391021 - DNA, 1000 bp, Homo Sapiens
tcaggctcaaatgctgtgctgttaggctgagtcagtctctcagataactttgaggtctaatcagcaagccatagaaaaaggctggactcgtgcttcacaaaagaaataattcaataccttccactgtcatcttctgaagatagtcaccctatgggccttctttattaagaattaagtttccagcattaagctgtatgcctttgagtgaaatcaggtctcctcatgttatctctgtcctggcctgaatgatgtaaaggagttaagaccaaaagatttcttttcatccatgagaattctgttctcaagtttcagaatctgaaaacttacaatatagacagacacagaggacaaggggcaaatagtagaatttcattacatgtaaattagtcgtcgggaaggtaacaaaggctctgttcatgaatttcaagaagaaaaagaagaggagaagaagaaggtggagaagagaaagtagaagaaaggaagaagagaagaagagcaggaagaaagggaagaggaggagaaaagagaaggagataagattttagttgtcagagaaagagttacaaacatgaaccaagcacagatgttggacacagcactgtatatccggaagaagacacaatgattttctcaactaagaaaggaaagtcaaattagtgggcatgacaaaggttttgatctccatgccattaataaaacactcattatgatttcctgactaggaagtagatgaggacaaagaagagccataggataatagcttctcagtgtgaattgggaacttagaggtcaagtttaacctcctgttagatgttacgtacctattagagataaatcttgcatcttagttattagaatgaagaaaagcctgtgatttattaatattgacttcttaatgaataattgaaaaatgattaaacaaaagactattcctgtcttgttaaagcctcaactttcataaatttcagaaataccacggtaaaatgagatatatttgatc

SEQ ID NO: 391022 - DNA, 1000 bp, Homo Sapiens
ctgcttttattagtatgaaataagacaagataattaacttattaaagcctcaattttcttgattgtaaagtaaggataatgtctaaattacaaggtcagttaagaataaggactagtgaaaatgatgatgtcattttctgagaattaactatgtgccaacttctatgataaccacttgacataatccatttaatcacctaaatgaattattctcttccctgtgagagtatgagaagacagctgcctaacattatacagcaactaaatgatgaataggatgagagcacaggtcagcagaatctcaaagtttgtagacttaactgcaaaatgacaaaacttcctatgataaaattttctatgctattatacctaatttctaagcaattgtgcctattggggaaaatgtgctgatttttaaagaaatgtctccactgatagtataataaatatgactcattaataatattactacctctaccttttctccataaatatgattattacactaacactgtcactataacattgctaacttgccatagggaaccaacattattgtatattaagttcagatactacaatactataccactatttcaataagttgaggaattctggatagagtgctagcaaataacattctttcaactgcatcccacagaatgaagggatgcattttttgtttgttttaaaatctgttcattttctgaaatgtgtttgtattagctacaaatgtttctctgcttttgttacttattaaagaaattttttttttttttgagatggagtcactctgtcagccaggctggagtacagtggtgctatctaggctcactgcaagctccgcctcccgggttcacgccattctcctgcctcagcctcccgagtagctgggactacaggcacccaccaccatacccggctaattttttgtatttttggtagagaaggagtttcaccgtgttagccgggatggtctcgatctcctgacctcatgatc

SEQ ID NO: 391023 - DNA, 1000 bp, Homo Sapiens; identical to SEQ ID NO: 281869

SEQ ID NO: 391024 - DNA, 1000 bp, Homo Sapiens
taggacctgagctcctagagaacaaggacctgggtggcctcgcttactgttccagcccaggccaagcacagggtctggctcgtggcaaaccttgaataaatatttgttggctgaatgagtggatgtatgagtttggcaccagcctggcagatccctgagccaaggggggtgtctcaggccagacctaggttgggcagggtacttccagcagctggggctccatgtcacaatcgcatgcaggtttctcagtaggaaacaaaaagaggcagagatagcagagatggggtagagatacagagatggagagaaggagagagagacttaacagacaggctgacacaaagagggagaacggtggcggagagacagatgcagagagatggcagccccacgccggctccagcgacccccctcctcggggggagcagtgagtgttgacatcattcccctccctggagcctcaccgcacaagtccatccctcactctactcacaacttaccaaccattctccctacccggcccccgaccctctccagggagctctgtggactgtcaagccctgtctgcaggtgagaagttactgtcactgttaggcctcccccaacagccctggaagctgcgggctgcagcccacctccccgtccggatgctgggtgctgacgttgactgcaaatggatgcgcttcgcttcccctcccagcccacaagcagttgaaagacaggaaggtgggccctcactttatgcaaggcgctgtgttcctggaagggaaattctggggcgtggacattgcatcatttgagccacaggagcagttctggtggacaaacttggtgtgttttggggcttatcttcacagacatctgtttctcacactgaaggtctcaacttccttatctcaaagcctcagggatggtaacctgagaaacagctgttccaccatctgataggtctgggcttaaatcctggctcggctacttaggagctgtgtgatcctgggca

SEQ ID NO: 391025 - DNA, 1000 bp, Homo Sapiens; identical to SEQ ID NO: 281870

SEQ ID NO: 391026 - DNA, 1000 bp, Homo Sapiens
  misc_feature (1)..(45): n is a, c, g, or t
nnnnnnnnnnnnnnnnnnnnnnnnnnnnnnnnnnnnnnnnnnnnntcttcagcaaggcggtgttctccatcctgaacacggggggcttcctgggcacgtttgccgactacatccgcagcgtgtgccgggtcctggggctctgcatgttccttaccggcgtgagcctcctgccggccgtcagcgccgagcgctgcgcctcggtcatcttccccgcctggtactggcgccggcggcccaagcgcctgtcggccgtggtgtgcgccctgctgtgggtcctgtccctcctggtcacctgcctgcacaactacttctgcgtgttcctgggccgcggggcccccggcgcggcctgcaggcacatggacatcttcctgggcatcctcctgttcctgctctgctgcccgctcatggtgctgccctgcctggccctcatcctgcacgtggagtgccgggcccgacggcgccagcgctctgccaagctcaaccacgtcatcctggccatggtctccgtcttcctggtgtcctccatctacttagggatcgactggttcctcttctgggtcttccagatcccggcccccttccccgagtacgtcactgacctgtgcatctgcatcaacagcagcgccaagcccatcgtctacttcctggccgggagggacaagtcgcagcggctgtgggagccgctcagggtggtcttccagcgggccctgcgggacggcgctgagctgggggaggccgggggcagcacgcccaacacagtcaccatggagatgcagtgtcccccggggaacgcctcctgagactccagcgcctggaggaggcaggggcaggaagcggcctccaagacccttcgccttgggacaggaatgggcacctgcttctgagtccatacaggagaagaaagatctgtttcctctcctcgggcctccttctccctgggctggggactccaggggtggctgggagactgggcagccaccagcaaacagaccctgtggcc

SEQ ID NO: 391027 - DNA, 1000 bp, Homo Sapiens
attgcctttgcagtgctttcggcccagttctggcctcagcctcaaagtgcaccgactagttgcttgcctatacctggcacctcattaagatgctgggcagcagtataacaggaggaagagatccctctcctttggtcagattattatgttctcagttctctctccctgctacccctttctctgcagttagatagacactggcattatccctttaggaagaggggggggcagcaagagagcctatttgggacagcattcctctctctctgctgctgtgacatctccctctccttgctggctccatctttcgtctgcactaccaattcaatgcccttcatccaatgggtatctatttttgtgtgtgattatagtaactactccctgctttatatgccaccctcttccttctctttgacccctgtgactctttctgtaactttcccagtgacttcccctagccctgacccaggcactaggccttggtgacttcctggggccaagaaactaaggaaactcggctttgcaacaggcattgctcgccattgattggtgcccacccagggcacactgtcggagttctatcacttgcttgacccctggacccataaaccagtccactgttatacccggggcactctaaccatcacaatcaatcaatcaaattcccttaaatttgtatggcactggaactttggcaaagcacttttgacaagttgtgtctgattggagcttcatgatagccttgtgacatctttagggcaggattcttatccccattttgcagatgaaaaccctgagtcacagatttctgtgggactgtggatctcactggaagctatccaagagcccactgtcaccttctagaccacatgatagggctagacagctcagttcaccatgattctcttctgtcacctctgctggcacaccagtggcaaggcccagaatggcgacctctctttagctcaatttctgggcctgaggtgctcagactgccccc

SEQ ID NO: 391028 - DNA, 1000 bp, Homo Sapiens
tcagttaacaatggaagactgtgagagagaggattaaaacaagagcaaaacagaaaactattaacaaaatggcagttagtaagtcctcagcaatcagtaattattttaatgtaaatggcttaatatcccaaataagaatgcttaaagtagctgagtgaatcaaaaaacatgatccagtgacttgctgtctataagagactcactttagatttaaaaatacatataggctggaagtaaagagatggaaaaggatattatgaaaatggtaaaaagaaaaaaaaaagaaagcaggggaggctatcctatcagacaaaatagacaaagtcaaaaacttcctctagaggtgaagttcattatataataataaaagggtcaatttaacaagatataacaattgtaaatatatacatattcaatatcagagcacttaaatatacaaagcaaatgttgatagatctgaaaggagaaattgatatcaatacaatactagtagtagaatctaatattccactttcaataatgtataaaacatccaggtaggagatctataaagaaagagagtacttgaacaacactgtacaccagttggactttagggacatatacattacataccactcaacagcagcagaatattcttatacttcagcaacatgttcttctcaaacacaggtggaacatactccaggataaattacatcagacctcaaaacaagtccccccaacattaaaaagataaaagtcatttcaaagatcttttaagatcacaattgagtaaaattagaaatcaatagtgcaagaaagtgggaaattcacaatgacgaaaaaacaatacactcttaaataaccattgggtcaattaggaaatcataaaggaatttaaattatatctcaaggcaagtgaaaacaaaaacacaacatatcaaaacttacaagatccagcaaaagtactaaaaaggaattttgtagcaataaatgcctacgttgaaatctaaggatc

SEQ ID NO: 391029 - DNA, 1000 bp, Homo Sapiens
  misc_feature (688)..(688): n is a, c, g, or t
ggtgcaggaaaggttgtaagttacttgtgcaggagggctgtgtgtcctggatcatgaagaaagacagacttgttgcttatctgctttctctttttgctttctcttggttccaccagcctggttccctttccctaattaggactccacaaagggatgagggtggccaggtaataggtgcttgctgctgattggttggggtggagatgaaattctgcctcctgcaggcagaattgcttctgggcagggccacaggggtgggtttggtgggggattcaggtgggttcaggtggagccatggatgtctgacatgcaaaaatcctgaaaagacatctcaaaaggccaatcttaggactcaagctcctctcctccaagcctgatggtctcccattggctttacaaaaggctttggggaggagaggagtttcagggcaaggcctgttatcatttaaatgataacctaaaatgtcttccaaagttagcttggcccaatagcccccaaataatcaagggaaaggcaaggtggtgcaggtggagggtgttaactctgcttactattataatttttctcagtgataaaattttcacaaaggcagttttaggtagactactgatcactgtcaactgatgtgttgacaaaaagagttaaactctaaaatatttaaagagatttatgctgagccaaatatgnagtgaccaaggcccatgacatagcccctaaaagtcctaagaacaggtgcccaaggtggttggtttacagcttttatacattttattttattttattttaggcagagtctcactctgttgcccaggctggggtgcagtggcactcactgcaacctctgcctctcaggctccagcaatttttgtgcctcagccacccaagtagctgggattacaggtgtgcattaccatgtctggctaatttttgtatttttattggagatgaaatttcactatgttggctaggctggtctcgaactcctggcttcaactgatc

SEQ ID NO: 391030 - DNA, 1000 bp, Homo Sapiens; identical to SEQ ID NO: 206226

SEQ ID NO: 391031 - DNA, 1000 bp, Homo Sapiens; identical to SEQ ID NO: 206228

SEQ ID NO: 391032 - DNA, 1000 bp, Homo Sapiens; identical to SEQ ID NO: 201470

SEQ ID NO: 391033 - DNA, 1000 bp, Homo Sapiens; identical to SEQ ID NO: 281874

SEQ ID NO: 391034 - DNA, 1000 bp, Homo Sapiens; identical to SEQ ID NO: 206229

SEQ ID NO: 391035 - DNA, 1000 bp, Homo Sapiens; identical to SEQ ID NO: 281876

SEQ ID NO: 391036 - DNA, 1000 bp, Homo Sapiens; identical to SEQ ID NO: 281877

SEQ ID NO: 391037 - DNA, 398 bp, Homo Sapiens
  misc_feature (23)..(23): n is a, c, g, or t
gttgaccgcccctggggctcctnctctctggctccgaggtgccagatgtgacatccagatgacccagtctccatcctccctgtctgcatctgtaggagacagagtcaccatcgcttgccgggcaaatcagagcattaccaattatttaaattggtatcaacagaaaccagggagagcccctaacctcctgatctatgctgcatccagcttgcaaagtggggtcccatcaaggttcagtggcagtggatatgggacagaattcactctcaccatcagcggtctgcaacttgaagattttgcaacttactactgtcaacagagttccaggacccctcgaacgttcggccaagggaccaaggtggaaatcaaacgaactgtggctgcaccatctgcttcaa

SEQ ID NO: 391038 - DNA, 1000 bp, Homo Sapiens; identical to SEQ ID NO: 198445

SEQ ID NO: 391039 - DNA, 648 bp, Homo Sapiens
tcagaagaaagggatgaggtgtaccgtacaggggcagtcaccttctcctctgtttagcttccattttggcctcatgtctaccccaaagttgtagcttagatggggggaaaattcagaattttgcatagaccataggtagcaccccctagaaaaagaatgtttctccccagatgtctcccactagtaccctaaccatctgcttgtctgtctagtgaggacccttggagggctgctaaaatgatcaagggttacatgcagcaacacaacatcccccagagggaggtggtcgatgtcaccggcctgaaccagtcgcacctctcccagcatctcaacaagggcacccctatgaagacccagaagcgtgccgctctgtacacctggtacgtcagaaagcaacgagagatcctccgacgtaagtgttttcatcctgcctctgcctcaacctgaagtgacctttgccctctcaccccattggctgcctcagtttccctttcatcgacaaggccttgtgagcacttggcagatatgaggaaggtggcaagtagatttggccttggtggttgctgtacaatggattggcttctgtcatgttcttcagtcacagcccccttgctacccagccagttgctctgaggagcctgtcagtgt

SEQ ID NO: 391040 - DNA, 1000 bp, Homo Sapiens
atccaccactgtggtgaaaagagccagagcgagtgtgcagagagagaaggatgatgcaggcactttctagatgtttcttcatagatgaggaggagagggagacagaggagacaagaccccctgggctcttgcaagggttttgccccaaattgctgtcaacaccgatagactagtgttgacactagtctatcactagagagggagtctggggtgaaattgggggctgatttgagatattttagaagatgctggaaatgtcaaacacgggagatggagaatggcactcaggggagctgcgtggctaggagagaaatgtaggagtcggtgtggattaagtgtgggtagagaaagggccccagaagagaaggaggccagccaggaggccagagagacagagcaggagtgcagagtaaataaagggcttcaagggccaggcgcagtggctcacgcctgtaatcccagcactttgggaggctgagtcaggtggatcacctgaccctaggagtttgagatcagcctgggcaacacagtgagaccccatctctacaaaaattttaaaaattagccggggccaagcatggtggctgatacctgtaatcctagcactttgggaggccaagatgggtggatcacctgaggtcaggtgttcaagaccagcctgggccaacattgtgaaacctcatctctactaaaaaaaatacaactattagccaggtgtggtgtacacgcctgtaatcccagctactcgggaggctgaggcaggagaatcgcttgaacctggaaggcggaggttgcagtgagccgagatctcaccactgtactccagcctgggtgacagagcgagactctgtctcgaaaaaaaaaaaaaaagaagaagaaggggaggggactctctggggttagcaccaagagagccacatgggagctggacaggagtggtcttcgggatggggggaggaagatggggcacagctgggtttgaggaggacccaggaggatc

SEQ ID NO: 391041 - DNA, 1000 bp, Homo Sapiens
aacataaaatgttctaattacatttaatacttcctctgtttcagcatcagaataagacatttctccagtaatccccaagttccttagtaaagaaagtaatttagaaatgtatgtgtgtttgtatatttataaattctacatgctagatggaattattgctatggaatttcatcacttcttgtccttctcaacatacataactagcaactgtatgcatatatatctatattatctatatctatatctatcttattagacataaattcattccaattcagcatctcaagctttattccaatttctcttttctctatgtttaaaataaacatattgatatatttcattattagctgccttaaatacacagaaactaatctaaaatctgccaagtcatattgctaaatatagtcacaaaacctataattgagaattcactatttctttataaatttctttttttcttttcttctgaaggtgatatacagccaaaatatattgttcagaagttttctgggttattgaattccatcacttgtcatcttcttgagggctttttttctgcaattatctccttttactagcatcatcatttttatcttcctgcttgtccatttctatcagcatgcaagggtgctttcttctcatacatgtatataattacatttagaaataaaaatcagagaacttccattggtacttttccccatttatcttctctttttcaaaagagctaattacattcactgattttcctttatgaattttcatggctgaaatagacattgttgaggtcatcaatgattatttggcatgctttaatatttaattttaacttgaaacatttctttatactttcatggttacactcatcttgttttctttgctcctcattgtactctctttctcaatatttctacccaatgactgtatcttatacatagctgttaatttagaaagacctgttcctctgttctgctgacaatcttttctttagatgatc

SEQ ID NO: 391042 - DNA, 1000 bp, Homo Sapiens; identical to SEQ ID NO: 195263

SEQ ID NO: 391043 - DNA, 1000 bp, Homo Sapiens
ctttgcatcaccagacactgcttccaattaacacattctcacaggtagcaaaagtgtaggtagaattaatccacagatcgacatatttgaagcaggttacctcttttccctcttttctgatttggtcttttgtcatgtgtaggtatgtagatggtgtaacacaaacattgtcctcaggttgcatttcaagcttgcgaatatgtcctaatgtgcttcagcacaacaaagtgatcatggatacatgctccctatatattcagttcataaagccacttagggccttttaggataaaagcagtgatggtggtaataacagtagtatcaataattaaatactgtgctcagtaaaaacataggctcagaagctaccctagagattagctagttcaaccatccagatgaagcaaaaacactccagcttattttacagttttttttgttgttgtttggctgggtttttttgttttttttttgttgttgttgttgtattgttttttgttttttttgacagagtcactgtcgcctaggctggagtgcagtggcgccatctcagctcactgcaacctccacgtcctgggttcaagcaattctcctgcctcagcctcctgaatagctgggattacaggcatgtgccaccatgcccagctaatttttgtatttttagtagagatggggtttcagcatgttggccaggctggtctcaaactcctgacctcaagtgatctgctcgccttggtctcccaaagtgctgagattacaggtgtgagccaccatgcctggctattttatggtattattaacaacaataattaatgtccacaaattttaagatcaatcaaaagacaaaaaaaattattcatcctttctggaatgttaatatagcatttaaaatctggcaaacacctcccccattgtaaactaagataacattgccagatctcagtgtttttttctatcatcaatagcatgatttttgcagtaatacattcatcttaatatt

SEQ ID NO: 391044 - DNA, 1000 bp, Homo Sapiens; identical to SEQ ID NO: 281880

SEQ ID NO: 391045 - DNA, 1000 bp, Homo Sapiens; identical to SEQ ID NO: 201622

SEQ ID NO: 391046 - DNA, 1000 bp, Homo Sapiens
ctggtgccttcaagtgagtgaccctgtccccttctcgtcagtggccaagtgtcccttggcctcaggccgggaggccttttctctggccccacatagagcccagcctgctcttggggacgagaggaggtctgttctcctactgctgtgtgtccaaagagagtgcaggcctgcccagtgtgtgttcccctccagccttccgggcccaactgtgcccccaacttctcaccagccccacgggcagtcactgtggctgtgggccctcctgttacctcagagagccctgaatccaacttggctgccctgttgtcctgggttcctcatactaatttctgccgcctgcctaaccacagcaggactgaaggcatcttgtcatgagatgtccagtcctggctcctggttgggcaggaccgctgcagtgtccaggctgatgtccttctgcccacctgggcctctccccgtggctgaaggacagtgagcaatgcctgattcgcccccatcctctctgcccccacgcggaggctgagctcccccttttccattctgtctgctggcactagcgtatttttgcagagggaggcctccacacttccccactggccagggcacacctgcacactcagtcctgaggaaaacagccacatgaacagtgatgctaaggctttaccctcttgggtagaggcttcaaaactctcctttatatagaaaaaagttttgtcctcttagccctcaaagcagaagatgggggcctctggctagcacctgagtcattcttcagtatctacctggagggggcccctaccttcccagctgggatgccccaaagcttcagagccctgccctgcagggagtagaaacccatagatgctgagtgccagggctactgttccacagggaggggctggggagggctgcctgtgcttacccctgatggtttctcttttcacaggtgtctgagagacggggctggagacgtggcttttatcagagagagcacagtgtt

SEQ ID NO: 391047 - DNA, 422 bp, Homo Sapiens
  misc_feature (410)..(411): n is a, c, g, or t
cgcggccgcataatacgactcactatagggatcctcctgccttagcttttcaaatagctaggactacaggcgcacaccaccacgctgctaattaaaaattttttttgtagagagggttctcattatgttgcctaggctggtcttgaactaaaacgatcctcccacctcagcctcccaaagtgttaggattataggtgtgagacactgtgccagttcttgggtttgtttataaattttaggatctgtttctacagagaaaccagcttggggagtctctaacgattgtatttaacctgtatattcggggagtgttccatcttggcaatatctgaacatggaatgttctattaggtcttattttttacacaatcactctgagcgacagttatagactaacatactaattctcnncggaagggatt

SEQ ID NO: 391048 - DNA, 1000 bp, Homo Sapiens
cattttaaatctacagttgacctgtactgatttttttgagtatggataaggagagtttacaattcagcttttttccacgtgaatatccatttgacgagtaccaagattgtccttttcccagcactctgcagtgccacctctgtcatacatcacatataagcctgggcaacttggcaaaacctcatctgtacaaaaaataaaataaaattagccaggtgtggtggtgcacacctgtagtcccagctacttgggaggcttgaggtgggaagattgcttgaacctgcgaggttgaggctacagtgagccatgatcaccagtctggactatacttttggtgacagagtgaaatctgtctcaaaaaaaaaaaaaaaaaataagccgggcatggtggctcaccatgcccgtaatggtggtgcctataatcccagcactttgggaggttgaggtgggcagatcacaaggtcagcagatcgagaccatcctggtaaaaccccatctctactaaaaatacaaaaaattagccgggcatggtggcgggcacttgtagtcccagctactcgggaagctgaggcaggagaatggcatgaacccaggaggcggagcttgcagtgagccgagatggtgccactgcactctagcctgggcgacagtgggagactccgcatcaaaaaataataataaataaataaagtatatcaaatatatatatatatgtgagtctgtttctgagctcatcctgttcaactgcactagtatcacactgtcttaattactgtacctttataacaagtcttaatatctggtagtatatatcctcaaccatgacttttcttcaatattgtctttgattattctttattcttagccctttacatttccacttaatgtctttttcatttagtatttatttattgagataggatcttgctcgtcacccatgctggaagtagtggcacaatcatagttcacgtaccctggaactcctgggctcaagggatcc

SEQ ID NO: 391049 - DNA, 1000 bp, Homo Sapiens
  misc_feature (830)..(830): n is a, c, g, or t
  misc_feature (860)..(860): n is a, c, g, or t
  misc_feature (880)..(880): n is a, c, g, or t
  misc_feature (889)..(889): n is a, c, g, or t
  misc_feature (893)..(893): n is a, c, g, or t
  misc_feature (898)..(898): n is a, c, g, or t
  misc_feature (911)..(911): n is a, c, g, or t
  misc_feature (914)..(914): n is a, c, g, or t
  misc_feature (920)..(920): n is a, c, g, or t
  misc_feature (929)..(929): n is a, c, g, or t
  misc_feature (939)..(939): n is a, c, g, or t
  misc_feature (951)..(951): n is a, c, g, or t
  misc_feature (958)..(958): n is a, c, g, or t
  misc_feature (961)..(961): n is a, c, g, or t
  misc_feature (964)..(964): n is a, c, g, or t
  misc_feature (971)..(971): n is a, c, g, or t
  misc_feature (973)..(973): n is a, c, g, or t
  misc_feature (986)..(986): n is a, c, g, or t
gcggtgcagctggagcgtcaggggagtcccgctcgccgcagccccagcgccgcgcgcgcccatccatcctagaaggacctggcggtgccggcgcccggagtggccctttaaaaggcagcttattgtccggagggggcgggcggggggcgccgaccgcggcctgaggcccggcccctcccctctccctccctctgtccccgcgtcgctcgctggctagctcgctggctcgctcgcccgtccggcgcacgctccgcctccgtcagttggctccgctgtcgggttgcgcggcgtggagcggcagccggtctggacgcgcggccggggctgggggctgggagcgcggcgcgcaagatctctccccgcgcgagagcggcccttgccaccgggcgaggcctgcgccgcgatggcagagatgggcagtaaaggggtgacggcgggaaagatcgccagcaacgtgcagaagaagctcacccgcgcgcaggagaaggtgagcgagccggagccccagcagccgcggagtcccagccgccgcggagccccggccacctgtccccctatcctccgaccccggggcctggtccttcgccaggatctggtgctgtcacctctagaggagcgctttcgaggggcttcgaggtccccaggctgcgttccccggcgctctgggtgccctcttaggtttgcgtcctctgtctccccacacccggccggggcaggacagggccccgctttgcaccttcgtggctcggctgcacagcagtggccggccctgctccagggctcttctcaggcgcgcgctccaagctaccccctttggaagccaagggccnggaagcttgggaagccagttggtgacctcnactctcccagccccatgcangcaacctangctnggccngcctccgggcgancanggaatntcttccttnttccccctgngggatttttttnccccttncantcnccttggntncctctctattctngtttcttttcttcc

SEQ ID NO: 391050 - DNA, 1000 bp, Homo Sapiens
  misc_feature (361)..(361): n is a, c, g, or t
  misc_feature (844)..(844): n is a, c, g, or t
  misc_feature (851)..(851): n is a, c, g, or t
  misc_feature (874)..(874): n is a, c, g, or t
  misc_feature (887)..(887): n is a, c, g, or t
  misc_feature (905)..(905): n is a, c, g, or t
  misc_feature (933)..(933): n is a, c, g, or t
  misc_feature (954)..(954): n is a, c, g, or t
  misc_feature (958)..(958): n is a, c, g, or t
  misc_feature (963)..(964): n is a, c, g, or t
  misc_feature (980)..(980): n is a, c, g, or t
  misc_feature (988)..(988): n is a, c, g, or t
  misc_feature (994)..(995): n is a, c, g, or t
agccaggaatctggccagagagagtgtcagtttccctctctcaccctttgttccctccatccatcatcctccatcatcctccatcacccatctctgagcatgtactaaggccagatgcagggccgcagaggggaaggtgccgcctctcccggcgcagcagttacatcagcagcgccctcgcgatgcagtgggtgctatggcagaggggatcggggagtgtggaggactgtggctgtcagggaaggcttccagggccagggagagttggaaggtcctggaatggctgaagcacctggacttcagctcccacagctgctgtcagcccctcgagggcgggggcagcggccaggctgcagggcanaactgccggtgtgcaacactccctaagaggcgtggaatgcccagatacagcagggagccacccaggggggcttgggtctctcccgacgggcccttggctcagcaaggagccacgcagagggtcttgggtctctcccagtgggctcttggctcagccgtggaggtgcctctggggagcccggcccacagccccaggtcttacgtccttcatggtggaggtcgggctggagtacctgtgctggaagcgcatcttgccagtgctggagtgggctgacgtgttgtcagatttgcccagaggtggccggccttccccgcactccccgagagctgactgcctcctcaaggtccagccctcaaggcctcaccttcctcctgtgggttagccaagaaccttcccacacaaacctcccctgttaggaaagctgtccatccaagcttgtggtggcctcccaacaaacaccttccacacactcaaaaaccctantggggantagtttggaaggttttaattttngggaatttgcccnctgggaacttgcaaacantggtcccctgctaagaaaggtttgggantggtgggcctccaaccccctntgcnaaaanntaggaaattaaaactnaggaaccnaaggcnnccgcc

SEQ ID NO: 391051 - DNA, 1000 bp, Homo Sapiens
agaatgaaggttcccagggtgtcttttcggcaatgttcttagtaactgtcagtgagtgaatgacttgtctttcctgagtttctctctctccatggcaaattgtctcttgcaagggtctgaagcattcaaatgtgggaacacttaaaactgctttccaaaatgagatgaagcccctcgccgtgtgatgttggagaaggcactttatgtggtggcgtttcgtggtaggaagtgcttcagactggagcactccccatggatagaatgtccctgaataacacagcagaagccacttggaggcttgaaatcttctgatgcatagaggactgtgggacaagtttgtctgcttctaagagaaagaattaggtttgaaatgcaaactgtgacaggacaccaagcctgtgcctgggaatcagatctggcaggatgggggcagacagctgccaaagtccagagagaggctgcacaagcctccagtgatatgggaagcaaaaggtcttttcaatatttggccacatcttgatggtggccctccagatcagaaatgcattgcctgatggatcaggaaaccatgccagggcattctgttaaagataaaacatgagagttttcagttgaacggtgacccatgcctagatgttcatgtctctgttgcacattgggctgactgtgcttgcagactgtgaagtgggaaatatctgaacgaacaattctgtatttacagaaaatgacaacgatgacgatgaagatgttcaagttgaggtggctgagaaagtgcagaaatcgtctgcccccagggagatgccgaaggctgaagaaaaggaagtccctgaggactcactggaggaatgtgccatcacttgttcaaatagccatggcccttatgactccaaccagccacataggaaaaccaaaatcacatttgaggaagacaaagtcgactcaactctcattggctcatcctctcatgttgaatgggaggatgctgtacacattatcccag

SEQ ID NO: 391052 - DNA, 1000 bp, Homo Sapiens; identical to SEQ ID NO: 281884

SEQ ID NO: 391053 - DNA, 1000 bp, Homo Sapiens
  misc_feature (92)..(92): n is a, c, g, or t
  misc_feature (842)..(842): n is a, c, g, or t
tgtaatatggcaagaaatactaaatcaaaaaagtatatattcagcaaaaaatacatctaaaaatggcttagtccatgcagtaaataccaggnacaaactcgcttacaaaaatgggaggvtaaagagaaggaagagggggtgtaagctgacaaggtaggcggggtaaacaaaaagaagcctgctgtgggatcttcyttatctaattcctgtggcccacattaatattttcacaccaaggdctccaagagttttggatgatgtttcatgtccaaggctttcgtatgcgttatctcctcacattcttacagagcctccacagatccttgcaacccacagaggtagacaaagaaggcattattttctcaattttacatttgggactttatcccaaacattcagggacactaaatgacaaaacacacttcaatagatattaatgagcttggtccagcaattttgccccatgctcttcttttaaaaaaagtttctaagtattgcaaaagatgttttgaaggctgacacaaaagagtgtccctgtgctccggagcagtttctagacctcagcactgttgacataggctggataattctttgtctgaggagctttcttgagcattggaggatgtttagcaacattgctgacctcgacctactagatgccagtgctgacaattaaaaatgtctgaggacattgccaaatgtcccttgggaggtaaaatcacccctggttgggaaccacttctgggtctgaattctggatacaacacttactatgaccttaaatctcttctcattttccccagctgcaatatggggtccataataggaccaacctgtaagangctgatatacataaatgaagaggagatggcatacataagccctttcacgcaatgtctacacacacactgcgcataaatgtaggcagtatacagaagctaagagaaatactatgctgaccagaccataagactggagcagaggacaccccacaatgtgc

SEQ ID NO: 391054 - DNA, 1000 bp, Homo Sapiens
agtctccagccaactccacctcctggggatgtggaggcagaggtgtgtgcagccgcttggcctcctggtggccatgcttgggattggcatatttcctagtgccccggagaaagcaccctcctgtccatccacaacccccgccacaccctacccccttggctatttcctttatgaactatggcatttgctccagtttccccatttctttgcagcacagatggccctcttcttttaatgggcagaataagtaggaaatggaagaaacagctgccagagcactgaatttatcctagtcctccataatttcttggaagatctgcgagtggggcccaagctgtctgctactgcgtggaaatcatgcttgtaccatacccatcatagttaaaccctgccaagggcatagggcattttaatagcttgaatccctgttgttttgccctcctctgtccccttctcccatgccttttctttgaggtaggtgcgtgtgttctttaagacccttccctcaaaacaatcttggtagcgagaccagctattatcttttttaagttcagtgttccctaaaagaaggatggttagacataagacatttgttagcttctctattatgtcttcctctcaggatgtgtttaggttgaaccatataaaagtgctgatatttagcccttttggacccacaaaaatagtggtttcatgaagttcaacctaacatgtacttactggtttgctttcattttactgcactcaaacccacgggtgcagtctcatcttagttcaccaactctgcaatgggacccagccgggagcagtaagcaattcttcttgccagcagacaaagcagattaattcccttgggttgaatgttatgccggtctcttaaacatcaaaaactgtttgttatgatctaaactgcttctatggagcagatgttgtgtccccgatgcagcagtgacattggaatcatttagtccttttaaggcaagtttgttttatttttcag

SEQ ID NO: 391055 - DNA, 1000 bp, Homo Sapiens
tttccacttaataggaccatatttcctcgttagtatctgttatgaatatatttcatttttaacgtggcatttaaaaggtaaagtgcttaacttaaaatgtttccatccctgggtgccaggtaccccttcaagtaccaaattgtatttttggcagaagaaagaacagtttccttctcaaatccctggtccacatctcttcaagttccatagtttgtatcgaagccattcctaacagctgtatttgtttctattctaaaacccaagatccaattcaagacttcaacaaacggagggttttggggcagttgagtcaaggggtatcttggaggcagggattctgatagtaacttagtaatgacttctcccacatagtgacaataatcagaaaaccttgtgatacaggtaaaagtggaatatggctgtgtattagttacctactgctgtgtaagaaattgcccaaaccctcagcagtgtaagataacatttagtctcacagtttctgtgagtcaggaatccaagtgtgtcttcaccgagctccctcaggcatggagtctctcacaaggctgcaatcaggtaatggccaaactgcagtgatcacaaggctcagctcagggaagacacagcccaagcatgctcacatgggctacaggcaagactaatgtctctggccaacagccctcaaggacatcagttccttggcacatgttcccctttacagggtagcttgcaacatggcatccagcttccctcaaagggagcaagagagagcccctaaggcagaaaccagttttttgagaccgaatatcggcagtgatagcctatcacttctgctatactctatgcactagaagaagcaagacactactaatgcagcccaaactcaaggggattgcttaaggctataatacatgaggagatggagatcactgggggctgcttagatgctgcctaccacaggctacatagctattcttttacaatcttgatttttaacttacag

SEQ ID NO: 391056 - DNA, 1000 bp, Homo Sapiens
agaaccagaaatgccatttgacccagcaatcgcattactgggtacatactaaaatgtacataaatcattctactataaagacacatgcacacatatgtttattgcagcactgttcacaatagcaaagacttggaagcaacccaaatacccatcaatgatagactggattaaaaaaatgtggcacatatgcaccatggaatactatgcagccataaaaaaggataagttcctgtcctttgcagggacatggatgaagcttgaaaccatcattctcagcaaactaacacaagaacagaaaaccaaacaatgcatgttctcactcataagtgggagttgaacaatgagaacacatggacaaagggaggggaacattacacaccagggcctgtcagggggtgagggctatgggagggacagcatcaggagaaatacctaatgtagatgatgagttgatgggtgcagcaaacaaccttggcccgtgtatacctatgtaacaaacctgcacattctgcacatgtatcccagaacttaaagtataatttagaaatatatgcaaaaaacaaataatttgctgaggaaatttttatctatgtgcatcataggatttttgcattatgagtgagactgacctgtgatattccttttttgtatgttccttgtcacatttttgtattgagatcattttggtctcaaaaaataaaaaatttttaaatttttttctattttcttgaggattttgtatgagattagaacaatttcttaaattatttgtaaaattcactgaggaagacataattatagattgaatttataaatctatgtagaaaactatttagatttttgtacatcttcttgtgtaagttttggaatttatatttttcaatgagtttatccatttcctatactttttcaaatttattggcataaagtaatttctattatcattttatgatctttatgtctgtaggatatgtagtgttagactcctcatcgttcctga

SEQ ID NO: 391057 - DNA, 1000 bp, Homo Sapiens; identical to SEQ ID NO: 281889

SEQ ID NO: 391058 - DNA, 1000 bp, Homo Sapiens; identical to SEQ ID NO: 281890

SEQ ID NO: 391059 - DNA, 1000 bp, Homo Sapiens
aggattgagacaatgtccccaattgcttgaggaggcagccacgtatgtgtcccacctccagaaaggctcccactactcccaccctcacacctgcgaacactctctctcgtggatttactgcttttcttgggcagaggcaagctctggatcaagacccacaaaatcagatgagaatgaggggaataatttctgattcttttctgaatgataatttttaatctggtcaccattccacatgtgcttgggacccagcacacacattattgagccttcccgtaaattaagagaaaaacaaggagaagcatgtacaaatgttccttgacttatgatgtggttaggtcctgataaacacattgcaaaatgatatcttaaatggaaaatgcatttaatacatctaacctaccaaacatcatagctgagcctagactactttaaccatgcccagaaccctatgttagcctgcagttaggcaaaactatctaacacaaggtctattttataatagggtgctgactatctcatggaatttattggctactgtactggaggtgaatgaatggttgtatgtgtacctgaagtgtggcttctcctgaattcacatcgcttttggaccaatgtgaagtctataaattttaagtcaagcctccataaatccaggaccgtgtgtattccgaacttcataagtaaataagactctgaaaatttatgtcttctcatttcttgggaggattatttttactttctttatgcatttatttgctattgttactattttatcatattttaaattaactattgctggtttatgagaaaaactcttgatttattttttattcatcttatacccaaccatctttttggattctcatttttttcctaatattaatacttctaagataattgattcttttatttttttatttctatttttgagacagagtctctctttgttgcctgggctagagtgcagtggcacaatcttggctcactggaacctctg

SEQ ID NO: 391060 - DNA, 1000 bp, Homo Sapiens; identical to SEQ ID NO: 206231

SEQ ID NO: 391061 - DNA, 1000 bp, Homo Sapiens; identical to SEQ ID NO: 281893

SEQ ID NO: 391062 - DNA, 1000 bp, Homo Sapiens
gggattacaggaatgagccaccatgcccagcccaagaagtagagtttcttttatactgactttggcctaaaaaaacagattttcatggaggaaaaaaaaacctagatttttagtaagactattttatatacttttttacattgatcaagtacattatttttaccaaacaacattgtttcccactacatccatggttatgtataaaaaaacgccattgtcaattaagatgttaaaaaattatttccataagagtattaaattctaatctatgattcacttaacttcctactttataaacactaggtaaagtaatctcacaagctgccaaagaacacatcccaagcagtaatcacagacgatgaagcaccttacaggacccctccaccctcaaacgcgcatgtccagagaagtattaatgccttaatagactactgaaggttaactatttacatcattctaaaaatattttaagctgtattacagtgctataaattctccttttaaggaaaaaagtaatagattgtttccttaccgtgtttgaaaggaaaaaaaataaatccatagtaactaatggtctgccgattttttccctgaatttttaaactccaacaaagcattattttgcaaaaagtcctttagcccaaagtcagtgtctctgttttgatctctttgtaaaagaactctctgttcatccattctctttccctgggaccgtaaaataaggctgaaaaagtcttcatctggtactgtcggaccctttgtggtagcaggtggtggagcacatctttgatcatctaatctggatccctagaagtttatgagagagattaaaagacatactgtgggaaagaaagcaccaagctatgttaaatctctcagtcacaacaagaaaacgcagttgtaaacttttatttggggcttctcagaaattaatctttgtttttatattgttctctttagttcccagcctgatttctgaaagaaataatctttaaacctg

SEQ ID NO: 391063 - DNA, 1000 bp, Homo Sapiens; identical to SEQ ID NO: 281898

SEQ ID NO: 391064 - DNA, 1000 bp, Homo Sapiens; identical to SEQ ID NO: 281899

SEQ ID NO: 391065 - DNA, 1000 bp, Homo Sapiens
tagcttcagctctttctccctctctctccttttcttctttttttcccccctagtttttctgaatagaggtattatggctacagctgttttcccgaattaacgaatgtcagggaggtactgaatatatatgatggttagaagatgatgttgggctcaaaatgcactacagatctttggtctgcagaagcccaataaaagtaaccatttaaacaatgtgtctttgtttttttagccccttccaaatgacaaaaccttactctacaatccatttcctcccacgaatgaatcagatgtcatccggaggcgcacagctcatgcttttaaaatttctaagatatataaggtaaaacatcttgtgttgttattctggatagttggttcctttgtgataccaaaatgtaataaactccacaatcggaagataagagcaccttcagtttccatgcagagaacctggcttgtgggagacaagtcacctttttgaggctggctgtcccttgtatatgttttattgttcttgccttagtaggttagaggcaggcacatcatacttaaccaaaatgaaatgcgtaagtagtgagaaatgttggcgctgagggtagagtctttgttgtcatgagagctggctttaaattttacttgttggagtgttccataggataaatgtcaagcaggctgggcttggtagctcatacctgtaatcccagcactttgggaggccaaggcaggtggatctcctcagcccaggaattcaaaaccagcctgggcaccatggtgaaaccccatcactattaacaaaaaaaaaaaaaggagagttctgtaaattactgattactcaaatgactcaaatgtgattagcttcttgatgcatttgtagcttgccagttgtcagttgccttaggctgggtatggtgattcacgcctgtaatctcagtactttgggaggttgaggctggagttcaagaccagtctgggcaacatggtgagaccctgtctctac

SEQ ID NO: 391066 - DNA, 1000 bp, Homo Sapiens; identical to SEQ ID NO: 281900

SEQ ID NO: 391067 - DNA, 1000 bp, Homo Sapiens; identical to SEQ ID NO: 114830

SEQ ID NO: 391068 - DNA, 1000 bp, Homo Sapiens; identical to SEQ ID NO: 281903

SEQ ID NO: 391069 - DNA, 1000 bp, Homo Sapiens
agctccagttcctcatcttgtacgtggcactgttttcttgggagagtcattataaagctaatataaagtacctgtactgtggtttgaatgtgtcctccaaaaagcgtgtgttggaaactgaatccacaatgcaaccatatcgggaagtgaatcctaatggctggctggccatggaggttccaactttatgaatggattaatactgattataaaagggcttgaggttgaggcaagttcaacctcttgccctcactcacccacttgcctttaccaagagatgatacagcaaaaagactcaccaaatgccgggatcttgatattagacttcttatcctccagaaccatgaaataggctgctttgctttataaattactcagtctgcgtattatattacagcaacacaagatgggcaacctgatacttaggtttcagttagtggtagatatttttatttcaagcattcctactggagtattagtttcttcataagcccagaatctttgcattttagcaacaacaaataagtctttttttttttttttttttttgagactgagtttcactcttgtcacccaggctagagtgcaatggcatgaccttggctcactgcaaacttggcctcccaggtttaagtgattctcctgcttcagcctcccaagtagctgggattacaggcgcctgctaccacgcccagctaatttttgtatttttagtagagacagagtttcatcatgttggccagctggtctcgaactcctgatctcaggtgatccacccaccttggcctcccaaagtgctgggattataggcatgagccaccacgttccaccagaagtcttaattaatgcaaagaaaatcaatctatagatttgatggaaatttggactcctatatcctactttttatcccactcctatatactactccttattagtgtcccagaaagatgaactattttccttctctacttggtctgcccatttctacttcctgccatat

SEQ ID NO: 391070 - DNA, 1000 bp, Homo Sapiens
aggagggagaggaggaccgggatgcggatgaggagggagaaggggatgaggagaccccaacctcggctccagggtccagcctggctggccgaaacccttatgccctgctgggtgaggatgagtgctgagttcctcgcccagcgccatcttccctcccagtatctttgcttttggactgacctgggggtatctcccctctgccaccccaattgtgaataaagattgtttgctttgtagccccttccccagatgaactgaggtgagagcggctgttccaggctaacagctgtgggaggcttctctcctcttctcccttcttttttcatgcattctctttgcaagggaaagttctcttaggagtttagtaggttctcagtctctgaaacctgcttcctctacccattctcccactctgcaccttaggaatcccgttatctacatggggaggggaggtctaaatccagctcccttttggagtttgtgccattctccgatttgagcagcagccctgtgtgccccctgccgccagacctgctcattccaggagcttctgggagaaggaacagtaagagaggaactgtgtcccaagctgatgtctcttaatgagatttttacaggaattgttcaaattcagcaaatatttattgagggtctattgtgtgtcttgacctgtgctgagcaccaagcatataaggatgtaccaccagagcctgacctaaatttgaagcctggccatgatcaaaaccccaccttcaggcacccaagtttttggattaagaagggtgaatgatgttctccaaatcctgggggctcatgcagtataattctaggacttcatgttgatacaaatttttagttaaggcaaaacgcttgtgaaaatgttgattaaatgtgtacgagtagttttaattactggtgaacaactagcgtgcacatttatgatttgagcagaacagccctttaagtacagtgttaagtttcattgtttaaaagcttggca

SEQ ID NO: 391071 - DNA, 1000 bp, Homo Sapiens; identical to SEQ ID NO: 281907

SEQ ID NO: 391072 - DNA, 1000 bp, Homo Sapiens
gctgagagcaacatgaacgacctcgtctctgagtatcagcagtaccaggatgccaccgcagaagaggaggaggatttcggtgaggaggccgaagaggaggcctaaggcagagcccccatcacctcaggcttctcagttcccttagccgtcttactcaactgcccctttcctctccctcagaatttgtgtttgctgcctctatcttgttttttgttttttcttctggggggggtctagaacagtgcctggcacatagtaggcgctcaataaatacttgtttgttgaatgtctcctctctctttccactctgggaaacctaggtttctgccattctgggtgaccctgtatttctttctggtgcccattccatttgtccagttaatacttcctcttaaaaatctccaagaagctgggtctccagatcccatttagaaccaaccaggtgctgaaaacacatgtagataatggccatcatcctaagcccaaagtagaaaatggtagaaggtagtgggtagaagtcactatataaggaaggggatgggattttccattctaaaagttttggagagggaaatccaggctattaaagtcactaaatttctaagtatgtccatttcccatctcagcttcaagggaggtgtcagcagtattatctccactttcaatctccctccaagctctactctggaggagtctgtcccactctgtcaagtggaatccttccctttccaactctacctccctcactcagctcctttcccctgatcagagaaagggatcaagggggttgggaggggggaaagagaccagccttggtccctaagcctccagaaacgtcttcttaatccccaccttttcttactcccaaaaaagaatgaacacccctgactctggagtggtgtatactgccacatcagtgtttgagtcagtccccagaggagaggggaaccctcctccatcttttttgcaacatctcatttcttccttttgctgttgcttc

SEQ ID NO: 391073 - DNA, 1000 bp, Homo Sapiens; identical to SEQ ID NO: 281908

SEQ ID NO: 391074 - DNA, 1000 bp, Homo Sapiens
tggggagggggcagaggggaaaggcctgggtaatggagattctttgattgggatgtttcgcgtgtgtggtgggctgtttagagtgtcatcacttaccatgactaaccagaatttgttcatgactgttgttttctgtagcctgagacagctgtcttgtgagggactgagatgcaggatttcttcactcctcccctttgtgacttcaagagcctctggcatctctttctgcaaaggcacctgaatgtgtctgcgtccctgttagcataatgtgaggaggtggagagacagcccacccccgtgtccactgtgacccctgttcccatgctgacctgtgtttcctccccagtcatctttcctgttccagaggggtggggctggatgtctccatctctgtctcaactttatgtgcactgagctgcaacttcttacttccctactgaaaataagaatctgaatataaatttgttttctcaaatatttgctatgagaggttgatggattaattaaataagtcaattcctggaatgtgagagagcaaataaagacctgagaactttccagaatctgcatgttcgctgtgctgagtctgttgcaggtggggtgtggagaaggctgtggggggccgagtgtggacagggcctgtgcccagttgttgttgagcccatcatgggctttatgtggttagtcctcagctgggtcaccttcactgccccattgtccttgtcccttcagcggaaacttgtccagtgggagctgtgaccacagaggctcacacatcgcccagggtggcccctgcacacgggggtctctgtgcattctgagacaaattttcagagccattcacctcctgccctgcttctagagctccttttctgctctgctctcctgccctctctccctgccctggttctagtgatcttggtgctgaatccaatcccaactcctgaatctgtaaagcagagtctaatttagacttacatttgtctgtgaaattggaccc

SEQ ID NO: 391075 - DNA, 1000 bp, Homo Sapiens
ctctactaaaaatacaaaaattagctgggcatggtgatgggcacctgtagtcccagctacttgggaggctgagcaggagaatggcttgaactcaggaggcggaggttgcagtgagccaaaatcgtggcactgcactccagcctgggtgacagagcgagactccattaagtatatacacagttttttgtacacaatgctactgtacacttaacagactacaatatagtacaaacataacttttatgcacaataggaaactaaaaagtttgtgtgactcactttgttgctatggtctggaaacaaatcttcagtatctccgaggtatgcctgtcatttccctttccctcttcttgctggcccagaatgaccttgtttcttgcccctgtctagccctgcatgctgtaggggtttgccttctctggtaggtctgggcactttgtatcccttgtaaccttggctcctgggatatgacactggtacaactggcctcaagttctgttggactagtgagcctcccccaacacctcctgaagtagaaccaaaggcctgtgcacacaccgtgcatgtgtgagtctgcatagagatgtcagcttcctgcagggtgttctgaagggatgtcctgttgtgactggactgtgacatagccacaggcccagaggcaggagtggctcagaagggagtggctggtcccaattttgatcatctaggaacaggaaggtccttagaaaaccatgccccagaaggcaggattgctggagagtggacagctgctagccagctcgctatctggatatcactctgcattgggagggaagatggcctctgccatggtgtaagagtccaggaaccaggcagtgaggacttcccagcggtcagtgcttctcacacttgcgggccaaagcacctttagatgaggccaaagactttacgttcctcattagctgactttttcccacttaagtggaaaaagaacccagaacctttgtaaaagttttagggg

SEQ ID NO: 391076 - DNA, 1000 bp, Homo Sapiens; identical to SEQ ID NO: 195485

SEQ ID NO: 391077 - DNA, 1000 bp, Homo Sapiens
ttagtggagtggtaatgtgaaagtcatcaacgtcagcctggtctagcagaccatgcaggcttacccattaaccatgtcactgcatttttctcctatgctcagggaggaaataactctagatgtcttgtgctatgattcttctttgggatttttcagatgctcctagaatatatctctctgccttaatatcttcagtatttttggatctttggcatatgatccaagcagtaagctagcttgtactcagtctggacctgttgtagaaatttctgccctaggtctcaatcatactggcatccataagagttatctaaaaaatgggcagagaacaatgatcacatgtagaatatgttgccaccaaaaccttagggctctcaccacgcactgtgcctccttcttttgatgggcagtataaagtgaagcaagttttcaggtactttaatgggaatatacttacatgctccataccacttgattcttagaaattttaccaataaggtaggatttaaatttttagggcttatttaccacacttttggaaacatatctaacagcaaagcagcagggattcttgctacttacttcttactatatcacctagcataacatcatcaatataatggataggtaaggtgttataaaagatattaagatgatcaaaagtccttcagatagtggtataacagagagaaagagcaaagaagtaaacatatgctattttccttgctacataaatgcaaaatgcttctgattttccttacttacaagaatatgaccaacagtattaagcaggcctgttgccacacaccaggtgtcagctttatgaggattttccccaataaaatattgtatccaggagagcactgtaattggcattaccacctcataagtttatgaaaatctactatcaacttcccaggtacattggacttttgcacaggccaagcaggtgataaaatggagatgtgatgggagtcaccatccatgcatctttcagatc

SEQ ID NO: 391078 - DNA, 1000 bp, Homo Sapiens
tgtgaaacatgagagtcagccctggttccaagaacccccatgatgctggcaacagccctactcccttacccgccatgactcccccgactccagcctcttacatctcgtcctcgggggccaacaggtcctggggggccaggccgcccagggtctcccttctctccaggaggccctgagtcaccctgtggaggaggcaagagggaggtgatgcaggacgctcgaagcaagcagttctcaaggggaggggaccccagaagccttgaggttgcccagggtaacgggtactcactgggggtcctgctctgccagtaaggccaatgggaccctgaaggggacagaaggggggcaggacttagtcagggtcccaccacctcatctccctctgtcacactccccattcccacattgattcacccggtctccagggtctcccttggggccagggtctccaggaagaaccaagccgggtgggccctgtggatggaaggataagaagtcaggaagacaaccttcaccaactgccccctaaacacttcgcttcacttacccgttccccttggactccggtagctcctctgggcccagcgggccccacatctccctggaggtgacaaagaccatcagtgctagtcccaggctccagttaaccccctgacccagcaagtcctgtgaccccccaagtcccatagataggccctatgacctagacctcaaccctgtagaaacctccccttgccccataccaggcttaccttttctcctttgggtccagcaacagcaggtccctgaaaacaaacaggacagatacagcttggccctgccttggggttgtatgatcaaagtcttcattggaatggaggtcacatggaattggaagtcatacagctcagtccccgcccagaagtcacagagtcaccgctgacagcagggaaggggttatacaaaatggactgacacaaagagctcatgacctgcatggcggtcttggggtcacaggatc

SEQ ID NO: 391079 - DNA, 1000 bp, Homo Sapiens; identical to SEQ ID NO: 281914

SEQ ID NO: 391080 - DNA, 1000 bp, Homo Sapiens
aagaccagcctgaccgacagggagaaacccccgtctctactagaaatacaacattagctgggtgtgctggcgcatgcctgtaatcccagctactcaggaggtggaggcaggacaatcgcttgaacccaggaggcagaggttgcggtgagccaagatttcaccatgacactccagcctgggcaacaagagtgaaactccatctcaaaacaaaaaacaaaaaacaaaaaaccagcatgatttcaagagcagaaagagaagagcttaaaaaccagcataatgagaaagttaggaagcttcttaccaaagcatctggaaatatgcaagcaattcttgtgaactaaaattttcatactgtagtatcaaacactagaactcacttattccatctttctctattttgggacccaattatccacttgtcttcattccctatcccaccccttgtcttcctagcgtctgctaaccacctttatactttccaccttcctgagattccttttgtgtgtaggtgtgtgatggagtctctttctgttgcccaggttggagtacgcaggcacaatccgggctcactgcaagctctgcctcccgagttcaagcccttcttgggcctcagccctccaagtagctgaaactacaggcacgcgtcaccacgcccggctcattgtttgtgttttccgtagagacggggtttcaccatgttggccaggcgggtctcgaactcctggactcaagtgatccgtgcgactcggcctcccggagtgctgggattacaggtctgagccaccacacctggccaaggtttccttttttcttcctacatagaagtgaggacatgaaatatttgtcattctgtgcctggcttatttcatttaatatacagacctgcaatctcatccattttgtctgcagcagagaggagtttcttcctttttaggctgaacaatacttcactgggtgtgtataccccagtttcttcattgaaacaaatttctgaagagca

SEQ ID NO: 391081 - DNA, 1000 bp, Homo Sapiens
aagagagagtgatcctgggagggaaaagggatatgccatccaaacagcccagagggcactgtctgagctggtgattagagacacaaaaacaagggtctccagactgtctggccctttttgggtaggggctgggaaaatggtttttggctggtgagagttgcctaaagtcctggagtgaatactttgttttcatgtactaaggtctgtccacttaaatggtcactgattttgagagcctgagtatgcatacacagggcacagacacaaagcctctccaattatcacggaaccccattaccttcccatcctctgggggtacggtgtattcaggaaagcctgaggtctgtcccctcagttattctctgcaatcaagagaacatccagctacatgatttgggggaagtgtccaaaagaccttcctgcctccaaatacatatttcattaggctgtggtagatacctacaattcttccattaaagcagttgtttcttggctgggtgcagcagctcacacctgtaatcccagtactttgggaggccgaggcaggaggatcacttgagcccaagagtaagagaccagcctgggcaatagagtgcaaccttgtctctacaaaaaaataaaaattagccaggcatggtggtgcatgcctgtagtcccagctacttgggaggctgaggtgggaggatgagctagggaggttgaagctgcagtgagctgagattgcgccactgcactccagcctgggtgacagagtgagaccctgcctcaaaaaaattaaattgaattgaattaaattaagtggttgtttcttaacttttgggagttatagacccttctgaaaatctgacaaaagctatagctgctcttaccagaaaaatacatatgctcccaaatttggcaatacaatttgaataggttcccacaactcttaagacccattcacataccccccttagggatctgtggacctccaggataacagaactcacttgaggaattc

SEQ ID NO: 391082 - DNA, 1000 bp, Homo Sapiens
tgctcaccttacactcaattcctcttttcctggagggagtggctgggaatcttcagaaagcttggatgaggagccagacatccagttctccagcttcagggttgggggagatcgggaagctggattcagatctgagagccctttgacgaccagatcattcttatttagaacgaactaattcctaaggccactcaccagaatggggttatttcctccttgtgagtgaggagagtggtgggtagggtgggggaaagacgaggcagggtctactgtgggactcattttccttgccttggctatgccagaggagctcactgacctaaggagtagctgtccagaaagcccacccagccagcacagccaccctggcggtacaaaggctgggctgaccggacttctgtgccccccacattcccagactggacgtataaaaacacacactagttagcattagtgtttgtagcgccactttactgccaatagctgacattgccctgggttaggggagaataaataaaatctgtggcatcagacaggtattaccgaggcgaagagtggactgggctttcgtgggcacttaccctgggaagggggtatgaggtggctggagaagtgttcatggagagtgtctctctcctgcccccaaggccacggaatcttctattccttctttgtacccaaaggggcaaagtggaggccagggtctctttgctaaggagctaagtaggggaaagaggcagggggagctcccagcaggaccaaagggagaccaaggtttggaccccagaacagagcaggaacccagagtcctgtgcagtcacaggatgacgcagggaggacggctgttggtgatcttttctagggtttctccattactggctcttcggatggcctcaatgagctagaggagtggaatgacaggatgatgcactgttggggtagggtgaccaagaggtcctcccaacgctgtaaatactcacatctttctcatagggaaagc

SEQ ID NO: 391083 - DNA, 1000 bp, Homo Sapiens; identical to SEQ ID NO: 114831

SEQ ID NO: 391084 - DNA, 1000 bp, Homo Sapiens; identical to SEQ ID NO: 281920

SEQ ID NO: 391085 - DNA, 1000 bp, Homo Sapiens
acaggtgtgtgggatgcagagtgcagtcctctgtgggctgaccacctgctgaacccatctcctctgcccagggccagtacatcctcacactgtcagaggacatcgtggatggccatgagcgggccatgctcaagcggctcctgcggatcgactccaagtgtctgcacttcactcccaaggactggagcaagagggggaagtggtgaccagacactgcccactgcagtgccaagacggcagcaggactggggctgatagcccaccccgcccccactgcagctcccacaaagcactctaagggagatggggctgaggacagctcaaaaaggagaggacaggcctggcaggggcccactggtgcccagcaccaaggcgagctccgggctcagaccaactccaaggtcagctggccacaggcccaggcctcctctgaagcagggaccagagggagccaggcagctgtgtacagtgagaagggatccggatgggggagctctgtacagagggctggtgattgtaaaaatttcttttgtaaagtagaagttgggggtggggtgggtgctggctgcaaaaatttctggcttctcttacccctattgcccccggcaataaattgtttctatatgccagagccatgcaaagttcttggtggggagggggaaagggcccatgctggcttaggggctctaaggcgcccagactcacaggtgctgtgaagagctcctttattggggtgatggaatcggttccaaagagctggtttactgctgtgaagggatcgcagctttgaatttcaagctctggttctcagtcctcgggcacctgtgcgtgaatctgcaacaggagtcgcctctactgttggacttgtaagacagggcggcaagctggcccccatacccgaggaaggacccagctgttcagaataaccgcttctagacatgctaggaagagtggtcagggagctacgcttcccacacactacccagtagaatcctccagg

SEQ ID NO: 391086 - DNA, 1000 bp, Homo Sapiens
tagggtcagtgagcagctgttagtgaggggaatgtagtggccaccaggcaggaactaggactccagccagttctttcctggtgggccacgtgtaactgtgtggccttgggcgagacatttcacttttctgtgcctgagtttatcagtaaactggagatggggggattcctcaccctgagttgtgaggattgaatgacagaaggcactagtgacagtgatgctggaggaaggagtgttgccaagtgcctcggtcactttgcctaatttcagaaagtcactctgagttggtatgttttgtgtttttaaaaaagctaggattcataaaattaaatagaaatcagtgaaataaaatatttgatatttaaaatacatttagaaatacaaagtgtcaagcaaaacgtgaatttggaaatctatggaacattagataaggtatttaaaagtaattgccatgtaaaaatgacacgaacttgaagtaagattatttgatttttctaaaaatacaagaaagcttggtgcatccgcctggtcattgttgaatcacaaatgtatttttgtgcagaagattcctgcagctcaaagccctttctgattccatactgttcggggaaatggagagatgagaggagctaaatcagctttcctctgactcactcccgttcaaagctcatttcttttctgataattttgagagtgtctggaacagcttttgttttcttggtggggtggcaaccttactgggcgcgctgtgggttttgcatccaaggctgcatctccggttcctgctagcctttcatcttgctcaggtggggactcgcgtgcatctcaggcccaaggtcctcccgtcctgcttgttcatggagtgtggaactctcatgaggttcaccctgcagtggcaactttgctggtggccttttctccacccctgtggtgggtggtgctgctgtggtcacctctgttttacaggtggagaaactgaggctcagagagtcaagtgtca

SEQ ID NO: 391087 - DNA, 1000 bp, Homo Sapiens
cccaggaattctgcccagttgatggggacacggtgggaaccagcttctgctgccttcacaaccaggcgccagtcctgtccatgggttatctcgcaaaccccagaggatctctgggaggaatgctactattaaccctatttcacaaacaaggaaatagaagagctcaaagaggttatgtaacttatctgtagccacgcagataatacaaagcagcaatctggacccattctgttcaaaacacttaacccttcgctatcatgccttggttcatctgggtctaatgtgctgagatcaagaaggtttaggacctaatggacagactcaagtcataacaatgctaagctctatttgtgtcccaagcactcctaagcattttatccctaactctacatcaaccccatgaaggagatactgttgatttccccatattagaagtagagagggaagctgaggcacacaaagactcatccacatgcccaagattcactgatagggaaaagtggaagcgagatttgaacccaggctgtttactcctaacctgtccaagccacctctcagacgacggtaggaatcagctggctgcttgtgagtacaggagttacagtccagtgggttatgttttttaagtctcaacatctaagcctggtcaggcatcagttcccctttttttgtgatttattttgtttttattttgttgttcattgtttaatttttccttttacaatgagaaggtcaccatcttgactcctaccttagccatttgttgaatcagactcatgacggctcctgggaagaagccagttcagatcataaaataaaacatatttattctttgtcatgggagtcattattttagaaactacaaactctccttgcttccatccttttttacatactcatgacacatgctcatcctgagtccttgaaaaggtatttttgaacatgtgtattaattataagcctctgaaaacctatggcccaaaccagaaatgatgttgat

SEQ ID NO: 391088 - DNA, 1000 bp, Homo Sapiens; identical to SEQ ID NO: 114832

SEQ ID NO: 391089 - DNA, 1000 bp, Homo Sapiens; identical to SEQ ID NO: 281922

SEQ ID NO: 391090 - DNA, 597 bp, Homo Sapiens
atgccggaacagagtaacgattaccgcgtggtggtgttcggggcgggcggcgtgggcaagagctcgctggtgctgcgcttcgtgaagggcacgttccgcgacacctacatccccaccatcgaggacacctaccggcaggtgatcagctgcgacaagagcgtgtgcacgctgcagatcacagacaccaccggcagccaccagttcccggccatgcagcgcctgtccatctccaagggccacgccttcatcctggtgttctccgtcaccagcaagcagtcgctggaggagctggggcccatctacaagctcatcgtgcagatcaagggcagcgtggaggacatccccgtgatgctcgtgggcaacaagtgcgatgagacgcagcgggaggtggacacgcgcgaggcgcaggcggtggcccaggagtggaagtgcgctttcatggagacctcggccaagatgaactacaacgtcaaggagctcttccaggagctgctgacgctggagacgcgccggaacatgagcctcaacatcgacggcaagcgctccggcaagcagaagaggacagaccgcgtcaagggcaaatgcaccctcatgtga

SEQ ID NO: 391091 - DNA, 1000 bp, Homo Sapiens
atttttattattttattttatttttttttgagacagagtctcactccattgccctgactggggcacaatggcacgatctctgctcactgcaacctccgcttcctgggctcaaataatcctcctgcctcagcctcctgagtaggtaggattacagtcatgcgccaccatgcccgcctaattttttgtatttttagaggtggggtttggctgtgttgcccaggctggtcttgaactcctgagctcagatgatctgcccccttcagcctcccaaagtgctggggttacaggcgtgagccactgaccccagctagattccttattcttaatgactttgcaacactgacataacttaagcagatagccaagatgatatcagataaccataattcttagaagaaaataaaatggagtgttgtaatggtgactggggttggagcaaccttagcttcagtggtcaggtagggactcgggtggtggggggaatggtgacatacaatccaagacctggcaggggaagaggatcatattagtgctcaatctctgtggaccccccggtgtcctagaacacagcttaggaccccttacagaggaccttttgtccatgaccaagcacctcaactcctcacccagagtctccggggtcagcccgagccaatgttcttcagtggggagtaggcagaggtaaacctggagacaggctggggaggtaggggctgagccccccccgagtggcaggatgctgagaacatcaagcactgggttctggtttccatactggattgctggtttccatacaagcactcaacacacactcacacatgtacaacaatacacacaaacagccccaagcccatgtgcacacaattcccccctcaaggtctcacgcatccagtgcctcacgtgctctgaagctcctcagagctgtctcaacctcagacctcctccctaaagtcacaggaagcagtgaaaccctggaaatagggaaggtttaggtctgcag

SEQ ID NO: 391092 - DNA, 1000 bp, Homo Sapiens
gggcccgccgtctgctggcctagagatacctgcttgggccactcagggacgtggggctctctgcactcacttgacatctttttctggggtgccctgtggggtctgtgggttagggatgagttggtcctgggcctgacctgcaggagctcacgggaaaggaaaagaagggagctcacgggaaaggaaaagggagctcacgggaaacgagggtgataggtggtacatctgtcgcagcccaggatgatctgtacgggacagaggcagcggcctgtgaggcccaagcaggcgtgtgggtaagggaagaacagcacggccggctgcagagcaagcctccgcggcccggggaccacagcctggcatgtcacacgtgggacctcaggaggccatacctttaccgagctggagaatgggagtggggggaggagggatgggaggaccagaggagcaggaagggctctggagcctggtggtgaggtcgctggagggtggcaggctgaggacaccagggcgagggcccatgggagaggcctcctgagctgggctgaggacagagaggaagggacctggctggcgactgagaggctggagggcagggcagaggaggaggaacctggtctggccccacagctgggtggggcccccctggagaggaactgccggaagaaggtgctgagctcagaggcccagtgaccttagacacaggcggagcgaagacaagggggctagaggatgtgggttctcagtcacagggtctctggcacccccctctgggtctttaccccctcccatctctgggtctctgtccccatgctctgggtctttgctttccgagcctctgttcccaccccacctttggccctctttctctgggcctctttccacccctggcacccagacctctggccccctctctctgggtctctgtcccccccctctggatctctggccccccatctctctctgggtctgtcccccgaccctgagtttctgtctccctctc

SEQ ID NO: 391093 - DNA, 1000 bp, Homo Sapiens; identical to SEQ ID NO: 281923

SEQ ID NO: 391094 - DNA, 1000 bp, Homo Sapiens; identical to SEQ ID NO: 281924

SEQ ID NO: 391095 - DNA, 1000 bp, Homo Sapiens
tttttggaatccttccaattttgaagaatctatattgttaaaatgtccatactacccaaaggagtctacagatataatgtaattcttatgaaaatacgaatgacattcttcacagaaatagaaaaaacaaccttaaaatttatatggaaccacaaaagacccagaataaccaaggctattttatgtaacaaacaaaccaacaaactaaaactggaggaatcacattacctgacttcaaattatactatagaactgtagtatccaaagaagcatggtactgacataaaaacagacacatagaccaatggaacagaataaagaacccagaaacaaatacatacacttacaatgaactcattttttgcaaaagtgctgagaacgtacattggggaaaagacagtctttattaaatgttgcttggaaaactggatatccatatgtagaaaaatgaaaccagacctctatctttcaacatacacaaaaataaaatgaaagtggattaaagacatatccaggacttcaaactatgaaactactacaagaaaacattggaaaaactctgcgggacattggtctgggcaaagatttcttaaatattaccccacaagcacaggcaaccaaaaggaaactcctggacaaactgtgatgagttggtcaccctaatgagagtggcaggcagctgccaaatgcctaggcagataggggtgggcctgtggtaaaaccccactccaagctggagacagtttaaagcctgaaagccaagctacaagttaaattttcggactggattgagaacttgtcttcccgtttggtttgctttcctctgattggtgcttacccttcacctattttatatatatctaccctttcctaattggttttcttcactatcatgcccacctttggagtggtgtctttgtttaaccttttttgcatactcacaaaccaatcagcacataatccttactctgagtccataaaaggcagaaccagccacacg

SEQ ID NO: 391096 - DNA, 1000 bp, Homo Sapiens; identical to SEQ ID NO: 114833

SEQ ID NO: 391097 - DNA, 1000 bp, Homo Sapiens
tgaaacactctctttgtaaagtctacaagtggatattttgggcccttggaggcattgtttggaaaagggaatgtcttcacataaaaggcagacagaagtgttctcagaaactgctttgtgatgtctgtgttcaactcacagagtttaacatttcctttgatagagcagtttagtaacactctctttgtagaatttggaagtgtatactaagagcgctttgaggcgtatggtagaaaaggaaatatcttcccataaaagctagacagaaggaatctcagaaactcctttgtgatgtttgcattcaactcaccgagtggaacattcctcttgatagagcagtttggaaacacttttttttgtagaatcagcttgattgtatttggccctccttgaggccttcgttggaaacgggttttcatcttataaacccagacagaagaattctcagagtcttctttgtgatgtgtgctttcaactcaccgagataaagatttctcttgatagagcaatttggaaacactctttttgtagaatttgcaagggtacattgagagcgctttcaggcctatggtagaaaagggaatatctttccataaaaggtagacagaagcaatctcagaaactactgtgtgatggctgcattccacacacaaggtggaacatttctcttgatacagcagttttgaaacactctttctgtagaatctgcaagtggataattggaccgccttgaggccttcgttggaaacggtatttcttcatgttactctagataggagagttctcaaacactactatgtgatgtttgcattcaagtcacagtgtgcaacattcctcttgatagagcagttgggaaacactccttttgtagaatttgcaatgggatatttggacctctttgaggccttcgttggaaacgggatttcttcctataaacccagacagaagaattctcagagacttctttgtgatgtgtgaattcaactcacagtgtggatcc

SEQ ID NO: 391098 - DNA, 1000 bp, Homo Sapiens
atctttagtcagtgtgctgattgctcccttgagtagagcagaatttctcacctctgaaaatatatgaaagtgccatacatactgttctgaactcacagaataatatgaacaacttattaaaaacattcagtgaatgaaaagagtatttcttatcactgtttaatattttgagggagttaaagaagtataacgacatttactctcaaagaatttacagtctggttgaggattcaaggcatacctgagtagaatgttaaatggcaataagagagatagatgccacaaggcagtatatgaaaattgacaaatgtgtgattaagccgatataacagctcaccctgtttcattcttaatcaagtccatttttttaaatggagttggtgcttgaacttaaccttgaggcccagattgaatttacatagatagtgaggagggcatatgtacaaaagagaaaccgcttgagtaaaggtatggtggttggaatgtaatttctgggaatggtaagtacattagtctacctcaggggtttagttttgttttaaagataatgtagatttttttttccttccattctaggtgcagataaaactctagactccagtgcagaggatcatactttgagtgaacaggattccatacaaaaaagtcctttatcagaaactatggatgtgaagccttctgatatgactttaccattagctcttccacttgggactgaggaccatcacatgcttctgcctgtcacggatactcagtctcctacatcagatacattgttgaggtcaactgtgaatgggtattcagaaccacagttgatttttttacaacaattatactgactttgtaaggaatatggaattgctaagatatcattggtagcaaacatctctggtaaggtgcatatattcatattaaattcccattcatttgagttgtgaccattatttttcattcactgaagtaaaagcacctgatgctgcatcacaactgcaatgtttgt

SEQ ID NO: 391099 - DNA, 1000 bp, Homo Sapiens; identical to SEQ ID NO: 281926

SEQ ID NO: 391100 - DNA, 1000 bp, Homo Sapiens
ggtttaggggagaaaatcagttgcgttttggacatctttaagataaacatgtgaagtcacttggcatatttagctgggaatgttaaatggtccctgtttcccaggtgtatggtttagcagtggataagaggcctgtagaggcactgtggcttagggcagtatctctacccctggcagcatcctggactttgagtcagcagactacttggtcttgccagagaaaatcagctaaaggaggcatgcccaggggtccctgaagcccagatttggtcccatagggcttctctgccattcatattgcagacgccaaagcatgactggctggggtcccattcacttttttttttttttttttttttttttttttttttaaagacagcgtcttgctctgtcacccaggctggagtgcaatggttcagtcatagctcattgcagcttcaaactcctgggctcaagcgatcctccagccgcagcctcctgagtaactgggactatgggcacgcactgtgatgccaaattaatttaattaatttgtttctgtagagaaggtcttgctacattgcccacgccagtcttgaattcctgggctcaagtggtcctcccaccttggcctcccaaagtgctgggattacacgtgtgagccactgtacctgggccagaaaaggaatttctgcagggactgggcccccctgaatcagggatgggaaaggtgtgtaagtgggcttgccaggtatcttgctttaagaatggttctcttgtcaagagaatggagctcatccttgttctgttgaggccaggtcagaagtaaccttatggtgcccttcagaaacaggcaggtgagccgggcgtggtgactcacacctataatcccagcactgagagaggccaaagcaggtggatcgactgagcccaggagtttgaaactagcctgcataacatggcaaaaccttgtctaccaaaaattagccgggcatggtgtcatgcatctttggtcccagct

SEQ ID NO: 391101 - DNA, 1000 bp, Homo Sapiens; identical to SEQ ID NO: 201553
  misc_feature (815)..(815): n is a, c, g, or t

SEQ ID NO: 391102 - DNA, 1000 bp, Homo Sapiens
aggatttcccacattcgctgcacttataaggcctttctccagtgtgaaccctatggtgttcaatgaggctagagttttggctaaatgacttcccacattcgctgcactcataaggcctggatccactgtgaactttctggtgttttatgagactggaatgatatgtaaaaaacttcccacattcactgcactcataaggcctctccccagtgtgaactccccgatgttgaaggagtgcagacctttggctaaaggatttcccacattcactgcactcatatggcctttccccagtgtgaactctccgatgtttaatgaggttagacttgttgctaaataattttccacattcatcacattcatgaggtcgtactgcagtgtgaactctccggtgctgaatgagactagagctttgcctaaaggacttcccacactctcgacattcataaggcttttctccagtgtgaagtctccaatggtcattgagactgtagcttttgctaaaggatttcccacattcactgcatatgtaacatctttctgtagtgagggttctctgctgctgaacaagtgtgtgtttaccgctgaatgcttttgtgtgttctccacagttgtaatgagtttttcctctgtgactgatggccccaccgtcgcttttgctatttgattgctccccagtgtgagcagcctgttgatggagaaatcccaacttggccaggaagtccttcccaacttctctgcaggtggaaggctcccctgacacatggaatgtgcaggtcttcacaaacaaggctctgcccacattgcttctgaaatgtttttctccaaggtgctgcttctgatgatgaacatctgcaatgaaatacaattatttcccacatgccccacctctatataatttctgcctatgatgtgtcccctagggcccagccaagagcaaaatgtctctcaagaccaggctacacgtctcacagtggtgggccttctagggagaaagatc

SEQ ID NO: 391103 - DNA, 1000 bp, Homo Sapiens; identical to SEQ ID NO: 281927

SEQ ID NO: 391104 - DNA, 1000 bp, Homo Sapiens; identical to SEQ ID NO: 281928

SEQ ID NO: 391105 - DNA, 1000 bp, Homo Sapiens; identical to SEQ ID NO: 281930

SEQ ID NO: 391106 - DNA, 1000 bp, Homo Sapiens; identical to SEQ ID NO: 281931

SEQ ID NO: 391107 - DNA, 1000 bp, Homo Sapiens; identical to SEQ ID NO: 114834

SEQ ID NO: 391108 - DNA, 1000 bp, Homo Sapiens; identical to SEQ ID NO: 195209

SEQ ID NO: 391109 - DNA, 1000 bp, Homo Sapiens; identical to SEQ ID NO: 201649

SEQ ID NO: 391110 - DNA, 1000 bp, Homo Sapiens; identical to SEQ ID NO: 195111

SEQ ID NO: 391111 - DNA, 1000 bp, Homo Sapiens; identical to SEQ ID NO: 114835

SEQ ID NO: 391112 - DNA, 1000 bp, Homo Sapiens; identical to SEQ ID NO: 281938

SEQ ID NO: 391113 - DNA, 1000 bp, Homo Sapiens
atgaagctgttttgatcaatacaaaatttgggttaaaatcaactttaacatctatttttatgtttcagttgatttggagaattctcctagtcttggatacatagatggaagtgatgacaggtttataacagttgaccttgcaatctcagacatttaaaacaggaccagaagtttatataaatataattaataagcaaactaatgacatcaccatgggacacacacaaaagttcttgcaggagcagggtctgtgtggcttcagttgcctgcagcgctcccaggccagagcaagtgctctaggatctgaactgcccgcagtgcagccctgcagcctttcccagggcacgttgatgtgcacacagtttccctgaaggcaaagtgaacatgtggagagcttacgtggcagcgcgtatgtcttcagtgtgtgttttagaagtccaactgttgtttttatgtttttaaaggaaagatttgaatcaagcagttatgggccccctgaagtatccttttttctagaacattctgaaagtcatccttgcctatgggaagcctaggccggcctgcactgttatgttcaataaataagcagggtgctctgggctggggattgtgtgaggagcagagcgcagcccgtcctcatgcttttccactgaagtaggccaggcagagagggagtacagcaatggatgcgctttggcagctgagtagtccgagagccagaaaagaaatgtggaaaataagaacgctgtagcaggcctaggtgaggaaatttaggaagggtttgcgggaggtaggatttgagatgggtcttggagagttggacagtgtcagccggtaggacgggggtgcggacggaagcctgtgaggaaggcagaggatgcggagctgtgagcggagggagcagcgaggctggagagcagctgggctgcgggtcaagacgtctgcgtttaattcgggactgaaggttagcagggaagggaacgatgccagatctgagtaa

SEQ ID NO: 391114 - DNA, 1000 bp, Homo Sapiens; identical to SEQ ID NO: 206233

SEQ ID NO: 391115 - DNA, 1000 bp, Homo Sapiens; identical to SEQ ID NO: 206234

SEQ ID NO: 391116 - DNA, 1000 bp, Homo Sapiens; identical to SEQ ID NO: 114836

SEQ ID NO: 391117 - DNA, 1000 bp, Homo Sapiens
aaagaaagaaaagaaattaatttagcaccataggaaaggttttttttaaaaaagcatgagctatgttatcctctttttttttttttgtataaggctacaaaatctggtattttgcacttatatcccatctcagttcggacaagccacatttcaagggcccaaaaccccatttggtgagtggcagccatattggatagagacagcccaccttctctggttttgtctctgcagatagccaaggaaacctaattatgcatccaactctctggcccattggctgagtcacctgccgggaagctttcagaatatttataggtaactgatctacagaaaacagaaagtgataccatctccagcccccacaacctttcttcagtctcaagtttgccgtctcagctactgttttctagaggcccagtgggaagagtatgcaaagtggcagtaaagtacatatgtaaacgtgtaggcaaaaggctgagaggattcttaccaaactactcacagtggaaaataagagtaatgtccaagcagagtttagttttgtcagtcatgccctaattttgtttttgttttttagaatgtattcattcacatattacttgtgtaagtgaaagtcaattgatatatatatagagataatagtaaagaaaagtaaccatgatttgcggtaaatccccaagaagtttaatggaaagcagtgagtgcagagattacaaggtggactctggggccggctgcctgcctttgcatcctagccctgctgtctactagctgtgtgaccttgggcaaggttctcttgctttctgggcctcagtttcctcatctataaactaaggataatgatgggacctatgttacaaggttgtcacaatgatttgatgagcaggtgtaaggtgttaagatgggatctggaacacagagtctcagctgtaataactaaaataattagtattatcactgtttttggtggaagagtaagtagcaagaaactctcttggtg

SEQ ID NO: 391118 - DNA, 1000 bp, Homo Sapiens; identical to SEQ ID NO: 195683

SEQ ID NO: 391119 - DNA, 1000 bp, Homo Sapiens; identical to SEQ ID NO: 195665

SEQ ID NO: 391120 - DNA, 1000 bp, Homo Sapiens
  misc_feature (961)..(961): n is a, c, g, or t
tgctggccacagaaacacaactgataaaaggccgacggtgctgtcagacagcccccaatttcgaagcgtagatttttttgcctctgcaacttaaaacgtccccaaacccacccgacgctgctgggtcttccagatgcgacggtctgggcgagcggtgggcacccagggtccctggaacgggtaccaagtggccggggcttccctcagggctgcccacggcgcgggcggtcgcaagcccaggggtcccgggatcgcccgacgcgtcaactccgggccccgttctcgcctcaacgcctgcgaagccgcacccgtccacctacctccagggcctccagggtgctgaagctggcgatggcgaagccgtcgatgacctcctcctcctgcgagctggactcgcggcggcggcggcgcgggggacgcgcggtgcggggcgcgggggcggcgcctcgggggggcgcgccgcggaggcccgcgttctccttgccggggctgggctcgggctcgtcgcccgacgacggactctgggcgcgggcgtcgcgggcggcctcccggcgccggccacggtcccgctgcgcgcgcgagcgccggctcgggcggaccttggcctccatggccgcgcgtgcgccccgtcgggccggtgaccttgacgccccgcgcctggctcgcagcaggcgggctccctcggctacgcggcgccgccgggctgagtgtgcgccgcgcgggctcgggccctgggcggcggcgggcggcgggccgggccgggcatgccgggcgcggggggcggctcagccccgggcccggcgcggcctgggacccccggcgcgggcggctgggcgcatcggcgggggcgggcccggcgctcagcgccctcggcgcccccccgggggcgcgccccatgcgcgcggcgcggcgatcgggccgagcgggcggggccgggcgggcgcggcaggcggcaggcggnaggcggccggctcctggcaccggctcgtggatgcccccc

SEQ ID NO: 391121 - DNA, 1000 bp, Homo Sapiens; identical to SEQ ID NO: 281945

SEQ ID NO: 391122 - DNA, 1000 bp, Homo Sapiens
cattgggagactcctgcctgccctcacctcactaacagaagagagcggataaactggcacaactgctgctcacctaatttgagactccaactgcagagccaactggccccaaaagcttgtactcctttctgtttcccagtgccttcactggagagcaaaagaccctgatacatctctccggatctgcttaaagtggtccctcgtgggcaattatttcgcatgtctttgagttttataatttaatgtaaagctgtaacctgtatctcccttttctcctctctctacttccctatctatagctttttttcaacaagctccaaaacccccctccctgttagactctgaagtgtcactcactgtgttttttatgcttccaatagtttccaaaacaaacagtggaggcagtgaccggctgggtattcactggatgcaacagtaactcccaatccgagcaacctgagccgccattggcggcaggtctgctccctaaaaggccagcacttgccaatctctgctctgccaggtcctggaatcagggatttgaggactaatggtctgcacatgtgcactgggaggaagggagactagactttgaaggacatatacactagtttgatcttcctctcctttcattttgtctattcaaacaaaaaatatatatgtatataaaaaaattacacacacacacacacacacacacacacacacacacacacaattattttctttgaatacagatccagaaattgtttttcagatttgggttttgggtttggggttttgttttgttttgttttgtttttcccgctttccctccttccttcaccctctgtgccctccgcctgtgtctccccctccctccctaacccagttcaggttgaaactttgctgcaaagaatcccttcaccccctccagggatggctctgagctctcgggcgcgtgccttctccgtggaagccttggtggggagacccagcaaaagaaaactccaagaccatg

SEQ ID NO: 391123 - DNA, 1000 bp, Homo Sapiens; identical to SEQ ID NO: 205599

SEQ ID NO: 391124 - DNA, 1000 bp, Homo Sapiens; identical to SEQ ID NO: 281946

SEQ ID NO: 391125 - DNA, 1000 bp, Homo Sapiens; identical to SEQ ID NO: 195124

SEQ ID NO: 391126 - DNA, 1000 bp, Homo Sapiens; identical to SEQ ID NO: 281948

SEQ ID NO: 391127 - DNA, 1000 bp, Homo Sapiens; identical to SEQ ID NO: 281949

SEQ ID NO: 391128 - DNA, 1000 bp, Homo Sapiens; identical to SEQ ID NO: 281950

SEQ ID NO: 391129 - DNA, 1000 bp, Homo Sapiens; identical to SEQ ID NO: 281951

SEQ ID NO: 391130 - DNA, 1000 bp, Homo Sapiens; identical to SEQ ID NO: 114837

SEQ ID NO: 391131 - DNA, 1000 bp, Homo Sapiens; identical to SEQ ID NO: 281952

SEQ ID NO: 391132 - DNA, 1000 bp, Homo Sapiens
tggcagaaagcaaagtaagtgttgcagtggaagccagcgcagatagctcgaagacagacaagaaattgcaaattcaagaaaaagcagcacaagaggtaaaattggccatcaagccattttaccaaaataaagatatcaccaaggaagaatataaagaaattgtacggaaagcagtagataaagtttgtcatagtaagagtggagaagtaaattctactaaagtggcaaatctggttaaagcctatgtagacaaatacaaatattcacggaaggggagccaaaagaaaactctggaagaacctgtgtctactgaaaaaaacataggctgaaatggggaacgctgtcaaggacattatcaggatatctgcaaagtgcaatttcaacatgtaccattaactgaaaatcatacataactgtgattgaaatttggttttgataaaattatttttttaacataggatatgatgttttgttctaaataaatataggtctgcactgcaacttctgtatccttccttcccctccaccctcccccacaaaattcaagggaaagtaaagggtttaaaggaatgtgcatctttactaggactgtgttatagtgtggatactggaaaatgtatagctttttgattagggcaatggagtgcataaattagaaactttctaagtgcactggttttcaaagagatatatataatgcatttattctgtcaggttaaaatataaagtatgatctttatgattttttccctctaattatagaaagttaaataatgtattaccatgaaaaatgtttctaatattaaatagaacatatcagttgcaaagttcctaatgtgtatttttaaagcacatatctgaataaattgcctagatagaaaaaaaattatcatcgagtaaaatttagtgttcaaaacattgagacactcttcacctattgtatgaccaaataaaggttatgctgcttgttaaaaaaaaaaaaaaaaaaaaaaaaaaaaaa

SEQ ID NO: 391133 - DNA, 1000 bp, Homo Sapiens; identical to SEQ ID NO: 281953

SEQ ID NO: 391134 - DNA, 1000 bp, Homo Sapiens
ctcctgttctatagtccagagagatgtgaagagtgaagcttttcatcttttccatcttgtcagctcagctgccttgggtaggaaggggtttataaaaagtgcttcttcactgcatcagctgtatggctgggcaagttacaagtcactggcactccgtgtgcctctttttccccttctataaaatgggaatataaatagttcatagtttggaggagtagataaaatcatccattgaaggcacttagaacagtgtctgacatggggaaatcttcactaaatgtcagccattctcattatggttgttgtggttgatgctgtttgtcagtggggtggagaaagacatgaaatccaaggaacaatttggccctttgttccaggagcagcaataattttgacaatactacgggattccctgggttcaccccttgactttccgaatctgcccattttagggtgtgaatctttagagttggatgggtcttctagtgaaaccccctttctaaagccaatcttatctgtagacaccgttactaagagccatccctcggttttttagtctcttataagatagtcaggtgcaaccacaagaggagatgcaggagaggctcagggaaaaaagaagccgattatactcacaggtcctagggacaaggggcacacacactgtgttggtccatatgagaaagacaccagggtggagctcgcagaagataggatgagggggagatttaagccataacctttgttggggtttctggggaaaggcaaggcagggcagggtgaatggttttggatgggctagattgaataattctggcaggcttttggctacaaagaggggtctctgttgctggcacctggtcctgggatgatgtaggcagaggaatactgcctcctgggatgcactggccagatacaggaggtctggcactgcactggttagtttgcatatcaaagacatgcttcagtctgagtcctttctctaagaattggccagatc

SEQ ID NO: 391135 - DNA, 1000 bp, Homo Sapiens; identical to SEQ ID NO: 281954

SEQ ID NO: 391136 - DNA, 1000 bp, Homo Sapiens; identical to SEQ ID NO: 281955

SEQ ID NO: 391137 - DNA, 1000 bp, Homo Sapiens
ctctgtagtatgggcctttccagaagctgcccctcaccactacattttctctccctctcggctcctgcactcttccactcttttcttttcttttcttttcttttcgtttcttcttctttttatgtagagatgggggtcttgatatgttgcccaggctggcctcgaacccctggcctcaagtgatcctcccacctcagcctcctaaagtgctgggattacaggcatgagccaccatgcccaaccccactgttttcttgacatgagttatatctacaggttaagccatacatcttgcattgcttacattccagtttccagagaaacttttagatagtcccagatgcctagtttgagatcttaaccagaagcaattctaccttaattgaaccaagcagcaacttatggccttaaatatgaaggatattgacagaatcaattacatccttgaaggaccttaagagaagatcaggtatatagggggtgatcattacagtcttctctttccattatgttagaaacctgccctcaagcaaaaacaagataggcctgccttcaactgctcaaccactcaattggctccttgtaaaatttgtgttcgaggcttccctggctctggagttatttctatagtctattagctccctagggccggctccgcctcatggagatcgtccttgggggctttctctaagtcctaccatggggtgccagaaatgtgatatagcttcggtgaaactcatctctggccctaaagaaataacttgaggactaatcatagaatctacacacactgaaaataactttccagatcggatgtagcctcaaacctggcacctgaagtccagatggaacaaattacctttcggttaaatttcagcccttcagagtgggaggggacgggcatgaccaactagagtcccaacaaggttatccttagacacacaccattgttgttatcatgaatgtaagtgagctctgggcaggctgggaatggttgggg

SEQ ID NO: 391138 - DNA, 1000 bp, Homo Sapiens
aagacaccaggtcctgtagggctgcccgagacgtgggccatgggacacgaaggcagaggctggcaggagatgtgggggctgggggtgagggcccctgcaggagacgctggccagctgtgatttacagctcctgctgtgcttggtggcaccggaaaagcagggtgagcagggagaaaatacggcacggcttttcccaatccccatttcctctccagacagcacgcgcgagctcctggggcctgaacatctgggaaatttaattttacaatttcggctgtgcagcagtatgctcccctccccaaaacgcttgagggaagctggggagagccgggaaggaggtgccttggcgctggccacctgagatggcacccagcagggaggccagagaggcgcagactggcgctgggctctgccggggcctgacactcctccctcccctctgcagagcaaggaccgcgacagaaagacagcgattcgcagttaggaggtggccggcagcagccaggaggcagacgctgctgggggaggtggacgcccggggtgactgcagacagcccccaccttggacctgagctgggcaaggcccaccgcaagcatgcccccaggccagccctggctgcgagcggggccgagggacagacggacgtacagacaggcgccggcagcgggactctgcgctggccccagcacctgcccgggcccactggaactttctgcgctggcttttcttccggccactgtgtgatggcatcttgtgtttttgatatgataatataaagtctgaaaattttgtataattaaaaacaaaacagtatcttccaaatatggaggccaactgtcctcatgaaaggttcagaatccacccccagcccccagcctgagcctccattcccacccttggtggtcccatcctccttgggccaagtaccccggctccctgggaagcccccactttccaggctcagggccacccctccctgggctgaggcggtgaggatgg

SEQ ID NO: 391139 - DNA, 1000 bp, Homo Sapiens; identical to SEQ ID NO: 281957

SEQ ID NO: 391140 - DNA, 1000 bp, Homo Sapiens
gaggtgaaataaccttgcctacagccgcatgtgtagttagtactagaagctggagaaataaagcccatttctgactgtaaatccaggaacttttttgctgctttacattgcctgctttttacatttatgataacttctgcagaatatatatggaatagtgattttggccttaatagcacttaactcacttaaatacactttcccaagatagaatacgacatttttccatggatcacttttctagactgaattaattagatgagcacattttgaaagagcagaaatctaatattcattttcttttctatttaagtgggggttaacgttttttaaattgtccttagactctgtgtattaactgtgtatctttccattgtgctttctgctgagaactaattaactgtggaaagagagtaaaatgttttgtatcttcataattggatattagagttgtctttttattgaccagatcatgctattttagtgtgtgtttgtagaagaacctgttcttgactggcaggatgccatggatgattgataatgctcatataaaattgttagatttctatttttaaatcttttgttcttagaatcctgccatgatgtcttattgtcagctaaagatgaagttgattatacaaaataaataaatgtggcaaaaactttgagtcttaccacaggtccatatttttaagaattagaacttaaatcactttatacctattaaaattttccttcagctagttatctgcgtcattgtattcaactccattcttttatgataaaatgtgctgtagtgcagaagtttttcttactttcagatgtaactatacacacacatttttaaaagttgccgttttttaaaaatgatattgtagttgtaaacctttttaagaacacactgaagaaaaattctgtcattagttcatctgaactcttcttatttaaagacagtactgacaatgtttattttctagttaaaagagattggtgtgtgatc

SEQ ID NO: 391141 - DNA, 1000 bp, Homo Sapiens
taatagtcaagttgatggctttcttcactttcacaactaaaattagatgtgatcatcacattctgcactcataatcagcattcatgccctttctctttatgatacagttggtccttcatattcttgggttctacacttgaggatccagccaactgcagatcaaaaataattgggaaatatcaatgacagatcggataaagaaaatgtgttacatatataccatggaatactatgcaactacaaaaaagaatgagatcatgtttttttgtgggcacatgatggagctggaggccattatccttagtaaactaacgcatgaacagaaaaccaaataccgcatgttctcacttataagtgagagctaaatgatgagaattcatgaacacaaagaagggaacaacagacaccagagtctacttgagtgtggagggtgggaggagggagaggagcagaaaaagtaactattaggtactaggctctatacctgcgtggtgaaataatctgtacaacacacccccgttacacaagtttacctatataacaaaccttcacaacttaaataaaaacctagaataaaagtttaaaaagggaaaaaaaaataacactacgataataagtaatataggtaaaacaatatagtataaatatttatacagcatttcattctattaggtattacaagtaatctggagatgatttaaagtatacgggaggatgtatgtagtttacaagtaaatactatgccatcttttataagaaacttgagcagtggcacattttgacatcacaggggttgaggaaccaattccccatggatagcaatggggataattgtgctgacatatttgggggagatttactttcttaattcagaaacagttgtcaattttggaagctttcatttaatggaaaaatttacttagtgtttatattctgtagattgatttacactttaataagcagttattgtagaaataattattttgtatgcttcctaata

SEQ ID NO: 391142 - DNA, 1000 bp, Homo Sapiens; identical to SEQ ID NO: 281958

SEQ ID NO: 391143 - DNA, 1000 bp, Homo Sapiens
cccatccacactgaaggtgggtctgcctctctgagtccactgactcaaatgttaatcttttttggcaacaacctcacaggcacacccaagaacaattctttgcatccttcaatgcaatgggacattaagtaaagtacccaaaaggcctttgtctcagatgtaagggcaaacaagtcatagacaaaatattgtcagtatttaccatcatacctacccaaaacaatgaagatggtcttttatattttactatgaaagttttatcattttagcttttaaatttaggtgtagattcaatttcaaattaatttttgtgtatgttcatttttatctcaaatggagaaccaaatggtttcagcataatttttagcaaaatttttctttttaccattgaattatcttgacaccattggtgaaaattaactgaagatttatgagtgggcctgtttttggattctattctgttccaccaatctgtgtctattctttcaccaataccatacagttttgatgactagatttataccatgccttgaaatagggtggtgtatgcagttaactgggtgattcttttaaaaaatttttaggctcttccaggtcatttgtatatctataaaatttatagaattagtttgttaatttttcaaaaaaatagcagcaataattttcatatttattgttttgaatttataagtcaacatgaaataatgttgaatattaagattattgatttttccaaacaataagcaagaaattttctatttcattgtcttttaatttgagccagcaatgttctgtagtttcctgtgcggtgatattgcatggaattgctcatttattttaagtatcttattttttgattttattattgagcaaaactttaaattttattgttcagtagtcttatattagtttaaaaagaatatactacattttttacaagcaaaatacagacatagtaactgttttaatgtccttttctcttaagtatgtaatctggatc

SEQ ID NO: 391144 - DNA, 1000 bp, Homo Sapiens
  misc_feature (152)..(154): n is a, c, g, or t
cagggaccttatgtaacctggctcagtccccaggctgacctgcctgaggcctgctggtctgtggtctgtgatttttttgtctaccttctctcctggccgctaaacgcatggcagctgcatttgctaaagaacacagcgccacctggtggaannntcagagcctgcctgtcacagtcacggatgagcaaatggacctgtgtagagcagggcaagagcaggagatgaggtcaggcatgaggaggatggccaggtgtgggcttggggagcctcgtgggcccagcaagccctttggctcttcttctgaaagacatgaggagacaacagaggagctaccaaactgagttgggtttttaaaggctcactgtagcgactgggtagagaacaaaccacaggggtggggggtaaggtagcagagagaccaggtaggaggccttggtgcaaatcccaggagagctgatagtgacttgaagcagggttgctgtagaagaaagggtgaaaggggattgcgtttgtatacattcttgatagatcctcatgttaattctgagagattggaggacagacactggatcagatgtgggtacaagcccagagctgaaaagctagtgatcaactcaggagcccccacttcctgatgcagcatccgatgctctttccaatgcccagcctgccgttggccctccctcagccatgcccaccctcttccccaactcaccctgtgtgtgtcctccttcccgcaggtcaacattgaccatgagacccgcgagctgacgaggatgaacctgcagactgccacagccacatgctttgatgcggctcaggggaagacacgtaccctgatggagaaggactcctacccacgcttcctgaagtcgcctgcttaccgggacctggctgcccaagcctcagccgcctctgccactctgtccagctgcagcctggacgagccctcacacacctgagtctccacggcagtgaggaagccagccgggaagagagg

SEQ ID NO: 391145 - DNA, 1000 bp, Homo Sapiens; identical to SEQ ID NO: 281959

SEQ ID NO: 391146 - DNA, 1000 bp, Homo Sapiens; identical to SEQ ID NO: 281961

SEQ ID NO: 391147 - DNA, 1000 bp, Homo Sapiens
agttcctggcttatcccacagccccacctgtcccaccaattctggggaagtctggcttctcctgggggaagtgggtgaaggggttgcatttctgaggagtctggtttcaatctgctctctctctctgctgttgtctgtttacacatctctctctctcgccgggctgtgagcacctctgggcaagtgctggggcttactcacctcagcaccttgcacagcgcctggcacagaggaggtgctcgataaatatttgctaaatggccccgtgactctccctgccctggccactacctcccccacacaccacacacattcatacacactcatgggaaccaaagtcacacacactcacactcacaaagataaatattcacaagccctcactcacatgcccctgcacgcactgcagacgctgcctgctctcacacactcgcatggaccgtattcacaacctgacacacttgcacacaccagcgcacgcaacacactcccacctcacaagtctcacatagccacacccaggcctgcctgcacgactcacctcctccctcggggtccttctatgaagcatttcctgacctcctctttggcccttttcccccaccagatgggttcagcccttgcctccagtcaggacaggcctggtaatttgcagagcccagtgcaaagtgaaagcctgggcccttgttaaagaattattaggctgggcgcagtggctcatgccagtaatcccacactttgggaggccgaggcgggtggatcgcctgaggtcaggagtttgagaccagcctgaccaacatggcgaaaccccatctctactaaaaatacaaaattagctgggcgtggtggtgtgcgcctgtaatcctagctactctggaggttgaggcagaagaatcgcttgaacctgggaggcggaggttgccgtgaaccaagatcatgacactgcactcccgcctgggcaacaagagagaaactccatcttaaaaaaaaaaaaaaaaaa

SEQ ID NO: 391148 - DNA, 1000 bp, Homo Sapiens; identical to SEQ ID NO: 281963

SEQ ID NO: 391149 - DNA, 1000 bp, Homo Sapiens; identical to SEQ ID NO: 281966

SEQ ID NO: 391150 - DNA, 1000 bp, Homo Sapiens; identical to SEQ ID NO: 281968

SEQ ID NO: 391151 - DNA, 1000 bp, Homo Sapiens
cgaggtcaggtaattttatcctggaatggcaatgtttggaaaagcagctttagctacaggtatgtgaagaaacataaaattttacagaccaaacagaccacataagaagaatgaagaacacattttaaattcagaatctgctggtagttcttttggaaaattcttgctaggaagaacagatggatgaaatacacattgttagttcaaataaacaactcatggcacttgacattagtagcatccttttaaatacatataattatttacttttagtagatgtcttcaatctgtagaatcaacagtgcaaaattgacctttaactgtaccatataccttatatatttataaagtttctcaacaggaaatctatagaatcaatagtgcaaaatgggctttaactgtaccatatactttatatatttataaaggttctcaacaggacatgttaaagttggaggcagaaatttatccagagatgtaaattggcagtagtggcatcttagccatatttgaaaatgctttagaagttccaaatcattatgggttaatgccagattttcctttttttatcgtaggtttcggagggcaatgcttgccatgttcaaatgtcagactcaccaaacaatgcctgtgacaagtattttacccatggatgtatctcaaaacccattggcttctggaagaatctgaaataagataaaaggacacactatcaaaacactttagttttttgacaatgcttttcttttaaatatgagcccatttagatcaagtgcagacatggatcattgtcctatgagagtgtaagctcctcaagcacagctcgtgcttctgtttgtgcactctggctgctgtagtgtatgcttctctgtgtcctgatatatcaacttattgctcatctcctttgatgaattaggcatcagaggttaaggtcccctttctttctccctattatggcatgcattacactgtactgatgacctttaacttgcctggctcc

SEQ ID NO: 391152 - DNA, 1000 bp, Homo Sapiens
gtttggccccacaggggaggagcgagcgagattgacgtggaagctgggcctctgaaggacacagagtgctctaagaaagggacgatggggcagatccatgttcacaaacacgcccatgtgaattcactctcagatgtctcctcgtgtcagcacgctgggtgccagcacgctctgatattgacacaaagggccacggagtcaccactcactccacacacactcaccccgtgcccacttacccagggagggccaggaatgaggatgccactgtggctcagtgatggcgccgagacacaggtgaacactgtaaaatgtggatgcctggaggcagcccacaccctgggccttggctgggggaaaggttccagaaacgtcatcacaacgatgcatttcatcagaactgagcacatgaatggggaggggcaggacttcctgaatgtcccaaccccactgtcccaccctctgtgtcaatatgaggctgccttataaagcaccaagaggctgccagtgggacattttctcggccctgccagcccccaggaggaaggtgggtctgaatctagcaccatgacggaactagagacagccatgggcatgatcatagacgtcttttcccgatattcgggcagcgagggcagcacgcagaccctgaccaagggggagctcaaggtgctgatggagaaggagctaccaggcttcctgcagagtggaaaagacaaggatgccgtggataaattgctcaaggacctggacgccaatggagatgcccaggtggacttcagtgagttcatcgtgttcgtggctgcaatcacgtctgcctgtcacaagtactttgagaaggcaggactcaaatgatgccctggagatgtcacagattcctggcagagccatggtcccaggcttcccaaaagtgtttgttggcaattattcccctaggctgagcctgctcatgtacctctgattaataaatgcttatgaaatgagaaaaaaaaaaaaaaaa

SEQ ID NO: 391153 - DNA, 1000 bp, Homo Sapiens; identical to SEQ ID NO: 281969

SEQ ID NO: 391154 - DNA, 1000 bp, Homo Sapiens
gctgaggtaagccacaccatacgcgtgagccaccatgcccggccctacccttagtcttgatatatcagaaaagcactgtttgatgtgcttcagtgtaaaccattgtggttcggtgaattctggcaggtcatctggaggtttctttggagagcttctatcctactggaaacccaggttgggccccatgtggattgatcggcagtgggaatcagctagggctgctgtaactgagttcgcagacccagtggcatagacagcaaagaggtactgccacgtggctttggagaccagaagtctgagaggaaggtgctggcagggctggttccttctgaggctgcaatggaaaacctgtcctggcctctctcctggcatctgctggttatctttggtgttccctgtagacagctgccccctccctgtatcttcatgtcgtcttccttctctgtgtccttctcttcacgtagtctttttaggacgctggtcgtgttgccttagggcccccatgtcagtgccgtcatctagactgatgatgcccgcagtgatcctgtctccagataaggtcatgtcctgaggtgttctgggttaggactttgacgtttgaatggtggggggtggtggacacaattcagcccctgacagcagcttttctctcccctccctgacgctgtcgcagctgcagtgacatgtacgagaaagtgctgtgcaccagctgtgccatgttcgagacctgaggctggctcaagccggctgccttcaccgggagccacgccgtgcatggcagccttccctggacgagcgctcggtgttcacactgaactgtggggtcgacgggaggggtgccttttacatgttctattttgtatcctaatgacagaatgaataaacctctttatatttgcacaagaggactcttgtctgtcagcacttctgagggtggagtttgtgaccctccacctgggagggccaaaggagcagtcagtgggcggggcctgctgcacct

SEQ ID NO: 391155 - DNA, 1000 bp, Homo Sapiens; identical to SEQ ID NO: 114838

SEQ ID NO: 391156 - DNA, 1000 bp, Homo Sapiens
atggatgagttggtgggtggatggttgggagggtggatgctaggtgggtggatagatgagtggattgaaggatggatagatgtttgggtggatggtagaagcatgggtggatagatggaggggtgggtgggtaggtgggtggatggatgagtggatggacgggtggatagatggttgggtggagggtggatggatgggtggatagatggatgagtggatgggtggatggttgggtgggtggatggatgagtggattgatggatgggtagatggttgggtggatggtggaaggatgggtggatagatggatgggtgggtgggtgggtgggtggatggatgagtggatggacgggtggatagatggctgggtggagggtggatggacgggtggatagatggttgggtggagggtggatgggcgggtggatagatggatgggtgggtggttgggtgggtgggtagatggatgagtgtatggacgggtggatagatggttgggtggagggtggaaggatgggtggatagatggatgggtgggtgggtgggtggatggatgagtggatggacgggtggatagatagttgggtggagggtggatgggcgggtggatagatggatgggtgggtggttgggtgggtgggtggatggatgaatggatggacgggtggaaagatggttggtggagggtggatggacgggtgggtagatggttgggtggagggtggatggatagatggtgggtgagtgggcaggtggatgggagaatggagtcaggcaggtgtgtcaggtgtgcgggcaaactgttgggtgcctgtgaaggatactgccgatttgccacagtccccattcacctctcacctcctgacacctaggccagctgcctctgtggccatgtgtgcccagggcctctgtcatcctgacccacttcactcattcagttctcccagccccagtgggcactgcagtggcggcccctcctccgtgtcccttggatttgatc

SEQ ID NO: 391157 - DNA, 1000 bp, Homo Sapiens
cagtgggtaggatctcagctcattggaacctctgccctccagggctcaagcaatcctcccacctcagcctcctgagtacgctgggaccaagggccacaggtgcatgacaccatgcccagctaatttttttgtatttttggtagagacagggtcttgccatactgcccaggctggtctcaaactcagttcagaaatccacctggcctcccaaagagctgggataatgggtgtgagccactgcacctggtgctgttttcatcacaaacaactcattctttttttaaatcaaaccctacatgagacagtggaacgaatgatgttgtgaagcagtttatagtaatgcccaagttaaaataaaatatatacaccacctacaagattcccccaaatgcccataaaattactaagttcaacctaccttttccacatgaattctcctgttcacctacagggtgtcttctttttggaggaaaagcagccaccatttccaggtttgatataagcttcatggactgtttcttcctccttctccggcaaggtgggcattaactaccagccccccacggtggtccctgggggagacctggccaaggtgcagcgggctgtgtgcatgctgagcaacaccacggccatcgcggaggcctgggctcgcctggaccataagttcgatctcatgtatgccaagcgggcctttgtgcactggtacgtgggagaaggcatggaggagggggagttctctgaggcccgcgaggacctggcagctctggagaaggattatgaagaggtgggcgtggattccgtggaagccgaggctgaagaaggtgaagaatactgaggggagggtgtggtgggttctccactccactgccacccccagcgtggctgctttcacgttctttgcaattaaaggttctgtataaaaccaagacctctgtgtatcgcactgcctagctttgcctgcaggagcaggtggcacccccagagcctgcatggacaagtg

SEQ ID NO: 391158 - DNA, 1000 bp, Homo Sapiens; identical to SEQ ID NO: 281971

SEQ ID NO: 391159 - DNA, 1000 bp, Homo Sapiens; identical to SEQ ID NO: 195188

SEQ ID NO: 391160 - DNA, 1000 bp, Homo Sapiens; identical to SEQ ID NO: 207005

SEQ ID NO: 391161 - DNA, 1000 bp, Homo Sapiens; identical to SEQ ID NO: 114839

SEQ ID NO: 391162 - DNA, 1000 bp, Homo Sapiens; identical to SEQ ID NO: 114840

SEQ ID NO: 391163 - DNA, 1000 bp, Homo Sapiens
cgtgagagaaactgaaaactcatcacagagcagaatcccttttccctttcaatcagctgcgtctgtaatagaagtaaaagttgtttttttttttttttttccagtagggaatggggatggaggtttggaaggacccacaaaagaggagtgtgatgaatgctttgtattctagtactagcctacctgtcaccagttctttttatgtcttcatttgtcaagtttctgcttttacacggtagtttaagttataaataatcagggatttctaccacagggttttaacattcttgaaatgtggacaaacttgggagtgagtgctcccgcgcttagtaatggaatacagcctcccacctctatttcagcttcagttcttaggctaggctgcttttctggcagctgtctggcctgagtaatgatggttgtggtttccctgaagttcccagcggagagtcatcccatgatagaaactgccttgcgcttctcactcacgctctcagcccggggaatcccagcggggaggagggagggaggtcgttttcttcagctccccaggtggtctgtgctgggtgtgctgacggtccttttgggaaaacaggtccacctttgccagcgtaattcagaaagagatgtaattttctgagagcacacacctgggcaggagatcgcttgaagtgagaaattcgtagtggtaaatgtatttgtagcaaagtaccactgcatatcctgcttgagaggatgaaatttgattatttagtaagttttcatgaacaactccacttcagtgtggggattacgcagatgagcaagagcgtggctctgtcacacagtcccgttgggaaagcctgcaactcattaagaatccgatgagtgccatttagaaatgtggacagggtactggagcttcctcattgtggggagatggcagaagcggaggtgctttactaaagcaccggtggcttttgaggtgtttcttgtgtttttttcagaactacttctgcag

SEQ ID NO: 391164 - DNA, 1000 bp, Homo Sapiens
tatttttttttttttactgtttattaataataatagccattctgactggtacgagatggtatctcattgtggttttgatttgcatttctctaatgatcaatgatagtgacctttttttcatatacttgttggccacatgtatgtcttcttttgaaaagtatctgttcatgcccttgcccactttttaatgggactgttttttgcttcaaatttttttaagttcctcatagatgctggatattatatctttgtcagatatatagtttgcaaatgttttctcccattctgtaggctgtctgtttactctgttgatagtttcttttgctgtgcagaagctcttaagtttaattagataccgtttttcaattttttgcttttgtcgcaattgcttttggcatctttgtcatgaaatatatatttgcctattcctacgtccagaatggtattgcctgggttattttccaaggtttttatagcttcaagttttacatttaagtcattaatgcatcttgagctgatttttgtatatggtataaggagggggtccagtttcaatctggatgtggctagccagttatctcagcaccgtttattgaataactggggagtcttttcaccattgcttgtttttgtcagctttgtttgaagatcagatggttttaggtatatagccttatttctgagctctctattctgtttcattggtttatgtgcctgtttttgtaccagtaccatgctgttttgattactgtagctctgttgtatagcttgaagtcagttaacatgatgcctccagctttgtacttttgcttaggattgtcttggctatttggactcttttttggttccatatgaattttaaaattattttttgtacttctgtgaaaaacatcattgttagtttgataggaatagcattgaatctgtaaattgctttggatagtattgccattttaataatattgattcttcccatcccttagcatggaatgttttccca

SEQ ID NO: 391165 - DNA, 1000 bp, Homo Sapiens; identical to SEQ ID NO: 114841

SEQ ID NO: 391166 - DNA, 1000 bp, Homo Sapiens; identical to SEQ ID NO: 281977

SEQ ID NO: 391167 - DNA, 1000 bp, Homo Sapiens
cccagctttgtgtgttctgaagtggagasstgacgctggcagaagaaacccaggcggggccctacctcctcttctctgtgggtgaccagcgtcctaagggccggtggctagttcagtcctgggttcgccccttgtgcccttagctcattggcttgagggaccaggcaggcaggaaggagggattccatacttctggttgaggggatgaacctggagacaaggatttgaggattgaaagctttgcagtcccctgggtcagacacatcaagaccctccctttgtctcccccaacatccaaagtgtggggcttacaggttccaacagagaagactgccctgagggacagcatctgtggtcacggcctggactttctgggcagaagcaggtggggtcaggtgcagggagacaggcaattgtccaggagaagtgagaggccctccggcctgggactaacaaaggtcctcccatcctgtgtccacatcctgttccttccacacgtgcctcccataccagggccagccagccacggcagtttgaaggggccatgttgaagagtgatattttgaagtgacttgaactgaaagagaaaatgtttaaattggagggtgtgagctgcaggtgtacaggccagcttcagctggtggaaggaaacgttgctcacgaggtatttttttaaattttatttttttgagacaaggtctcgctctgtcacccaggctgcagtgcagtgccatgatcttggctccctgaatccttgacttcctgggctcaagcgatcctcccacctcggcctcctgagtagctgggactacaggcgcgtgccaccatgcctggctaatttttgtatttttgttgttgagacggggtttcaccatgttgcctgggctggtcttgaactcctgagcttaagcgatcctcccatcttggcttcacaaagtcttgggattacagacatgagccaccacgcctggccgaggtattttttcacagctctgaattc

SEQ ID NO: 391168 - DNA, 1000 bp, Homo Sapiens
cctggaggccggtggttggggcttctccgcgtcggggatggggccggtaccctagcccgtttccagcgcctcagtcggttccccatgccctcagaggtggcccggggcaagcgcgccgccctcttcttcgctgcggtggccatcgtgctggggctaccgctctggtggaagaccacggagacctaccgggcctcgttgccttactcccagatcagtggcctgaatgcccttcaggtgagactgctgtgcgggagggtcgggggacagcccccccggcaaggtggagactcagtgacggccctgatgctccttcctgtagctccgcctcatggtgcctgtcactgtcgtgtttacgcgggagtcagtgcccctggacgaccaggagaagctgcccttaccgttgtgcatgaaagagagattcctctgaaatgtgagttactggggatcagggctgcttttcgcctctgagctcagttcagagctgagttgggtgggaggagcgggggtgtaccataaacgcagttaaaaacttactgttgaaagacctctgaatgaacagtgtgtttggtcagaaaaaaaactactttcaattcacagtcactaaatagcaattttactcgtaagacaggctacctaatcggaagcagttgatgcccatcagggtataggggaagaggtgggatatagtggaaagaacacagagtttgaaattaaattggatttgcatataggccctatttagtttgtttgtttatttatttattatattttgagacgacttcgctctgtcgcccaggctggagtgcagtggcgccatcttggctcactgcaacctctgcctcctgggttcaagcgattcttctgcaccagccacccgagtagctgggattacaggcgcgcgacactacgcccagctaatttttgtatttttagtagagacggggttatgccatgttggccatgctgctctcgaactcctgacttcaggtgatccgcatgc

SEQ ID NO: 391169 - DNA, 1000 bp, Homo Sapiens
ttctagtataaccggagagcacccaggaaagggtcctaaaggacctgatgggaccaatgggaatgtggttggatattcacagtctgttttctcttctcacctgtccagggtccccctcccccagcgaccctgattatggcctccctcccctagcaggacactctctctcatggactgatgaaaaacaactcaaggaacaaaatattatccgaacagccaaagtctggaccccagaggaccccagaaaactcaacagcaaatcttccttcaacaacatagaaaacgaaccaccatttgagtttgtgtcctgagaagtcccagactcggctgaagatctgattatgtctctgtgcatattgtacatgtaaatatctataatgtaaatgtaatttaagaatcaaatttttcgaatggcaatcaactgtttattatttatctatttattatcctgttgagttgatgaaatagatgatttctttttaaatatataatttatataacttatcctgattttctgaaaatatgcaatagcctatgattttcctgaactctgtgttgttgggagaactctggccagaaaacgtcctgcttatttattgccagatatggtttatttctaagcgttgtcaataaatgctatttacaccttttcctgaaggtttttgagtacatgatttgatagatactctttaaaaagaattaacttagtaaaaattaaccaaaccagagactcaaagtgtagctttttagtaagaaactacatttcagacttagcctaaaggtgggtaggttagaggattagacctcaactttctatgacagcacttcatctaggtcgcctgccctacacagcaacttttgtctgtattttgggccaccttccaaacaccctatgcaaatacatcctggagtatttattgttcccattttgcagatggtaaagttaaggctcagagatgacatttgacttacccaaggtcacccctacgttgtctattcc

SEQ ID NO: 391170 - DNA, 1000 bp, Homo Sapiens
agtaagccctgcccgcggggttgcgcactgcactgcgcccttcgccttcaccctggggagagcgcgggctggggaggtgtgatggctttccagctggtggccacagagtgtccagagggaactaggccctcttaaaaaagaacttttaggccgagtgcaatggcttatgcctgtaatcccagcactttgggaggccgaggcaggaggatcgcttgagcccaggacttcgagaccagcttgggcaacttagcgagaccctatctctataaaaaattagccaggtgtggtggtacgtgcctgtggtcccagctgttcgggagactgagaagggaggatgacttgagcccaggaggtggaggctacagtgagccgtgatcatgccaacacactccaggcctgggtgacggagtaagaccctgtctctaaataaatacaataaaaaagaactttttattttagaattttagatttacaggccaggtgcagtgggtcacgcctgtaaccccagcactttgggaggccaaggtgggcagatcatttgaggccaggggttcaagaccagtctggccaacatagtgaaaccctgtctctactaaaaatataaaaaattagctgagcacagtggcgcacgcctgtaatcccggctacttgggaggctgagtcaggagaatcacttgaacctgggagggaaagttacagtgaactaagattgcaccactgtattccagccttggtgacagagtgagactctgtctcaaaaaaaaaaaaaatgtttagacttacaggaaagttgcaaagatagtagtgttcctttacacatggtacccagcttcaccgaaggttcacatcttacgctgctgtgtacattggttgtagctaaggaaccagcacgggtacatcactattagctaaacgccactgttcctttggctttgccagttttcctctaatgtcccttttctgttccagctcgccccccaggataccacatgaggtttag

SEQ ID NO: 391171 - DNA, 1000 bp, Homo Sapiens; identical to SEQ ID NO: 281978

SEQ ID NO: 391172 - DNA, 1000 bp, Homo Sapiens
tcgacctgtgtggggccacactgctgtggcgcacaccggcggggctgctgcgggctcccacactgaagcaactggaggcccagcggcaggaggcaaatgcagcgcggccccagtgccccgtgggcctcagcactctggccttccccagcccagcccgtggccgcacagcgcccgacaaacagcagccctgggtctacgtccgctgcgggcacgtccatggctaccacggctggggctgccggcgggagcggggcccccaggagcgcgaatgtcctctctgccgccttgtggggccttatgtgcctctatggcttggccaggaggccggcctctgcctggaccctgggccgcctagccatgcctttgcaccttgcggccacgtctgctctgagaagactgcccgctactgggcccagacaccactgccccacggcacccatgctttccatgccgcctgccccttttgcggggcctggcttaccggcgagcatggctgcgtccgcctcattttccagggcccgctggattaggctccctggggccccctgctgctgtgcccacctgcccacccaggtccccacctcctgcagcccagagggagctctgcatgtgggacactccctgctggcacagccacaccagatggacatgttggatgggctgtgcccttccccccaactgtggccccccaaggaggtccccaagatctccaccccagtcatgctgatggggccttcagcaccagctctgtcctgggtcgatggaggaaagcccagccccatggccttgcccttcctggggcatcccacatcgtgccgccgacactgtgtgcccctgggggagtgaaggggccaggggcctttgacccccagcttaggctggctatgccctgagcctgccaacccagtttcagacactcatccttcatccttcctgctgccgccctgggttcctctataaacctcgctgctcagctgcccccacgaaaaaaaaaaaaaaa

SEQ ID NO: 391173 - DNA, 1000 bp, Homo Sapiens
tgatgcatccgtctcctcatgcccttggactgggatttacactgccactaccctggttctcaggcctttggacttaggatggaaacacaaccccagctttcctgagtctccagcttgaagacagcagcaggtcatggtacttcagagcctccataattgcatgagtgagttcttcctgtatacatgtccttctggttctgtttctccgagaggtctggctgatacatacctgaccaaatattgcttttacaatgagaaaaagattggtaactattatttttaatcagtaaatggtatgcaccaaacctggccggtctgccttcaggggggcctctctgtagcattttctcagacataagtacaacttttgagagtgtaacatgccaggctctgtgcccaacatttggcacatatagccttacctgatcttcacaacgctgtccattttaggaagctcacattcagaaacgtttattctgtcacttacccagggtacacagtatgctccccaaaagtatattatggaaacacatggccattgatttgtgatgatatttaagagtttggtatagaggtcctgagcccggagtgctatgggcacaactcatgacctatgtgaatggtgcctcctggacttgtgcagggcaccagcttcaagggactctgctgactcccagcagtacctgggggaattgtcagcaatcctaaaagcaagctcagcctgcaaggctgcctaccccggacagatgatgccccctccaattgagccatgatcccatagagccgtagaaaatgggtcacctcctgcaggaagccaccagggtgcttgcatggctgggaactcttttttctctaactgtcccagaccatctgctgctttcctccctgcttccaaaaaaaaaaaaaaaaaaaaaaaaaaaaaaagtcattctctaaatttttatggtgggcaaagttatcagttttcagtaagcccattccttagctcccctatttgatc

SEQ ID NO: 391174 - DNA, 1000 bp, Homo Sapiens
tgagctagaagtcattcatctaatagaagaacatagattagttagagaacatcttttaacaaatcacttaaagtctaaagaggtatggaaggctttgttacaagaaatgccgcttactgcattactaaggaatctaggaaagatgactgctaattcagtacttgaaccaggaaattcagaagtatctttagtatgtgaaaaactgtgtaatgaaaaactattaaaaaaggctcgtatacatccatttcatattttgatcgcattagaaacttacaagacaggtcatggtctcagagggaaactgaagtggcgccctgatgaagaaattttgaaagcattggatgctgctttttataaaacatttaagacagttgaaccaactggaaaacgtttcttactagctgttgatgtcagtgcttctatgaaccaaagagttttgggtagtatactcaacgctagtacagttgctgcagcaatgtgcatggttgtcacacgaacagaaaaagattcttatgtagttgctttttccgatgaaatggtaccatgtccagtgactacagatatgaccttacaacaggttttaatggctatgagtcagatcccagcaggtggaactgattgctctcttccaatgatctgggctcagaagacaaacacacctgctgatgtcttcattgtattcactgataatgagacctttgctggaggtgtccatcctgctattgctctgagggagtatcgaaagaaaatggatattccagctaaattgattgtttgtggaatgacatcaaatggtttcaccattgcagacccagatgatagagacactgtaaaatagttttgctttgttgaataatacgtgtgtacctaaaagagccttgcaaaataccctactaaataaatcattttagacatggagtgcaggtggacactgtgtgaactgtttttggtcagttattgtagaaattgatagatgtaccaaataaactctatgcacatt

SEQ ID NO: 391175 - DNA, 1000 bp, Homo Sapiens
gcctccccaggcccctcctgcctcgggcaggccccagccctcctccttacccaacctcccatccagaaccttgctgccagggcctcccagctcgctcctgcggccaaaggccagctgtcaggtgctatgcggggtcaccagcagagtgcccgctggcaggtgggggcttccccgcttccggggtctgccccaggactcctgggtggacctcccccccccacctccgctgactcctgcaggcactggggagctctgctggaattgggggttttaaaacttcattagcagatttgtgctcttccatactgtttgtttgtttgttaggtgaaatacagtgtggtgagctgcactggtgacaacagcccttacctggctggggaggtgtctccagcagagctcactcccgcctacagccactcacaccccggggacaggaagctgtagagttggcgggccaggagggcagttgagagctggccagcggagggtgcagggaagcccagctgtgctcaactctcctgcctccgccttccaccctgggcccagggacagacagacattgccctcagaagggcagggaggaggctgtcctggagaggcctgtaggtccattcttcacccgtccctaccaggccaactcggcctgcaggaagggagacctgcagggcgctacccctgcgcccccacacacagtagggccagaacaccatcccctccaccggggtgtgccgaggacagtggggaggagaggagaggggcagcttcctcctggccccaggaagggctggcatcgggttcctggcacagcccctcctgtccaggactttatcatcggcagacctcagaagacaacacacaaaggtttcttttgtcttagcttcatttctcttaaaaaacaaggaacaagaaaacattgcaccagcgttctaagcctcaaacaaaacacaaaacaaatccccctgcgaagcaacaataaactttacatctctttggcaacaat

SEQ ID NO: 391176 - DNA, 655 bp, Homo Sapiens
aacttgaaacagaatgtgtattatccttggttgtgtttccttggccctgcagcaggatgaagctctcctctggcatcattttctgctccctggtcctgggtgtcagcagccaaggatggttaacattcctcaaggcagctggccaagggactaaagacatgtggaaagcctactctgacatgaaagaagccaattacaaaaaattcagacaaatacttccatgcttgggggaactatgatgctgtacaaagggggcttggggctgtctgggctacagaagtgatcaggtaatgcacattcctgatgttgccaggaatgagtgagcagagcttgactgccttggacagtcaggagagagcgatgccagagagaacgtccagagactcacaggagaccatgcagaggattcgctggctggccaggctaccaacaaatggggccagagtggcaaagaccccaatcacttccgacctgctggcctgccagagaaatactgagcttccttttcaatctgctctcaggagacctggctgtgagcccctgagggcagggacatttgttgacctacagttactgaattctatatccctagtacttgatatagaacacataaaaatgcttaataaatgcttgtgaaatccaaaaaaaaaaaaaa

SEQ ID NO: 391177 - DNA, 1000 bp, Homo Sapiens; identical to SEQ ID NO: 281981

SEQ ID NO: 391178 - DNA, 1000 bp, Homo Sapiens; identical to SEQ ID NO: 281982

SEQ ID NO: 391179 - DNA, 1000 bp, Homo Sapiens; identical to SEQ ID NO: 281983

SEQ ID NO: 391180 - DNA, 1000 bp, Homo Sapiens
gcattgcttcacactgcccagccccagaggctgaaggcctcagagcccacacctgcccagctacaactggcaggcaggaggggctcactggtttcttttggtttatttaagacagagtttcactctgtcacccaggctggagtgtggtggcacgatcttggctcactgcaacctttacctcccaggttcaagcgattctcgtgcctcagcctcccaagtagctgggactacaggtgtgtgccgccacactcagctaatttttgtatttttagtagagacggggttttgccacgttggccaggctggtctggaactcctgacctcaagtgatccacccacctcggccgtccaaagtgctgggattacaggcatgaaccactgtgctcggccatgagagcatgtgtaggactccacagcttcagggcaccccagccctctttttgcggtgaggagctgacctccagagagtggaactagtagcattgttctaagtgcctgccacaggcatctgggagatggtccctgtttccatggagctcatagtgggggagagggcagttagaatacagcatgatggccggatgtagtggcccatgcctggaatcccagcactttgagaggctgaggcaggcagatcgcttgagtccaggagttcgagtccagcctgggcaatgtagtgaaaccccatctctacaaaaaatacaaaaattaggcaggtgtggtggcatgtgcctgtagtcccagctacttgggggtggtggcactgagctgggatgggaggatcccttgagcccaagaggtggaggctgtggtgagctgagattgcatcactgcactccagcctaggtgacagaatgagaccctgtctgaaaaaaaaaaaaaaaaaaaaaaaaaaaaaggaatacagctctgatgggcaggaggcatggcgggtcactgaggcgatgcaggtgatccagctgtttctgtggagctgcccctccgtgtttctgtggagctg

SEQ ID NO: 391181 - DNA, 1000 bp, Homo Sapiens
tgaggcctatggtgaaaaaggaaatatcttctcataaaaaccagaaagaagcattctcagaaacttctttgtgttgtgtgtactcaagtaacagtgttgaaccttccttttgacagagcagttttgaaacactcttttggtagaatctgcaagtggatatttggatagctttgaggatttcgttggaaacgggttatcttcatataaaatccagacaggagcattctcagaaacttctttgtgctgtatgtcctcaattcacagagctgaacctttgtttggatacagcattttggagacattcctttagtagaatctgcaagttgatatttagatagctttgaagatttcgttggaaacgggaatatcttcatagaaaatctagacggaagcattctcagaaactgctttgtgatgtttgcattcaagtcacagagttgaatattcccttttatagagtaggtttgaaacactctttcggcactacctggaagtggatatttcgagctctttgaggcctatggttaaaaggaaatatcttcccataaaaactagacagaagccgtctcagaaacttgtttgtgatgtgtgtattcaactaccagagttgaacatttctgttacagagcaattttaaaacactctttttgtggaatctgaaagtggataattggatagctttgtggatttcgttggaaacgggatgacgtataaaatctagagagaagcattctcaggaacttctttctgatgtttgcattcaagtcacagaattgaacattccttttcagagtgcaggtttgaaacactctttctgtagtatctggaagtggacatttcaagcgctttcaggcctacggggagaaaggaaatatcttcaaataaaaactagacagaaggattctcagaaacttatttgtgatgtgtgtcctaaacgaacacagttgaacctttgttttgatacagcattttggaaacactccttttgtaggatctgcag

SEQ ID NO: 391182 - DNA, 1000 bp, Homo Sapiens
ccttgttcagcatcagagaattcattctggggatgaagcttatatatgtaatgaatgtgggaaggctttcaggcacagatcggtccttatgcgccatcaaagagtccacactataaagtaatttgtgaatactgtgaatagtgtaaatacttcagtcagatttttaagtttgttagtcaaaagagtttactttggagcaaaactccataaaggttataaaatactaggtcttgagtctagcttgctttgtgcagcatttcccagtgctaatgtaaagtgtcccttgaaagcttttcctgtgactaatcagaacagaatacagaagaatcattacttccagctcttctcttattaggaatactcaggaaatacgaaaagtgggaatgtaacattgaaacctcattttgtatgaaagtgtcatgaatatagcaacccaggctctgtcactgcatctgattgttagtgtgccaggttatggggcttgtgtggactgtgtgaggcacttcgactcaggaactaaaaaaaaaaaaaaaactgacccaataaagaacagtgacagagcagcaggaaaggtggggaaatggcttcatcaatgatttgttgagcccagggcaggccaggaattagataggcatgagaagaaagaatataatttacccaaaggttattttttgagtacctactttgtcccaggaactaggaatacagtggaaaacaagactgtagtctctacagtctaatgggcaaggcagccagacaggcagtgaaagtggaatgctcctatgtgaccttaaggagcacctgactcagccttggataaggaaatgggggaaatggcctgaaggatgaggaggagttagccaaggtggtactctagggaagtggtaccccagtaaagaacagtagccaaaggccagaaacaaagtgtggagcattccttgagttcctgttgtagtgaggtcttgtctgtcagagaagtctgggtctggccagactctta

SEQ ID NO: 391183 - DNA, 1000 bp, Homo Sapiens; identical to SEQ ID NO: 206240

SEQ ID NO: 391184 - DNA, 1000 bp, Homo Sapiens; identical to SEQ ID NO: 114842

SEQ ID NO: 391185 - DNA, 1000 bp, Homo Sapiens; identical to SEQ ID NO: 281987

SEQ ID NO: 391186 - DNA, 1000 bp, Homo Sapiens; identical to SEQ ID NO: 281988

SEQ ID NO: 391187 - DNA, 1000 bp, Homo Sapiens; identical to SEQ ID NO: 281989

SEQ ID NO: 391188 - DNA, 1000 bp, Homo Sapiens
ttgtactgaactatctagtgatcacgttaacacctaactctccttctttcttccaggggccgggctagagcgacatcatggtattccccttactaaaaaaagtgtgtattaggaggagagagaggaaaaaaagaggaaagaaggaaaaaaaaaagaattaaaaaaaaaaaaaagaaaaacagaagatgaccttgatggaaaaaaaatattttttaaaaaaaagatatactgtggaaggggggagaatcccataactaactgctgaggagggacctgctttggggagtaggggaaggcccagggagtggggcagggggctgcttattcactctggggattcgccatggacacgtctcaactgcgcaagctgcttgcccatgtttccctgcccccttcacccccttgggcctgctcaagggtaggtgggcgtgggtggtaggagggttttttttacccagggctctggaaggacaccaaactgttctgcttgttaccttccctcccgtcttctcctcgcctttcacagtcccctcctgcctgctcctgtccagccaggtctaccacccaccccacccctctttctccggctccctgcccctccagattgcctggtgatctattttgtttccttttgtgtttctttttctgttttgagtgtctttctttgcaggtttctgtagccggaagatctccgttccgctcccagcggctccagtgtaaattccccttccccctggggaaatgcactaccttgttttggggggtttaggggtgtttttgtttttcagttgttttgtttttttgttttttttttttcctttgccttttttcccttttatttggagggaatgggaggaagtgggaacagggaggtgggaggtggattttgtttatttttttagctcatttccaggggtgggaatttttttttaatatgtgtcatgaataaagttgtttttgaaaataaaaaaaaaaaaaaaaaaaaaaaaaaaaaaaaaaa

SEQ ID NO: 391189 - DNA, 1000 bp, Homo Sapiens
tcctataatcccaacagtttgggaggctaaagcaggaggatcgcttgagtccaggagttagagaccagcctgggcagtgtagtgagaccgccatttctagaaaaaaattaaaaattagccgggcgtggtggcacacacctgtagtcccagtacacaggaggcgaggcgggaggatcactgagctcagaagtcgaggctgcagtgagctgtgattgctgcatccagcctgggcatcagagtgagacattgtttcaaaaaacgaaaacaaagtcacatagacacagaacacaaaaggggagagccccgcaaagatgggcacagaaacagagagagactgaaacacaggcagaagccagacagggaccttcggggacagagactcagagacacacagaaccagagacagggaagctgattgcagcagatgagactcaccaggcctgagagtcaccagaggcagaagggaggtgaagtcacccagaggctccgggagacacagggagaccccgagaggcagacagagaccccccacccagagatgcaggggcaccggccaggaggatagctggggcatggagggccggtgtcctcctggaaccccttctcgcccgcagtctggtggctctgacagctatcgtatcgccacctcgcaggacaagaaagatgacaaggactcacccaagaagaacaagggcaaggagcgccgggacctggatgacctcaagaaggaggtggctatggtaagcctcgccctctgcccgcacaccctcccagagaaccttccccagttcttggctggcctaggcactcaccgtctcccccaaactcctgttcctcagacagagcacaagatgtcagtggaagaggtctgccggaaatacaacacagactgtgtgcaggtgtggccaggctgtgggctgggacctgggaactagggaggaggagctgggggctaggacctgggttgagggaggaggggctgtggctggtgtcttaagtt

SEQ ID NO: 391190 - DNA, 1000 bp, Homo Sapiens; identical to SEQ ID NO: 281991

SEQ ID NO: 391191 - DNA, 1000 bp, Homo Sapiens
gaacggctgcgtggtgaagcgctacggacccatggaggagcccctggtaggtcctctctagggagcccgcttgaggctcgggggcttgggaggtagctgccctaacccagctttcctccccgacaggtgatagagaaggacctgccccactatttctagctccacaagtgtgtggccccgcccgagcccctgcccacgcccttggagccttccaccggcactcatgacggcctgcctgcaaacctgctggtggggcagacccgaaaatccagcgtgcaccccgccggaggaaggtcccatggcctgctgggcttggctcggcgcccccacccctggctaccttgtgggaataaacagacaaattagcctgctggatctttctgcgtaggggcttggggggcccttttgccaggggcccctccatgtcagggccagttgccgtcagctgccaggctgggggtgccatggaggtggcgtgttgttgccccctcttcctccaggctcggggggctgtgctggctgcagtgctggggtgcagtgagatctgggcccgttggacacccagccctggctcttaatccgtgcagccccacctgctgtgcacaggcagggcctggtgtagtgccgagtcttggaggagataattctaagtggctgtgcttcctggccccgggccttaactgttaggaggtggctactggggcctcccctggccaggaagcagaagtgcagaggcccgaggaacagcgtggccctggtgctggggatgggttgggcacccacaccggcccttggggcctcacctggctggggggtgtgggggtggctgggtggttactgtttgcacagagtccctccgtgagggctggggatggacaggccaggaggggctggtagagcagtaccagccaccgttcatgggacccgggggctgtctggacacggcctggctgcccacctgcacagctagagggactgcagcctgccagggtggctgatc

SEQ ID NO: 391192 - DNA, 1000 bp, Homo Sapiens
acgccctgcacagggagctcagggcttcctggcctccgtttcccagcggactcgcctgcggtgtggttaggcggctggagggaggtggaggaacggcattccaggtgggaggctgcaggagtgtgggttgcaggggcgcaggggtagacccagaggggttcacggtggggggcatgggaaggtggaaaggggctgcggaccgagccgcgacacgaatgccggtggaccctgcagctgaccgcccacgggtgaggctggaagtcagttaacattttactgggtttgcttctgccctttgcatgtggaatgggtgtgccccaccgctgcccgtcccaccccaaccctgaacatcaggcttcccgtggggcccagccacggaacattccaggcctggagcggccatctcatttgcatgccgcaaggttgtggctcaggcggcttctcctgggggcctggtggtcccaggcagggggccgggctggggactgctccgccgaaccacgtcccagatccaggccacaaaggcggacacctgcgtgtacacgtcgggggtcttggggtcgccgcaccagaggcccgagaaggaaacgaggccgtgagcccggttcctgcacaccaggggccctccggagtcggcctggagtgaaaggagaggtgaggtcagggcctctgggagctgctgcaggcacatctcaccacggccctccctgcctcagaaccctctgtggctccctactgctctccaaggaaaaagtaaattcatttctcccctccaggccctgaggacccagcccccacccacttctctgccctccccgctgagcctcctcagtgctccacggcctttgtatagcctggagacctgttcctgccctgcgctggatgctgcctgtgtgaacattcgagtctgcagtgttttgggcagtgcacaacctacacagctgtacgcggcagccctctactaacaggtctctctgccttgcgtgtgtttcctcagatc

SEQ ID NO: 391193 - DNA, 298 bp, Homo Sapiens
acagcaagtgacgctgagatgctcccctaggtctggagacctctctgtgtactggtaccaacagagcctggaccagggcctccagttcctcattcagtattataatggagaagagagagcaaaaggaaacattcttgaacgattctccgcacaacagttccctgacttgcactctgaactaaacctgagctctctggagctgggggactcagctttgtatttctgtgccagcagcccgaggacagtgacggacaccggggagctgttttttggagaaggctctaggctgaccgtacta

SEQ ID NO: 391194 - DNA, 1000 bp, Homo Sapiens
gggtccaggaccaccaactttgctgggatcctgtccctgggtctttggatagccctgcctgaagcacctgtgatgggctacatgtttggtaaagtgatctatttcgctgatcttgtctccaagagtgccaacgactgccatacatcttaggaagacccaatagggttaatcctgtcggaagaagttgcccttggaaacgtgtgtgaactgaagcatgcttcacatatcagcaagttacccaagggcaagcacagtgtcaaaggtttgggcaaaactactcctgacctttcagctagtatcccactggatggtgtagaggttcctcttgggaccagggtttcatctggtgtgaatgacacctgtctactgtataatgagtacattgtctatgatattgctcaggtaaatctgaaatatctgctgaaactgaaattcaattttaagacctccttgtggtaattgggagaggtggctgagtcacacacggtgactctggtattaattcaccctaagcgcttctgcaccaactcacctggctggctaagttgctggtgggtagtacctgtactaaacctcctcagaaaggattttgcagaaatgcattaaaagctttttcccaaattttttagtctcttgttttgtgttgtgtttgtggggaggggttgtttttgttttttcttgccaggtagataaaactgacaagctggagagagattctgtttgcatggattagtcctctggaaaaaaccaagctgtgctacaatatctgccttagtggtttccccagggaagaaaaaatatgtttccaccctttttttttgtttgtttgtctttagttttgattttggaaagatgttaagcatttatttttagttaaaaataaaaattgatttcatactaaaaaaaagatgggttattgaaaccctgtatgtcaccatacaatactccagttctcccagtaaagaaaccagatgggtcatacagattagtgcaaaatcta

SEQ ID NO: 391195 - DNA, 1000 bp, Homo Sapiens; identical to SEQ ID NO: 114843

SEQ ID NO: 391196 - DNA, 1000 bp, Homo Sapiens
gaaacgtactgtcatagattctgctaaaaaagtcgttccaacctgttgaatcaaaacataggttaaatgctgtgagataaatccacatataccaaagcattttcaaagatagcttgtttctaatttttatcacagaatatttggtttttcacagtaggcctcaatgggctcagaaatgtacctctgtagattctacaaaaagtgtttccaaccttgtgaatcaaaacacaggtgccattcagttagatgaatgcacacatcacaaaacattttcacatacagcttgtctctagtttttattgtgggatattagtttcttactataggtctcaaaaagctaagaaatttctatttgtagattctaaaaaatagtgtttccaatgtgttgaataaaaacaatggtttaactttgtgagatgaatctatacatcacaaagtattttcacagataggttgtttcaagtttttaccatgggataattgatttttcacaataggcctcaatgggctctgaaatgtcccttcgtagattctacaaaaagtgtgtttccaactgggtgaatcaaaatacaggttccatttggtgagatgaatccacacatcacaaacattccacacgtatcttgtttctagtttctatttcaggatatgtggtttttcactatacttctcaatgagctcagaaatgttttttcatagattctacagagagagtgtttccaacatgttgaatcaaaacaatggtttaactttgtgagataaacccacacatcacaaagcattttcacacatagctggtttccagcgtttgttcaagaaattcagtttttcactgtaggccacaatgggctcagatatgtctctttttagaccttttattttccacaaaaagagagtttccaacctgatgaatcaatacaaagattcatctctgtgagatgaatcacatttctcaaagcatttccatatttaggttgtttctagtttttaccacaggatc

SEQ ID NO: 391197 - DNA, 1000 bp, Homo Sapiens; identical to SEQ ID NO: 281993

SEQ ID NO: 391198 - DNA, 22 bp, Homo Sapiens
tcacagtgaaccggtctctttc

SEQ ID NO: 391199 - DNA, 21 bp, Homo Sapiens
tgtcagtttgtcaaatacccc

SEQ ID NO: 391200 - DNA, 1000 bp, Homo Sapiens; identical to SEQ ID NO: 114845

SEQ ID NO: 391201 - DNA, 1000 bp, Homo Sapiens; identical to SEQ ID NO: 200993

SEQ ID NO: 391202 - DNA, 1000 bp, Homo Sapiens
tcagaccctgtcctcatcattggcgcggggctgtcagcggccgacgcggtcctctacgcccgccactacaacatcccggtgatccatgccttccgccgggccgtggacgaccctggcctggtgttcaaccagctgcccaagatgctgtaccccgagtaccacaaggtgcaccagatgatgcgggagcagtccatcctgtcgcccagcccctatgagggttaccgcagcctccccaggcaccagctgctgtgcttcaaggaagactgccaggccgtgttccaggacctcgagggtgtcgagaaggtgtttggggtctccctggtgctggtcctcatcggctcccaccccgacctctccttcctgcctggggcaggggctgactttgcagtggatcccgaccagccgctgagcgccaagaggaaccccattgacgtggaccccttcacctaccagagcacccgccaggagggcctgtacgccatggggccgctggccggggacaacttcgtgaggtttgtgcaggggggcgccttggctgtggccagctccctgctaaggaaggagaccaggaagccaccctaacactcggccagacccgctggctcccaggccctgagaggacagagatgaccacatccctgctggatgcaggacccgtccaaagatgccccggggaggggtgtcagcccacgttgctggcctttggggtcaagaggagtagggatcccaggctgccctggacttagaccagtgtctgaggtggtaacagcggccgcaggccagggttggcctagacctgggatttgtggggaaagctgctggtgtgaccagctgagcacccagccaggagacctgcagccctgcgccttccagaagcaggtcccaaataaagccagtgcccacctgctctcatgcgtctgaggactctgtgctcggagggagctgcgttcccggaaccctgcactgggctggggggaagggaggaaaggggattgtggga

SEQ ID NO: 391203 - DNA, 1000 bp, Homo Sapiens
cagtctgactcctcaacccagcagcaatttgaggggatgagggggaagaggagctgccttttggaggcccccttcacctgcagctatgatgcccttccccttctcccctgtcctcaccatatgccttatccccattctactcccctgctatgcaagtgcccctgtggcttgtccccaaccccctcagcaacaaagctcagctggggaacgagagtaatttgaagaatgcttgaagtcagcgtcttccattccagaaagacccccattcttcctttgggggtatgatgtggaagctggtttcagcccaggacccaccactgaggagaggatctagacaggtgggcctaattccaaggggcccttcctggcctggagaaggccttttacacacacacaacacatacacacacacacacacacacatatcacagttttcacacagcccctgctgcattctctgtccatctgtctgtttctattaataaagatttgttgatctgttccatctttttgtgtgtctgagcagccggaaaaagcctctgacccctggggacctcaggaagatctctctcttgctgtgtgattcatggtagattttttttttttttttaagagatggggtctcctctgttgcccaggctggagtgcagtggcacagtgacatgatcatagctccctgcagccttgaactcatggtcccaaacaattttcctgccttagccttatgagtagctgggaccttatgagtagcaaatgccaccatgcctggttagctttttaaattttttttagaaatggggtcttgctatgttgccccggctgatctccagctcctggcctcaagtgatccttcctcagtctccagagtagctgagataacagaaacaagccaccatgcctgacaagacagtggcttttgactagtagggactatatacttgagtgtgccttagaatcacctaagacactctttgagtcagtaactcagactactgagctc

SEQ ID NO: 391204 - DNA, 1000 bp, Homo Sapiens; identical to SEQ ID NO: 114846

SEQ ID NO: 391205 - DNA, 1000 bp, Homo Sapiens; identical to SEQ ID NO: 114847

SEQ ID NO: 391206 - DNA, 1000 bp, Homo Sapiens; identical to SEQ ID NO: 204996

SEQ ID NO: 391207 - DNA, 1000 bp, Homo Sapiens; identical to SEQ ID NO: 195154

SEQ ID NO: 391208 - DNA, 1000 bp, Homo Sapiens
  misc_feature (855)..(855): n is a, c, g, or t
  misc_feature (915)..(915): n is a, c, g, or t
tgtttccttttgggcgcgggaagccagcaggtctcaaattccctgagagtgcagccaggtttttccaggacagaattccatgaaggcagctcctaggggagcttctgggagttctatgcagtggaagacactcctggccaggagtccggggccctgtgggaggccctggctgaatcaccacacctctctcgaccatacccacctgtaagggaacggagagggccagggccttggctttctttcacttaatctcagttcaggtgaggacgcccagtctggctgctccctctagcagcctgttcattcatggcagcccagctctctgcagggccctcaggtgcccaggaaggaaagctcctcccgcagccttgctctaggagcccagaacaggggagctggggcctccgtgtgccaaagcttggacatggatgacctcatctccttccttccttccagcctgaggtgactttttagagtccagggatagctttcctcaggcctgagccaagaggaggtgtcatttaacacaaggcagccagggagcctgaagggagttgaggacatttatttcacattcacacaactgtacattttctataaataatgtggggctgaaatatttacagtcatttcttgcccatacccaggctgtctctccctcctgacaccccgtgcctggagagacagcctgcagacagatgtgcaaacccagcttggtctttcctgccccctccctgatgctcaggcagagcagccagcggtccctgggactccactagcctcgaccactccatcctctgatgccgaaagcgtggcaggccacagggaattcgccgctccactgcagtcacagangctgtggcaggcagcagccaacactgcgggcctgggcagtactgcggcttgggaatgcanaagaagcaggaggtgcactcactcggctgccccaatctccttcctctctgtgcctctctgagaggtgagccaggtctcactctca

SEQ ID NO: 391209 - DNA, 1000 bp, Homo Sapiens
agatttgtagtagtctgtgaaactgaaaaatgtgagttttccaatgttctttttcaagactgttttgtctgtcagatcctttgaatttttgtatgattttagaatgagtttctttgtttctgcaaaaatgcctttgggattttgatggtattgcattgaatctgtagattactttagatggtattgtcatcttaacaatattgtcttacaacccgtgaacacagaatgtctttccacttatttccactctctttagttttttgcagcaatgttttgtgtataccaccatggttagatttatgcctgaataacgtattctttgatgtcattataaatggaatttttaaaatgttttcatagttctttacaactatatagaaatatagctcatttgcctatgtttgtttgcatcctgcctcctttattagttataatcggttttgtgttttgtttggagctttatacctataagatcatgtgtagatataattttacacctattttttatttctaatttagatgccttttatttctttgtcttgcctaattgctctggctagaactgccagtgctacgttgaatacaagtggcaaatgcaccatccttttcttctagatgttaggaaaacagctttcagtgtttcatcattgatcatgatattaactgttgggtttttgtacatcccattgtcatgttgcagaagatcccttctatgcctagtttatagagtatttttattatagaagggtgttgtatttcatcaatgttttctctgcagcaattgaaataatcacgtgcttattcattttactgttacagcatattacactgattgattttttatatgttgaaccacccatgcattttggggataaatctcaaagggtgatagtttacaatcctttgattatacagtattgctgctagtattttgctagtattgctagtattttgctgagatttttgcttatatattcataggggatatagtgctgtattt

SEQ ID NO: 391210 - DNA, 1000 bp, Homo Sapiens; identical to SEQ ID NO: 201476

SEQ ID NO: 391211 - DNA, 1000 bp, Homo Sapiens; identical to SEQ ID NO: 282007

SEQ ID NO: 391212 - DNA, 855 bp, Homo Sapiens
gcatacgcagatatatgattgaaaatcactttgtgacatctcatttgctgataatgaaatgccaatgactgttaccttgtataaaaaaccaaatatgcgtgttagaagtgctgtcattttactcaaaatacacagatttgaaagtttgtcactgtttctgttctcaattgtcctttctccacatctagctcaagactgcagtgcagatgacgacaacttccttgtgcccattgcggtgggagctgccttggcaggagtacttattctagtgttgctggcttattttattggtctcaagcaccatcatgctggatatgagcaattttagaatctgcaacctgattgattatataaaaatacatgcaaataacaagattttcttacctctcagttgttgaaacactttgcttcttaaaattgatatgttgaaactttaattcttttatcaatcccagcattttgagatcagtctttattaataaaacctgttctctttaatcagcttaaaatccaaagtgtcatatttactggtcctggagacaaacttgttcaaaagaacatcaacgtgcaatgttttaagggtctatcttaaccaagccctggccaaattttgacctaacttgaagtatccttgaacttattaacatggccattataagaataaaatatgtagttgtgtcttaatggaattaataaatgtcatttcactactggtgttctgtttcaatctataaggactatagtgatttaaactcatcaatgtgcctttgcataaagttcattaaataaatattgatgtggtataaatgcccatcagatatgcttaaacttggttttcagttgaatgaagtagag

SEQ ID NO: 391213 - DNA, 1000 bp, Homo Sapiens; identical to SEQ ID NO: 282009

SEQ ID NO: 391214 - DNA, 1000 bp, Homo Sapiens; identical to SEQ ID NO: 282010

SEQ ID NO: 391215 - DNA, 1000 bp, Homo Sapiens; identical to SEQ ID NO: 114849

SEQ ID NO: 391216 - DNA, 1000 bp, Homo Sapiens; identical to SEQ ID NO: 282012

SEQ ID NO: 391217 - DNA, 1000 bp, Homo Sapiens
tgggaccataactaagtccatgaagttgccacttaaaggtgaatagtggtttatgttctgcctcagtgaacaatgcatctcaagagccgaatagaccactatgattacattgcccatagtgtacaaacttttgttctccctggactacttaaccactacctttcttttgttgtgtgattagcctacatcaaagctttgggggtttttttgtttttgttttttttgagatgggagtctcaccatatcacccaagctggaatgcagtggtgtgatctcggctcaccgcaacctccgcctccagtgttcaagcaattctcctgcctcagcctccggagtagccgggactacaggtgtgtgctaccgcgccccgctaattttttgtatttttcagtagagatgggagtttcaccatgttggccaggctagtctcttaactcctgacctcaagcgatcctcccaccccggcctcccaaaagtgctgggattacagatgtgagccaccgtgcctggcagctttttcttttacaccttccattaaatcaattatctcacaatttgatgttcccaggatctctcccaaccgactccgctaatctggacgcatgggtggtgggtgtctggggaacctcccttcttcctctcctacacatcactgaccccccgccctcatctccccgcttctcccaagtctaccctcaaacaaaaagcagccatcacaggagagtaactttatactcagtacaaatgtttatttttgcaatgagaactgcacaaaaaaaaaaaaaaacctttcgtatgtaagtgaaaagtctacgaattcccttctacaaatgtctaaagtgtttaatacaagtctcagattcactgacataattattggccaagcgatccgtgcatacagtacagtgggggcttgtacacacctcttactctggtataggactaagatttctagtactgtgggaagggttgggaaatggctggagaaattaaatagatc

SEQ ID NO: 391218 - DNA, 437 bp, Homo Sapiens
  misc_feature (208)..(208): n is a, c, g, or t
  misc_feature (250)..(250): n is a, c, g, or t
  misc_feature (278)..(278): n is a, c, g, or t
  misc_feature (290)..(290): n is a, c, g, or t
  misc_feature (302)..(302): n is a, c, g, or t
  misc_feature (309)..(309): n is a, c, g, or t
  misc_feature (337)..(337): n is a, c, g, or t
  misc_feature (350)..(350): n is a, c, g, or t
  misc_feature (352)..(352): n is a, c, g, or t
  misc_feature (372)..(372): n is a, c, g, or t
  misc_feature (413)..(413): n is a, c, g, or t
gaattctttgcctagaccggtgtcaaagagagttttcactaggttttctcctagcatttatatagcttcaggttgttttttgtgttttcttttattttactttgttttgttttgctttgctttgttttgttttgttttgtttttgagacggagtctcgctctgtctcccaggctggagtgcagtggcgccatctcggctcactgcaanctacacctcctgggttcaagcgattctcctggctcaagactnccgagtagctgggactacaggcacgtgncacccacggccnggttaaatttcntgtaaantttaagtaggagacgggggttttcaccntggttaagccagngntaggcctcgatcggcctgancctcaaaggatccgcccggcttgggcttcccaaaagggctngggataaaaggcggtgagcaccca

SEQ ID NO: 391219 - DNA, 239 bp, Homo Sapiens
gatattctttttactgtcatcactttaagtatattttcaactttttataatgggcaatttcagacatacgcaataaatagcacatggtataatgaacctccacgtacccaccacccaacttcaacaattatccattgacattctatgcatgtacatgcacacacacacacacacacacacacacacacattcctatttttatacaaatgctagcatgctactcacactgtgcttttact

SEQ ID NO: 391220 - DNA, 1000 bp, Homo Sapiens; identical to SEQ ID NO: 282015

SEQ ID NO: 391221 - DNA, 1000 bp, Homo Sapiens; identical to SEQ ID NO: 282016

SEQ ID NO: 391222 - DNA, 1000 bp, Homo Sapiens
gggggcaggaggcctggtgggctgggccattgtggttgagagccgggcactggggtgtctgggggagcaattttcctggcggcggcagctctgggaagccgaacccagaggggctgttagaccatcaagcacctcctccctgcacgggtggacaccagtttacacagtgccgggatgcccagatggaaatttatggtgtgcagggaagaacttctcacccaggttccagccagccgggtgagagaacaatatttcccatcgaggagacgtgcaaaagctcttaacaaatcgatgggctgcatttagtcaataaaccacagtgctttccagggaggcaggagccctcctcccccagttgtccctggggcccctcaggcttcgccgagggtgggggtacggccgggcgggtggacgccaaggaagctggggagcctgggtcttatgtccccacccatagctcctggcctcagggcatcctcctgccctggggtgtgggaaggacagcggcttccccagcggcggacgcaggggcagcattgtcggtggtgccagatggaggtttggggctcacatcttgccttccagctggggagcccaggtgcagccacctcggcccccccagccctgccttcctggccacggtagcaacctctctggggtccccagcacagccgctccctgcttgcctgcacctccctccccagatccccgctgagattggccctgcccctccagcgctgggcacctctcactcctttccagggacccccaggccatggcacagtgtcgcctggggacacacgtggtgcgtgtggcttttcagctgctcaacactcacttctgaggcccccgcggcgtggcacggcctgggcgttggatgcagcagtgaacgggacccacgcagggactcagggtatgacgggcagaggggtaggtggggtgggggcaggtgaggcgggggtgcccagcggtcagggaggggctctcgggaggtgacatt

SEQ ID NO: 391223 - DNA, 1000 bp, Homo Sapiens; identical to SEQ ID NO: 195166

SEQ ID NO: 391224 - DNA, 1000 bp, Homo Sapiens; identical to SEQ ID NO: 282018

SEQ ID NO: 391225 - DNA, 1000 bp, Homo Sapiens
atactttgggtgcatttggaaaccagagaaaaaaatcacacacatgttgtcttgacttcccttatgcaaacaggtgtcgactatttcattgtaaactttctcagggtcatcagtgacttcaagcctggatcttacaaaatcacagagctcttcatttcccataacatcccagatactatcacatgcaaggataatgaagtgatcatcttcttcagatctttcagtgtcatggacttcaggctctggtgagacaagctgcccagtaggacctttcccatggatacatttgtaatcaaaatccccaagggctttggatacagccagagaggctttcacatgctaaagcattacagagccacctgcattctgaattcattctttttctagcggatttgcaatttgtgaagaaatgaactttcctgttcctacaaagtaaacgtctagagtcttcatagttaatgaaataattatgttggggagaaagtaagacgcttacatctgttgacccacttctatctgcaccatgtttcttctctgacataactctcgtgttcatcaatctccaggaaacctgttctgattccattctttacattttccaaagaaggtgctcctgcagaccctgtaaatcctggttatcggcgatgtgatctaacaaatgctcacagcagtatttggcaacctgagaaccaggatgcccgttatacacagcaaagaatgaccacctttcaagtccacttggcaaagcaatcacagccgtatgtgcatcctccatttcaatacgtcaaccttgcatgctgcgtagctcgtatcgcaactaattaccccacccccaggcattatgctcttccatctttgcttgtctaaagatggtcccattatgtcataatcctgtaggtctctattaaaagtcaaaaatcatcaacaaaaccaaaacaagtcaacaaccacaacaacaacaacaaaacaaggctgtggagagaaggcaatgcttatacac

SEQ ID NO: 391226 - DNA, 1000 bp, Homo Sapiens
attgataatctttatttactgttttaagttgcagagatgtgaatggtttacaaatctgaagctgaagttcaatctttggttttctgttgtaaatgccttttacaaacattgaattagctaccttaagtattgaagagcttccattgctaggtgagccctgctttgtcctcagtagagtgccggttccctgggctcatccaggggctgagagatggcgggacgctggggcagggcacactggcggagctgcttgctcagtagggaatgtcagttgttgcgctgggccatgagaaatccgccagaaaacgttaggtgagcagacatgccccccatgccagtgggctgctgtgagtgaggataaggtgtgtgttgggcatagaaaccctggctgcccgcccaccctgtggagacaagtgcagctcctccagctggagaggctgccctctctcctgcccacttccctcccttctccatgatttccatggagacctgtggctctgctcacccctggcatgcagaccgctctcccgtccagccctaagcctgctctgcggagggcggggtcattcttctcctggagatttcagtgggactcgtccccagtgggcacaacacagcccttggtgggaggggaaggccccagcctcctccacctcccactggaaagcagactgcttgggactgcccagctgtgaattgtatagtttctgtacttattagaactgggtaaattattttggttcaaatctattattccatcaattcagttagaattgaattttctaggtgattatgcagaatcttctgccagggcacgatgctgtcgtaagagatttctgttctctgtactgggcccccttgccctgttccttgagtgaagtgggggctgccctcacctgtcccccttgcctgtgaatcccttccttgtacatggtggtcagtggcacggaatccccaatagattgtatatctgaaggagaaaaataaacacttttgctcg

SEQ ID NO: 391227 - DNA, 930 bp, Homo Sapiens
ggcacgagggagagaactagtctcgagtttttttttttttttttttccttatcaattctgtattagaaatccatagattgtccaaattttggtaatctagggtttcagatttttttaatcataatatagacttggtttaatgctaattgcatgtgatctttcctgtacctagaaaatgaaaattgaattagaccaagttaagcaacaactaatggtaagtgaattttttttctagctgttaatttcagaacaaatattcgttacaagatcattttttaaatatctttgctttctttaaagcatgaaaccagtcgaatcagagcagataataaactggatatcaacttagaaaggagcagagtaacagatatggtaatgttcttttaaatgtactttcttggttacttactccttttttatttttagactttttttttaacttcctgctgcttcatatcctatagtttacagatcaagaaaagcaacttatggaaacaactacagaatttacaaaaaaggtaaagtaatatgtaaaaatgtctcttttgtacagttcttgtgccttgtataactgcttttatgtgtaccagtttataagtttagacttttaaaaactacccttgtagagtctctggcttcctcatagctattatagttaaccagcacttttggggaacctggcaccaggtagatggtcgcccatgagccatgaccttgaagtaagaatcaagatttccacatagtgtgcttttttaaactaaattacttctataatagaaaataactattttttgggccaggcacagtagctcacacctgttaatcctgcactttgggaggctgaggcaggagttcaagaccagtctgggcaacatagcaagaccctgtctcaaaaaaaaaaaaaaaaaaaaaaaaaaaaaaaaaaaaaaa

SEQ ID NO: 391228 - DNA, 1000 bp, Homo Sapiens
tgctagatgggataatgaatttaattttgtacttgttttgagatatctctggggcattcacgtaagcagtttgaaaaatgggtttaaagttcaagaaagatttcagttagatgtatatatgtaggtatgtgtgtgtgtatatatgtatgtgtgtgtgtatatatatatatatatacacatatatatacatatatgtatattctgcccaaggatattcaccctaagcagactggaatgcttgtgtttattggacagatcacatacaaaagacaactagccaaatttttgctcttttctatcttctctgtaggttctctgtcttcatttatactgttctttcttcagactcattacattgctgtacaattaggttagctttatctacatgtaacagttaggtgatatagttagatatattaatatacatgcttttccagttaccttaatgaacttaactgttactatatcttcttgccacccatttaccagctcttccttaaagtgggacattgtacaggtagttgattttaaatgttacatttgtatttatccttgtttcaccctcattgtaatcttaaacttgaggtttcagagaaaccttaatatcaaccattaaacacatttaggagatgcggcctaatgaataatgagatttagaggcagatgggattgtgggttaatgtcaagtgaaggtctggaacaacaaatgtggacattaagaagtgagtaaaagattactaagcagtaaaaaaaaccaattttaatttgaatccaggcatttgtagtaggctagttctagtagtttttggtctttcctgtggcaaatcacttatagtatagaagactacaaatgagggccaggtgtggtggctcacacctgtaatcccagcactttgggaggctgaggtgggcgaatcatgaggtcaggagattgagaccatcctggctaatacagtgaaaccctgcctctactaaaaatacaaaaaaaaaaaaaaaaaaa

SEQ ID NO: 391229 - DNA, 1000 bp, Homo Sapiens; identical to SEQ ID NO: 282021

SEQ ID NO: 391230 - DNA, 1000 bp, Homo Sapiens; identical to SEQ ID NO: 282022

SEQ ID NO: 391231 - DNA, 1000 bp, Homo Sapiens; identical to SEQ ID NO: 114850

SEQ ID NO: 391232 - DNA, 1000 bp, Homo Sapiens
aattctatcaacatgtgaataattctaaaatgtagtttcaccatacaatgaaatactacttaacaaaaagataaatataactaagagtacaatgtggatgaacctaaaaataatatatgctaagtaaaagaatccagtcacaaaattccacatattgtatgactccatttgtattaattatctggaaaaggtaaaccgagagagagagagtagattagtgatctgctagcctaggaacaagaatactggttaaatggaaattagcataaagaattattatggagtaaagcaagtgttctaaaagtggattaagatggttacacaactctgcaaatttacaaaatacatcataaaattttacacttaaagtgcatacctttattatatgtgttatacctcaatatagctatttaaaaatgaaataaataaataaatggaacaataagtagtgatgtatgaaatgaaagatttaataaaatattttattaagattaaaaaatactcttcaaaaatgaaattcagtaaatcaaaaagaaaccacagactatgagaaaatatagggaacacatttatctgatgaagaacatgtatccagaattacataataagcacttactacctaacaataataaaagaaacaactcaattaaaaattcattagagaatttaaacaggtattcaacacaagagaacatataagtttttagtaaacccagggcaaattcttgatatcagcagttaggaaaatgtaaataaaataaaaataagatgccactacaaatttactagtaacaaaagtctttgttaaaaagactgataatatcgagtcctggtaagaatgtggaacaaatgaaacttacacattgatgttaggaatataaaatttgactactttgtaaacctgtatatttaaaaagttaaacatacatttaccccaagacccaacaatttaatacccttattatttacttaggagaattaaagtacacatctacatgaa

SEQ ID NO: 391233 - DNA, 1000 bp, Homo Sapiens; identical to SEQ ID NO: 114851

SEQ ID NO: 391234 - DNA, 1000 bp, Homo Sapiens; identical to SEQ ID NO: 206247

SEQ ID NO: 391235 - DNA, 1000 bp, Homo Sapiens
tagtttgtcccacttaagtttttaaaggtgttaaaagtacatgtttcaaaaagtaaggatagactaaaaaagtgaacggtggtaagttctaagttgtgggcttacaggtgttctttatttttatgctttgctgtattttccaagttttttttttaagttttccaagatgttttacatctctgttcttatttaccagataaactttgtggttagttactggataaactgtaaatagtgataaaatttttaagtttatatcaagatagcacttcattttaaaaccagtaattattaggttggtgcaaaattaattgcagttgttgccattggaagtgatggtaaaaaccgcaattacttttgcaccaaccttatatttctaaaagatcaagttgtaaacctatttgttttccctaagatccgctcttgcagagttggaataaatatgattgtttacacttaagagtccaggactacagcaggcctggttggaggggagttactaatgttcccagacttaaatccagctggaacaccacctaaaatatgcagtaacataagaccatcaaaagcaatgtcccaggacttacaatgtttgctaagacgcaagagggtgtgacacagacgctaagccccactggcgaggagatgaaggggtcgtcttcatcttcgccggatgatttccgcccacatagagggcgccagtgacgcccacacacgtgctggtgtcccgggaagagttcctggcaaagagctcaggaacgttggatcttaatcaaggctttctccgtcggggtggatgggttggactttaggctccagcaagccccgccccactcggcgggtcggtgccgccgggtcccaggtgcccgctacttcccagaacctccgcctcccgctccgggccctcgaaccagcgcggacaccacaatggaccgggcgtccgagctgctcttctacgtgaacggccgcaaggtgagcgcccggcgcttcctctgccccc

SEQ ID NO: 391236 - DNA, 1000 bp, Homo Sapiens; identical to SEQ ID NO: 195270

SEQ ID NO: 391237 - DNA, 1000 bp, Homo Sapiens; identical to SEQ ID NO: 114852

SEQ ID NO: 391238 - DNA, 1000 bp, Homo Sapiens
tgtaatctggcaaacaagggaagaggaagagagcactgggactcaggatgaacccagagaattcaggacaaaggtctccatcagctgagggtatcatgctggcttctgactctgtttttctctggttttgccctagaattcttcgatttttcttatgaccttaacctgtgtgggctgacagaggacccagatcttcaggtttctgcgatgcagcaccagacagtgctggaactgacagagactggggtggaggcggctgcagcctccgccatctctgtggcccgcaccctgctggtctttgaagtgcagcagcccttcctcttcgtgctctgggaccagcagcacaagttccctgtcttcatggggcgagtatatgaccccagggcctgagacctgcaggatcaggttagggcgagcgctacctctccagcctcagctctcagttgcagccctgctgctgcctgcctggacttgcccctgccacctcctgcctcaggtgtccgctatccaccaaaagggctccctgagggtctgggcaagggacctgcttctattagcccttctccatggccctgccatgctctccaaaccactttttgcagctttctctagttcaagttcaccagactctataaataaaacctgacagaccatgactttctctgctttgcctttgtttttttattttttattttttattttttttaggcagggtctcaatctgtcacccaggctagagtacagtggtgagatcatggttcactgcagccttaacctcctgagctcaaacaatcctcccatctcagcctcctatgtaggtgggaccacatgggcttgccaccatgcccagctaatttttaaattttttgtaaagacagggtcttactatgttgcctaggctggtctccaactcctgggctcaagcaatcatcctaacacagcctcccgaagtgctgggattgtaggcacaccatacctctcctttgcctttgaatatcag

SEQ ID NO: 391239 - DNA, 1000 bp, Homo Sapiens; identical to SEQ ID NO: 282026

SEQ ID NO: 391240 - DNA, 1000 bp, Homo Sapiens; identical to SEQ ID NO: 282027

SEQ ID NO: 391241 - DNA, 1000 bp, Homo Sapiens; identical to SEQ ID NO: 114853

SEQ ID NO: 391242 - DNA, 1000 bp, Homo Sapiens
acaagagcaagactccatctcaaacaacaacaaaaacccaaaaggggacagcagtagtgggagaggccagcatctgtacaccccatcagggtccccgctgtgtgtgcccctcaggcggccaccagccctaccaggtcctcccctcccggcaggtcttcgccttgatcgtgttctcctgcatctatggtgagggctacagcaatgcccacgagtctaagcagatgtactgcgtgttcaaccgcaacgaggatgcctgccgctatggcagtgccatcggggtgctggccttcctggcctcggccttcttcttggtggtcgacgcgtatttcccccagatcagcaacgccactgaccgcaagtacctggtcattggtgacctgctcttctcaggtatctgcctgtggcacctccatttgatcttgggggaggcattaactctagggttccgcagctgggagggtctcggcctctctgggaggggcagggagcagctcactcctccagggcatttttaggaaagggttttcagctagtgtttttccgtgctggaatggcaccagccctgcctggggtagctagaagctgagtggacctgcagcacacccgagcagatgggctttgcctctgccccttttgtcccctaggctgtctgctgtggcccaccctgccaaggcccgagtgtgggggactttggaggtggctcccggcccggcttccaagtcctcccctccatagtgtggaggctcccccgggaggtccctgccctacctgcccgcgtcccctcccagagtcctggaaagcccctccctttccatggaactgacgattcacccgtcctcccccagctctctggaccttcctgtggtttgttggtttctgcttcctcaccaaccagtgggcagtcaccaacccgaaggacgtgctggtgggggccgactctgtgagggcagccatcaccttcagcttcttttccatcttctcctgggtaggatggccaggg

SEQ ID NO: 391243 - DNA, 1000 bp, Homo Sapiens; identical to SEQ ID NO: 282030

SEQ ID NO: 391244 - DNA, 1000 bp, Homo Sapiens; identical to SEQ ID NO: 195112

SEQ ID NO: 391245 - DNA, 1000 bp, Homo Sapiens
ttgattaaatgatcagggaagcagatcctgatggtgatggtcaagtaaactatgagtttgtacaaatgatgacagcataatgaagaccttgtacagaatgtgttaaatttcttgcacaaaactgtttatttgccttttgtttgtaacttatctgtaaaaggcttctccctactgtcaaaaaaaaatatgcatgtatggtaatcaggacttcattcctccatgtgttcttcccttactgtcattgccctgaaaccttattttagaaaactgatgaagtaacatgttgcctgtggcttactccggatatatctaagcccttctgcacatctaaacttaggtggagttggtcaaataagggaacatccgggttatgcctttttttaaagtagttttctttaggaactgtcagcatggtgttgaagtatggagttgtaactctgtgtggactacggacagccaacaatatgtacttaaaagttgcactactgcagaatgggtgtattatccaggtactcccaggtacctcacacactgttttttctgtactgctggtcctgtaccagaaacattttcttttactgttacttgctttttaaactttgtttagccacttaaagaaaatgtgcttatggcacaatttgcctcaaatccattccaagttgtgtatttgttttccaattaaaaaaattacaattaaaaaaagaattatactaaatctactctgcctaccacacatctgtttacagcatggtttactaagtattttaagcccactgtgaagacctattgctcagaaaaaaagatttgaagatattactgctcattgacaacgcacctggtcacccatgggctttgatggaggtgcagaaagaagttaatgttgttttaatgtctactaacaacatccattctgcttcccatggatcaaggagtattttcgatttgccagtctttcatttaagaaatatatttcctttgggaggccgaggcgggcggatcc

SEQ ID NO: 391246 - DNA, 1000 bp, Homo Sapiens
ttatttctaaagacacactacatagaaagaggccctataaactcaaaaagtcattgggaaacttaaagtctattctactttgccaagaggagaaatgtgttttatgaacgatagatcacatcagaactcctgtggggaggaaaccttataaattaaacacatggcccccttagagaccacaggcgatgtctgtctccatccttccctctccttttctgtcacctttccccctagctggctcctttggacctacccctgtccttgctgacttgtgttgcattgtattccaaacgtgtttacaggttctcttaagcaatgttgtatttgcaggcttttctgaataccaaatctgctttttgtaaagcgtaaaaacatcacaaagtaggtcattccatcaccacccttgtctctctacacattttgcctttggggatctggttggggttttgggttttttgttgttgttgtttatttgttattttaaaggtaaattgcacttttaaaaaaataattggttgacttaatatatttgctttttttctcacctgcacttagaggaaatttgaacaagttggaaaaaaacaatttttgtttcaattctaagaaacacttgcagctctagtattcacttgagtcttcctgtttttcctgtaccgggtcatggtaatttttggttgttttggttgttttcttaaaaaacaagttaaaacctgacgatttctgcagtgacttgatgctctaaaacagtgtaggatttaagaatagatggtttttaatcctggaaattgtgattgtgacccatgagtggaggaactttcagttctaaagctgataaagtgtgtagccagaagagtactttttttttgtaaccactgtcttgatggcaaaataattatggtaaaaaacaagtctcgtgtttattattccttaagaactctgtgttatattaccatggaacgcctaataaagcaaaatgtggttgtttcaaaaaaaaaaaaaa

SEQ ID NO: 391247 - DNA, 1000 bp, Homo Sapiens
tattcgcctacacaattctccgatccgtccctaacaaactaggaggcgtccttgccctattactatccatcctcatcctagcaataatccccatcctccatatatccaaacaacaaagcataatatttcgcccactaagccaatcactttattgactcctagccgcagacctcctcattctaacctgaatcggaggacaaccagtaagctacccttttaccatcattggacaagtagcatccgtactatacttcacaacaatcctaatcctaataccaactatctccctaattgaaaacaaaatactcaaatgggcctgtccttgtagtataaactaatacaccagtcttgtaaaccggagatgaaaacctttttccaaggacaaatcagagaaaaagtctttaactccaccattagcacccaaagctaagattctaatttaaactattctctgttctttcatggggaagcagatttgggtaccacccaagtattgactcacccatcaacaaccgctatgtatttcgtacattactgccagccaccatgaatattgtacggtaccataaatacttgaccacctgtagtacataaaaacccaatccacatcaaacccccccccccatgcttacaagcaagtacaacaatcaaccttcaactatcacacatcaactgcaactccaacgccacccctcacccactaggatatcaacaaacctacccacccttaacagtacatagtacataaagccatttaccgtacatagcacattacagtcaaatcccttctcgtccccatggatgacccccctcagataggggtcccttgaccaccatcctccgtgaaatcaatatcccgcacaagagtgctactctcctcgctccgggcccataacacttgggggtagctaaagtgaactgtatccgacatctggttcctacttcagggccataaagcctaaatagcccacacgttccccttaaataagacatcacgatg

SEQ ID NO: 391248 - DNA, 1000 bp, Homo Sapiens
cctgtttccttgcgtgaaaacatacatcaccaagtaatttgtagtacaaagaacaagagaagaaaccctaagaagatagcttatttgttatcctcccttttaatgactaaccttaatccaaatgaatccactgagaaccagcctgtggatgcctactgggctttcaccctggaccaggaatttttgacgtatgcctgtgttgaaggcactggatgcttgttttgtggaagacatgttcattgaggtaagtggctcatcgcttggtgtgtttggctctctttggcattatgcatagccaaggtcccagattttggccgctctcagtgggtgttcttgcatcagaactttaaaaaaattaacactaccttaacactgagactgtcaggtatttgtcagtatttatttctaatttcctactttaaatcttaggagacaaagtgtttctccaactggacgctgatttgaaacacaactagaatgctacaggtctctcttccagtatgcagctgctgtacctgaaaatttttccccataatttcccatctttagggtatgtccctgttatcaggtgtggaattaatgtgggtaaatttccatttcagttgaatttcctgtcatccccagcaaaacctgtgaatccttcttcaaagcatagaggaggcagagacaagtcttaaaccggcttcccttcgcttttaccaggtagcctggttcagtcccagctgggtcctgaaggagcacagtactagagcctgagtcatgttgactattaataaagtgcattaagtttgggtcaggcaaagtggtggcaaaagttcatgatgcaggacagaggaaacaagtggacaagacaagtggagcccagctctgttcgcatgggaggccgggcgatgctggcatgggtgtggttggccgagttctcatagctagagaaaggccgtgtaggtataagtgcttaatgtttcatctgtctgaaagaccagctatttgataatcttcc

SEQ ID NO: 391249 - DNA, 1000 bp, Homo Sapiens; identical to SEQ ID NO: 282034

SEQ ID NO: 391250 - DNA, 1000 bp, Homo Sapiens
cctccgaccgccctccaatttcctctccacttgcaacctccgggaccatcttctcggctatctcctgcttctgggacctgccagcaccgtttttgtcgttagctccttcttggcgaccaaccatgagctcccagattcgtcaaaattattccaccgacgtggaggcagccgtcaacagcctggtcaatttgtacctgcaggcctcctacacctacctctctctgggcttctatttcgaccgcgatgatgcggctctggaaggcgtgagccacttcttccgcgaattgaccgaggagaagcgcgagggctacgagcgtctcctgaagatgcaaaaccagcgtggcggccgcgctctcttccaggacatcaagaagccagctgaagatgagtggggtaaaaccccagatgccatgaaagctgccatggccctggagaaaaagctgaaccaggcccttttggatcttcatgccctggattctgcccacatggacccccatctctgtgacttcctggagactcacttcctagatgaggaagtgaagctcatcaagaagatgggtgaccacctgacgaacctccacaggctgggaggcccagaggctgggctgggcgagtatctcttcgaaaggctcactctcaagcacgtctaagagccttatgagcccagcgacttctgaagggccccttgcaaagtaatagggcttctgcctaagcctctccctccagccaataggcagctttcttaactaccctaacaagccttggaccaaatggaaataaggctttctgatgcaaaaaaaaaaaaaaaaaaaaaaaaaaaaagaataagaggtgatattacacccatgaaacaagaataagatgctattttgagacaagaaacaaaaaataagctttaaaataaacacacacacatacacacacatacacacaacagcagaaatgaaaaattcaatggatggcttgagaaaaatgtctagaatatctcacagaaaataga

SEQ ID NO: 391251 - DNA, 1000 bp, Homo Sapiens
gaacagtacaggggaaggagcacgcacagcctgtttagtgaagagccggtcgctcagtggggatagagtgcaggtgaggggcttattaacaactgaggagggagggagggagggagagaggaggctgcagtgagggtggaggacttcccaagtgtagtgcaaacggcataatctctgcacaggtgtggatcttgtgtgaagctcactgcctcaaggtggccgtggatggtcagcacgtgtttgaatactaccatcgcctgaggaacctgcccaccatcaacaaactggaagtgggtggcgacatccagctgacccacgtgcagacataggcggctccctggccctggggccgggggctggggtgtggggcagtcggggtcctctcatcatccccacttcccaggcccagcctttccaaccgtgcctgggatctgggctttaatgcagaggccatgtccttatctggtcctgcttctggctacagccaccctggaattgagaaggcagctgactgggattgtcttcctcagccgcagcagcacctggggcgccagctgctggaatcctacaatcccagaaggcgggcacagccagggagaggggaggagcgggcagtgaagatgaagccccatgctcagtcccctcccatcccccacgcagctccaccccagtctcaagccaccagctgtctgctcctggtgggagatggcctcctcagcccctcctctctgacctttaacctcactctcaccttgcaccctgcaccaacccttcacccctcctggaaagcaggtctgatggcttcccactggcctccaccaactgaccagagtgttctcttcaggggactggctcctttcccagtgtccttaaaataaagaaatgaaaatgcttgttggcacattcatgtgggttgactgtggcttctttaattcatttggagacattttggaatctgtggaatcaggcggaggggctgctgagaggagtgggatgggag

SEQ ID NO: 391252 - DNA, 1000 bp, Homo Sapiens; identical to SEQ ID NO: 282035

SEQ ID NO: 391253 - DNA, 1000 bp, Homo Sapiens; identical to SEQ ID NO: 282036

SEQ ID NO: 391254 - DNA, 1000 bp, Homo Sapiens; identical to SEQ ID NO: 206248

SEQ ID NO: 391255 - DNA, 1000 bp, Homo Sapiens; identical to SEQ ID NO: 206249

SEQ ID NO: 391256 - DNA, 1000 bp, Homo Sapiens; identical to SEQ ID NO: 195273

SEQ ID NO: 391257 - DNA, 1000 bp, Homo Sapiens; identical to SEQ ID NO: 282040

SEQ ID NO: 391258 - DNA, 1000 bp, Homo Sapiens; identical to SEQ ID NO: 282041

SEQ ID NO: 391259 - DNA, 1000 bp, Homo Sapiens
cagatggttcacttcgaggaaccgtggaaggcgtgtgcaggtcctgaggtaggacagaatcagagtgtgcagggtctgcaggtcaggaggagttgaggttgagttgtcacgtggtgggaactcactgccacttactttccttctctcttcttgcctcagcctcggggatacgacacatgcccatgatgagaagcagaacgtggtgacctttcatgaacacgggcatggctgtggacccctcgtcatcaggtgcatagcaagtgaaagcaagtgttcacaacagtgaaaagttgagcgtcatttttcttagtgtgccaagagttcgatgttagagtttacgttgtactttcttacagtgtgccattctgttagatattaacattttcactgatcagcaagacatacttaatgcatatttcggtttgtgtatccatgcacctaccttagaaaacaagtatagtcaggtattctctccatagaacagcactaccctcctctctccccagatgtgactgctgaggggaggtctgagtgtttaatttcagattttttcctctgcatttacaccacacacacacacacacacacacacacacacacaaacaccaagtaacactataagcatctcccatctgcttgtactcccctcatccgattcccctctatcagtcactgacagttaataaacatttgcaaacgttccccagttgtttgctcctctcattattgtgcacacagctctctgcatgtgtatgaatatttctttaggaaagattcttagaagtggaattgctgtgtcaaacgagtcacttattcaacaaaaaactaatgagtgcatactcatgctgagcgctgttctaggtgctggagagacaccagggaacaaggcagacagatgtttctgacccccattctagaggaagatgtttcccgttgttgggtttcttggtttgtttgtttgtttcttctagagatggggtcttgctctatccaggctaga

SEQ ID NO: 391260 - DNA, 1000 bp, Homo Sapiens; identical to SEQ ID NO: 114854

SEQ ID NO: 391261 - DNA, 1000 bp, Homo Sapiens
tagtttagtcatggcctcatactttctcttcatatacacatagatgattttctccgaggctttcatctttcccactctttcttagagaagtatttggcaatatcattgaaggcctagaagaaaaaaaaaaggaattctggcagtactcagctaggcatgtctgccattcagctggagccgcttcctgtgtgctagatctgggaactggggatgataattcttcctggttgatgccatggctaactgacagaacaaggggcacctaccctagcttctcccctgccacacagtagggctttaatgctgctggctggctctcttcccaccttccagaatggactgagattcaccaaatgaagtgcacagtcatagacttgtctccagagatgctaggtgatgacagagcgagggtgggaagttcccaaggatccagatctcccccgagaccctgctccttgtctccagtgtctctgtcctcccctcctcagaaaccaggtcaccccacactgtcccctgggccactactatgccccctccaggtcacctcagcttttgtatcttctctggtatttgagcatcatccctagctctctttgcacagtcgttgtctccgttcatggcaccgggactagtctgacctgcaagagaaacagaatgagactttccagccacaggacctttggtcttgtggagggagaaatcagtgaaggccggccacactcagtcacctggaatcaggtgctgcatttctccatccggggcttatctgttcctgagtaaggccatggggagaagtcagatgaaaacaggaaaccagggatctctgggagaagtattgattggggataacaggtttcctatgggcaaagcagccttgagtctttaggagggggttggctactcttgttagtagtttccctggagctagccttgccctgaaagatgtacagacccttgttggggaggcaaggacatgactatgtaattgtattgggtgagg

SEQ ID NO: 391262 - DNA, 1000 bp, Homo Sapiens
acccagcagtgcaccatctcctactgagccctagagctcttccctgagcagtcactgtgtcattgatgaacagactgatgtctggtccctgggctgtgtgatatatgccacaatgtttggggaaggcccttacgaaatggtgttcaagaaacgtgacagtgtggcccttgctgtgcagaaccaactcagcatcccacaaagccccacgcattcttcaggagtgtggcagctcctggcctcaatgatgactgtggacctgcagcagcaccctcacaatgcttgcctcctcagtcagctggaggtactgcagcccccagctcctggccagcacactgcccaaatctgaacaaagcagtggccatattgagaaggtggcgccttgtgccttggaaagaggctcccatcactcactggaatctctacccattctttctttattttattttatttattttatttttttttttttgagagacaagtctcattctgttgtccaggctggagcagagtggcacgatcttggctcactgcaacctccgcctcccgggttcaagcgattctcctgcctcagcttcccaaatagctgggactacaggcatgcaccaccatgcccagctaatttttgtattttttagtagagacggggttttgctgtatgttggccaggctggtctcgaactcctgacctcaggtgatctgcccacctcggcctcccaaagtgctgggattacgggcatgagccactgcgcccagcctgcttttctgctttcttacccccaagagcaacacctggacaaggggctttactgagtgggggtggaataggggttgggaaaaggaaaactgatgcgatatggtacatggctctgtgcaggactgttgagctcatattacgttctgcctccaaatctgggagcaagagaatgtataaacagaagaataaagtgaatgcagattggtgtgggggaaaataagtaaataaataaataacaggtaactt

SEQ ID NO: 391263 - DNA, 1000 bp, Homo Sapiens
gaccctgcggtgtctggagccctccaggaatggcagggaagggacgcggagccagcagggagaccacagggtcactgaggagctgtgcctgaagacggtgcgtgtctggcaaggccctgcaggagctcccacaggatggtacgggggaaatatgtccacagagccaaagagaaattaaaagaggcaccaggaggaaattccttgattagagatagctcccattcagacgacctactaacaatatctgttaaaacatcagctggaccaactaatcttccaatcaaataccaagatggtaaattcagattgcactctgtcctatgtggcaagtatggtttcatctgattgactgctatgttcagatgtgtaaggatgagcagacgggtgggaaggccccagaacagcactgctcacctttactgaccaaatcactctacccatcagcactgatgaaacaggaaaatagagtctggagacagggaacataaggccaattcacacttcagctatgacaggaaatgtcctctccatagggcctacactgagtaaatgactttgtaactttacttcatcctgttcatttacacagggcgtaccccaagtacagggtatttaaactcacaaaaactctgtaacagggcctttgagcccgtgttcggccctgctcccacactgtggagtgcacttccttttcaataaatctcttcattcctttcttgctttgtttgtgcgttttgtccaattctttgttcaagacaccaagaacctggacactgtccaccggaaacaccatctctatagcagctctgtgaacccactgctaacagacagtgatatctgggaacggcctttaccaacaagactaaaagttaattggaagaatatcagttccaggtataagtgggtttttttttgtttgttttctttgtttgtttgtttgtttttgagactagagtcttgctctgttgcccagactggagtgcagtgatgtgatctcagc

SEQ ID NO: 391264 - DNA, 1000 bp, Homo Sapiens
agctttaaaatgctaaaagagttctccaagaaaacaccaaatggcgaatgagaccagtgcagtgggagggcctagaggccccaaaatgggaagccacagcagtggcatccagggctaaggctggggccacggagctggtggtggcaaggccaaggccaaggccaaggccaaggagtaggtccccatcatcaaactgggcagcatagtcaaggacatgaagattaagtccctgaagctctatctcctctccctgcccatcaaggaggctgagatcatcgactttttcctgggggcaaccctcacgaatgagtttaagattatgccagtaaaaatggagacttgcactggccagtggtccagattcaaggcacttgttgccattggggactaaaatatccatgtcggtctgggtgttaaatgctccaagacggtacctactaccatccaaggagtcatcatctttgtcaagctctccactgtcccggtgcagagaggcatctcaggagacaacactggcaagccccacggcattccttgcaaggtgacagaccactgcaactctgtgctggtacacctcatctctacacacagagacaatggtttcatcttgatctctgtgcccaaaaagctgttgatgatggctggcattaaggactgccacacctcagtcaggggctgcactgccaccctgggcaacttcaccaaggccactgttaatgtcatctcaaagacctacagctatctgatccccaagctctggaaggagaccatattcaccaagtctacctattaggaaactaggaattcactgaccagagtctccactgcagagaacccaggctccagctatggctattatacaatgcaggatttttatacaagaaaaataaagtgaattaaatttttaaaatgctaaaagaaatcaatggcaaaccaagagttctataaaactaataaaaagacacttcacaaatggaaaaaagttctaaaattagatgtg

SEQ ID NO: 391265 - DNA, 689 bp, Homo Sapiens
taaattggaaagaactcaaatgtccaacataatcttataatctggtacaatcatatcatggaaactgtacacattaaaagctgcagagcccttttcacaagatggcaccgaaagcaaagaaggaagctcctgcccctcctcaagccgaagccaaagcaaaggctgtgaaggccaagaaagcagtgttgaaaggcgtccacagccggaaaaaaaaaagatccacacatcacccaccttccagcggcccaaaacactgcgactccaggggcagcccaaatatcctcagaagagcgcccccaggagaaacaagcttgaccaccatattatcatcaagttgccgctgaccactgagtctgccatgaagaagagcgaggacaacaagacacttgtgttcattgtagatgttaaagccaacaggcaccagatcaaacaggctgtgaagaagctctatgacattgatgtggcccggtcaacaccctgattcggcctgatggagagaaggaggcatacgttcaactagctcctgattatgatgctttggatgttgccaacaaaattggggtcatctaaactgagtccagctggctaattctaaatatatgtatatcttttcaccagaaaaaataaaaaataaaaagttgcagaagtatgtacatttaatgacttgggaaaaccatacatgaagtaca

SEQ ID NO: 391266 - DNA, 1000 bp, Homo Sapiens
actgcgcttttcagctggaactgccatcttccagtaatttgcgaaaatgacgaagacaaagggaaagaggagaagtacctgatagatgttttctaggccttttagaaaacggagtttttcctttggccatgtatatgcgcatctgtaagagggatgatattgtcagctggacgcagtggcacatgcctgtaatcccagcactttgggaggctgaggcgtttggatcacctgaggtcagcagttcaagaccagcttgggcaacatggggaaaccctgtctctactaaaaatacaaaaattagccaggcgtggtggtgcatgcctgtaattctagctacttgggaggctgaggcaggagaatcgctggaacttgggaggtggaggctgcggtgagccgagattgcaccactgcactccagcctaggtgacagagcaagactgcatctcaaaaaaaaaggaggatgatgttgtcgacattaagggaatgggaatgggtactgttcaaaaaggaatggcccataaatgttgccatggcaaaactggaagagtctacagtgttccccagcatgctgttagcattgttgtgaacaagtaagttaagggcaagactcttgccaagagaattaatgtgcgcattgagcacattaagcactctaagagccgagatagcttcctgaaacgtgtagtaaaatgatcagaaaaagaacccaaagagaaaggtacctgagttcaactgaagtgccagcctgccccacccagagaagcacactttgtgagaacaaatgggaaggagcctgagctgctggaacctattctctatggattcatagcataataggtgttaaaatacccctggactgtttgtaaaaaaaaaaaaaaaaaaaaaagactttacagcttggtgtgatgcctcacttagcactctgggaggtcagggcggaaggattgcttgaggtaaggagttcaagatcatcctggacaacatggtgagactacatctc

SEQ ID NO: 391267 - DNA, 1000 bp, Homo Sapiens
caaagacctaatgtcccaagctgagaagaatggtgtgaagattaccttgcctattgactttgtcactgctgagaaatttgatgagaatgccaggactggccaagccactgtggcttctggcatacctgctggctgaatgggcttggactgtggtcctgaaagcagcaagaagtatgctgagactgtcacttgggctaagcagattgtgtggaatggtcctgtgggggtatttgaatgggaagcttttgcccagggaaccaaagccctcatggatgaggtggtgaaagccacttctaggggctgcattaccatcataggtggtggaaacactgccacttgctgtgccaaatggaacacagaggataaaatcagacatgtgagcactacgggtggtgccagtttagagctcctggacagtaaagtccttcctggggtggatgctctcggcaatatttagtacttttctgccttttagttcctgtgcacagcccctaagtcaacttagcattttctgcatctccacttggcattagctaaaaccttccatgtcaagattcagctagtggccaagagatgcagtgccaggaacccttaaacagttgcacagcatctcagctcatctttactgcaccctggatttgcctacattcttcaagatcccatttgaatttcttagtgactaaaccattgtgcattctagaatgcatatatgcatattttgcctgttaaaaaaaaagtgagctgtgttagcttagttctcttttgatgtagcttatcctgattagctttgtcactgtttcactactcagcgtggaaacaagatgaaattccatttgtaggtagggagacgaaattgatgatccattaaatagacaataaaagtgtccattgaaaccatgaaaaaaatggaaatcagatcacatcattccctctgtgccaaattttcagtaacctcccttcatacctagaataaaatttgcattttattcttcattatatg

SEQ ID NO: 391268 - DNA, 1000 bp, Homo Sapiens; identical to SEQ ID NO: 282044

SEQ ID NO: 391269 - DNA, 1000 bp, Homo Sapiens
aaatatctatttttttccaaaaacatttttcactcatgagtattttcaagtttttcataccgtacacatttcttaaaagacatgataccagcagcaattgaaaatgaatgccaaatttgatacacatgtgttatctacctcaaggtgagaagagtaattagcaaaacatataccacccacagtgcttcacaatacgcacttctatttagccagtgtttattgtagtaaactattcttaataagactcactcactgtttataaacgctctggtatgcattctttatagtgaagtgttactatatcacatcttattgattttagcgtatcagtatattttctttaattataaaaattaatttggttttaaaaatttatttgcaaacacactttttcaatttgacactatggtttgttgcctacctagcttagtatataatgtcagcttatcctaaggctgtccaagtacttaatttacttaagtgttcattttaactaacgtgctcactgtgtataggaatttgtattttgtaggtgcttggtctatctacaaagaaaaattaggaaatgctttattataaaatgctcctagaagtcctaattgtgtttatttaaaaaaaaaaaactaatgttagacttgtgtgcatggaagtaattaaggtatatcattattgtagtttaaaagttgtacatgataagatattttgattttagtaatgtatatttttagtgaatgatctattccccatcccaaggcaagcatgaataaaattaggttaaatgtagcatgtggcatcacagtctcttagaatttgtttcatctattttattttattgcatactatctgcatcttcagttaacctatttgaagaaaaagaacaaataaaacatggccagcaaaaatgaaataaaataaaagatcagagtcggtgaaagagagaaacactaaggatggtaataagtgaaatgggtcagatttcactgcttgcagatttgactgc

SEQ ID NO: 391270 - DNA, 1000 bp, Homo Sapiens
ccttgcagcaggaacccacttaggtagcaccaatcttgacttccagatggaacagtacatctataaaaggaaaagtgatggcatctatatcataaatctgaagaggacctgggagaagcttctctggcagcttgtgctgttgttgccattgaaaaccctgctcatgtcagtgttaaatcctccaggaatactggccagagggctgtgctgaagtttgctgctgccactggagccactccaattgctggccgcttcactcctggaaccttcactaacgagatccaggcagccttctgggagccacggcttcttgtggttactgatcccagggctgaccaccagcctctcacagaggcatcttaagttaacctacctaccattgctctgtgtaacacagattctcctctgtgctatgtggacattgccatcccatgcaacagcaagggagctcactcagtgggtttgatgtggtggatgctggcttgggaagttctgcgcatgcatggcaccatttcccgtgaacacccatgggaggtcatgcctgatctctacttctacagagatcctggagagattgaaaaagaagagtaggctgctgctgaaaaggcagtgaccgaggaggaatttcagggtgaatggactgctccagctcctgagttcactgctactcggcctgaggttgcagactggtctgaaggtgtgcaggtgccctctgtgcctattcagcagttccctactgaagactggagcgctcagcctgccatagaagactggtctgcagctcccactgctcaggccactgaatgggtaggagcaaccactgaatggtcttaagctgttcttgcataggctcttaagcaacatggaaaaatggttaatggaaaataaacatcagtttctaaaaaaaaaaaaaaaaaaaagagtgaagtttaacttgctactattttaaaagcatgtgaccttgtagagcatctataaaatgtgagaagtgttaaataat

SEQ ID NO: 391271 - DNA, 1000 bp, Homo Sapiens; identical to SEQ ID NO: 282045

SEQ ID NO: 391272 - DNA, 1000 bp, Homo Sapiens
aattaatccatatggctaatgacagtgtgaggatgctcttttcatatggcatgttgctgttgatcagctgtgttcagcagctttcttttgtcccaatcccttgttaagtaatgctgcagcagtccctcagcctcagccttttccagtgtctggtggaggacgttgtgtgatttcctcttctcagcagggtgaagaatgattgaaatgttttctgcagaatacggcagttttgcagaaaacacaaaaagcacagtcattgtgtatttgctgctgtggaataaaagtatggttcagcgagtccctgctctgtggccttccctgtgccctggccagatcccaggtctagtcatttcctggacctgctacctgcccttctccacatttaataaagaggcccagcagacaaagcagcagtgcctcccagtgcacttcttttctgttcctttgggaaatgcactgctcaaccgccaatagcttttttgagtttttggtttattttgagcagggatattttggagccgagaaccccctttcagacagtctatcctaagtcagaaattcctcaaaagaagcagcctgagagtgtgctgccactcagctggaaggaccgtccctggaagaaggccttgtagtggaggcctcacccctcactgcactccttccctccatctccccaggagctgagaaactggttgtcagaaaaaaggcatcccctttgcgctggccaccaggttgaagtctgcatcgtttgagatgaagacaagccgccacaaggagatcttcagcttgttttcccagactgtgctgggagatgaccccaaagtgcagcgtggcaagccagaccccgacatcttcctagcttgcgccaagaggttctctcccactcctgccgtggagaaggtaagagggtgccagtgacatgggccgtgttccacaaccatgttaccccacataatatccacgtagtgtttaccaaatgtgaaaagctgtaatttgtgct

SEQ ID NO: 391273 - DNA, 1000 bp, Homo Sapiens
ctttttaatgactaagatgggccctagaaacatactaacaaaaaactctcggccccaggctacttggagtagaactctgcattctcacttgccatttgtctctgttacaggaaattcaatatcgtttgcctgaaaataagtggtttcacaacttgctgttgttttcagattttacaaatgagcagagaatacggttttggtgtcctgctacaaaaagacatcggtcagtaacgagcacgatgtggaaaaatgagagaagggacacattcaaccctggagagttcaatggctgctgaagctgcctgcttttcactgctgcaaggcctttctgtgtgtgacgtgcatgggagcaacttgtttgtgggtcatcgggaatactagggagaaggtttcattgcccccagggcacttcacagagtgtgctggaggactgagtaagaaatgctgcccatgccaccgcttccggctcctgtgctttccctgagctgggacctttagtggtggccgtttagccaccatctttgcaagttgctttgccctggtagggcagtaacattgggtcctgggtctttcatggggtgatgctgggctggctccctcttggtcttcccaggctggggctgaccttcctcgcagagaggccaggtgcaggttgggaatgaggcttgctgagaggggctgtccagttcccagaagccatgtcagtctctgagggcttcctttggggccgggaacttgcgggtttgaggataggagttcacttcatcttcttagctccaatttctactcttaagtttctcagctcccatttctactctcccatggcttaatgcttctttcattttctgtttgttttatacaaatgtcttagttgtacaaataaagtcccaggttaaagataacaaacgggtcctgtgacataaacgtacgaaagcccatctacagcaaagacatcagtgctcagtggaacagaaaccagaaggagaaaatttgtacatcc

SEQ ID NO: 391274 - DNA, 1000 bp, Homo Sapiens
gcacctgttaaatggactggcactttagatgccctcatggaataagaagctctagttatattcttataagaagacattaacttatctctgtatattatagagtaggcccattcacttttcggagagaagcaaatccagtttctttgtacagacttagaatttatctaggctgggcatggtggttcacgcctgtaatcccagcattttcgggggccaaggcgggcagatggcttgagctcaggagtttgagacctgcctgaacaacacagtgagactgtgtctctacaaggaaatataaaaattagccagatatggtggtacatgcttatagtcctacctacttggaagagtgaggcaggaggatcacttgggcccggaaggcagaggttatagtgagccaagattgtgccactgcactccagcctgggtgctagagtgagaccctgtctcaaaaaaaaaaaacttaaagatttcatctttttacctcatgtttcttaggaatataatgggtaaatattgtctattttattatgccttttggctcaagcaatatatatacatatatatatatcactgttgatgttttctttcttgtatcaagtttaaaagaaaaagcaaaacaatcctttgaaaaaaggaaggaattaaatcattttttccttaatgcttttttgaaggtcaggggctttatctatgaaaaagtagtagtttctgtaacctgtgtgaagcatcagccagccttaaagtagtccattgctgctaataattagaacagtgaatattactagtataattgtttcagcttcttaatcaaaataactagatgatagaattcaagaacttgttacatgttattactcggtgtactactaatcatttaaaagtaaagcctatcatgcaaataaataaataaataaataaataaatacatgagaccagataaaatgaaggaagaatgactttgagatcagagccacaggtgaggaggctgttggggctg

SEQ ID NO: 391275 - DNA, 1000 bp, Homo Sapiens
ataaacacattcagcatcctgccctcgcccaaggtgtcagacaccatggtggagccctacaacgccaccctctcagtccgccagctcatagaaaacgcagatgagaccttctgcatagataacgaagcgctatatgacatatgttccaggaccctaaaactgcccacacccacctatggtgacctgaaccacctggtgtctgctaccatgagtggggtcaccacgtgcctgcgcttcccaggccagctgaatgctgacctgcggaagctggccgtgaacatggtcccgtttccccggctgcatttcttcatgcctggctttgccccactgaccagccggggcagccagcagtaccgggccttgactgtggctgagctcacccagcagatgtttgatgctaagaacatgagggctgcccgtgacccccgtcacggccgctacctaacggcggctgccattttccagggtcgcatgcccatgagggaggtggatgaacagatgttcaacattcaagataagaacagcagctactttgctgactggttccccgacaacgtaaaaacagccgtctgtgacatcccaccccgggggctaaaaatgtcaggcagcttcattgggaataatgcggccatccaggaactcttcacgtgtgtctcagagcagtttacagcaatgttcaggtgcaaggccttcctccactggtacacgggcgagggcatggatgagatggaattcaccgaggccgagagcaacatgaatgacctggtgtctgaatatcagcaatatcaggatgccacggccaaggaggaggaggatgaggagtatgctgaggaggaggtggcctagaactctccttttctaggtaaagcgggggaggcagtgtgtattcttcactgtgttgtgacagctatgtgtcactacgcacttgttcatttgtgtcttcacatctcctgctgctgcattttaaagcacttttatagtgtgcagttttgactaataa

SEQ ID NO: 391276 - DNA, 1000 bp, Homo Sapiens; identical to SEQ ID NO: 282047

SEQ ID NO: 391277 - DNA, 1000 bp, Homo Sapiens
cacccccttatctcccatgcactcactccattttcatcttcactatgaaaaacaataccaaaagtatctggaaattgatatatatatatccacatatatatatcatatatttgccatatatatatatatatatatatatatatatatatatatatatatatatatttgccctgtctttgatcctggggaacaaaagaaaaaagtcagaaagggaaaaaattacactcattgccctaagaagacagaggtgggcagaatatgtggggaaaggaaaaagaaaacaagaccaccaaatgaaataatgaaggtacagcgcctcgctgtgccagacacagtaggcgctcaatcagtattagttcccaccattccccttttcttgtgttccttcttgttggtttcctgaagtcctatttgaagacagtggtttatttccccctctctatcccgtcaaattcaccttaaataacacccagctagatacaggcactaggtttgtgtaagatatgttgatacacacgaacaaagtttattttgactataatgtgtggactgactttcaacatttgcattttatctcacaaaggtgtatctattcaagtaacctttttttttttgtttgtttgtttcttttttgtttttttttttcttttggttgtttgtttcaattcatgtagctatttaaactgggataccttggactaagccagtctgtatcccaattcgctagcaagcctaagtttgtggggttttgtttttgtttttgttttaccttctaatttacaagaaagaggaaaagctcttctaactgaactttggtatgcggttgagctttgtaactatttgttctccatgaaaacaaaattatttatatttgacatatttttttctagtgtattaagttattttaaacaaaagatgttatctcatgacgtgttgtcagtacaaaatgtgtcgcctccaattctgttaaaccttttaaataagtgccaagttattaatt

SEQ ID NO: 391278 - DNA, 235 bp, Homo Sapiens
atcacttgccgggcaagtcagagcattagcacctctttaaattggtatcagcaaaaaccagggaaaacccctgaggtcctgatctatgctgcgtccaaattgcaaagtggggtcccctcaaggttcattggcagtggatctgggacagatttcattctcaccatcagcaatctgcaaccagaagattttgcttcttacttctgtcaacagacttacatgaccccattcaatttcg

SEQ ID NO: 391279 - DNA, 1000 bp, Homo Sapiens; identical to SEQ ID NO: 282051

SEQ ID NO: 391280 - DNA, 1000 bp, Homo Sapiens; identical to SEQ ID NO: 195281

SEQ ID NO: 391281 - DNA, 1000 bp, Homo Sapiens; identical to SEQ ID NO: 201479

SEQ ID NO: 391282 - DNA, 1000 bp, Homo Sapiens
aggatgtgtgtgtgtgtgtgtgtgtgtgtgtgttcatgtgcatgcacatctatgtgcagacggatgagggctggaggtgtgtgtatatggggtgtgtgtacactagaagatgtttgtgctaggaatctgtgcagaggagcctggagcctgtgcatgaggcagctgaggtaatgtgccaactgagaaggggtctgaagggctgtgtggatctgggtatcagcatggtgcgccatttgaggtgtgtatgtgtgtcttcctgtgagaaggctttattctcacccttggtttttctgttttctttttaaaatagagacagggtcttactctgtctcccaggctggagtgcagcggtgcaatcacagctcctgcagcctcgaactcccaggcttaagcaatcctcccacctcagcctcccgagtagctgggactacaggtgggtgccatcaggactggctaattaaaaaaagatttttttttatagagacggggtgtcctatgttgctcaggctggtctcaagctcctgggctcaagcaatcatcctgcctcggcctaccaaagtcctgggatagcaggtgtgaaccactgtgcccggcctcacccttgtttttgtatcagccccatctctcttttcaccagttcctgaaatccctcccgctgggccctggatggcttccagtcctccacctctattttctgccctggctctaactagccctgtagcatcctggggcgttttagacacagtggtttcatcccagggaggggtcccggggcaaaggtctcaggcagggcccagtgaacaggggctattttagggcaggcttctcaccacagcccgccccacagttcaccacatgggtgtgatgcccccacccccacccaatacacacatgagagatcacttagagcaaagggtgagaggggcaggtggggctagggtggagaccaaagcactgatgtgacggaaccatcagccaggcaactggacctggtggatcc

SEQ ID NO: 391283 - DNA, 1000 bp, Homo Sapiens
gtcctgtgaggtgaaggtactattcttatttatttttttgagacggagtttcactcttgtggctcaggctggagtgcaatggtgcgacctcgcctcactgcagcctctgcctcctgagttcaagtgattctcctgcctcagcctcccaagtagctgggattataggcgtgcactgctctgccccgctacttttgtatttttagtaaagacggcgtttcaccatgttggccaggctggtctcaaactcctgaattcaggtgatctgcccacctcggcctcccaaagtgctgggattacaggtgtgagacaccacgcccggccaaaggtagtattattatataccccatggactcagacttgtgaacaagttaaataacatacccaaggtcatggagctcatcagcggcagcctgctcgacctattttcttttttatttacttatttttttttgaaatggactctcgctctgttgcccaggctggagggcagtggcgcaatctcaacgcactgcacccctctgcctcctgggttcaagcaattctcctgcctcggcccccagtagctgggattacaggcgggcaccaccacgcccagctagtttttgtactttcagtagagatggggtttctccatgttgggcaggctggtctcaaactcctgaccttaggcgatctgcccgccttggcgtcccaaagtgctgggattacaggcgtgagccaccgtgcccggcctgcttgaactgttttctcccctgagtttcccatcagcgcgctccctcccgtgccactgtgttcttccatttgcattcagtctgtctgcagctacgcgttgaagatgttactgccgtacacgctgacctaaagatgtccagcacctggtgtaaacactcagtagtagatagttgtttaattaatgatttgtgaaaagtcaaacctctccggcctcttctccttgcctgtttttttttttaattttaattttaatttattttttattttt

SEQ ID NO: 391284 - DNA, 1000 bp, Homo Sapiens; identical to SEQ ID NO: 282057

SEQ ID NO: 391285 - DNA, 1000 bp, Homo Sapiens; identical to SEQ ID NO: 195283

SEQ ID NO: 391286 - DNA, 1000 bp, Homo Sapiens; identical to SEQ ID NO: 195292

SEQ ID NO: 391287 - DNA, 802 bp, Homo Sapiens
ctgcagcctggctggtgacgccgagccctcagcccggccttacgcggcggcgctctgcctcgctttcctgcccacgtgtcagcccctgcagcccggccgctgaggccgccagaggacaggccagggtgggccgcccgtccgagggcgcgcgggcgcaaaggaggggcgcccgtgactcacatgacccggtccccgaccagaccgccaagcctcacccacgcggcgctcggggggactcggcctctgagcgccctacagaggccagcccccgaccccgacctccctgggctacccccaacccccctgagggacccccgcggcgcacatacctgagagcccccgggtgcggcctccgggcaaatccggccgcccgtgggcccgccccgacccgccccgacccgccccgaccttcccctccctgcccctcccgtccgttcccctccactctcctccccgcccttcctctcccctcccctcccttccccactggcgcgcgagcgtcgcgccgagcccgcccgcgcctgcgcgcccccgacgccccgccggcgcgcgctgccgccagcgaggcccggggaggccgcggcggaggcggaggcccggcgccctgggcggcgccctgtccccgaagtccgtcctccccgttaggtggcgagcgcccgaggggaggggacagccgggcaagcaggaagctgcggcttaaaagggcaacccgcgcgggacccttcctccctagtcgcggggagtctgagaaagcgcgcctgtttcgcgaccatcacgcacctcccctccgcttgtggccatg

SEQ ID NO: 391288 - DNA, 1000 bp, Homo Sapiens
caccccaaagaggggtccctgctccgtctcacagggatctttttgtatatttggcttagcatcatacatttgccatgttgtttcatcatctgcctaatttactgtttttgaatatttcatttgtttctaattgttactacagataatgctggggtgagcaactctgtgtacataggtttatctcctattggaatattttctttatataggcgttttttttttttctttttttttggagacagagtcttgctctgttgcccaggctggagtgcagtggcgcgaccggagctcactgcaacctccacttcccgggttcaagtgattgtcccacctcagcctcctgaatagctgggattacaggtgcatgctaccatgcctggctactttttgtatttttagcagagacagggtttcaccatgttggccagggtggtctcgaactcctgacctcaagtgatccgtctggctcagcctcccaaagtgctgggattacaggtgtgagccactgcacctggcctatataggcttttttcttaaacctatttagtaatgttttcccaagtttattttttatttttaattttttccccaagtttatttttctatttttttttcatggaaaaatggggtaacttagcagtttcaatattgaagactgaagtttaaaaaaaatttaaattcaaggtacttttaaaattcagttagaaaagtaggctttaaaaattattagagacaagagtaccaaagcggtgtgtgtatgtgtgtgtgtgtatgcatgcttgtggattggaaaaactttggagactgattacttttcattatatatgtgtcacagtgaaacagcttttatgtgtcatgtaagattactgcttgcctctctaaggaaggtcgtgactgtttaaatagacgggcaaggtggaaccttttgaaagatgagcttttgaatataagttgtctgctagatcatggtttgtattgaactaacaaggtttgcagatct

SEQ ID NO: 391289 - DNA, 1000 bp, Homo Sapiens; identical to SEQ ID NO: 282061

SEQ ID NO: 391290 - DNA, 1000 bp, Homo Sapiens; identical to SEQ ID NO: 282062

SEQ ID NO: 391291 - DNA, 1000 bp, Homo Sapiens
cagagagaagcaaaaaggcggctgtggatcgccctgggctgggcaccagtgacaggtcaggatctccaaacatggacgtcctcccctccaaatccagaagctcccagaaggtgtccttaactgcaaagctgtgcagggtactcctccagatggaatcaggaagtcgagacaccatcccaggtgtgtgtaagagagagagagagaacagggaggatacagaagtattgcagcccagatcccctatcagggggacagctggtgggcaaagcagccaccccacagccttgtggctagagtacagtggggtagaccctccagccccaatagccctagtacccagctggcagggttgcccacccctgctgtccacctgctccatcctctagggttccacaggcccctgaccgcacagggaggctggggccagcctggtctcccaggcctgaggacatgcctcccaccaaatgtcccctgctccagtcccactcctgtcaccccacgctctgcactggggagaaaacgggaggtgctcgtgctggccctgggtgggagcggggagtcctggtgagaccccggtgagatggaccatcctgcccccgtgggggatcccctttcccacatccgtgctgtgtcattgttgctctgcttcctttcaatgtgtcagtgcctggggggaggggaggagcaccccctcagcccccctgaacctgaccaaaagccatggctgttgctcccccctttgtatgatgcaaatgctgaaatgtacaaaatcaaccatgacaacaaagaaaaagaccttgtacagcagctctctgtctgtgctcttctgtccatcggcaccaccagagacaaacaggggcaccaactcaccagggaggaggcaacccacaaagctcgaggccccagaaaatcttcaattttaccctggcttctggccaggacaccatggagatgactccagaaatcaaccgcagccagagttgggactgggcttggggtt

SEQ ID NO: 391292 - DNA, 1000 bp, Homo Sapiens
atttgaagcatataacgtatacaaaatgtatatctcactgtgcaggctgaagaatgataatcaatttttccatgtacccatctttaatctctcaaacactgtttcctctgtgttcttaggaaatactttttctattttctattctaattgcttgtgtatatgtgtcctaaattcttctgaaatactgtgagtttcttcaatgcatgattcttgactcattcatgtttggttcccattaccttcaacatgtaaggatgtaaataaatatgtgtagagtgagtgagtgaatgcattgcaagctctctgtggtgagaactcatttattatcttactattcctttcagttactatgcttaggggcaattaacaaatgttggaattgaatgcattgaaaggtcctgttagtctgtctaggcacctcttgaatgtttgtgcaaggcactgtgctgtgttatgtgttgttcattcatgttcatgaaagtaataaaatataaaacttactgaggagtttgagactatcctgtctgttcattgaagacctcatattgtcatattacttgcaattgtaattgtcgtattctttctttctctttccagctatttctggtagtcatgtcaagttgagtttatatgctaggtttgatgaagaggcagcatggagtgtgattggaaaaatggagtgtgatctaatggaaataaactggggagaacttagcagggccagttggttcagattctcctctgtatcctgtttcttcagagataggattttgctttcttctgggaatatggaagccactctagaatgagggtcttatgacccacttcaagggaaggtcagaaaaatccttcctggattttaggaccaaatttgaggggaaggtgagaatgaccttcctgcttctgctatagtctccaatgtcaaggtgccatatttttgggctaacatgtcttaaaccccatcaaactgtattatctaatccttggtttcctcatctgc

SEQ ID NO: 391293 - DNA, 1000 bp, Homo Sapiens; identical to SEQ ID NO: 206243

SEQ ID NO: 391294 - DNA, 1000 bp, Homo Sapiens
cagaaagcattcctttgttgatgagactaaataatctttggccattagttttccccatttctgtggtggataggattatgcaaacttccctttgcaacccagagagaaactggcctcacttacggcttcttccagaagttcactttgtcatggcagagccagcccttgttctctctattctggcctcctttgtgtgccaggctcatcctcaggatgtccctcatcctcaggatacaaataaagggccgcactaattcccacctcccagcttccttgtatgccatctaccagctcctgcctgtgagaatggcagcccatccaccccatccccttcttggcaccttgtgtctcatttgctcaaattgtgtcacatgcctggaaacaggacatactaatcagctcaagccaatctaacccatccctagaattaagagtggggtcaatacccgaagctaatcctagcaggagattgttcctccaaagcaaatctggacaccgaggtcaggataaaggaagaaatagatgtgttggaggcaagcaaaaatgtctgctatagagcataaactactagctagtttgtcaaacacacaaatctgagtaaaatcctgaaagagagtgaaaagtctgggttttttttttaaccatttcacaatcccaagaagattatggggtcataacagatttaactacaaaccaaggactaaatgaacttggtgccacctaattaatatccttaacactctaaagaagaggcgctccattcactagagacaatcacttctggcaattgccccacaatgtggtctgagctcagcctggaaagggcaaggggaaaccacctagagagaccacactggagggccagctgctgctcctgggctggcagggacagatacctcatccccacaggcacggccagccctgccaacattctcccctgcactgacgaaggggtgttcccaccccgacagaacagcttaatatgtagaaatatgaattc

SEQ ID NO: 391295 - DNA, 1000 bp, Homo Sapiens
ctgtctcaacgtgattgactttcttgtgctgcccaggacttcttgcccacgtgcgccttcaaaacggtaagagctgcaactgaacgtgtgagacatggtgcagataggctgagaggcggcgggagagatgcccatgaactcaagtacccggacacgccctccacttctaccaccacgagtaacaccgcccccacgggaccgctctcgaggtcccccaagccaaggtgaggcaagtcccagttgaatgtcatcccgttcctcttgggcacggcggaccgctctcgcccttaaaggtgcgttgacgtggaaggtgaatgtctctttgtgtgacagtgcctcagcgcacgggccgacgaggggcacacctatccccctggctcgctctctagctggattcaggtggaacggaggaccatgaaccctctggaccttttctgccttggtcctatgcttgtaaggtttccggcctaagaggcccatcgactccttctgccttctttcagttgattacaaaataaataaataaataaataaataaataaataaaaaagcaggacattaaacctgccacctccagagggtcctctagcttccttctccactcctgaattgagcgaagcggtgccgacctccaccctttgggcacgagcccctgtgcacttgggagactcctgaacaccctcggagaagccagaaagccccgggagatggctccgtctgctgctgtaccagaccaggtcctgcaaaggatgcatcctccgagcctcctccctgcaggtccagtggggcctgccccgattctacctgagggacccactggaggagaggcacggggatgctgcctgagcagcggacccttctggcgcggagcaggctgtccccaggcagagtccgacgggtccttccttctgggtgcccccggcttcccggactccagcaggcctgggaaggccccgggcccccttagccgatgcccagagagtctccatttctcaagctt

SEQ ID NO: 391296 - DNA, 1000 bp, Homo Sapiens
agacaaattgctctcggtggtggttcaaagtactgcaattgactggaatagcaccgcgcagttttccttcctctcgtgcaagataagagtgataggagctgtatcgattacctgcaagatagaagtagaagcgggccgggtgcggtggctcacgcctgtaatcccagcactttgggaggctgaggcgggtggatcattcgacgtcaggagttccagaccagcctgaccaacatggtgaaaccccgtctctactaaaaatacaacaaattagccgggtgtggtggcaagcgcctgtaatcccagctactcggttggttgggcaggagaatcgcttgaacccgggaggcggaggttgcagtgagccgagatcgcgccattgcactccagcctgggcgacaagagcgagactctgtctcaaaaaaaaaaaaaaaagaagtagaagggaagaaaatcgcaaggaactagactaaaagaatctcgacccttgaatggagttacacgaacggccagatgaaagaaggaaggcccggacctccactcagggccgactaggggactggcggagggtgcacgctgatggatttactcaccgggtgcttggagctccagcagctggctggagcccgcgatgacgtcacggactcgggtcacatggccaagtccgccccgccccctccccgtccccgccgctgcagcggtcgccttcggagcgaagggtaccgacccggcagaagctcggagctctcggggtatcgaggaggcaggcccgcgggcgcacgggcgagcgggccgggagccggagcggcggaggagccggcagcagcggcgcggcgggctccaggcgaggcggtcgacgctcctgaaaacttgcgcgcgcgctcgcgccactgcgcccggagcgatgaagatggtcgcgccctggacgcggttctactccaacagctgctgcttgtgctgccatgtccgcaccggcaccatcctgctcggcgtctggtatctg

SEQ ID NO: 391297 - DNA, 1000 bp, Homo Sapiens; identical to SEQ ID NO: 282066

SEQ ID NO: 391298 - DNA, 1000 bp, Homo Sapiens; identical to SEQ ID NO: 206252

SEQ ID NO: 391299 - DNA, 1000 bp, Homo Sapiens; identical to SEQ ID NO: 282069

SEQ ID NO: 391300 - DNA, 1000 bp, Homo Sapiens; identical to SEQ ID NO: 206251

SEQ ID NO: 391301 - DNA, 1000 bp, Homo Sapiens
gtggtgtgatctcggctcactgcaacctccgcctcctgggttcaagcgattctcctgcacggggattacaggtgcgcatcaccatgcccagctaatcttttgtatttttagtagagatggggttttgccatgttggccaggcttgtgtgtgtgtgtgtgtgtgtgtgtgtgtgtgtgttgttgttaagagagacagggtcttggtctgttgctcaggctaaagttcagtggtaccatcatagctcacagcggccttgacctgctggggtcaagcaatcctccggcctcaacctcctgattagctgggactacaagtgtgcgccaccacacctggctcgtttgtgtatttttttgtggagacaggatcttggctgtgttgcccaggctggtcttgagaactcccgggctcaagcgatcctcccaaagtgttgggatgacaggtgtgagccaccattcctagccttgaagtgacctactgttgtgctgccctgatgcacggtctgagttctggagcatgtctctgggcagaaagcccctgtacagctcttagatggacttccaggatgtggttttagtcgtagctaggttcacatccagaactaaaggagttagagactccagctctggggcctcgtgtatgactaggaagtgggaattctaggatacgtctttaaatactgtgtccagagcagaggtgatgggaggagctgctttttttgggggccgggggggggtttgggtttttcttttttctttttttttttgagatggagttttgctcttgttgcccaaggtggagcgtgcagtggcacggtctcagctcactgcaacctgcgcctcctgggttcaagcaattctcctgtctcagcctcccaagtagctgagattacaggcacgtgccaccacgtccagctaattttttttttttttgcctttttagtaaaaacgaggtttcaccatgttggccaggctggtctcgaactcctgacctcaggtgatc

SEQ ID NO: 391302 - DNA, 660 bp, Homo Sapiens
ggcagttccagcaggcctaatcgccactcatcagcaaaggcaggctatgctatagtatcttccacatctatcactgaggctaccgctccgctcccctccattacctctgaacaaaccgaattagttgccttaactcaagccctcgctcttgcaaaaggactacgcgtcaatatttatactgactctaaatatgcctttcatattctgcaccaccatgctgttatacaggctgaaagaggtttcctcactacgcaagcgtcctccatcattaatgcctctttaataaaaactctgcttaaggccgctttacttccaaaagaagctggggtcattcactgcaaggggcatcaaaaggcatcagatcccgttgctctagacaatgcttatgctgataaggtggctagacaagcagctagctttccaacttctgtccttcacggccagtttctctccttcacatcgttcactcccacctactcctccgctgaaacttccacctatcaatcccttcccacacaaggcaaatggttcttagaccaaggaaaatatctccttccagcctcacaggcccattctattctgtggtcatttcataacctcttccatgtaggttacaagccgctagcccatctcttagaacctctcatttcctttccatca

SEQ ID NO: 391303 - DNA, 1000 bp, Homo Sapiens; identical to SEQ ID NO: 282071

SEQ ID NO: 391304 - DNA, 1000 bp, Homo Sapiens; identical to SEQ ID NO: 114855

SEQ ID NO: 391305 - DNA, 1000 bp, Homo Sapiens
  misc_feature (27)..(27): n is a, c, g, or t
  misc_feature (118)..(118): n is a, c, g, or t
ggttgagggtgaacaggatgttacaanagtgcccaggccatgtggaacctgcccactccccacactgaggaggggactgagggtgacaagcccagggccccaaaaaacagtacctaanatgggctggagtgaggaagggaaactgattgcaaccacctatggggctgcagacctgaaaatgcaacagcgcatcatgaacctgatctgtgacccggacctaaccaaggtgagccgatgcctggagcatgccctgactgctcgacacccccgaacccgctacagcccaggttgggatgccaagctgctctggctgcctgcctcctacctgccagccagcctggtggatgctgtgctcacctgggtccttcccaagcctgcccaagcagtctactgaatccagccttccagcaagagattgtttttcaaggacaaggactttgatttatttctgcccccaccctggtactgcctggtgcctgccacaaaataagcactaacaaaagtgtattgtttaaaaaataaaaagaaggtgggcagaaatgtgcccagtggaaggctgaccccatttaagtgccaactactccaaaccgacatgctcacggtctctggcctgttcagtccctgcaaaacagctagcacccacagtggggcgccagggaactgcctcacatctacagctgcacgtcggggagtggccatcaaagggcactttaatacatttcccttattttctgaaggggagtaaggttgcaattcagtgtctgtactgggaatggtcttcatatttcttgggggagaagagcaggtgatgagggttctgggccaggctgggtggcttccatggaagaaaaggcaatattcacataaattctcctgctaaggacactgaccacacaggtgtgcaaggcaacttatcatacttcgaaaggagctggatcccttgaggattggccaggaagggaggtgctgggcccttagcggtgcacagaaggccaggaag

SEQ ID NO: 391306 - DNA, 835 bp, Homo Sapiens
atgcagatgggttctctacctggcctgtgccttgttgcctgttcctttactgtacatgtgatgacaagaaaagaagatggaccctccatgttgaacatgcctgataaaactctgcaaagacaatgtctagcacttatatctccagtaactcctgtcaaggtttattgttgcttgttcatcattgcagtcctgactacaagtgtgattgcactttctattgttttgtcagcaagaaaggaaaagccagtggtagagtcatctaaatacgctgcttgcccaaaaagctgaattagatttaggagtaaatgtttttatttttctgaaggcataagaaattagacattgagtcaaacgttctgtgtctcattagaagccagccttgctcagtttgcaactatggaggaactgaatttcctgaaaagatacaaaggcccttctgaccattggattggccttagaagagaatcatcccatcgcatttggaaatggacagacaacatggaatataataacatgcttgctatcagaggaagtggagaatgtgccttcctgaatgacaatggagtcaacagtggcagaatctacatgaacagaaaatggatttgtagcaagccaaacaattatgtctacagttgccagttatgtccccactgggatactacctagtagagctgtgagaagagggccaccatcctccagactccagaatggtggaatcagcagcagcttccaccatgcccctggaaaaactgcaagtaacagacctgcacatgtatcccctacatctaaaataaaagttggaaaaaatggaaaaaaaaaaaaaaaaaaaaaaaaa

SEQ ID NO: 391307 - DNA, 1000 bp, Homo Sapiens
gatactatttcttgttctgaactctgttgtgtctaatatcaatgtagtccttccacagctttattttagtgtttccatgatatggctttctccatatcttgatgataacctatttatatctctatgtatttggagcaagatataaaatttaaggaaggtttggaaggttgattttttaaagatttttcaagatgtaattcttatttatttttgttctatttgacgttctctgagtttcctatatctgaagtttgattttctgtcacttcttttagaatatttttggcagttattttgaaaaatatttcttttgctctattatttttccctcttttctttttgggatttcaattataactagggtaggtaatttcatctcagacttatgcaggtactttttctcagggtctcaggcatgtagccttctcacacttctgttcttttcctgcctgttttggtgagatcagtgatattcctccttcaccttcaagagcagttttgttttgtttttcctgttttcatactcccagcatcaggagtattctaagtgtggcagtttttgttgccttcccctacatattaagtggaatatcttggtctatttggactcttataacaaaataacatgaactgggtgactaaaaaacaacagatatttcttttttcacacttcttgaggctgtaagatctcaggtcaagatgctcacaaattcagtgttgatgagagcccatttcatggttcatagatggtgtcttcattcaatgtcctcacatagtggaaggcacaaaagaactccattgagcttcttttataaaggcactaatcccattcctaagggctcagcccccaagacttggttgcctcccaagtgttctgctctccctgatctgtatcatatacagactctcttggattccttaccaattgcttgagagatcacagtgggtttgtggggaaaaagttttcaagatgatggatctttcccaacttctgcagctg

SEQ ID NO: 391308 - DNA, 1000 bp, Homo Sapiens; identical to SEQ ID NO: 282074

SEQ ID NO: 391309 - DNA, 1000 bp, Homo Sapiens; identical to SEQ ID NO: 114857

SEQ ID NO: 391310 - DNA, 1000 bp, Homo Sapiens; identical to SEQ ID NO: 206257

SEQ ID NO: 391311 - DNA, 1000 bp, Homo Sapiens; identical to SEQ ID NO: 195296

SEQ ID NO: 391312 - DNA, 1000 bp, Homo Sapiens
ggaagggatgggaggagaaggagataatgatcctgttcttggacattaatgttgttttattttctaggaaatttcctcacctcccaattctgtgtaatcaagaatacctccttatgaaaataattctgagagcatgaatatttgaccttaaatctccagtgactcagagcttcacccacaaactcaggagaacataagcctgctcgtaaagctcaatccttctatcatggcaccaatcacaagaaccttggacgtttgactgactctatcctttctctcctaactataaatcctatttgtgtgtcgtgggtatggaaggacagatatatttctttaggcattcttggatatctgtaacttctatgatcattactccaaagttgtttccagaaattggttctatttcttcttatccacctactccattgctttatgaggtttaaggaaggaaggcggtataatccctattcaatatattttttctaaaatccaacttctgaccgcccagtaggaagaaaaatgagacattttttccattacagagaaatgcttcttgactttaacatcagcattataaaaagtgtcaaataaaaaattaccatcattatcattaaaataaattttcactgtatttgagatgggagggttaaggctcagggattttatttcagtgaactgctggaactcacacatgccctgatatgtaaatgatgatttatgttggcgagtctgagagcaagcccaaatgtgttcttcaaaggacaatgggaaactgtaaagtagagaactaaagaataaggcctttagaatctgacacatctgggttcaaattctgaaactgtcacttattacctgtatgaacatgggcaaattatctaatctctctgatctatttttcctcatctgtaaaataggtgtaataataacaactactttgtcggttgctctgagggttaaatgaaaataaaaagaaaatgtgaaacagcaccacaggtacttg

SEQ ID NO: 391313 - DNA, 1000 bp, Homo Sapiens
ctgctcgctcccgccggggaaaagaaaactttgagttctatgaattggccaagttgttgcctcttcctgcagccattaccagccagctcgacaaggcatccatcattcgacttacaattagctatctgaaaatgagggactttgctaaccagggggaccctccgtggaacttgcgaatggaaggccctccacctaacacatcagtaaaaggtgcacagcgaaggagaagccccagtgcactagccattgaagtatttgaagcacatttgggaagccacattttgcagtccctggatggctttgtatttgcactaaatcaggaaggaaaatttttgtacatttccgaaacagtctccatctacctaggcctctcacaagtggagctgacaggcagcagtgtctttgactatgtccaccccggagatcacgtggagatggctgagcagctgggcatgaagctcccccctgggcggggtctcctgtcacagggcactgctgaggacggagccagctcagcatcttcctcctctcagtcggagacccccgagccagtggtttgcttcccaccagcgagtgatcagtttcttctgtaggacccctgtcaggaagaacatgcctggatcctacttcagagagaactcagccagggcaaggggctcttgtggctttttgggtgggtgtgagttcatagaggggaaaatcaatactgtaccaggatttagacaatttagcaaaatgcatgaggcagtactttggatgatgaataactacagctgcatggctaacccattggttgtgtaaagtatgggttatcatgttttgtctaaattttcaggcaaaatctagcctgttttgtggcattaggatcatcattatagtagtatgatttttatgctattatacttacgctatgtcccgaatgtttttaaggccagcaaaatggaaacagtagagtacttgcctgaatgcaaataaacttcagtttcaacttaaaaaaaaa

SEQ ID NO: 391314 - DNA, 1000 bp, Homo Sapiens
ttttgagatggagtcgtgctctgttgcccagactggagtgcagtggcgcaatctcggctcactgcaacctcctgcctcccgggttcaagcaatcctcctgtctcaggcttctgtaggggcctcctccttttattatgtgggcctgggagccccatccctctctgtgcctccgtcattccggccgtatatacagagggggtggctgtcggatccctccaaagccctttggccaaaaccctgttggacagatgagactgtgggccagaggggcaggggtcaccagagcgatcacagctcaggcacccgacgcccagccccagccttgggttctgggaacccttctggcttttcccagctggtggtgcccaaagccaccctcagccaagccattctccccgcacagtgggggacaaagtgcctgctgacctccgcctcatcgagatcaagtccaccacgctgcgagtggaccagtccatcctgacgggtgaggccccccccaggaggccgggacctagtgggccaggactaagggatgggcgtgtcttcatgtggggcttctcatctctgattccctgaccaggtgaatctgtgtccgtgaccaagcacacagaggccatcccagaccccagagctgtgaaccaggacaagaagaacatgctgttttctgtaagtcaaatgtctggggcctttgcccagacaatgataaaaataacaacattaggattatgatcacgcctgtaatcccagcactttgggaggctgaggtgggtggatcacctgaggtcaggagttcgagaccagcctggccaacatggtgaaacccgtctctactaaaaatacaaaaagattagctgggggtggtggcgtgtgcctgtaatcccagcaacttgggaggctgaggcaggagagtcacttgagcccgggaggcggaggttgcagtgagccaagatcgtgccactgcactccagcctgggtgacgagagcaaaactctgtctcaaa

SEQ ID NO: 391315 - DNA, 1000 bp, Homo Sapiens
gtgatggggcgaggggacctcaaggtgacaagaaagctggtcctgggctggtcaggaggagtcatctccaagacactcactcacaaagctcaccgatgataatccaattacaacacacgtaatatattaaaatatcttaaaatataataaaataggccagacatggtggatgatataataaaataaaataaattaaaatgtaataaaataggccgggtatggtggctcatgcttgtaatcccagcactttgggaggctgaggcaggcagatcacctgaggtcaggagtttgagaccagcctggccaacatggcaaaatcctgtctctatgaaaaatgcaaaaattagccgggtatggtggtgcatgtctgtaaccccagctactcgggaggctgaggcaagagaagtgcttgaacccgggaggcggaggctgcaacgagctgagatcatgtcactgaactgcagcctgggtgacagagtgagactctgtctttttttttttttttttttgagacagagtctcgctctgtcgccaggctggagtgcagtggtgtgatctcagctcactgcaacctccacctcccaggttcaagtgattttcctgcctcagctcctgagtagctgggactacaggcacacgccaccaggcccagctaattttttgtatttttagtagagacagggtttcaccatgttgatcaggatggtctcgatctcttgaccttgtgatccgcccgcctcggcctcccaaagtgttgggattacaggcgtgagccaccgtgcctggcctgagactctgtcttaaaaaaaaaaaataataatacgaaaacaacaaaaacaatgacaccaattaatatggcacagctgcaaatgcctcatatctactaacattttgcagcctccaacaacaataaataagtgcttttattttctctgtttcataggtcaggaaactgaggcaccaagagggaaagtgcttgtgagatccaggcagggaattc

SEQ ID NO: 391316 - DNA, 1000 bp, Homo Sapiens; identical to SEQ ID NO: 282078

SEQ ID NO: 391317 - DNA, 1000 bp, Homo Sapiens; identical to SEQ ID NO: 282079

SEQ ID NO: 391318 - DNA, 1000 bp, Homo Sapiens; identical to SEQ ID NO: 282080

SEQ ID NO: 391319 - DNA, 1000 bp, Homo Sapiens
tttttttttttttttgcattttttagtagagatgggggtttctccttgttggtcaggctggtctcgaactcccgacctcaggtgatccacctgcctcggcctcccaaagtgttgggattacaggcgtgagccaccgcgcccggccttcagtttcttcctaggccgttctgtcacccaaatagctgctacccagaggggcggggttgacctaggctgaatatccactttgtttttatggatggctcccttcccccattcgccttcccagaatatccttcaagttccacttcccagggagctctgggggaggggcggccattctggctccgtccccagtggccaccttggaaacatcggctggctttgggactattccacctccttcccctgagcccagatctgcccccaccatcctttctctggcttcttttagcaagttatcaactaatcactaactccttccttttcctctgcatgccagcctgaaaattccaaatctagcctctgaatgtcttggctccatctcttcagacccctttgcctttaaaaaaaaaacaaaaacaaaaacaaaaaaacccataatgcccatagaatgtcaaatgaggggcctcctgcctcctgctctgaatattctgtagctgtagaggcattttaaccctttgtcctccagcatcccttcacgtcctcatcctctctaacctcctttttctttttttaatgctgcagcctccacactccacccacaggtgacccttacctttttctctagctggatctgtgtttcttcccttcgggcccccatgttttcctgcacccgccctaccatggtctctctctgcagttatttaatgcctgtgtcagatctactgtaaaaagaggattaagtaaaataaaatgagagcaattatatatataaatatatatcatacacagagccctgtgtgtgggttgttcctttctgagcagttggaagagccaggaaggagtggagggtggatct

SEQ ID NO: 391320 - DNA, 1000 bp, Homo Sapiens
gtgaaatgatgaaggaaaatccaccccagtagcgccaaggccagcaccccacatgctgtccctgcaaagtcagagcaggggacacggcagggagagtggggagcgtctgcttccttttcctctccaccctgacttgctttaacagggtctttggggtgagggaagtgtagcaccccctaggatgccatgagctgaggagatttgagtctgggcctcaccctgctgggggtgggtggtcttagtcactcagttttctgtggggggttgggggatagaagtggtggttgtggtcagtggtaaagggtccctgcagggaggtgctcctggttttctacctcggtgaaggatctttgacacaggcaacctccatccaggcacccagtggaaacggacagctgaccatatagcccagtgccttttctgacacacttcttccttggggaagttgaggttgggggcgggctgtgcacagggctccccagcctccctgtgtgtctgcttccttccctgccctccgcccggtggccccatggcccacagcccacagggaagcaagttggtgccacccctgcctcccctccgcagccggcgggcctgtaaatgcctcccttgggcccccatgaggccagtgagccagaagcccctctgacccagaggtcactgtgaccagcacatcctggagaggaggcctcgcccttgcacctttcatctgcaagagttacttttacatttattttaaatgttgatttaagtatatacttcatctacagttatccatataaatagattcattacagggcctggctctgaataaacacagtaagttggagaggctttttcattgatctggttctacactggtggctttataacatagtgctttgacacctcttgcattgtgttgctggtgaccattggggtgggatcaggaagggcccagtagcttctgagctccctagcattcttgtcctgaaggaagccagcctttgcagaaggatcc

SEQ ID NO: 391321 - DNA, 1000 bp, Homo Sapiens; identical to SEQ ID NO: 206236

SEQ ID NO: 391322 - DNA, 1000 bp, Homo Sapiens
aagtctgtttatatcttgcgctgctctcctcaggagaggttaagatgtactttgtgtacgttctggagctgctaaggacttctggtgggaggagtccttccatttattcatccaaatatgttagcgcttgacaggcgctgtgtactagtcattcagaatatcatagtagccaagtccctgccctaatgaactgacttccagtaggaaaacacaaacactggaaaacagaataattaatacaaattgtattactaggttgaatcatgtgcagttactgatatttaaccatccccgacctgtaaaaacagcaattttatatccacttacaactatgaaataagggactgagttagaagaaaatgtaatcaaggacaggaggtaagaaaaagtctctgaggaagtggcatgtaagttgctacctgaaggaggaaaaggctagctcctcttgttcctctgtttaaatcaagatggtagatgcaaatgccagacagatgaaaagagtgcactgggcctgatggggactgtgtctcgtcaggagtctcctgctctgtccaaagagtgaggaagagggagggcatcagccctttacatatggggtaggtaggccctgtgttgctataccttgtgatcttccaagataagctagaaaatggcttttagaggaaaaacattcaaatatactatatttgagttgaaatgtaatttttatgtgaagtctttcagattatacatgtcagctatttcagtgcagtggtttacacctgtaatcccagcaatttgggaggctgaggtgggaggattgcttgagtccaggagctcaggaccagcctgggcaacatagcaagatctcaactctacaaaaattaaaaataaaattagggcccagtgtggtggctcacacttgtgatcccagcactttgggaggctgaggtgagaggatcacttgacgccaggaatgtgagaccagtctgggcgacatagtgagacctcctctctattc

SEQ ID NO: 391323 - DNA, 1000 bp, Homo Sapiens
gttgcctgcttcttagtgtagacctttctggtataacagagatgatccccagtttgttcatttgttgaaggatgcctctgggaaactttaagccaaggagagggttaattatatcaaatactacaaagtggcaagaaatctatcttaatttgttataaagtcagtgtagtatccacaatttaaaattttaagaaggcaatcacgaatggaagttataggttgagacagacattcagtaaagaattcaaatattcttcaagcagtgccggaagaaactgtgtgtatgccggattggaacactcgattttaaaaaacttatttcagccagatcaatttgcaaacatgcgcatgcacgcacacacacagacacacacacacttgcctttggggtaaaaggaaacttgagttagtcgttatcaaaagatatcatttacctttctttttttaaatcattaattttttaaacagccttgatgtgtttttataaattgtagactgtgaatttttgtgctgtttgaaatctaagagagagttgcctttctttgtattcttggagcaaagtagaaagtgaacccatgactagaaagataatatcaagtaggatattgtaaacacacctcagggagataacatggggtggaggcagacaaacaggccaatccgggggaggaatggagttaaggaaagctctacaatgaggcagattttttaatacccactccttccaagtccttcagctcaagctgcagccaaatatttgcataaagagctggtaaaggattccagcttcctggttcatgacattacagcatggatcgttttcaaaattaatactgcctcctgtttcagcagtggctgcctgcacagctctccctgtggctcagagtatgggagtgagtatgccctgtaacccaaaagaggtgtggtgagctcggcttcccagcacagaatcacagagcaatacgggtacctttaaactttaaagccacacctgaaattt

SEQ ID NO: 391324 - DNA, 1000 bp, Homo Sapiens; identical to SEQ ID NO: 282083

SEQ ID NO: 391325 - DNA, 1000 bp, Homo Sapiens
gattacaggcatgagccaccgcacccggcccagataatttttaatagcctttgatcatggggtgagtgagggagtaggtatacttggcaaatgcatggttctctgatttctagctctaaagcagccttatctgaatccccaaatcttgtgatgctgagtaccattactgaaccagtctgcacggtaggcatctgctaccaaaatttacctcctacctggtaggtgtcatctgataagaaagaagacaggttattttaattttttgagataatcacagaaaattgcagcccatactctttattaccgaattcaagtttggaaatagaccctttgttttaaatcatgatgggtctttatcccaatcatttatctgggtcatttttccaactttggagttctaggaaagaaccttgaaaacctgatatgattctgcagcatgaggtctacggtgaccatttgggcaaagctccagtggcaatcatttattgtgttttgcatttcctgggatttattgaaataagaattcactgtgattatgtagtcttctggctagtatcaggcagctctgcttttaatttggttaattttattttctctgaagagggagaagaggtacaatttaatcttggcctccacaagcatattaaagctcacgtgttaatcagtgcattcttatgctcctacattaaatgccttgggtaaatggataaatggacatgtgcccagctttaattttttttgcaacagaaagatcagacttccgtatggcatcgttggatttcagaggctttctggtgtatctgtaaatctgaatgttgccttctgccagtctgtataaccaggtgattcatgctgcaaatgaaatcaggaagcagtaaagtgttaaagcaagagtattgtccaattcacttgtcttcctgatccttgtactttatttcacgtgtcggtgtttacattacatacttatatttcctgtgaaagaaagagttaaataaattgt

SEQ ID NO: 391326 - DNA, 1000 bp, Homo Sapiens
gatacatactacaacatggctgagccttgattcagcattttagtaatgtgagctccttaattgtgttagctgtttgtttgtttttttgtaaccatgaaagtttatttatttatttttcaatagttttgagggtacaggtggttttttgttacatggataagttctttagtggtgatttctgagattttggtgcacctgtcactggagcagtgtacattatacccaatatgtagtcttttatccctatgaaggtttattttaatcctagcacttgttaatatttatccttaattcttactaacttttagattgtgggtattatatcttcatgagaatagctaaaataattttatttggatattcctcaaagaactattgaatgtgagcatgctaagattacccctggcaaaatggaaaatgcctagcacctggaagcatctgtttctgccggtcttctaggagagaggaaatatttatgtcttccatttatgtattttgactggggaaaattttcccttttattctggggagctgttactcagcataagagaatgtagaggagaatcacccctttcacatatctaatagctttaccacattactacagtagtatcttatgttgtatgcattgattgtcaatctcttctcctcatctccaccattttgatagcttaaggcttatcattcattctctgtgcatagaaaaaaaaaccgaaatgatgttttccactattttgtaatctttccttcatgaattgcagaagaaaagtgtttgggttttgtcccattcatcataaagcggtacacaatagatacggttgcattttaaagcaaggctaagatggatttaagatgtatttcttgtcatgtgaaacgtcctcctcagtggtcttaaataaaatattaattagataattctgcagtgattaatatgaaaatggttacataattcttagatggtatgtattgtgttgggctaacaccacattgcttttctaga

SEQ ID NO: 391327 - DNA, 1000 bp, Homo Sapiens; identical to SEQ ID NO: 114858

SEQ ID NO: 391328 - DNA, 1000 bp, Homo Sapiens; identical to SEQ ID NO: 282087

SEQ ID NO: 391329 - DNA, 1000 bp, Homo Sapiens; identical to SEQ ID NO: 282088

SEQ ID NO: 391330 - DNA, 861 bp, Homo Sapiens
agtactttgctttttcattactgtatagaattccaccctctgaatatgccatgatatttgttttcattcacctgctggtggccacatgggttgttccaatttgggttgggatagtctaactaaagttactataaatctttctattttgcccttgatgttattagaccctctttggttaactgggtggagtgtggaggaaaactgcctggattcgaatctcagctccaccatttaccagctgtgtgaccttgggctagtttcttaatctcgcagtgcctctattttcccctatctgtaaactggaggtcacatgatctactgcagggtaggaaagttaaatgaaggagttttataaagctgttggaaatgtgcctatcataggtatgaaataaacaactatcgttcatctccaactcccaaaaacaaaggaaattcccatgaatgagagcatccgcagaccaaaagagcagatcctggaggtcagagggcatggtggttccaggaactaggcggtactgcctgcccacccctgccctacgtagggaggcataacaaagtcgctttccattagaatgaattgaattttattaaaagcatcccatcgctcaaccatgtcatgagtggaggagtccttctccctgtcaaccccagaccatcccccaacacctccctgaaattcctgcaaggtcaggccgatctcaggctctgactcctttcactagcctttctggtgatgtgatcttacccagcttcctgtttgtcttcctgagagacagtagatttagaaagtgaggatcagagggtggaaaataaaagctgtggtccccaggagtcctgaacatctggggacagcgggaaaac

SEQ ID NO: 391331 - DNA, 1000 bp, Homo Sapiens; identical to SEQ ID NO: 282090

SEQ ID NO: 391332 - DNA, 1000 bp, Homo Sapiens
aaacacagcagaaactgatagataagggaataaagttgaaatgattccttaaaattcatggacacagataaatgcaaggtgagaattgacaaatgctataaatgctttctttttctgaaaagattttgaaaaatttaaaaaagtatagctactactgtgttcaaaacgttttaaatgacaaatgactttcccaggggaatttgcagttctgtaaatatcttaaataaaagccaacttaagaagagcccagcattaaatttacgatcttaggtggtaatgaaaagtatatgctgctttgtatttatgtaaaataattggccctctccatcttttctcatttcatgtgtcaggtagtttttctgaaccacacaaatggctttcctggagagagatctgtagcacagacagtgggttacagcagccccactgagggaccaaactcaaaccctgcatttccatcttaccaggtcaaaccaaaccagtcagtggggctactttttatagtgctttaatctgaatttagagctgatttttaaaggagtctttaaatgttaatggtatactaactaacgaatagtgcctcattatcattcttgagtcagatacttctgttgatgggagaaacagaagaatccttccctttgggtgtgttgagctcccccaaagccatcagcatctcttttgacaaatgctagtcctttctctgtgctttggaatcaggttcctgcatcatcacccggactgtaaaaagtatcataagcctcccttgccagatgccaactcgtggggcatttcaacagagtttctttgaaatgtttacaacgtattcttcttgataagcaatgaacttaacatttagatgcaatccgtgaaaagaaaaaaaaatctgaaaaatatctcctgcatcaggtctgtgttatttatgtattgtgaatgttttcttaattttattggctgtatgctttcttacacataataaaaatattttgtgacggaattc

SEQ ID NO: 391333 - DNA, 1000 bp, Homo Sapiens
tcagttttcatccaacttgtcaggcagggcagggctggtatgaagcccaggacatatcgctgggacatcccataggtctgtgagattcccaggtccctccaaatccacacggtcatcatgggcaaattagtttaagtctgatctgttaagatccagatctctcacaccaacagcacacacccctttttcccatggccatggaaggagggtagcatagcctgactcgagtcctcgttctcagcagaactggttctgtggtggccacttccctttctcaacttttacctacttctgtttaataggttgttctgcaagtctgagagcaacggcaagcttagaagtgtggactcggcctggtacagtggctcatgcctgtaatcccagcactttgggaggctgaggtgggctgactgcttgagctcaggagttcaaaaccagcttgggcagcatggcgaaatcccatctctacaaaaaatacaaaaattagctgggcatggtggtgtgcatctgtagcctcagctactcagggggttgaggtgggaagatggcttgagcccaggaggtggaggttgcagtgagccgagatagtgccactgtgctccagcctggatgacggagccagatcctgtttcaaaaaaagaaaaagacaagaaagaagtatggactctaccttcttgcccttgtggagattgggaactgcctgcccttggcctctttcctgtccatcttgtattatgaaaggctgtttctggcacacccgggctcctctgtgtggtttctgggaagtgactgagggtcaggggaatggagcccctctgcagccggccgctggtaccttccctattgaacccttctttaggcttgctcactctttttgatgggtgtctttccaaagctggctggggacctccctgattgagagacatggggccagttctgttgctgtggctacacgggaataataaagcagaagaacacctgaggaaagctgatgtttact

SEQ ID NO: 391334 - DNA, 1000 bp, Homo Sapiens; identical to SEQ ID NO: 114859

SEQ ID NO: 391335 - DNA, 1000 bp, Homo Sapiens
tgcccatgctggagtgcattggcacaatctcggctcatggcaagctccgcctcctggattcaagtgattctcctgcctcaacctccctagtagctgggattacaggtgcacaccaccacacctggctaatttttgtatttttagtagagacagggtttcactatgctggtcaggctggtctcgaactcctgacctcaagtgatctgcctgcctcagcctcccaaagtgctaggattacaggtgtaagccactgtgcccggcctcctgctggattctttattcaactaggtaggttccagattaaatatgagccatatgctcattaggcaagaaatgtgaaagagggtgcctctacagtgttggtgacccaacactagccaacttgagtcagaaaatatggaagaagataaattactctcacatatctaagacttttccatttttcttcactttctgttgcagggcccatatgagtaaatctatattccgtctgctccaacacacaccttccttctcttaattttgctttcccacccaccaagaaatttgtaagtcaaaatttatttccatgagtaactatttctaaatgattggaaatttttgaaaaagtggtatggtttatatacctaatctgcttatctgctataagtcatatgagaacaacagctaggatgattgtccaagcagctttagatgtgtttagggccaggcaaaaggtttgcttgttttttctttttgcttaagatctgggagattagcaaatttctcaagactatagactgaactgtaatttttaccaactcttgctcatgagcctcaaaatgaatatatccttgaataaagtataaatatttcaatagatacatctctctattatccattttcacaattataaaagcatcagcaaaattgtggatatgtgttccagtcactcatggatccatggaaatggaccgtgtttaaatgaatgcttcccttggatgggatgttcagcaatagc

SEQ ID NO: 391336 - DNA, 1000 bp, Homo Sapiens; identical to SEQ ID NO: 114860

SEQ ID NO: 391337 - DNA, 1000 bp, Homo Sapiens
ttggccaggagacagataaaactacaacaagaaatagagaatctgtttatttactgctagatatgattgtacaagaatctccattccttacaatggatcttttggaatcttgttttccttatgtcttgctgagaaatgcataccatgctgtctacaaacaaagtgttacatcttctgcataaaattacctacttaatcaagataagcacgcatttttgttgccttggttttacctgtagactgtggaactattttaccttaagacctgaaaaagttttgtggattataaatttctttcatacggttgtattttctgatcattggtttcttaatatggttgtactacagtatacttggttgatttaggttgcacattcactgaattcactgagattattcctataattttaaagtatcatttatttgaaaaacatacattatcaacatgtttttgatatttgataatgaaaaaaatctttgcttgtttatttctgaaaaagaactgtatttagtgattattttagatagtgatattatagcattcatctgtgtgtaaattatttcatatagggaagagttctgatctgtacctatggttcttattgaaaacaacattggatgtgcatttctgtgatgttatgaatacatttctactttattttgaaacatttgccaaactaaatactgtaacactgtataacatttaaaaatgttaaagaactgcttagtattagaagcagatcatttcccaaaattctaagagcagcagcatatgttgttgcttgtataaagcctagcgataatttttagactaacttccatggtgccctgttggcattagcactaccattgtaccctgctgtataataaacaatcttagacatttatcaactgttgatacaaatgttagtccctaaccactttttatatatgttttaaatttttgaaattcaagtgtaccttccataacataaaataaacactagactgtatcacactt

SEQ ID NO: 391338 - DNA, 1000 bp, Homo Sapiens; identical to SEQ ID NO: 282094

SEQ ID NO: 391339 - DNA, 1000 bp, Homo Sapiens
tataaagtatagcaggatttctgtatactctgcaatcagttctttttttaaaaaagtcaaaaggtagagaatacaagaaaagtttttgggatataattggaatgactgtgaaaacatgacctttgatactgaactcatttgctcactccttaactggacagcaaagtccagtatgtacaattgtgttgggtgtgggtggtctccaaggccacactactctctgaattgactttgagttttgtttgtaagatgatcacagtcatgttacactgacctgaaggatatatatccctttaaaaaaatcactctgcctcattcttatttcaagatgaatttctatacagactagatatgtttttctgaagatcatatcaattagacattttgaaaatgatttaaaatgttttccttaatgttctcagaaaacaagtttcttttgtagttttaatcaaaaaagtgccctttttgtcactggattcacctagcattcataattttttttcatacaatgaattaaaattactaaaatcatggactggctttctggttggatttcaggtgagatgtgtttaaggccagagcttttctcaatatttgattttttcccccaatatttgattttaaaaaaatatacacatagttgctgcatttatatctgctggtttaaattctattatatttcacttatagccttttagtatggcaaatgatattttacttttacttaagcatttgtaatttggagtatctggtactagctaagaaataattctataattgagttttgtactcatcatatatggatcattcctcatctataatgtgccccaaatgcagcttcattttccagataccttgacgcaggataaagtttttcatcatttaggtgccaaaaaaaaagaaaagaaaactattcaaaagctcaggcaatctataagaaatcttttctttgcctcttagtatcaagaaattaaaaagaaaggagaaaaagaagtgggta

SEQ ID NO: 391340 - DNA, 1000 bp, Homo Sapiens; identical to SEQ ID NO: 206259

SEQ ID NO: 391341 - DNA, 1000 bp, Homo Sapiens; identical to SEQ ID NO: 282100

SEQ ID NO: 391342 - DNA, 1000 bp, Homo Sapiens
gaaaaatgagtctataggctgggcgtggtggctcacgcctgtaatcccagcactttgggaggctgaagtgggtggatcacgaggtcaggagatcgagaccatcctggctaacacggtgaaaccccgtctctattaaaaaatacaaaaaattagctgggtgtggtggcgggagcctgtagtcccagctactcgggaggttgaggcaggagaatggcgtgaacctgggaggcggaacttgcagtgagctgagatcgcgccactgcactccagcctgggcaacagagccagactctgtctcaaaaaaaaaaaaaaaaaaaaaaaaaagaaaaagaaaaatgagtctatagactgctgtagacattagaggtgagccaacatgcaactgaaagtgttagtgatcatggcccaaagaattgctctaattgaggaggcagttgtgtatcctcagttggattccaggattatactttgttgttgttgttgttgctgtaattagtccttggtccttttctgatttgacttcacccccttttccatgggagatgacttcctaggaatgagccttcatagtgatgtaagatcagatgaaacatagccacaaagtcatgtatttaacagtaatttctctgaaagatatagaagaatgttggaggtgggcaggtgtggtggcacaggcctgtaatttcacattttgaaaggccaaggtggaaggatcgcttgaagccaggagttcaagactagcctgagcaacaaaatgagaccacatctctacaaaaaataaactaaaataaattagctgggtgcagtggtgcatgcctgtagtctcagctattcaggaggctgatgtgggaggacctcctgagcccaggagttccaggctgcagtgagctacaatcatgtcactataccctagcctgggtgacagagcaagaccttgcttcttaaaaaaaaagtgggaggcggggttggggcaacaggaaggcaaaaagcctcagggatc

SEQ ID NO: 391343 - DNA, 1000 bp, Homo Sapiens; identical to SEQ ID NO: 201612

SEQ ID NO: 391344 - DNA, 1000 bp, Homo Sapiens
aggccagaactggagagagacagaaccagtctacgttgcagctctgtcccccttagtagctatttgagtgtgaggaagttactgaacttctgtttcccacatgagaaatggtgataatagattcagccttgcagagtagtcgagtgggttttctaagcttatgttgtaatttctcttgggtacagagcacccagcaccgtgtagaatcttcataagtgttagctgttactgtggtacaacattacttaaaggaagttggaagagttaactccgcaaatctggggaccctaagaggctgtgtgatgcctcagcacttgagcccacgtggaaaggctgtggccagggccctgacctgctgtgtctgcagtggggttgtcccagccctcatgggcagctgaccttgagttctggccttattttcccccctctcagggcttggagaagatctctgcctacatgaagtccagccgcttcctcccaaaacctctgtacacaagggtggctgtctggggcaacaagtaatgccttgaaggccaggaggtgggagtgaggagcccatactcagcctgctgcccaggctgtgcagcgcagctggactctgcatcccagcacctgcctcctcgttcctttctcctgtttattcccatctttacccccaagactttattgggcctcttcacttcccctaaacccctgtcccatgcaggccctttgaagcctcagctacccactttccttcatgaacatccccctcccaacactacccttccctgcactaaagccagcctgaccttccttcctgttagtggttgtatctgctttgaagggcctacctggcccctcgcctgtggagctcagccctgagctgtccccgtgttgcatgacagcattgactggtttacaggccctgctcctgcagcatggcccctgccttaggcctacctgatcaaaataaagcctcagccacatttgctatagtcttgtcttatttgctcctggc

SEQ ID NO: 391345 - DNA, 1000 bp, Homo Sapiens; identical to SEQ ID NO: 282104

SEQ ID NO: 391346 - DNA, 1000 bp, Homo Sapiens
ttgccccctgggttctggtcaagggagttcatccccacttgaggttatatcaagaaattcagttgggcatttcaacctgtgacccctgcctgagctagttggctggcttctgcaaggtctcctgtgagatataataaggaatggcttccctcagtccatgctggagattgggaatgcctgcaaggcactttctgctgctgcttctatttttatatttcttaccactccctaaatcagttccagctctgggtagagttaaggcctccccctgtggtctggcttttcagactccccagtgaagatgtgtaccctggaggcagtctctccccctctcacactctggggattcacagtttttcacctgtctcacagagtaggatgcagcctgcagcttcttttgaagggtctatggattcttttgggtttcctgttaagcctctgtgttgttttttggggaaagaaagttcacagtgtgaatctctacatacttttttgtccttccacaggggagagacacactgacattgcctccaattcatcatcttggaaaagaaatgttgtgtctattttatatactcctatttgtatagaaaaagtctgtgttcatataaagtgggcatcaagataaccattttactggaaggacacacagaaaaccattgatggtagaaaccgctagtgtgagacttaagaaggaagctcattttttatcataaatttatggattttttttgacagagtgcacaattttgcttgaaagctaggtttttaaaagcatagaaatgtgttgccacttcacaggactgctgggctgagcaaagtcttggacgggaggacactgccttcaaaacacctgtccagtccattgcctcctctccatccccagcccctggcctggctcaggtcccagaatgtcctcactgggacttcattctacagctgatcctctctaatatgctctccacagtagtcctgaaaggatcttccttctgcccagatc

SEQ ID NO: 391347 - DNA, 1000 bp, Homo Sapiens; identical to SEQ ID NO: 206261

SEQ ID NO: 391348 - DNA, 1000 bp, Homo Sapiens
cggaacaagaagaagaaagaggtgaaggaagaagggtcacctgacagctatgagctgagccctcagttagaagagctcatcaccaaggtcagcaaagcccatcaggagactttcccctcgctctgccagctgggcaagtataccacgaactccagtgcagaccaccgcgtgcagctggatctggggctgtgggacaagttcagtgagctggctaccaagtgcatcatcaagatcgtggagtttgccaagcggttgcctggctttacagggctcagcattgctgaccagatcactctgctcaaagctgcctgcctagatatcctgatgctgcgtatctgcacaaggtacaccccagagcaggacaccatgaccttctccgacgggctgaccctgaaccggacccagatgcacaatgccggcttcgggcccctcacagaccttgtctttgcctttgctgggcagctcctgcccctggagatggatgacaccgagacagggctgctcagcgccatctgcctcatctgcggagaccgcatggacctggaggagcccgaaaaagtggacaagctgcaggagccactgctggaagccctgaggctgtacgcccggcgccggcggcccagccagccctacatgttcccaaggatgctaatgaaaatcaccgacctccggggcatcagcactaagggagctgaaagggccattactctgaagatggagattccaggcccgatgcctcccttaatccgagagatgctggagaaccctgaaatgtttgaggatgactcctcgcagcctggtccccaccccaatgcctctagcgaggatgaggttcctgggggccagggcaaagggggcctgaagtccccagcctgaccagggcccctgacctccccgctgtgggggttggggcttcaggcagcagactgaccatctcccagaccgccagtgactgggggaggacctgctctgccctctccccaaccccttccaatgagcg

SEQ ID NO: 391349 - DNA, 1000 bp, Homo Sapiens
acacaaaactatcataattaatggacaaattcccagactaatataaaaagcaaacagctcctcaaatgtatttcaaggaaaaaagggatgtttagaggctttatgaatggcagtaaatccgtaagacacttgaccatggatgcctgtaggtgtttttttgcgggggaggtggggaatgaccacagagaatcagatgcaggtaaacccctgtgcctgaggagtgcaaagctgcattgacagaagaccgccagcctcagagtcttcaatctgaaacacgaagagcacaccaccaagatctgtctcactgcttcagtggtgacaaggtgtagcactgtcctctagccctcaaccatgtccatctcactgagacttttctaccttgccatgagcctcccaggacacaattcccctcattggcacctacaccttcctgaacgtccacctgaaaagccaggttccagcatgttctccagggcatagcttttcacagtgaagcaatgggccagccagcctgagagagctgggggagcctgttcacagccaactcgcctgagtttgaaggtcagtgttactgatatcccagcagggatatcactcaggtcataaaaccccagtgagaaatatgccagatgcatcttttaattgtcacaatgaaacggtactaccccatcagtgaagccaatacttaaaggctgcctcctatgagtcggtatttgttacccaaagcaatggagcagcaacagtgctacatatccaccaaacccctgcttcctcttcctcttgggcccacagagagatcacacttcacagtctctctcccttgcagctgggtggcaccatgtgactgggctctagacaatggaatgtgggcagaagcaatgtacaccccttccaaggcttgtcccagaagcttctggcaggattccccatgccttctctcttcccttgcctgtgggcccaaagcaaagaacccactggaggacagcaaagcctcaaaaaa

SEQ ID NO: 391350 - DNA, 1000 bp, Homo Sapiens; identical to SEQ ID NO: 195312

SEQ ID NO: 391351 - DNA, 1000 bp, Homo Sapiens; identical to SEQ ID NO: 282107

SEQ ID NO: 391352 - DNA, 1000 bp, Homo Sapiens; identical to SEQ ID NO: 195313

SEQ ID NO: 391353 - DNA, 1000 bp, Homo Sapiens
aagtgagaagggaagtttagagaaaaaagaataaaaagaaatgagcaaagcctccaagaaatatgggactatgtgaaaagaccaaatctacgtctgattggtgtacctgaaagtgacggggagaatggaaccaagttggaaaacactctgcaggatattatccaggagaactcccccaatctagcaaggcaggccaaagttcagattcaggaaatacagagaacgccacaaagatactcctcgagaagagcaactccaagacacataattgtcagattcaccaaagttgaaatgaaggaaaaaatgttaagggcagccagagagaaaggtcgggttaccctcaaagggaagcccatcagactaacagcggatctcttggcagaaaccctacaagccagaagagagtgggggccaatattcaacattcttaaagaaaagaattttcaacccagaatttcatatccagcccaactaagcttcataagtgaaggagaaataaaatacttaagagacaagcaaatactgagagattttgtcaccaccaggcctgccctaaaagacctcctgaaggaagcgctaaacatggaaaggaacaactggtaccagccactgcaaaatcatgccaaaatgtaaagaccatcgagactaggaagaaactgcatcaactaacgagctaaccagctaacatcataatgacaggatcaaattcacatataacaatattaactttaaatgtaaatagactaaattctccaattaaaagacacagactggcaaattggataaagagtcaagacccatcagtgtgctgtattcaggaaacccatctcacgtgcagagacacacataggctcaaaataaaaggatggaggaagatctaccaaggaaatggaaaacaaaaaaaggcaggggttgcaatcctagtctctgataaaacagactttaaaccaacaaagatcaaaagagacaaagaaggccattacataatggtaaagggatc

SEQ ID NO: 391354 - DNA, 1000 bp, Homo Sapiens; identical to SEQ ID NO: 282109

SEQ ID NO: 391355 - DNA, 1000 bp, Homo Sapiens; identical to SEQ ID NO: 282113

SEQ ID NO: 391356 - DNA, 98 bp, Homo Sapiens; identical to SEQ ID NO: 282114

SEQ ID NO: 391357 - DNA, 88 bp, Homo Sapiens; identical to SEQ ID NO: 282115

SEQ ID NO: 391358 - DNA, 1000 bp, Homo Sapiens; identical to SEQ ID NO: 195255

SEQ ID NO: 391359 - DNA, 1000 bp, Homo Sapiens; identical to SEQ ID NO: 195319

SEQ ID NO: 391360 - DNA, 1000 bp, Homo Sapiens; identical to SEQ ID NO: 206262

SEQ ID NO: 391361 - DNA, 1000 bp, Homo Sapiens
cctccgtagagcctgtggtgtttatcggtggcattgggagaattagtgtgtatttatgttggcgtggggtgtggggtggatttgtgtgtgtgcagttaggcctagtggaaggaatgtgggatctgaaggcaggccagcctgagttccagtcctgcctgttgctcacaagctttatgaggcgagagctaacccctgccagcctcagttgtcttctttgcaagatggaggttgcagccccagtctctggagcatgttatgcagatccaccgagagtgcctgccaggcacacagtaggtgctcagctcagttactgtggcggcccccactccccattgttgttgttttcctattgcctggcggccacagctggtatcccttgaaaagggctacagggggtggagtcggaccctgccccagccctgtggagaccctgggcttgggccagggcctggggtctgggcctgcagacagctgtgtctataaagcagctgaagggctgaggccgggggaggtcctggcagcagggcgttattttgggcctggcctgccacccccagctcctgtttctcttgggagtctgttgggggaggaagtgtggggaagaggagggggtgcaagtgggtgaggcatggagtggggaggcctccctcagggacatggacccttgagttctatttctgttcctccctcctgttcctccctctttgtccttatctgcctagagaggtgggaatagaggccattctgagtatcactaggagaccaccagtttgtggccactggccactggcccaggcagggaacctgggggcttgccctaccagcctctcccagcaatctgaaggcagggggtacctcgtattaccccctaggatttgaccttaggctccaacttgctgggagagcagtgcctctggtgtcagaccccaagccagcccttgtgctgtccctgaatctgcatgtagcctgtgggaggcggagcagtgaccggcaggaattc

SEQ ID NO: 391362 - DNA, 1000 bp, Homo Sapiens; identical to SEQ ID NO: 282120

SEQ ID NO: 391363 - DNA, 1000 bp, Homo Sapiens; identical to SEQ ID NO: 195254

SEQ ID NO: 391364 - DNA, 1000 bp, Homo Sapiens; identical to SEQ ID NO: 282122

SEQ ID NO: 391365 - DNA, 1000 bp, Homo Sapiens; identical to SEQ ID NO: 282123

SEQ ID NO: 391366 - DNA, 1000 bp, Homo Sapiens
gaactctgcagtccgggtacctgctcctctcggccgaggagccccagggcggcggggttccctttccgactttgcctgtgctggccccgcttgcaccccgtcccccctcgcctggagcgaggcgcgcgccggtccttgtaattggcgccgcggccgccgcggagccttcccgccggcggcccgagcggagggctggggttggggaggcgtgagcgcggcttcccagcccggggtcggtccccgcccgccctgcccccgtctcggcccggagcccccgagccgcggccccctcccactgcaggggccggcggccgcggcagggcgggcgccgcgcggaggcagggcgggcgtattcaatggaagtgtgttaccagctgccggtactgcccctggacaggccggtcccccagcacgtcctcagccgccgaggagccatcagcttcagctccagctccgctctcttcggctgccccaatccccggcagctctctcaggtaatcgccgccgccgggcccacacttgagggcttctctcttttgtttccctctgcccacccagcttcacctcctctacaacccccagcccgcgcattgtccattgtctggggatttctaggctggcctttcgattgcagagccttttctttgaatattcctggctgtcccccctcagttctccagcctccccaaaaccccaccctggtgggttccgggatcctctcatcagaccctcccaggctcgtcaccctctgtgcccagcagtttaagcctcaggaatgaccgcccttgtctttttcggtctggaagttgagtctttattccttagtcgtggcccagagtcacctgtgctcccccgccttgcaacatacctgtcccccttcccatacacacaactgtacggggttcgcgccttttctccccagatccgcgcgccccgcggcgctcgcctggtcctgcggttcctctgaacaatagcctagatgccccgtttgctgaagtct

SEQ ID NO: 391367 - DNA, 1000 bp, Homo Sapiens; identical to SEQ ID NO: 206700

SEQ ID NO: 391368 - DNA, 1000 bp, Homo Sapiens
ttcacgccatcctcctgcctcggcctcctgagcagctgggactacaggcgcatgctacgacgcctggctaattttttgtatttttagtagagacggggtttcaccgtgttaaccaggatggtctcgatctcctgaccttgtgatccacccaccttggcctcccaaagtgctgggattacaggcgtgagccaccacgcccggccactagcctgaatttcaatcaagggttggctgatactgtgtgtccagggtggactggatttgtcctggggggttctctggtttgctgcctcctgaccacatgatggggccttcgaggtcgaggacaactgttcccattagattgcaccctctgccctcaggttcttgagggtgtgtggacacagaggctttccatgggatgtccctgagccggcccttgattggggcctcaccatttacagggccgttttattctgcaaaccgaaacttgggtcatgtgacctgatgggattatgggactccctccaggtgcccgagacaaggttgatatttccaaaatattttggtgatttagtgggacaagcaaatgacagaataccggagaaggcagggatcgtgggtgtcaggagccagaggggagggggacagatgtgctgtgtacaggacaaggtgtcaggtgactccttcccagcagggcctcgcagatgcacaagcacggagctggtgggttttgcccaagaaaggtcacgcggcacatgcagggattggaactcccaggccagggctctaggtcgctcccaccttttcatgtttctttctgtggccatgggtatagtggaaagacataaagctaaagccaacttttaatcctgaatgcactgcttgccaggtaaatgcccttggttgtggtatcttgttgagacttagttttcacagagggataatgaaccgttgcagaggtttattgagatcattaacagagtggaattcagcacccgccacagcagccagccatggg

SEQ ID NO: 391369 - DNA, 1000 bp, Homo Sapiens
cttcccattggcccattactggtcacacctcccgctgtccagatgtttgcacattagagctttcagtgggctccacacccacacacataccttcctttacacctagtgggacacatacatgtgaagagatggcagagcctggcgcgggaagagaggctgaatctgaaggcctttgtgtacaggtgggcagtgaaagacaggagcctgtgtggacctggtcgttgtgaactctggatgagagaacagcccctgaaatagccctgcctcccagcctcgcccctaagacgctttattagaagccagccttctctggtggatgcctacttctgacgcaggaagcgttaagaggtatagagccgaggtttgccttttgaggagtgttgagtcattcatttcatttacgttttgtacttcatctttgggactggataatttggtgactaatgtggattctatttcagtgaaagctttgctttcagcgtttcttacttcttcactaatgccttgtgtgtgtttttactaaccttttagattgtaccttcaggtgagaagaacagaaaaaaataaaaataaaaaccctcagcagggttgctcttgctgccaggtgctggctgtggaggtcaaaagaagtaattgtctgcaccatttttctgccttgtcagcccctttactgtaccaaggtctttgggaaacccctgcaggttcctattgcagggtgggaaattgtgaagaaaagtgtttgcacaatcttaacaataagtgttcctggtctcttgtaggtttttgttattcctagttctcccctgctcagactgagaaaaacatttgtggtgctgtcaacctgtgttcttgaccctcaaatgattttgattttttttttttgtatttccaatatgaatttgtgtgttacgaatttctgatttcttcaatagcatatgctactatataaatttgtatcaataataaatgatggcccagttgtcaaaaaaaaaaaaaaaaa

SEQ ID NO: 391370 - DNA, 1000 bp, Homo Sapiens
tttcacctgtggggttgccttctcaggtatgagagcttcttggtttcggcactctagtttagggtttggggctttgtagcaggcactagttttcaggtctgagggagggctgcccatccacgtccttccttggcggtggagggcattgttcagctgtgtccatactgccaagacggggctggtgccagcgaggttccccaagcctttgctggatgcccaacccgactgttggctctggggtgagtatgtgggagggtccacaggagcacccgccgctttctccaggtccacccccaccatggaccctgtgccgcctcatccattgcctcctttttcaaggcccagaaatgccactggtctgcgtctttgaggcagcgccatctggtgccagggctgacaaagatcgcagggccctggaactgacgcctaaaattagcaggatctacagattatcttttaacccaatgtagggtcccctttagaacatcccagaagaggtgtcactgtcattcaaaggtcagctttggttgtaaaattcttccattcttccatgtctagcttgtaggatggttccagggattaaaccagctaatatgtaaagataccggcacatagcaggacggcagctgctgtgattgaggacaattgttatgatttagggagcccaaggctgactctctgtcacctttacttgttggtcttttttttctcttaagggatgacccaggtgaaagctgattttcctgtaacaggacagcatttgaaataccaaaggcagctcttatgtctcccttccacccttctccccaggaagctgtctcctctccagcctgaatatcaccagtccctaatgcctcccacatttcacatggctcctagtgcccttgccattttggtaaccacctcctggaagccctctggtttgttttggtccctctgattcataaaatttctgaaactggagtgttcagaattgaacacagaaactccaagcatgatc

SEQ ID NO: 391371 - DNA, 1000 bp, Homo Sapiens
atcagagagggaaagtgactagcccaaagtcacactgcaagtaagtggcagtgtgggactgtattataggcctcctatgtccccctccactaaatgttgagagatgggaggggtgtggagggtgtgagccactgcgattggtccctgatagtttgttgattgaataatacctacctcatggggggctttacatgtgacctcaggtggccaagaactgtgaagctgggattactgggcccattttgcagaccatgacactgagatgtaaagagtttaattcctagccggtcagcaacatgatgtgggacttgaacccatgccaagaagagtgcagagcccctgctcagtttccaatggggaaacacgagaggttgcccaagccacacacatgtaggaagtggtagagacatccatggtgaacacagaggcagagggagaagacaaatcgcccctcccccccgcccccacacacagggcccactggtggctctgagccaggcactcacaggcaggcagcctcccgggagggcagctgggtgcaacgacctccatttgcacacgggcttccgtccaggcaagggggggctgtgtgggggtgaaggaaggtggaggatcagccaggtgcccaggaaccccaggcccaagtgacaaaccccctccctccctccaccaggcaacagctgcatggggatgggggcgtctctgcgggtgcagggagtccccccatccacagttcccacgccccccccccccccgccccagccccagctgttgaggctgcagctgtccctgccagctcgagccctgggaaccacaaagcaggggaaggcaggaggaggggctgtcttatgccagatgtgggggctcgggaagctgccagagctaagatgtgcagaatggggtgtgctgagacaggaagtaagggtgctgagtgttacagggaggtctggggcttcatgcccaggttcaggggtaatagaaggggaaggggcaggggatc

SEQ ID NO: 391372 - DNA, 1000 bp, Homo Sapiens; identical to SEQ ID NO: 282125

SEQ ID NO: 391373 - DNA, 1000 bp, Homo Sapiens; identical to SEQ ID NO: 282126

SEQ ID NO: 391374 - DNA, 1000 bp, Homo Sapiens
acatggtgaaaacccgtctctactaaaaatacaaaaaaattagatgggcgtggtggtgggtgcctgtaatcctagctacttgggaggctgaggcaggagaatcgcctgaacttgggagatggaggtttcagtgagcccagatcatgatactgcactccaacctgggcaacaaatgtgaaactccatctcaaaaacaaaaaaaagtctggtatagtggttcacacctgtaatcccagcactttgggaggctgaggtggttggataacctgaggtcaggagttcaagaccagcctggccaattttgtgaaaccccacctctactaaaaatatgaaaattagctgcacgtggtggcatgcacctgtagtcccagctactcgggaggctgagacaggagaattgcttgaaccccagaggtgggtgttgcaatgagccgagattgcaccactgcactccagcctgggtgacagagcaagactccatctcaaacaaacaaacaaacaaaaaacccaaaaaacaaacaaaataaaccagaaaaatgaaaggaggttcccagggccgctgctgttgctggctcagagactgagaagtacagaaaggggccccttaagatactttactgccatctgctggaagatagaataaatgtaaaagctacactatgatgctagtggtgtccgcttagatgcggggctttggtgctgtgtacaacctgcccaaccttatgtgtcagccttgagtgccccttgttcttggggtaacaggttttgaaggtgatggtcgtcgtcttctctctcatagccagatccgatgccggttcttcgtgcgagggaatggccgctgccccttcaaatctgagtgtatctacctgcaccagctcccagctaaggctgggacctccggtcctccctggcctgagagagtgcaactggcctctgggagtgaggtggtaaccgcaggggtatggggcaggggaggctgctggtcatggcttataataaa

SEQ ID NO: 391375 - DNA, 335 bp, Homo Sapiens
  misc_feature (313)..(313): n is a, c, g, or t
gatccagtaaattgtcactgcaagggaaagggggcaggggtcgctgtggccatgtggtggcatgctaatcgaatttcagtgggattaagggtgtatgtgatgattctataggagtctgttcttttgctgctgtggcaggtcactggtaccttccccttactggctcaatgacatttcataaataagctatggatactatagcacaaggcaggcacaggcttacggtcaatatatggtgagtaaagggatgtagaagagctcagtacacacacacacacacacacacacacacacacacacacacacacacaantggcttgggaccacatgaactg

SEQ ID NO: 391376 - DNA, 1000 bp, Homo Sapiens
tatttatttatttatttattttatttgtttttcattcatcccattaatcatttccccataactcaatggcctaaaactggcctgacttgggggaacgatgtgtctgtatttcatgtggctgtagatcccaagatgactggggtgggaggtcttgctagaatgggaagggtcatagaaagggccttgacatcagttcctttgtgtgtactcactgaagcctgcgttggtccagagcggaggctgtgtgcctgggggagttttcctctatacatctctccccaaccctaggttccctgttcttcctccagctgcaccagagcaacctctcactccccatgccacgttccacagttgccaccacctctgtggcattgaaatgagcacctccattaaagtctgaatcagtgcactgttgtgtctaaggagtcttactctagtccctatgaggggagagaagatggagcacctggaagctggtgaaactggatagcagagctgggggggcacaaaaagaggaagacaaactgaacaaatatggccgagatgatggcactgcctaccccattctggctaggtggggtgcatgtggcccctgctttcttagcagaaggcttggctcccagacgcaggtgaattaaggggttcaagagcccctaaaagcataaaatattttgtgtgtgtgtgtgtgtgcacgcgcattttgggggaaagggggtctaaggtgttttcatatccaaagggcttgtggactggagcagctcctgtactgggcctctgccaacaaaaccctggctggttctcgaatggaacaggacttcatggccatcacccactgcaagatggggaaatgggaaggaagaatggttccgggggtagtatacggaaggacctaaggaaacagagtcctcaataaactgaagattcaggaacaaaagtgcttaacagaaccctggctgggtcagactaacagtaggtttccaatatgtggctagagacgtac

SEQ ID NO: 391377 - DNA, 1000 bp, Homo Sapiens; identical to SEQ ID NO: 282127

SEQ ID NO: 391378 - DNA, 1000 bp, Homo Sapiens; identical to SEQ ID NO: 224118

SEQ ID NO: 391379 - DNA, 1000 bp, Homo Sapiens; identical to SEQ ID NO: 282131

SEQ ID NO: 391380 - DNA, 1000 bp, Homo Sapiens
aagatggttcttgagcaacactcaagaacgtgcacgtggagtgctactagagtgcactccacgtgcacgttcctccctaagagccactgcaaggatcctgggcctgctgcgtggcccaagaatccacgttgcttctgaggctagatctagccacagcgattagggtttcttcgccatggccttggtggtggctggccctaaactggtcacagtctgaagacccaccctgaaagggactaaggttagagacagcgcccctcccctcccacccttagctcagcatccccactaagcacaccccttggggaccacaaacgccctctttcccgaagaccccagtagtgacctgtgggattctggctgggtgtccgtgacttaccctcaaagagaacctgcacgcctggggtcccaggatggctggcttgcccctcccgtccgaagatgacctcgtccttctctttcagtcccggtgggtcttcggactgccgccgccgcgctttcctcggcctgggcacgctgggtcggcgtggtcccggctcgcgtccctgttgggcggccgcggcgcgggtggcggcgggacaagtcgtgagcgcgcgctgggcgcgcgcccggccggggcagtcgcgggggaggagcgcccgcccgccgctcgcgcgcccaacggaccaggctggggccgtgaggtaactgttgcagccagcggaggtgggaggcgacactgagtctccagtcccgagaggtgcccgagggaaaaggaggcggcagctaaactggtcctggagagaagccccttccgcccctctcctcagccagcatgtcccggactccgccgctcctcagtccgcgcggtggggaccccgggccgtggcggccggcgcagccctgacgggttgcgaaccagggggcgccccgaacgcgggggttggggtctgggagcgcgagcggccgctacggtacgagcggggtgtgctgagtcccgtggccacccccggccccagcc

SEQ ID NO: 391381 - DNA, 1000 bp, Homo Sapiens; identical to SEQ ID NO: 282133

SEQ ID NO: 391382 - DNA, 1000 bp, Homo Sapiens; identical to SEQ ID NO: 205727

SEQ ID NO: 391383 - DNA, 1000 bp, Homo Sapiens; identical to SEQ ID NO: 205728

SEQ ID NO: 391384 - DNA, 1000 bp, Homo Sapiens; identical to SEQ ID NO: 282136

SEQ ID NO: 391385 - DNA, 1000 bp, Homo Sapiens; identical to SEQ ID NO: 205729

SEQ ID NO: 391386 - DNA, 1000 bp, Homo Sapiens; identical to SEQ ID NO: 114861

SEQ ID NO: 391387 - DNA, 1000 bp, Homo Sapiens; identical to SEQ ID NO: 282139

SEQ ID NO: 391388 - DNA, 1000 bp, Homo Sapiens; identical to SEQ ID NO: 114862

SEQ ID NO: 391389 - DNA, 1000 bp, Homo Sapiens; identical to SEQ ID NO: 114863

SEQ ID NO: 391390 - DNA, 1000 bp, Homo Sapiens; identical to SEQ ID NO: 205732

SEQ ID NO: 391391 - DNA, 1000 bp, Homo Sapiens; identical to SEQ ID NO: 114864

SEQ ID NO: 391392 - DNA, 1000 bp, Homo Sapiens
atgttcagacctggcggagactgatctaagaatgtgagtagtgagatgtcagggattgcggatggggcagaagggaggcttcacgcagcccgcacccttcaacacatacatgctcctcgtcctggtcaccactgagtgttacaggcaagaaaataaaaaccctaaactcctcagacagtgatcattaggtgtcattctgttcaaatcttaaaaaatagtttgagcagatgaagaatcagtaaagaaagcttggaggtgatttgataacattttatctacccagaggaccaatcaaagagagtatttgtattgtggtgatggtggtgatggtggtggtggtggtggtggtggtcgtggtgctggttttgttccatttgcttgcttccggtggcttcactcacatgcttcctctgcagtcctggttccccacagccatgggcagaaggtacagcctatatatgagtctctatcagtgcacaggtgtccagtgtaggaaaaaataaaatggaacattacagcaccccgtttaatagacaacttttgaattcacttatgaccatggtctccatggttctaggggctgtgagggcatcagagatgccttttgtattttatattcacacagactcacagtaactcagatggagggctgtaggctttgaaccatgaactgccccagcgaggctgttggggaaggcgtgcagggctggctgctgtaacagacctggccacaggagatgggagagatggatgctcaaccttccccctcccatcctccgctcataagaaccctactgtgtccaaacacaatcaggcaccaatctcctctcccatcctcctgtcttccctcctcctggtcatctcttccctttaagatcctggctgtgtgttgcccgatttggtcgtgcctccagttggtcactccactccatggctcatgtaggctcatgtgtgacctcagtaggctacttgagctctggtgcctcagtctcctcctctg

SEQ ID NO: 391393 - DNA, 1000 bp, Homo Sapiens; identical to SEQ ID NO: 282143

SEQ ID NO: 391394 - DNA, 1000 bp, Homo Sapiens; identical to SEQ ID NO: 282144

SEQ ID NO: 391395 - DNA, 1000 bp, Homo Sapiens; identical to SEQ ID NO: 205733

SEQ ID NO: 391396 - DNA, 1000 bp, Homo Sapiens; identical to SEQ ID NO: 282146

SEQ ID NO: 391397 - DNA, 1000 bp, Homo Sapiens; identical to SEQ ID NO: 114865

SEQ ID NO: 391398 - DNA, 1000 bp, Homo Sapiens; identical to SEQ ID NO: 114866

SEQ ID NO: 391399 - DNA, 1000 bp, Homo Sapiens; identical to SEQ ID NO: 114867

SEQ ID NO: 391400 - DNA, 1000 bp, Homo Sapiens; identical to SEQ ID NO: 205736

SEQ ID NO: 391401 - DNA, 1000 bp, Homo Sapiens; identical to SEQ ID NO: 205737

SEQ ID NO: 391402 - DNA, 1000 bp, Homo Sapiens; identical to SEQ ID NO: 114868

SEQ ID NO: 391403 - DNA, 1000 bp, Homo Sapiens; identical to SEQ ID NO: 282152

SEQ ID NO: 391404 - DNA, 1000 bp, Homo Sapiens; identical to SEQ ID NO: 205739

SEQ ID NO: 391405 - DNA, 1000 bp, Homo Sapiens; identical to SEQ ID NO: 114869

SEQ ID NO: 391406 - DNA, 1000 bp, Homo Sapiens; identical to SEQ ID NO: 205741

SEQ ID NO: 391407 - DNA, 1000 bp, Homo Sapiens; identical to SEQ ID NO: 205742

SEQ ID NO: 391408 - DNA, 1000 bp, Homo Sapiens; identical to SEQ ID NO: 282157

SEQ ID NO: 391409 - DNA, 1000 bp, Homo Sapiens; identical to SEQ ID NO: 205743

SEQ ID NO: 391410 - DNA, 1000 bp, Homo Sapiens; identical to SEQ ID NO: 114870

SEQ ID NO: 391411 - DNA, 1000 bp, Homo Sapiens
ttacaaatgtggtgtgtgtggaaaaaccttcagctcgggttcatcccgtactgtacatcagagaattcatacaggagagaaaccttatgaatgtgatatatgtgggaaagattttagccatcatgcatcactcactcagcatcaaagagtacattctggagagaaaccgtatgaatgcaaggaatgtgggaaagcctttaggcagaatgtacaccttgttagtcatttgagaattcatactggtgaaaaaccctatgaatgtaaagaatgtggaaaagcttttagaatcagttcacagctggctactcatcagagaattcatactggagagaagccttatgaatgtattgaatgtggaaatgctttcaaacagagatcacaccttgcccaacatcagaaaactcatacaggagagaaaccttatgagtgtaatgaatgcgggaaagccttcagccaaacttccaatcttactcaacatcaaagaattcatactggagagaaaccctataaatgtactgaatgtggaaaggcttttagtgatagctcatcctgtgctcagcatcaaagactccacactggccaaaggccctatcagtgttttgaatgtgggaaggcgttcagaagaaagttatccttaatttgtcatcaaagaagtcatactggagaagaaccttaagaatgtagtgcatgtggccaagcctttagttatcaccaatcccctactgttaatcagagatgtcccactggataaaaaacatataaatgtaagaaatgtagaaaaaccttcagccaggaggctggcaagatggccgaataggaacagctctgatctgcagttcccagtgagatcaacgcagaaggtgggtgctttctgtatttccagctgaggtacctggctcatctcattgggactggttagacagtgggtgcagcccacggagggtgagctgaagcagggtggggcgtaacctcacctgggaagtgcaaggagtcggggatc

SEQ ID NO: 391412 - DNA, 372 bp, Homo Sapiens
taataataataatgataataataacaggtaattcttcctttatttttcagaaatgtgttacggatgagtgtttcttttttgaacgattggaatctaataactacaatacttaccggtcaaggaaatacaccagttggtatgtggcattgaaacgaactgggcagtataaacttggatccaaaacaggacctgggcagaaagctatactttttcttccaatgtctgctaagagctgattttaatggccacatctaatctcatttcacatgaaagaagaagtatattttagaaatttgttaatgagagtaaaagaaaataaatgtgtatagctcagtttggataattggtcaaacaattttttatccagtagta

SEQ ID NO: 391413 - DNA, 1000 bp, Homo Sapiens
gcatgattccacttaacagaggtgcctaacgtcatgaaatgcatagacagaaaatgaaaaggtggttgtcagtggctggagggagggagaaagaggagttggtgtttaatgggtacagaattccagttggggaatatgaaaaagttctgggtggggatggacagtggtggtggttgaacaacaacctaaatgtacttcctgccactggatgtacacttaaaagtggttaaaatgggccaggcgaggtggctcacgtctaatcccagcactttgggaggtcgaggcaggcagatcacgaggtcaggagatcgagaccatcctggctaacatgatgaaatcccctctctactaaaaatagaaaaaattagccgggtgtggtggcatgcacctgtagtcccagctactcaggaggctgaaacaggagaatcggttgaacccaggaggtgaaggttgcagtgagctgagatcaccccattgcattccaggctgggtgacagaacgaggccccttctcaaaaaaaaaaaaaaaaaagaaagaaaagaaaagaaaaaaagtggtcaaaatgttgaattctatgttatatatattttaccataatttgcaataattcctattgttttgcataaaacagctgtagaaagctttgcaggtcatgaacagcatagctggccactgaggctggtgtggggctaggacctgggtgcacagggaacaggtatgagacacaggctcttcatgcctgcacacatatacggatacacacagatgcaaatttctgagccatctaaatacaacacctattcaaaaaattaaacagaaaaaggaaatgtaatggagctaaaggataagggtaggtgggcggctgctcaggaggactgtggaggccacatcacccaaactttgaggcctctcttagcagctggagtgcatcccggagacttgggaactctggaaagaggagcaggagagggccatggccagaggaggcctgaaaaagatc

SEQ ID NO: 391414 - DNA, 1000 bp, Homo Sapiens; identical to SEQ ID NO: 114871

SEQ ID NO: 391415 - DNA, 1000 bp, Homo Sapiens; identical to SEQ ID NO: 206266

SEQ ID NO: 391416 - DNA, 1000 bp, Homo Sapiens; identical to SEQ ID NO: 206267

SEQ ID NO: 391417 - DNA, 1000 bp, Homo Sapiens; identical to SEQ ID NO: 282164

SEQ ID NO: 391418 - DNA, 1000 bp, Homo Sapiens
tcttcaggagggcccttcagtggaatttttcccgcccacttcccatctggccaatgcctgccactttccgactgtggatcctttgatcacgtggctgttccacggagggttcccaaagggtcaaagactgaaagagctggacccctgtggagtgagggtttcctagcaggagtctcctgaaatcctcacgacccactgtgagtcctcacgtggcagatccttgatcaccaggctcttttgggaaccagagactctttctagtcctgaatgtgtggttgggggcaggaggtgttctctttttccttctctgggtcttgtctttgaaaggcagaggcaaacaggtagttgggggttcagggtttctcagcatcagcctccacccttcccttactcatcccctggggtgcagggccgggtgtgctccttggggtgggggccctgacagctggacccatgcagcatccctcttcgtgcccccccttcacggccaggggtgcgcatgctggatggcgaggtgacagatgcagtggaggcacgctcgctgggcctgaaccccaaccacatccacatctacagtgccagctggggccccgaggatgacggcaagacagtggatgggccagcccgcctcgccgaggaggccttcttccgtggggttagccaggtgaggtggggatctgtccagcccctgcgggcaggttgggtgctgtcttccgtacctatcttgtgttttttggtttgttttatttattctcatgtttaactttacacaaagcatgtttattgaaacattaagggacagaagaagagtagagtgcatataccacttggacttgcctaattaaaaaacacattttttttagaaatgaggtcttgctgtgttacccaggctggtctcaaactcctggcctcaagcgatcctcccgccttggcctcttggtctgattttttgtgtgcctagatagacatatttggatacatacttgatccaccagggatc

SEQ ID NO: 391419 - DNA, 1000 bp, Homo Sapiens; identical to SEQ ID NO: 201654

SEQ ID NO: 391420 - DNA, 1000 bp, Homo Sapiens; identical to SEQ ID NO: 201655

SEQ ID NO: 391421 - DNA, 1000 bp, Homo Sapiens
agctttctgctgtgggttctgacatttctcatcacaccaagcatcagtcctctcagacccagatctgaaagcgggggctgaaacctgtgttactgccttagctgtcatctccatggctgtgtgggatcccagagccacagccttccgtcctggcactgtgttgatttttaaggccttttctttgagatttgggacattattgtttcctctttcccagctcccccctatcaagctagagccctgaccattaggcactctggccagacccaggctctcccttgggctgggccacacgctgtggttggggagtttcttctgcaacgaaggcctccctggacccctgactcaccacgcatgtggccaaccacacctctgagggcctggagcccagaccctccagtggcagggggtattgggtccatccacggagagaacccctgatggaagaggcgcctccctcctgggccatccacactgacaatgcagctgctccctgcccccacctcctcctccactctccgcaggtgttggtcctgcgcacctcactaaacttgctcagaggcaggttcctcagaggctgctccacgcatccaggaccggaggcctcaccagggatcccttctcagatccttaccctccctgccatctctcttctgctcaggtccacagtgggtccgtggccatgatgactatggagcttctctacttcaacttgaatttgcccttccttcaaccactctgtgtatttctacaccagcatgacaccttcccccctgcccctgccagacagaaagcttcagctgtaagggcagtgaggaccaagacactcttgccttgtccgcacctcttcacaggctccttcttcccacagaggaaggcttggcccccactgagagacgctcccttagggaacaggtgctgttctatttccatgccgcatttgccctcaccttccctgggcctgggctcggtagcaaaagaccacagagagaaattccaa

SEQ ID NO: 391422 - DNA, 1000 bp, Homo Sapiens
gtgtagaaataatgcttttttattttgaattaataatattgagtacctacactgtgcctagcctaccatcagcatttcaacatttcttttattataagagcatcatgttctacagagtcaatatgatctcataaggtgcaaataaaaactgctggcagggcaggtataataatttctatcatagtttacaaatggtctttgcaaatagtgatcagaggcattaacgtttccctgagctaagctaaattaaatgcattcttttctgccttgattatattactaattttctttacccacatttgaaataatctcaatacttgctatttcaaaactaaaatgcaatgttatagggggtatacattgagtttttaatcgtatcaataatggtgtgtaaaaactcaagaatattatataaaggagacattaatttaagattttcccaccaaatttagtatgttaaccaaaacctaaaactttatatccatttagatgggaactttttacaagtacttttatgttgtttctgcaagtctagacttcaatagtaatcatgatatactaactatattttatttctgaatagttttttaaattcatgaaaaattaatagccatgaaaactgattttattgtcatatttgtttaagcatcttattagtttacttctcttgcattaatagtactgctatattttgggtctgtatatttatatgtggcatttataaaattatctagtgttttaaaaatactttgaaataaatattaaaattaaaatggttcaatgctacttttttgaagagtactctatatttactcatacttgtaccaaaatttgataaaatttttattttcttttgggtgttttgttatacaacttttaattttaaaaacaaaataaagtggtctaatctctgttttatactaatgagaaatgaactgttaaactgcgtgtgtatgtatttgatgtatatatgtgcatgtgtatatacacaaggtactct

SEQ ID NO: 391423 - DNA, 1000 bp, Homo Sapiens; identical to SEQ ID NO: 282168

SEQ ID NO: 391424 - DNA, 1000 bp, Homo Sapiens
actctctctctcggcccattcatccaccaggctagtgaactgcctgtcaacccacactcacacactcctctagacaaactcatagggaagaaaagaaagtgctctccaggctctagcactgttggcaacagtggcagcaaacccacaaaggttgccaagttgccagctatgaacaacgtccacatgaaacacacaggcaacatctcaggggcacaaggattgacgaacaattccctcctccatcagccaaaggcacgaccctgacagctgacagtaccactggaaggaataatccagacatttttgaagacaagctacgcctctgctcagcactctggactccacgatgcctttgagtctctttttctaactcctgtgggccttcagggtaacctctggctgtttgacaaggatttcccgaagctgtgtctgtagcagtgagtacaggtaaagaacactggatcacctcagccaccggattgctctcagtgttaaagtggtctggactgcttgctcccaatccgtgagaagtttgtgtttgtattgtgttttgttttgttttttcatttggagcatatcatggagtcactcttgaagtagattggctggggaggatcatttctgtagccttgccttcctttttctttgccatctgtcagtcaggctccagaaggtaggcaccttaactggagactgaaggcctccaaggaaaggggagtgagctgcatcctgagagcctcctagaggatacctggctttagagttttatagcgctgttgaggaatagtacactgagatgtttgttggtcagtgcgtcatgacatagtagccccgcaccttttcagttaatttgggatgagaagcttatcaagttcttcagacgtgaggactggctcgaagctgctgacgcctggatattaagtttaaaggatctcagaagcttagtttttatggtacaaaagcatgtgtgatagaaagagagaaagaaaaaggaagaatg

SEQ ID NO: 391425 - DNA, 1000 bp, Homo Sapiens
cttcaaacttaaatagaaaacatcagtgaatgatacattatgtggcatctttagtgaatgattttattgttttagttccataacgtgactaatagaaaaagtaacctagtttatgaaaatgtaataaaatgtaaatataaatatacttgtaatagaaaaagatacaatatgaacacaagcatatatgcatatgacattattaattaattttgtgaaaatatattacaatatattttacagaaaaacatatatacctagccaccattagccattctgatggaagggcaaataataattctcattgcaaagaaataaatatgggtttaaattccaactttttagattttagagaatagccgggcacagtggctcacgcctgtaatcccagcacattggaaggccgaggcagacggataacgaggtcaggagatcgagaccatcctggctaacacgggtgaaacctccgtctctactaaaaatacaaaaaaaattagctgggcctggtggcacacgcctgtaatcccagctactcaggaggctgaggcaggagaatcgcttgagcccaggaggcagaggttgcagtgagccgagatggcaccactgcactccagcctgggcaatagaattatgcataaacattcccccttttcttgatagaaaataaatgatgaaaagatttttatttaatacaactagataatttatagttttttccctgatgttcgtataccatttattttttaaaagtttttgtttatttgtttttgagacaaggtctggctctgttgcccaggctacagtgcagtgacactaacagttcactgcagccttgaccccaatgggctcaagcgatcctctcacctcagcctccagagcagatgggactacaagcaaacaccagcatcctcggctaatttatatatatatatatatatatatttttttttttaagagatggggtttcatcctgtgtatcatgctaacctcaaactcctgagct

SEQ ID NO: 391426 - DNA, 1000 bp, Homo Sapiens; identical to SEQ ID NO: 282171

SEQ ID NO: 391427 - DNA, 1000 bp, Homo Sapiens; identical to SEQ ID NO: 195005

SEQ ID NO: 391428 - DNA, 1000 bp, Homo Sapiens; identical to SEQ ID NO: 282174

SEQ ID NO: 391429 - DNA, 1000 bp, Homo Sapiens; identical to SEQ ID NO: 195211

SEQ ID NO: 391430 - DNA, 1000 bp, Homo Sapiens; identical to SEQ ID NO: 195343

SEQ ID NO: 391431 - DNA, 1000 bp, Homo Sapiens
  misc_feature (375)..(375): n is a, c, g, or t
  misc_feature (379)..(379): n is a, c, g, or t
  misc_feature (433)..(433): n is a, c, g, or t
  misc_feature (687)..(687): n is a, c, g, or t
cgttcctggaggcggcgcttagattgggaggcctcattggcacttagagcgcacgctgagtttccaggccccttcctgggagaggctgttaacacgggggaggggcaggagagggatatggagagcaggtggtggaatcagaggacgaggctgctctaaagactgttctggccccagacacagggtagtctttgctagcagctcatttccgagttacttttcattttcaaatgccaaggcaagtgactagactcgcgctaatacagtgctggacaacacattcaccttttctgtgaacaggcagccttctaaaagccccaaacatccttcttgatgctttgggggctcaattattttatatccaaccccagcatntttntagtccctatgctgtatgcttgaacttcggaaaatgctttttccccgcccaatnttctcttcaaatataaacacatcacaacagggtgttgggggtggggggggggtggggggacttatccctggccttaggacacaggacaaatctattttggatagaaatgcctgaacagagacccttattggaaagggaattaactttggtcacgacatggactgtcagacaaaatggcagtatcctaagagttaaggcacatcaaacacaggagtcgagagaggcagttcagggaaaaaggagaggaggaaacnagtgaggcagggagaaagctttccaaataagagttcatgttggaaacttttgtcacggctttattgagattaagttcacatacaatttgtatccatttaaagtgtacaatttgatgacttttggtatattcagagttgtgcaaccattatcactagatcaattttagaaagtttatcaccccaaagagaaatcctgcacccatcagccaacactccccaacccatcggccaccccaagccctctgcaaccacgaatcgactgtctctgtagattggccttctggacgttctacataaatgaaatcatatagta

SEQ ID NO: 391432 - DNA, 1000 bp, Homo Sapiens; identical to SEQ ID NO: 282180

SEQ ID NO: 391433 - DNA, 1000 bp, Homo Sapiens
cctacaaatggaagaaaggaggcttctaggacaaaccccctgcctgaggtcacccagcagccagctgacctcgtccttactaagtccccactaaccaggcccccactcaccaggtccccacccaccaggtcctgttgactaagccggactgatcgtgttctgtgctgaccaagccctgcagactgggtcccactgatcagtcccccccagtgaccaagccaccactgacccggtcccccgtgaccatctacccacagacaagggcccatcttcttaagtcaacccatctaagaaaatgggtttggccccagaccaaagccattttcttaagttccatggagctcactagggtataaagccaagtggggagaggctaagcttcagaatctggacgttttcaacatttccaggtatttccacattcttcacagtgatttcaccaatgtgctctcccaccattgagggtttctacctgcctccaaaactgctggtgttgccagacttttcatttatgttgggtgttgggtttgaaatgcctcatggtggcttcttgttcctcatgactggtgaggttgggtgcccttgtattttaatcctgtgccaactgggcccccccacccccacccccgccacttgctgtctctgcttcgtaaggagatcttcttgcccggtcaactccgagggatcacaggttcaggggtgcccccaaaatgagacacttagtgtttgatgaatgaatgatgatgttgaggccaggagtgagaggaaggtcagcaggcagacagggcccatgtggacagaaagggtttattccaagtccagacatgaccaatagcgataaaaagggggaacaattggagtaatccatgggagaaggagtgagcctgaatttgaaagatggagagaactggacgtggaggaggggagggaggaaggcagaacaaaggaaataagaagctgttgaccaaaatacatatgttgtgattccatgcatatgatc

SEQ ID NO: 391434 - DNA, 1000 bp, Homo Sapiens
gcttggattttcttctaatacctcccttcattgggagacctcacactgttgctatgtcatttatgtcacattgacactcagatcccttttctgggttgaaggtggagaaatgtaattcacacaaaaggcccaaatgctaatgttttctgttttactgtacttcctggtttgttttatggaagtaatacttccgtgtattggtttaatttttttgtatgtatgtatgtatttattttgagacagcgtctcgctctgtcacccaggctggagtgcagtgacatgatctcggctcattgcaacctctgcctcctgggttcaagtgatgcttctgcctcagcctcccaagtagctgggactacaggtgtgtgccaccacacctggcctatgtgcattgtttttaaaaacaaacatgttgtatgttttgtatgtaggaataaaagcagaaggcccctaggggcatgttaggatttataatctcctaaagttaaatattctgcaagtttacacaagcagtaacttcatgaattactaagtattactgagagtatttatgttccaaattcgaagccttaatcaaaccagaaaaaaacatattctgttgggtttgaacaggtagttttcttattcattgtatacttagaaccttgggacttaaaggtcagagagtcaagggaactgccaaggagttagttgctagatatttttttgtttttttgagctgtatatatttccccacttgaaaaaacaaaaacactactacttatatggcattagtatgataggtgagagagaatgttgttggccatggttaccaccttaaattgacatgggaaaagagaatcaatatgaagtggaggaaaaaaaacaataacttcatttaatcatacatttttaccgttaacctgttttcttttggcttatccttctgagctagggtaaggaggcttgttttgtctttgttgtttttgtttttttgtgtcagtgacctccaaatagatga

SEQ ID NO: 391435 - DNA, 1000 bp, Homo Sapiens
ctattagagtcaagaagctagaaacacagatagaaatgaaacatgggaaatgttacatcattcacatattgtcacattaaaaattgctatgttgaaatttcagcacaaggtgaaatgcagcatatacaatattacatacttaatttaataagaagagtagtgagaactggacaccgaaaaatacttatcttgatgaattttgattttttaataattattcataattgtttgatagcattgatgagcagactttaggataaataatctttaaatgaaaatattttaagagtccaaaggatggagggatttatggacaaagggattaataaacaacttttatcaaaataaatcattgaaatattttctggataagttaatgatatcatcttattataattatgttaaatcattttctttttttaatctctaggaaataactatatcactattcaagatcatcttcacaacatcacctgctagccacgtgggatgtttgaaatgttaagtcctgtaaatttaagaggtgtattctgaggccacattgctttgcatgccaataaataaattttcttttagtgttgtgtagccaaaaattacaaatggaataaagttttatcaaaatattgctaaaatatcagctttaaaatatgaaagtgctagattctgttattttcttcttattttggatgaagtaccccaacctgtttacatttagcgataaaattatttttctatgatataatttgtaaatgtaaattattccgatctgacatatctgcattataataataggagaatagaagaactggtagccacagtggtgaaattggaaagagaactttcttcctgaaacctttgtcttaaaaatactcagctttcaatgtatcaaagatacaattaaataaaattttcaagcttctttaccattgtctgatttctctttacgtccccctttgtcatgccccactccttccaagcaccctgttttctaagctgcagt

SEQ ID NO: 391436 - DNA, 1000 bp, Homo Sapiens; identical to SEQ ID NO: 201610

SEQ ID NO: 391437 - DNA, 442 bp, Homo Sapiens
  misc_feature (101)..(101): n is a, c, g, or t
  misc_feature (430)..(430): n is a, c, g, or t
gcccgggagttcgagagcagcgtgggcaacatggcaaaaccctgtctttacaaaaaaatacaaaaaattagctgggcatggtggctgtcgcctgtagtcanagctacttgggaggctgaggtaggaggatagcttgagcccaggaggtgagctgtgatcttgccactgcacggacagagcaagactgtcgcagaagaaaatataaaattcaatattccaagggctgtctccctgatagtatttattagctctttatttgtgtaactaagtaatcaaaattttaaaataaataaaagaaaaggtcaaaatacatcgaactacacatggggcaatgaatgaatttaaaagacatacatgttcagttcgtagctaataaaaacatacaaaggaaataactcacatgctctacaattttctatcctgagggtcnctctctcactcg

SEQ ID NO: 391438 - DNA, 376 bp, Homo Sapiens; identical to SEQ ID NO: 282186
  misc_feature (88)..(88): n is a, c, g, or t
  misc_feature (196)..(196): n is a, c, g, or t

SEQ ID NO: 391439 - DNA, 1000 bp, Homo Sapiens; identical to SEQ ID NO: 282188

SEQ ID NO: 391440 - DNA, 1000 bp, Homo Sapiens; identical to SEQ ID NO: 114873

SEQ ID NO: 391441 - DNA, 1000 bp, Homo Sapiens; identical to SEQ ID NO: 282190

SEQ ID NO: 391442 - DNA, 1000 bp, Homo Sapiens
gagaagcccgtgcctgctgcgcctgtgcccagcccggtggccccggccccagtgccatccagaagaaatccccctggcggcaagtccagcctcgtcttgggttagctctgactgtcctgaacgctgtcgttctgtctgtttcctccatgcttgtgaactgcacaacttgagcctgactgtacatctcttggatttgtttcattaaaaagaagcactttatgtactgctgtcttttttttttttcttttgaagaacaggtttctctctgtccttgactcttgggtctgtgggccatggcatgagtgttttctagtagtagattggagggaaagctttgtgacacttagtactgtgtttttaagaagaaataatttggttccagatgtgttagaggatcttttgtactgaggtttttaacactttacttgggtttaccaagcctcaactggacagaccataaacagtccacaggcaccgttcctgccaggccccaacccacagggagtctctccgcagagccttcttggtgttgccctaacttgccagtggcctttgctcagagcctcctcctgtgacatgtgaacaatgaagaggcctgcgcctcctgccttgccgcctgcaaagcaaagaaactgccttttattttttaaccttaaaaagtagccagatagtaacaagactggctggctgatgagcaaagcctttgctctcacgcagaggaaggcttggatgtacaatgaaactgcctggaactaaaagcagtgaagcaagggaggcaatcacactgaagcgggtcttcctccaggaacggggtcccacaggcgtgttgttttaaataacctgatgctgtgtgcatgatgctggtgcttgaccatgaaaggaaagtctcatccttaaaatgtgttgtacttcacaatcctggactgttgcttcaagtaaacaatatccacattttgaaacactgtgtactgtgtcttctttttgagatggtttcagtgtt

SEQ ID NO: 391443 - DNA, 993 bp, Homo Sapiens
  misc_feature (99)..(99): n is a, c, g, or t
  misc_feature (412)..(412): n is a, c, g, or t
  misc_feature (414)..(414): n is a, c, g, or t
aagcttgtattcgtgattatttgaaacttttggtaattttgcagaatcaggaaactagcaaagttctttttgagagggcttcttgtggcaattgctatnctctgtgagccaacctgttacgaaaaataaaggtaacttttgagaaattaatatgaagttataattcagtggtatatgaatactccagaatctatccatgttaagtagcatgtctgcattttcagaacggctatttagaaagagcacctcttgagaggctgccactgattagctctgtgaccttggatgagtgagatcacctcttggggtctcctgtccttgttagttaagagtgacccgaaaggccctgacattgcttcgggcactccaattctagatcctctagctctggggaatgtggctggctcttacntnccctgctcccgtgctggcttttccttcttgctaccaatgccggggcgagggtcccacaatgtgttcacaggtcagtattgggcctgaaaatgcacaatccttccacttagggacacacatctacctgtttcagtgatgattgtccttcctcttgttttggcctagttcgttttcctcacctatgtgcttggagtggcctggctgggtgtgtttggtttctcagcggtgcccgtgtttatgttctacaacatatggtcaacttgtgaagtcatcaagtcaccgcagaccaacgggaccacgggtgtggagcagatctgtgtggatatccgacaatacggtactccttctaatcacccctcccccagttatttcatatcctctcgtgatatgtctggacctaattattacatgcgcatccttttaattgtcatgatctgtttcatcccttctattagagtaattttatacttttcccttcaatatgctattttctgggtggaaacttcagggaggcttttagcttgctaggtatcaaaatttcgttatattttcatgttaagtgtgtagtgaaagaagctt

SEQ ID NO: 391444 - DNA, 1000 bp, Homo Sapiens; identical to SEQ ID NO: 282192

SEQ ID NO: 391445 - DNA, 1000 bp, Homo Sapiens; identical to SEQ ID NO: 282194

SEQ ID NO: 391446 - DNA, 1000 bp, Homo Sapiens; identical to SEQ ID NO: 282195

SEQ ID NO: 391447 - DNA, 1000 bp, Homo Sapiens; identical to SEQ ID NO: 114874

SEQ ID NO: 391448 - DNA, 1000 bp, Homo Sapiens
tctcgacctagtggtttctactctcaccgacttattctgatttcagaaataaaatgaaatgtcttattttggaaagttaacctttcaaagtcagtaaatcaaacagtagatcagaggtgggataggatgggtggcatgggttggtcttaacagcagatttgtttctttaattctgtccccaactccatttcattggtccctaacacaagccttatactggcatccctatattttcattaccaacatgcagccacgtgtgcatgcgtgcacacacactccaatcccacacagacacacaatgagaggtgggaacttttagataattccaggggaagagggaagaagttgtgtacctaacataggaaacccagaaaaagggcagtcttaatcagacatgacaagatctagaatgactgctacatccacgcattagaccatgaaatgagggtcacatcccctgccccgtgtttgtaagaggaacataaggaactctggaggtgctgaaagcccttggtggtgggacccaacaaacactagaaaccccgggctgtacattttagacatcagctaccccatgttttgacaaatcaaagacacccttgttcatcctagattcatgccagctctttagggcctgtgatatatggccctgacagtagagagctggttcctccttgtgcctgagaaatatccaggtaatagatactcaggaacattcctctggggatgaaactctctggaaaggtccctggaacttttaggcaggagggtgactgcaaaggagccagattttggttttatgaggatagagtaatcaacctttttaaggtggccataggcccctctgtgcatctgagggcctgcagcctctatgtgagctctgttttcctgttccacatcttcacactgatgccttggatgatcagtaatccccctttccccagccactactctcacgatgcttcctgagtaccacccctttcatcttccacaaacacct

SEQ ID NO: 391449 - DNA, 1000 bp, Homo Sapiens; identical to SEQ ID NO: 282198

SEQ ID NO: 391450 - DNA, 1000 bp, Homo Sapiens; identical to SEQ ID NO: 282199

SEQ ID NO: 391451 - DNA, 1000 bp, Homo Sapiens; identical to SEQ ID NO: 114875

SEQ ID NO: 391452 - DNA, 1000 bp, Homo Sapiens
gcctcatggatctactctccaagaagcacccgctggacacactgttcctgctggccgggccagacacggtgctcacgcctgacttcctgaaccgctgccgcatgcatgccatctccggctggcaggccttctttcccatgcatttccaagccttccacccagctgtggccccaccacaagggcctgggcccccagagctgggccgtgacactggccgctttgatcgccaggcagccagcgaggcctgcttctacaactccgactacgtggcagcccgtgggcgcctggcggcagcctcagaacaagaagaggagctgctggagagcctggatgtgtacgagctgttcctccacttctccagtctgcatgtgctgcgggcggtggagccggcgctgctgcagcgctaccgggcccagacgtgcagcgcgaggctcagtgaggacctgtaccaccgctgcctccagagcgtgcttgagggcctcggctcccgaacccagctggccatgctactctttgaacaggagcagggcaacagcacctgaccccaccctgtccccgtgggccgtggcatggccacaccccaccccacttctcccccaaaaccagagccacctgccagcctcgctgggcagggctggccgtagccagaccccaagctggcccactggtcccctctctggctctgtgggtccctgggctctggacaagcactgggggacgtgcccccagagccacccacttctcatcccaaacccagtttccctgccccctgacgctgctgattcgggctgtggcctccacgtatttatgcagtacagtctgcctgacgccagccctgcctctgggccctgggggctgggctgtagaagagttgttggggaaggagggagctgaggagggggcatctcccaacttctcccttttggaccctgccgaagctccctgcctttaataaactggccaagtgtggacttgtgaaaaaaaaaaaaaaaaaaaaaaa

SEQ ID NO: 391453 - DNA, 295 bp, Homo Sapiens; identical to SEQ ID NO: 282201

SEQ ID NO: 391454 - DNA, 1000 bp, Homo Sapiens; identical to SEQ ID NO: 206271

SEQ ID NO: 391455 - DNA, 1000 bp, Homo Sapiens; identical to SEQ ID NO: 282203

SEQ ID NO: 391456 - DNA, 1000 bp, Homo Sapiens; identical to SEQ ID NO: 282204

SEQ ID NO: 391457 - DNA, 1000 bp, Homo Sapiens
ttcaactttaaatttgcccacagaaccctctaaatccccttgtaaatttaactgttagtccaaagaggaacagctctttggacactaggaaaaaaccttgtagagagagtaaaaaatttaacacccatagtaggcctaaaagcagccaccaattaagaaagcgttcaagctcaacacccactacctaaaaaatcccaaacatataactgaactcctcacacccaattggaccaatctatcaccctatagaagaactaatgttagtataagtaacatgaagacattctcctccgcataagcctgcgtcagattaaaacactgaactgacaattaacagcccaatatctacaatcaaccaacaagttcattattaccctcactgtcaacccaacacaggcatgctcataaggaaaggttaaaaaaagtaaaaggaactcggcaaatcttaccccgcctgtttaccaaaaacatcacctctagcatcaccagtattagaggcaccgcctgcccagtgacacatgtttaacggccgcggtaccctaaccgtgcaaaggtagcataatcacttgttccttaaatagggacctgtatgaatggctccacgagggttcagctgtctcttacttttaaccagtgaaattgacctgcccgtgaagaggcgggcataacacagcaagacgagaagaccctatggagctttaatttattaatgcaaacagtacctaacaaacccacaggtcctaaactaccaaacctgcattaaaaatttcggttggggcgacctcggagcagaacccaacctccgagcagtacatgctaagacttcaccagtcaaagcgaactactatactcaattgatccaataacttgaccaacggaacaagttaccctagggataacagcgcaatcctattctagagtccatatcaacaatagggtttacgacctcgatgttggatcaggacatcccaatggtgcagccgctattaaaggttcgttt

SEQ ID NO: 391458 - DNA, 1000 bp, Homo Sapiens; identical to SEQ ID NO: 282206

SEQ ID NO: 391459 - DNA, 1000 bp, Homo Sapiens; identical to SEQ ID NO: 282207

SEQ ID NO: 391460 - DNA, 1000 bp, Homo Sapiens
ctcaatacattcatgaatctctaggtagatggatcaagaaaaagagataagactcaaatccccaatatcagaaatggaagtgggtacgtcacaacaaatcatacagacattaaaagtattatgacagaatgctatgaaaatgccaataaacaaaaatgacaataaatttgacaatttacattgttaaattaaattaaatttggtgtaaagctttctccatatcttaaattcctacatagcaaactaacccaacttaacataactgcgttatgcaaacaaactacagcctaacttaagagtgttgtaataaatagctgagtctcagccaatcacaggctgccaagtgatcatattatgtcccccataagcaaatgcctcatcacgccatgcccatataaggcaaacactgagctgtaataaattggctggttttgagtatcacttcctgtttttatctataaacactgccttcacatgttgctggacagagctttctgaatctttctgggttctgagggctccccaattcatgaattgttctttgctaaataaactctgttaaattcaacttctctaaaatttttattttaacaacatgaaatagaaacatttcttgaacgattcaaattaccaaaactaaatcaagaagaaatctctgtcaatggaagaaattaagtttgtaattttaaaaatccttctcacagagaaggccaaatggtttccaggtcagatggcttcattgattaatccatagtattctgtcataatactgtcataatacttttaatgtctgtatgattaattctattatacatttaaggaagaaacaatacaaactcaatacaaactctttcaacaaaagagcagaagaaaacacatcccaataatttacaagtccaatatactaacatcaaacaatgacattaaaagaaaaggaaactaaagacacacaaacatagccatgaaaatgtttaacaaaatattttttaaaattgaattc

SEQ ID NO: 391461 - DNA, 1000 bp, Homo Sapiens; identical to SEQ ID NO: 206215

SEQ ID NO: 391462 - DNA, 1000 bp, Homo Sapiens; identical to SEQ ID NO: 206273

SEQ ID NO: 391463 - DNA, 1000 bp, Homo Sapiens
agagactgaggcaagttttagagcaggcatgaaagtttactgaaaagctttaaagcaggaatgaaagaacgtaaaacatacttagtagagggccaagcaggcgacttgagagatccagtgcactgtttgacctttgacttggggttttacacgttggcatgcttccggggtcttgcgttgcttctccccacgattcttccctttcttcccttggggtgggctgtccgcatgcgcagtagtggcctgctagcgctggggaggggagcatgcgcagtgtgtttactggagttgtgcacgcgctcactcgaggttcttcccttaccaggggaatgctccattttgtctcttagtgcgcatgtttgagcccactcgcccaactcctgacattttatggggaagctgccgatcaccagtttcaggttttttctatctattgggagactgtcgttccctggtgccagctgtgaccaattattattttagagagacaatcagcagccacctgaccatcacctgatggtcgcctgacattcctgggggttgtgttgaagaaggaattcatgaattttacaagtataatcaaagacaaccaaaaatttttactttttccttcaaaagctaagtgtagtgtagctcccccatagtctaagttaaagaagaacactaactgcctgtttttccttctgtgctcagcaagccttatctgtacttgctagtttcacattccttgaggctcagcgagttcctgcttcaccaccctagcgcagctgcaaagttacaaggttgatgcagaaacatggtttcccagggatgtggaacatgtagtatagataaatgtaaaagactgaacaactgcctttgctctcgcttctgtaagtacgcttcctgcctcgcgtactcccggccaccgactgcttaaaaggtggctgctttctttatccagggctcagactttcctggacgctagtcctactgagccaggtgatcaccttttaataaa

SEQ ID NO: 391464 - DNA, 1000 bp, Homo Sapiens
ttgaagttgcgagaagcagccgccacctcccgggcgctccgcactgcgcggcggcgggatctgcgcctgcaggagctgcccagctctccctctaggggtgcagagcgagcacgcgaggtgggctggccagaccctgcggctggcactgacctccgcgccccttcctccgacgcccgcacccacgcgaccggggcgcagactcccagcgccttccttcccgcggagatccctgcagggtctctgggaaagacagacagacggacggggagagcactcggagggaaagttgttcctcccagtctcctgtcaggcaattacaggcgagcccaagcggggagaggggcgggaggaagcgagggaagggctccggagtggggggaggccgcaggaggggaggcgggggtgcagttggtgaaactcctctgtctcccgctcatcttttcattgctcgttcccctccttcccgcagacacccggacctcccctgggcgccagctccgcggctccaacgggtccagaaacaagccggattttttttttttcttcctggaaattggctttggtgtgtgttgccctacctccctcctccccctcccacccacagcccccccccggccttttttttttttttttttttttttgagacatggcccgggcagtggctcctggaagaggaacaagtgtgggaaaagggagaggaagccggagctaaatgacaggatgcaggcgacttgagacacaaaaagagaagcgttcctctcggatccaggcattgcctcgctgctttcttttctccaagacgggctgaggattgtacagctctaggcggagttggggctcttcggatcgcttagattctcctctttgctgcatttccccccacgtcctcgttctcccgcgtctgcctgcggacccggagaagggagaatggagagggggctgccgctcctctgcgccgtgctcgccctcgtcctcgccccggccggcgcttttcgcaacg

SEQ ID NO: 391465 - DNA, 1000 bp, Homo Sapiens; identical to SEQ ID NO: 282210

SEQ ID NO: 391466 - DNA, 1000 bp, Homo Sapiens
cctctctacttccatctgcatttgcaacttctataaaattagcaaattaatagactcatgtcagagagtgtctctgtgaatgtgtacacagttgtccatttgtaaggtagatgacactttgctcctaagtagacctgcaaacaaagacaatggggtctttcctgattcctttagtttggagatgcagagaaccccacgtttctctaagtgaaatggcaagaagttatttgttagaatatggaactggtaacaaattcatgtttgcaccttgaatttgctttcacagacctggctgtattgttggacaggaataaagtaaattggagactaattgctttgtccattcccttagtcaaaaaagtatcgctgttaagttcttgaggttttttgtgtattatctctcaagtgttgagatgtttgtgtaatatatgtatcacactcatggatgaggaatcaggcacagatgaaacttgttgaaggttatgtgtacatttaatgagcagcagagtcaggattcagaccctcaactagacaaaagtcatctctgacagacttttattcaggataaaataccatttgtccatttagccagttaccagccatttactttcattattgctgaagtcattcattctaggttgtagacgggtaatttttattctaaaagcggtgtcctcttccagaggaaacttaagagacatcttagaatggtcaggggtagtgggctggtatttgagcagaggttgcagaatttgagaaagttacagctgaggttctttgttagtggcaagtctgctaagccctgggctatgctaacagctctgcctcatgctctttaatctttgagtcagacctatgagatacaggtgtagccccattttgtagtcgagagtgaggctcagatgtgaagcgactggctgaggttaaacttgatagtctgtttacttattttctggccctcttcttgttgccatataattaggatgagtagggtaagctt

SEQ ID NO: 391467 - DNA, 1000 bp, Homo Sapiens; identical to SEQ ID NO: 282211

SEQ ID NO: 391468 - DNA, 1000 bp, Homo Sapiens
tattcgcctacacaattctccgatccgtccctaacaagctaggaggcgtccttgccctattactatccatcctcatcctagcaataatccccatcctccatatatccaaacaacaaagcataatatttcgcccactaagccaatcactttattgactcctagccgcagacctcctcattctaacctgaatcggaggacaaccagtaagctacccttttaccatcattggacaagtagcatccgtactatacttcacaacaatcctaatcctaataccaactatctccctaattgaaaacaaaatactcaaatgggcctgtccttgtagtataaactaatacaccagtcttgtaaaccggagatgaaaacctttttccaaggacaaatcagagaaaaagtctttaactccaccattagcacccaaagctaagattctaatttaaactattctctgttctttcatggggaagcagatttgggtaccacccaagtattgactcacccatcaacaaccgctatgtatttcgtacattactgccagccaccatgaatattgtacggtaccataaatacttgactacctgtagtacataaaaaccccatccacatcaaaaccccctccccatgcttacaagcaagtacagcaatcaaccctcaactatcacacatcaactgcaactccaaagtcacccctcacccattaggataccaacaaacctacccacccttaacagtacatagcacataaagccatttaccgtacatagcacattacagtcaaatcctttctcgcccccatggatgacccccctcagataggggtcccttgaccaccatcctccgtgaaatcaatatcccgcacaagagtgctactctcctcgctccgggcccataacacttgggggtagctaaagtgaactgtatccgacatctggttcctacttcagggtcataaagcctaaatagcccacacgttccccttaaataagacatcacgatg

SEQ ID NO: 391469 - DNA, 1000 bp, Homo Sapiens
tattcgcctacacaattctccgatccgtccctaacaagctaggaggcgtccttgccctattactatccatcctcatcctagcaataatccccatcctccatatatccaaacaacaaagcataatatttcgcccactaagccaatcactttattgactcctagccgcagacctcctcattctaacctgaatcggaggacaaccagtaagctacccttttaccatcattggacaagtagcatccgtactatacttcacaacaatcctaatcctaataccaactatctccctaattgaaaacaaaatactcaaatggccctgtccttgtagtataaactaatacaccagtcttgtaaaccggagatgaaaacctttttccaaggacaaatcagagaaaaagtctttaactccaccattagcacccaaagctaagattctaatttaaactattctctgttctttcatggggaagcagatttgggtaccacccaagtattgactcacccatcaacaaccgctatgtatttcgtacattactgccagccaccatgaatattgtacggtaccataaatacttgaccacctgtagtacataaaaacccaatccacatcaaaaccccctccccatgcttacaagcaagtacagcaatcaaccctcaactatcacacatcaactgcaaccccaaagccacccctcacccactagaataccaacaaacctactcacccttaacagtacatagtgcataaagccatttaccgtacatagcacattacagtcaaatcccttctcgtccccatgggtgacccccctcagataggggtcccttgaccaccatcctccgtgaaatcaatatcccgcacaagagtgctactctcctcgctccgggcccataacacttgggggtagctaaagtgaactgtatccgacatctggttcctacttcagggtcataaagcctaaatagcccacacgttccccttaaataagacatcacgatg

SEQ ID NO: 391470 - DNA, 974 bp, Homo Sapiens
attctaatttaaactattctctgttctttcatggggaagcagatttgggtaccacccaagtattgacttacccatcaacaaccgctatgtatttcgtacattactgccagccaccatgaatattgcacggtaccataaatacttaaccacctgtagtacataaaaacccaacccacatcaaaaccccctcctcatgcttacaagcaagtacagcaatcaactctcaactatcacacatcaactgcaactccaaagccacctctcacccactaggataccaacaaacctacccacccttaacagtacatagtacataaagccatttaccgtacatagcacattacagtcaaatcccttctcgcccccatggatgacccccctcagataggggtcccttgaccaccatcctccgtgaaatcaatatcccgcacaagagtgctactctcctcgctccgggcccataacacttgggggtagctaaagtgaactgtatccgacatctggttcctacttcagggtcataaagcctaaatagcccacacgttccccttaaataagacatcacgatggatcacaggtctatcaccctattaaccactcacgggagctctccatgcatttggtattttcgtctggggggtgtgcacgcgatagcattgcgagacgctggagccggagcaccctatgtcgcagtatctgtctttgattcctgcctcatcctattatttatcgcacctacgttcaatattacaggcgaacatacttactaaagtgtgttaattaattaatgcttgtaggacataataataataattgaatgtctgcacagccgctttccacacagacatcataacaaaaaattttcaccaaaccccccctccccccgcttctggccacagcacttaaacacatctctgccaaaccccaaaaacaaagaaccctaacaccagcctaaccagatttcaaattttatc

SEQ ID NO: 391471 - DNA, 976 bp, Homo Sapiens
ttctaatttaaactattctctgttctttcatggggaagcagatttgggtaccacccaagtattgactcacccatcaacaaccgctatgtatttcgtacattactgccagccaccatgaatattgcacggtaccataaatacttgaccacctgtagtacataaaaacccaatccacatcaaaaccccttccccatgcttacaagcaagtacagcaatcaaccctcaactatcacacatcaactgcaactccaaagccacccctcacccactaggataccaacaaacctacccatctttaacagtacatagtacataaagccatttaccgtacatagcacattacagtcaaatcccttctcgtccccatggatgacccccctcagataggggtcccttgaccaccatcctccgtgaaatcaatatcccgcacaagagtgctactctcctcgctccgggcccataacacttgggggtagctaaagtgaactgtatccgacatctggttcctacttcagggccataaagcctaaatagcccacacgttccccttaaataagacatcacgatggatcacaggtctatcaccctattaaccactcacgggagctctccatgcatttggtattttcgtctggggggtgtgcacgcgatagcattgcgagacgctggagccggagcaccctatgtcgcagtatctgtctttgattcctgcctcatcctattatttatcgcacctacgttcaatattacaggcgaacatacttactaaagtgtgttaattaattaatgcttgtaggacataataataacaattgaatgtctgcacagccgctttccacacagacatcataacaaaaaatttccaccaaacccccccctccccccgcttctggccacagcacttaaacacatctctgccaaaccccaaaaacaaagaaccctaacaccagcctaaccagatttcaaattttatctt

SEQ ID NO: 391472 - DNA, 1000 bp, Homo Sapiens
ttaataaaaattgtaaagccagcagagattccagaactaaaaaagactgaaactcagactacaggtgcagaaaacaaagctaaaaagcttacattgcctctatttggtgccatgaaaggaggaagcaaattcaaattaaaaactggaacagtagggaagttaccccccaagcgtccagaactccctccaactctaatgagaatgaaagatgagcctgaagtagaagaggaggaggaagaggaagaggaagaagagaaagaaaaggaggagcatgaaaagaaaaaactggaggatggaagcctcagtaggccacagccagagatagagccagaagcagcagtgcaggaaatgaggcctcccacagatctcacacattttaaagaaacccaaacccatgaaaacatgtctcaacttagcgaggaagaacagaataaagattatcaagactgtagcaaaaccacttcattgtgcgcaggaccctcagcatcaaagaatgaatatgagaaaagcagaggtgaattgaagaaaaagaaaacacctggtccaggcaaacttccaccaacactttcttccaaatatcctgaagatgacccagactactgtgtgtgggtcccacctgaaggtcaaagtggagatggcagaacccatcttaatgacaagtatggctattgattgcttcagaatcccaaaagaaaaccttgtggaccatgtgacatggaatatttgggataatgtatcaaattgaatggccagagaagtttagatgattatttgtaagatctggtgactggcttttcgttctgtgttcttggcttcctaaatttatctgcccatatgattctcatgcatttgatatttatgtttaaaagtgtttatatatgtatgtaaaaagggaaccatatgttttgagaatttgtaaagtgagagacatgatcctattaaaataagaaggcaaaaatgtaaaaaaaaaaaaaaaaaaaaaaaaaaaaaaaaaaaaaaa

SEQ ID NO: 391473 - DNA, 1000 bp, Homo Sapiens; identical to SEQ ID NO: 207083

SEQ ID NO: 391474 - DNA, 1000 bp, Homo Sapiens
gggcaagtgggagctgatagccagggaacagggttggatatctgcagctggaaaattaccaagaggaaacatcaggggaaggggaattctggctaaactgactgctggggatgggttctcggtcattttctacactgacctaacaggattcatactggaggcaggccagggtgctcagacatcaccggggggatggtggcagatgaggaacgtgatcagatataggaggtgatcagatatgggaggtgatcagatatggagtggtggggggagggttgttgctaagctgacttagcagagttcttgttagaactggattttatttatttatttattttgagatggagttttgctcttgttgcccaggctggagtgcaatggcgcgatctggctcactgcaacctccgcctcctgagttcaagtgattctcctgcctcagcctcctgagtagctgggattacaggcatgcgccaccacgcccagctaattttgtatttttagtagagatggtgtttctctatgttggtcaggctggtcttgaactcccgacctcaggtgattctcccgccttggcctcccaaagtgctgggattacaggtgtgagccaccacgcccggcccagaactggattttaaaaggaagtgcacagatgggcctaggagaggactcaggggcctgactgattaaagcttggccaagcacagaatctttcccactctccagaagctcaccctgacctctccttttcactcaggccctgtctctcattaacagccagtagcttattggtgatcctagatgcagcctgcaaccttttgtacaactcacagaagcactgatttgctgtcaaatggtggaaaagttcaagctgccaaactttttcttaaaggaccaaacagtgaatactgtaggccttaactgttgcaacaccatagcctctgttgcaacaactcaactctgtccttgtagtacaaaagcagccactgacaatatgtccata

SEQ ID NO: 391475 - DNA, 1000 bp, Homo Sapiens; identical to SEQ ID NO: 114876

SEQ ID NO: 391476 - DNA, 1000 bp, Homo Sapiens
cttatttggggttgcatcagaaatgtctggagaataattctttgattatgactgttttttaaactaggaaaattggacattaagcatcacaaatgatattaaaaattggctagttgaatctattgggattttctacaagtattctgcctttgcagaaacagatttggtgaatttgaatctcaatttgagtaatctgatcgttctttctagctaatggaaaatgattttacttagcaatgttatcttggtgtgttaagagttaggtttaacataaaggttattttctcctgatatagatcacataacagaatgcaccagtcatcagctattcagttggtaagcttccaggaaaaaggacaggcagaaagagtttgagacctgaatagctcccagatttcagtcttttcctgtttttgttaactttgggttaaaaaaaaaaaaagtctgattggttttaattgaaggaaagatttgtactacagttcttttgttgtaaagagttgtgttgttcttttcccccaaagtggtttcagcaatatttaaggagatgtaagagctttacaaaaagacacttgatacttgttttcaaaccagtatacaagataagcttccaggctgcatagaaggaggagagggaaaatgttttgtaagaaaccaatcaagataaaggacagtgaagtaatccgtaccttgtgttttgttttgatttaataacataacaaataaccaacccttccctgaaaacctcacatgcatacatacacatatatacacacacaaagagagttaatcaactgaaagtgtttccttcatttctgatatagaattgcaattttaacacacataaaggataaacttttagaaacttatcttacaaagtgtattttataaaattaaagaaaataaaattaagaatgttctcaatcaaacatcgtgtcctttgagtgaattgttctatttgacttcacaatagaaacttaataatcgtaccttctcaaga

SEQ ID NO: 391477 - DNA, 1000 bp, Homo Sapiens
acaaatcagtcgtgttaagacatttcaggagaacctttcagcatttaaacgtgatccccaaatcaatattttgctgctgcccctgcacacaggttctaatggattaactatcattgaagcaactcatgttctcttggtggagcccatattgaaccctgcccatgagcttcaggccatagggagggtgcaccgaattggacagacaaaacctactattgtacacagattcttaattaaagcaacaatagaagaaagaatgcaggcaatgctgaaaactgctgagagaagtcacacgaactcatcagcaaagcattcagaggcctctgtcttgactgtggctgacctggcagacctatttaccaaagaaactgargagcttgaatgaactacacttgattcattccatggactttagtgtattaataaactttcatagctgtagagcaaagttacaagttttaaaaacccagtagataacagtaacactgttcctagttgaatgaatttgtttattgttctggttatacagtggcttagtacttattgagtccttttcaatatactgtttccaaaagatctataaagattcttaattttacactcctaataaaacatttattttttgtcccaaatagtatctatatctgatgatgcaagggaattaagagaggtaatgtgtacttttcttatgataagatcactcataaaacagttggaataagaaagtaaactagtctagttttatatgacctggtatattgaacaaacatagatctcagttttggaagggccttcagtatctttagcacatgattcaccaatatcttgttagtaatattttaagtagatggtgaattatattaacccattttttgagtaggcttataccataactttacacctagtaattttgcagtaatacaactccttacaataagttaatgttagacagttatttgtttcttctgcatcttgctactgaaaacaaaaacaaaaaaaa

SEQ ID NO: 391478 - DNA, 1000 bp, Homo Sapiens; identical to SEQ ID NO: 282216

SEQ ID NO: 391479 - DNA, 729 bp, Homo Sapiens
gcgtgaagagctgcagtgtcactcttaaagctgaattaatctctgccattccttaaggaaacaggcaactgtcttaaaaccgtggtttggaaaatattttgttcaagataaaactgttttaagatatatgtatatatatcttatatatctgtattcgcatggtaacatatcttcggtcttcctgccgctgggctctcagcggccctccaaggcagcccgcaggcccgtgctcgcctcagggatcctccacagccccggggagaccttgcctctaaagttgctgcttttgcagctctgccacaaccgcgcgtcctcagagccagccgggaggagctagaaccttccccgcgtttctttcagcagccctgagtcagaggcgggctggccttgcaagtagccgcccagccttcttcggtctcacggaccgatccgcccgaaccttctcccggggtcagcgccgcgctgcgccgcccggctgactcagcccgggcgggcgggcgggaggctctcgactgggcgggaaggtgcgggaaggttcgcggcggcggggtcggggaggtgcaaaaggatgaaaagcccgtggacggagctgagcagatccggccgggctggcggcagagaaaccgcagggagagcctcactgctgagcgcccctcgacgcgggcggcagcagcctccgtggcctccagcatccgacaagaagcttcagccatgcaggccccacgggag

SEQ ID NO: 391480 - DNA, 1000 bp, Homo Sapiens; identical to SEQ ID NO: 282219

SEQ ID NO: 391481 - DNA, 1000 bp, Homo Sapiens
ggatcgccctggagacgcggagctggatgctgaggagctaggagaccacgagcgtgcgcgccgtcgccggcgagcccactggccccgtgactgctcctctcctgagtccgactgagaggacccatctcttgagtgccacttgggccgcggggggctccggcttcgcatccctgagcgctgccaccgctcttcctctgaatctgacctgcggagaggaccatggatgcctgctcagtgcctgcagctgtcatctgctccacagatgcttactgggtgcccgtgggggagcaggcactgttctaggttctggggacacagcagtgacccaaataccgatggcttctgccttcctgggctcaccctctggtgggccccaacaaggaagacatcaacaaataaacacaccacgcaacactaggcagaggcagaagccacaaagagtagcaatgccgagcacaggggctggggctgcagggccgaggtcagagaggggctctctcaggagctgacactgagccaaggtctggagggagtggggaggcagcgatgggtggattcggagggagagtgctcgaggcagagcaagagcgagggcctagaggcaggcactgacctgccacattctaagaacaacaaggaggctgtatggctgagacagagtgtgggggagagggaggaggcgcgggcagggaggtggctggggctggtggcgcaggaattataagggtacgaaccaggggacccgaacacatttaggctgtcaagggagggcttcctagatggaagtggtatttgaactagtcccacaggatggacaggagttaacagagtagagcgcagggaatggaagatgcacaacctcaggggtggttcaggggcctttaattttatttattagagacaaggtctactagacacagagtctactagagacaaggtctatatttttatttattagagacagagtctccctctgtcacacaggctggagtgcatgatc

SEQ ID NO: 391482 - DNA, 1000 bp, Homo Sapiens
gacaacatttagtggacacagacttgactcgatatgcttagtctaccaagtttttcctggcttatgagacacagctgaacatatgccagtttcatgggggactgtcagatattctgaaggtacctaatcaagtcagtacagtaggaaggagagagaaacagaagtctcgtttgtgaaatactacttgagtttgtgcgtgaagaatggataggatttaaactgagaagagtggcaaggggacaaccataaacaactatagagaggctggaaccttagctgtcctgtaggcagcagggatgcctggaggcatgtggaaaccacgaatggagggcacaggacatttgacaatgcagtgcataagctcaacatcagacaagtagaagaacttctgtaagatgtcaaggaaaactgcttttattaaatatcttaatttttggcagaatcattttgtctgatataatgtgatgggtttagtaccacattacatttcacatgttatgttctgaaatctgaaacatttattttttttaatctaagaatattccctgggcttttgaagcaataaagaaagcaagtgaatgggtaagaagaactgaaggacagtacccatctatctgcccatggcttgaactggggaatgactgggactcggccaccaagcagttacagggactccagcccataaacactgtgtcccctcttcatagagtccttcattacagtcaaggctaagtcaaatgaaactgaattttaaactttttgcatgcttctatgtagaaaattatcaaatgataatagatacttataatgaaactccattaaggttttattcagtgtagcaattagtgtctttaaaaataaagtggaagcagaactactttaatcaactaacaagcaatagtgaaacttaaaatatttcagttttctgtctcattttttgttattttattttttatatatattttttgagacaaagttttgctcttgttgctcagactgg

SEQ ID NO: 391483 - DNA, 1000 bp, Homo Sapiens
ccagaaagctcaagccatctctgtcctccatgagatgatgcagcagaccttcaatctcttcagcacaaagaactcatctgctgcttgggatgagaccctcctagaaaaattctacattgaacttttccagcaaatgaatgacctggaagcctgtgtgatacaggaggttggggtggaagagactcccctgatgaatgaggactccatcctggctgtgaagaaatacttccaaagaatcactctttatctgatggagaagaaatacagcccttgtgcctgggaggttgtcagagcagaaatcatgagatccctctctttttcaacaaacttgcaaaaaagattaaggaggaaggattgaaaagtggttcatcatggaaatgattctcattgactaatacatcatctcacactttcatgagttcttccatttcaaagactcacttctcctataaccaccacaagttgaatcaaaattttcaaatgttttcaggagtgtaaagaagcatcatgtatacctgtgcaggcactagtcctttacagatgaccatgctgatgtctcctttcatctatttatttaaatatttatttatttaactatttttattatttaaattattttttatgtaatatcatgtgtacctttacattgtggttaatataacaaatatgttcttcatatttagccaatatattaatttcctttttcattaaatttttactatacaaaatttcttgtgtttggttattttttaagataaaaagtcaagcctgactgtacaacctgatttcaaaatagatgatttaatcaagttacctatcataattttattcaagttatagaaaaatcaattttctataccaggttatatgttgccttaaggatgtaaacatgaatataaaaaatacagctcctgttctcttgtatctttgatttttgtcaggaaataaatctaaaaacaataataatgctgaattaatatcagttatacaaactgctgta

SEQ ID NO: 391484 - DNA, 1000 bp, Homo Sapiens
gtcactgtgcctggaccatagtcagagtggaaatcctaaggaacttttacttcattaacagacttacaggttacctccgaaactgaagatctcctagcctgtgcctctgggactggacaattgcttcaagcattcttcaaccagcagatgctgtttaagtgactgatggctaatgtactgcatatgaaaggacactagaagattttgaaatttttattaaattatgagttatttttatttatttaaattttattttggaaaataaattatttttggtgcaaaagtcaacatggcagttttaatttcgatttgatttatataaccatccatattataaaattgccaagtacctattagttgttctttttaaaatatacctgcaaagtagtatactttctggcccctgcctttaaggaatttaaaattcaagaaagccatgatggaatatataaggtaagagacaataaggggacctgaaccttatgggggaataaatatggcatgaactgctgtgggattaaaagagaaaaggaaagctggagggtctggaactaaacctggggttcccattcctcctactgtgtgttccagattctctcatcataaagttagaattgagctggccatcaggaatagccagaggaatatgtcagcttttgtgttctccctaaccttccccagttatttgggggatcactttgctcctcgaaagatttttaaataattatgtgccccccaccatccctgcaagcttaagggtgagaagtcccatttacttccatgacactattaagcagcaatctctttattctgctcatcatgggacagccaagatgtgtgggtatcttaggggagctgtgggtccctgtctgctggcatggcacaggcatcagaggaagaagaacctttttataccctagccatctggttagttttctccctagtttttcaaaaaactaagcctgcttccagtccccactgccttgttcatacagaattc

SEQ ID NO: 391485 - DNA, 1000 bp, Homo Sapiens; identical to SEQ ID NO: 195190

SEQ ID NO: 391486 - DNA, 1000 bp, Homo Sapiens
actgctgtgcaggtgagggaaactgaggcacaaagcagcaggggagcagaggggagaggcgcctaatctgagggatgctgtgcgctgcacgccatgcccccacccacccaggttcataaccaacaggccttgaagatggccccgcgcctcaggccaacccattctctggggcctcacctccgactctcgtgggcgaggtagtcagcaaacatgcgcacggcctggagctcaggggccgaggagggcttgatctcatccaggaccacaccgaacttcctctgcagtagggacgaggcgtcagctgcacccgtccaccccagaggatttccatgtcttcagcttggcagggagagccccagacaggaagtccctgccccaccagggacccctcagcccagcatgggccacctccactgcagtacactgtggagggtggcatggcgtcacctgtcgtgagcagccaggtgtgccctcatctgcagggccacactgcccatgccttgagctagggaccctggtaggttactgtctatcccctggcagctgtccacctctggtggtgaggtgaagggcgtgtcacctgggggcagggcagcagcagttatgggggttgtgacatgcgcttctataaagcaggacatgcccccagccagccctgcccacctactggccctctgaggatgcccagactgataccactgtcacatctgcagctgggggcccgtccctcattgtgttccctcctagatggttccttccccatttttttttttttcgagacggagtctcgctctgtcgcccaggctggagtgcagtggcgtgatctcggctcactgcaagctccacctcccaggttcacaccattctcctgcctcagcctcccgagtagctgagactacaggcgcccgccaccacgcccggctaatttttttgtatttttagtagagacggggtttcactgtgttagccaggatggtctcaatctcctgaccttgtgatc

SEQ ID NO: 391487 - DNA, 1000 bp, Homo Sapiens
attcgactgcctgcgtaagtgtccataggatatctgaggaacattcaccgaaaataagccatagacatgaacaacacctcactcccccattgaagatgcatcgtctagttaacctgctgcagtttttacatgatagactttgttccagattgacaagtcatctttcagttatttcctctatcacttcaaaactccagcttgcccaataaggatttagaactagagtgattgttatatatataaattatatatatataaattaaatttatatatatataatttatatataatatatatattttaattcagagttacatacatacagctaccattttatatgaaaaaaacatttcttcctggaacccactttttatgtaatttttttatataaatatttttcctttcaaatcagatgatgagactagaaggagaaatactttctgtctcattaaaattaataaatgattggtctttacaagacttggatacattacagcagacatggaaatagaattttaaacaattcctctccaacctccttcaaattcagtcgctactgttatgttactttctccagcaaccctgcactggggaaggctgtgatattagatttccttgtatgcaaagtttttgttgaaagctgtgctcagcggaggtgagaggagaggaggagaaaactgcatcatatctttccagaattgaatctagagtcttccctggaaagcccagaaacttctctgcagtatctgacttgtccatctggtctaaggtggctgcttcttccgcaaccatgagttagtctgtgtccatgaataatacaagatctgttatttccatgactgctttactgtaattttagggtcaatatactgtacatttgataataaaatatattctcccaaaaacctggcagtgatgacaatgctattttcttttttttttttttaattatactttaagttctagggtacatgtgcacaatgtgcaggttagttacata

SEQ ID NO: 391488 - DNA, 1000 bp, Homo Sapiens
gaatagcttgggttataaaagccactggtaaccggtacctctcatggacttatcctgattagttctgggataaacacagataggcctgggggtttgaaatgtgtttgctgaagaatgtacattctttttctgctttgtccccttcctccatactatacttcccatatcctggagataaccagtaatgcacattgagcagtttctatggccagtgtttgttgtacaaatttgccatcatagggaaaaatgtctcctttgtcatgaaacagattttgtttcatacttatatgtaatacattgaggtttgactttggctaattctggcaacggtgcaaaaacaaacacagaaatgtaataaattcaactgacttccgcatgctttttctttcccctatgctcacttcaccttcaatccctcatcatgtggaatgaacctcttcagcacctgcaaagggagtctgagatcttagagggaatatatgcatactactttgatctaataattttcaacaataaaattgatgaaaatgattagacatctgggagaagctgttgagttcatatgcacagaccctccatgggtcccaatcccctagagcctagatatctaaagaattttagtataactagaaatcatctcttacctcatcatctgtcctgtttcagcaggtctaactagagactagttatagtgttgcctaaatttacaattattgtcatgctcaaaaaaaagaaggaaaaaaaagtaatttaaggagaccatatattttaaaactagttctcctaaactttaattaaatatatatttaagtgtataactatttaattatttggaatgattagagatagttggaaatcatagctttttattgtcaaggctccaacagctgcacaaaatagctgctgctttctataatccattttattaataaattcttttattaacaataagaaagttgtcttgaactgagaacactgcattttttagtctgattttact

SEQ ID NO: 391489 - DNA, 1000 bp, Homo Sapiens
cctagcactgggattacaggcatgagccactgcatctagcccagaacacagttctttgagttggattacatctttgctgtaactcaggtcatcaagtcatcacttccactttttgccttttgtttccacctaagatctaaacactttgggtgagttttcaagagtcaaacacaacataaaataagggatagtagctatgagtttccatggcattgcagcatcaggaaacgggcatagccattgggttgactttgtctcatgtttaaggttccttcattctcctcctgtgttttgttttgtttagaatgaaaggaagaatgtttgtgaattagaatactgaatattcactgcaagtcgtgatttttttttttcttttttgagacagggtctcactctgtcacccaggctggagtagagtggtacaatcacagctcactgcagcctcaaactcccaggctcaagtatcctcctacctcagcctcccaagtagctgtaactacaggtatgccaccatgcccagctaatttttgtatttttcatagagacagagtttcaccatgtggcccaggctagtctcgaacttcttaggtcaagcaattcacccacctcagcctcccaaagtgctgggatgacaggtgtgagccaccacatctggcccaagccatgaatcttgggagaggagaggaggtgactatggccttgtcacccctgctgtccctcaggagtgtaactctggtgtttctgttgattttcacagtgactgatcaggcttttgtcacactggccacagatgacatctactgccagggcgccctggtcctggggcagtcactgaggagacacaggctgacgaggaagctggtggtgttgatcactcctcaggtgtccagcctgctcaggtaaggctcagagatgtggcttgtgcccagatgggtcctatagaaggagggtcacctctcccccaagaggtcctaggagttattctgatgactgaccaccg

SEQ ID NO: 391490 - DNA, 1000 bp, Homo Sapiens; identical to SEQ ID NO: 282225

SEQ ID NO: 391491 - DNA, 1000 bp, Homo Sapiens; identical to SEQ ID NO: 282227

SEQ ID NO: 391492 - DNA, 1000 bp, Homo Sapiens
catatattgcaagagcctggcctgaggatgggaaaactcagagaggtcctttgacaacgcctgtcaaaagaagtgaggactgtctcaaaatccctgaggcagcaccatccatgttaactgggtggtctggccagagggatcttcaaaggcaaacaagtattgagagtgaggatgtaatggtatacagaaaaagccatcctttatatctaggattgtgaacaatttagttccctcaggtatttgagttagcaagatatagggattagggaccacaggatgaattgcgactgtggccttattaatgaggcagaggtcctgaactagcgtccatgccccactgagtttttgcactcctaatattggggtgttgcaggggctgttacagggtttgaggaggactcaacctattcttccttgaacggcccacgcttctggattaatattcgcttccactgggggagacaaagtgtttatcctggggctgtaaggatgttggcccccgtgtgattaaaaatatttctacctaataaaggagtgagactttcagacatacttaagaaggcatgtataaataataggtctcccactctacaactaaggggttgagaaaaatactgggttagaacctttcctgagatgtctatcacagtcatgctacaggaagaggggaggcctggattagagagaagagagaggctgcctccagtgctcagaaggaggtccacgcttcttttaatttccagtatcacctggggttcctgtgcagtaatggcagcttaagctgctggagccaggggtttgaatcctgggacccatccgtcccattggaccatctgtgaaacttattctgatctcagtgacctccatctccagggggagtctgatggaatgggcgctgtccaggttgctgccctctcctgaagcttgataatgaggaacactgatgtgtcactacagaggaggctgtgggaaaaagctgtttctcagggtggcctggatc

SEQ ID NO: 391493 - DNA, 1000 bp, Homo Sapiens; identical to SEQ ID NO: 282229

SEQ ID NO: 391494 - DNA, 1000 bp, Homo Sapiens
taagacagatggcatgtccatacaagatccttgatattagctgaaggatagcactcataaacataaaagggaaattaatcacatctgtgtgaacagatcatttaccttcatttgtctctttgccatccacatgctcagactgttgatttaatgatattgtatgtactttgacttataagggttacattttaacttcttggctaatttatctttggacataaccatgagaaatgacagaaaggaacagcaactggaaaacaagcattgcattgcaccaggatgtctgtgaaatggacttcagtaattttgctaatacaactgagcttttgctttagctctgggaattgtggaaaggtgctggtgtgggcagcagaatacagccattggatgaatataaagacaatcctggatgagcttattcagagaggtcatgaggtgactgtactggcatcttcagcttccattctttttgatcccaacaactcatccgctcttaaaattgaaatttatcccacatctttaactaaaactgagttggagaatttcatcatgcaacagattaagagatggtcagaccttccaaaagatacattttggttatatttttcacaagtacaggaaatcatgtcaatatttggtgacataactagaaagttctgtaaagatgtagtttcaaataagaaatttatgaaaaaagtacaagagtcaagatttgacgtcatttttgcagatgctatttttccctgtagtgagctgctggctgagctatttaacataccctttgtgtacagtctcagcttctctcctggctacacttttgaaaagcatagtggaggatttattttccctccttcctacgtacctgttgttatgtcagaattaactgatcaaatgactttcatggagagggtaaaaaatatgatctatgtgctttactttgacttttggttcgaaatatttgacatgaagaagtgggatcagttttatagtgaagttctag

SEQ ID NO: 391495 - DNA, 1000 bp, Homo Sapiens; identical to SEQ ID NO: 206277

SEQ ID NO: 391496 - DNA, 1000 bp, Homo Sapiens
cactcactacctggtggcttctgactctagcacagcccctctttactgatgagaaaactgaggctcagagagattgcctgatatacctgaagtcccacaataagggctgcacatgggatagaaactcacttcctacattccagatggaatgctctctgcaggccaagcccgcagtgcctacgtctaagctgggccaggcagaggggcgagatgcaggctcagcaccctccggaggggacccggccttcctgggcatggccgtgagcaccctgtgtggcgaggtgccgctctactacatctaggacgcctccggtgagcaggtgtgatcccagggcccctgatcagcagcggaggagcgctcgggccacctgcccgggctgtggaggagcgctcgcgctgaccaggcgctggggcgtccactgaagcggggtcatccaggcaactcgggggaggggaagctcacagaccggtacttcccactcccctgaattctctctgtccatcctcaacattcctttgcttcacagggtcagtggaagccccaacgggaaaggaaacgccccgggcaaagggtcttttgcagcttttgcagacgggcaagaagctgcttctgcccacaccgcagggacaagccctggagaaatgggagcttggggagaggatgggagtgggcagaggtggcgcccaggggcccgggaactcctgccacaacagaataaagcagcctgattgaaaagcaaagggtctgcttctgtcttcctgcagggcgcagtcctgccctggcgggggccggccaagaagggaagggccttgggagagcaaagtggggtttgccattcgccctctgtcccagggcgctggggcactgggtccacctcggcgggggagaggggctcgcagggagccatccacgggctttcggcgccctccagcggcgtctccgaaaaccggcgggcaaggcggcttttccttctgtaggaaacttttctggccaaactcc

SEQ ID NO: 391497 - DNA, 1000 bp, Homo Sapiens; identical to SEQ ID NO: 282230

SEQ ID NO: 391498 - DNA, 1000 bp, Homo Sapiens; identical to SEQ ID NO: 114878

SEQ ID NO: 391499 - DNA, 1000 bp, Homo Sapiens
atatccaactactgttcacattttgccaattcttaatttcatagcaaagcccatggcctgtggctcagaaaatctggtgaggctacgtgtttcaggacagcggagacatctacaattcaggcacacagtacaacgccatatatgccccactgtgcatatgctgtgtgtattttccagtgtgctgagtctatttctggacttctgtgagttgcaagttctggtcttgtgttcaggggctttgctccctggctctcaggagcagaggctaagaggtgtgctcaggttaaaagctagaaaaccgtaggaatttaacagatggaatagatatgcctgatgtgccttgtcgggtgccggttgcccgacaggcttgagttgcccctaatggtaaaattctggatggagtaaagagatacgattttaaacagagatgggatacaggcggacaaaaaggagagaaggctgaatttctagctaatttcgatattgattataggagaaccagtagaagatagccagataaagaggacactgcacattcctgcctttgttcacattattcccttggcctaggaagaattttccacttctccacggtttggggagcatctcttgtaggtgctaagagtgcaggctctggagtaggatcactggggatctaatcacagtcccacactgaccagctgtgagacctgagcacatcacctgacttccctgactgtttcccagtttcgcaacagcaattgtcagaggtgtttgaaccagagcaactccatcttgaataggggcaggggaaaatgaggctgagaactactgggctgctttcccagatgcttaagccattctaagtcacaggatgagagaggaggtcaagacaagacacaggtcataaagaccttgctgataaaacagtttgcagtaaagaggccagccaaaatccaccaaaaccaagatggtgatgagagtgacctctggtcgtcctcattactacactcccatctgc

SEQ ID NO: 391500 - DNA, 1000 bp, Homo Sapiens
agtttttgcactgtcttactattcaaggtaagaggatacaaacaagaggaccacttgtctctaatttatgaatggtgtccatcctttccccatccctgcctcctgcccctgacgcccatttccccccttagagcagcgaaactgccccctcctgcccgcccttgcctgtcggtgaggcaggtttttactgtgaggtgaacgtggacctgtttctgtttccagtctgtggtgatgctgtctgtctgtctgagtctcgtggccgcccctggaccagtgatgactgatgaatcttatgagcttctgattgatctcggggtccatctgtgatatttctttgtgccaaaaagaaaaaaaaagagtggatcagtttgctaaatgaacattgaaattgaaatgctttatctgtgttttctgtaaataaaagagtgcaataatctctgtgtgtgattgcaggacattctgaatgggtacgagagggcctcagccgggtctgggtgttcctagctttggggaggacagcgagagagaggtggaggtgggaattaaatgacaagtctgcctttcagaactcttgtcaccctcaacactgagtttagtttaggtttttgttttgttttgttttgagacagagtctcgctctgtcacccaggctggagtgcaatggcgccatctcggctcactgcaacctctgcctcccaggttcaagcagttctcccgcctcagcctcccgagtgactgggactacaggtgcacactgccacacctggctatttttttttttttttggattttagtagagacggggtttcaccgtgttgtccaggctggtcgcgaactcctgagctctgggcattcctcctgcctcagcctcccaaagtgctgggattgcagacttgagccacctcacccagccgttttttttttccttcagtcagttgagaccgggtaacttatagccagggataatgttcaaagtctttaacaagtggtatggcttgct

SEQ ID NO: 391501 - DNA, 1000 bp, Homo Sapiens
gacaagtttgatggagagagaggcagagacagatccctgaagacatcatttaagatcccgaattcacctgtgcccaaagccagactagtcctgaatgatttagttacaagaactaataaatgcctttttccataagtcagtttgaggccagatgaatagaaattgcatcccttattgagtcctggctcaagtcaatttagcaagcatttgttaagatccacggtgggagctatacctcagagctccagggagcacaggaggtgtgctacaatcacagccattgccagtattgttattattccatttattagacatttcagacactcctcagcactttacacacattatttcatttcaccctttgagcacatcctttaattaaaaattgttatctacactttacagggaaagaaacctagaccagagaagttaagaaatacatccaggggtgggtgcggtggcttacacctgtaatcccaacactttgcgaggccaaggtgggaggattgcttgagcctaggagttgaaggccagcctgggaaacatggcaaaatcctctctctattttcaaaaaatacaaaaattagccgggcatggtggtgtgtgcttgtagtcccagctacttaggaggctgaggtgggagaattacctgagcccaggaagcagagattccagtgagttgagatcatgcccctgcattccagcctaggcgacagagtgagaccctgtctcaaaaaagaaagaaaaaaagaaatatgtctaatatagtaataatagtgacagaggatgtgagttatcgtctacacactggcaggcaaaagaggttacttcctcccatctcaaggacttggaagtaagggaaataagactgtacacccaagaaagcaaaatggaatagatcggagtagagatctgccaagttgccttacagagccaggacagcttccagccagccaggctagatctagctgcctgaatgtattgacagcaaaaaaaaaaa

SEQ ID NO: 391502 - DNA, 1000 bp, Homo Sapiens
gctttcaagtataagggccttatatatgaaagttaagttagggtctactatgtatatgtgttcagtttttaaaattttagttaatttttttaaaaatttaggtttatgtctgggaaagaaataaagaagaagaagcatttgtttgggttgcgaattcgtgttcctcctgtgccaccaaatgtggctttcaaagcagagaaagaacctgaaggaacatctcatgaatttaaaattaaaggcagaaaggcatccaaacctatatctgattcaagggaagtaagcaatggcatagaaaaaaaaggaaagaaaaaatctgtaggtcgtccacctggcccatatacaagaaaaatgattcaaaaaactgctgagccacttttggataaggaatcaatttcagagaatcctactttggatttaccttgttctatagggagaactgagggaactgcacattcatccaatacctcagatgtggatttcacgggtgcttccagtgcaaaagaaactacctcgtctagcatttccaggcattatggattatctgactccagaaaaagaacgcgtacaggaagatcttggcctgctgcaataccacatttgcggagaagaagaggtcgtcttccaagaagagcactccagactcagaactcagaaattgtaaaagatgatgaaggcaaagaagattatcagtttgatgaactcaacacagagattctgaataacttagcagatcaggagttacaactcaatcatctaaagaactccattaccagttattttggtgctgcaggtagaatagcatgtggcgaaaaataccgagttttggcacgtcgggtgacacttgatggaaaggtgcagtatcttgtggaatgggaaggagcaactgcatcctgactgtaggactgaacattatgttcactgcactctgattttctgtaggtacagttcaaagccctaaaggagtctggcttttactatctttcttaaaaaaaaaaaaaaa

SEQ ID NO: 391503 - DNA, 1000 bp, Homo Sapiens; identical to SEQ ID NO: 195498

SEQ ID NO: 391504 - DNA, 1000 bp, Homo Sapiens
atctcggctcattgcaacctccgcctcccaggttcaagtgattctcctgccttagcctcctgagtagctgggattacaggcacctgccaccacgcccggctatttttttttgtatttttagtagagacggggtttcaccatgttggccaggctgattttgaactcctgacctcaagtgatccgcccgacttgagctcccaaagtgctaggattacaggtgtaagccactgtacctggcctgatttatatattgattctaaagataatgtttagtctaagatggacctgacaaggccaggcacagtggttcaccagcaatttgagaggctgaggcaggaggatcgcctgagcctagaagttcaaggttacagttagctgtgatctcaccactgccttctagcctgggcaacagagcaagacactgtctcaaaaaataaaaaaaagaaaagaaatatatattggaaactaaagtcatttcccataacttaaagaggctggaatatttccagttcaatacagtttctgcctggttttcttctgccttttatttatttattttattattattattttttgagacggagtctcactctgtcacccaggctggagtgcagtggcgcaatctcggttcactgcaagctccgcctcccgggttcacaccattctccagcctcagcctcccaagtagctgggactacaggcgcctgccactatgcccagctaattttttgtatatttagtagagacggggtttcactgtgttagccaggatggtctcgatctcctgacctcgtgatccgcccacctcagcctcccaaagtgctgggattacaggtatgagccgccgcgcccggcctcttctgcctttttttaagctcatctttgggtgaaaaattgccgggatgttctgcagtccaactacaacaaacagcgctttgatcaacctttagaggtttcaacctagctgaagaatttcaaaactacaaatgagcacttcctg

SEQ ID NO: 391505 - DNA, 1000 bp, Homo Sapiens; identical to SEQ ID NO: 282234

SEQ ID NO: 391506 - DNA, 1000 bp, Homo Sapiens; identical to SEQ ID NO: 282235

SEQ ID NO: 391507 - DNA, 1000 bp, Homo Sapiens; identical to SEQ ID NO: 206282

SEQ ID NO: 391508 - DNA, 1000 bp, Homo Sapiens; identical to SEQ ID NO: 206283

SEQ ID NO: 391509 - DNA, 1000 bp, Homo Sapiens
taaaggatttagtctagaaaccaattctaattcaaaaggatattatttactcatggcttttcatttcatttcagtaatattgtcagaactttaagtcagtgagttgggtattcaggaattaacaattttagaagacaatatgtttcaataaaatgagaattggtttttcctactttccaggctctaaaattacatgaattttcagggagctgtgaacatttaggagcacattattcattcagcatcttttatatgcccaacatatgatattgtgttgaagatatatctgcaaagaagaaaaaaagccactgccgtcgtggagactcacaatctaggaaaagagagggacagcaaacaactcattacaatacattgggatcagtagtgtgagggagaaaaacaggtctaggttctttggaaaacatttaggagagtcaatgagactttcagaatgtgaagtgcatgggattaggtcatggaagaagaccatgtatgtcatcttgaggacttcattctgtagaccatgggccactattgaagttttgcattttggaaggagcttattagtttgttttcctgttgattatagtagtaatgcagtatcagggtagctgaactgcaataataatcccaacatctcactggcttcatgcagtaggaatatgctttcatcacagtccagtatggcaggcaacctccagactcccagggacccaaacttacactttactaaatgtaattctttcatttgaatttttaaaggtttttgtataatcatcttagtaaaacatttgataattcttcacaacatttgcaatcattgatttggccagattggtctaacatggtacccatgattttacttcatttccagtactattctgataatttcctttagagtcaattgagtagagagtacccctctcacctaagcttagtcatgtcccaggaattttggaactccaactgagatttcaggctcattattcattctagggct

SEQ ID NO: 391510 - DNA, 1000 bp, Homo Sapiens; identical to SEQ ID NO: 282237

SEQ ID NO: 391511 - DNA, 1000 bp, Homo Sapiens; identical to SEQ ID NO: 206281

SEQ ID NO: 391512 - DNA, 1000 bp, Homo Sapiens
tggctaacacagtgaaaccctgtctctactaaagatacaaaaaattagccgggcatggtggcgggtgcctgtagtcctagctactcgggaggctgaggcaggagaatggtgtgaacctgggaggcggagcttgcagtgagccaagatcgcgccactgcactccagcctgggtgacagactctgtctcaaaccaacaaaaaacccaaagaaaaacaaaaacaggttataaaaatgtactttataaagaaaaaagtgtttccaggccaaaagagcttgctgcctgatgcccatactgtaaaaccaggtttttgggaaaagaaagaaatttaattttaaaaaagagacggtcttgctgtcacccaggccggagcctccaacacatgggctcaagcgagcctcctgcttcagcctcccaaagtgctgggattcaggtgtgagccactctgcccggccaacaaaagctttatattgcaagtcaactcacaggaagataggagtcaagctcaaatctgtctccctctgctggcttccaagcagtatttttattagaaaatgtcagggggtaaattctgagattagtaggtgattggtggaaagaaaggggaggtctgaaaagtccttgggcatgtccagttatctctttatgctgcctcagaggtagcatgtgcaaattccagaggagttagtatgaaatgtcatggaaattcaggctgtgacatcagcaagcttgttctgtgcagactccagttagccatcttggttccaacaaatttcagccagtttttttttaatctcataaggagagagagtttcagtgtttcagtaagttatttcttttcttatctgccatcctccaaattcaagaatttcctttagttattggtttcttgaactctttggggcacaatttcaagaggaagaagtaaaaaaaaggataccatttcaaggaattgcccagggacaagtgcgaagagaatattctttctcttggctgaggaag

SEQ ID NO: 391513 - DNA, 1000 bp, Homo Sapiens; identical to SEQ ID NO: 282239

SEQ ID NO: 391514 - DNA, 1000 bp, Homo Sapiens; identical to SEQ ID NO: 282240

SEQ ID NO: 391515 - DNA, 1000 bp, Homo Sapiens; identical to SEQ ID NO: 206284

SEQ ID NO: 391516 - DNA, 1000 bp, Homo Sapiens; identical to SEQ ID NO: 206279

SEQ ID NO: 391517 - DNA, 1000 bp, Homo Sapiens; identical to SEQ ID NO: 282241

SEQ ID NO: 391518 - DNA, 1000 bp, Homo Sapiens; identical to SEQ ID NO: 282242

SEQ ID NO: 391519 - DNA, 1000 bp, Homo Sapiens; identical to SEQ ID NO: 282243

SEQ ID NO: 391520 - DNA, 1000 bp, Homo Sapiens; identical to SEQ ID NO: 282244

SEQ ID NO: 391521 - DNA, 1000 bp, Homo Sapiens
tctcactctgtatcccaggctggagtgcagtggtgcagtctcagctcactgcaacctctgcctcctgagttcaagtgaatctcctggctcagcctcctgagtagctgggattacaggcacgcaccaccatgcccagctaattttttttttttttgtatttttcatagagatggggtttcactgtgttagccaggctggtcttgaactcctgacctcgagtgatccacccgcctcggcctcccaaagtgctgggattacaggtgtgaaccaccatgcctggccattttttttttttttttggtatttttttgtagagatggcgtttcaccatgtctttgggaggccaaggcagacagctcacttgaggccaggagtttgagaccagcctggccaacatggtgaaaccttgtctctaccagaaaaaaaaaaaaaacaaaaaatctccaaaacacacttcactttgaaattttttttttttttttttttgagacggagtcttgctcttttgcccaggctggagtgcagtggcgcgatcttggctcactgcaagctccgcttcccgggttcacgccattctcctgcctctgcctcccgagtagctggactacaggcacccgtcactacgcctggctaactttttgtattttttagtagagatggggtttcattgtgttagccaggatggtcttgatctcctgaccttgtgatccacccgcctcagctggcctcccagagtgctgggattacaggtgtgagctaccgcgcccggccacgcccagctaattttttctatttttagtagagacggggtttcaccttgttagccaggatggtctctatctcctgacctcgtgatccacctgcctcagcttcccaaagcgctgggattccaggtgtgagccaccacgccaacccctaaagtggttttagacttagaagaaagttgcaaagcaccgcacagactttctatgtggctttatttcatcacagtaccctgatc

SEQ ID NO: 391522 - DNA, 1000 bp, Homo Sapiens; identical to SEQ ID NO: 282247

SEQ ID NO: 391523 - DNA, 1000 bp, Homo Sapiens
tagcttggttgctgaacaccgggttaggctctcaaattaccctctgattctgatgtggcctgagtgtgacagttaattattgggaatatcaaaacaattacccagcatgatcatgtattatttaaacagtcctgacagaactgtacctttgtgaacagtgcttttgattgttctacatggcatattcacatccattttcttccacagggtgatcttctgttctagggagaaagtgtctcatttgcagaaaggaaaggcacctgcggtatttgtgaaatgccatgacaagtctctgaataagaagtcaggctggtgagcattctgggctaaagctgactgggcatcctgagcttgcaccctaagggaggcagcttcatgcattcctcttcaccccatcaccagcagcttgccctgactcatgtgatcaaagcattcaatcagtctttcttagtccttctgcatatgtatcaaatgggtctgttgctttatgcaatacttcctctttttttctttctcctcttgtttctcccagcccggaccttcaacccaggcacacattttaggttttattttactccttgaactacccctgaatcttcacttctccttttttctctactgcgtctctgctgactttgcagatgccatctgcagagcatgtaacacaagtttagtagttgccgttctggctgtgggtgcagctcttcccaggatgtattcagggaagtaaaaagatctcactgcatcacctgcagccacatagttcttgattctccaagtgccagcatactccgggacacacagccaacagggctgccccaagcacccatctcaaaaccctcaaagctgccaagcaaacagaatgagagttataggaaactgttctctcttctatctccaaacaactctgtgcctctttcctacctgacctttagggctaatccatgtggcagctgttagctgcatctttccagagcgtcagtactgagaggacactaag

SEQ ID NO: 391524 - DNA, 1000 bp, Homo Sapiens
caggctttctgtaaaaattgtattgtatataatgtgatttttacacatacatacacacacaaatacacaatctctagggtaagccagaaggcaagatcagattaaaaacaccatgtttctaagcatccatttttccctttctttaaaagaaacttaactgttctatgaaggagattgagggagaagagacaaactcctatgtcatgagaataaccgatgttctgataatagtagcatctaggtacagatgctggttgtattaccacgtcaatgtcctatgcagtattgttagacattttctcattttgaaatatttgtgtgtttgtgtatgtgctctgtgccatggctggtgtatatatgtgcaatgttagaaggcaaaagagtgatggtaggcagagggcaaagtcattgaatctcttatgccagttttcataaaacccaaaccacatatgaaaaaatccattaagggtccaagaagtctgtccatatgaaaatgagggtaaatatagtttatttcccaggtatcagtcattataattgatataatagctctaacatgcaatataaaattcataggagtattaatagcccatttacacatctataaaatgtaatgggattgcagagctgcagagtacagtgtaacagtactctcatgcaatttttttcaggatgcaaaggcaattattctttgtaagcgggacatttagaatatatttgtgtacatattatatgtatgtatatttcaaagtaccacactgaaaattagacatttattaaccaaatttaacgtggtatttaaaggtaatatttttaatatgatacattacatattgtgaatgtatactaaaaaaacattttaaatgttaaaattataatttcagattcatataaccacaactgtgatatatcctaactataaccagttgttgaggggtatactagaagcagaatgaaaccacattttttggtttgataatatgcacttattgactcccac

SEQ ID NO: 391525 - DNA, 1000 bp, Homo Sapiens
cctgaacgcgggaggtggaggttgcagtgagctgagattgcgccagtgcactcctgcctgggtgacagagcgagactccatcttaaaaaaaaaaaaaaaatgaaattcaaaactctgttccttagctgcaccagtctgctgtcaagtgttcagtggcacatgtcgcgaggggctgccatcacggacggtgcagatgtcccatatatccagcattctaggacattctgttagatggcaccgggctctgtcctgtctgctgaggaggtggcttctcatccctgtcctgagcaggtctgagctgccgcccgctgaccactgccgtcgtcctgcaggtggctgggagcctgagccccacacctgccgggcagtaggtgctggacatcgacagctgcctggactcgtccgtgctggacagctccttcctcacgttctcaggcctccacgctgaggtgagggctctactgggggtcctgggctgggctgggggtcctgccgccttggcgcagcttggactccagacactgtgcacctctcagcaggcctttgctggacaggtgaagagtgacttgtttctggatgattctaagaggtgggttccctagagaaacctcgagccctggtgcaggtcactgtgtctggagtaccgggggtgtgcgggctgcgtgtccttgctgggtgtctgtggctccatgtggtcacaccacgtgggagcaggtttgctcggaagcccagggtgtccgtgcgtgactggacgggggtgggctgtgtgtgtgacacatcccctggtaccttgctgacccgcgccacctgcagtctggtgtgctggccctccagcgagggaacgcccagttggccggacctgctcagtgacccgtccattgtgggtagcaatctgcggcacaacccccacttactgggtctctccttttacaaccaacacaaccgaaatctagggcttctttttttttttttttttttttgagacagagtctcattccat

SEQ ID NO: 391526 - DNA, 1000 bp, Homo Sapiens; identical to SEQ ID NO: 282249

SEQ ID NO: 391527 - DNA, 1000 bp, Homo Sapiens
tcttgcccgcccctcagcaccctgccttgtctccaggaggtccgaagctctgtgggacctcttgggggcaaggtggggtgaggccggggagtagggaggtcaggcgggtctgagcccacagagcaggagagctgccaggtctgcccatcgaccaggttgcttgggccccggagcccacgggtctggtgatgccatagcagccaccaccgcggcgcctagggctgcggcagggactcggcctctgggaggtttacctcgcccccacttgtgcccccagctcagcccccctgcacgcagcccgactagcagtctagaggcctgaggcttctgggtcctggtgacggggctggcatgaccccgggggtcgtccatgccagtccgcctcagtcgcagagggtccctcggcaagcgccctgtgagtgggccattcggaacattggacagaagcccaaagagccaaattgtcacaattgtggaacccacattggcctgagatccaaaacgcttcgaggcaccccaaattacctgcccattcgtcaggacacccacccacccagtgttatattctgcctcgccggagtgggtgttcccgggctgcctgtctgacctccgtgcctagtcgtggctctccatcttgtctcctccccgtgtccccaatgtcttcagtggggggccccctcttgggtcccctcctctgccatcacctgaagacccccacgccaaacactgaatgtcacctgtgcctgccgcctcggtccaccttgcggcccgtgtttgactcaactcagctcctttaacgctaatatttccggcaaaatcccatgcttgggttttgtctttaaccttgtaacgcttgcaatcccaataaagcattaaaagtcatgatcttctgaggtgttccactctctgacttgggtactggactgccggagggagggaaggggctgagcacctggaagcaggcagagggggatagaagagggaaggggaaggaaggcct

SEQ ID NO: 391528 - DNA, 1000 bp, Homo Sapiens; identical to SEQ ID NO: 195305

SEQ ID NO: 391529 - DNA, 1000 bp, Homo Sapiens; identical to SEQ ID NO: 282251

SEQ ID NO: 391530 - DNA, 1000 bp, Homo Sapiens
aagtgctcacaaacttcaagagcagtgagattgagcaggctgtgcagtcactggacagaaacggcgttgacttgttaatgaagtacatttataaaggctttgagaagcccacagaaaatagcagcgcagtgttactccagtggcacgaaaaggccttagcagtaggaggactaggctccattataagagttcttacagcaagaaagactgtttaaaaaaaataaaaagactcatgttaccttgagaagaattctggatgcccaggctggtgaagaagggattgacaatggaccatcttcctaggaactcccaagtaaactatttcaggacatgtatctgctgaaatgtattttattttcaaggtggaggggaaaatcgtctgtttcctaaatcctgtttaggatctgatagtctatgcctttgtctccgagtactgcagaactgacattttgacggtctaccagcgtggcggctggtgttggtcagatgcacctgtgtgcactgggggagggatggtttgggcaggtgcagatccaagggctgtggtaaacgggagagcttgtgtttttgaagtggaaaaaaacccaagagtttgtacagacatcctgtcttcccagagaaggtggacactcttgggctcattgtaaagtgcctgctgcatcaataaagctcttggcttattagtctataaaaaaaaaaatggtaatgaatgggatggtaatgaatgagagttcagttgttgttccggaaacccgatgtggaaggagtagacctgtgtccctgttgagccacccctgggagcgagcatggcaatccacaggccctctgccacaggacgccagcctcggcctcagagctgccggctgctgcagagaggtgtttgctgaataaactatttattgtttcttattcctttgatttgtatgtaattaattttggagcttatttaattaatttaataaagtgccaaacatttaataattgaaaaaaaaaaaaaaaa

SEQ ID NO: 391531 - DNA, 1000 bp, Homo Sapiens; identical to SEQ ID NO: 201490

SEQ ID NO: 391532 - DNA, 1000 bp, Homo Sapiens
cctgcagggcacctcagctccaattcacagacgcgcctacagcttcctgcaccaagcagctgtgtctctctgcctgagggctttctctggctgcaggagcgtgctcagccctcacaaggcagcccaaagtaccagggagttgatgccctgggttgagagcaaccctcaaccaacagaggcaagttggtggatcagtaaccccactcccttgctcttcactgggacaatctggggagagttctgcagtctctcagggggccccagcaggctgagccttgcctgtccactcactgccaggcacccactcgtcatcatacccttcattggcttcctgtcttccttgtgtcactgtccccatggttcctgggatcacctctcaagtaaatgatgtggaccaaagtcctgtctcagggtaaccatctctgcttattcctctgccacgtctttcccttctcctctctgctctcataaagaagaatgggagatgaaagtggaggggcagctgaggtggggcggcatcaggctgatacaacaccccagggaaccctgcttccatgtaaccctgaccttaaatccctatcctataataaagagttgggcacaacagaagggaaaaggaagtattctgcaaattgttttccataacagtgcagaggacacactttgcaatgtgtaatttgtgcagtatgacatgcatttgggtgtgtctggtcaggtacatcatgtggtgtccctgttatgcattttgcagactgacactctgcttaaccagtccttccgtgctgtgctgttttgtaagctcttaaccagaatgcaaaaatgttaaataactgtctggttttattttccagccctctgggatgagtctgatgacagtaactcagaaattgaggctgctttacgccccagaaaccataacaccgatgattctgatgatttttatgactaacgtgctgtgacattggtttcaaataaagtctttaaacaaactaaaaaaaaa

SEQ ID NO: 391533 - DNA, 1000 bp, Homo Sapiens
tcttggctcgagtgctgccaagtgctccctgctgctgcgcccaccttcccggggagaggcgagcccctggctccctgagttcatgacccaccctgtccaccatcagcagctggcttgtgtctctgggtggctgggcaccagcctcctggaggccacgtgcctgggtccacatggagggtcctggtgggggcatcatcctgggtcccgggagtgaggctggcaggtgcccatcgggggtgtcaagtccagggggatcgaggctctggaagctcaagggggctctggccttggggaccagctgagtttccagctggcagccaggtcctcgagggaaggggtttggacagaatccgaggcccctaagctgatggggtcccctgtctccccttccagccctgacccactggacatggggactctttccagtccggagagctccttgtctgtgtccccagcagaaggtggggtggctcctgcctcaccctctgcccagccctgatccaggccacagccatctagggccctgaaggaggggcaggaggcaggcgtggcttctggaacctgaggcttggccccggttgggtctgttcttgcgggctgcactgctggatcccaggagcaggtgtggaacagccccatggccaggtgacggaaatcctcggctgcatgcagacatagacccaccctggactgggctgtctccggagcctagacacatcgccctgggaaggggcagctgggcctgcagtgtgctgggcaggggctggcggccctggtcgtgggctctccagggtccctcaggggactgggcctctccccaggcaggaaggtgggaagtgcaggcatgacccggggttcctgaggctggtccaccaagttgcttctgagacgccttcgcttctgtcctggctggctgttaatgatatccctgttctaattccactctggctaaactgaaagtaaagatccttaagcttaaaaaaaaaaaaaaaaaaaaaaa

SEQ ID NO: 391534 - DNA, 1000 bp, Homo Sapiens
cagttgtgctgcttactcagtgaacaaccagccaacaagctgcgtgcacgtttattgtgatgagaacttaaacacaaagcagacgtgtaagttcccctggtgtccccagttcctagcacatagtagaaactttgtaaatatttgtttggggtaaatgaagtcagtagcactacagataggaggccgtaaggaaggatggtttctaaaacaataaaaagggacatcagctaggccagtggtcttccaacttactgtgtatcagaatcacctggagagcttgttaaaacagattgctgggcctacccccagagtgtctgcttctgtaggtgtggcatgggcccaagaatttgcatttctaagaagtctcttggtgaagctgccgtcgttgttggttcaggaccacactttgagaaccgctgactaggctaatgcctgtggatgagaaaagaggcttagagaaattatgttttgcctaattgacaaaaccaattagtggctgaaacaacacagaaggccaggtttgtcctctcacttcctaacttgaggacagagaaatatattctgatgtccctaactggcagtctgctatgatagtgaccacatgcccatttctttcttgggatttcgtcccagcctgacaaccttggaacagaacaagaggacaggaggtgtcgttccaggtatgtgttagctgcaccagccactctttgtggcatctgctacccatcaaaggacgtggttgggctgggagccaagttaagttttctcattgtttggcagttgtgtccccagattttcttgcccatcttggagatcttagcacagccggggtgcttggggctcagctgccttgaaggggactcagtcccccacacaggtgattcccatgtcccatggtgggcactgagattggggtgaggggagcacacttgagggacccttcacttcctcacagcccttgcccctttcctcagggtgcgctgggaagaacccccagcgg

SEQ ID NO: 391535 - DNA, 1000 bp, Homo Sapiens; identical to SEQ ID NO: 282254

SEQ ID NO: 391536 - DNA, 1000 bp, Homo Sapiens
cccccctcaggtgactctgaggctcccccgtaccctacgggtgactctgaggcccgtgcccaccttgggtgacactgaggctgccccatccccgctacgggtgactctgaggccgcccctgtgtcccccacagatgactccgaggaagctcagatgctgcagtcattagtttctagtgtcccatcagccttggtctcaagaggccgagagggtgcaaccccaggggctcccctcccatcttgagctcttcctgaataaaacctcattcccctgtctggcgtctttgctctcaaggctaagctgcaggaaggagtggacctcagttacccttacagcaccaggtgggggcccaacctgtgaccccatcacctggcacaatccccaggctctggggcgttgatggtgccatcctcactttcgagtggaggaggtgggcccagggaagttgattggcaggcccaggagtgggagtcaggcacaggtcactccagagcctgcccttccctgaatggaaccaggctgctggctcccaggggctagattctgtcccagatggtgggaggggctggtggcagctgcagtcagagagggagctggggtctggcaggctgtggctgcctctggactaggggatcccagccacacccacatcctctgggtgcagggagtgaagtctgtgttctaactggggtctggggaaccgcctgggaaaagaaagggattctgctcctccagccggatgcaagtggaagaaagaataacacatcacaccagaaggttggaagcagaggatggggagggtgctgggcagtaggcgctgggttggcggcctctggggggtgcccaatggctctggcagagttgacggggcagcgcgccagagggcagaaggcagagtcaggagtactcctgcctctgctgggtctaagcccagggacatcacttgagcactttgaccagcctgaccttcaccataggccttgtgaggtgggtatggtct

SEQ ID NO: 391537 - DNA, 1000 bp, Homo Sapiens; identical to SEQ ID NO: 282255

SEQ ID NO: 391538 - DNA, 1000 bp, Homo Sapiens
tttagaaaggcaaaccagataccttttattctgccctaggaaatacagtgttgatcagtgctaaaactcttcagtggcagtcactgtggttcttttaactggggatttcctttcagtgtttcatttggtaccaaaacagaacatttaccttacatttcagatactctgttttctcagcattgttcagatactttcctttaccgctcttcacgtacccttttggcattgagtaattctataaatgtttctatccttggtttttaaaccaagttattcatactcttaaaatatctaccaaatctcattgtattttcacatattttgagcatcaagatactggtcattttaaaaaatccttcagtaaatagcacagtttattttcctaatgacatttttagggtttcttcattgatcaaccaggtttgggttacacaaatcaattgtgggggaaaaatcaaataaaacaattgcttattatattttccaaaggactgagcatttatcttttattcacgaagatatcatatgaggatgataatgatctttaacagattttttagagatagaatttataaagaggctgatactaagaatactacaatcaaaattgaagctagagaatgtaaaaatagaaagtaaatagttctaagaatattctggcataaattatttttatttagccaataaaatagcctccaaatgtatatctcagacaccatagagctgctaacaatgagaatcaaggaagatgcttgcacttagatttcgtttgttgtatttcagtagttctggatgtcctttgttaaaattggaaaatggaaaaatgtctcgacagaaatgtcaatctggtgattctgtgaactgtaaaatgttcacttttaaaaataaagttgtaaacaagttactcatataagttggtattacagtagcaaaaacagaaaaccatgtgatccatcctgtattttgattgatgctttaataaagggtttgcacagctgtg

SEQ ID NO: 391539 - DNA, 1000 bp, Homo Sapiens
cttctgaaaaccagactccggggcccctgggtcagcacctctaggtcattccacagacttacacagtttaaagaaagagccagcgaacatggggtgatcctggggtgccactgggatcccaagccaggcccggaggtctgcctgtttcgtccccagaaacttgagctggcatcctccgctggtttgcactgggcacggggactggagagccaccaggccactgagcacagcatgctatcacttctcaggaagttgtgagggtgaggagaatagccgggcccactctgcagaggggaggaacaggcacaggctagaggcacgggctgatagagtgagtcctctccctcattcattcattcattcattcattcatccatcagacacctgctgggcatctgctgtgtgcgagacactgtgctgggtgccccagacacaagacagaaactcgggtcgctctgtgtgcctccacactggccttccctgctgcgtggacgcaggctctgtctcctaggctttaagccccatgcatcaggtggaagacaatttccagcggcctctgcccgcttgtttttcctcctctccttttcctgccgccttggtcttttttgtcttttgtgcagggccgtctctcgcagcgcccgtctgtgctccgcagcgtctaggaaaggattagtgtgagcagagcatgcaggctttggtgaacagagccgagcttggtttcaacatctaattcaatttgttctgccgagattgaaatatgaaatggttgccagtcaaacgttcaaaggacggggaagggagagtgagcgcatgctgaaatttaaattttaatgaaaatgactttaaccctttggtacaccttgcaaaatgtaacccatcctcccatcctgtgaaagcggcctctcgggttagagcttttccacccacttctcttccactgagcttcactaataatatgtaatcatttttttcagccgtcttaataataaaagattaatag

SEQ ID NO: 391540 - DNA, 1000 bp, Homo Sapiens
cacgtgagccttcaccgcctgcttcattcaggagccagtgcagcagtaatacagtctatacattgttctgttttcaaatttatcctgaggctttgttgagcataaatgattatacgataaaggtatccgttattttggaactcatttcagttgggatctcctgtatgcagagtgttgcatttagaggtttgagtcccatcttggtttcttgccgtgctgactgtagccttcaccttgacttgaatgaaggtctgtggttggaatgtgtgaggagccgctgaggtgttcaggaggtgctgcctggaggtcggtttcttcctgggtgttacgggcaactgctcacacagttgtttctctgtgaacatttccagtgtttaatccaaaatgaaaacccaccaatgcttttgctaacttcagtgccttttataaatcatttttaaatttcctgaacttgctttttgaggatatacagggatattaagtagacgcaggattgtttttgtttgtaaaaattctgaattgaaactttgttttaaaaaaaggcttctttctttcatatgacaagagataggtcaggaatattggaatcaagatttaaatgttaaaattcgattttgttacacagggtgtgttcatttgttttgtagcagacaagatctagatcccagacagaaacaacacatgctattctaaaaagccgcattttaaaaggcaccttggttctcaaaagaaatcagaatatggatattcgtagtgatgatctgttttctctaaaatcttaccatattgtctgtatatggttgtaaattcaaatggaaagtaaaacgttttggccctgattttgtatgtggaccactgctcctgatttcccaggtcttaggccacctttgactgtttctccgtttgtttgtgggcagcgattccagtcccaacggaggcattctcgtgtgtcccggggggttatgtccttcacaaaacacttaatgaaatgaattacttc

SEQ ID NO: 391541 - DNA, 1000 bp, Homo Sapiens
tttcagcatgcggttaaaatcggaactgatatgctagaattggactgccatatcacaaaagatgaacaagttgtagtgtcacatgatgagaatctaaagagagcaactggggtcaatgtaaacatctctgatctcaaatactgtgagctcccaccttaccttggcaaactggatgtctcatttcaaagagcatgccagtgtgaaggaaaagataaccgaattccattactgaaggaagtttttgaggcctttcctaacactcccattaacatcgatatcaaagtcaacaacaatgtgctgattaagaaggtttcagagttggtgaagcggtataatcgagaacacttaacagtgtggggtaatgccaattatgaaattgtagaaaagtgctacaaagagaattcagatattcctatactcttcagtctacaacgtgtcctgctcattcttggccttttcttcactggcctcttgccctttgtgcccattcgagaacagttttttgaaatcccaatgccttctattatactgaagctaaaagaaccacacaccatgtccagaagtcaaaagtttctcatctggctttctgatctcttactaatgaggaaagctttgtttgaaccactgcacccggccagtaaaagaaattttgaaggccattgcagctatttggtagtgtcttgttatttctaggtgtaccttagttaaagaggaaaaataaaacggaaaaaagcttggaaatcagtgatgtgtagttatttggcaagttatacataatcagcagcagccaggctcaagaaaataaaagttgattagttgatcagaaataaaatctgtagagtgaattagatttctgagttgttgttgttaatggaacattctatttgagacctttttcaggtgtgtagcaattctaccatgtccatttttttaagcattaaaaaggaacttaccagttgtaaattaagacaagatccaaatagtcatatttttgtgtttc

SEQ ID NO: 391542 - DNA, 1000 bp, Homo Sapiens; identical to SEQ ID NO: 282257

SEQ ID NO: 391543 - DNA, 1000 bp, Homo Sapiens; identical to SEQ ID NO: 282258

SEQ ID NO: 391544 - DNA, 688 bp, Homo Sapiens
  misc_feature (417)..(417): n is a, c, g, or t
agcggtacctgcctgagaacaagggccgcggaaggacgggagtgcctgagccctgccaggaaattcaccaacaagaaggcagaaacagccatgaggtgacgctttcagagctagaagtgctctccactcagggcgcctgagtgacaggagacggtggcctcaggagtagaattcctcctgtagagggacaggtccctgatgtgggagacagggagaggggcagctccacgcttcatcatctcagttaccacagcgtgctcttcaggaatctcccagaaactccatctcggggcctcgtatttctcattggttttattaggtatggcaggtgttacccttctggttctgttttccccaggccagcatccttcagaaaaagcatccccgaggaggaagacgaatcgttaaacatcttangtcagctctagcctctcggaatttgtcttcttcagtggaaaccccgagaagactgatcagttcttcagttctaaaacaatggcccagggtttggtgacgttcgccgacgtagccatagacttttctcaggaggagtgggcctgtctgaactctgctcagagggacctgtactgggacgtgatgctggagaactacagtaacttggtctcactggatttggagtcagcatatgaaaataagagtttacctacagaaaaaaacattcatgaaa

SEQ ID NO: 391545 - DNA, 1000 bp, Homo Sapiens
ccgcctggcaccctgcagggcaccaagctacctgtggagccgaggaaaaggtatgtgtatgtgtggcactgcccccagggaccaggcctagagactccgcttgttgcagacaccagtggagcctattttcgccgggaaggattaggtagcaactacctaggtggtcgtagccccactgagcaggaagaaccggacccggcgaacctggaagtggaccatgatttcttccaggacaaggtgtggccccatttggccctgagggtcccagcttttgagactctgaaggttcagagcgcctgggccggctattacgactacaacacctttgaccagaatggcgtggtgggcccccatttcccgctagttgtcaacatgtactttgctactggcttcagtggtcacgggctccagcaggcccctggcattgggcgagctgtagcagagatggtactgaagggcaggttccagaccatcgacctgagccccttcctctttacccgcttttacttgggagagaagatccaggagaacaacatcatctgagcatgtgtgctctgcactggctccactggcttgcatcctggctgtgttcacagccttgtttgctgcttccatcttccccagtactgtgccaggccttctccccctccccagtgtcctctcctctcagggaggccattgcacccatatggctgggcaggcacaggcagtgaggccgaggccaatagcgagtgatgagcgggatcctaggactgatctgtagcccatgctgatgtcacccaccagggcaatccatctggaggcctgagcaccctggcccaggactggcttcatcctggcactgaccaggaaagactgcctctgaccctcttagcagacagagcccaggcatgggagcactctggggcagcctggctcaggtttattgattttcgtctgtttaccctatccattaatcaatacatgtaattaactccttcaaaaaaaaaaaaaaaaaaaa

SEQ ID NO: 391546 - DNA, 1000 bp, Homo Sapiens
acagccacgtcacccccgccacacttcccccatgccgccaccagcagctctgcggcctccagctggcccacggcggcctcgcccccggggggcccacagcaccaccagccacagccgcccctgtggactccaacacccccttctccggcttcagactggccacccctggccccccaacaggccacctcagaacccagggcccaccctgccatggaggcagagagataagggaggcccctcccccctcccggaggccaggacccgtggggcgggggagaggacgtctctgcgggcccccttcaccccttttctgtctgcaccccttgttccccggagccctggaggggagagcgcggactctagccaggcagggacacgtctggtgccagaacacgcagctgcccacacgcaaggtcatggccccagcggccccggcacatggagtggttcagagcggcctgggtgcctggcggacagaacttcagagaccacgcagccttccttcgaagacgcacctgcccagcccagcccaggggtgccgtggaggaccaccctggcggagacattgctgatccctggcttggagctccttgggggccggcaggcctcgaacccccaccctagggaatgcagagcctctccgcatgtgtgcgcgtggccgtgtctgtgtatttctacgtgtgtcgctcttcagaagcaacctagttcctggggcagctggactttgcatgttagtgtgagcccccagccccctgcccgccgccccctccccagggccctgcctcctccccaccccctcgtcagccagcgttgctgttccttgcagagaaaaggattgtgggaaactccaggactcttcccaccgcctcccagcgcctgcctgctggggctgcctgcatgcctcccctgcacctgggggtacccgcatccacttcctttcccccttttaacaaaagagaagaacgaattccaaaaaaaaaaaaaaaaaaaaaaaaaaaaa

SEQ ID NO: 391547 - DNA, 1000 bp, Homo Sapiens
cgctgagggacggctatgtgccccccaagcaccgcgagctccgggtcacgaagcgcaacatcctggacgtgcgcccgccctccggcccccgccgcagccagtcggccagcgacgcccccttgtcgcagcacaccctggagacgctgctggaagagatcaaggccctccgcgagcgggtgcaggcccaggagcagcgcatcacggctctggagaacatgctgtgcgagctggtggacggcacggactagccccgcgcgccaggcaggcggagcggggcggggcgcacaagctcggccccgccccggcttttagtcccgaactccggaccccgccttcttgggctgggcccgggggcgggactggggagggaactccgcccctcgcgggagaccagaactcttggagcttaggggagacccacgtcgctccagcggaggctggactgcgagcctcgtctgggactcggctggagctggcctagggaggcctggggtaacctggggggctcagcaatggtgctgcacggcgaggtggtgtccccctttgtcctccgcccagggcagggaaagtgcttagtattagcgtgatgcttggggttattggagcctgagcttgacctcaaacgggtggcgatttgatgggtacccccaggctggggaaaatgacagcgcttctcctaatcagctcactggattccatcaccctgagcggtaaaccagatgggcgtcaccccagttctgcagacacatacacaacccgtttgctgcagagccggacccagtggctacacccacagcggtctgtggtagagaactctcttccttctttccaccgacaggggcgagggctgcttcctcgcggcagcccccgcgaagaaatctcgagagaactggcatgaggagttaggttcatcacaaatacacacacactgcccccaaccctctgccgttgcctctctcagaaaaacaagacgtactgaatgaaaaaaaaaaaaaaaaaa

SEQ ID NO: 391548 - DNA, 1000 bp, Homo Sapiens
agtctcatttctgctgctgtaacaaaataccacagactgggtcatttagaaaccatagaaactgatttcgtactgttctagaggctgggaagtcccagatcaaggtgccagcaggtttggtgtcgtgagggccactctctgcttccaagatggtccctccttgctgtgtcctctggaggggaagactgctgtgtcctcacgctgcagaaggtggaagggcgagagatggcaaaccaggcttacaagccctttgaaaagggccctcatcccatcctggagagctctgccctatcacattggcgattatgtttcaatatgtaaattttgggagatgcattcagaccacaggaggaagggaaaagaaagagcccccaggttgaaagccagtttaggtttgagtcccagcctttccccttgctgtgtgacctggagtaaattcctcagcctctgtgagtctcccattccaccccaggattgttgtgaaaacacagtaaggcaagcgggtaagaaagcacccagcaaggtgtcaagtgccccaccaggaggggtggggtggcaatttccagcattgcttggaaccagaatagcaacgtcttctgaggttccagaatttggactctgaacccattgagaagaatgaaatcaactttggcgtcaatcagccactgattgccatgtggcctggacgagtcatctcattcaacttcactttcagccggacgctgtgactcgggcctgtaaccccagcactttgggaagctgaggtgggtggatcgcttgagcccaggagttagagaccagcctgggcaacctggcgaaacctcgtctctacaaaaaaatacaaaaaattagctgggcctggtggcgtgtgcctgtagtcccggctactcaggagtctgaggtgggaagatccactgagcccaggaggttgaggctgcactccagcctgggcgacaggagtgaaaccctgtctcaaaaagttaaaaaaaaaaaaaaaaaa

SEQ ID NO: 391549 - DNA, 1000 bp, Homo Sapiens
acaatccttgtaagaacccgaactgacttctttgtagaaattgacaaattgattctaagattcatacaggattgccatagatccagaatagccacatcaattttaaaaaaagaagaaagtacaaagactcacattacctgatttaaaaacataccataaagcaatgttaggacagtgtggtattgacataaggatagacacatagatcaatgaaaaggaaagggagcccagaagtaaaaccacatcaactgattttcaacaaagatgccaagaccattcaattgaggaaagaatagtcccttcaacaaatggtgctgcaaccagacagtcatatgcaaaagaatgaaatttaacctttacaaaatttaaccatatataaaaattaattcaaatggatcaaagacatataagggctgaaactataaaattgttaagagaacataggaataaatattcatgaccttggatttggcagtggattcttagctataacatcaaagcacaagtaagaaaagagagataaattggatttcatgaaaattaaaaacctgtgcttcaaagacactatcaagaaagtgacaaggcaacccacagaatgggaaaaactgcagattatctgataagggacttctatctagaatatataaaaatctctcacaactcagaaataagacaatccagttaaaataagggtaaaggagccgggcatggtggctcacgcctgtaatcccagagctttgggaggtggaggtgggcagatcacctgaggtcaggagttcacgaccagcctggccaacatggtaaaaccccatctctactaaaaatacaaaaattagccgggtgtggtggtgcatgcctgtaatcccagctacttgggaggctgaggcagaagaatcacttgaacctgggaggtggaggttgcagtgagccgagatcgcgccactgcactccagcctgggcgacagagcgagaatctgtctcgaaaaaaaaaaaaaaaaaa

SEQ ID NO: 391550 - DNA, 1000 bp, Homo Sapiens
atggttaaatagaggaagagcagtggtcaatgtggaaggtacaggttttcttctctatctgaactacaattcttcaccctctgtgcacctgaatactagattcgaatacattttctttctttttcttttcttttttttttttttttttgagacagagtcctgctctgccacccaggttggagtgcagtgccatgatctcagctcactgctgcctcccggtttcaagcgattctcctgcctcagcctcctaagtagctgggattacaggtgtgcgccaccatgcccagctaatttttttttttttttttttttttttgagacggagtcttgctcttttgcccaggccggacttgcagtgacgctatctggtctcactgcaagctccgcctcccaggttcacgccattctcctgcctcagcctcccgagtagctgggactacaggtgcccaccaccgcgcccagctaattttttgtacttttagtagagacgggttttcactgtattagccaggatggtcttgatctcctgaccttgtgatgcgtctgcctcggcctcccaaagtgctgggattacgggcgtaagccaccgcgcccggcttaatttttgaatttttagtagagacggggtttcactatgttggccaggctggtttcgaactcctgacctcaagtgatccgccagcctcagcctcgcaaagtgctgggattacaggcgtgagccaccgcgcctggccagggtttgtttgttttaacgtcttaatgctgcaggtccagacacttcctcaacttcatggaaatttcctgggagaagtgcagaataaacagataattaagtcgtacataaattatagtgtgatgagactggagcgagagagacagacagttacaaagaattacaacacagcggttagcacataaccctataagatactgggatgttcctgtgggaaccccacagagcgaattgccagctccggctcagctcggtggaaatcggaga

SEQ ID NO: 391551 - DNA, 1000 bp, Homo Sapiens; identical to SEQ ID NO: 282261

SEQ ID NO: 391552 - DNA, 871 bp, Homo Sapiens
gccctgcctgcggccacagggccagggggcaggcaccctgggctggggtgtggggcaggagggtacgtcctcacacacacatgctccctgcccaggtcccagcaccccacttccagaagaccccaactggaatgtcactgagttccacaccacgcccaagatgtccacgtacttgctggccttcattgtcagtgagttcgactacgtggagaagcaggcatccaatggtgtcttggtatgaggctgggcccatctctccttcacgtgggctggccccggcttgaggggtcttcccgttctcttcatccctgtgccagtttctgaattgttaggccagggttggaatcccacctctgagtgatttcaggcaagtgtcttgttctctggttctccatttctgcacctgaaaaatgaaaacaatggtttctcttcatgaagggagttcctgacccaccggttaccagacagacggtggctatgatgattgttattctccaaaggcccttctctaggacccacagcctccagaccccagtagcgttcccctctgctgaccaggcctctaggtttagcttgattggcctccagccctggcccatcagggatccccccagcccactgggccctgggacccagcccacctgccccaggatcaaacaggagcccctggtctgcttcttcctcacaccttgcagatccggatctgggcccggcccagtgccattgcggcgggccacggcgattatgccctgaacgtgacgggccccatccttaacttctttgctggtcattatgacacaccctacccactcccaaaatcaggtgagtgggggtccttgaggagggaggcagtggatggagctccactccc

SEQ ID NO: 391553 - DNA, 1000 bp, Homo Sapiens; identical to SEQ ID NO: 282265

SEQ ID NO: 391554 - DNA, 1000 bp, Homo Sapiens
agctcaggaatgtgtttaggaatacaaaatatctgatacctgatacgtaaaagtcccagccttctactcagaaattcccatacatataaagaagcaagaaaatatgacccacaataaggaaacaaataattaataggagcagatccagaaatgacaaagataatagaattagtggacagagacattaaaacagttattttgaccgttattttatgcaatcaagaaaacatgttagagacatgaaaggtgtaaacagatccaaatcaaactttcagaagtaaaactacaatgtctgacatgaaaaatgcactggatgggattaacagcagaagtcattgctgaaaatttccacatttgatgaaaaatacacacatccaagaagctcaacaaacccggagcacaagaaatatgaagaaaattataagatacattataatgaaatcacttaaaatcagtggtaaagaaaaaaatctgaaaaatagccagacggggggaaaagagcacattacatatggaagaacaaagataaggatggcaggagtcatcattgcatctcattgaacagtgaagccagaagatagtggtgcagaatcttttaagtactgatagcaaaaactatcaactaggattcattacctactaaaaatttatttcagaaatgaagatgaaataaagacttttcccagacatgtaaaagcgagataattcatccgcagcagatctgcattacaagaaatgtgaaaagatgtccttaggcagaagggaaatgataccaaatggaaatctgaaaatgaatacagagtaccagagatggtaattatgtggataaatataaattactcttaccataactgaatatttaaagcaaaaataaacgcattatgaagtaaaagttaataacaaaaaagagcaggaggattgcttgagcccagcagagcagttcaagaccatcctgggtaacatagtgagaccccacctctaccaaaaaaaaaaaaaaaaa

SEQ ID NO: 391555 - DNA, 889 bp, Homo Sapiens; identical to SEQ ID NO: 282266

SEQ ID NO: 391556 - DNA, 1000 bp, Homo Sapiens
tgtggagaataagcaggtggtgattatacatcacatgaggctgcaggccaaagctttgcaacttatagtaacagcacgaactacacgaggacttgaccccttatttgggatgtgtgaaaaatttttacaggaagtagacttttttcagaggtatttcatcgctgatttgccccacttgcaggacagctttgtggacaaactccttgaccttatgccccgactcatgacatccaaacctgcagaagtggtcaaaattctacagaccatgctgcgacagagtgcctttctgcatctcccgcttccagagcagatccacaaagcctcagccaccatcatcgagccagcgggcgagtcagacaaccctttgcggtttacctctgggttggtggttgccctggatgttgatgcaaccctggagcatgtgcaggatcctcagaacactgttaaggtccaggtcttatatccagatggccaggctcagatgattcaccccaagcctgcagacttccggaatcctggcccagggcggcaccggctcatcactcaggtttatctctccccccccgcttggacagaggcatgccaggtggaagtgaggctgttgctggcctacaactccagtgctcgcattccaaaatgcccctggatggagggtggtgagatgtcaccacaggtggaaaccagcatcgagggcaccattcccttcagcaagcctgtaaaagtttatataatgcccaaacctgcacggcgctaaggcaaaaacagtcttcccaaccgtggcctagagggccctttttaggtgtcagaatgagccaagcctgaagcacttcacctggaattgatgtgtaggcttaaggagtatgtgacccttacagtctcatctggtatcaaacacaggataaattgttttttcattaaaaaataaaaaaccttcaagtctacttacccttctcctgtccccaataaagttgagaaacccccaaaaaaaaaaaaaaaaaaa

SEQ ID NO: 391557 - DNA, 1000 bp, Homo Sapiens
aagctgctggtataggatttgttcctttgaagaaaaaatgagggaaacaaacacaaaaacctcaatgcagtgtataaataacattttgttcaactacctcttaatgtggaattatctactttaatagtttcctgacagtaatgttaaatagtaactgccaaatttgttattttcccatctctcttaaaaaagtctttatgattattttatatagttttgagaactttaaagccacttttttttaaccttacatttgcataaaaatgtttagcttttaagtagagagcaaattatgatcatatattttgatattcatgacctgtttgactataggagtttttttaaaaaaatgcactttggctataaaaccatggatgatttgatccataagatttaaatgtgccaccattatagtattcctagacatgagcttgatgaatggtattctgtaattataacgtgccacacattattgtgtcttaattgcccttagcctgaattttaatgatcaatttgttattgttgcagatgtgaatattgtgcataaacttactaaatttatgtaaaattgtataaaatagaattagaagtcactaagttctttctgtgtagaagtaataaatttattgtaacacaatgcagttgtgtatatgacattctgtaattccttgaactggatcatatattcataagttctgtagatacttatgcatgaacattttctcatttagttcttgggttcattatttgtattgtgtttactacttgtgatcatgtagttgtgccttactttgtgagaaaggttagctcagtaaatactgcaatttctaaactcagtgattggaaggttattaattataaatgtaactgataaagtacgtgacagcatttaaatctgtataaagaacaatggaaggatccttattgaattgttgcttttttttaatatgtttaaatattatattaaaaacatttatttctaaaaaaaaaaaaaaaaaaa

SEQ ID NO: 391558 - DNA, 1000 bp, Homo Sapiens; identical to SEQ ID NO: 114881

SEQ ID NO: 391559 - DNA, 1000 bp, Homo Sapiens
ctcttgaccacctctgttaataaattccgacagtgcagtggcgatcggagtgtgaacttatgttcccagcatatggaaagctatcttaggttttaaggtagtagaaattgcccaggagtttgacagcaactttgtttcccgggtctaaaatcgtatcccactgaggtgtatgcagtggagcataatacatgcaaatacatgcaaaactccttttgtttcacctaagattcactttctatcttactttcccttcctgcctagtgtgacttttgcccccaagagtgcctggacagcattctagtttctacaaaatggtcctctgtgtaggtgaatgtgtcccaaacctgctatcactttcttgtttcagtgtgactgtcttgttagaggtgaagtttatccagggtaacttgctcactaactgttcctttttatggcctggggttaaagggcgcatggctcacactggtgaaaataaggaaggcctggtcttatcttgtattaataatactggctgcattccaccagccagagatttctatctgcgaagacctatgaaacactgaagagaaatgtaggcagaaggaaatggccacatatcacaagttctattatatattcttttgtaaatacatattgtatattacttggatgttttcttatatcatttactgtctttttgagttaatgtcagtttttactctctcaacttactatgtaacattgtaaataacataatgtcctttattatttatatttaagcatctaacatatagagttgttttcatataagtttaagataaatgtcaaaaatatatgttcttttgtttttctttgctttaaaattatgtatcttttccttttcttttttttaagaataatttattgttcaggagaaagaatgtatatgtaactgaaactatctgaagaatgcacattgaaggccgtgaggtactgataaactaaagaatttattattcaaaataaaaaaaaaaaaaaaaaa

SEQ ID NO: 391560 - DNA, 1000 bp, Homo Sapiens
acaaaggacgtcgtgatttagctgctaatgggccaagacagatagtgatggtgaggcatacgttctggggacaggatgggtggagcctgcgcggatgtggtgccatcttcacttctgctggtgggaccgatgaaactgtgaaataaaaagtccagggaccggggcagggccctggggttcccggagatgacttccaaggggaagttcatggagaagtcagggaaggagtggggagagcctgttcggtggtgacagaggtatagaggccatgggctctcttggacaccatttgattctcaggtcacactgaagtacagtaagcattaagtagagtaaacatcactattgttgcttgggaaagaattgcagtttccatccagataatttgtttcatgaggaattttgtactagaaaaaattactttgtattattaaaaaatagtaaaacaaacaaaaatggtgcaaagggcttagtacttgtcccacgaccggggtctgactttccccctcacgatcctgtggtgcccacagcgaacccatcctacgtgcctccaccccagtgccagccaggcgagtttgcctgtgccaacagccgctgcatccaggagcgctggaagtgtgacggagacaacgattgcctggacaacagtgatgaggccccagccctctgccatcagcacacctgcccctcggaccgattcaagtgcgagaacaaccggtgcatccccaaccgctggctctgcgacggggacaatgactgtgggaacagtgaagatgagtccaatgccacttgttcaggtgtggagcggggctcagatcacacgaggcacccctcagtcaaggaggcaggggagacgagggggccaggttcagtggctcatgcctataatctcagcactttgggaggccaaggtgagaggatcacttgagcccaggagctcaagaccagcctggccaacatagtgagacctcccactctttacaaaaaaaaaaaaaaaaaa

SEQ ID NO: 391561 - DNA, 1000 bp, Homo Sapiens
ctctccccctctccctgccctcccggccccgacagttgcacccttgggtgaccaagaacggggaggagccccttccttcggaggaggagcactgcagcgtggtggaggtgacagaggaggaggttaagaactcagtcaggctcatccccagctggaccacggtggtaagagagccggggtagatgctcccttgtcctggagggcctgggggacctgagccttgctctgtgcctggctccttggggggacagaggcctgcctggccagccagctgtgatcctgggccactggagccagccattctgatggaggcccatggagagggaggtcttgtggtcgggagaccaggaggcttggtgaggagagtgactgatttaaagaaatagcgggcgtggggccgggcgcggtggctcacgcctgtaatcccagcactttgggaggccaaggcgggcagatcacgaggtcaggagatcgagaccatccttgaaaccccgtctctactaaaaatatagaaaattagccgggcgtggtggcgggcgcgtgtagtcccagctactcgggaggctgaggcaggagaatggtgtgaacccgggaggtggagtttgccgtgagccgagatcgcgccactgcactccagcctgggccacagagcgagactgcgtctcaaaaaaaaaaaaagaagaaaagaaaagaaagaaataccaggcgcggtggctcacgcctggaatcccagcactttgggaggccgaggcgggtggatcacgaggtcaggagatcgagaccatcctggctaatacggcgaaaccccacctctactaaaaatacaaaaaaattagccgggcgcagtggtgggcacctgtagtcccagctactggggaggccgaggcaggagaatcgcttgaacctgggaggtggaggttgtagtgagccaagatcacgccattgcactccagcctggttgacagaacgagactccatctcaaaaaaaaaaaaaaaaaaa

SEQ ID NO: 391562 - DNA, 1000 bp, Homo Sapiens; identical to SEQ ID NO: 282271

SEQ ID NO: 391563 - DNA, 1000 bp, Homo Sapiens
ctgcctagcggggccccttcagtcacagtatttaccatgatttaaagggcatattaaggatgaacaaacatcctgatgaccatgaagttaatccagcatggtttgcatatgcagcttaccagctttgtcatctatggaggagtgccacttggcatttaaaggaggggaaggaccatttcccttttcagggtaaacaaattttacagtggcttttacccagtccaccagactagctgtccctttaggaacaatctattgtgtgtttggatcatgtacaacaatccatgattgttcagtaataaggttcctgcatcaaccccaagcagacttcttcattctgcaacattcagaatcaaagatactgctcccaagttagtcactctcacaatctattttcttaaatgtttttcaggaacccgatgaataccagttcacaaggcaagataactccttcacacataacccctgcttccagtactgtcttggttttgtcacccaccatttggacaatgttcctggtggtcaaaggccatagatatactgtctgtttttttcagcataattttccattgggtttatcctggaggctaacagccatagctcaagctaaccaaaatccaagctttttgagcatcaggatttccttaacactctctcttactttcattttagctgttttaaaatacagcagactgggccaggcgcagtggctcacattggtaatcccagtacgttgggaggccaagtcgggcagatcacttgaggccaggagtttgagaccagcctgaccaacatggtgaaaccctgtctccactaaaaatacaaaaaattagcttggcttggtggcatgcgcctgtaatcccagctacttgaggggctgaggcaggagaatcactggaacccaggaggcagaggttgcagtgatctgagatcatgccactgtactccagcctgggagacacagcgagactccctctcaaaaaaaaaaaaaaaaaaaaaa

SEQ ID NO: 391564 - DNA, 1000 bp, Homo Sapiens
acagcacagatgggtgcaacatctgtctgaggacacaaacaaagtggagatggtcaaggcgatggcacacagagctggcaaaggacagaccaaatgcggcaggaagaaaacgcaaagaggaggcagacgaggctggcagaggggtgagcagtctgtcaaagccactgtcaagggctggaggttttggctggccccatcctcagggtctgggggtagtaaactctggtgttccctgcgtcagccgtgatcatgggaacaccaggaagcggggagaggcttcctgagctatatagggaaccgggaccccagggatctcccagggtctctccaaggtctggcgagtagccagtcaggcgaggagaggaaggaacactcactcaaggaaaggagggttgagactagtgcagaagcctgagtaagcacctaatgagagtgacagaagcaaaccccccacttcatgtgagtgtgtggccacagtgtgtgcagatgggctgaatcactgcttccctgggagagctcgtctggagcccagggcaaaccttgacaagctctggaggccagcctgggccagtcctggtgctaggccacggccatgtggccttggaccgtccacgtggccttggaccagacactagctcttcagtttctttgtctggaagaacaggatgcgggaagcagccttatcctgatggttgtcaagtggggaggattttgccccctagtggacatttggcaatgtctggagacagttttggtcgtcacaacttggaggggtgccattagcatctcacaggtagaggccagagatgctgctaaagattctacaatgcacaggacagtccccctcaacaaaggatcatcctggtcaaaacagcaagggtgctgaggctgaggaccccgccgtgtgggcaatgttgatggcgttaagcgcacaatgtctaggcaagtgctttacaaactttaagtatgattattgtaaaactgtatttttttaattccg

SEQ ID NO: 391565 - DNA, 1000 bp, Homo Sapiens; identical to SEQ ID NO: 282273

SEQ ID NO: 391566 - DNA, 1000 bp, Homo Sapiens; identical to SEQ ID NO: 282274

SEQ ID NO: 391567 - DNA, 1000 bp, Homo Sapiens
ttcaagtggctttcacctagtaccaaacccacacagccttcagacccagcccctccaatctcccgacctcctgggcaccatccctggccaacctggtccagaatggcctccgtcctctagaggccccaggcaccaagatccacaccctctattccagagcattcttggcttcaagttaggtcctatttatcaaacatttgtctagagagcagccccagcacataagtgtgtgtgaaccgcagagtagaggcatggcccctgctcactgtcccctctgactctgggcctgggtaagactgggctccccaaaagcaatataagtgtaccaggaattttctatggtgctcctgggagaagtaggaaggaggagggagacggagaaatcaagtaggggtgtgattcaagccccattcttgcttgcacctgcagcgtgactcccagtgtgagctgaaccttagagcttgtccggacttgaatcaaagcaacgagcctcaggtattggtgtgggtcaagatggggagacataaactccctggagcatcacttccagctttctgcacctgtgaacaaagcccaaaggtgggtcactgaggagagacacaggtatggtattagttgctgaagaacacagatgctgaggagtggtcctgggtgggaggggttgggcggagcaaacaccagcttcacggccaccttcataggccagtctcctgccaggggcacgagacgctccaaggagccagaaatcagagctttcatttcctttgtgactctaccaggtactcacagaagcaggaagggagaggcattgtttaaaaaagcaaacacttatatagcacttactatatgccaggcaatgttccaagcattttataagcactaattcacttagtttctcaatgtctcaatttccttataggtaaagtcaagctaataatattagctacttcacaggcttgcagggaagctaaatagcctatgtaaggttacagagatgatc

SEQ ID NO: 391568 - DNA, 1000 bp, Homo Sapiens
gttgctcaggctgatcttgaactcctggcctcaagcaatcctcccacctcagcctcccaaagcactgggattacaggcttgatcctcagaacctggtcattttactattaaaattacatgtcagaatctcccatttcgcttcttaaactcccagcagtattccactccacccctttcattagtcataaaagtgaggtgtctgcattcaggcatcccaggatcctttgcaactccagctcagctaagcaagagaggggaacttcccaggcaggggcacagcagagagggaggtgacagcagaggttaggtggcctcactacactgaacatcacccaagaggaggcaggggatctgctcacagccagatggtatggagaagcaggcggggcttgaagatgcctgagtgtgggtctctaggtctttctctggtggagaccgtgaagtaaggtcagcttctcaggccacatcccagggataatggtccttgcatgagccaccttctgtccccactgataaagcagtatatttaggtaccagaggagacttggcataaacctaggagcagtccccatgcatccgtattttctcttatcccatagaacacatgagccctcaactggtcctaagttgaccccaataagataacctaatcaaaacaacaacaataaaagaatctcagcttctcagctgaaagagggaagaggagatagtcctcttggcatctctttcacttgactgagttcccatctcttctcttcctcccagaacctcctccctaagccctcccctcatctccctcctctcaggggtccctggaatgcctccatcccttattgtctgtccttaaaatcttaaagggaaaccaggaaggagagaaggagagagactatgggaatctcatccctggttctgattaagcttcaattagaaataaaatatgtcaatcactcctcctggaaggggttcctgctgtcggggctggttatgcaaagcactccaa

SEQ ID NO: 391569 - DNA, 1000 bp, Homo Sapiens
cagtgtccttttccaggcgggacggtgctgtcccggcctctctactacaccgcgcccttctatcccggctacacgaactatggctccttcggacaccttcatggccacccggggcccgggccaggccccacaaccggtccggggtctcatttcaatggattaaaccagaccgtgttgaaccgagcggacgctttggctaaagacccgaaaatgttgcggagccagtctcagctagacctgtgcaaagactctccctatgaattgaagaaaggtatgtccgacatttaacgcgggctgcgtcggtcccggacttttctaatttattaaaaacatggccttggcagttatttttccatcaccgagagagagagacagagagagaaaataaactacccctcctattcagaagtttatagtttatggagatggatgacataaaaatgtaaacatctccacacaaaaaaaaaaatgtcttaaccaaccgaaaagaaaaattaaaaaaggatttgtattaaatcttattctgtatatttaatgtagcatttttgtatttaaattgataattcaatatctttgaagtaaattatgaaatcaagacacctgtacaggcatttaatgtttttttgtaatataaatatatacatttgtgtttcccccaaaactgtttcatagttaaaaaatacaagtttaatttaattttttacacctattgattctgctgggtatgagctaaagtattacagaaaggaaacaggttatactcttagatttaaaaagtgaaagaaactgcaggcgcctttgtaaaatgcaaaatatttaattaaaagagattttaacataatgagagccactcattactttttagaagcctcaataaactgtccattgccttggtcaaaaggtgcaaactgcaacttttttcaaagtggggattgaaaggttccacagaccttcaagtgtaccaggggaaaaccataattaggctgcaagccccggggaa

SEQ ID NO: 391570 - DNA, 1000 bp, Homo Sapiens
atacatctgtgagatggtgggcaagagaaattaaaaaaggtgctctctgcagtgaatgttaaaaagatctcacaatgaagtgattaacatttttatgaataaaattaatcacgcattaaactctgcagcacagtacatctgaaagccaaatgtggacccgaagccccctttcttacacctaagaatttggagccttccctggcccacagcaagcattcaaccattaggaatttcagagtatttatgagaagataagtcaataagcgatatctaagtttgagctaccccctcaaaagaaaaaccctccaaaaatgcctccacctccctctccccctgccctccttaacacacaaacacatggcaacattaaaaagcaaccagtaatttttaaaaattttttttcttttagcaaactctcaaccaaagcaggccatttccattctcagatatgcacgtgggatatgtggccctgggtcagggagggcaggcagggctgatacgagaggaggggctggagtccgcttttcccttcctgacccccatcctgggcccgctgttctggcaaagctgatcagattggagggtgggtcttctgcattattaaaatttccactcttccagataataaagtgtgatttctcctctctctgtctccccttctgcctcctttctaatctcttgccactgtggttttgggattattccagcaggctgtacaaagggaagcgaaggcatctgaagtgtcactctacagctgtgcaaagtaacagcatttccattttgttgatgctcccagctcatgtgcgcagcagaaggtgaaatcaaagaagccggtcctcctcagttgtgcacattatttttcactgctgtggcgaatctctccgagctccgtgaaccaataaaacaacggtccctgtttgagttgatatattaatatttactgaggatttgcaaggttggggttaaatgtcagcagattgcgggggcagtcctgtgggga

SEQ ID NO: 391571 - DNA, 886 bp, Homo Sapiens
ggatcccaaaccatgtttctttttttctgttctatagctcatggcccaagttgcccaggttatgttattttctctggggttggggcagggaatgggactgaatgtcctttattcctatggagcctgtgcttgaactgtaacaccagccagatggtcagataggaacctggtctgtgggggtggggggtcctgcaaagcctggggaaggcagactgcaagagcctggctttcagaggatgttctgcagggggaagtctcaagggagcttgggagttgggcagggactgtggctgagcctccccagccgggaagctaactgtcctcctcctttttgtgtttggttttcagttgacgaagtgagtcccacacctcctatcactgtgacccacaaaccagaagaagacacttttggggtgagtcacttcttggtcaagaggagtgtgttgactggcatagtcattttcagacttcatttgtgttgctaacttttccaaatattatcttacttgaaactttgaaaaaaaaaagtaatgaattgaactacgttcaggcagtttaaaccttccttgttggatggaaatagttcattgtttgaggaaatgtttgacgatctgctccaagccctagggttcagaaaatccccagtctgttaggagcccagctgggcctgatttgcaggggctgctaactgtacaagtttcctacaaaaggccaagttgctcaaggcatctccttgggtgtgttttcaagcgcccactcctactatttcagagcctaagattactctggggaggaggagaaaggattctttttagaatccagatcttttcgactttcctggataagaatgttatataaggaattttaacatgaagatgcagaattc

SEQ ID NO: 391572 - DNA, 1000 bp, Homo Sapiens
catggttttgctttgactgctgataaacattgcttagaagggcttatgcaatgaggataatttggaaaggaagttggatttcagggcaaatgaagacggactttggtttattttcattacgggtgggtaaagggactcctagtttgagacacgttttcctcttgtttttgaagttgtgttggaaggcgtcagcacagcaagaatgtagggtagactccggcattgaaaagctgcccatgcaatgggatctcagcacgtagctctacacagagtcccagagtggatgccaagagcaacatgatttctaaatctgctggctggcttccatgacatacagtgctccactccactgtggcagggtggggtggtgggatatggctctttgccaaggctcgggtaaggggactggcatgaaaggggttaacatggtgaattagcatccacctgcctggtctcagagatggatgtgaccaaatggttcaagagaggctgggtaccaagttccaaaacagaaacttgaatttcaagatatactcccagctggggtttccatgtttggcgatgttgggtgggggtgggtagggaggcatgatacgaggtttgataagttatcagtttgctgagccaggactcaggttggtgttatctggtgagactatgggatgtgtagagagatgaatttctatggattctctgcatgagcttgtgtctgtggttggggaccttggggcttagggactgaagaagagtacatgaatggcattcacaggacgtgatcctctgaatggtatgcaaatgttggagtgtttgcgctaggaaccgaactagtccatagctttcgctatattctcagaaacctctgtaactccttgaaaattcagaacactgatatatagggaaatacccagagaggattagaagggtagaaaaccctgtaaacccagctactcaggaggctgaggtgggaagattgattgagcacaggaggtcaaggctgcag

SEQ ID NO: 391573 - DNA, 1000 bp, Homo Sapiens; identical to SEQ ID NO: 282278

SEQ ID NO: 391574 - DNA, 1000 bp, Homo Sapiens
aataatgagtttacttcttcttgctgatggagtagcagttaatactaacaaaaaagacgaaatttcagatgctgtggtaagaaggaaactaaacttttcaattacacctcagaatgttttaatgagtagctctgaaaaaattatgccatcacaaaatgacatctcacaaactaacatttctcagtcagttctatttgataataaaaatctcattactgaatgccaccgtgttaattcaacctaaactgtcatagtccatccatttagctggagagacatcaagaacatgccagacacattttatttggtggtaagctgattgctttttcacctttaagcctctctgtgtagaacaatcagaagaattttaaatttaaaagtaaaacaaaatacttccttctgtatttttaatgctgtaatatattctttcttttttggacaggatctcattctgtgtgtagactggagtacggtgacatgaccacagtgtgctgtagcctcaacctcctgggctcaagctatccaaaggagctgggactacaggcacacacagctatgggtggctattttttttttaattttgtagatacagggtctcactaagttgcccaggctggtctcaatctcccgacctcaaggaatcctcctgcctttgcctcccaaagtgctgaaattacaggcatgagcctctatgcctagtctgtaatatattctttagactattaaaaatttgggtaatatatatgtatattcacgtctattgaatctacttgtgtaatattatctgtttaaatgttaattgttaagtgaactgtatgttttcagctatatatctcagcaatatattccaatttagatacaatactgtttttcaagggaggtggaaatattttgtacattaaccatgcaaaataaaattgtactttaaaatacattgatttttagatgttaaaacaactttgcattcttgggacaaatctgagataatcgtttatgatcc

SEQ ID NO: 391575 - DNA, 1000 bp, Homo Sapiens; identical to SEQ ID NO: 282280

SEQ ID NO: 391576 - DNA, 1000 bp, Homo Sapiens
ttcatgcaggaggaagcgcatacgtgtggtggggtgtggggagtccctctctggatcctggtgggtttggcacgcggaccctacatggtggatgtgatggacagtgtcctcctttgggagcggggcctgtcctggtcctcttgtgaagggtgggggacaggcactgacctgtcaggagggttagagggttggcaccagcaggtggcctggagcgctcagagcacgcgcgatcaggaaggcccgagtctccagtgtgccctccctggccttgtgaagtcatcttaaagtctggcttgagcgcctctgacttggattctgggaagctgacacagcgcggccggggtcgccacatcctgttgagtagccgctgggtgctaggcgcctgggtggtagaccaggtgtcagggatagggcccatgcctggcctactggggagaggacagaggctcagaggggtcacctcgagcgcccaggccattgtgttctgctggcttccaaggcagcacacggtcatggaactggagagagaggtttatggaagattttatctggtacactggggaatggtaagacagggacacctggaaatattgtaggaaagtcacagagggaggaaggactcagcggagagaggagaaagccgcctctgggcagcttcgaggatacccaggactgtggccgggggccatgcagctcagagccaggcccatggcaggtctctgggtttattgggtggctgtggaaggagacatcctgagtggggctcctggctgggcccctagaggccgtgactacttgtacctgtgcagagtgagcacaaggcacctggcaagattgttggtcaggccagagagggccgtgatctgggggaggctgttgcagtgcggggagtgatagggaacctcatggggccgtgccggcctttctggggctctcttggtgcatttggagttattccgaggcaggtctcctgggctctgtcagcactctggcctggatc

SEQ ID NO: 391577 - DNA, 1000 bp, Homo Sapiens; identical to SEQ ID NO: 282281

SEQ ID NO: 391578 - DNA, 1000 bp, Homo Sapiens
tctctcgtcgctgcaggcgcctcagcccagccgcgtgccttggcccatggccgcctactcttaccgccccggccctggggccggccctgggcctgctgcaggcgcggcgctgccggaccagagcttcctgtggaacgttttccagagggtcgataaagacaggagtggagtgatatcagacaccgagcttcagcaagctctctccaacggcacgtggactccctttaatccagtgactgtcaggtcgatcatatccatgtttgaccgtgagaacaaggccggcgtgaacttcagcgagttcacgggtgtgtggaagtacatcacggactggcagaacgtcttccgcacgtacgaccgggacaactccgggatgatcgataagaacgagctgaagcaggccctctcaggtttcggctaccggctctctgaccagttccacgacatcctcattcgaaagtttgacaggcagggacgggggcagatcgccttcgacgacttcatccagggctgcatcgtcctgcagaggttgacggatatattcagacgttacgacacggatcaggacggctggattcaggtgtcgtacgaacagtacctgtccatggtcttcagtatcgtatgaccctggcctctcgtgaagagcagcacaacatggaaagagccaaaatgtcacagttcctatctgtgagggaatggagcacaggtgcagttagatgctgttcttcctttagattttgtcacgtggggacccagctgaacatatgtggataagctgattaatggttttgcaactgtaatagtagctgtatcgttctaatgcagacattggatttggtgactgtctcattgtgccatgaggtaaatgtaatgtttcaggcatctgcttgcaaaaaaatctatcatgtgcttttctagatgtctctggttctatagtgcaaatgcttttattagccaataggaattttaaaataacatggaacttacacaaaaaaaaaaaaaa

SEQ ID NO: 391579 - DNA, 1000 bp, Homo Sapiens; identical to SEQ ID NO: 282282

SEQ ID NO: 391580 - DNA, 1000 bp, Homo Sapiens
tgattgccaagagcggcatctcctcccagcagcaatccatgcgcctggctaacctcctgatgctcctgtcccacgtcaggcatgcgagggcagaaaaggcctctcaaacactcacctcatttggaatgaagatggagactcttttgcctgaagcaacgatggagcagtgaccctctaatcaactcggtggcctaaagaaaaatcttgggtaacattttcacttcaatttccctctgggatcattgtaatccatgaaaaaaataattttaaagaaagagttaaaatactttgaagttagttatgtggttaaaaaccaccttcctttctattatcaatccaacaatttgataactgtaaacgctaaagtgaagacggattctcttcagatggtctccttaactgcccagggcttgcagatgtctcacccatgaggggcaccaatgtagaaagctgaggcttcatctactgatgagcttcactggtttcccctgaggtttgtgctttggcagagaaggggaggaggggactgggattgtgtggtcagctgtggctgccaacagatgcaggttaggaactgtgttcagtatcttccaataagaaaggggaaatgccgatgcctatcctctttgtttaggtagaaagtaaaatgctactggacttaaatgggcaacaaggggctttgcctgttcatttgccatggagagggctgggaatccaggtgcggtggctcacacctgtaatcccaacactttgggaggccgaggtgggcagatcagttgaggtcaggagtttgaaaccagcctggccaacatggcgaaaccccgtctctattaaaaatataataattagccaggcatggtggtgtgtgcttgtaatcccagctactcaggaggctgaggcatgagaatggcttgaacctggaaggcaaaggttgcagtgagccgagattgggccaccgcactccagcctgggtgactgacagagtgagacttgtcaaaaa

SEQ ID NO: 391581 - DNA, 391 bp, Homo Sapiens
ggagtgtgttctagctattacacaaatgaattcaaagaattcctagaaaatcaacttgctatataatctctgtccttgaagcacttttgcctgcaccttgagcaatatctacttaatccaagggacagatgaactggacaaaacatccatagcctaacaaaaatgaggtaagtctcatgaaaaaagtgttattttattctaagttctaattgggacagaatgaactagccctttatacctcactacacattgtaatacaccaccttcctttaattcagtttcaaaactgtagaaaaatattatatatgtcacttagtgaaatgcaagtctcatcctttaaaaagctgtggtaggaactgagatactaccataagatctctaataaaatgtt

SEQ ID NO: 391582 - DNA, 1000 bp, Homo Sapiens; identical to SEQ ID NO: 206254

SEQ ID NO: 391583 - DNA, 1000 bp, Homo Sapiens; identical to SEQ ID NO: 114882

SEQ ID NO: 391584 - DNA, 1000 bp, Homo Sapiens
tcccagtactttgggaggctgaggcgagaggatcacctgaggtcgggagtttgagaccagcctgaccaatatggagaaaccccagttatactaaaaatacaaaattagctgggtgtggtggcgcatgcctgtaatcctagctactaggaaggctgaggcaggagaatcgcttgaacccgggaggtggaggttgaggtgagctgagatcacgccattgcactccagcctgggcaacaagagcaaaactccgtctcaaaaaataaataaataaataaataaataaactaaaatctatccatgctttcacacacacacacacacacacacacacacacacacacacggggtagaggcaggcctcatccacacccctaacatttgatgcgtagctgttccagtcttctaggcacatgtagagatgcttttcctcagaaatggtattctcaaggtgacactgaggaaaagtggacaggccgggcgcggtggctcacgcctgtaatcccagcactccgggaggccgaggcgggcggatcacgaggtcaggagatcgagaccatcctggctaacactgtgaaaccccgtctctactaaaaatacaaaaaaatagctgggggtggtggcgggcgcctgcattcccagctactcgggaggctgcggcaggagaatggcgtgaaccccggagcggagcctgcagtgagccaagattgcgccactgcactccagcctgggcgacagagtgagactccgtctcagaaaaaataaaaataaaaataaaaattagctgggtgtggtgccgggcgcctgtaatcccaacttcaggaggctgaggcaggaggatggcttgaacccgggaggcggaggttgcggtgagccgagatcacaccattgcactccagcctgagcgacagagcgagactccgtctcaaaaaaaaaaaaaagaggagggggcggggggaagagccagagaaaatatttgctacatgtggcagataaaggttat

SEQ ID NO: 391585 - DNA, 1000 bp, Homo Sapiens
ccaggacacgcccatccacagagacaggagggggatgcgtggctgccatgtgctgggaaggagaatgactctgatgggaacagagtttattttcaggggatgaaaatgttctggaagcagaggtctggctgcacacctctgagaaagtactccatgcagctgaattgtgagcttaaaatgctgtgctttatggaattttatctcagtttttaaacattgccaaaaagggtcaggcatggtggcacacgcctgtaatcccagctactcaggaggctgagggaggagaatcgcttgaacccaggaggcggaggctgcagtgagccaagattgctccactgcactacagcccgggcaaaagatggagactccatctcaaaaaaaaaaaaaaaaaaattgccaaaaagccctttggtgagttcgtctcacccttaggggagggtggagccccttggggccttcctgggccctggtccacgctccgcaccctctgagctgcttctccttttcctgggaccttgccccgcacaggctccccccgtctcccccagaccttctcagtctctgcatcagtgcacttccttggggagcactcccaccccagcgaccctgccaccccccacctgcacgtgcatgagtctccctgctggtctgtcttcccctccaggggtgcagccctcgttccctgccttccaaagcagctcctgaggccacagggcaggccaacggcagccggaaatgccatccccaccccgagtctcacctccagatggtgcaggtgaagtgctggtggtcttcgctggtccccagactcatctgccattgctggggagagaagacagcgcgggtcagccccggacacacagctgctctcggagacttctaggtgtgcctctgattctacagtcaggccacctcttctgtacctcccgattcaggggctggccactaaatcccctgccccgccctcctggtggcctggggtttgctgtcatctgtgatc

SEQ ID NO: 391586 - DNA, 1000 bp, Homo Sapiens
tgggcgcagggggcatttttttcccagactccgggggaccgggcagttgatggcttcacagcttgtccttttaataccctgagtgctcagagtgcaggctggcttggggcaagagaaggcaggttgttctgtcccagcctgggaaaggtcagggcaaaattatctgctaggaagagcagggcgggccacggtgggcctgactccgcccccgctccttcctccatcccccagcaggatgggatccaggacccacgcaaatgaaattgtggggtctcttgttagaaaagtattaagactttccagaccacaatagcgagcttttatcttttcttccccctcccccccaccccccttttagagacagggtcttgctctgtcacccagactggggtgcagtagcatgatcatagcccactgtagccttgaactccgaggctcaggcgatcctcctgcctcagcctcctaagtacttgggactataggcaggccccattacaccaggctaagttttacatttttctttttgtagagacttggacagtgaggcatggggtctctatgttgcccagactagtctcaaactcctgggctcaagtgatcctcttgacttggcctcccgaagtgttggcattacaggtgtgagccacggcatgtggccagcagcagagctttaaaaagcacggggcctttcttttttttcttttgagatggagtctccctgtgtcacccaggctggagtacagtggcgcaatctcagctcactgcagcctccgcctcccgggttcaagcaatcctcctacctcagcctcccaagaatccgggagctaggatgacaggtgcacaccaccatgcctggctaatttttgtatttttagtagatttggggtttcaccatgttggccaggctggtctcaaactcctgacctcaagttgtccacttgcctcggcctcccaaactgctgggattacaggccaaagcacagggcctgagggagggatc

SEQ ID NO: 391587 - DNA, 1000 bp, Homo Sapiens; identical to SEQ ID NO: 282288

SEQ ID NO: 391588 - DNA, 1000 bp, Homo Sapiens
ctctattgtcttaaaactggatttttgaaatcatggattttgatggagatctggatagaggcagcttggtatgataggtagaaaaaacatgcaaatatgagttagtagtcataaattcttgactgtaggtagctttgtaatcttaggacaagctttggaccatcatttactaatctacaaaattagagattggattgcatgatctctaagaccttttctagaaggaactcactctgattcttggaggatgaggaactgcttaagcataacatgtctttggtggtagttcattggtttaccatagaagaccctaaacagtatgcgactgtttctacagtatggatttctacagagaagccaaggagtggagacacattttggaaatttcttataggtcagaatctataagtctcagttaaaatagcctccctactgagtccaagattaatcttttgttcacatatgtgggtcagatcagaaagtgagccctacaaatgtaactacacaaacttaaaacttaccttcacctttgtaggtattgtatggggagaagagactctgatggaatatttggagaacccaaagaaatatatccctgggactgtacgtggtggctcacacctgtaatcccagcaccttggaggccgaggagggcggatcacctgaggttaggagttcaagaccagcctggctaacatggtgaaaccccatctctactaaaaatacaaaaaaattgctaggcatgttggtgcatgcctgtaatcccagctacttgggaggctgaggcaggagaatggcttgaacctgggaggcggaggttgcagtgagctgagatcgcgccattgcactccagcttgggcaacaagagcaaaactccatctcaaaaaaaaaaaaaagaaagaaatatatccctggaactaacatgaccttttctggtcttaaaaagaagagtgagagagaagatcttattcagtatttgaaatgggcaacatcttcactt

SEQ ID NO: 391589 - DNA, 1000 bp, Homo Sapiens; identical to SEQ ID NO: 282289

SEQ ID NO: 391590 - DNA, 996 bp, Homo Sapiens
ttcggaagaaccggtaacctgagtttaaactatagtatcagttcacaaaattcccccttttgataatacaccatatttcccaagaggaacactctttagtcagatgggtcctgtatttacaagtggcttttgagactggtgattttataccagcacttacagtaactagagtagaattattggttccctagctttgtgtctctctatatgtcaacagggggaaaaaagacttaaataatcaaaactgatgactctagagggaatccctctaatgcctcggctgttattaaggcaccctgaggggaacactttaatggctcttgaccatggcccttctttcctggccaatctgccccctggatcttctgtaagaccagtatagcctctgttaactttaactcagcagcaaggcacctttttctggctccatagttcctacttaaacaaaacaaaacaaaaacagacaatacatatcttgagtattctcaaaaaaggcctcagttaaaacagaagacagaaatttgagaccaattgatacatcatgttttaattcagcagaactgtcttctatttctttataagaagtgatcacttggtaatgagaaacctggaaaagttgtgaaaattaatttgcttctccaagaacattcaataaatcatcctttataattttactgaaaaggcaggagagtgatggtctgcatatcatccactattctcttcactgcaatgaggttaaaagatagcatgaacaatgacggttaatactatacttacattttaacgaaaaagttaaggtttacaatgcattttattttacccagaagtgggtagccattattccaactgtattcatttgggtgagtttgaggattaaattcttaatgtctggaacacagtgtacagtcgtatcttattctccctgtcttgtgggtagctgatccacaacattttgaagagttgtgtcacagattcatgggtataaatgtgaaataa

SEQ ID NO: 391591 - DNA, 997 bp, Homo Sapiens
atgctgggatccaggcgtgagccacaatgcccacccagttttatgcatttgtctcttcagtaatctctcctattttattattttattctctttttatttctgagacagagtctcgctgtgctgcccaggctggagcacagtggtgtgatctcactttactgcaaactccatcaccaggattcaatggattctcctgcatcagccttccaagtagctgggataatatccatgggccaccaagcttggctagctttggtatgatagtagacatggcatcttgccatgtctaatttcatatctattttaaagctcagtttataagcaatactgacttcctggaatgttttctgtttacaaaactatagtactattatttagcctcctcagataaaatatgataacacacaaaacatacacacacagacaaagacacagtcagtgatcaaaaaatcagtgtaggccacgacctaaaatggaaggtgaactgctgcagttgcctagaattaaagcagaccagagttgacccataccaggctgagagatgtgaacagaggctttccaacaactctatcagatacatgttagattattctccagccatagcgaagggacattaaagatctgttgtgcttagaagagtctcgatgatttgacttttccagggtattagcattcatgatgttggcctttacagctctctgcaatgaagtcagtagacgacacagtttttctaggagtctaaagtgcttttcagaattatctaaaacttagtggcttaaaaccataattataatttactaactgtcagtctctgcaatcgccctcagtctctcagccaaatgaatgtggttcaggggcactcaggaggatgcaatctagtgatggccaaagatggggacattggcgggtgtcttctcatctccctggtgccatggctagcgtgactcaaatagcaggggctggactgctgagatgctcagacatcttgttctgtttc

SEQ ID NO: 391592 - DNA, 1000 bp, Homo Sapiens
gtaacttccttcctcacttagatctaagtgatcaccaagtcttgtcagttacttgtttgacttttctctacctcttctttcttgattcctaaattaacaccttctatttctcacctccaattcatactgaaatctatcttcctctgcctgccagactcatcttgctcattttttctctataaaatgggaataactgtacctgtgtcacagggccattgtgagaattagacatacgtaatgtaaagtgtttattgtattgcctggcacaaagtaagtattcagcaaatggttagcatactctgcttcttacctcctgctaaatttgactatctttcactccacctgcgtccaaaccttggcagtagcaaagtatatagccaaaaatacgggacatggaacctttggtttgatccttggtttgaacctccagattcctgcttaccatttattctcttttgggaaagtacgtcagtttagttactgacctataaggtttttaggagttcagaatgagataaagtatgtagagagaatgctgccttcacaggcagtcacgatgcagatgcttctcgtttttgttcttaaaacctgtagtgtaacctatttggtgtaaggagtttgaagcaagtatgatgagtttttacttttttttttttttttggcaggttaaacccatccagagtaatggctgcggccttacccaggaccctgggggagttgcagctgtatagaatattacaaaaagccaatctactttcttattttgatgcctttatccaacaaggtggtgatgatgtccagcaactctgtgaagcaggagaagaggagtttttggaaatcatggcactcgtgggcatggctagcaagccccttcatgttagaaggctgcagaaggctttgagagactgggtcacaaaccctgggcttttcaatcagccactgacttcccttcctgtcagtagcatacccatctataaattaccagagggatcgagtcgac

SEQ ID NO: 391593 - DNA, 270 bp, Homo Sapiens
gaattcccgtcccattggcattcacaactccctcctgtttccctaattccatttgtgtcctcctgactccacgtagaccacccacattggcccttccttgctcaacacccttcccagctcctcagcgaccacacttctcggcctggcattggggcgcttgatgaccccgggcctgcccacctttgtggcttcatctcctgggactctctgtcatcagtacatgagccagccctgccgaagcgcatgcccagcctcctgccctcctgcccc

SEQ ID NO: 391594 - DNA, 1000 bp, Homo Sapiens
cacacaggtctgcccacctcatccaggcccggcccctccccgcttccgcacagggaccgggaccgggaccgtgagcgggagcgcagagagcggagccgggagcgagacaaggagcgagaacggcgacgctcccgctcccgggaccggcggaggcgctcacggagtcgcgacaaggaggagcggaggcgctccagggagcggagcaaggacaaggaccgggaccggaagcggcgaagcagccggagtcgggagcgggcccggcgggagcgggagcgcaaggaggagctgcgtggcggcggtggcgacatggcggagccctccgaggcgggtgacgcgccccctgatgatgggcctccaggggagctcgggcctgacggccctgacggtccagaggaaaagggccgggatcgtgaccgggagcgacggcggagccaccggagcgagcgcgagcggcgccgggaccgggatcgtgaccgtgaccgtgaccgcgagcacaaacggggggagcggggcagtgagcggggcagggatgaggcccgaggtgggggcggtggccaggacaacgggctggagggtctgggcaacgacagccgagacatgtacatggagtctgagggcggcgacggctacctggctccggagaatgggtatttgatggaggctgcgccggagtgaagaggtcgtcctctccatctgctgtgtttggacgcgttcctgcccagccccttgctgtcatcccctcccccaaccttggccacttgagtttgtcctccaagggtaggtgtctcatttgttctggccccttggatttaaaaataaaattaatttcctgttgatagtgggctcctcggtttcttcctcactgctctgttttccccagaaggttgttcctgacttgatagccctgcttggtttggtttccagggtgtacttaaaacttgagcgttaggacatgaggctggctctgccagtagccagagctgttgaaagtgggtgaggc

SEQ ID NO: 391595 - DNA, 344 bp, Homo Sapiens
aattcttctgtctaggcttacatgaaaaatacccgtttccaacgaaggcctctaagtggtcaagttatccacgtgcagactttacaaacagagtgtttccaaactgctgaatgaaaagaaaagttaaactgtgagagttgaacgcacacatcgcagagcagtttctgagaatgattctgtctagttttgaaacgaagatatttccttttctgcctttggcctcaaagcgcttgaaatctacatttgcaaattccacaaaaagagtgtttcaaatctgctctgtgtaaatgaaagttcaactctgtgagttgaacacaaccaaaacaaggaagttactgggaatt

SEQ ID NO: 391596 - DNA, 647 bp, Homo Sapiens
gcagcatgccaatcctgtttttgcattttagtaacacaaattgtaatgttaactttttaaattatgaaagcatctaaaatataaaattatttgtaaccccactgtccttttgggcttctataaatgaatatacatctaaaatgtgggggtttagcttaattgattgttttccatagaaactaggttttatgggaagatggttggatagacttgtttcacttaaaggtctgatttgtgtaggacaaacccacatatgtaatcgtgccagtctgttctctgcatgacataattttccagcaatagctgtgtggtttttgtaatcctatcatctagtcagttcaagatcttgcaacactgtgtgattctttgctccgtagttcagtcttgttgaacatgacacaggtgtttactttcctgttcttgcatctagtttcattctaataatgttctctgttgaaaaagctggcttcaatttattgagcaagatgctggtgttatcatctaacataaaacctatcttataataaagtgttgacacatgtaatgagtactgtactgaaaaatggtggtatgtatatggtttgtactgattatgtatcgcttttataccatcaaaaagttgaaaaatcataaagttgaatcatcct

SEQ ID NO: 391597 - DNA, 1000 bp, Homo Sapiens
tggtaggcgcctgtagtcccagctactctggaggctgaggcaagagaatcacttgaacctgggaggcagaagtttcagcaagctgagactgcaccactgcacttcagcctgggaggcagaagtttcagcaagctgagactgcaccactgcacttcagcctgggagacagagcaagactccatctcaaaacaaaaaacaaaacaaaaaaaagaaaagaaatagatgtagtcagacagtggggaatcactccggtcctgagaagcaaaggcgtgctggggatgggaggatgcagacaggttccagagacactgaggggatcaacagactcctgaagccatcaatcagtaggaccgggtggaggagagggacagatccagcttggcttgcataacaccaggttcatcttgaggttgacatttctccttgacctttttgtttagtccccacccgcaaggtcgcattagctgcctgctgagtttaatcaaatctcttcctgtcctggcaatgcccgggaatgaagagataatcagtctatttccagaatccaaagaggtttagaagaaaaagtagctttcatttagctgttggccctcccaccaaccttccccaagtcagctgggtgactcatacatctgtgagaccctccgtatggagaccggggcggggggtgttgcttaatgcttagaactgctgaaactaccagttcactgtctcagcactaatccaactctgctccttaagtgggatttggcttttagacattgagacctggatgctgggcatcctcgctagatcccctacaaattccccacatacgtaggccaggagcctcagcggtgccccttcaggctcatctggcaagacggtaccagcttgctcagaacaggggctggctattcatcatctcagagcatagagaccctctccttgccacccggcccttcccacctggttggtgacaaatcacaaggtgtagaagttgccagggacagataacatg

SEQ ID NO: 391598 - DNA, 664 bp, Homo Sapiens
gctcatagcctgccctcctatacctggtccccgcctgcatcggttttcctgtcctggtggcgctggccaagggagaagtgacagagatgttcaggtaaggcagagtggggggcagatgtcctcatgggcaccagtgtgcctgctggcagtcagtggaacctgctgggggtatctttacacctctccaggggaacattgttcctgccaccagccccaccccttgcctttttcagcagtacatgggtacctggcctgtggacaccagtgggaaccttaccctgggccaggagccaggggagcgcaaggcatcagagccctctaggcatcccccatccaaatgttagctggatcttaagaatagctgttgtggatttttctctgcctactgtcagaagtcctaggtgactctgcccccaggtgacttcaggcatgtcttcccctcccatggcctcagttttcacatgtgagtaatagaacagggggcgtgtgggatgccctagtgtggtagaaagtgccccgagtagaaggcaggtgtcagtccctgttcattcacctctgtggctttaacccacagctcactgctttctctatatctgtatctcacacagataccccttccccagggccatatccacacctatcacaccccatcctaaaaaaaaaa

SEQ ID NO: 391599 - DNA, 515 bp, Homo Sapiens
ggccacccggcctataaagtacgtttaattaaaaaaacagctttgttttaattaaaaaaaaaaaaaaaggccaagcacagtggctcacgcctgtaatcccagcacttcgggaggccaaggtgggcagatcacctgaggttgggagttcgagaccagcctgaccaacatgaagaaaccccgtccctactgaaaatacaaaattagtagtggcgcctgcctatagtcccagctactcgggaggctgaggcgagagaatcacttgaacccaggaggcggaggttgtggtgagtggagatcacaccattgcactcagcctgggcaacaaaagcaaaactccatctctaaatagataactaactaaataaataaataaataaaataaaccaaaatgaagacaggtacagtgactcacgcctgtagccctagctattcggaggctggggcagaggatcgcttgagcccgggagttcaagtccagcctgagcaacatagcacaccccatcctaaaaaaaaaa

SEQ ID NO: 391600 - DNA, 653 bp, Homo Sapiens
attgggatgattttcaaataatgtgtatatttaatgtggtcattaaaaacatgaaatcaatggcatttcttacaagcaataatatcttgcaggtaaaatgtgattttaagaagtgtttctttaaaaattagttcatgtaattagtatggacacttaagttcgtggtagaaaatagccaattcattcgttcattcaacaaataatggagtgtttacgatgtcgccttggcaacaagggggtaggtgaacagcagtaaacaaaagcggcaaaaatccttgctttcaagcgcctgtcagccagccactgcttcgtgccctgtgcactacctaccttgcttctcaaatcagttgggttattttagggagaataagtattttagccaaggccactcagcgcttaagtgatagaagcagattccaactcaagtctgcatggctttaaaccctgtgttctttcctcaaattaccataattgttgggctaaatgaaactttctcactttgtctcactgacagagctatcattacctgggccctctctcttcccacctgcctcagcactggcttgaggactcaagtccgggaactgttggtggaaatagaaggcatttcagtggatgcctcagcccaggctggtgtgtttttaaaaaaaaaa

SEQ ID NO: 391601 - DNA, 613 bp, Homo Sapiens
aaaattacttttaaaagtttcttcttttattaaaatggactttcttaaataaaatacatcctctgatagcagctatctctttttacttgtaatgattaattctaaatgcttcatgtaattgagggacattatgagaagactagaaagtatctcatcagataatcctaagggctgtaacttctacttgccataaacaaagtataattaagagtgagtagcaattggtttggggagtcgtagttatatatgaaactttcttttgtttctcatgatgtatgtaaaatgtttgcagaaggatggtagaaaatgttactaatgaatttagagtggtttgggagaatacactgatacttcctcatttgaaaattataaggagttacaaggggaactaagaaccagaagtggctggcctctagcttttcaatacctgataagtgttcttggttatgttttgaacacttaaatttctcaacaaatggctatgtctatatttatgtaggggccacccttgccctacttgcatgccactttgacttttaactgaaatcagtgtgaattctgtatgcataagggatgtaataaagaggcgggatcattaacgctaaaaaaaaaa

SEQ ID NO: 391602 - DNA, 625 bp, Homo Sapiens; identical to SEQ ID NO: 57975

SEQ ID NO: 391603 - DNA, 557 bp, Homo Sapiens
ccgccaccatgacccactaattttttttttttttttggatttttggtagagtcggggtttcactgtgttggccgggatggtctcaacctcctgacctcgtgatctgcctgcctctgcctcccagagtgctgggattacaggtgtgagccaccgcgcccggcctggaactgcaatttctaactcatacatcattgctataaaccttatttgtttactgtttctcttccaaggacggtcagtcatcctttaaaattcatttgaagttatgaaaagatagtttttgttacatgggcaatttacttttagtacagtaaaatgttatgtgaatttctacagaatgtttgctagaatgaattatatctaggatatgcttaacaatatattctggaggcagctttcatttgaaattaggttcatcttctgagagtattaaaaagttaatgggtttttgtgcctgaagattttgatgttgcatttggctacatttaatccactttcacccataaggtttagcatctaaaaaaattaaatcactgctaatgcaattaaaaaaaaaa

SEQ ID NO: 391604 - DNA, 365 bp, Homo Sapiens
aactggagatacaatgaggagtgaaatatatagtccctctctgaaagcttgtgcatcatacaaaacagtgcagataatggtaaatgcttttgcacaaaaccccataagacttagaggcaagcagaaatgacgcaagtatgaaactcaagctggctgcccgctgtgctttgagtaatgaagtcccttgtctctgatccaggaagctcctgtcttctgccagcatctgtcagcaggctaatttgtcagcttgcaaatagggagacatctcaggcttgtcacagttctttacagttactagcctcatgtggctatttccaattaaaattaaattttaagtttaaaatgcagttcctcagatgcactca

SEQ ID NO: 391605 - DNA, 341 bp, Homo Sapiens
ccaacataaaactaaatatgtagatctcaagcattagtgagtcatttgggttggacataaataagagaattttgtcactcagaaaatacactacactaggaatggggagtcagaaagcatagactagctatcatagctatcataatgtacatatggtacaatactgtttcatggtagacgtgccattcaatttttgagaggcagccatatgatgtaaagtggactattaactgttgatgtcaaaattaacaatactctatatagaaaatgtccacagattcatgaatttgaaatgaatttaaaaaataagtaaaaaatgtctgtgggcccagaattgacca

SEQ ID NO: 391606 - DNA, 1000 bp, Homo Sapiens
accccatgggcttcctccccaaacccttaccccagtataaatcatgacaaatatactttaaaaaccattaccctatatctaaccagtactcctcaaaactgtcaaggtcatcaaaaataagaaaagtctgaggaactgtcaaaactaagaggaacccaaggagacatgagaattatatgtaatgtggcattctgaatgagatcccagaacagaaaaagaacagtagctaaaaaactaatgaaatataaataaagtttgaactttagttttttttaaaaaagagtagcattaacacggcaaagtcattttcatatttttcttgaacattaagtacaagtctataattaaaaattttttaaatgtagtctggaacattgccagaaacagaagtacagcagctatctgtgctgtcgcctaactatccatagctgattggtctaaaatgagatacatcaacgctcctccatgttttttgttttctttttaaatgaaaaactttattttttaagaggagtttcaggttcatagcaaaattgagaggaaggtacattcaagctgaggaagttttcctctattcctagtttactgagagattgcatcatgaatgggtgttaaattttgtcaaatgctttttctgtgtctatcaatatgaccatgtgattttcttctttaacctgttgatgggacaaattacgttaattgattttcaaacgttgaaccacccttacatatctggaataaattctacttggttgtggtgtatattttttgatacattcttggattctttttgctaatattttgttgaaaatgtttgtatctttgttcatgagagatattggtctgttgttttcttttcttgtaatgtcattttctagttccggtattaaggtaatgctggcctagttgaatgatttaggaagtattccctctgcttctgtcttctgaaagagattgtagaaagttgatacaatttttttttctttaaatatcttgatag

SEQ ID NO: 391607 - DNA, 1000 bp, Homo Sapiens
ttttgaaacattctttttaaaaaatctgcagttggacatttggagctcttttaggctatcggttgaaaaggaagtatcttcacattaaaacaagacagaagcattctcagaaactcctttatgatgtctgcattcaactcacagagttgaaccttccttttgatagagcagttttgaaacactctttctgtagaatctggaggcggatattagggtgctttgaagccttcttgggaaacaggattatcttcacataaaaattagacagaagcattctcagaaacttctttgtgatgtgtgcattcaactcacagcgttgaaacttccttttgctagagcagttttgaaaccctctttttgaagaatctgaaagtgcataattgcagcactttgaggcttaaggtagaaaaggaaatatcttcatataaaaactagacagaagcattctcagaaactactttgtgatgtatacattctactcacatagttgaaatttccttctgatactgcagttttgaaaccgtctttttgaggaatcttccagtgggcattttgagggctttgggggctattgtggataaggaaatatcttcacatgaaaagtagacagaagtgtcctcagaaacttcattttgatgggtgcattcaactaacaaggtaaaacttactttattgagcagttttgaaacagtctttttgtagactctgcaggtggatatttggaacgctttgaagccttcgttggaaacgggaatatcttccccttgaaactagacagaagcattctcagaaacttctttgtgatgtgggcattgaactcacggagctgaaccttcctttggattgagcagttttgaaaaactcttcctttataatctgcaggtggatatttggagtgctttgaagccttctttggaaacgggagtatcgtcacataaaaatagacagaagtattcccagaaacttctttgtgatttgtgcattcaactcacagagttga

SEQ ID NO: 391608 - DNA, 1000 bp, Homo Sapiens
ttccatttcaaagattagcctcaaatcgcttgaaatctccacttgcaaactccacagaaagaatttttcaaaactgctctgtctaaaggaaggttcaactctgtgacttgaatacacacaacacaaagaagtgactgagaattcttctgtctagcattatatgaagaaatcccgtttccaaccaaggcctcaatgaagtccaaaaaagcacttgcaggctttacaaacagagtgtttccaaactgctctatgaaaagaaaggttaaactctgtgagttgaacgcacacatcacaaagtagttcttgagaatgattctgtgtagtttttatacgaagatatttgcttttctgccataggcctagaagcgcttgaaatctgcacttgcaaattccaaaaacagagtgtttcaaatctgctctctctaaaggaaggttcaaatctgtgagttgaatacaaacaacacaaagacgttactgagaattcttctgtctagcattatatgaggaaatcccgtttccaacgaagggctcaaagagggccaattatccacctgcagacttacaaagagtgtatttccaaactgctcgattaaagaaaggttaaactctgtgagttgaacacacacatcacaaagtgttttctgagaatgattttgtctagttttaatacgaagatatatcctttcctatcactgtcttcgaagcgtttgaaatctgcacttgcaaattccaaaaacagagtgtttcaactctgctctctctcaagaaaggttcaactctgtgagttgaatacacacaacacaaagaagttactgagaattcttctgtctagtgttgtatgaagaaatcccgtttccaacgaaggcctcaaagaggtccaattatccacttgcagactttagaaatagagtgtttccaaactgctctatgaaagaaaggttaaactctgtgagttgaaggcacacatcacaaactgttctacgagactctgtgtcgagct

SEQ ID NO: 391609 - DNA, 1000 bp, Homo Sapiens
ctattataattatctttcccacatatcaaactccactggtttttttcccatttttctttcatacttcagaaagacgagaatccaggacttgaatcgtatcttcccactttctgaggactactctggatcaggcttcggctccggctccggctctggatcaggatctgggagtggcttcctaacggaaatggaacaggattaccaactagtagacgaaagtgatgctttccatgacaaccttaggtctcttgacaggaatctgccctcagacagccaggacttgggtcaacatggattagaagaggattttatgttataaaagaggattttcccaccttgacaccaggcaatgtagttagcatattttatgtaccatggttatatgattaatcttgggacaaagaattttatagaaatttttaaacatctgaaaaagaagcttaagttttatcatccttttttttctcatgaattcttaaaggattatgctttaatgctgttatctatcttattgttcttgaaaatacctgcattttttggtatcatgttcaaccaacatcattatgaaattaattagattcccatggccataaaatggctttaaagaatatatatatatttttaaagtagcttgagaagcaaattggcaggtaatatttcatacctaaattaagactctgacttggattgtgaattataatgatatgccccttttcttataaaaacaaaaaaaaaataatgaaacacagtgaatttgtagagtgggggtatttgacatattttacagggtggagtgtactatatactattacctttgaatgtgtttgcagagctagtggatgtgtttgtctacaagtatgattgctgttacataacaccccaaattaactcccaaattaaaacacagttgtgctgtcaatacctcatactgctttacctttttttcctggatatctgtgtattttcaaatgttactatatattaaagcagaaatataacc

SEQ ID NO: 391610 - DNA, 285 bp, Homo Sapiens
tttttgcatgtggctctgtatatgtttttaaatcgtatatatttaaagtgcacaacagtgatgttttgatatactgtacatatacagtgaaataatcaccatagtcaaacaaattaacatatctatctcctcactcacttctctctctgcgtgtgtgtgtgtgtgtgtgagtgtgtgtgtgtgtgtgtgtgtgtgtgtgtgtgtgtctgtggtcctggatattttagaagcagcgatggcttgtcaaattcttctcgcgcttgaaatttgttttacagggcttat

SEQ ID NO: 391611 - DNA, 253 bp, Homo Sapiens
tcttacaactcatgagctcccacctggtgattacttttgacttaaatggtttatgaccgtgaaaaccatggctgggtggttaaaccaaaagttccatgatgtatatttgtgtgtgtgtgtgtgtgggtgtgtgtgtgtgtgtgtgtgtgtgtgtgtgtatttcaagcatggtagtgctaatgcatgtagcagaaggcaatcaaggcaataaagcctagcaggtagcgtggtaccaggataaggataatatgtg

SEQ ID NO: 391612 - DNA, 376 bp, Homo Sapiens
ttttaaaatcttttttctatttattattactattattttttggtctgactggtttattccaaaaaaccagttttaaagttcagaaattctttcttctgcttgatctaatctattgttgaagttctctaatatatgtgtgtgtgtgtgtgtgtgtgtgtgtgtgtgtatgtatatatatatatatattctttggtttcaagatttgtttcattattaaaaatgatatttatttatttctgtgttgaatttcttattcagatcatgaattgtttttctgattttgttgaattgtctgtgttctcttatatctcagtttgttctcactcataggtgggaattgaacaatgagaacacttgaacacaggaaggggaacat

SEQ ID NO: 391613 - DNA, 1000 bp, Homo Sapiens
aatacatttctttgaaaatttccacatacgtctatgaagctaagtagatctcttcagtggttatctgtttgtttttaccattttatactactccattatgtggctgcaccgtgatttctttaaccaatctgtgtcactggacactgagggtggtttcagcttctcactgttataaaatatgttccagttcccatctgtgtaaatatatctgtgaacaaattcagcagcaagtaataacaagctaagaatgatcttctgttcccaacacgtagggaccaatctggagcacatttcgtgcaagggcatccaaagagtgaacacacagtgaactcgggaggaaacacaggaggtagaagggatgggggagagaggatgggctctcatgtactgtagtgcagtaagaccagtgaggaattcgacatttcctgccatgacaagtctggtctatgaacttccttgtttgtttgtttcaggaagtgaataagaagatgagagtgattcaaatgattcaaatgccatgacattgggaaataggtcatcatagctctaacttctgtataccaataaaataattagcttgcaatttctgattgtggtgtctgtttctcaatatttgtgaatgtgggatctgaggaccaagagaagacattacacgaatatctaggaacccttttccttgatgctccagggagtttcctcctcctttaatcctaatttagccagctgccatgcaaaagattttactgtttctctacttccctgacttccattttttttcctccaagatggagcttttttcacccaagctagagagtgcagtggcacgatctcggctcactgccttctgcatctcctaggttcaagctattctcctgcctcagccttctaagtatctgagattataggtgcccaccatcatgcacagctaatttttgtatttttagtagaaacaggggtttcaccatgttggccaagctagtctccaactcctaacctcagg

SEQ ID NO: 391614 - DNA, 1000 bp, Homo Sapiens; identical to SEQ ID NO: 195527

SEQ ID NO: 391615 - DNA, 1000 bp, Homo Sapiens; identical to SEQ ID NO: 282313

SEQ ID NO: 391616 - DNA, 1000 bp, Homo Sapiens
catttcattttggcaccgaataatattccattttctgaatgtaccacacagtttatttgtccattcacctactgaaggacattcttgattgcttccatgtttcagcgattatgaataaagctgctataaacatccatgtacaattttttgtttgaatgtaagtttctatctcccttgggcaaataccaagcagtatgattgctgaattataggttttgttttataagaaactgtcaatctgtcttccaaagtagctgtacactttgcattccaaccagcaatgaatgagaattctggttgttccatgtaatcaccagaatttgttgatgtcagtgttttcaattttggccctcctaacaggtgggcagtggtatctcaatgttttagcttgaaattctctagtaacatataatattgaacatctttttatatgattacttgccatctgtaaatattactgggtgagatgtctattcaggtcattttcctaggtttaaattggctgttactttttttattattgaattttaagagttttttgtatattttggataaaagtcctttatgagatatgtcttttgataatattttctatctatggcttggcttctcattctctttacattgtcttccatagagcagaagtttttaattttaatcaagctcaagttatcaattatttctttcatggatcataccttcagtgtcatatctaaaaagccatcaccatacccaagcttacctagatattctcctatgttattttctatgagttttataattttgtgttttacatttaggtttataatccattttaatttttgtgaagggtgtaagcagatagtgtccagattcatttcttttgcatgtggatgtataattgttccagcaccaattgttgaaaagactatcttgactccactgtattgtctttgcttcgtcaaagatcaattgattctatttatgtgggtctatttctgggctattttttctgttgatc

SEQ ID NO: 391617 - DNA, 1000 bp, Homo Sapiens; identical to SEQ ID NO: 282314

SEQ ID NO: 391618 - DNA, 389 bp, Homo Sapiens
gttaagctaagtaaaagatttgcattaaatatctagaccatttataaataagatacaatactaaaacattaattactgaacataaataattcaagtttatatacttttggcttcctgtttttacagagagactaaagatattttggcccgttaataaacatgtttttttctgccacactgaggaattgtattatgaggaaacacatccctctagatgttgggagatggtatattcatacattttctaacctactatagaatgctaatatatgacagtttataactgtctacttcctagttttctctggaaaataaaagattactaagtattaaaattataatcaatatatgtaaataaaactactggaaataatagaataactagaaac

SEQ ID NO: 391619 - DNA, 1000 bp, Homo Sapiens
acaaagcagcattctctcatccatttttcttcccctgttttctttcagactgtggcttcacctccggtaagtgagtctctcctttttctctctatctttcgccgtctctgctctcgaaccagggcatggagaatccacggacacaggggcgtgagggaggccagagccacctgtgcacaggtacctacatgctctgttcttgtcaacagagtcttaccagcaaggggtcctgtctgccaccatcctctatgagatcttgctagggaaggccaccttgtatgccgtgctggtcagtgccctcgtgctgatggccatggtaaggaggagggtgggatagggcagatgatgggggcaggggatggaacatcacacatgggcataaaggaatctcagagccagagcacagcctaatatatcctatcacctcaatgaaaccataatgaagccagactggggagaaaatgcagggaatatcacagaatgcatcatgggaggatggagacaaccagcgagccctactcaaattaggcctcagagcccgcctcccctgccctactcctgctgtgccatagcccctgaaaccctgaaaatgttctctcttccacaggtcaagagaaaggattccagaggctagctccaaaaccatcccaggtcattcttcatcctcacccaggattctcctgtacctgctcccaatctgtgttcctaaaagtgattctcactctgcttctcatctcctacttacatgaatacttctctcttttttctgtttccctgaagattgagctcccaacccccaagtacgaaataggctaaaccaataaaaaattgtgtgttgggcctggttgcatttcaggagtgtctgtggagttctgctcatcactgacctatcttctgatttagggaaagcagcattcgcttggacatctgaagtgacagccctctttctctccacccaatgctgctttctcctgttcatcctgatggaagtctcaacaca

SEQ ID NO: 391620 - DNA, 988 bp, Homo Sapiens
gatcgcaccactgcactccagcctgggcgacagagcgagactccgtctcaaaaaaaaaaaaaaagagagtcaggcaactccacagggccatgatgcctgttcctccccacacccctcgccctcctggctggcgccgccagattgaccaagtctccctcccgtcctcccccagaaaaaggtgcactgcctcaacatggacagcctctctttccagctgggcctctacctcagcccacacttcctccaggcctccaacaccatcgagccggggcagcagagctttgtgcaggtacctggcatgcctgtcacccctcggcctcccagctcctggaacttcctctccgcctttcttcccaccatgactccagaggagatgagactcccagagtcaggagggagacagcctgggtgcacagggagagggagagacagagaaggcattgctcagggacactgacaaggatgtggccctgtcctcctcctctgccccagtacaggtccatgtctttctttccactgtgaggactcaggggtgggaactcttaattctagccgatatttgaaggcagcaggtggggtggggtgaagagcagctgcccatgccgcgtggccctacctacccatgcaggtcagagtgtccccatccgtctccgagttcctgctccagttagacagctgccacctggacttggggcctgagggaggcaccgtggaactcatccagggccgggcggccaagggcaactgtgtgagcctgctgtccccaagccccgagggtgacccgcgcttcagcttcctcctccacttctacacagtacccatacccaaaaccggcaccctcagctgcacggtagccctgcgtcccaagaccgggtctcaagaccaggtgagtggggcctgggcggccagcttcaagtgggagcttccaggtctgtggtttgcatggaagggacatggcagcccacaggatgtggccagctggtgaggg

SEQ ID NO: 391621 - DNA, 1000 bp, Homo Sapiens; identical to SEQ ID NO: 282317

SEQ ID NO: 391622 - DNA, 1000 bp, Homo Sapiens
tttacagactgggggagggggtttttctttttatttttttttttaattttaaacgactgaagaaaacattaggagaggcaaaaatattgttaaaaactagactctaaacaccccttcctgctgtgaggatagtgggtgtgacaatggaaggtccacagaggtttttgttttttggttttttttttttttttaagaaaaaaagatgaaaaatgaaaaaaaaaatggttaggaggctgaaagaaaaaacacactgttattttggggcagtggggacacaggccccgtggacctgtcctgcctggcccccaaggccatacttaccccccagaaggcgggccatggggtaactggaagctgggggccagcagtttgcacaggaggcctgtctgagccccacccgccagacctgttgtgagcagctcctgtcactgaggctggctgaggtgtccggggtggggccaaagtagccccttggcttcgctgctttgggggacagttgcacaaattggacgagtggccccagctctctggctgccatcttgtgctggccgagtagacgggaggggccaagccgtgccaacctctctggctggcagggtggggcagcaggactctggttctggtgaggggcgtctcccactgctgccattttgggggacaccctgggtttgaacctgaaagccccagctctctgccttgccacgtgaatgtattctttgggccacaagcccccgcctcacccctgcctgagctgcctcacccctgtgagcggcgggggtggatgattgctccagaggctgcagagagaaggctgagctgtttctccagtgaagggggcaggaggaggggcctcaaaggcaaggagtgggtggctttgggcttagggttgcagtagaggggctgccgcccggggccccaacctgtagccagctcgtaagatgtggaccacccagctctgcacctgacccttccgctgaccaaatgggagaggagcaggtgg

SEQ ID NO: 391623 - DNA, 1000 bp, Homo Sapiens; identical to SEQ ID NO: 282318

SEQ ID NO: 391624 - DNA, 1000 bp, Homo Sapiens
  misc_feature (416)..(416): n is a, c, g, or t
  misc_feature (492)..(492): n is a, c, g, or t
  misc_feature (561)..(561): n is a, c, g, or t
  misc_feature (692)..(692): n is a, c, g, or t
  misc_feature (786)..(786): n is a, c, g, or t
ctctacctacaaaatggtgctacaactgtaccttcatttgatatcaaactaatttgagatttcaaccggttagaaaataaagcaactcattttggagatccaaataaaattctatgacaatatatggaatattgaagaacataaagctgtgttttaagggatgttaaatactaaacgaaactcaacccagagcagcataatgctgagttagcaaatttaaatccaaggcagaaaatgcaagcctaggagtttgttttaatagtattactaatatggtgataattcattgaggtgggaaaaggctttaaacataacagaagacccagaagttccaaggaaaaatctgaaaaatttcagtacataaaaataaaaagcttttttatggcaaagcttaaaaaagaatccttaaatgacanactgagataaaatacttctatcataagtgattcacgttccagtaagagttttaccctgccagggaagctgaggcangagaatcgcttgaaccaaggagttgcaggttgcagtgagccgagatcgctccactgcactccagcctgnggatagagtgagactctgtctaaaaaaaaaaacaaaacaaaacaagaaaaaacttatactcccttaggaaaatgcctaagacaagcaattcacaataaacaaaatgcagatgttcaataagcaagagaaanagtatttagcccttcctgcagtagcttgattttatgggggaaaaaaaaaagtactagccttgtttataattaaatactgtcaagaccgcttacnggtgctcacgcctataatcccagcactttgggaggctgaggcaagcagatttgcttatgccaggagttgacaacagctttggcaaatggcacaacccgtgtcaacaaataattaaccgggtgcaatgactcctggccatattccaacctacgggtttggagctttcacataatttctttattcagggaggttttagtgccattagcattatagt

SEQ ID NO: 391625 - DNA, 1000 bp, Homo Sapiens
ggtgggggtatggctctgcctccttcctgtcctggcccttcacccatcccctgtccctgcggccaggtcgaggtgattgggggagcagacaagtaccactccgtgtgtcggctctgctacttcaagaaggcctcaggccagcctgccgggccggacaacaaagagaactgcccagtgccaggaaagccaggggaagccgtggctgccaggaagctctttgccccacagcagattctgcaatgcagccctgccaactgagggacctgcaagggccgcccgctcccttcctgccactgccgcctactggacgctgccctgcatgctgcccagccactccaggaggaagtcgggaggcgtggagggtgaccacaccttggccttctgggaactctcctttgtgtggctgccccacctgccgcatgctccctcctctcctacccactggtctgcttaaagcttccctctcagctgctgggacgatcgcccaggctggagctggccccgcttggtggcctgggatctggcacactccctctccttggggtgagggacagagccccacgctgttgacatcagcctgcttcttcccctctgcggctttcactgctgagtttctgttctccctgggaagcctgtgccagcacctttgagccttggcccacactgaggcttaggcctctctgcctgggatgggctcccaccctcccctgaggatggcctggattcacgccctcttgtttccttttgggctcaaagcccttcctacctctggtgatggtttccacaggaacaacagcatctttcaccaagatgggtggcaccaaccttgctgggacttggatcccaggggcttatctcttcaagtgtggagagggcagggtccacgcctctgctgtagcttatgaaattaactaattgaaaattcactggttggtggacgcacatttctctttcacctgggtttccctgggtctcatggacagctccaacttgatttggg

SEQ ID NO: 391626 - DNA, 92 bp, Homo Sapiens
ccttcgatagctcagctggtagagcggaggactgtagactgcggaaacgtttgtggacatccttaggtcgtggttcaattccggctcgaagg

SEQ ID NO: 391627 - DNA, 1000 bp, Homo Sapiens; identical to SEQ ID NO: 114884

SEQ ID NO: 391628 - DNA, 1000 bp, Homo Sapiens
tcttctcgtccaggcctcaaccaaacgctcacagggtttcttttttcttttcttttctttctttttttttttctggggatggagtcttgctctgtcccccaggctggagtgcaatggcatgatctcggctcactgcaacctctgtctcccgagttcaagcgattctcctgccttagcctccccagtagctgggattacaggcacccaccaccatgcatggctaatttttgtatttttagtagagatggggttttgccacattggccaggctggtctcgaactcctgacctcaggtgatcctccagccttggcctcccaaagtgctgtgattataagtgtgagccactgcgcccagcctgttcacagggtttctaacagctcaaggccatatccctaggatgaccctgggcccacttaaagtgcccacctgagaaaactcaaggctgccaaaaagatttactgtttttttcagccaacacctgaagacaatatagagtctctgtctcccgctctctgaggaaggacaggatcctacctcagtaactgccagcctcagccacaggtgacctagttgcatttacacagtctgcatttttcacttccctaactctgctaagcttctgctttcccatccctatgccctctctgtctcttaaaacacctgttcccctctgcacaaatcaaagaatcattcagttcttgcggaactcttttccctactgcaatagttattgctgattaaaatctggcctcaccactttaatcagtgtccagctttgtttatcgttgatattcagaataatttatgacaagcataataaataaacacaaaaacatgaaaggctactgactaagccattataaacaagatctaattagaaatttggagaatggaaatgagaatgatggaaatatagagctcaatagacgggctgatggtagagtagaggggcagtgagtcagaaggccatgtgtttcttcaaaataagacccattgatc

SEQ ID NO: 391629 - DNA, 1000 bp, Homo Sapiens; identical to SEQ ID NO: 195530

SEQ ID NO: 391630 - DNA, 1000 bp, Homo Sapiens
cccacactcagcactgggggaccacgcggcccggcccacacttggcaccggggtcagacttcctccaaatgaagttctgctgctttaacagggagatttgggtccaagctgccccacatacggacgctggagcatgaggcggctgtaggcagggtgggcagggagccgggcgggcggtgctcacagaaccagcacagtggccccgagggctccgggctgaacagatgcagcagcaattgttcaggaggggaggagcaggagaattcatgagacagagatggagacggagacagagacagagacatggagagagacagagacagggagacagagacgcagagacatagagacatagagacagaggcagagagggaaacagacgaagacagagagggcgacagagacagaggcagagagggaaacagacgaagacagagagggcgacagagacagagagggaaacagacacagaggcagagagggagacaaagagacaggtggagagggagacagagagacagaggcagagacaaagagacagagacagagagggagacagagagacagagacagagagggagacagagagacaggggcagagacaagcagagagggagacacagacagagacagagagggagacagagagacagaggcggagatggagacagagacagagagacagagacagagagggagacagagacaaagagggagacagagacagagactgagagggagacagagagatggagcatagagggagacagagacagaggcagagagagagacagaggcagagaggaagacagaggcagagagggaggcagagacagagagggagataggcagagagagattgagagggagggagacagagagagagactaggagcagggggaagagggagagagagagacagagaaaagaaagagacaggccgggcacggtggctcacgcctgtaatcccagcactttgggaggctgaggcgggcggatc

SEQ ID NO: 391631 - DNA, 1000 bp, Homo Sapiens
tatgttagaggcagttcacacaatccatcaacatggcattgttcacagtgatcttaaaccagctaactttctgatagttgatggaatgctaaagctaattgattttgggattgcaaaccaaatgcaaccagatacaacaagtgttgttaaagattctcaggttggcacagttaattatatgccaccagaagcaatcaaagatatgtcttcctccagagagaatgggaaatctaagtcaaagataagccccaaaagtgatgtttggtccttaggatgtattttgtactatatgacttacgggaaaacaccatttcagcagataattaatcagatttctaaattacatgccataattgatcctaatcatgaaattgaatttcccgatattccagagaaagatcttcaagatgtgttaaagtgttgtttaaaaagggacccaaaacagaggatatccattcctgagctcctggctcatccatatgttcaaattcaaactcatccagttaaccaaatggccaagggaaccactgaagaaatgaaatatgttctgggccaacttgttggtctgaattctcctaactccattttgaaagctgctaaaactttatatgaacactatagtggtggtgaaagtcataattcttcatcctccaagacttttgaaaaaaaaaggggaaaaaaatgatttgcagttattcgtaatgtcagataggaggtataaaatatattggactgttatactcttgaatccctgtggaaatctacatttgaagacaacatcactctgaagtgttatcagcaaaaaaaattcagtgagattatctttaaaagaaaactgtaaaaatagcaaccacttatggcactgtatatattgtagacttgttttctctgttttatgctcttgtgtaatctacttgacatcattttactcttggaatagtgggtggatagcaagtatattctaaaaaactttgtaaataaagttttgtggctaaaatga

SEQ ID NO: 391632 - DNA, 1000 bp, Homo Sapiens; identical to SEQ ID NO: 282323

SEQ ID NO: 391633 - DNA, 1000 bp, Homo Sapiens
tctttatttaaggtagacctttgcagccactcagaactgtttctatcaaggatcacgttttcctggaatgttacctggatgaccaaagccctctcttccaaagagctcaagcatttagagggccttgcttccatgacatctgtcccttggaatgccatcggaatgcctctcctgccagtgacagtgacaagaaggaagcggactgacacatggtaggaaaatagctcgttcaacagtaatcacacctgctaatcctaagagggtgacttctagtttcagataaagtagaagttgtctgtacttcttccctagcaaactgagggagtggtactgacttctgtctctgtctggggcccaggctggatgtgagttgacctttgattttgaatgaccacagtcacggttgaagcattcaggtctgttatggctgcaagagtcccagtgtaagaaacaaatagggccaggtgtggtggctcacgcctgtgatgctagcgctttgagaggctgaggcaggaggatcacttgagcccaaaagtttgagaccagcctaggcaacatagtgagatccaatctctataaaaaataaatagccaggcatggtggtgtgcacctgtgtctcagctacccaggaggctgcagtgggaagatcgcttgagcccaggaggtcgaggctgcagtgaactgcactccagcctgggtggcagtgtaagactctgtctcttagaaaaggaaaaaaaaaaaaaaaaaaaaacataaataggttcaaataactaagaagtccaagggcttcaagcacaattgcacctaggagcccaggcagtgccctcagaggctggggacccctctgttttctgtcacgttgctctgctctcagcagtggcaaaataattaagagcagctcctgccccttttccagcccctcagcaatcctagaagagcctactcctctctcttccagctccacacaaacatcagaacagggccttgtgggatcctcgag

SEQ ID NO: 391634 - DNA, 1000 bp, Homo Sapiens; identical to SEQ ID NO: 282324

SEQ ID NO: 391635 - DNA, 1000 bp, Homo Sapiens; identical to SEQ ID NO: 114885

SEQ ID NO: 391636 - DNA, 1000 bp, Homo Sapiens; identical to SEQ ID NO: 195348

SEQ ID NO: 391637 - DNA, 1000 bp, Homo Sapiens
ttcccccttctgcctaatcttatcttcttatctccccgactggccgccaaactgtcaacctgaaagtttatattgtttccaccgtaatcccaaaaccttaaacttttgtctttccaggaacggtaatggtaggagagagagagcagggattggggaatgctgcccccccaaagtttctggtgctacgcttagcaccccaaccatcctcctttgtcctcagtggatctaaagtttgatacccaggaggggagcgcttcaccgtctgtacactttgctggttaatcaacgtccaggcaagagagagcctctcgggtcgccagaaagataactgtcttggaaagtgaacgggaaagacacttggaatgagatatctgacacctgggtgcctctttgtctttgcaggaagtggttacctggaaggaaaggagctgcagaacttgatccaggagctccagcaggcgcgaaagaaggctggattggtaggttcaagtttgcgaaaaagaaaaaaagacttttaacccccaaattaaaacattcttgtgttttcacaaaaagccagtagcgtaaagcgctttctgggtaatgtaaacgtttattgactgcgaaaggcaagaaaaaacacttttccaactcgaatacagagaaaggggaaaggggaaagagactgagaaagagagagggggagagagagagagagagaagggagggacagagaagggagggaagaagggagaaagggagacagacagagagagacagattttctaaagggaaaaaccttgctatctgaaactggagctttaaatatatatatattctatactagtacttgcattaataggtcttaaaagggaactgtgggtgcatgagattctttagcggatcaccacctctaccactgagtttgattaggtaatttttaaattctcttttactgtgtgagaaataagggggtggaaatgcatttctgccccttggtggtcaagaaacagatctgcag

SEQ ID NO: 391638 - DNA, 1000 bp, Homo Sapiens
catgtccccctacccctgcctgtgatggagtgttctgaggggctttggcatttgctggaagcacagggagttccaaatgagagggagcttctgtggcttgagagcctctggggccttggctgccagagcacgaggcaggccaggacctggagagcccagaccctgtctccaggaggccaggaggccagatgggggccttgcctgaaagactggtccccttgatcgctggaggcatgtgggtggcaaccagggctgggcagggcttagggtgtgtgggccaaacccccctggggttggcaaagccgcctgtcaggcctcctggtgggggcccctggacacagggagcagaccctctgcctcatggggtaggagtggctgcctcctgtgttctctggatttcttctcccaacaactacaaccctggacttgcctccccaggcctcttgcctgtaaatagaagcccgcaaactgtacagatttacagaggcatcgagactgggccctgggagttgccatctgagagccgatggccccagcatcccccaggtgcctgcctggcaccacagtgaccctggcctcagcgtggcaaatgcatgtaaatatttttcgtaggcagcgtggctccagagagccccctgaagacagtgtccctccctcctgtgagtcctttctcctgtacagaacctgcctggggtgggtgggggtctgccattccctcccccaggccttccctgccccttctctcccctgtaacctgtttattaaccatacctgtcctgagttcatggccaaaaccttaaataagaaaaacaaaagaaaaagacagtggaaaaaagagaccaaggcgcctgccccactgcgggtactctcctgttccagccttgtgaaggaactggttttgtttttgtttttgttttttttttttttgtttgtttgtttgttttttaacacttcctgtgctgtgcccatttataagaggaaataaaattaagctgaaatg

SEQ ID NO: 391639 - DNA, 1000 bp, Homo Sapiens; identical to SEQ ID NO: 282329

SEQ ID NO: 391640 - DNA, 1000 bp, Homo Sapiens; identical to SEQ ID NO: 114886

SEQ ID NO: 391641 - DNA, 1000 bp, Homo Sapiens
cttacctccctgtgtgtgtgcacctgagtgtgtgggggggcgtacgtttctgtagcttaatttaggttccacatacacttcagtggttaaacctgagctagactcaaatagtttgtttccattaagaaaatgaatcttttatgtggaccaaggtcaggttagttaatttgtttgcttttattggaataacttttcccattccaattcatcacttaattttaagtggttctactaaaatacccattaaagtcctttacatttctcacagactagggctatgacagattcataagacgtttcttttttcctcaaggcacaaaaggtagcttttctggtcatcaacctagtcttccttgttcctaatttcacaacagtggggcaacattttatataataccaatatgaactctaattgcaaagagactaaatgaaatcttcacacgaagcaagattaattaaaatataaaatgtgcttgactgtggtaaaacatttcttttaaaaaaaatagtatgacttttttttttttttttgctaaatctttcttttttgtacacctcaccctcttcttcactgatgcattttccagcaactggaagttcactctggctaggaaagtaactaaatgtgatgttatcattctaattagtgattacaaaagatcaattaatgttataattaaaaacagtgtctagatctgttgtttgtagtgaataaatgtgacaattactttgttcattgacatagatgtgttgaatttcctccctagattttaaggggatgcattttagtgctgatgtgtgcatttaactgtggacagtaggaacaaggcaagcatattaggggaagagtagggcccctaatgtctaagctacagacatattttagcatgcttgacacctttccttggtatatgatgctatatcagcaacttgtactcattggatctggagcctctagcttttaatattttatcactaaatgcttaagtgtttatgttgc

SEQ ID NO: 391642 - DNA, 1000 bp, Homo Sapiens; identical to SEQ ID NO: 282331

SEQ ID NO: 391643 - DNA, 1000 bp, Homo Sapiens
cctagcattcaagtgctacccagcagaaatataatgccagttctgcatctaattttaaatttcctaatagccatgctaaaaaagtaaaaagaaacagttgaaattaattttaataatgtatctcgcccaatatatccaaactgttatttcaacatgcaatttttgaaaaatgtgagatgttttacattctctttttcacacttagtcttcaatatctggtgtgtattttacacttctagcacctctcaattcacaccagccacatttaaaatgctcagtagccgcatgcagcttgtgcagccttacttaggtccagtgtcagcctggggccgtgctggggagctgagctgtgtccatgggggccctggtgagcctccagtgctgtgctgagggtaagggcacccagcgcaagccccagcgcagctgcctgtccagccctgcctcagctccttgcacagaatgagcttgaagtgctcccctctgctcggttctagttctgcctctgacagttttgctctttggttcacaaggcttcctaaactcaggattgctttgtgggtctgttctttgggatgagaggccagggcaggtgcaagctatgccttcactcctttgtccctgccttcctccttcctgtaccccagctacagccccgttgggaagaatgtgtcgttagtcacaaagcattgcagatgtgtctaagaaatgccacgctggggccgggcgtggtgctcacacctgtaatcccagcacttcgagaggctgaggcaggcggattgcctgagctcaggatttcaagaccaccctgggtaacatggtgaaaccctgtctctactaaaaatacaaaaaaattagctgggtgtggtggtacacgcctatagtcccagctacatgggaggctgagcaggagaattgcttgaacctgggaggcagaggttgcagtgagccgagatcacaccactgcactctagcctgggtgactgagcaagactctgtctcc

SEQ ID NO: 391644 - DNA, 1000 bp, Homo Sapiens; identical to SEQ ID NO: 114888

SEQ ID NO: 391645 - DNA, 1000 bp, Homo Sapiens; identical to SEQ ID NO: 282332

SEQ ID NO: 391646 - DNA, 1000 bp, Homo Sapiens
aagcctcgtcatgccgggcagcgcccatccctgcctacctgtcccttttgctgtctcggagggagcctgtgggagggaggtcgagatcccagcctctgtgagggcaccgttggggggggggattgggcagggaaaagagtggcgcccacagagcaggacacggagaagccttgagctggaaataaggaggccaatatctaggcctgacctgtcattaacgagccatgaggcatgaggtctttttttttttttttccaagagatcctcccacctcagcctcctgagtggctgggaccacaggtgcgtgccaccatgcctggttaatttttaatttttttagggaagaggtcacaccatgttgttcaggctggtcttgaattcttgagctcgggtgatcctcctacctcggcctcccggggtgctgggattactggcgtgagccactgcagccagtgagccatgaggtcttgagcaaggccgcccctctgttagaggtccccttctctatgcctcatggttccacagcctggggtaccccagctccaaatgacacatctccctgcgtttgctgtgcacgtgcctgggtgtgggtgatgctgatttctaatgcatttcttcattcattcagttccacatttatggggcatctcttctagagctagctctgtgccaaaaaggaggtataaagataaatagagcaggcgcggtggctcacggctgtaatctcagcgctttgggatgccgagatgggaggatcgcctggggtcgggagtttgaggccagcctggccaacatggagacatgtttaatagagacatggccaacatgtctctacaaaaaatacaaaaaaaaaatagccagatgtggtggcacgtgtgatcccaggtacttgggaggctgaggcaggagaatcgcttgaacctgggagacggagattgcagtgagctgagatcgccccactgcactgcagcctgggcaacaagaatgaaaactccacctc

SEQ ID NO: 391647 - DNA, 1000 bp, Homo Sapiens; identical to SEQ ID NO: 195003

SEQ ID NO: 391648 - DNA, 1000 bp, Homo Sapiens
ttttgccctcattattaaaaccattagtttatttagtgacttcacagtcacaagttttttatatttcctgggcaagcaaaacctcagtagcataaacttagttttgtcactgccccggggatcccacttcatatgggccaataaatttccaggcaactacaagtattatgtcatatgtgcaaaaatgtgatgtcttttttgatccaaacctttgccagacattcaagagaggttaggatgtagtaagtgtttgtaaaagactggagctctcagtaggccaagtatagcgtagaaactggcagtggtgaaaacctggctgcaggtacaagagaacacacgtatatggattgtagttacagctttagtgtgagcgaattaatcttcattgtacgagggacccaatgtaattcttcagacgtttttgtggaaaatcttcgtgaaggagacttagatcattgttgtgccgtagaatttctctgataatggaaatgttctctctttgttgtgcaatatggcaatcagtagccgttttcatgtatcaaacacttgaaatgcgttgaatgtgactgaggaattgaatttcaaatttaattttaatgatgttttaaatttaaatagctacatgtggttagtgactaccttttggatagcacagctctagatggctaggtttggcatgtctactcgtgagataatgtctgtgaaaaactgtggcatgcagccgggtgcagtggctgacgcctgtaatcccagcactttcggaggcctaagcaggcggaacacgaggtcgggagttcgagaccagcctggccgatatagtgaaaccctgtctctgctggggatacaaaaattagccgggcatgatggcacatgcccgtagtcccagctactcgggaggctggggcgggagagccgcttgaacccaggaggtgggaggttgtggtgagctgggatcgcactactgcactccagcctgggtgactgggcgagcctccatgtc

SEQ ID NO: 391649 - DNA, 1000 bp, Homo Sapiens
catttctcatcttctgtaagagcctgcagcccctgtcagatgccagccattccccaggtcttgctgacactgtcattaggattcctatgagggccagtggggagacagctcagtctcggccctgcttccgaccccaccaccacccccaaatgcatactgctggcctttcctgggtttaattttattttgcagtggtagaggttgttttgctaaaattatttcaaaatctgccttgtggaaaaacgcccacgtcagggtgaccatctgtggtaaccgagaattccttggaggcagcgtcttcaccgcctggctaagcggatggcacaagctgccagccagacctctgtctgtccctgcccagaggccccagctgccccttcctccaggcacctccctgatctctggagtccaggttttgttcccaaggtcctacctttgtatctaaatgctgtgtcctctccccggacgatctcctccaggcactggctctcaggggccagctccccatgggcgatgatgtctctgatacaggaacttatgggtaccttgcaagtttgcacagaaagtggagcccgtctgttccttctggggtgtgcgagcggggcctcggggagcaggtgcaggacagggcacaggaggaacaggcacggctggtggtgtgcagtgaacagcagtggtcacaccaggtggtggctcccgtgggacttttgaggccggcccagccctgagcaggtggggtctgcagaggcctcgtgggttggaggagacttattcagagggagttttggtcttgctagaaattgcatgagatgaaagatgatattttaattctatcattgaggcatagtctttccaacacaccccctgaggtgtgagggaggctgtccctatatgatgtggtccccgctccttcaggctggggctcctggccagttcatctttcgtcctgtgtctgactttctctatcatttctaaaatgactaagacaatttattttgtt

SEQ ID NO: 391650 - DNA, 1000 bp, Homo Sapiens; identical to SEQ ID NO: 214931

SEQ ID NO: 391651 - DNA, 1000 bp, Homo Sapiens; identical to SEQ ID NO: 282334

SEQ ID NO: 391652 - DNA, 1000 bp, Homo Sapiens
atttagaaggaaatcagtacttggcaacctggtatttttagctgccaggccaaaactccagacataaaccccttccctttaattgaatgatgtttatatataaaggaatagatctccccaagaaagaaccccagaacactggttccattccagtgtgggggctgcttgggcagcagtgacacctgtgcattagatgcaatagacacttcaattcctgcaaaaatgtcggccaactaagtgctcctttaccaactgcggaggcccagactcacaccatggtcccacagactcaaggtttagaatctatgtgagtctattttggttaacacacaggctcctccttccaatcattcacacacacacacacacacacacacacacacatgcacacacacacatgcatgcacacatacacaggtgcacatgcacaaacacacacatctaatgattccaacctcgaatactccccaggcccatggggatgcccaagtaccctaagcaaatcactgtgacactgagggggtcattaactggggctccgagcagctgaaacccaccctggtggtctctagattgttgttctgagaaatcataaacaccaaatcctccaatccctttgaatttgagtttgtcattttaacctttaacagccttttcaggtaaaaataacaaagaccaatttattgactttgtagctacaatgagcttgaaaaagcgcttacttaaaagaaagactggaaggaagaaaaaaaaaagaaaatggagtacatactcctcagacgatgcacactttaattagctaaaataaaaataaaaatgtacagaggaagggagaggaaaaaccaacttctctgatcctttcatggcactgtagctcaaagactggaatctctgcttgttaaccattgttaactagtatttttagtcctggttgcttttagcctctgtatagttccttttttaaacacattttctatacgttaataaaagatcctgaaag

SEQ ID NO: 391653 - DNA, 1000 bp, Homo Sapiens
ggttgacatggtcttcccagcatgtactcagcaggtgtggggtggagcacatgtaggcacagaaaacaggaatgcagacaacatgcatcccctgcgtccatgagttacatgtgttctcttagtgtccacgttgttttgatgttattcatggaataccttctgtgctaaatacagtcacttaattccttggccttacagtgtctcaaagttctttacaaatctacttaaagccatcctggctgaggcaggagaatcgcttgaacctgggaggcggaggttgcggtgggctgggattgcaccattgcactgcagcctgagcagcaagagcgaaactccatctcaaaaaaaagatgaaaaaatcagcccaataggtaagagtccctctgggactgggggtggtaatggctaaataaaagtcttcacttctgaaatttggtggttctagagacaaaacttggttagatagcatataggatttgcattctgagcctaacgccatatataaaaatgataggaaatgcctgggacttggatatgtgacagtgtctaagggggcagtgcacaggcagggagagaccttgtctcagtctcgtgctaagcaggtattgaatgcttggtaaatggcaatcacgtttagtcctttaaattctctgaaaagttcttaatccccttcgataatatacaggaggaattacgtaaattgaggtcttagtagtggctgaatttaaatttaactccaaagccccattttattctgctaagttttgttgcgtactgaaaggtgttagaagaaaggtttacggtgttaaactaggaagtgaatggcaaaaagggtaaaaagtcaattttgttttttcccaggtctagcaagagaatattaaatcttaagatttctttcaattaaaaacataaggcacttgagggaatcaagtcaatatagaacctctataaatgatctcccaaagtaactcatcctcctggagttactgggaaagcattt

SEQ ID NO: 391654 - DNA, 1000 bp, Homo Sapiens
aggtcactccaacctggacaacagagttaagaccctgtctcaccaaaaaaaaaaaaaaaaaaatcacatccttctccagccttggaaatgaataccaaattgactgccaccactcctagactggagatctggggatccagggtgactggttttcaactctgaggcagcactcagacagcctttgttgaattcattaattacgaatttctctcattcatcccccaaggcataacccccatttctaggcatctaaggaggaaaaacacacacacaggcatgggctcacctcttctgctggaagctcctctgtcctccagctgcttccactgggcgctcaggtcttgtgcggaaggggcacatgagggcgttttattggtgagattcccacctcccactgggtcatgcccttccacaccctctaacctaatgaggctttgatttaattataacagggaattaggtttttactggtgatatatctccagttaattgtaactttagtaaatccttcatcctgacagtgtatttttctttcatatgaagataagattaaattgcctttatattaaattaggcttaatgtactaacttcaaaagcttattttagagatgtttccatcagttgtcagtaaagataattcctgtaatatgttgtaggcttcaagctttgcttggaaacctgaagtattaagtatgattggatttgcaattttacaaaatggtttaaattcatatacatcagactcaaaggtaataggggcatgcattccattgaggaaattctagggaatttttatttattttcattggtttatttctggttttgaaaaaatttcataattcataggaaaaaattggataattactattttgacaaatgaccattaagcttcttggaccttgagtacttcacacagtgttaagataaaagtcacaatttaaaaaaaaaagatgattttcttgtgaaacttgtgttctcaaataaaaattgttacccgtg

SEQ ID NO: 391655 - DNA, 1000 bp, Homo Sapiens
ttattgttgttttggttttttatttgtatgagttccttacatattttggatattaaccacttaacagtggtttgcaaatattttctcccaacctgtaagttttcttattgttttctgtttataagttttttagtttgatgtagtccaacttttttatatttgcctttgtggcgcactttttgtgtcagatccaaaaaaatactgtcaagaccaatataaaggaggttgaccacattttgttttcttttaggatttttaagaattcatgtgttttatttgtccttattttgagttaattttgggatatgatgtaagaaaaatcatctaattttattcttttgcttgtggatacccaattttcttagctccaaataataaagggatttcacttactgcattgtgcattttcaatatccttgttcaagattaattgattttataggcataggttttttttttctaggatctctactttgttctgtaggtttccgtgtccatttttatgcacatgctgtcttgtttttattactatagtattgaatataatttaaaatcagaaactataggggcgggtgcggtggctcacacacctgtaatcccagtactttgggaggccgaggtgggtggatcatgaggtcaggagttcgagaccagcctgaccaacatggtgaaatctcgtctctactaaaaatataaaaattagccgggcatggtggcgagcacctgtaatcccagctactcaggagactgatgtaggagaatcacttgaacctgggaggcagaggttgcagtgagctgagatcgtaccattgcactccaacctgggtgacagagtgagactccatctcaaaaaaaaaaaaaaaaaagatcagaaactataatatccttagctttcttcttcctcaagattgctttagctattcaaagtctgttgtaatttcacataaattttaagctttttgaattctttggatccactagtgtcgacctgcaggcgcgc

SEQ ID NO: 391656 - DNA, 1000 bp, Homo Sapiens; identical to SEQ ID NO: 282337

SEQ ID NO: 391657 - DNA, 1000 bp, Homo Sapiens
agcctgggaggcagaagttgcaatgagcagagatcgtgccactccgctccagtcttggtgacagaatgagactccatctcaaaaataaataaataaataaaataaatgaaatgaaattataagaaattaccactttttcatgtaagaagtgatcatttccattataagggaaggaatttaatcctacctgccattccaccaaagcttacctagtgctaaaggatgaggtgttagtaagaccaacatctcagaggcctctctgtgccaatagccttccttcctttcccttccaaaaacctcaagtgactagttcagaggcctgtctggaataatggcatcatctaatatcactggccttctggaacctgggcattttccagtgtgttccatactgtcaatattcccccagcttcctggactcctgtcacaagctggaaaagtgagaggatggacagggattaaccagagagctccctgctgaggaaaaaatctcccagatgctgaaagtgaggccatgtggcttggccaaataaaacctggctccgtggtgcctctgtcttagcagccaccctgctgatgaactgccaccttggacttgggaccagaaagaggtgggttgggtgaagaggcaccacacagagtgatgtaacagcaagatcaggtcacccacaggccctggcagtcacagtcataaattagctaactgtacacaagctggggacactccctttggaaaccaaaaaaaaaaaaaaaaaaaagagacctttatgcaaaaacaactctctggatggcatggggtgagtataaatacttcttggctgccagtgtgttcataactttgtagcgagtcgaaaactgaggctccggccgcagagaactcagcctcattcctgctttaaaatctctcggccacctttgatgaggggactgggcagttctagacagtcccgaagttctcaaggcacaggtctcttcctggtttgactgtccttaccccggg

SEQ ID NO: 391658 - DNA, 938 bp, Homo Sapiens
gttaagatgaccatcttgtaatttttattcaaagtttttctttcatttaaaaagttactgtgttctaaggtactctaattgatatgattatgatgactgatacttcagtctttaagtttaattgcaggtcgtggctacattgctacttttcagctttgctttcttagaaaatcaaatctgacttacataaggttctaaatagctaccagttactcttcccccatcccccagtctctcacatcgtctgatttgtcaactttagtggttggaagaggcccatcaaaatgctggctgtatgtggttctctcgcctctcagtactttcagccacatttgaatgcaaagaatgcagacagtcagcagtatttttaaatgtgaaattttcaacagagtgttctacaggttccagttgttggcgtacctcctttccctctccaaatctcactgaaatgatagatggagggaacaaagattttcaaaagaagaagaagagatcaatagtagtgctggaaaggaggggaatgtaagagtggatcagaaattatggagaatttctggaatatgtaaagttgatgaagttgaaccaatggaaactagtctcagcaaatccaacccgagacaggtgtaaagaggacttaagcagaggtacacactgttcttctcaacaggcttaggcggaactccaagctcatggtcatctggtgtgagggagcccaagcaggctatgcagcaatcatcagggttgttataaaacaagatggaacagcggggccagtaaacctccagtgcagtagttctcaacttttcctgaatttagaattacctagggagcttttaaaaattctgacacccagaccagttaaataagaatctcacatctcagaagatggaactccaggcacaagtatttttttttaaactcccagattattctagttt

SEQ ID NO: 391659 - DNA, 1000 bp, Homo Sapiens
ctcagcttttgtggagcgagtgcggaaacggggcttcgaggtggtatatatgaccgagcccattgacgagtactgtgtgcagcagctcaaggaatttgatgggaagagcctggtctcagttaccaaggagggtctggagctgcctgaggatgaggaggagaagaagaagatggaagagagcaaggcaaagtttgagaacctctgcaagctcatgaaagaaatcttagataagaaggttgagaaggtgacaatctccaatagacttgtgtcttcaccttgctgcattgtgaccagcacctacggctggacagccaatatggagcggatcatgaaagcccaggcacttcgggacaactccaccatgggctatatgatggccaaaaagcacctggagatcaaccctgaccaccccattgtggagacgctgcggcagaaggctgaggccgacaagaatgataaggcagttaaggacctggtggtgctgctgtttgaaaccgccctgctatcttctggcttttcccttgaggatccccagacccactccaaccgcatctatcgcatgatcaagctaggtctaggtattgatgaagatgaagtggcagcagaggaacccaatgctgcagttcctgatgagatcccccctctcgagggcgatgaggatgcgtctcgcatggaagaagtcgattaggttaggagttcatagttggaaaacttgtgcccttgtatagtgtccccatgggctcccactgcagcctcgagtgcccctgtcccacctggctccccctgctggtgtctagtgtttttttccctctcctgtccttgtgttgaaggcagtaaactaagggtgtcaagccccattccctctctactcttgacagcaggattggatgttgtgtattgtggtttattttattttcttcattttgttctgaaattaaagtatgcaaaataaagaatatgccgtttttatacgaaaaaaaaaaaaaaaaaaaaaaaaaaa

SEQ ID NO: 391660 - DNA, 1000 bp, Homo Sapiens; identical to SEQ ID NO: 282339

SEQ ID NO: 391661 - DNA, 1000 bp, Homo Sapiens; identical to SEQ ID NO: 282340

SEQ ID NO: 391662 - DNA, 1000 bp, Homo Sapiens; identical to SEQ ID NO: 114891

SEQ ID NO: 391663 - DNA, 1000 bp, Homo Sapiens
aagctagtagagctggaggtggagtgcatggaagagcctaatcaccttgatgtggacctggagacccggatccctgtcatcaataaggtggatggtactttgctggtgggtgaggatgcccctcgccgggctgaactggagatgtggttacagggtcatccagagtttgctgttgatccccgatttctagcgtatatggaggatcgcagaaaacagaagtggcaaagatgtaaaaaaaataataaggcagaattgaactgtttgggaatggaaccagtacagacagctaactctagaaatgggaaaaagggtcatcacactgaaacggtgttcaaccgggttttgccagggcctattgcaccagagagcagcaagaagcgggcccgtaggatgcgaccagacctttctaagatgatggccctcatgcagggtggaagcactgggtctctatctctgcataacacgttccaacacagcagtagtggcctacagtctgtgtcatctttgggtcacagcagtgccacttctgcatctttgccttttatgccatttgtgatgggtggtgcaccatcatcccctcatgtagactccagcaccatgcttcatcaccaccaccaccacccccacccccaccatcaccaccatcaccatccaggcttgagagcccctggctacccctcttcaccagtgactaccgcctctggtactaccttgcggttgccaccactgcaacctgaggaggatgacgatgaggatgaagaagatgatgatgacttatctcagggctatgatagctcagaaagggacttctcactcattgatgatcctatgatgccagctaactcagactccagtgaagatgctgatgactgaagccccagcatgggccccattgcttgggcggctgctgtattttcatttactctggcccttggactatggaaacgtgggaggggcaggggagatgtggggaagtccaggactccaggaggtgaaaagg

SEQ ID NO: 391664 - DNA, 1000 bp, Homo Sapiens; identical to SEQ ID NO: 282342

SEQ ID NO: 391665 - DNA, 670 bp, Homo Sapiens
gttttgcaattgaaaaattaagttccaatagcttcctgctctgtaccttctcagtgggctcccaggaatccttgcaacaactgccagtatgtctcaggctgtttgagaaagctgccaaggatattaagcaccttgagaccaagccagcagatgatgagaggatgttcatctacagccgctgcaaacaagcgactgtgcatgacttaaatacagaatggcccaggatgttagacctcaaaggcaaggcaaagcaggatgctggaatgagctgaaagacactgccaaggaagatgctgtgaaagctgatatcaacaaagtagaagagcgaaataaaaaaatacagaatataagagattggatttggttgccagccatgcatttaacctaaactgatacaatgcctttttttcccttatactgtggatgatgtgaaatagtgaatataaacagtaaacccagtttctcaaggctgttcaggatacagttctaacagattaagggctaaaatgatcactaatcttctccaaatagtttttatcttagatcaattaaaaatgtatttgttactttaaaacaaaaattaaattcctttattttttctttaaaataattggccccaattacaaaataactttgtttactctcacgacatgttccaggatgattttgt

SEQ ID NO: 391666 - DNA, 1000 bp, Homo Sapiens
gtgaaaagagtattataacagggaaagaaagccgatgcaatagtaaaaactgttgagaagggaattatacaaagagtgagacatggcatcaagaatgaattcaaaaagagcagaaaaatataggcataaaaagagataatgtacagaaaaaaagtcagtgatacaacaacacaaatttttacctgctagaatgtaagtaatttagagctggattttataaacatgaaattgtttttctaatacattcaaccaaaagtcagcacacatagttcagtcatctctcattacttacaataaaatattttctatttgttaggaaataatatcttattccctggatctattatttctttttattgattttctttctattctctaaacttaattgcttaatttttataactgattctctgtctctattccatcttattccagcatggattatttaaaacctgtattagttttggaaccactaaacatttgctcagaagtttgaattaccagagaagcaccctaactcttcaagaacttccaagcctaaggaatcactgatttcatgcattcatcctggagattttccttaaaaattagaaataacagatctcatgtttcacaaaatcaaaatgacaacttttggagtgggggaatgagaagtgggaaaaggatgatactgggggttctttgtcagtatgctgtatgtatgctgtatgtcagtgcagttgaatgactccttctgtgcgtcagaaatccaaagcagcagcagcagcaattagggaagatcgtcactttcactcaaggttcagaaatgggggaggagagcaggggggacaaaggaaaaggggaggagaaagcagggcaaagaggggagggatggaggtgaagatagggcacatcctgcaaagataatgtctgtacaatcaatgacatcatcctcctgcttatatatataggggaatggccagagcacctctcatagttcactcactttcaaagccagctg

SEQ ID NO: 391667 - DNA, 1000 bp, Homo Sapiens; identical to SEQ ID NO: 282343

SEQ ID NO: 391668 - DNA, 1000 bp, Homo Sapiens; identical to SEQ ID NO: 206219

SEQ ID NO: 391669 - DNA, 1000 bp, Homo Sapiens; identical to SEQ ID NO: 282347

SEQ ID NO: 391670 - DNA, 1000 bp, Homo Sapiens; identical to SEQ ID NO: 282349

SEQ ID NO: 391671 - DNA, 1000 bp, Homo Sapiens
cctcccttccccaacccctccacccaccaagtagcgagtcattcaatctgtacacctcctgggctgggaatcgcaattgcgaagttgggaggcggggtgacaacgtttgggaagggccagggcgaccggcagtgtgcacagggactgtgtcgggcttggacctcacctgatcctctctcttagcgcgacccttcctctgctccctgtctcctctttctgccacttgtgcgctgcttccgcgcactcccggctccctagcggcaggaggaggaaggcgcacagcgggtggagagggtgcgccaaggagaggtaaccccttcgggagcccggggaatcccggccgccaccaggggccgtgccaccgccctcgcgggaccaaagcttccggcgtgtccccaactttgtggcgccctcaggccgcggcgactgggttagagatgccttccagcggcagagcgctgctggactcgccgctggacagcggctccctgacctccctggactctagtgtcttctgcagcgagggtgaaggggagcccttggcgctcggggactgcttcacggtcaacgtgggcggcagccgcttcgtgctctcgcagcaggcgctgtcctgcttcccgcacacgcgccttggcaagctggccgtggtggtggcttcctaccgccgccccggggccctggccgccgtgcccagccctctggagctttgcgacgatgccaaccccgtggacaacgagtacttcttcgaccgcagctcgcaggcgttccgatatgtcctgcactactaccgcaccggccgcctgcatgtcatggagcagctgtgcgcgctctccttcctgcaggagatccagtactggggcatcgatgagctcagcatcgattcctgctgcagggacaggtaccccggaggcacgcggcggctgggcggggaggcgggcgcggcagagaaagagaggaaggcacaggtagatttgaggctttacacaagcttcgctggagc

SEQ ID NO: 391672 - DNA, 1000 bp, Homo Sapiens
ggacaatcccagagcctccagaacctcctctcccaatagagccacacgagacaaccccagaacatcctgtgcccagcgggacaatcccagagcctcctctcccagtagagctacacgagacaaccccacaacatcctgtgcccagcgggacaatcccagagcctccagaacctcctctcccaatagagccacacgagacaaccccagaacatcctgcgcccagcgggacaatcccagagcctcctctcccaatagagctgcacgagacaaccccacaacatcctgtgcccagcgggacaatcccagagcctccagaacctcctctcccaatagagccacacgagacaaccccagaacatcctgtgcccagcgggacaatcccagagcctcctctcccaatagagctacacgagacaaccccacaacatcctgtgcccagcgggacaatcccagagcctccagaacctcctctcccaatagagccacacgagataaccccagaacatcctgtgcccagtgggacaatcccagagcctcctctcccaacagaaccacccaacaagacagccccagaacatcctgtgcccgacgggacgatcccagagcctcctctcctaacagaaccatccaacaagagaaccccagaacatcctgtgccctacgggacaatcccagagcctcctctcccagcagaaccatccaacaagagaaccccagaacatcctgtgcccaacgggacgatcccagagcctcctctcctaacagaaccacccaccacacacacacacacacacacacacacacacagacacacagacacatacgcacacacgtgcacacatgtacacacggatacacacacacacacacacacacacacactgcatatctgagcacgcccctcgcactgggtctcaccttgcaccttcttcaggattttatatgtgaagagatttttatatagatttttttcctttttttccaaaacactttatacttt

SEQ ID NO: 391673 - DNA, 1000 bp, Homo Sapiens
gaccccacatcctcagagtacatcaccctgctgagggacatccaggacaaggtcaccacactctacaaaggcagtcaactacatgacacattccgcttctgcctggtcaccaacttgacgatggactccgtgttggtcactgtcaaggcattgttctcctccaatttggaccccagcctggtggagcaagtctttctagataagaccctgaatgcctcattccattggctgggctccacctaccagttggtggacatccatgtgacagaaatggagtcatcagtttatcaaccaacaagcagctccagcacccagcacttctacctgaatttcaccatcaccaacctaccatattcccaggacaaagcccagccaggcaccaccaattaccagaggaacaaaaggaatattgaggatgcgctcaaccaactcttccgaaacagcagcatcaagagttatttttctgactgtcaagtttcaacattcaggtctgtccccaacaggcaccacaccggggtggactccctgtgtaacttctcgccactggctcggagagtagacagagttgccatctatgaggaatttctgcggatgacccggaatggtacccagctgcagaacttcaccctggacaggagcagtgtccttgtggatgggtattctcccaacagaaatgagcccttaactgggaattctgaccttcccttctgggctgtcatcctcatcggcttggcaggactcctgggactcatcacatgcctgatctgcggtgtcctggtgaccacccgccggcggaagaaggaaggagaatacaacgtccagcaacagtgcccaggctactaccagtcacacctagacctggaggatctgcaatgactggaacttgccggtgcctggggtgcctttcccccagccagggtccaaagaagcttggctggggcagaaataaaccatattggtcggaaaaaaaaaaaaaaaaaaaaaaaaaaaaaaaaaaaaa

SEQ ID NO: 391674 - DNA, 1000 bp, Homo Sapiens
actcgggaggctgagagaggagaatggtgtggacctgggaggcggagcttgcagtgagctgagatcgtgccactgcactccagccggggcaacagagtgagactccgtctcaaaaaaaaaaaaaaaaaaaagtgtgtgtttccaagaggctgttatggggcctcgggcacaccctcactgggtctggatcccagcctgtctaccaccaggcgtcccttctggtgaacagagctatgtgagaacttccaacagggacaccacggccgctcgtagcccagagcttgcagagctttgttcaaaggcaatggcccagggccgagcacggcggctcacacctgtaatcccagcacttgcagaggccaaggtgggtggatcacctgagatcaggagttcgagaccagtctggccaacatggcaaaaccctatctctactaaacctacaaaaattagctgggtgtggtggcacatgcttgtagtctcagctactcgggaggctgaggcaggagaatcgcttgaacccaggaggcagaggttgcggtgagctgagatcgcgccattgcactccagcctggtgacagagtgagactccatctcaaacaaacaaacaaacaaaaaagcagtggccatcatgatcggttgtgtcatctagtgggaggcaggggtgtgtctgcatgcgtgtctggggtgcattgtggggggattgcaggcgtattgagggcttaccaagtgcctggctcatctgagccctcaggaaaccacattgttggcagctacctcaccgtctcacaaccacccgctgaggttggaatgatcattaacagcatttaacagatggggaaactgaggcctagagaggcaaagtcactggcctaaggtcacatagctaaggagcacagtcaggatttaaatccaagcctgggagatcccaggacccacagtgggcaccacataaaggggctgtttggggtatggcagggactgccctggaacgttccggatc

SEQ ID NO: 391675 - DNA, 1000 bp, Homo Sapiens
ttttgtgttggtgggtttttttgtttgtttgtttgttttttggagatgatggctcactctgtcgcccaggctggagtgcagtggcaccaactcggctcactgcaacctccgcctcccaggttcaagcgattctcttgcctcagcctcccggagtagctgggattacaagcatgcgccaccacgcccggctaatttttgtatttttagtggagacagggttttgccatgttggccaggctggtctcgaactcctgacctcaggtgatccacctgcctgggcctcccaaagtgctgggatgacaggcgtgagccaccacgcccggcccatttttgtgttgttgaacttaaagcatgagcttgggcaaatcccttcttcttctgagccatagggtaaaggtgagaggagagtcttgtaagctccgtgatgagttccagaagtccagggtgaccagtcatgcttagatcatttccgtgtcatttatggactcgatgagagacaaaagggcctctggggactgtgagttgcatcagcctcttgctgaactgacagaacattcaggtttcagggagaggtgaggtcattgccagggatcttgttcaagggataagggctgacacctgctcctgaagagggaccacacggtgcctgcctggaaatggaaaatccgggctcgcactctggctctgctcctggtttttgggtcttggcttcctcagctggaagatgagagggctcctctcaaggctgaggatgggtccccatttgtcatcctgtggctccaagatcaagaggatctagaatatccatgacctccttctaaacgacttggactttgggttaaaaatctctcttggcagattttggcttgcacaatggtggattagcagctaaggacaaacccactctcttgctgaggtccactagaaaagctggacagggccgggtgcggcggctcacgcctgtgatcccagcactgtgggaggtcgaggcgggaggatc

SEQ ID NO: 391676 - DNA, 538 bp, Homo Sapiens
tgtctggctgtgagctcccaggaggtcccaggggtgtgacctccctccctccctccctccctcttcccttcaccccaggccagcccagggccagctataaagctggcccagcctggctctcagcacacccagctgcctgagaccctccttcaacctccctagaggacagccccactctgcctcctgctcccccagggcagcaccatgtggcccctgtggctctgctgggcactctgggtgctgcccctggctggccccggggcggccctgaccgaggagcagctcctgggcagcctgctgcggcagctgcagctcagcgaggtgcccgtactggacagggccgacatggagaagctggtcatccccgcccacgtgagggcccagtatgtagtcctgctgcggcgcagccacggggaccgctcccgcggaaagaggttcagccagagcttccgaggtgagaccctccctccctgctggccccggtcccatggtcgggggcaggccggttgtgcccactctggaggtgtcgaagggccct

SEQ ID NO: 391677 - DNA, 1000 bp, Homo Sapiens
aaaggacacaatcaacaaagtgaagagacaacccatggaatgggagaaaatatttgcaaactacccatctgacaagaaattaataaccagaatatacacggggctgcaaacaactctataggaaaaaatctaataataaaaaaatgggcaaaagatttgaatagccatttctcaaaagaagacatacaaatggcaaacaggcatatgaaaaggtgctcaacgtcattgttcaccagagcaatgcaaatcaaaactacaatgagatatcatctcaccccagttaaaatgtcttatatccaaaacacaggcgataacaaatgctggcgaagatgttaagaaaagggaaccaggccaggcacagtgcctcatgcctgtaatcccagcactttgggaggccaaggcgggtggatccctggaggttggaagttcgagaccagcctgaccaacatggagaaaccccgtctctactaaaaatacaaaattagctgggcatggtggcacatgcctgtaatcccagctactcgggaggctgaggcaggagaatcgcttgaacctggaaggcggaggttgtggtgagcagagatcgcgccattgcactacagcctgggcaacaggaaggaaattccatctcaaaaaaaaaagaaaaaagaaaaagaaaagggaaccatcctacactgttggtgagaatgtaaattagtaaaataattatggagaacagtttggaagttcctcaaaaaactaaaaatggagctaccatatcatccagcaataccactcctgggtatatatccaaaataaggaaaataagtatactgaaaagatacctgcactcctacgtttatttgcagcactgtttacaatagctgggatctggcagcaatctaagtgtccatcaacagacgaacggataaagaaaatgtaggacttctacacaatggaatactattcagccataaaaaagaatgaatcatttgcaacaacatggatgaaactggagatc

SEQ ID NO: 391678 - DNA, 1000 bp, Homo Sapiens
tcccccagtccctggttgctctcatgcccccacctgcccaccaaggcaggagcccagccctccggtgcctggtctcagccccatgcccccttatgtgtcctcctcaggtggtgtgtgccaggtgctccgactaccgggccgaactgaaatacgacgacaacaggcccaaccgagtctgcctccactgctacgcattcctcactggaaatgtgctgcctgaggccaaggaggacaagaggcggggcatcctggagaaagggtcctcagccacgcctgaccagagcctgatgtgcagcttcctgcagctcatcggggacaagtggggcaagaccggcccccggggctggtgtgtgatccctcgggatgaccccctcgtgctctatgtctatgctgcccctcaggacatgagggctcacacctccatccccctgctgggctaccaggtgactgttgggccccagggggaccctcgggtcttccagctacagcagtcaggccagctctacaccttcaaggccgagacggaggagctgaagggccgctgggtgaaggccatggagcgggcggccagtggctggagccccagctggcccaacgatggggacctgtccgactgagccactgccagccgctctcctgcccacctctccccaccctgaacccagctcctgccacagactgaccctgtggcctcagtgacccactgccccaagtggtgctttcagagaattgattcagccatctgcgcccaggccacgtgtcccgatctgggattagaaaatatgggtccattcctttctagaaaggggacaaccaagtgtctcagtttgccttgcggggagggggctcctgggccatgggacttccagtgctaaaactgggaaagccccaggtaaccccggactggtggtcaccatagtatggtttttcatttgtatctcctggggagcttttaaagagtactggtgaaaaacacatagtaaattaattttaaaaatgt

SEQ ID NO: 391679 - DNA, 1000 bp, Homo Sapiens
tccgggtggggctggtgctgctgaagcacgcgctgggctcccctgagaaggtcaagcctgccagggccagtacgagaccatcgagcgactgcggagcctcagccccaagatcatgcaggaggcctttctggtccaggaggtggtggagttgcccgtgacagagcgccagattgagcgcgaacacctcattcagctgcggcgctggcaggagacccggggtgagctgcagtgccgctccccgcccaggctgcatggtgccaaggctatcttggatgcagaacctggtccccggcctgccctacaaccttcaccatccatccacctgcccctagatgcccccctccctggctccaaagccaagcccaagccacccaagcaggcccagaaggagcagcggaaacagatgaaggggagagggcagctggagaagcccccagccccaaatcaagccatggtggtggccgctgcaggagatgcatgtcccccacagcatgtgcccccgaaggactcagcccccaaggactcagcccctcaggatttggctccccaggtctcagcccaccaccgctcccaggagagcttgacgtcccaagagagtgaggacacctacttgtaaccctggcagctaaggcctccagggcggggtctccatataactacacggttcatgaactgacattccacatcctgcccaccctctgagggccaagctgcctggccactgggctgggctggagtctggctggtccaacacagattctgcctggtccaacacagattctgcctgagcctccttatttattttctttacagtggcactcaggctggcccagccagggcaggcagaagctagggcctggggggtggggcctccttcagccccctcctcctgggggatgctccccagggttagggtgctggtgtgaggggaaagggtggggtgttctttgtgtaaaatagaaacatggttttgtacagaaataaacagccttgtatagag

SEQ ID NO: 391680 - DNA, 1000 bp, Homo Sapiens
tttgccaattagcccccaaacagccagaggttccctagcctgctctaccgtcctgcacagctgcctataaaaagtcacccagtgtcacctgacccctgacagggcctgtctggggcaccactggtgcatgaggtgaggggcacatggttcctggccgggctgcacagcttcggagatgcttgccaaggccccgccaggccggcggtcttcaccgcgctccctgcctatgaggactgggtcagcagtttggactggcaggtctacttcgccgaggaaccagagcccgaggctgagcctggaagctgcctggccaacataagtatgtggccccggggcctcctgccaaaccctgcctctccaggacccttctctctccagtgagaacgtgccgttctaacccactccagctgccttgggtagggtggagcaacaggcagacccatttgattcagattctggttctttgtcatcgtgtgacttggagcaggctgctcaaccgctttgagcgtcagtattctcatctgtcatggcggccaagacagaccctgttccttggaggaatggggagggagggagggaccaaagccatgaggatgaggacaactccaccctccttccttccccacaggccaaccaaccagctgctgacaggggacctggccattctcaggacaagagaatgcaggcaggcaaatggcattactgcccctgtcctccccaccctgtcatgtgtgattccaggcaccagggcaggcccagaagcccagcagctgtgggaaggaacctgcctggggccacaggtgcccactccccaccctgcaggacaggggtgtctgtggacactcccacacccaactctgctaccaagcaggcgtctcagctttcctcctcctttaccctttcagatacaatcacgccagccacgttgttttgaaaatttctttttttggggggcagcagttttcctttttttaaacttaaataaattgttacaaaatag

SEQ ID NO: 391681 - DNA, 1000 bp, Homo Sapiens
caggggtcacaactcacaatctggaagaccacacgaagctgcccctgatcttccacctgggacgggacccaggggagaggttccccctcagctttgccagcgccgagtaccaggaggccctcagcaggatcacctcggtcgtccagcagcaccaggaggccttggtccccgcgcagccccagctcaacgtgtgcaactgggcggtcatgaactgggcacctccgggctgtgaaaagttagggaagtgtctgacacctccagaatccattcccaagaagtgcctctggtcccactagcacctgcgcagactcaggccaggcctagaatctccggttggccctgcaagtgcctggaggaaggatggctctggcctcggtcctcccccaaccctgcccaagccagacagacagcacctgcagacgcagggggactgcacaattccacctgcccaggacctgaccctggcgtgtgcttggccctcctcctcgcccacggcgcctcagatttcaggaccctcctcctcgcccacggcgcctcagacctcaggaccctgccgtctcacgcctttgtgaaccccaaatatctgagaccagtctcagtttattttgccaaggttaaggatgcacctgtgacagcctcaggaggtcctgacaacaggtgcctgaggtggctggggatacagtttgcctttatacatcttagggagacacaagatcagtatgtgtatggcgtacattggttcagtcagccttccactgaatacacgattgagtctggcccagtgaatccgcatttttatgtaaacagtaagggaacggggcaatcatataagcgtttgtctcaggggagccccagagggatgacttccagttccgtctgtcctttgtccacaaggaatttccctggacgctaattatgagggaggcgtgtagcttcttatcattgtaactatgttatttagaaataaaacgggaggcaggtttgcctaattcccagcttg

SEQ ID NO: 391682 - DNA, 1000 bp, Homo Sapiens
atgaacaaatctgttttttcttccctccctgcctaaagactcctaataagggacattaaatcatacacaactgaatctaagatatgaaaaactagtttcaatgacaaagacttgaacacacagttaagagataaattcaaggtggtagacacctagaaaaagctattctaggcagcagacatctggcacctgacccaaatgttcatttggtttcagttaagaggcttcctaatattagatttgtggggcaggctagggataggggtggaatggtggtacaagtaaccaagagaagtaaagtaatgctttacccattcaaaaatatagcaaattaaaacatagtaacatttgtgtcctgtcacaataggcaccctgcacagcaatacacactgaacaatgtcgagtttctgctgaatagacttcctacgttgctctggaattcgaagttggcctaactgaggtctccagttacagaaaacactggctctgtatcctgggctttgagaaaacttatcaggctgtcacacttaccatcccttcagtctgcttgtcaggttccttaaggacgcatatctcaaatgtatggcatctacctctacctgggtcacaaccaagtgggtttctactagatcggtgttccttgacagccaacaagggagctgacactgccctcctaagttctgatcttgctcctgttcaactggaacttgatggatcccatgtggtttcccccatcctgacgctgtggctcagacactctccctaagctggtccttccctccaaatcctgccttaaacacactcagaaggtagaaaacacttcagcagcaaagtcctcttcccaagccaacagttgtgttcttccaatcacatgatcttaccttttcaataaaaggcaaaacaaaccaatttccaacatagcattacagcctttaaaaccattcacttctcatagtgattcacagagaacaagagattaaagtgctggattttaaatgtc

SEQ ID NO: 391683 - DNA, 1000 bp, Homo Sapiens
aaagtcacagcacccatttcatgttctgtgaggctcccaaggagggaaacttctagtttgctgtcctttacctcacccctgtgaccacagcactaatttctcatgaattcttgttaccaatgagatacaaatgtttggggagctctggcctggtctgattttgagctctgtggaaatacgcagaccacgggggaggaggccgggaaatggactcggtttgagggcttgctcaaggatgcggttttgtttttcggctgatttactccaagacagccagagattgttctgtcgttgccacagaggtgactaaacaggaaggtaagtttgaggtaggaagaaaaccatccccaggagtttcatgtagcaaagaaggaagtagctgttacaaatgggtgacagtttacatgtgggtctaacagtctcagctctgttgttcaatctttcagttatactcagagagtaagcgggaggagccttggggctgctattgagtgcagcatcctgaaggctgttcttcaagtgttactcagactactatcccaagagcactcaaggcagttcttcctccatccctgctccctagctcccttggctttgatgagtttattacaaaagggctattcactttagaataggagggtaattaagactcctggtctgcagcccagatttactgcattttacaagttaataatatgatttttttttgtagctccaattgattggtaacagaagatgaagacaacagcataactaaattattttaaaaactaaaaagccatctgatttctcatttgagtattacaatttttgaacaactgttggaaatgtaacttgaagcagctgctttaagaagaaatacccactaacaaagaacaagcattagttttggctgtcatcaacttattatatgactaggtgcttgctttttttgtcagtaaattgtttttactgatgatgtagatacttttgtaaataaatgtaaatatgtacacaagtg

SEQ ID NO: 391684 - DNA, 1000 bp, Homo Sapiens
tgagctgagatggcgccactgcactccagcctgggctacagagcgagactctggctcaaaaagaaaaaaaaaaatctgtgggggaagtcaagaggaagaaggtagacatggaccaataggcgtaacaaaaattaaatattgacaatgagagcaagggagctgacaggaagactatagaaagaaatacgatatcctcctaaagctaagcagtgtgaagacccagaaaggctggcactactgtacttattgccgagtcctttagtggatatccataatgatgactcagcgttattgagaaggtgaggtggtattctgtgccttctgcatatgaaggcagagatgagtgcaacatattataaaaagacttccacccacgatgacctgaagaaaaaaatttaatgccccaaagaataattgcagttgtctagcaaatgcaacgatgtagaaattgacagagcagaatgaaagagataatgctttaaaaataatattaaaggcagctgttaaggaatgtagtaaatgtgggagaaggcactcaataaatacgtttaaaaaattaaactcagtttggaccctgcctagctcccattctggagaggtatctaaataaatgaatgggtgactgaatgtatgaatgaaaattatctggcctgaggtccccctttcactagggttgttctatggttcttggagctaatgcagtgtcaaggtgttggagatggaggacacctgtcttatcttcaatcatcatccacacacattaccactcaggaggtccattatccctatctgcatcatgtgttccagggccagaagctgttctgtgttcttgccatgttgaggaatggtttctgccaatgctggctaggatgccatttgccttgaagcacccctctattgtcctctctgttcttgtttccctgaaggtgctgctcagcagaacagtggtctgacctgatctttgcactaaaagatcctttctcatttctcctccctgcag

SEQ ID NO: 391685 - DNA, 1000 bp, Homo Sapiens
agggagggtcagtgccaagtctcaggaggagggcgcatgtgtgtatcaccctcagctggcggaacctggctgcgaactgtgcagttacgttgcatccacaggattccagttgcgtgtctgtttccttctctttctccgtatttatttttttattcttcggaggaggtggacatttcggaagtggtggggactaagggaagaactctctagttccctcagtgtgaagcctgtcgtgttctctccccttgcactggtcatcagtattgtgtaaaggaacaactgatatacttgagtgtgcaagcaaagaacccatttgccatgctgctatgaagactacttttagatcaacaataaaaaaaaacctacaaaaaaacctttattctttaattgttgcttttacggtgatattgtgcatgcaaaccaggagcattttgtgtcttaagaaaaataatcttagaacagatggctgtgaaaattacacccatgcacagaacaagccacaggaataatagttcaggatttggtttttctctttttcttgtaaacctggagggttgatatattctttccatgcagttattagaacttagttttgttccaacagttaaacttgcaatgaaaagaaaatgtgccatttttttcactcagaattattcatagctgtatatttgaaactgctaattacacacgtgtgatgtatgttggttttttagtgcaatttcttctgtagctattctttgaccaaactgtgggtattgttaatattaatttatatttgtctcattttgtatgtatgtgtagtgtgtttgtgagtatgtgtggtttataatctgacaaagtcatgaagctcagtttggctgtaatttaattccccttcccttatttttatttatttttgtactgtgctgattcaataaaatgcactgaccatccattacagagacctctttttgtgggcaggctggggccccctttactaaatgattcatgcactcagaac

SEQ ID NO: 391686 - DNA, 1000 bp, Homo Sapiens
gtttacacaatcctacagttctgctaggcttctatgatgctactattctgcatttgaatgagcaaatggatttaatgcattgtcagggagccggccaaagcttgagagctccttcctggctgggaggccccttggaatgtggcctgaaggtaagctggcagcgagcctgacatgctttcatctagtttcctcgcttccttccttttctgcagttttcgcttcacagaaagcagaatccttaaaaataaccctcttagttcacatctgtggtcagtctgggcttaatggcaccccatcctccccatttgctcatttggtctcagcagtgaatggaaaaagtgtctcgtcctgaccccctgcttccctttcctacttcctggaaatccacaggatgctgcatttgctcagcagatttaacagcccacttatcactcatggaagatccctcctcctgcttgactccgccctctctccctctgcccgctttcaataagaggcagagacagcagccagaggaaccgagaggctgagactaacccagaaacatccaattctcaaactgaagctcgcactctcgcctccagcatgaaagtctctgccgcccttctgtgcctgctgctcatagcagccaccttcattccccaagggctcgctcagccaggtaaggccccctcttcttctccttgaaccacattgtcttctctctgagttatcatggaccatccaagcagacgtggtacccacagtcttgctttaacgctacttttccaagataaggtgactcagaaaaggacaaggggtgagcccaaccacacagctgctgctcggcagagcctgaactagaattccagctgtgaaccccaaatccagctccttccaggattccagctctgggaacacactcagcgcagttactcccccagctgcttccagcagagtttggggatcagggtaatcaaagagagggtgggtgtgtaggctgtttccagacacgctggag

SEQ ID NO: 391687 - DNA, 1000 bp, Homo Sapiens
ggtgacccatggcctctccaggcagctgtttggagtaaatgagccgagtcccatacgcagcactcctccgtcttgctctcggtcaccacacccatgcagcactcagcaacacagcccgcggctccctcccctcggccaggcctgacctgccgggctttttgttttttgtttttggcagctaagttcattcaaattggcaaaatgttcatagacagctcgtcatcactcaacagcccgcggctgctgcttcctcttttctcccccggctcctgtgtcctctcccgacctgtacgctcagacacaacctgacgttcacaaaagcttggacacagtggctcacacctgtaatcccagcactttgggaggctgaggcgggaggattgcttgaggccaggtgtttgagaccagcctgggcaacatagggagactcttgtctataccatccactctggtgcacgcacaacacacacacacacacacacacacacacacacacacacgaaagaacgaacagctcagggaaatgggtagacagtcgactgcattcttctgacagaagggatggctcccgcccaggggctgagctactccaccctgaccctcagcctcccgctcccttgactctggcagagtttgatgcccaacagatcacgctctgcaggatccaaaaactctgcggccacgggcactcagctgagccctcagccctcatggctttcccgatgctcaccggtgcagaggagccagctggggagcctctgtgtatcctttttattaacttatttctgaagttctccaagacgcccagagttgaattcctccagagctctgtgcagacagtccaagcagcggatggcagagaggtccttgctagcaagaaacttacaggccaggctgtctcctgctccagcatgccggtgagcatgcaccgtccccgcagggcacaggggtatcctttgaagtgtcaagggacacctgagtccgtgccagacacttaggg

SEQ ID NO: 391688 - DNA, 1000 bp, Homo Sapiens; identical to SEQ ID NO: 206265

SEQ ID NO: 391689 - DNA, 243 bp, Homo Sapiens
gatctctcagctattacaaggatacaaaatacgaacattctacaagttacttaacacacacacacacacacacacacacacacaaaattaattccacaggtcagtttctctgaaacattttttcactaaattctaagtcttcctggagttgcaagtgcctatctcctagacaaggcaattactcaccaactaaaatcactgtcaatctgagatttcggctgggcatgagaccatggtcagggg

SEQ ID NO: 391690 - DNA, 1000 bp, Homo Sapiens; identical to SEQ ID NO: 282356

SEQ ID NO: 391691 - DNA, 1000 bp, Homo Sapiens; identical to SEQ ID NO: 195559

SEQ ID NO: 391692 - DNA, 1000 bp, Homo Sapiens
agttgggcctctaggcagagctgagggcccagagtggctctcagcttaaaggatcttggcttagaaggaatgtgcagtgggctgcctctgctcgggaggggctaaaaaaagcctcaccctcccctgggctttgtgtgaggcttatcaactgctcaagtcagctcatctctctggctgctccggcatatttgagaaggtctgtttccctggtccttctgggtttccaccaattggcaagaagggatcagcctgtcctagaggtgaagagagagctgtggcatgaaggggagggggctggtggccccaaacctggtgacaatacacagttgtcagctgtaccctgctggcgtttcttccttttatagtcagcagcagttgctcttgctttcacccagcccctctgtggggctcctgcccaggataaaagggaagggaggcagcccaggctcctatctcatctcccagacgccacgtctctcggtttcttcttagatcactcctctgccaaagatcccaacaagacaacatggctcccaagaagcctgagcctaagaaggaggcagccaagccagctccagctccagctccagcccctgcaccagcccctgccccagctcctgaggctcccaaggaacctgcctttgaccccaagagtgtaaaggtaagtgaggctcagccattgggatagaggtggggatgacattgagagtccttttgctctggagcttagcgatctactttatgtgggctggactgggatgaggactagggtgtccatgccccagatcgcagtcccatggggcagtggagtgggtgttggggctgatgagggggagattgagtcataaaccttttccgtcaagaatgaggtgctgctttgagggagccctgtcctgctaccctagatttgtgcagctaagttgggaatggggggaggtacaaccaaccatccatccacccttttataaggcattaatgaggaccaccatagcaaagtaaa

SEQ ID NO: 391693 - DNA, 1000 bp, Homo Sapiens
cagaggtggttgcagagcatgcttatcaagcaaaataccacgaagcagtaaggaacgacagagataacagtaacaataataattcaccccaaggtactcaactggaaaaaggaaatacagaggagaggtgtcgttaagaaagccaggaccgcacatcacggccccgtcgctgcactactctcgtctaggggtcaacagtggagtcgagactcgaagcttccacgcggcggaacagcgtccctctcaggcggcgaacgggctagggaagcgccgagagacctagcgtgagaactacaactcccgcggacccgaggcaggctgcctgcgtaacttccgcttccgccacctgcccctcgcaccctcttcactcgaaccctacccgggagcgtcaggcgcgtgaccccgcgtgaccggggtgcgcgagccgagaggccctggaagcgggactctgggaccccattgaaagaaaggcaaccagaaaaggcgaaacgacaacctcgatagtgattggagctgatggaacgagggcggagctaaagtcccagaatactggccaatcagagtttaagattatcagggagcccgggaaggggaaaggggcgaaatggttctatggtcacatgccgcggggtctggtgggaggacggttcccagcggcctcttggcgcttcctgtttccggttcccagagtggggcacacgaggcgctagggggaacgctggcctctgaaactagctctgggaccggggtctgcggccggcccctagctggccccgtctcccatccccagaagggtattcactggggattctgagctttggctactccagtttcccacgacacgtgagtgtgaggggcgtggaggaggaggcgggctgggttgcgctcacacttaagcgtctgtgacaggagccggaatcgcatctcccttgaccatggttctagccaaagatctggctgaggagccctaagggtagaatggaggcggaggcatgagagc

SEQ ID NO: 391694 - DNA, 1000 bp, Homo Sapiens; identical to SEQ ID NO: 282358

SEQ ID NO: 391695 - DNA, 1000 bp, Homo Sapiens; identical to SEQ ID NO: 206293

SEQ ID NO: 391696 - DNA, 1000 bp, Homo Sapiens; identical to SEQ ID NO: 282360

SEQ ID NO: 391697 - DNA, 1000 bp, Homo Sapiens; identical to SEQ ID NO: 282361

SEQ ID NO: 391698 - DNA, 1000 bp, Homo Sapiens
gccgtggtaatgtcaggaagttaccctctatggtctaaaaagggaatatatgaataatccacacgttgtttagcatatcatcaagaaataaccataaaaatgggcaaccagcagtgcttggggatgctctgtctatggagtagcaattcttttattcctttactttcttaataaacttgctttcactttactcgacggactggccccgaattctttcttgcgcgagatccaagaaccctctcttggagtctggatggggaccccttttctgtaacatctttccggcgaccgcagaagggactacagtgaggaaatccccaacccaaaggttaactttgggtaagtgttaggatcctgtaacacttccataaccaaaggaagcttgtctttacctttctaaaagacagtggaattatatcttttaactaaatttttaaaaacaactctagattaatattccctccatgactggagagtaaaagcactgatttagctgagtattagggaaaaatactaagcacaggtgcccaggaaagtccttcctagtggacgaagactatggagaaacatgtgttctaggcatacaggaatgctgaactgcttatttgtggttctgaattttctgcttgggaccaaatttgacctgtagctgcagacttcccatggggtatttacagctgggccacttacaaattggaatccaggggagtccaggaaagatgaatggcagctcagttatttccagctgaaagtgaatggggcatctgaaattgaatggggccctggatcctgtaaacatatgagatcttagcctctgatagccaagtttggaaaatcaatgaaagcaatagactttctcctctgcccaatgcacacacaaaataataataataataataatgcaatgttgcttacactttcaagaggtttatggaccacctcaaagctcatgcatgcacccattcccccagccccaagagaagagacaggatgacagatc

SEQ ID NO: 391699 - DNA, 1000 bp, Homo Sapiens; identical to SEQ ID NO: 195562

SEQ ID NO: 391700 - DNA, 1000 bp, Homo Sapiens; identical to SEQ ID NO: 195561

SEQ ID NO: 391701 - DNA, 1000 bp, Homo Sapiens; identical to SEQ ID NO: 195519

SEQ ID NO: 391702 - DNA, 1000 bp, Homo Sapiens; identical to SEQ ID NO: 195564

SEQ ID NO: 391703 - DNA, 1000 bp, Homo Sapiens
  misc_feature (194)..(194): n is a, c, g, or t
gatgtggatttctttggatgtgagagtcgtgtgtgtgtgtgtgtgtgtgtgtgtgtgtgtgtgtggtgtgtttgtgataatgtgagcaatcagcaatgtgagcaaatagtgaatatttataatggtatttaagtgtataattgtgtttgcaattcttgcgtgtaaatgcttgtttctgcttaagttgcaaatcnaaactatcattgtatgcacgggcttgtagtggtgtgtgtgtaaccgtatgtgaatgtgactgtctctttttgggtaattgtgtaatcaaccattgtttgtgattatgtatgaatcgtgttgatgtttgggagaatatgtattagtttctctttgtaaatctatttttctgtgaaatgtgtgactgcttctgaagtggatcatcttgaattttatgggtgtaattgtgtgtgagatgtaattatgtgtgagctgtgcattttccctgtatttacttgtgtgtgacagaatgtaattgggggagtaaaggtagtggggagtgtggatcactgtgggagaccatcactgcaagtgggtgggtatggttctgtatgagtgtgtgtaattgtgtgctgatggtgtatgtgttggtggggagtctgttgtgcgatacgcagatacattgtggcgggaccaacatctgctgaagttctggggctctagacgcttacccagcaagctgcagagactggggcacattgaatcagaaattaaggccagaatcctctctggtgctgtaagtgggacctaccagttcccagcactagcctggcctaggagagatctaaagaattgactttctgagaacctccaggagccctccagaccacccttgccagacctgcagccacagtcacatgcacacaggcataacagccagtccccagcctattcgaattatcctagacaagactgacttgggtctgcttttctggaagaagctgtgtggtggagggtctacagaactcatcaccctaggggtgagttg

SEQ ID NO: 391704 - DNA, 1000 bp, Homo Sapiens; identical to SEQ ID NO: 114893

SEQ ID NO: 391705 - DNA, 1000 bp, Homo Sapiens
cctagcacccctgcctagcccaggtcggtctccgcggacccacggacggacagacagacgggaggacggccagccgcgagcgcccgggcggcgggagggggcggggaggcgacggccgtggcgtgaggagcaggagcaggtgcagcggcggcggcgggcggggccgggacccggcgcggagggagccgcggcgcggcgggcggcagggaccgggaggccgcgactcggagtcagccccgccgggtcgcgcgcaggtccggggagccgcggttgagccgggtggggtggtgactccagagaacgcaggatcccaaggagacagagaggacgagagctggagggggatccggaaagcggcgggggcgctccgggaggggtggagtaggacatagggggcgcacctggaggagagacggggcgggggtggccaggacctgagctggagcctgggagcccgaagccagacaggtgaggcgggagacccggaggtgggggtgaggtccggttagtgggagagatccggaggtgttaagttctgagctgggctgggaaggcaggcaggctgggcggggagaaaggctcttagcgggaggcccaggggtggtcagctggtgggggaagctgggggaggacgcagggccaggtggagagccggcagggttgggggctccctaggcgccaggcaggtgggctcaagggtgaggctgttttttttgttttgttttttgtttttgagacggagtctcgctctgtcgcccaggctggagtgcagtggcgtgatcttggctcactgcaacctccgcctctcgggttcaagcgattctcctgcctcagcttcctgagtagctgggattacaggtgcgcaccaccatgcccggctaacttttgtatttttagtagagatggggtttcaccatgttggtcaggctggtctcgaactcctgacctagtgagctggcctcctcagcctcccaacgtactgggattacaggcgtgagcc

SEQ ID NO: 391706 - DNA, 1000 bp, Homo Sapiens
cggaggtgggggtggggtaacctgggctacaggcccagctcctgagccctacctgaaccctctgtcaccctgcagcccaccaacttcaccaaccccgtgtatgccacactctacatggggggccatggcagtcgccactccctggccagcacggacgagaagcgagaactcctgggccggggccctgaggacgagataggggaccccttggcatagggccctgccccgtcggactgcccccagaaagcctcctgccccctgccggtgaagtccttcagtgagcccctccccagccagcccttccctggccccgccggatgtataaatgtaaaaatgaaggaattacattttatatgtgagcgagcaagccggcaagcgagcacagtattatttctccatcccctccctgcctgctccttggcacccccatgctgccttcagggagacaggcagggagggcttggggctgcacctcctaccctcccaccagaacgcaccccactgggagagctggtggtgcagccttcccctccctgtataagacactttgccaaggctctcccctctcgccccatccctgcttgcccgctcccacagcttcctgagggctaattctgggaagggagagttctttgctgcccctgtctggaagacgtggctctgggtgaggtaggcgggaaaggatggagtgttttagttcttgggggaggccaccccaaaccccagccccaactccaggggcacctatgagatggccatgctcaacccccctcccagacaggccctccctgtctccagggcccccaccgaggttcccagggctggagacttcctctggtaaacattcctccagcctcccctcccctggggacgccaaggaggtgggccacacccaggaagggaaagcgggcagccccgttttggggacgtgaacgttttaataatttttgctgaattctttacaactaaataacacagatattcttataaataaaattgt

SEQ ID NO: 391707 - DNA, 572 bp, Homo Sapiens
tccagcaccgtggtcaatgtctgctgcccttgaagatttattcagacttgagttttaataaatgacttgataaggatataagcacctgcaaaaaaattttggcatttaaaggcatataataaatgacataagtagcataaaaaccaggaggtatttgataaatgtttgtggagattgttgacaaaggtgtcagttgtaaaagtaaagaatggtttgtttaattttctgttttagaacatagttctcctgtcagcagaagaaaaaaaagaacagactattgaaataaaagaagaagtggttgggctaactgaaacatcttcccaaccaaagaatgaagaagacattgaaattattccaatccaagaagaggaagaagaagaaacagagacgaactttccagaacctccccaagatcaggaatcctcaccaatagaaaatgacagctctccttaagtgatttcttctgttttctgtttccttttttaaacattagtgttcatagcttccaagagacatgctgactttcatttcttgaggtactctgcacatacgcaccacatctctatctggcc

SEQ ID NO: 391708 - DNA, 1000 bp, Homo Sapiens; identical to SEQ ID NO: 114894

SEQ ID NO: 391709 - DNA, 1000 bp, Homo Sapiens
ataaggggtttgccatttgatacccctggggaacatttctgtaaataccattgacacatccgccttttgtatacatcctgggtaatgagaggtggcttttgcggccagtattagactggaagttcatacctaagtactgtaataatacctcaatgtttgaggagcatgttttgtatacaaatatattgttaatctctgttatgtactgtactaattcttacactgcctgtatactttagtatgacgctgatacataactaaatttgatacttatattttcgtatgaaaatgagttgtgaaagttttgagtagatattactttatcactttttgaactaagaaacttttgtaaagaaatttactatatatatatgcctttttcctagcctgtttcttcctgttaatgtatttgttcatgtttggtgcatagaactgggtaaatgcaaagttctgtgtttaatttcttcaaaatgtatatatttagtgctgcatcttatagcactttgaaatacctcatgtttatgaaaataaatagcttaaaattaaatgatgcaactcaaccttttccttaatggcattacactctgtcccttaaggagcaaccataaataatccataacctatagagggaatttggtttccgtaaatagccctttttgcacctgtacaatcctggttggggggcatgagtcattgtccccacttaaggtggagggaactgagtttggggaaattaaggcagttctccaagattatgcagaatagagatgttattagcgactattgtgtgcattgtagcaatggcatttgataatttacagagcacttctgtatactgtggctccttagtggaattaagctgagacctcagatcagtccctttaaaagaaaagtaaaaatagccacagggttgtttaactcgcttgtattgggctttggtagtattcgtcccattggcagacagtcttctattttaaggtagagcatagtttgtctccaa

SEQ ID NO: 391710 - DNA, 1000 bp, Homo Sapiens; identical to SEQ ID NO: 282370

SEQ ID NO: 391711 - DNA, 1000 bp, Homo Sapiens
ccccggagtctctgggtggttccagctctggaagctgggcctctcaggacttcccaggatccaccaccatcacttcacagaggtgatggaagggatgtttgctcccaaagctcactgattgggagctgggggtaggggacaatcacagaatctctgcctctggggcagagtcctttctcctatggtgttttggcctcattttctccatctgaaaagtttccccaccttcaaaattctgggcctgagacaagaggtgcccctaatgtcttgactttctcctgttcacaggactccctggccggcctggccaggcaatcaacggcaaggatggagatcgagggtccccaggggctccaggagaggcaggtcgacctggcctgccaggccccgtggggctgccgggcttctgtgaacctgccgcctgccttggagcttcggcctatgcctctgcccgccttacagagcctggatccatcaaggggccttgagcatcaggcccagacagagcctggaggcatcctggcgggaaggaccaggtcccctctggtggacatgcacccatccccagtccaggaaaccatctcccccaggaccttctgtctgggactcaggagtcctaaggaaaaggaattctaaaacatgggggaaggggaggtagagcactgatgggtgaaaaagtgaggccaacacacagggcaagtggtgtcgatggagtcgaagcgctgaaggaatagggcggctttccttccagcgagcatcattcggctgttaccaaaacaaacatcttaatctgcaccttcctccactggccatcttgtccttgggtcagtgggacatgggcacctcgggaggcccgggccctgcccagctacagttccacccctcagcttgaggaccaatactgaggtctatgccagttcctgatcccatctcactctctggacctactaggtgactgctgctggggtgactcccctgaggcggctatacccttaagcca

SEQ ID NO: 391712 - DNA, 1000 bp, Homo Sapiens
actgaaaaagtattatattttatttattacagggtgtagtcggtgaaccgggtccaaagggtgaacaggtcagtcttattatttaattggtataaaatgcaatgtttgatatgcaccatttcacaagcaagggggaatggctggtttatgggggttaataaaaccatgaaggctaacagtttttctcaatgtgttcatagtgagtgaaacctggtgttgagtttggtccgcagcattgtttactattttaacaagctggagctaaagatggctctgctccaggactgcacactgtctttcctttgaagagcgtggctctgtctctggttcacggaattggtttattcatatccaatgagccttccacagccacattagaatgtcttaggtttttcttgatcaagacctcagcaaataaactgtttatatgaattagactcagtcctttccctgggttcctttttctactgtagattccctatttcaagggccaattataaaattgttgaatatggtcatttatccttcattctagctgaaactcagcctcaccttctggctttcctctccgctattttctgattgggactaaccactgacagctagattggaaagccgctgagagcattttgtatttctgcatgattctgggaacactgtgggcacttatgaatgcttatcaatgtttactggttaaaattgggcaatgggactaagaattttaaaatgtaaccttttatcttaatttttagggtgcctctggtgaagaaggtgaagcaggagaaaggggggaacttgtaagattttttttttctggttaatgatgaagctttaccaattttgaactgttagaagtatatatatatacttctaacacagttcaaaattggtatatatatatatgtggttattttctggacactgttatcctcactgccttctttaaaggttatgatgtttctcctatcagctaacaaaagtctcccaagattgcagccaa

SEQ ID NO: 391713 - DNA, 1000 bp, Homo Sapiens
gctggcctgctgtggcacagactgtgtccatggccccctgttctgcctctctccccaccattagaccactggagaatactccttcaagatctttccagagaaaaacattcgtggcttcaagctcccagacacacctcaaggcctcctgggggaggcccggatgctcaatgccagcattgtggcatccttcgtggagctaccgctggccagcattgtctcacttcatgcctccagctgcggtgagcacccttcccctgcccctccccctcccttcccttcccctcccttggatcagtggccacactgttggtgaagcacctctgtgtgagcttgggcaaggtacatcagcctctctgagcctcatttttctcatctgcacatgggaacaatgggagtagctaatcatagaagagcctgagaatcgcttgaacctgggagatggaggttgcagtgagccaagatcgtgccactgcactcccagcccgggtaacagagcaaaactccgtctcaaaaaaaaaaaaaaaaaaaaaaaagcctggtgcggcacacatatcacacagtgaccagccgcctggcctgcctctgctaccccacaggtggtaggctgcagacctcacccgcaccgatccagaccactcctcccaaggacacttgtagcccggagctgctcatgtccttgatccagacaaagtgtgccgacgacgccatgaccctggtactaaagaaagagcttgttgcggtaagggaactcctgcccctctggctcaggatgacatggacatctggttcctcccctagccaagactcttggggtcctagcccaggcaggggggcaagtcacgtccctctgcaagccttagttttcccacttgtataatggaattgataatggtacctaccacgtggtgagaattaaaggcagtctgacaggccaatcacgtggcacagtaagatgtggtacatagtaagtgcttagtaaataatgcagcactaggtagtt

SEQ ID NO: 391714 - DNA, 1000 bp, Homo Sapiens
ccaaccctggtgtccccggcgagttgggcagccccgcgcgccctgaccttgacgccccagtctccagccagggcttaggtgaacttggggtggggtgtgcgtgcgtgcgtgtgtatgtgcgtgcgtgtgtgtgtgtggaaggggtggtgagactgggaacgcgctgttttctttcccagtttgatactagcaactggatttttactttaagaccggctttgctctctgctggggttgggagggggggcgatcttttcccatcactcacatctttgttcattgttcactgagtggaaggcaggcgacttaaagagacgaaagagaggaaaaaggggtgagagacggagagaggaaaaagaggggggcggccagaagagggaaggagaggcgtggggacagggcccccgcccccgccggggtcgggtttgatggtgaaatagtaaacccacgcacggagggtcgccaggaaagtggacattaccgctttaattaacttcgagatgctccggcggcgggacctggcgtagccgtgacgcgcccccataaatctgcccggcccggggctgctccgagaactcgtacagtagcggcgtcagatccatcccgcgcctcccagtccggagtccatttgcataattggattttttttttttgcctccttctttctccctgaaacttgtttgaaaacccaagtgaaaaccgcgacgatctgcacactcaaaagcaagtgccaagtaagtgccctgcggtggcctcggcgcgccccggggtgagcgcgcaaagccgggagcgaggtgccgcgagctgcgcgccgccccgggccggcctcgcgtgtgggcggctgggcggctgggcggcgggaggacggcctccgcgggctccgggactgcccggctggctgctcgcacaactttttttttttcccccgtctgctgacttttcgggccaggtgaagtgtttgggccacgcgtgtacctgtggcgagactcgggaggcgatc

SEQ ID NO: 391715 - DNA, 1000 bp, Homo Sapiens
cggtagccttttcccattggcctctttgaccaagcaataggtgttcaagtttgctccatttttcatggcttgagagctcatttcttttcagcgctgaataatactccatggtccgggtgcaccacagtgtgcctgctcattcacctattaaaggacccttccaagtttggtcaatgtgggcagaagttttcatctcctttgggtaaataccaaggagtacagttgctggaccacgtggtgagaggacgtttagttttttaagacgccaccaaactgtcctcccgcccacctgtcccactgtgtgctcctagcagcagcgaatgaacgttcccagggccccgcttccccgcccccatctggagttgtcggtgttgtgcatcctggccaccctgggaggcgtgttgcgctgtctcattgccatttcaatctgcattcccccgatggctgccttcgcggcggggcccctttgcatgcctgtttgccatctgtgtgtttccttggtgagctctcttcatgtcttttgcccagtttgttgttgttgttgttgttgtttgagatggagtctcgctctgttgcccaggttggagtgcagtggcgtgatctaggctcactgcaacctccacttcctgggttcaatcatttctgtgcctcagcttcccaagtagctgggattacattacaggcgcccaccaccacacccagctaattttctttctttttttttttttgagatggagtcttgctctgtcaccaggctggaactacggtgcccaccaccacgcccagctaatttttgaatttttagtagcgatggggtttcaccatgttggccaggatggtctcaatctcttgacttcgtgatctgcccgccttggcctcccaaagtgccgggatttacaggcatgagccaccatgtccagcctaatttttgtatttttagtagagacgaggtgttgtcatgttggccaggctggtctcaagctcctgacctcaggtgatc

SEQ ID NO: 391716 - DNA, 1000 bp, Homo Sapiens; identical to SEQ ID NO: 195572

SEQ ID NO: 391717 - DNA, 1000 bp, Homo Sapiens; identical to SEQ ID NO: 286974

SEQ ID NO: 391718 - DNA, 1000 bp, Homo Sapiens; identical to SEQ ID NO: 195119

SEQ ID NO: 391719 - DNA, 1000 bp, Homo Sapiens
gggacgagactcccataagggatagtctaattacaaaataggctgattggctttgggttgccttgcaatgaaatgcaggagagaagcactgcattgtcttctcccgaaatatttccctccttttggggatccaggaaccggtataaaatgacactcttaatttgggggatctgtctttgccttcagctgcttatttggccctagaaatgcatgctttcctggccctgttcctccaagggctccaccctgaagccagtaatccagttaagaaaggtggttcacacctgtaatcctagtactttgggaggcccaggcaggttgatcacgaggtcaggagttcgagatcagactggccaatatgcttaaacctgtctctactaaaaatacaaaatttagccgggcatggtggtgggtgtctgtaatcccagctactcaggaggctgaggcaggagaatcacttgaacctgggaggcggaggttgcagtgtgatgagattgccccattgcaccacagcctgggcaatagcgtgagactccatctcaaaaaaagaaggaaggaaggaaggaaggaaggaaggaaggaaggaaggaaagaaggaaggatggaagggagaaaatggcaaatgaaaaatcttacaagtgctgaatcttctgtctgtggatttatatatgttgcatgtttatagataaaagagctctaattaactggcttagaaaaataggcacttaaatattttgtcagaaaaacaggaactttaatgcctttttgttcatgtgactttagtaatcttttggaaataatgacagttctaaaaattattagtaaaataaaatgtctttaaaaatgtagacatttggtctaaattaacgtcaaatatcagatttgctaaatgctttaaggtcaaattgtttttctgacttttgaaaattgttcaatttggctgggcccagtggctcacgcctgtaatcccagcactttgggaggctgaggcaggtggatc

SEQ ID NO: 391720 - DNA, 1000 bp, Homo Sapiens; identical to SEQ ID NO: 195575

SEQ ID NO: 391721 - DNA, 1000 bp, Homo Sapiens; identical to SEQ ID NO: 282378

SEQ ID NO: 391722 - DNA, 1000 bp, Homo Sapiens; identical to SEQ ID NO: 282379

SEQ ID NO: 391723 - DNA, 1000 bp, Homo Sapiens
ccaacatcccgagccagccctgggggccggttcacacctaggccatctgtgctcaccggggcggtcaaggccagccccactcccgagtcagcctttgggatcccgccctgccctcctctgcggtccgttggcggggtcattgatctgggcgggcccttagacacttccggggagtatcacagtgtggtaagagcttggacacctagggtgggaccctggctcggtcacctcccggctgggcagcactggatagaggagacacctggcggaagccttggtttccttgtgtagcacccacccagagccatgaggtgacgagtgtgtgtgagtgcgtgtgtgcagcccctggcctggcccacctgctccaggaagcctcccctcactgcctgtgagcctcagccactgtcccatgctggagctggctgtgtttctgctgtcgtcccgccccgccccaccatgggctccctgggggtggggggtcagacctgctggcctcatcggcgagtgccaggtcccggtcgggcagggagtcctcccagtctaggatggtgtccctcagctctcccctgcaatgaggaagctgaggagagtcctcaggggcctcgcagcctcccctggagcccagggcatgggtgggggtggctcacctgcaggctcgcagcccccttgccttagccacggtgcagagccggcccgtggccttcaggcccatggtgcccacgactgtgtctcggacgtactgcctgtgtcagggaggaagggggaggatgggaccaggtgagctcccatgggtgactctcgcactgtttctagggtgacgttctcccagggaggtggggggtggacaggtgaccagaactagcacccagcgacacggaacgagtagccttccacgaataacgggctgggatgctgctcggtgcccggagcacagaaaacaaagcaggaaactgtcccagacagacgaaggggctcgagagacaagacccagcatgggatc

SEQ ID NO: 391724 - DNA, 1000 bp, Homo Sapiens
acctacgtgtgtgttcctgtgtgcagatgtgcggccatttgagggtggcagtgcgcctgtgtgagtaggtacctaggacagcgtgcctgtgcatttgtatgtgagtgtgtgtgctgtttttgcacgcatgcaccggtgtgagggtgtgtgtgtatcggtgcacatctatgagcatgtcagtgtgtgtgagtggcagaaggtacacgggtgtgtacgtgcgtgtgtatacctgttcgtgtacctggcagtgtgtgggcatgtgcgggtgtgagggtgtgtgtgccggtgcacaccagtgtctgcacctgcgaccaccccgaccccgtgcccagccccctgaccctctcctgctgttctcactgcggggaaacgggtccaaccccaccactgaccccagctcatctcaggcctcccgtccacagccacttcctcaggagccctcctggacccgccagcccgggtctgaccccggtatcagcccgaggggcctcgtcttgaacggaggagccgctggttccactcatgcatttatttcataaatgttggcctcccgggagctccataatggcagaggcctgtccgccttgagcaggggtccctccccagagcctgggattaaagaagagaacccagtggtcctaggtgcgccgtgagaacatcaaacatcggccagggctgcacacgggaggccctcgggggtgcagcgtggaagccccctggacagatggagaagctgaggccctgtcaacaggtcccccgcgtcctccccggccctgtgttgatgggcggcagctgtgtccaggcacgctgtccccgttggacatggccggacgcatggatttccgaagccatctctccatctggcagctttattaacccaattccagggatcgagtgattgacgtgtttgcttatcggctcctcctgtctctccagggacgggtgcccaggtgcccccaccccacctccatcggcccagggggagaggggacaccagatc

SEQ ID NO: 391725 - DNA, 1000 bp, Homo Sapiens; identical to SEQ ID NO: 282380

SEQ ID NO: 391726 - DNA, 1000 bp, Homo Sapiens; identical to SEQ ID NO: 195576

SEQ ID NO: 391727 - DNA, 1000 bp, Homo Sapiens
atcccccgtttgaggggtgttctggggtgttgactccctggtacttcctgcctacccagagggggttctcggtgagtgtctgtacgcaggtgggtgcctgcacacagtaggtgctgcatgtctctgggtgtctgcacacagtaggcatggcacgcaggtggggctctgcacacagtaggccttgcgtgcaataaagacgctgcacacagcaggtgtttgcatgaaggagaggggctgcacgcagtaggtttgcacactgttagagaaagaccccaggcaaagggacacgggaagccgttggactgtaggaaattgtcggaagccagctcccaggtggccaaggggacatagcagcatctgccatgcccttttgtgcactttaagcactggttctcagacttcagggtgcattggcaaccccctgggtacccccctttttttttttttaaatagagacaggatctccctatgttgcccaggctggtctggaactcctgggctcaaaggatcctcctgcctcccaaaatgcgaggattacaggtgtgagccaccatggccggcccctgggtacactttcaatgtggtgggttggatgttgtggcaggggaccctaaaccgggtctccccttttctaggacacagcagaaggaatgcagaggcttcctgagccgtcactcttccttactttctcccgggacccccttctctctgcagaccaccgccaagagcccagccctcagagccccagaactccctgcagcttcccagctctaggccttggcccctgtgatctccacctcgtggtcggggcagtgcccagccagggctccggggaggcgagggaggaaccagggtgggtctccttggaggaagcagagagtcacggagtcttgcagagagaggctcagagccctgcacgtcactttctccagcccccaccccagagcctggagcatgctccccggacatgtaggtcacgcgacccacagctttacagatc

SEQ ID NO: 391728 - DNA, 1000 bp, Homo Sapiens; identical to SEQ ID NO: 282381

SEQ ID NO: 391729 - DNA, 1000 bp, Homo Sapiens
agggggcctctgtcgggcctgggtacccccagaggcaccctgtgtctcatgggcaccccaccctcttacctgggcagggctggttccattggtgacgggtgacggcagaggacctgtggggacagcgtgtcagtggctgctcagccaccacaccgcacccaccctgtgccctgggccgtggcccaccttccacgtgctcctcggtgggtgtgacccgaagccgcttgaagtgttcatctgtctcggggtccacgaccagcagccgggcctcgtcctcccgtgccttgatgctggccaccacctcagcatggcgcagtccctccacattctgcccgttcacctgccgccaccagcatgtatcagccccgccatgggcccagacagcccccaacgccgcgtggccaggtgtggcatcaaatattcatcacagccaccgcccaccgaggcagcaggaggcgcaccagctcaggttcccagcgtctccctcctccctgcaaggacccagggccccagtgtggacaggtgcggggcactcggcaccccgcagccctggtgggccggtacctcaatgagccggtcctgggcgcggaggccagagcgggcggcaggtgagcccgggtccacagagcggatgtactggccgggccgggacttgtcactatgcaggttgaacccatagccctgaggtccctttcgcaggtggcagagccgagggcgcagctccctcaggggcccactgacatcctgcaggcccaacggacagggtcagtctcttgctccagcctcccgcctccagaggccactccccggtggtgccgccactgcccaaactcggtaccgtgccccccacgggcaggcccaggtctcagtggcaaacactccgggcacccaggctgcctgtgacagagctttagctgtgggaacttgggcaaagcctgttttcaaacccagaagcctccccgacgggcccagccgccttcccgggttgctgggagaattc

SEQ ID NO: 391730 - DNA, 979 bp, Homo Sapiens
  misc_feature (379)..(381): n is a, c, g, or t
ggtgctgtcgggggcaggaggtctgtgtgtcctgcacagctgctgggtgtgatggctgctgtgtgtgggggcaggccttggcctcttccttgagaggcctggggggtcaggggctgcatccaccgaggccacccgtccccgcagacaacctcctgcaccagcagatgctgcagtcggagatccaggccatgaagaagctgcggcacaaacacatcctggcgctgtacgccgtggtgtccgtgggggaccccgtgtacatcatcacggagctcatggccaagggcagcctgctggagctgctccgcggtgagtggcatgggcggggctcttgctggaggcagcgggggcacgtgaggaaataaagtgcacaccccccccnnntctacacacacacacacgtagacacacagacacacagacacacacactgcacacacagacacagacacagacacacagagacaccacgcacagaccacatgcacacacacatgcacacagacatacacatgcacacacagacacacacacaagacacatcacatgacacacacagacatacacatagacacagacacacacacagagacacacaaacagatcacacggacacacacagacacacacacagatcacacggacacacacagacacacacacacacagacacacactgatccagacacacacacagacacacacagatcacattggctcaaagacttcatcctctaagttccattatttcctttctcaccaaaaccaaagacaatcgctgccagggaatggagatgcccgtgcgtgaaggcgcagtttggattccgatgttagaatgggagggaacgttgtggtataggaaaaatgccgtgtgtgtctgaggagagctacactgaggcaccacgcacgtttgcgctctgagcgaaaaggctccgtaccccgtcgccctcacgcaaagggcttgatcatctcagacagtccc

SEQ ID NO: 391731 - DNA, 1000 bp, Homo Sapiens
ggagggaattcggctgcgggggcgtctgggacctggcccctggttgtgcgctctacgggaggcttcctgctgaagcccatcctggggtccatttagggggcgccacgctgcgcgtggtgttaacgaagtctgggttggggaagggggctgcacacttaggggtctgtattcttggtgacagtgcagaacagctgctaagctgggaaccacttggagggaccttcctgggggcactatactgagggctagattcgcagtgtttggggtactcttggagcactccataagggggtgcctgctaggaccaggatctttacttcagggtggggtgctctcagggtccttctaggggatggaggactctattgcggggatgttagtggactcctcctgcagcagctggggtcagaaatccagagggtgcctcttgggggagcactgttttgggagccttgcgttagattggagttcccctctcagggcaagagtgttagcgttaagtagctgttcagaggcaggaaacagtggagggggggcgcagtcccagcacagaaggaagaatccctgactgcagaggtgacagcatagtgagggtgcatgtgtgttgagcttggtctcctctgagggtattctccgattgacctccgtttgctccagctgtccgggtatgaccagctgtggctacctcagttgtgtgctctgtgtgagcttctggggtcttgtgatggtgacacgatgactctgtgtcctccagggacagtgtaattgtgacagtgtgactgtgtatttccagggtagtgtgactgtgtgtttctgggacagggtttgcgacagtgactgtgtgtgctccaagaatgctgtgactgtcacagggtgactgtggcctcatgggatgcagtgattgggataaagtgactgtttctgctcctaggacagtgattgtgcaatggtgttggtggtctagggacaatgtgattgtgacagtgtcatttctggcatg

SEQ ID NO: 391732 - DNA, 1000 bp, Homo Sapiens
gcggggctggctgggctggaaaggggatgaacgggcaggaggcggggctgggggcggggctggctgggctggaaaggggatggccgggctggggtagagctgactgggctggaggcgaggctggccgggctggggaggggttagctagttgggggcggagctggccctctgcggttggagctgcacacgtggggccctcccctgactccgggctgggctgcagattcggagctggcgctcatgtacaacgatgagtcggtgctcgagaatcaccacctggccgtgggcttcaagctgctgcaggaggacaactgcgacatcttccagaacctcagcaagcgccagcggcagagcctacgcaagatggtcatcgacatggtgggcggggctggggcgggacggagcgggaaaggaagcctaggagtcgagggctttggggaggagtgggtctgagtcccagaggaaccctcaacctggacagagcgggcggcttctacctggtgaaaacttcagaggcccgggtcagtctggggggcgggtgtcagcggccccagtgacgcccccttgcccgcaggtgctggccacggacatgtccaagcacatgaccctcctggctgacctgaagaccatggtggagaccaagaaagtgaccagctcaggggtcctcctgctagataactactccgaccgcatccaggtgcccccacgccccatcatctaaggagggaggacactcccccagccacacctttaggtctgggtagctaactgccccttcctcagcctctttctcccaagtggcccatcttcctgtgtccttctttcttttttttcgtttgtttgtttttgagacggagtcttgctcttgttgcccaggctggaatgcaatggcgccatcttggctcaccacaacctccgcctcccgcctcccgctcccgcctcccgggttcaagcgattctcctgtctcagcctgccgagtagctgggatcacaggcatgc

SEQ ID NO: 391733 - DNA, 1000 bp, Homo Sapiens
aaaaagctacttggtctctcagagcttcaatttcctcatctacaatgagaagaatcaaaacaactaccttagaatatggagactattcagataacatatgtaccaaaaaccttgcagagattggcatgtctgcttctcaagcaaggaaggttcaatattagaaaactgcccctgtgcccaccgatagcctcagataattcactatgaatttcagaaatttcagaatagaaggatctcactgtaaccatcaccaagttgagcaacccacattcagttcaatcccagttctctgacttctctcctattatcatagttgaaggctccctacccctatctcttatctttcctcttgattctgaaccacattacccagtcaaggattttgcttctgtatgtgacccttttgtctcctgattcttacatctatgctctatgggattacctcaatcagcaaaagcctgctgaaacatcacccatttttacagagattttgctaagactcttagtgtttctttcctaccctattatttgtctgccatttttattgcaaaagttcttgaaacatatgtatgtgattatttccccatcccctcccttccattttctttttaaacacacattaaagatgcttttgttctttccactccaagtctgtcaaggtcatctactgcctgcattccactcatttcaggaatcgattatcagtcctgcatctcctgtgaccccttggcagtttaacaccattgatcctacaattcttttgggaacactctatcaatctttccgggaacctcccactctctcctcgggtttctcctacctctgcctcttccctcctgtaactacaaagttactcctcttccaactctatttggtcttggtaaattattcatctaattaattaaggaaactaggatttattctagactcttctcttttcctcttacatcacattacatctagtcaaatcagctatgttatcattgtgaaattcaagctt

SEQ ID NO: 391734 - DNA, 1000 bp, Homo Sapiens
ctctgaggaggatgtttcaaatatcctggctatgccactcaaactaatgctattaatcggctcctacctctccctcaactctcatagacactaaattcctatctataacttttcagcaaatattattctctttacttgagttatcaaagatagccccagagcaatgaaactattcagttccaaaaccatcacatttactacgattgtcacaacaataatcctttcctaaacgtatacattgttttaaatgtctcaggacactcagagtcaatgttagtttaatttagttactttaaaaaacgaaagttgaagtcaataaatctcaccatgggcaacctgtttcctagcttgggctgcagacacaacaatttatctcttggagttacccgtaactctctggagctatatttgtgactgtcctaggaatattagctaaagcccaacaaagaggtgaaagttctgttgcagtcaaagtgatacttgtccttacagagagttaaaataatatatcataataatagaaatataaaaaatatagtaggcatgtatatttatatatgtgaaagactgaatacatatgagtagaaaattaatgccaataatactcaatgtacattactcctcctatcataacaatatgtataactgcctaataaatacttcatatgacataaaaaaagaaaaagaaaattaatgccaataatccaactaaatccatcaatcattgaaaaaattgtacatttttctattgtttcaaatctgctgatttttctggttatgtatgtactctttagagaatgttaaaaaaatgtgttaatgctgacaattaacttttaggaaaaataaaaccagaaacaaaaaatcctgttgtaatatcctagtaacgcctaaagaaaatatcaacaattactttgttttgctttgttttgttttatttttcttttaagctgaataaaccatacgagcctattgcttggtttgtcaccagtagatgctgatc

SEQ ID NO: 391735 - DNA, 1000 bp, Homo Sapiens
accagatggcccaggagggggaccaggtggctctcacatgggtaagaaaggcagacctggtgctagggagctgggaccaaagaatccttaatttttcagcggggaggctcggggaacataggggaatgggaatatgatagatcttgtttcttttgtcctagggggtaactacggggatgatcgtcgtggtggyagaggaggctatgatcgaggcggctaccggggccgcggcggggaccgtggaggcttccgagggggccggggtggtggggacagaggtggctttggccctggcaagatggattccaggtaagactttaaatcagaataaaaaagtagagcagttgaacagaggccataggataacagggttttgttgagaaagtggtttcattttgagggctaggtggaaagacctgaggttgtaaccagtagtggagagggaaggaaaattaactcagggggagtgaatctgtagacccacttgagataagatactcgctgggttaggtaggaggggcagataggatatctaggcttggagaggctggtaactcaaatataatggatacttaatttttttttttttttttgcaggggtgagcacagacaggatcgcagggagaggccgtattaattagcctggctccccaggttctggaacagctttttgtcctgtacccagtgttaccctcgttattttgtaaccttccaattcctgatcacccaagggttttttttgtgtcggactatgtaattgtaactatacctctggttcccattaaaagtgaccattttagttaaattttgttcctcttcccccttttcactttcctggaagatcgatgtcccgatcaggaaggtagagagttttcctgttcagattaccctgcccagcaggaactggaatacagtgttcggggagaaggccaaatgatatccttgagagcagagattaaacttttctgtcatggggaaagttggtgtataaattgagaaa

SEQ ID NO: 391736 - DNA, 1000 bp, Homo Sapiens
cgcgtaagtaccttattctacatcattaaccagtaaggactttttaattaaccacaataccactatcacacctaataatagtaattccttatggatctcttctttagacctatttttgaaggcataaaagcagttgagtttctggagaatttttggatggtgattaatgacttgactggctgctcttcccagagctgtggcagctctcccgtagaagatggggtttgtattggcgcaccaagatctccaacagccagtgtgtgtttcccatctcttgtaggttccatcaatggtgagcaccagcctgaatgcagaagcgctccagtatctccaagggtaccttcaggcagccagtgtgacactgctttaaactgcatttttctaatgggctaaacccagatggtttcctaggaaatcacaggcttctgagcacagctgcattaaaacaaaggaagttctccttttgaacttgtcacgaattccatcttgtaaaggatattaaatgttgctttaacctgaaccttgagcaaattagttggtttgtgtgatcatacagttatgtgggtggcttctagtttgcaacttcaagggacaagtattaatagttcagtgtatggcgttggtttgtgttgagcgtttgcacggtttggataatcttaaattttgacggacactgtggagactttctgttactaaatccttttgttttgaagctgttgctatttgtatttctcttgtcctttatattttttgtctgtttatttacgcttttattggaaatgtgaataagtaaagaattacttgtgttacttgccaagcagtgcacatttcatagtttcaaatctgtaatcagcaataaaaatcctaaaatatgtacctaaaaacatcttaagggcaggttttcagtgctctctcatgcttttataaaaatgaagaatttctttaaatttcttccttttcctttcctggactctgtaaaatcctaatttctaaatcatgt

SEQ ID NO: 391737 - DNA, 1000 bp, Homo Sapiens
ctctcagtcgcggagagcagaacccgcagcttcaggggctgctgcgggagggtgttccctgctgtacgtgtgtgttcgtcatgggggtgtgtgtgtgtgtgttggggagggtacgtctgtgtgtgtgtctgtgtgtgtgcgcgcgcagtgcctgtctgtgtgccgacttctgtctctctctcacgtctctctctctctctctctctccctctccctctccctctctcccttctcgctctttccgtggccctctctttctgtctctgtccgtctgtgtgtcgtgcgcctcgggacacatgtgccctgtgcgccggagggtgggtttcttgcacgtcggcctttcttctggtcagcctctccccgcgtctctgcctgggtcgtgtggccggttggcagtcgtcgtcccggcggttccagtttgggggtctgtgaaggcctgggcaacgtgggcatcggcgtcggaccgcaggggttttcatcccctccccatccggagcagcctctttgctaggctggatccagacgagcgctccccaaccaaggacaacggcctcccaggcgctcatcgtccacccgcaggagggtgcccgcagagcttcaagaaggtggttgtcacgcctgtcgccctctgccctcatcgagaaatgtagccacagtcgacgcagggacggagaaggaagccggcaaggggatggggcaagcatgtctgtctctcaaaggctgcttcccggccgagtcacccgtttgacactcctcccggatgccggtggtggtgcatggcccccccgtatcctgcctgggctctggcctctgctctgacctccctcttgctgtgtctgccccgtctctgagctggcggcttcttagtgtggctcagtgtcttccacaaagaagacttccccgtccatcagggagaaacctcgtgcggtccgcgtcatgattgtttccctctccacacctctttctggatgattgggcagctgtggtgatcctggagctc

SEQ ID NO: 391738 - DNA, 1000 bp, Homo Sapiens; identical to SEQ ID NO: 282385

SEQ ID NO: 391739 - DNA, 1000 bp, Homo Sapiens
gcctatattacggatcatttctctactcagaaacctgaaacatcggcattatcctcctgcttgcaactatagcaacagccttcataggctatgtcctcccgtgaggccaaatatcattctgaggggccacagtaattacaaacttactatccgccatcccatacattgggacagacctagttcaatgaatctgaggaggctactcagtagacagtcccaccctcacacgattctttacctttcacttcatcttacccttcattattgcagccctagcagcactccacctcctattcttgcacgaaacgggatcaaacaaccccctaggaatcacctcccattccgataaaatcaccttccacccttactacacaatcaaagacgccctcggcttacttctcttccttctctccttaatgacattaacactattctcaccagacctcctaggcgacccagacaattataccctagccaaccccttaaacacccctccccacatcaagcccgaatgatatttcctattcgcctacacaattctccgatccgtccctaacaaactaggaggcgtccttgccctattactatccatcctcatcctagcaataatccccatcctccatatatccaaacaacaaagcataatatttcgcccactaagccaatcactttactgactcctagccgcagacctcctcattctaacctgaatcggaggacaaccagtaagctacccttttaccatcattggacaagtagcatccgtactatacttcacaacaatcctaatcctaataccaactatctccctaattgaaaacaaaatactcaaatgggcctgtccttgtagtataaactaatacaccagtcttgtaaaccggagatgaaaacctttttccaaggacaaatcagagaaaaagtctttaactccaccattagcacccaaagctaagattctaatttaaactattctctgttctttcatggggaagcagatttg

SEQ ID NO: 391740 - DNA, 116 bp, Homo Sapiens
atactctggtttctcttcagatcgtataaatctttcgcctttcatcaaagatttccgtggagaggaataactctgagtcttaagctaattttttgagccttgctccgacaaggcta

SEQ ID NO: 391741 - DNA, 1000 bp, Homo Sapiens; identical to SEQ ID NO: 282386

SEQ ID NO: 391742 - DNA, 916 bp, Homo Sapiens
  misc_feature (3)..(3): n is a, c, g, or t
  misc_feature (6)..(6): n is a, c, g, or t
  misc_feature (11)..(12): n is a, c, g, or t
  misc_feature (45)..(45): n is a, c, g, or t
  misc_feature (50)..(50): n is a, c, g, or t
  misc_feature (57)..(58): n is a, c, g, or t
  misc_feature (65)..(65): n is a, c, g, or t
  misc_feature (119)..(120): n is a, c, g, or t
  misc_feature (122)..(122): n is a, c, g, or t
  misc_feature (133)..(133): n is a, c, g, or t
  misc_feature (136)..(136): n is a, c, g, or t
  misc_feature (147)..(147): n is a, c, g, or t
  misc_feature (171)..(172): n is a, c, g, or t
  misc_feature (223)..(223): n is a, c, g, or t
  misc_feature (263)..(264): n is a, c, g, or t
  misc_feature (309)..(310): n is a, c, g, or t
  misc_feature (314)..(315): n is a, c, g, or t
  misc_feature (318)..(319): n is a, c, g, or t
  misc_feature (327)..(328): n is a, c, g, or t
  misc_feature (333)..(333): n is a, c, g, or t
  misc_feature (335)..(335): n is a, c, g, or t
  misc_feature (344)..(344): n is a, c, g, or t
  misc_feature (360)..(360): n is a, c, g, or t
  misc_feature (376)..(376): n is a, c, g, or t
  misc_feature (643)..(643): n is a, c, g, or t
  misc_feature (845)..(845): n is a, c, g, or t
  misc_feature (871)..(871): n is a, c, g, or t
gantcngctcnngacacaactctctgagccttcggtgacctttcngtctngtgtaanngcactcntgtcyycctggcagcagttggacctcgcgatgtggattgtgccctcacccagcnntntttatgccctntcnccatggtgacnggattaggggtctcctgctcttcnntcctaaggaccactgtctgtgctgtgtctttcaaaggtcagaagagattgnacctttgtgtttttattttccctgtgtttgctttttctcnntggggaacctgtgttgctgctttgaaggtatattcatactggccnntcanntgnncaacatcnncaaantnactagttanggctttcaaaatatgntatttcaaaaaattanccgtctgtattttccatatgcagttataagtaggtttcatcggttatgttttattcctcagtttatacatttgattattgtaccaagcagagtacctttgaaattttttttcatttaaaaaatatggatcttggctcaggcctgtaatcccagcaaatttggaggccaaggcaaggggatcacaaggtgaagagatcaagaccatcctggccaatacagtgaaacgctgtcactactaaaaatccaaaaaattagytaggcatggyngcagctggtgyagtyccagtgtggtgtagtcccagctacctgggaggctgagggaggacaattgcttggaccctgtgaggcagaagttgcagtgagcaaagayggcgccayygtaccccacccygtgcaacaggacaaygagattctgtctaaaaaaaaattatatatgatatatattacatgttatgtgctatgccttatntgtaacatataacctcatatattttntatgtcatagtatataatatttatcctgtgtcatcttatatatac

SEQ ID NO: 391743 - DNA, 1000 bp, Homo Sapiens
tgccattataaatggtatcattaaaaacaaacaaacaaaaaatttactttccgtttgttgctagtatatgtaactacaatttatttttatactagcttcatgtccagtccagtgatcatctcaattaactaatcccaataatttgaggtatatatttttttgaattttctatgaaaaaaaatcatgtctgcacataagttgatttttatttctgcaatataattatttggcttattgtactggctaggctttgccagataattattaatgggtcataggagatatccttatctcattacagaagtcatacatctttcattatttcatcattaaatctgataattctttccatttttaaaataaatgccttgtttcagactaagaaaactctattttatttctagttttctgttatttaatattacaaatgggatttgagatgattattataattctcttttttgttaatttagaaaattgtattaattgatctaaaaattttaagccacccctgaagtcctgaaataaattcatttttaaaatttatacattgtattttattaattgataatttttcttgataatattttgtttatcattgtacttagtgatgaaataattattttttaggatgttggtatcaaggttatgctggactcataaaaagaatgtggcatattctcagtttataaaagtggctatttaggactggtataatttattatttgtttaaaggtttgagtacagagtttcttctggatatggagttttatccagataattattttaattagattcaattctaataggtttttaaattcaattctaattagattttttatttcttctatcagttttgaaaatctgtttttctaagaattttatttatttttttctatttattggcataaatttgtttataatattctgatttttttgattatgtattcccacaatcaccctgtgaaataaactaccttaagatttactggcttaaaac

SEQ ID NO: 391744 - DNA, 1000 bp, Homo Sapiens
atgcccccttttgtcccctacaggaggacttgaggccatctgccccccaacaggagggtgtggcatccaaagagaaagaggaagtggcagaggaggtaggagctgggctcctggggtgcaccatggggggttccttggtagggaccccatcccccacagacgcactgcttccctcctgggctcccagggcccagaggggcctcctgaccttccacagcccctacagggactgtgtacagggctaaccctgaacctgagtgggaggtccccccacggatgacccctcaggcatggggcacagaagacaacttttctcagcccactcagggtggcccattaaggctggggcctggagctgggtgtgcaggtcattctctctcccaggcccagagtgggggagactagagggctacaggccagcgtggatgacctgaagagcgctcctctgccttggacaccatcccctcctagcacaaggagtgcccgccttgagtgacatgcggctgcccacgctcctgccctcgtctccctggccacccttggcctgtccacctgtgctgctgcaccaacctcactgccctccctcggccccacccaccctctggtccttctgaccccacttatgctgctgtgaattttttttttaaatgattccaaataaaacttgagcccactcctgccatgcttcctctgggtgctgtgtagcttgaggaggggtccccaggtcctcccaggaacaggaacgggttcagcctgttgataggaccaggtatcctatagggacacacacagggcattcatgggacctgcgtgagccttcaggaacacccccaacccacccattgcctttaacatggaggaggcagcactgccttcggctccccaagacattcgacaggactcacagtcccatccacggggatagcttagctcagcctcaaggtagcccccgcctgcctgctctgagtccctgaggaacccactgtcagcaggaggtgaa

SEQ ID NO: 391745 - DNA, 1000 bp, Homo Sapiens; identical to SEQ ID NO: 282390

SEQ ID NO: 391746 - DNA, 1000 bp, Homo Sapiens
caaatagaaaagtaaaataacgaatatgcttttccaataacataatccccttctcacttgagaattttcctctaaaaagatatgctagatttatttcatgcttttatgtgcctctggtgtgtccccttataacctcctccatatcatttagggatggtctcagctgcaagtaagaactgccacaacagtgatgtaagccaaaaaaaaaaaaaaaaaaaaaagcaaagccaagcaaaacaaagcccatttaattatttcccataataataagtctgggagaagaagattccagagttggctcagcagcttagtgacagcaaggccctaggctggcattttcttggccttcccgatggtcccaagatgactctcatggcctcaaacatcacttcctcacatcctgtcagggagaaagaggcaagtgagcaacaacaatttttgttgttttgatcatttgtcagagaggaagaacgttcctaaaaactccgcctctgctgtttgacatcctcatcctattccttggccatggtggtatctcatggtcactcctctatctgccactgtaaagaggaactggattgctatattctgcttagacacatgaggatgcagcccaccttcccagaacatgtgcggaattagatttctacaaacacatttgtcttgcttctgcccaactctctcactagaatgcacattccataggggcaaacatttttgtctattttgttcacagctatattctcaacacctagaagagtgacagaaattcaataaatagttgttaagtgagcaaatgaatgcatgaataaggaaaagggtacatggctattgagtaggtaaccagcagtgttgatcacccccaacagcatacaactccagtctgatgaacatcatgctactaagtggccactcatcacccaagtctctgaccttactttttctctcttttctcccagggagtgagccataactggcggctgctctttcgccaatgagc

SEQ ID NO: 391747 - DNA, 649 bp, Homo Sapiens
  misc_feature (468)..(468): n is a, c, g, or t
ggatcctgcattgtgtggctctggtgtgggccagtggctacagctctgatgagccccctagcctgggaacctccatatgccgcgggtgtggccccaaaaaagacaaaaaacaacccaaacaaacaaacaaaaaaaaactgccttcaagctaaatgccctcatttccttcagcatttcttcacccagaatcggcaccatctatggaccctcggcttcactccgaacagcacaggctctgagttccggctgctgctgccacattctagcagcctaagtaacttaacctctcaggcctggtttccgctggtgaggcaagcagctcctctgccctagctcaaagggtgaatttagagccggaatgaaaatgcacggaaagcacccagccattatgctgcattaggcaccatcacagcatcagccttctcctcggtggacgcgatgggagggagagcccgcgttcctctctgncagggacgggccaccgctggcacacaggactgacggtcggctccatgcgagggtcactttctcgctctctgttcaaatgacgcgtcctcatcctgtgcctgtgaagtcggagggttttttttgaacccactgacaggactttacatttctgccttattaaatttcatcctgttgtttccaa

SEQ ID NO: 391748 - DNA, 367 bp, Homo Sapiens
cggcgagactggccttgtcttctaggacaagtgcatttcccctgcgcttcctgtctcactcttgagggacatcctctcctccgctcacaggtggacagactccctggatcttttggctgtaacgaatgtcaggaaacaaagggactgcgctgggactggggctggggctgcgtgcaggggaggttgcgtcagggctagctgggtggtggagggttgggggtggggtgactgttgcagaaacctctgtggtcctctggcaggcatttcaacatgtggcttggctgaggcacaagccccgtccaggttcccaggtcttctttgtgttcccttggcactcagggaaaggccattgatcccctttcgaccg

SEQ ID NO: 391749 - DNA, 1000 bp, Homo Sapiens; identical to SEQ ID NO: 114896

SEQ ID NO: 391750 - DNA, 1000 bp, Homo Sapiens; identical to SEQ ID NO: 282393

SEQ ID NO: 391751 - DNA, 1000 bp, Homo Sapiens
agcaatagtggacgtccctcccctagcctcgctgctgccttgcagtttgatctcagactgctgtgctagcagtgagtgaggctcccaggaatgggatataatctcctggtgtgctgtttgctaaggccattggaaaagtgcagtattagggtgggagtgcccaattttccagatactgtctgtcatggcttccctttgctaggaaagggaattacctgactccttgcacttcccaggtgaggcaatgccctgccctgctccgtgggctgcacccactgtctgacgagccccagtgagatgaacccagtacctcagttggaaatgcagaaatcacccatcttctgtgtcactcatgctgggagctgcagactggagctcttcctgttcagccaccttggaaccaaagccttgaagtctttttgtgataaatttgacatctggtcatttgtttttattatactttaagttttagggtacatgtgcacaacgtgcaggttagttacatatgtatacatgtgccatgtttgtgtgctgcacccattagctcatcatttaacattaggtatatttcctaatgctatccctcccccctccccccaccccacaacaggccccagtgtgtgatgttccccttcctgtgtccatgtgttcccattgttcaattcccacctatgagtgagaacatgtggtgtttggttttctgtccttgccatagtttgctcagaatgatggtttccagcttcatccatgtccctacaaaggacctgaactcatcattttttatggctgcatagtattccatggtgtatatgagccacattttcttaattcagtctatcattgttggacatttgggttggttccaagtctttgctattgtgaatagtgcctcaataaacatacatgtgcatgtgtctttatagcagtgtgttttataatcctttgggtatatacccagtaatgggatggctgggtcaaatggtatttctagttctagatc

SEQ ID NO: 391752 - DNA, 1000 bp, Homo Sapiens
tgtgtccaagtgttctcattgttcaattcccacctatgagtgagaacatgcggtgttcggttttttgtccttgcaatagtttgctgagaatgatggtttccagcttcgtccatgtccctacaaaggacatgaactcatccttttttatggctgcataatatttcatggtgtatatgtaccatattttcttaattcaatctagtattgatggacatttgggttggttccaagtctttgctattgtgaatagtgctgcaataaacatatgtgtgcatgtgtttttatagtagaatgatttataatcctttgggtatatacccagtaatgggattgcagggccaaatggtatttctagttctagatccttgaggaattgccacactgtcttccacaatggttgaactggtttacagtcccaccaacagtataaaagtgttcctatttctccgcatcctctccagcatctgttgtttcctgaatttttaatgatcaccattctaactggcatgagatggtatctcgtggttttgagttgcatttctcagatgaccagtgatgatgagcattttttcatgtgtctgttggctgcataaacgtcttcttttgagaaatgtctgtttatatcctttgcccactttttgatggggtcgtttgtttttttcttgtaaatttgtttaagttctttgtagattctggatattagccctttgccagatgggtagattgcaaaaattttctcctattctgtaggttgcctgttcactctgatggtagtttcttttgctgtgcagaagctctttagtttaattagatcccatttgtcaattttggcttttgttgccattgcttttggtgttttagtcatgaagtccttgcccatgcctatgtcctgaatggtattgcctaggttttcttctagggtttttatggttttaggtctaacatttaagtctttaatccatcttgaattaacttttgtgtaaggtgtaaggaagggatc

SEQ ID NO: 391753 - DNA, 1000 bp, Homo Sapiens
tgctcactgcaacctcgacctcctgggctcaagtgatcctcccagctcagccttcaagagtagctgggactgcagacctgcaccaccacgtccagctgcccggttaatttttttctgtcggtttgaagaggggagaaggtctcactatgttgcccaggcttgtctcaaactcccgggctcaagcaatcctcccactgtggcgtcccaaagtgctggggttacaggtgtgagccaccacacactgggctctgctctgcctttctgagtttggtttctgcttatggtggggagcttgttcccgttcttcccacaagaacccaggatgtggcacagcttccctgccgtcttccttcactcagttggctacgcctcccatcctagctccacttccagaactgccttcaccctaggctgggtccttgttttgtttttagagacagggtctcactgtgtctcccaggctggagtacagtggcgtgatctcggctcactgccacctccacctcccgagttcaagcgattctcctgcctcagcctcccgagtagctaggattacaggcatgcaccaccacgcctggctactttttatatttttagtagagatgaggtttcaccttgttggccaggctggtctcgaactcctggcctcaggtgatccacccgcctcacctcctaaaatgctgggattacaggcgtgggccactgcgcctagccagctgggtccttgttctgctgcccaagcttggccctggttccgtgtgctggttctactttttgttctcccatctgcctcctgcctcctcccctttgagcttagccccgccctctcagcctgatttctgtttcccaagtccagcagtgtcgtgggataggttttgctttcttttactgtctccatcctacttacacctccctgatcctggggtctggggactccccatggtttccttccttctgcaggcccaaaatgatggcccctcttaacccaaggcaggggatc

SEQ ID NO: 391754 - DNA, 1000 bp, Homo Sapiens; identical to SEQ ID NO: 282394

SEQ ID NO: 391755 - DNA, 1000 bp, Homo Sapiens
agccatgcttctcacacaaagcctgtttggtggtctcttcacacagacgcgcatgaaatttggtgccgtgactcggatcgggggacctcccttgggaggtcaatcccctgtcctcctgctctttgctccgtgagaaagatccacctaccacctcaggtcctcagtccaaccagcccaggaaacatcccaccaatttcaaatccggtaagcggcctctttttactctcttctccaacctccctcactatccctcaacctctttctcctttcaatcttggcgccacatttcaatctctcccttctcttaatttcaattcctttcattttctggtagagacaaaagagacatgttttatccgtgaacccaaaactccggcgccggtcacggactgggaaggcagccttcccttggtgtttaatcattgcagggacgcctctctgattatacactcacgtttcaagggtgtcagaccacgcagggacgcccgccttggtccttcacccttagtggcaagtcccgctttcctggggcaggggcaagtacccctcaaccccttctccttcaccctcagtggcaagtcccgctttcctagggggcaagaaacccccaatcgcttatttccgcaccccaacctcttatatctctgcaccccaatcccttatttccacaccctgacctctttgtgccccaatcccttacttccgtgccccaaccccttctctgcttttctggagggcgagaaccccccaccccttctccgtgtctctactcttttttctgggcttgcctccttcactatgggtaagcttccaccttccattcctcctccttctcctttagcctgtgttctcaaaaacttaaaacctcttcaactcacacctgacctaaaacctaaatgccttattttcttctgcaatgccgcttgactccaatacaagctcgacagtagttccaaatagccggaaaacggcactttcaatttttccatcctacaagatc

SEQ ID NO: 391756 - DNA, 1000 bp, Homo Sapiens; identical to SEQ ID NO: 282395

SEQ ID NO: 391757 - DNA, 1000 bp, Homo Sapiens; identical to SEQ ID NO: 282396

SEQ ID NO: 391758 - DNA, 1000 bp, Homo Sapiens
accttccagaccttccatctggtgagtgtagggaggcggagggatggcgggccctttaccaggtgtgacataagtgtagctggaatgcaagacagcttttggaaatggcacaagatgagctttcttggagtgcaggaaaaccagatccccaagaatagatggagccatgccaggagggtgtgttctaggctgcaccgggccaaggccagcacttggccacagccccaaaagtattcattcagcggatccttgtgcatccgtgaaacaggcactattgttagttacactttacagatgaggaaaagtgtaactagaagtgcccaaactctcctgccctgggtctggggacccctaactccagcgtgtggcagccacccacccctgagttatactggccccgtggatggaagcaggtgagacgcttggagagggcctagagggctctgggcactggatggacctggagcttgaagctcagcagtccctgcatggggtctgattgtctttcattcggcgcatgcgtgctgcagctggcccttccccctgccctctgagttgctgcaaagagcagtcagccccggggctgctgtccccaggtggagctgctatccctgggtggagcagcccgtgcctgccctcctgggaagcctggtgtttctcaacctcggtgaacatttgactcgacggcggcacttaaaacaaaaactgatgccagtacctcagcttcagacattctgatgtaactggtttgccatggagcccaggcagggtctttttcctttcttaggttccatggtgattgtgaaccagggagggataaggcaagaaaaaggccggagtcaggacacctgggcttggatcctttcccaccacttcgttttccattgcctggggctatgctgtccaccttctctgagcctgttttcctcatctgtctattggggatgttatcagcctcaaatagcagggtggtattagtgtgagactagatgtgaaggtg

SEQ ID NO: 391759 - DNA, 1000 bp, Homo Sapiens; identical to SEQ ID NO: 206295

SEQ ID NO: 391760 - DNA, 1000 bp, Homo Sapiens
aaaatgtgccatgcacagaacgcttagtatctaataactaagaattcctgttgcagccctttttcttttagtttttggcttctttgtttgggaaacctagcgctgacaggagctcccaatattctatttagatgtgttgcttatactgtgaactcagactgactgacttaggtaaccaaagtaggcacacaaaccaacttgtttcttctcatggctggagaaacctcagctctgtttgtatttattgtgtgaagctctttctacgctcccaaaggttgggagtgccattcgtggggactgtgctgtccccctcaccccaccccttaactagcaaagcctgatgtgtaagcccagaggaggtggcctggggatggccaccaacaaccttctcttaggactcctgtgtgtggttgctgggcagacccctggcctgaccctgtttgtgcttctctgatctgtagggaggaggctcattgctgctttctgaggtcctgttgtgtcccttccagaaagcatccttagaagagaggacccggtttgatcttctctgaagctcctatcctcttttcttgagggtccccttaaatctgagtggcaagcccacagtggcgagggccagtcgctggaatgtcggggctgctgttgaggtcctcaggctacactggttgtctgtgtcacatggcggtcgggcgtggactttgatccctgttgagagagcatgctgctgtgggcgctgggctggggaaggtccttccatgcttcatgctgccttggaggtttggccaagagggtctctgcccttggcggttgtcagggtcccaggtggaggactactcccagttctttggcttacggaaggtgtctgccatgctttgtgctttgggccgaatcgtctgagcaggctgggccttggaagagttgcgctgcatgagcttggggcctcccagcagctgcagcctgtgtagaaggtggtccaggcttagggaacaggagtgaacag

SEQ ID NO: 391761 - DNA, 1000 bp, Homo Sapiens; identical to SEQ ID NO: 206297

SEQ ID NO: 391762 - DNA, 820 bp, Homo Sapiens
ctaaagctgacgggaagaaggtaggtgggagcagcgctgaggtttttggaacgtcctcaagtgctgtgacaccgataaactcatctttggaaaaggaacccgtgtgactgtggaaccaagaagtcagcctcataccaaaccatccgtttttgtcatgaaaaatggaacaaatgtcgcttgtctggtgaaggaattctaccccaaggatataagaataaatctcgtgtcatccaagaagataacagagtttgatcctgctattgtcatctctcccagtgggaagtacaatgctgtcaagcttggtaaatatgaagattcaaattcagtgacatgttcagttcaacacgacaataaaactgtgcactccactgactttgaagtgaagacagattctacagatcacgtaaaaccaaaggaaactgaaaacacaaagcaaccttcaaagagctgccataaacccaaagccatagttcataccgagaaggtgaacatgatgtccctcacagtgcttgggctacgaatgctgtttgcaaagactgttgccgtcaattttctcttgactgccaagttatttttcttgtaaggctgactggcatgaggaagctacactcctgaagaaaccaaaggcttacaaaaatgcatctccttggcttctgacttctttgtgattcaagttgacctgtcatagccttgttaaaatggctgctagccaaaccactttttcttcaaagacaacaaacccagctcatcctccagcttgatgggaagacaaaagtcctggggaaggggggtttatgtcctaactgctttgtatgctgtt

SEQ ID NO: 391763 - DNA, 1000 bp, Homo Sapiens; identical to SEQ ID NO: 282400

SEQ ID NO: 391764 - DNA, 1000 bp, Homo Sapiens; identical to SEQ ID NO: 114897

SEQ ID NO: 391765 - DNA, 1000 bp, Homo Sapiens
ctaaattgttcttcatcctaaggcttatttcagtccctgtctcttcattgaagcttgtatggttatttctgttagaagccgtcatcctttgtttctttgaattctggaaggtacaatggtgtggactgaaacataagctttggattcagaaatatgtgagtctgaattctggttccacctttcaccaattctgagataaaagacaagttagtgatgtcttgggatagagggataatagtacctacttaaagggtcattgtgagcattagatgaggtgcaaacacaaaggtctccagcacataacagatttcttcctcatcatttttgctgctcaatggtccccaaaggtattatgggtgatgcaaaggcttttatcaaaattttctgcagcaccttttaaaaagtcttgtgcctggccatcactaagatgagagacacccttgaactgaactgaatgtatgggactttaaaaaactcaaccgagatttgtttttcctggaacacaactcagtaaacaagtggatagaaaaatgtaacccaacagagggagaagggaagcgcaatggtttcatataacagccatgccttcttaggaaaaagctgtgatgccttctgagagtttgctctcagtcaggcaggatcaaagaagtacaactccttagtacaatcccttaaaccgtgagtcctgcacagcacctcactaatccattccctgcccaggtgatgtgtgcataggtgaagagtcagatctccataagtcagacactcttcccccttttcagctccctgaccctcactactgtgtgctctggtctggccccagctgccaggccattagtattggtctaagaaagcaagaccaggacgggcagctgagaggaaagtcagaggccaccaagcatgaaaagagagagatgaggctgtcattgctcaaagtcacccactctgggtgtgttttatgactgtttctggattttggaatattctcccctttgtgatc

SEQ ID NO: 391766 - DNA, 1000 bp, Homo Sapiens; identical to SEQ ID NO: 282403

SEQ ID NO: 391767 - DNA, 1000 bp, Homo Sapiens
agtctgttaaagctttgaaagtctatagacagtccagtgatataatcttgaactgctcagaaacttgtatgcaagagtacttgtcagtatcttttccataaatcttttgaaatagaagcaattttggactgtagctgattgcaactgctttcaggaagaatcaaaacaactatctgtgaatgaccatcatgtaaaatgactattgctaaaactctgataagagtttgatataataaagagagtaactccagccagtacaccagtcatgatgctgacattggccccaactgagagatgaaaagaactttcttgtcctgaaacagctgtcatggaaaaaaaaagaagagaaggaataaacaataaagacagcaagggttttaaccaattattttttgagatagggtctcactctgttgcctaggctggagtgcagtggtgcaatctcagctcactgcaacctgtgcctcccaggctcaagccgtcctcccaccttgctctcctgagtagctgggactagacgcacacaccaccatgcatgcttgatttttgtatttttgtagagatgggcttttaccatgttgttgaggctggttttgaattcctggactcaagttatccacccaccttggcgtcccaaggtgcaggcattacaggtgtgagccactgctcctgccggtttcatcctttttataataagaatgaactccttatgtaataataaataaataaacagaaattatttgctttggatgtagcaaatgtagatttagattgtccagagtcaggagctaagcctcattttttttttttgttttagctcagtgtagagtgcattgaagttgtcctaaaaataattccatatagtaagccaactttaaaccctgctcacagccagatctgccaagagtgagccacgtaaaattaccaaaaagggtggttctgactgactccttaacaataacgtggcttacaaacaaagactgatatgaaatagttgatc

SEQ ID NO: 391768 - DNA, 1000 bp, Homo Sapiens; identical to SEQ ID NO: 282405

SEQ ID NO: 391769 - DNA, 1000 bp, Homo Sapiens; identical to SEQ ID NO: 282406

SEQ ID NO: 391770 - DNA, 1000 bp, Homo Sapiens; identical to SEQ ID NO: 195603

SEQ ID NO: 391771 - DNA, 1000 bp, Homo Sapiens; identical to SEQ ID NO: 195601

SEQ ID NO: 391772 - DNA, 1000 bp, Homo Sapiens; identical to SEQ ID NO: 195600

SEQ ID NO: 391773 - DNA, 1000 bp, Homo Sapiens; identical to SEQ ID NO: 282409

SEQ ID NO: 391774 - DNA, 1000 bp, Homo Sapiens
ggttgtccagaaaaacggtgatgatgcaggcctacaagaaggggaggcgggacgcaagggagacatccgtcggagaaggccatcctaagaaacgagagatggcacaggccccagaaggagaaggaaaagggaacccagcgagtgaagacggcatggggttgggtgagggaggagagatgcccggagaggacccagacacggggaggatccgctcagaggacatcacgtggtgcagcgccgagaaggaagtgctccggaaagagcatccttgggcagcaacacagcagagagcaaggggaagagggagtggaggaagacggaacctgaaggaggcggcagggaaggatctgggccagccgtagaggtgacccaggccacaagctgcagacagaaagcggcacaggcccaggggagagaatgcaggtcagagaaagcaggacctgcctgggaaggggaaacagtgggccagaggcggcgcagaagccagtagagctcaaagtggtccggactcaggagagagacggcagcgttagagggcagagttccggcggcacagcaagggcactcgggggcgagaggagggcagcgcaaagtgacaatggccagggccaggcagatagaccagactgagctatgggagctggctcaggttcaggagagggcagggcagggaaggagacaaagtccaggaccggctggaggggctcaacatcggaagaggggaagtcgagggagggatggtaaggaggactgcatgggtcagcacaggctgccaaagccagggccagttaaagcgactccaatgcggaagagagtaggtcgaaggggaatggtaaggaggcctggggcagagtggtcagcacagagtggctaagcccagggccagttgaagcggctccaattcggaagtggggtggtcgaaggggaatggtaagggggactgggacggggtgtcagcatagggtggcaaagcccagggccaggaacgacggggcggatc

SEQ ID NO: 391775 - DNA, 1000 bp, Homo Sapiens; identical to SEQ ID NO: 282412

SEQ ID NO: 391776 - DNA, 1000 bp, Homo Sapiens; identical to SEQ ID NO: 282413

SEQ ID NO: 391777 - DNA, 1000 bp, Homo Sapiens; identical to SEQ ID NO: 282414

SEQ ID NO: 391778 - DNA, 1000 bp, Homo Sapiens; identical to SEQ ID NO: 282415

SEQ ID NO: 391779 - DNA, 1000 bp, Homo Sapiens
cggagccctggctgggctcccgctttccattttgcaatcagggaaaccaaggcccagaggccaccgtcacaggcagagctgacgttccagccccggcctcctcctccgagcccagagcttgctgccttcctcttcctcctcctccctcacccgatgattctgctgggagccgcccgggagcccaggaggggcgggtatgcggccgccttgaagtgggctgtcaccttcctgtctcctgccgtcatcatggctgtgatctcaccaggctgtaattacctctttgtgtgtcttcctgcccctcaaggcagctgtggctgagctgcagccctaattacagcccaaaataagcaggtggggcctcccacacgtatgccagctgctgtcctgagcacctggctccagccccgttctcccgtcctcacaagaacccccactccgtagatgcacaaggccaggtgcagaaaaggagagtgcacacagctgggaggggcagacgaacacccgaggcaggcctgggccaggcacagagccctgcacaccgaggggccgcgtggatgcttgcggagctggaccagggctgccgcccccagagaggagagcatttatgcagaagtggtggtggatggcgctgggtaatcccggcccacagacctgtcagtcagaagctgcgagcacgacaggaaccaacaaccccaaacctcagtggcttcaacacaagcaaaactcttctcgcttactctgcaggggacgtccagttgtttttttgttgttttttttgagatggagtctggttctgtcacccaggctggagtgcagtggcgcgatctcggctcactacaagttccgcctcctgggttgacgccattctcctgcctcagcctcccgagtagctgggactacaggcgcccccaccacacccggctaatttttgtatttttagtagagacggggtttcaccatgttggccaggctggtcttgaactcctgacctcaagtgatc

SEQ ID NO: 391780 - DNA, 1000 bp, Homo Sapiens; identical to SEQ ID NO: 282416

SEQ ID NO: 391781 - DNA, 1000 bp, Homo Sapiens
gcctttacggtgccccccacgtctgtgctgaacagaacgcagctccaccctcgcagtgccctcagcccgcccgcccgggtctgacctgataagaactctgctccgccttcgcaatacccccgaagtctgtgcagaggagaacgcagctccgccctcgcgatgctctccgggtgtgtgctaaagacaacgcaactccgccctcgcaaaggcggcgcgccggcgcaggcgcagagaggcgcggggcgccggcgcaggcgcagagaggcgcggggcgccggcgcaggcgcagagaggcgcgccgctgttggggagacgcggcgcagggggtagacgcacgccggcgcctccccggaaggggaggggtcgctgagcgggcgggagtgaggcgcggcgcaggcgcagagacgcacgtcgctgggctgagggtggcggggagtgttgcagtcgcacagtcgcgcgccgccgggcggggagcgcgggggtggcgcggtgcacgcgcagagacacacgtccccggcggcgcagagacgagtggaacctgagtaatctgaaaagcccgtttcgggcgccccctgcttgcagccgggcactacaggaccagcttgcccacggtgctctgccattgcgtcccctactggcgactaggacaactgcagggccctcttgcttacagtgctgtccagcgccccctgctggcgccggggctcggcagggctctcttgctcgcagtatagtggtggcacgccgcctgctggcagctagggacattgcagggccctcttcctcacattatagtggcagcacacccgcctgctggcagctgggcacactgccgggccctcttgctgccattgtcgtggctgcacgccacatgcaggcagatggggactacgcagggccctcttgctcccggcgtaacggctggcgtcccctactggccgcctcctgcaccacttaaagtcagagcgccagttattaatccccatcagttctgcaaatt

SEQ ID NO: 391782 - DNA, 1000 bp, Homo Sapiens
taataaactttcctcttgcaaagcagacatgattctcatttgtattcattcttttcaaagtgttgactctctgtgtgcttcttataaagccacttgaaagcagaaggaggactttataggttaatcatctcctaaaaggtcttcatcaccttcattaacattcattaagcacagtgagtcccagcatccacttaggccagcataaaacaagtaggatcactaggacaagaggcctcgtctgaatatgataaacatatttctcatgggaccttactcagtaaaatgcaacggtgagcatctctagacagttccactcattcttttaagtccctagcagggatgacagaagttaatatttattgaacacctaccaaatgccaggaattgtgctactaattttttctcttcctcacagtgaggaagaatcaatggcaggactgaacccagagttcactctctgcttgtcagttacacatgaggtgtgattatgagaggacaaaattgatttcaaacaagcacccagagcttatacatcctcctggggagacacaatgctgttagtgctcaaaacatctctgaaactctcctttgtgaaatactgaataactcaatactaaaaagcaccaccttgccatcttccatatttgagcaatacccaacctattttgaaagtgtttcttttctcacttgaattgtttaaccatgggaactacatatgaatttcgggaccctccccctcaaagttatttagaatcaaattaggatattacaagtcaggtgtttgcaaatgctaacagtgaccacggtactggtgcctggcccctactggtgcctgctgatgtctaaccaaggttaatggctcccatcactgtgcatgctgtggtttgtgccaaggccactccctcagtctgcagattattcccagattaaccaatctgctaattatgtcttctctccttgagatgaagctgatactatctcccctgctgtgatgatgccc

SEQ ID NO: 391783 - DNA, 1000 bp, Homo Sapiens
cttcttcatggtggcatagtgtggtggaggtggatcttctctagggtcagggaaacttgggttcaaatcccaccttggtgactctgaagtgggatttgaacccaccttgctgagtgaagttggccaggtcactgcattctcttgagacctattccttgtttgtggaagtaggatagttgtatttccctctcactgtggttgaggggtaatgcatctaatgttcctggcatctagaaggtgttcagtggatattggtttattggggctccctaggaaccagcaggtacaatctcttcctcccagagagaaaaaggagctgaagagatagtagcagaacccactctcagcatcggggccctagattctacgttggtggctggaaagtttggccatattccttgttcatgtacatgcaataataaaagccatcttctgttgtcattaggcctgtttctcactccaagtagcctaactgaatccaaaaaagcattcattgggctgtcagaggacaagactgtttggtgggctcttctaatgaggaacccacaagagtcatgttttaagaagtggccatgaccctccctgaccctcagtgtgatggggttgtggagatccgacctgtccccacctttcttggccaggtcacacccttaacaagctctacctatgaggtcccatggctaggtgtgacaggaggtgccactcaggtacatagaaaatgaaggctagaggctggcaggtgggtaaccagtgcagtcaggacacctggaccctggggttttactcacattcgttatcctagcctgagagcttagggctccctctggtaccaaatcccagacatcttttcttgcaagtgattctcccgcctggacattctgtgcctgtccctggcctctctgcctcacatactctcaccgactggatggatatagccctgaatgtggcacaataggctttgctttggccacaataactgcaaccaggtgtctcttatttt

SEQ ID NO: 391784 - DNA, 1000 bp, Homo Sapiens; identical to SEQ ID NO: 282418

SEQ ID NO: 391785 - DNA, 1000 bp, Homo Sapiens
caccaccctggagcactctgattgtgccttcatggtagacaatgaggccatctatgacatctgtcgtagaaacctcgatattgagcgtccaacctatactaacctgaataggttaataggtcaaattgtgtcctccatcactgcttccctgagatttgatggagccctgaatgttgacctgacagaattccagaccaacctggtgccctatccccgcatccacttccctctggccacatatgcccctgtcatctctgctgagaaagcctaccatgaacagctttctgtagcagagatcaccaatgcttgctttgagccagccaaccagatggtgaaatgtgaccctggccatggtaaatacatggcttgctgcctgttgtaccgtggtgacgtggttcccaaagatgtcaatgctgccattgccaccatcaagaccaagcgtaccatccagtttgtggattggtgccccactggcttcaaggttggcatcaactaccagcctcccactgtggtgcctggtggagacctggccaaggtacagagagctgtgtgcatgctgagcaacaccacagccattgctgaggcctgggctcgcctggaccacaagtttgacctgatgtatgccaaacgtgcctttgttcactggtacgttggggaggggatggaggaaggtgagttttcagaggcccgtgaggacatggctgcccttgagaaggattatgaggaggttggtgtgcattctgttgaaggagagggtgaggaagaaggagaggaatactaaagttaaaacgtcacaaaggtgctgcttttacagggaagcttattctgttttaaacattgaaaatgttgtggtctgatcagttaatttgtatgtagcagtgtatgctctcatatcaattactgacctatgctctaaaacatgaatgcctttgttacagacccaagctgtccatttctgtgatgggttttgaataaagtattccctgtcttaaatgaattc

SEQ ID NO: 391786 - DNA, 1000 bp, Homo Sapiens
tggtgtctgctaccatgagtggggtcaccacctgcctgcgcttcccaggccagctcaatgctgacctgcggaagctggctgtgaacatggtcccgtttccccggctgcacttcttcatgcccggctttgccccactgaccagccggggcagccagcagtaccgggcgctgaccgtgcccgagctcacccagcagatgtttgatgccaagaacatgatggctgcctgcgacccccgccatggccgctacctgacggttgccgccgtgttcaggggccggatgtccatgaaggaggtggatgagcaaatgcttaatgtccaaaacaaaaacagcagctattttgttgagtggatccccaacaatgtgaaaacggctgtctgtgacatcccacctcgggggctaaaaatgtccgccaccttcattggcaacagcacggccatccaggagctgttcaagcgcatctccgagcagttcacggccatgttccggcgcaaggccttcctgcactggtacacgggcgagggcatggacgagatggagttcaccgaggccgagagcaacatgaatgacctggtgtccgagtaccagcagtaccaggatgccacagccgaggaggagggcgagttcgaggaggaggctgaggaggaggtggcctagagccttcagtcactggggaaagcagggaagcagtgtgaactctttattcactcccagcctgtcctgtggcctgtcccactgtgtgcacttgctgttttccctgtccacatccatgctgtacagacaccaccattaaagcttattctaagtgtgtggtttcgctttgcccattccttccagtaggccctccgggtgctgttgccgaatgtcagggcgtagttgtcctgcatggctgcggggagccaggctgcagctgagctggggcttatgtgcccaggaccagcatgggctggacacccaggcttcagagaagtgtggggctgccctgggccctgggtatctgc

SEQ ID NO: 391787 - DNA, 1000 bp, Homo Sapiens
ctttggggtaggtgttattttctcactttgcagatgagaaaattgaggctcagagcgattaggtgacctgccccagatcacacaactaatcaatcctccaatgactttccaaatgagaggctgcctccctctgtcctaccctgctcagagccaccaggttgtgcaactccaggtggtgctgtttgcacagaaaacaatgacagccttgacctttcacatctccccaccctgtcactttgtgcctcaggcccaggggcataaacatctgaggtgacctggagatggcagggtttgacttgtgctggggttcctgcaaggatatctcttctcccagggtggcagctgtgggggattcctgcctgaggtctcagggctgtcgtccagtgaagttgagagggtggtgtggtcctgactggtgtcgtccagtggggacatgggtgtgggtcccatggttgcctacagaggagttctcatgccctgctctgttgcttcccctgactgatttaggggctgggtgaccgatggcttcagttccctgaaagactactggagcaccgttaaggacaagttctctgagttctgggatttggaccctgaggtcagaccaacttcagccgtggctgcctgagacctcaataccccaagtccacctgcctatccatcctgccagctccttgggtcctgcaatctccagggctgcccctgtaggttgcttaaaagggacagtattctcagtgctctcctaccccacctcatgcctggcccccctccaggcatgctggcctcccaataaagctggacaagaagctgctatgagtgggccgtcgcaagtgtgccatctgtgtctgggcatgggaaagggccgaggctgttctgtgggtgggcactggacagactccaggtcaggcaggcatggaggccagcgctctatccaccttctggtagctgggcagtctctgggcctcagtttcttcatctctaaggtaggaatcaccctccg

SEQ ID NO: 391788 - DNA, 1000 bp, Homo Sapiens
ggggcaggcagcaggacgcacctccttctcgcagtctctaagcagccagctcttgcagggcctatttatgtctgcagccagggtctgggctgggaggctgataagcccagccccggccctgttgctgctcactggtcctggcaatgtggaacttaagagttcaaggatcagctctgtccctggggctgggcaaatagagtgggcaaacagcaagctgcgggggctgcagggcaggggtcaagggttcagtgggggcgggaggggagtgtctgcaggcttgcaggtctcccgggtggggtcggggttccctgcactcatccccttcccctccatgggagtgtgtgggcagttgccattgtccattgtgttggcagaggaggggaggggagggacgctgggactcctccaccaaggagactgcctcccccaccaccagcattccagggagactacttcactcccctcccccttcccccgccctgtcctcccaccagtgctcttctttagtccccagcaggtcctccaggcctctctccaagcctcccaaactggtaaacctggggagaggggagagccctccgtggctcccagactgaggtttcggagacctcttgcatttcaaaacactccagagatcaattcggagctgccaacttttaattttgtcatgtaaagatattgtccgcctccaaaaaaccctcaccatctacagtgaccatcacttcaaaaaggaaaggctttaacaaaaaagggcataatctcagaattacattacagaattgaagccccttagattgaagacgtctccctttgcattgttcacacttatatttgatcacgcacaggtgtgactggatctcagcccttgggaagccctggtgtggggagaagacctctgggcaaaggaagtggcaggagacctgctttctcatttcacttggcctccatcttgctggaggaagatcgtgggcaagttatataatctctctgagcctcggtt

SEQ ID NO: 391789 - DNA, 1000 bp, Homo Sapiens; identical to SEQ ID NO: 206298

SEQ ID NO: 391790 - DNA, 1000 bp, Homo Sapiens; identical to SEQ ID NO: 282421

SEQ ID NO: 391791 - DNA, 1000 bp, Homo Sapiens
wctskctgcagtatttaccatgaaagtctccctttttgaaacatccttcttttgtttctgagattctgtgttccaaggttcccttcttcctcctgggaagttccttctcagtttctcctttgctggttcatcttcctccaaaggttgattttccgcaggcttgatccttcttgtgccgtactgtctctggaacaatttatagagcattgaggctatctcgtgtttgaagatttggtagaattccctgtgaaaccatctgggcctgacgctttttcatgtgatatttcctttataactttctcaatttttttttctgtggaaattggtctatttaagctttctaacatctaatggagaaaattttagtgatctgtacttttctagcaaattatccctttcatctggcgttttcaaatttatgttggtagaggtctacaaagacatcctttattatttttaaattttttcatcttatttcctccatgccctcattttgtgtttctgtgcttttccccttttttccttaagttatctaatggtttatctattttattttgttatttttttcaaaaactacagaattttgaattattaatwagatctgtttttctgtttttttcccctcattcttttcttctactttcatctttttttgcttgttttttcctgagacaaggtctctctctgtcactcagactgacgtgcagtcagtggcattgtctcagctcactgtagcctctacctcctgggctcaagcaatcctcccacctcagcctcccaagtagctgggactacagtggtgcaccaccacacttggctaattttgataatttttttttgtagagacaaggtctgcccatgttgcccgggctggccttgaactcttggcctcaaataatcctcctgcctcagtctcccaaagtgccggaattacaggcatgagccactgtgcctggcctactttaatctttattatttacttccatgtcctttcttttgg

SEQ ID NO: 391792 - DNA, 1000 bp, Homo Sapiens; identical to SEQ ID NO: 206299

SEQ ID NO: 391793 - DNA, 1000 bp, Homo Sapiens; identical to SEQ ID NO: 206301

SEQ ID NO: 391794 - DNA, 1000 bp, Homo Sapiens
ggcggttactcctgcaggattccagcttctattgaagaccagctgagacacaactactagattcttggattttccattcatagacagctactgttgggttagctggaccacagcctacactgcagaaggaatgaagagtaaaaagcccctgaagatcaccatggaagacagccggaggcttaatgacccagcggaacaaggcggcctctgtcccgcgcccgtggggccatcatactccgaggcctggggctacttccatctggacccagctcagcctaggcaccggatgatgagcgcctgggccacctgccgcctgtgcgggctgcaagtgggtggcctccccaacttccagatgtggacgcgggcgctgtgccagcacctgagtgatgtgcacctgccggagctgaagaagagcgctgctccgagctcgccgaccaccatgccctgcccgccgccgcccagccccaccatggctgccgagggcgactgggcacgcctgttggagcagatgggtgagctggccatgcggggcagccagcgggagctggagctggagcggcgcgaggcggccctaatgcaggcggaactcgagctggagcgcaagcgccaggctctgaagcaggaggcacaatccgtggagcaggagcgccaccagctacaggtagagcgtgaagcactgagtaagtggataaagaagcagagccccggtgcacaggtcccggaaccgccctctcccctgcctctgctccccaaggaggaccctgacatccatgacaacaacagtgacaatgatatggtcaccaaggtcctgctgtagcatgactgaccgctccatgtgtaaacctaaccataggctgcaggcgcggcagcgccccccagtccagtagcctggattaggtacacagaccggatagtcctcacagctacctctttgtagtcctgaagcatttttaagccagaaggttctctaacaccagagactcatccacgcgactttttt

SEQ ID NO: 391795 - DNA, 1000 bp, Homo Sapiens; identical to SEQ ID NO: 282422

SEQ ID NO: 391796 - DNA, 1000 bp, Homo Sapiens
atcaggcttctgagcctgttggctgtcagggtcggactgtgccccataggcgccatggcagtccccatgcaatccaccaggtgtcaccaggcagcatacaagtaacaggcctggaaggtccccaacagcccagctggacatgctcactctggggctcttcattcagtggcacaaactccaggacccagtgagggaaatgggaacccaccacgctgagcagtatggctaaatccatttattccaaaatggaaagcaaaataaacaggagtcgcatcaccaaggcagccaggaccccatcccctcctccttcctctgtcctatgctatcaataaataagtttcccagccacaaataatgattagaacctcctcctcatatgccagctccaacctccgctaggtactatacagggggtggccctaccacccggaatatacaaaatgttacacagatactatatgtacactgcggaaggggggccaccacagcagcccatgccctcgcctgctctacggttagctccactgtcccacctcagctgcctctctgaataagatgggagccccctgagggaaaagttgctttggtgagagtagggaggccatcaggcctcctccaaacaaaccagctctaccagcctctggctcttaaataataatcatcatcatccagaaacttaaggactcagccctggtcaaggtggcaaagggtctgtttttctccccccattagacaggggtcttgtcttgctaccctaatggtaaaggggtgactgggaagggttggtaagaacatggtagggatggagactccagccccacttctctgggcttatgctgacagagacctgcttttatttttatcccttgagttttttaaaaaaatccagtaactttattcataactttttcaaaaacttttcataaaacatttttctactttttttccacaacttttgccgcaacttttccacagcattttttatcccataactttttca

SEQ ID NO: 391797 - DNA, 1000 bp, Homo Sapiens
gagcagtgaaaaggtcacacccttttcaagggacacttttcctggaaagtccctggagcttagctggatctcaccctgtgaagccagctctggccactaggggacagggccctgaactcagcctggagggaacctgcggggcagccggcactctggagggacagacaggccacctggtgcagacaggagagggaggcagggggacagaacggaagacacttagggtggatggaagtcagtgcccttgggcgcaggtatctgccttccctgccacagctacatcaggcttctcaaccagttggctgtcagggccagactgtactccgtaggtgacatggcagtccccatgaaatccaccaggtgtcaccaggcagcatacaggtaacaggcctggaaggtccccaacagcccagctggacattctgagacactctggggctcctcattcagtgggacaaactgcaggacccagtgagggaaacaggaacataccaggccgagcagtatggctaaatccatttattccaaaatcaaaagcaaaaaaaaaaaaaaaaaaaaccgagtaccatcaccagggagccatgaccccatccccgcctccttccttgctcctatgctagcaataaataagtttcccagccgtgaacaattataagaacctcttcctcatatgccagctgcaacctccggtaggtacgatacagaatgttacacagatacagtatgtacacgggggaaggggggccacccccagcagcctgtgccctcacctcatctacagttatctccactgtcccgcctcagctgcctctctgagtaagaagatgggagcccccctgagggaaaagttgctttggtgagagtaaggaggccatcagacctcctccaaacaaaccaactccaccaacctctggctcttacataacaaacatcatcatccagaaatgtaaggactcaggcttggtcaaggtggtaaagggtctctttgtctccctccatt

SEQ ID NO: 391798 - DNA, 1000 bp, Homo Sapiens; identical to SEQ ID NO: 282425

SEQ ID NO: 391799 - DNA, 1000 bp, Homo Sapiens
taagaggtttttcctctttgctccctccaatcttgagattgggttttgctttagagtgcaagtatcataattccgtatgatagatggggccctggacacccatctcaacagggtcacttggtaattaacaataatagccatataaatgcggatacaggttactaccctcaccctttaccttcctcaggtaacagtcgtagataccagcttttttttttttttttttaaattggctttggccagtagctaaagtgcaagactgaattaatgagaagatatattaaatgtagtcataggggactgaggagcaagggtggccttgaagaggccaaaggaatgtccatttgctgagtttcccttccttatgtctccagtctggtgccaggtagtggagtaaaaaaggagacagtttatttttttattctatgtgcacacttacagtatacatatatatttatatcacaatttacgaaaccaaaaagttgagtttccaatggaacccttgttttttaataatcgactttttaaatgtgatcaggactataatattgtacagttattatagggcttttggggaaggggaggatagcgagaagatgctctgggggttttgtttttgcttttccttcagggttttatttttgactgttttgttttcttgttggccatttctgtattgctggcatctgtgctaagctttacagtggcaaaaataatgacatgtagcaaagattttcaaacaaaatattttttccttttgtaaaatttcttgtgttgtgtgatcttgattgcggctttatcattcctttccagttcataaacaacaggcacccacaaccagaggaatctatagtttaagctccagacatacaaacataaggcacattgtgtctttaatttcaggaatcagaaatcatagggttctgatcacattgcacgcctcccccctcacttgtcctcctgatcctgacacattctgagtaacatcagcaggaatgct

SEQ ID NO: 391800 - DNA, 1000 bp, Homo Sapiens; identical to SEQ ID NO: 282426

SEQ ID NO: 391801 - DNA, 1000 bp, Homo Sapiens
gagtaaatttgtaccagtagagtgagatattgctgaaaagatacctgaaaatgtggaagcgactttggaactgggtaacaggcagaggttggaacagtttggaggactcagaagaagacaggaaaatgtgagaaagtttggaactccctagagacttgttgaatggctttgatcaaaatgttgataatgatatggacaacgaactccaggttgaggtgggtctcacagggagatgagaaacttgttgggaactggagcaaaggtgactcttgttaagttttagcaaagagactggtggcattttacccctgctctagagatctgtggaattttgaacttgagagagatgatttagggtatctggcagaagaaatgtctaagcagcaaagcattcaagaggctattttgtgctgttaacggcattcagttttataagggaagcagggcatataagtttggagaatttgcaacctcacaatgcaatagaaaagaaaatcccattttctgaggagaaatgcaagccagctgtagcaatttgcataagaaacaattagccaaatgttaatccccaagacaatggggaaaatgtctccagggcatgtcagaggtcttcacagcagcccctcccatcacaggctcagaggcctaggaggaaaaagtggtttcatgggccgggcccagggtctctctgccatgtgcaacctagggacttgttaccctgtgtcccagccactccagccatggctgaaagggcccaatgcagagcttgggccatggcttcagagggtgcaaggcccaagccttggcagcttccatgtggtgtttagcctgcgagtgcacagaagtcaacaactggggtttgggaacctctgcctagatttcagaagatgtgtggaaacacctggatgtccaggcagaaggttgctgcaggggtggggccctcatggaaaacctctgctagggcagtgtggaagggaaatgtggggtcagatccgaattc

SEQ ID NO: 391802 - DNA, 1000 bp, Homo Sapiens; identical to SEQ ID NO: 282427

SEQ ID NO: 391803 - DNA, 1000 bp, Homo Sapiens; identical to SEQ ID NO: 206303

SEQ ID NO: 391804 - DNA, 1000 bp, Homo Sapiens; identical to SEQ ID NO: 206304

SEQ ID NO: 391805 - DNA, 1000 bp, Homo Sapiens
taagacacacagctaatcctgattattcttcctttacatgtgaccatagaacttcacacaagttcaagatacatttgttgagcacatcagtatcagttcagtcactcagtcatgtccgaatctttgtgaccttgtggactgcagcacgccaggctttcctgtccaccaccaacccctggagcttactcaaactcatgtccattgagtcagtgatcccatccaaccatctcatcctctgtcatcctcttctcctgccttcaatctttcccagacattggagtcttttccaatgagtcagatcttcacattaggtggccaaagtataggagtttcagcttcagcatcaatccttccaatgaatattccttgatgtacccctttcgcagtttggaaccagtctgttgttccatgtccagttctaactgctgcttctggacctgtatacagatttctcaggaggcaggtaaagtggtctggtattcccatctcttgaagaattttccacagtttattgtgatccacacaatcaaaggctttagcgtagtcaataaagcagatgtttttctggaactctcgtgcttttttgatgatccaatggatgttggcaatttgatctctggttcctctgccttttctaaatccagcttgaacatctggaagttcatggtccacgtactgttgaagcctggcttggagaattttgagagttattttgctagcatgtgagatgagtgcaatcatgtgggtgtttgaacatactttgtcattgcttttctttgggattgtggcagtcctgtggccactgctgagttttccaaatttgctgacatattgagtgcagcactttcacagcatcaccttttaagatttgaaatagctcaactggaattccatcacctccactagctttgttcatagtgaggctttctaaggccgtttgactttgcattccagggtgtctggctctaggtgagtgatccgttgagcctgcagcggccgc

SEQ ID NO: 391806 - DNA, 1000 bp, Homo Sapiens
aatgctcttgtttgaccagtggagaaaccaagaccaggaaggcagtgtagtttagcttccgtaggacagtcagctgggaaatgtagagattccccactggggttttgaccactagtccttgcaatcttagtctttctctcacttttttagttttaattcctaagacaaaacaaagaaatgtactaaggatccaaacaaagaacctggaaaaagtaactaaaaattaaacttaggaaatcattcctaaaacaatcactgttattattttttaagtgttctccttccctctttgtttttggtcttaatctcagtcagatacatatcatctgtagttccttgtattaatttggtaacaattccattttagattactattatctccaggatatagtatttaaaaattattatccaagtataattgatgctgtgacctcttgtaactgttgtgaatgtggtgaatcgaggtttgctatcattgataacctgtctgaattgctctgtcttgcccgccatctggtgcacagaggctgtaactcccatgtcccagctgtgtgtgtatggccagtcactgtaaatcctgccctcctctgtcctcacataggtaggcacgagacggtacatggctcctgaggtgctcgagggagccatcaacttccagagagatgccttcctgcgcattgacatgtatgccatggggttggtgctgtgggagcttgtgtctcgctgcaaggctgcagacggtaagtaggatggcagccctgggcatcctagattgagtgatagggagcagtgggaccttagagtgatcctgccaggctctctctttctcctaggacccgtggatgagtacatgctgccctttgaggaagagattggccagcacccttcgttggaggagctgcaggaggtggtggtgcacaagaagatgaggcccaccattaaagatcactggttgaaacacccggtaaggggcctggttcaggcaactttgcaggggggt

SEQ ID NO: 391807 - DNA, 1000 bp, Homo Sapiens
aaagtataaaggacaaatataacatgtttaaatattgagcattcttagcagtataaagcacagggaatgatatgaaggtgagaacttcactacacattcagaaaatatgactcaatgtttactttagagttaaatttgttaagcttcaaatactactcttacacttctttttaataaaactttctgactcttgcaggcataattaatatcctgtcaacaaaggcagacaaaagtagatatttccaaatagtactttaattcatgctttagtgatagctgtaatgatgtttaaatgtagtccaacatattattttaccaaccctgcaggtacctctcatggtgcaccaccagcatgagggcctcagttgtcttacggtggaagaagccgccatgattataacaatacatgagatagatacggcagaagtcaagagagttacgcaaggagatgtggtgatttttattcctgtggtcatgagcatgttggcagaaaagacctaaggaatccaccttctctaggtagggtgcaccctgctcctcgtgaaacatgtggtagctcaagttatgtggcatctacaggagatggtggggaaagttgatctggaaaaaagagccagaagcagatattaaagcaagtattcaaaataatagttattgcataccaaaccttgttttcaaatcgaaaattgacatgttatttctgcatcgttacctgtgtcttgctaaaagaaacctgttggttttgtggagagaggtagatactaacttcctccattaattttttgaggtattcaaaggaagaggaatttttttcaaagtaatttcgtacttgctaatgctttttaagaactatttagatgtaatatctgcattaaaattttcagaataaaattttacatgtaatccaaaatgcctgatgttattgcttaacagcacatgcttaaaagcaaattcaataggagagtaaattgcattgtttgttgaatgttttcctttgttt

SEQ ID NO: 391808 - DNA, 1000 bp, Homo Sapiens
agctcaggggaaatttttcaaaaattgaattttaaaatttcttatgattttaaataccttgacattgattttgcttcccatctttgaagtaattggttagttttctttgttcagccatttcaagttggtggttgggatatctgctctctgggatggcatcagttgggcagtcatccttttggaagagaagtgtgcttttgaatggaagatccaaagccagtctttgttaaactgcagggcgtactctcaaagaccaaaactattggccacttttgtatgttgccagcatattttgaacttgtatctttttttatactagcaacactacaaaggagaagttactcatttcaaaatggatgaattgttattatgtgtgaagagactctgagtttatggtctgtgccataaactttcagtgtaataagacttcttcaatacatcttccaataaggggtgcttctttgtgacagtatttttatttctgacattcattttatttgggtacatagtgtggttgttgataccttgcaaaagtattgcttctgaaagtaataaaaaattttaggagaatttgagaagtttacagaattacttattcattgttttcttggtaagtcagtttaatgtttatttttctcattatttcatcactggaataaagaataagggtgtttgagctcacctccatgcaaagacttcagttttaaaacattattttgcctaaaattagcattgtgatgctctctaaaagaaatattttataaaccctgttcacagcagaatttctgaatctgtatagagactactacaaaattggacaaagattggcaattctttgtaaagaatttgtgaactgtgtataaatttattctaacatttaataaaaatgtatttaaacctaaaaaaagaaaagaaaagaaaaactgaaaactcgattgggtcagatatgtcatttctattctatactttttttctggaagtagttccttcctctcctgat

SEQ ID NO: 391809 - DNA, 1000 bp, Homo Sapiens
cttacaattctccttctcaaaaatattacttctattcgatcctactgttcaactcttgttgcttagttctaaattctcgcctcaaataatttcaaatcttacactaaggtcttgtgttaatgtttaaacatccaggtacaatcttaattattgatttacatccccttatatttcataactctacacttctgtgatatccacttaatttaagaatattggactccttcatgtctaacttacaagccttaaattattttttaaataatgtttaagctcagtgaatctttttctgctaaatattcttgcagttcttttcaatctttatataagcaggaaaaatgcctcacggattagaattattgaggtctcaaaacctagatggccaggctaactggctcacactgtgggccagtgtggaagggtgaggcacctggactgcttgagccccgggctttaatgtcagttttgtcaatgtggtgagatcctctctctacaaaaatataggggaaaaaacttagctagatatggtggtgcatggctatagttgcagcaactcaggaaaatgaaacaggagaattgcctgagcccaggagtttaaggctgtagtaagccatcatctcacctatgcactctgacctcataagagcaagactccaacccaacaaaggaactgaacaagcaatttttagaatgggacaccagggaaccactaccaggggacctaggaaatggaagaattcattagatgaagaagactacaatcaaagaatactgctaggaactgttagaattattaaggggaattctctagcaaacacaggattaaaagtaatgttggcctcactctaataacttatttcacctgcaatgagaagctcaagtatttctttaccataaatctgaaatgtagttagtgatatataaaccataataaaaggtatcagtctgaattatgcccatgtatgtgtcactcctctttcgttcgatgaagttaaagtta

SEQ ID NO: 391810 - DNA, 1000 bp, Homo Sapiens
gtgctgcaataaaaatctttgaacaagttctaatgccgttcaactggaattgaagttttcaatcgttggatatgtcaaaatttaatcagattgtatattgctcaattactttcaaattatgtacaccaagtcattcttgctctggcaaaataagaatattttcattaatatatcattcaacttgaaattgcccagcttttccttctcatttccccccagtcaaatgagttgaattaatactgtctaaaaatatatattcatttgcttacctgttagtatttgttccatgtattaagaagctttgctagtatatgaaaatatatgtattaccatgtcttgtgaattagtacttttatcattttgaaatgtttgttttcatttctgctgaccgttctaacctgggtatctattttgactggtttttaatgtaactactaacatctttttatgttcagcactttttcacaattttactttcaatgtctttatttttaaaatgtatcttctgtagacagtgtacaggtggtcttgttttattgtaaatcaagtgacaatctctatttcataattgacatatttaatccatatatatttaatttaattgttgttattttgagacttaatatccagttttactattttggcccatttatttttggtttattttagatgtcttgccttatcttagattgattgatatttttagtatttaattacatttcttttataaatgtaatttcttgaatatttgtttttattttagcaattgctctgggaatataaaaatcatctttaaaatctatttagagttaatggtactactttatgcagtaggtaaaaacatttcactagcacaatttcatttgcaggcacctaaccttctgtgatagtattgtcttatattgttatatttatgagatacaatcactacagtaaaatactattttctattcattgtgccatcttataaataaacagatgaataaacagatatttttga

SEQ ID NO: 391811 - DNA, 1000 bp, Homo Sapiens; identical to SEQ ID NO: 282435

SEQ ID NO: 391812 - DNA, 1000 bp, Homo Sapiens
ctaccgtatgaggacggatacagagtgttccccccacccccagcccaggggatatttgattcatgaacattccctcagtgtctttgtgggggacaatgctgtgccaggctcagggatgccaggacgagtaagacccaggctcccacgtggcccaggcagggagagagacacataaacaaccatcaggaaagaggttgtgaaatgtgctcgcaggaggcttttcaggcacagaggagccagctggtcgagctgctggtctcagggtccctggaaggcttcgagagtgtcctggactggctgctgtcctgggaggtcctctcctgggaggactacgagggcttccacctcctgggccagcctctctcccacttggccaggcgccttctggacaccgtctggaataagggtacttgggcctgtcagaagctcatcgcggctgcccaagaagcccaggccgacagccagtcccccaagctgcatggctgctgggacccccactcgctccacccagcccgagacctgcagagtcaccggccagccattgtcaggaggctccacagccatgtggagaacatgctggacctggcatgggagcggggtttcgtcagccagtatgaatgtgatgaaatcaggttgccgatcttcacaccgtcgcagagggcaagaaggctgcttgatcttgccacggtgaaagcgaatggattggctgccttccttctacaacatgttcaggaattaccagtcccattggccctgcctttggaagctgccacatgcaagaagtatatggccaagctgaggaccacggtgtctgctcagtctcgcttcctcagtacctatgatggagcagagacgctctgcctggaggacatatacacagagaatgtcctggaggtctgggcagatgtgggcatggctggacccccgcagaagagcccagccaccctgggcctggaggagctcttcagcacccctggccacctcaatgacgatgcggaca

SEQ ID NO: 391813 - DNA, 1000 bp, Homo Sapiens
ggcggcagctggatagcattcgggcccatccgaataagcggtaaatggatcatttctggggcctccctgactcctcttccagagcctcctaccgacctgctctgtcccctccttccttcatgccctccactcttccctaaatgcaagtctcctccccaagcccatgtcctcctcggcttcccctctgctctcctcaccggtctcactcagtcaacttcaagtctgagccttctctgcctgtctccttccattctcacctttcctgtcacaccagatcactcttctcccaggctgtccctcgtgccaaacttttttggtaaatcttccttaatgatctagaaacagtctctcccttctttctattccataatggtccttcaaaaccccaaccctcgccgggcgcggtggctcacgcctgtaatcccagcactttggaaggccgaggtgggcggatcataaggtcaggagatcgagaccatcctggctaacaaggtgaaacactatctctactaaaaatacaggaaaaaaaaaaattagccgggcgtgggggcgggcccctgtagtcccaggtactcgggaggctgaggcaggagaatggcgtgaacccgggaggcggagcttgcaatgagccaagatcttgccactgcactccagcctgggcgacagagcaagactctgtctcaaaaaaaaaaaaagttaaatttggccaggcacagtggctcacacctgtaatcccaacactttgggaggccaaggtgtgccagatagcttgagccccagagtttgagagcagtctgggcaacatagtgagaccttcttgagaccttcttctctacaaaaaatttaaaaattagccaggaacctgtagttccagctactcgggaggctgaggtgggagaatcacctgagcccaggaggtcaaggctgcagtgagctgtgttcctgccactgtactccagcctgggtgacagtaagaccttgtaaaaaaaaaaaaaaaaaa

SEQ ID NO: 391814 - DNA, 1000 bp, Homo Sapiens
gaggcgctggctccttctcctcccacctgggacaggtgtctccccagcccccgctcccaggggcctctctctctctcccgccccgcagggtcgagtcccggcaggggctcggggatcgggtagtcagtacctctctgcgtctccagccgccggtagttggggaccctgtggctggagtgcgttttcaccaggaaggagcgcggcatgttcccctcccgggcggcaggccggggtgggctggggcggggagggcgcgcctgggtccggactgctgcgtccgccggcgcttgaaggggtcaggctcattagcatagcgcgccgcctccgccaaccagcgcccggcgcgagtggggcggggccacgggggcggaactgagggcgaggcggggtctcgggcaacacgcccaggacaggtgcgcgggcgggacggggcggggagcgcgtggccgcccggtgtcctccccacgggaattctctggcgtgcgcgccgccgagtcacacaccgacccgtcgggcctggccacccactcgccgtgagtgaagggcagagttcaaagctgtgtggaaaccgagcgagaatctcttccacagaatgtggaagcgtcggccgagcgcggtccttggagaacccttgctgcggagaatgacgctcactctgcggcctggcctcgcctccccatcccttctgcaaactcacaggacaggattgatggggagagcccaggcgaaacgaagctgaccctagtgaccagccctactggcggctctggaacaggcccgggaccggtggcctggagacagtggtcctttctggatgggctgcagtctccgaaggcttcccccactggagtcagccctttaggagtttgtccagtgcctccagaaaactgttttttgggggacggaggacttggcctggaattctggaattcccagggggtcagacatggttatgggaagtttaataaaaccggtgaatcaaaaaaaaaaaaaaaaaaaa

SEQ ID NO: 391815 - DNA, 1000 bp, Homo Sapiens
ggcaacctccctataccctatctatacaaaaaaatacccgtgaatgatattagccacccgtggtcccatgttcttattagcctgagccactcagatggttgagatgcgagaatcgcttgagccggtgagctaaagtttctactaagcacacctacttccactacactccaacattggccacatccctatcctgtctcaaaaaaaaaaaagttcactattatatgttatgatttatatatatttttatgtatgtttatgtatattttaacctgatttgctcttataaccatcgttaagtatacaattcagccaggcacggtggctcacgcctgtaatcccagcactttgggacgccgaggtgggcggatcacgaggtcaggagatcgagaccatcctggctaacacggtgaaaccccatctctactaaaaatacaaaaaatgagccgtgcgtggtggtgggcgcctgtagtcccaggtactcaggaggctgaggcaggagaatggtgtgaacccgagaggcggagcttgcagtgagccgagattgcgccactgcactccagcctgggcaacagagcgagactccgagactccatctcaaaaaaaaaaaaaaaaaaagtatacaattcaatggtattaattactattcacaatgtagtacaagcaataccactatttctgaaactttagtatctcaaacagaaactctgtaaccagggagggcatggtggctcacgcctgtaatcccagcactttgggaggtcaacgtgggcagatcacttgagttcaggagttcaagaacagcctggccaacatggtgaaaccccgtatctactaaaaatacaaaaattagccatgcatggtggcatgcatctgtaacaccagctactaaggaggcagaggttgcagtgagctgaggtcatgccattgcacttcagcctgggctgcacagccagactccatctcaaaaaaaaaaaaaaaaaaaaaaaaaaaaaaaaaaaaa

SEQ ID NO: 391816 - DNA, 237 bp, Homo Sapiens
actgggagcagctccaacatcggggcaggttatgatgtacactggtaccaacagcttccaggaacggcccccaaactcctcatctatggtaacagcaatcggccctcaggggtccctgaccgattctctggctccaagtctggcacctcagcctccctggccatcactgggctccaggctgaggatgaggctgattattactgccagtcctatgacagcagcctgagtgccctattc

SEQ ID NO: 391817 - DNA, 1000 bp, Homo Sapiens; identical to SEQ ID NO: 282436

SEQ ID NO: 391818 - DNA, 1000 bp, Homo Sapiens
taaagtttaacttcctggttctcttcgcccccttgcttctaatttcagtaaacaaccttttccatcagttttattcagtagttcacacctgttcccctggtcacttgctccatcctgactcatcccagtcacctgctttgacctgagtcacccctggtcacctgctctgatgtaagtcacctttagttacccgttcctaactgtccttcctgccaaactactcacctcgccactctggctcatacctctgctctctttaaaatagccaatcggaattagcttagaccgtgcggtccaaccttagccaacaggggaacaacatagcagcagggattacctgggtcaggaataagaaccccttcccctcccttgttcaactgtgctctcaccattgttccatctatgaggagcaccctttctacagaaactaaaaattgcttgctgagaaaattaaatttatgtttgagtgctatttctttgcagcagtggagaacaagcattcctaacactgggattgcaggcataagccaccgtgcccagcttccagctcaccttcttatgctcaaattgtgtcttctccttcccaccctcaagctacaatacaaaaagtttcttccaaccctctcagtcttggaaggtagcaggctctattttctctgggtgtgtaaagaaaatgcctctcccacattagccaattgagacgggaggaagcgcagcaagatgctggctagtgcaaggtccctggggtagaaagaatcatgatggattcaagaacagtcaagagggctggtgtggccctgaaagcaaagaactaggggcgagagatgaggcccaaccagcaggcagggtcacataacaaaggtgataaaagggcttggcctttatttcagcagccaggagagacagccaggaggctggggctgtggggagctcagaagtaagatgccccttccagtctgggaatatgtgaggggagggcaccatcttctgagccaggttt

SEQ ID NO: 391819 - DNA, 1000 bp, Homo Sapiens
agagggtgacagggaaggccccataccccatgtggcacctgggaaaggaaccaggcagatgggacttcttccgtcctggtgacacagggccagactgctgctggtattgtgccccgggagtggaaggtagagaaataaatcttcacaaataaatatttgcaattttcccccatctgttgagtgcctctgcctgctcctcctcgatgggattaggcccacagttcggaatcttggggagagccaaggaagcggtaggcacccagtaggcccacggccgtcggctgatagcaatggtgatgctgtcctacctacttgtgtaaggcattcgatcttcctcccttccatacatattgaaataaataagccgcgcaatgtgttagctattgatcagaactaaagtgaagtcagccacggggattacaaatctcggcttctcccctcatgttcctgagagtcttcccctggttttgaacacatctccctagctcgatgtcaaggtgagggattctgtcggcaacagcagtgcccttagttgcttcgtcgtaactccccgtcaccggttttattcagttaccttccagtcccactctcagagcttcctggcttgttctgctctcaaagcgggtagagctggcacacatggactctccgaaacggctgcaagatgccaagtttctcggaagaactggaagcacagagaccagaagtgccttaaggtctcgctattcagtgtggcgcttagaccggcagtggcggcagctgccctgggagcttgttagaatgtggcttctcacgcccctcctggacctacagagtcagaatctgcagttttacaggaggtccaggcttggaagttgctcgtagagacctgagacagcgcagccacgtgctggaaacaaagcatttaagtttgtgactttattttaaaaggcagcaggcagtcgacaaaccaatttcttctacttagaggcggcttcggcttctggaagtcgctaggagt

SEQ ID NO: 391820 - DNA, 1000 bp, Homo Sapiens
gggatgatgccatccatctgccatcaacgggactcaggtggagctgtttacacaacctcaggtgggaagtctgaaaagagccggaaccaagctccctctagtccctcagggaccaaggctaatgctgtggcagtagactgtgggtcagaaagttctcccagctcacagaagccagctctgagttcagactctgctctgctgagctagtcagccctgtctcttgtccctgcaaaactcccctcagctgtccttatccactgcagatgcccccgccctgccccatgtagccatttacacaggcattctaaggcactaccacctaaaatcatagaacaccagagatccaggcaatacttccactttacaggtggggaaactgaggcccagagaatggaaggccttgcccaagattactcggtcaagaatcaagtagtgaagaatactgaaagatagtgaagaatcaagactggaacccagcccgtctgacttgggtcctgggggtttccaccttatcataagcagttggtaccgtcataagtacagtgcttcacgcacgctggtacagggccacgtgcacaagcacacaggtgcacacacacactgctatcctccatcccatccacctgggactcgtcaggctgaagtctcttctcccactctcactccttgggctgtcttcagggcacatgtaacttggggaatgagaaattagcatccacctggagccactgaagccatccctcttcaccatagttgctcacctctcttttgacagaaagtcgtgaggcactgaatggcccaaccaggccctcagtacctctgggagccatctgcaagagtccctgtgtagcgccaagagccggagcctgggcttcaggaccctggactcccactgattctccatgttcccttgtcctgcatagctgtacttcctcactgcaaaggaagtgttggtggccagtgtcttttccagctccatcctggagctccaggaccttag

SEQ ID NO: 391821 - DNA, 1000 bp, Homo Sapiens; identical to SEQ ID NO: 206302

SEQ ID NO: 391822 - DNA, 1000 bp, Homo Sapiens; identical to SEQ ID NO: 114900

SEQ ID NO: 391823 - DNA, 1000 bp, Homo Sapiens
atattgggtctcagccctaggggaatgggaagcagctgaagggaccctgggtgggagcataggaggagtctggacatgtggttactagtacaggttttgccctgattaaaaaatctcccaaagccccaaattcctgttagccaggtggaggcttctgatacgtgtatgagactatgcaaaagtacaagggctgagattcttcgtgtatagctgtgtgaacgtgtatgtacctaggatatgttaaatatatagctggcaccttagttgcatgaccacatagaacatgtgtctatctgcttttgcctacgtgacaacacaaatttgggagggtgagacactgcacagaagacagcagcaagtgtgctggcctctctgacatatgctaacccccaaatactctgaatttggagtctgactgtgcccaagtgggtccaagtggctgtgacatctacgtatggctccacacctccaatgctgcctgggagccagggtgagagtctgggtccaggcctggccatgtggccctccagtgtatgagagggccctgcctgctgcatcttttctgttgccccatccaccgccagcttcccttcactcccctatcccattctccctctcaaggcaggggtcatagatcctaagccataaaataaattttattccaaaataacaaaataaataatctactgtacacaatctgaaaagaaagacgctctaactgctcagataggtgctgcggtccagcccccagctggaggagaccctgagtccaacccaggcctcccgagggggccagtgaagggatcccacacccaccgcccctatgtagggcagggaagaaattgcaaaggacttgggggatagatgggaatgggagggcaaactgcagcacttgttaaattaattaaagaaacaaaccagaagcacaaaaacggggaaggagaagggagaaggagcaggtccagtgttccaggccccaattctgggggcaaatgtgcca

SEQ ID NO: 391824 - DNA, 1000 bp, Homo Sapiens; identical to SEQ ID NO: 282439

SEQ ID NO: 391825 - DNA, 1000 bp, Homo Sapiens; identical to SEQ ID NO: 220518

SEQ ID NO: 391826 - DNA, 1000 bp, Homo Sapiens; identical to SEQ ID NO: 282441
  misc_feature (334)..(334): n is a, c, g, or t
  misc_feature (768)..(768): n is a, c, g, or t

SEQ ID NO: 391827 - DNA, 1000 bp, Homo Sapiens; identical to SEQ ID NO: 282442
  misc_feature (222)..(222): n is a, c, g, or t
  misc_feature (230)..(230): n is a, c, g, or t
  misc_feature (400)..(400): n is a, c, g, or t
  misc_feature (474)..(474): n is a, c, g, or t
  misc_feature (478)..(479): n is a, c, g, or t
  misc_feature (482)..(482): n is a, c, g, or t
  misc_feature (503)..(503): n is a, c, g, or t
  misc_feature (507)..(507): n is a, c, g, or t
  misc_feature (579)..(579): n is a, c, g, or t
  misc_feature (661)..(661): n is a, c, g, or t
  misc_feature (718)..(718): n is a, c, g, or t
  misc_feature (744)..(744): n is a, c, g, or t
  misc_feature (760)..(760): n is a, c, g, or t
  misc_feature (827)..(827): n is a, c, g, or t
  misc_feature (836)..(836): n is a, c, g, or t
  misc_feature (845)..(845): n is a, c, g, or t
  misc_feature (857)..(857): n is a, c, g, or t
  misc_feature (885)..(885): n is a, c, g, or t

SEQ ID NO: 391828 - DNA, 1000 bp, Homo Sapiens
  misc_feature (480)..(480): n is a, c, g, or t
  misc_feature (523)..(523): n is a, c, g, or t
  misc_feature (607)..(607): n is a, c, g, or t
  misc_feature (616)..(616): n is a, c, g, or t
  misc_feature (636)..(636): n is a, c, g, or t
  misc_feature (703)..(703): n is a, c, g, or t
  misc_feature (794)..(794): n is a, c, g, or t
  misc_feature (949)..(949): n is a, c, g, or t
tacttcagaacctgcaaggtcagacttctgaaattggagggaagatcttcatcccccacccatgaaatgcctgcctggctccagatgtgatgtatcattaactcacatgctccctggatcattttctacttgggaggctgtgggcaggtcaccgaaccctgatgggagatggtgatagtcacctaagtgatttaaatagaattaaggagaggatctacgtatacatgaagtgacctgtccatcccagcagaactcaataaaggtgatttgtatctgagtctcaacctggactgccctcatggagagtgagatggcagaggggctcgataaattgtttaatcctgaggttgtcaaactttgaaaagtcaccaaattttttaatccaaaaaaaaaaaaaaaaaaaaaaactccatggaacctgaagcatgtctggctcattccaggacacatggatttgcatttgctgttccccctgcctanaatgtccttccacattgaatccatctggaacattcttgttctncgtataggggcttgtttatctttgtatcgcaagcatcttccactgttcctgagagagagtaggtacacagtgattgcttttcgnactatgccnatataacaaattttataccnatttttagttaaaatcccgcatgaagataatgaaggaaaaaaaatggtgaggataaggaattaatanatcagaaagcatatttggcttagaaactgttgaaattgttatagaacttctctcttcatattgatatttttcccggtggtcatggttttanataataacagtaataataagcagttctctatctgtaggtagctaaacaaattttaatgagtcttaatttgtactcacgaataaatgcaccaccatagcatgaggatgtaatttggaagaagacaagaaggaaactgggcttggaaataatatacnaagccaaatttgaatatataatcagtagttttacaaaaacaccaaaagctt

SEQ ID NO: 391829 - DNA, 1000 bp, Homo Sapiens
ttactagttactgtctacacatagataatcaaaggcaagtagttaaagacatagttaaaaatatgacaaaactggcacatgtgcctgtacaagtgtaacatggattcgaccctgaagccatgtttagaaggtggttcccagcactaagaaaatttaaaactcttataataagagttataatagtaataggaacctgcttactgctcccttgtttgctacctgtacttcttcaaatgataaaaagcttcatcactaccttgattcaccaaaatgcttcagcacaagtgtactatatgaatcactatcaatctattgcacaagaagatgtaagtagcaaaaataagagtgagaactccaactaataaaaagtgagagtctcgaaggggggaaatgagggacgagagagaccctctcatgttgttttatactcagaaaaggaaagagaagagaaacagaaggcaggtagcccagcacctaggaaccagacctgaaaccaaggaaccagatctgaaaccaggcctgggcctgcctgacctaagcctggtagtaaaaattccacccctgacctagcaactgttgttatctatagattccagacattgtatggaaggaccttgtgaaacctcccgttctattctgtttcactctgtccatcggtgctcacagccccgtcacataccccctggcttgctcaatcaatcacgaccctctcatgtggacccccttagggttgttagcccttaaaagggacagaagttgagcacctgaggagctcggattttaagacgctaggctgctgatgctcccagctgattaaagccactcccttcactatctcggtgtctgaggggttttgtctgtggctcatcctgctacacagtaacctactgtttcaaaatgagttagaaaacactaagaaaacaatataaaatgtaaaagagcatcacaaattataattagaaaactcagcaatgaggtgacaaaactgggaaagaattag

SEQ ID NO: 391830 - DNA, 1000 bp, Homo Sapiens
ttgttggtattaacatttttaaaagatccctagatatttcctatatgcaactagtgttgagcctcatcctagttcactaaatatttattgcaggtgattcaagtatagtgtaagacagaaaagctctgccttcaagacatttaccacctagttagcaggaggtggtatgttttctcaatgcagtgcagtaaataactggctgaggtgtgcagcaggaatccctaggatagctcccaggaagctatcacctagctcagcctgaatgagtcagggagggcttcctggagagatgctacctgaaacttttttgaaggatgaataggagttatggaaacgagattgttataggcataagcaaaattacaaaatcaccaaacaatatgacctgaaagagaaaatacagaaaatcattcagtatcaacctgtgaagtcaaaagaggatctaaggaagctgggtggtgagggcagggtcacactgtaggccatggaaagcaatgggaaatcagggtacaaacttgatcagatttgcattccagataggtcatcagaccacagtgctggggagggattttagccaagccaaaggtcagaagataggcttagaagcaattgagctattccaggtgggatgtaaagaacatctgaagctaagaagggaaactcaacatagatttgaagttttataaaaacacaaaaacgtagcagggggcaatgaagtgcacctgtagtcttagctacttgccaggctgagtcgggtggaaagcttgagcccaggagttcaaggctgtagtgtgttatgatcacacctgtgaatagctactgcactccagccttggaaacattgcaagacctcatatctgaaaaaagcaaaacaaacaaaaacaacaacaaaaaaagattatttattatagaaacaaagctgaaagtaatgagataatggaagaagagaataaatctgggatcactctcagattcctggcttcaatggctaggtggctgg

SEQ ID NO: 391831 - DNA, 1000 bp, Homo Sapiens; identical to SEQ ID NO: 282443

SEQ ID NO: 391832 - DNA, 1000 bp, Homo Sapiens
ttgagatggagtctcgctctgtcgcccaggctggagtgcagtgctgcaatctcggctcactgcaagctctgcctcccaggttcacgccattctcctgcctcagcttcccgagtagctgggtttacaggctcctgccaccacgcccagctaattttttgtattttcagtagagacggggtttcaccgtgttagccaggatggtctcgatctcctgacctcgtgatccgcccgcctcggcctcccaaagtgctgggattacaggcgtgagccaccgcacacggccacgactttcttttctaaataaaagacttcaccacactctacaggctaattttgacactgtagtcatgaaatataataaacattaacaagccgagcatggcggcacgcgcctatgatcgtagctactcaagaggctgaggcaggaggatctcttgatcccgggagtttgaggctgcagtgagctatgatcacaccactgcactccagcctgggtgaaagagtgagaccctgtttcaagctactagggaggctgaagtggaaggatcccctgagcccaggagttggaggctgcagtgagctgtgatcacgccactgcactccagcctgagtgacagagagagacactatctcaaacaaacacacacacaaaacacaaacaaaacaaaacaaaacaaaacaaaacaaaacaaaaaaccaataacagcttgcatttctggagcacttactgcatacttccttgttcggagttttccacatctcatctcattaaatgttcaaaccagctctgtgatattgatatttttgctcccatttcatggatgtggaactaaaaattcagagaagttaagtcatttgtccaagatcacacaaatggcaaaatcaggatttggccaggtctgtctggtggcagtgcccaagcttttaaccactaagtcacttcagcccaattcctctatgagtatttatgactacatttacattgaaattcaccagaact

SEQ ID NO: 391833 - DNA, 1000 bp, Homo Sapiens; identical to SEQ ID NO: 282444

SEQ ID NO: 391834 - DNA, 1000 bp, Homo Sapiens; identical to SEQ ID NO: 206306

SEQ ID NO: 391835 - DNA, 1000 bp, Homo Sapiens; identical to SEQ ID NO: 206307

SEQ ID NO: 391836 - DNA, 1000 bp, Homo Sapiens; identical to SEQ ID NO: 206305

SEQ ID NO: 391837 - DNA, 1000 bp, Homo Sapiens; identical to SEQ ID NO: 114901

SEQ ID NO: 391838 - DNA, 1000 bp, Homo Sapiens
aactgtttaccctccagaagaggaaaccggtatgttcttagttttaaatagttgctctggagtcattgttgtgatgaactctgtttacacgagctgtaactcatgacagttctcaagctttcgtgacagaaaacccatctcttttactccaaagcccatatagcacccacaactattaactgtgaccaagaaagagaaggcaagccccaattaacctttgtacgtaaagcctaaagaatgaaaaaatatacctgaatcctcaatcatcaaacagcatagtatatactaagtaatttgtaataattaaactctagaaaattgtgtggcttcggtagtaagagagcttcatgacataaaatggcaagtggagacagagacaaaagtaggatgtggactgagagggaaggttagcacaggtggaacagtaaggcaaccatactatcaattgctactgacatagaatccagagagactattggcaaaagctcaaatgagacacagtaacagtttagattcatacagtggctatggcataaatcagaaaattgatagccgcatgatccctctttgcatgggactggcatctgtgtggagtaatggttccatatgcctcctttcttctccttatttttaaattttttaaaaatacattgcttcttgtggaagtcaataagtgattcttccaatactttctcattccttccccctcagttatgagacaatttgcttatttctcatccatgaatacttgttgggtcattaaaagtagatactgaaattactaatggtacgactgacatattacctcataaatgttactagctagatgttgaaagttgaccaacaactctcaaaatatgattaagaaaaggaaacccacagaacagtttgattccaaaatgatttttttctttgcacatgccttacttatttggacttacattgaaattttgctttataggagaaagggtacaacttgcccatcatttctctgaaccag

SEQ ID NO: 391839 - DNA, 1000 bp, Homo Sapiens
ttctgtaaatggatgtattgtacagagaacatgaacgtctcttcctaattttacatcttcagcatcattgcattaaagtggtgtaatctccttctctacatctgttgtcagagccactgagtgctgtgctgctcgacgtgagggtgaaatgattgacttgtgacctgccaggttgcccgatgccctgttgggtcaccggctggacctgctgcagcctgcagagccacagtcagcctgcccacatgccaccgagcaaacgcatcttgcttttcacatctctcctcctacagccttaatggctgcttgctgccatatgtgacaaatcaccaccaccagtgttaagtgcttctggattcatgggtgagttccctgggcagcccccaggaaggccttccagatctggctccagggtcaccacctgtcacagcaatacctgggaccatgctctcctgggactgtgaggctccttttgacgtacttttgacatcaggcaggtttgggaagaaacaaagccatgcctgctcctgcctctctcccaacatgtttccagcaagtagatgcccctgtgtgtgttttcccttgccttgtttcctgccttatatcttgtatttcgacttattacagagttgagggttcttgcttaatttagatcaagtataaaatttgtatgacttcaagtctcattttatctgaaaggtttttttctcatttaatctgatgtggcattttcgtcatctgaagcatgagtgacaagttgggaatgatgtggtgatttagaatgcagtattggccaagtccaagttgtcaacttaagcgtctgtttaccaaagaccgggaacaggggcccaaacatgtccagtcctcttcttccctctgctggaacctttggggacactcaagggtacagtttgacactgatctggtccatgaggctgcccagagaaagcactgcttctgtatgtctcttgtggtattggaacaataaacccgtacaacctgc

SEQ ID NO: 391840 - DNA, 1000 bp, Homo Sapiens; identical to SEQ ID NO: 282450

SEQ ID NO: 391841 - DNA, 1000 bp, Homo Sapiens; identical to SEQ ID NO: 282451

SEQ ID NO: 391842 - DNA, 1000 bp, Homo Sapiens
gagagaaaccctacaagtgtgaagaatgtggcaaagcttttacccaatcctcaaaccttactacacataagaaaattcatactggagagaaattctacaaatgtgaagaatgtggcaaagcttttacccaatcttcaaaccttactacacataaaaaaattcatactggaggaaaaccctacaaatgtgaagaatgtggcaaagcttttaaccagttctcaactcttactaaacataagataattcacactgaggagaaaccctacaaatgtgaagaatgtggcaaagcctttaagtggtcctcaacccttactaaacataagataattcatactggagagaaaccctacaaatgtgaagaatgtggcaaagcttttaaactgtcctcaaccctttctacacataagattattcatactggagagaaaccctacaaatgtgaaaaatgtggcaaagcttttaaccgaccctcaaaccttattgaacataagaaaattcatactggagagcaaccctacaaatgtgaagaatgtggcaaagcatttaactattcctcacaccttaatacacataagagaattcatactaaagagcaaccctacaaatgtaaagaatgtggcaaagctttcaaccaatattcaaaccttactacacataacaaaattcatactggagagaaactctacaaacctgaagatgtgacagtgattttgacaacacctcaaactttttcaaacataaaataaattatactggtgagaaattctagaaatgtaaagaatgtgataaaggctttacatggttgtcacacttgattgtaggtaagataatttacattggagtaaacttctacaagtgtgaagaatgtggcaaaacttttaattaatgctcataccttattgcacaggaaagaatttttacttggaaaaaggtatatacacaaagaatgtggaaaagccattaatatgtgctcatatcttactcaacatcagagagtctg

SEQ ID NO: 391843 - DNA, 1000 bp, Homo Sapiens
atggtgaaaccccatctctactaaaaatacaaaaaattagccaggcgtggtggtggacacctgtactcccagctactcaggaggctgaggcaggagaatggcatgaaccagggaggcagagcttgcagtgagccaagatagcgccactgcactccagcatgggcaacagagcgagactctgtctctaaataaataaataaataaataaatgttgtatcccacagaaaaaatcgaatatccttgtcagttgtggtataatgaactctcatcaggtctttcatcacagccatttcatattctttatcatttagatattatttccccctgatgctttcctgaaagctcctgcaatcagctacaggtcagaatgttcatctccatcacgggattccctctgagacacacagaaaagagtatgcaagatagtctggttataggcttctgatgatattgtttaaataactttaagaccatacacttcgctcagtgaagatctccagaagtctgcttcagaaattgatgggttcatgacactgctaacccaagatgcaacaagactggaattgattacatggtactgaatgaactgatgaaaattgattataattttatagctttttggagcattgctggttctttaatgttctagtttctggacttaagaaatctctttctcttaacctaactgtaacatacaatttagtagattatacttttgaaaacagaagtgaagcatttatcttttttcccctgcctgatttttccagaattttgaaatccttactgaacactcttattttcacgatgatatagttgttagaaaagtccaataagaatctgttcaccttgaacagagacctcagaaataatgccgcatatctacaaccatctgatctttgacaaacctgacaaaaacaagcaatgggaaagattccctatttaataaatggtgctgggaaaactggctagccatatgtagaaagctaaactggatccccct

SEQ ID NO: 391844 - DNA, 1000 bp, Homo Sapiens; identical to SEQ ID NO: 282452

SEQ ID NO: 391845 - DNA, 1000 bp, Homo Sapiens
tagtaacagggtgtgcctagataatttatgatccaaactgagtcagtttggaaagtgaaagggaaacttacatataatccctccgggacaatgagcaaaaactaggactgtccccagacaaatgtgaacatacatatcatcacttaaattaaaatggctatgagaaagaaagagggggagaaacagtcttgcgggtgtgaagtcccatgaccagccatgtcaaaagaaggtaaagaagtcaagaaaaagccatgaagcccatttgatttcatttttctgaaaataggctcaagagggaataaattagaaactcacaatttctcttgtttgttaccaagacagtgattctcttgctgctaccacccaactgcatccgtccatgatctcagaggaaactgtcgctgaccctggacatgggtacgtttgacgagtgagaggaggcatgacccctcccatgtgtatagacactaccccaacctaaattcatccctaaattgtcccaagttctccagcaatagaggctgccacaaacttcagggagaaagagttacaagtacatgcaatgagtgaactgactgtggctacattcttgaagatatacggaagagacgtattattaatgcttgacatatatcatcttgcctttcttggtctagactgacttctaatgactaactcaaagtcaaggcaactgagtaatgtcagctcagcaaagtgcagcaaacccatctcccacaggcctccaaaccctggctgttcacagaaccacaaagggcagatgctgcacagaaaactagagaaggggtcataggttcatggttttgtttgagatttgttgctactgtttttctgttttgaattttcttctttgttctgtttttactttatttagggggactaggtgtttctgatattttagttttcttgtttgttttgttttgtgttgtctgtgaatggggttttaactgtggatgaatggaccttatctgttggcttaaag

SEQ ID NO: 391846 - DNA, 1000 bp, Homo Sapiens; identical to SEQ ID NO: 282454

SEQ ID NO: 391847 - DNA, 1000 bp, Homo Sapiens
ttctgtgttaatttgcttaggataatggcctccagttgcctccgtgttgctgccatggacatgattttgttttttcatgactgtgtagtattctacggggtatttgaatcacatttttaaaatccagtccactgttgataggcatcaaaggaacatacctcagaatactatgagaaagcgatgacaaatgcacagccaacatcatactgggaaaccaaaagctgaaatcattccccttgagacctggaacaagacgacaaggatgcccactcttaccaccccaattcaacatggtactggaagtccatgctaagaaataaacaaagccatccagataggggaaaaagaagtcagattatgtctcttcactgatgatataaaacctagaaattctgaagactctttcaaaaagctcatagaactgataaagagcttcagtaaaggacacaaaatccaggtccgaaaacgagtagcatttctatacatcaacaacattcaaactgagagccaaatcagaatgtcatctcatgcatattttgggcttttctagctggtaagcaaatgtgccacacctacaaagaaagccaaatcttaatgcttggagacacaatgcacttaatgagaaagaaagaaaatatgttctggttttcttttcatagatgtcccagcatccctgaagaggtatagaggggtagcctgcaatctcctgcagtcccgtgcgtttgtggtatggccatgtttggggatgtttatagaccctgtgcttacaaccaccatgggccatctggcaggacctcaaattttacctcgacttttacattctagaaatccctaaagtggagagcaatgttttctgagactgaatctcagttcagacccagttcaagaatcctgttataatagtttttaaaaaaatagaatcaggccgggcgcagtggctcactcctgtaatcccagcactttgggaggccaaggtgggcggatcacgaggtcaggagat

SEQ ID NO: 391848 - DNA, 1000 bp, Homo Sapiens
gtatttgaaccgcaaggggataaaaaagtggatgcataacatcagagatgcctgcagggatcacatggaagggtatcattacagatatgaaatcaatgcggaccccagattaacaaacctcagttctaactcggatgtctgagaaatattagaggacagaccaaggacaactctgcatgagatgtagacttaagctttatccctactaggcttgctccactttcatcctccactatagatacaacggactttgactaaaagcagtgaaggggatttgcttccttgttatgtaaagtttctcggtgtgttctgttaatgtaagacgatgaacagttgtgtatagtgttttaccctcttctttttcttggaactcctcaacacgtatggagggatttttcaggtttcagcatgaacatgggcttcttgctgtctgtctctctctcagtacagttcaaggtgtagcaagtgtacccacacagatagcattcaacaaaagctgcctcaactttttcgagaaaaatactttattcataaatatcagttttattctcatgtacctaagttgtggagaaaataattgcatcctataaactgcctgcagacgttagcaggctcttcaaaataactccatggtgcacaggagcacctgcatccaagagcatgcttacattttactgttctgcatattacaaaaaataacttgcaacttcataacttctttgacaaagtaaattacttttttgattgcagtttatatgaaaatgtactgatttttttttaataaactgcatcgagatccaaccgactgaattgttaaaaaaaaaaaaaaataaacattgttaaaacaattacagtgtgtgcaagtttgctttgaaaaaaggatgaagggcaggagtattcaatggtcttggttccgatgataattattacttaacatagctgagaatcaaactgtagcaatgtctaatataaatagacttgggagatcgtttcgaaatgg

SEQ ID NO: 391849 - DNA, 1000 bp, Homo Sapiens
ataagaatctgcactcaacaagaaaagccatatctgtattcaaagtggactcagagtttgcaggagaaaacagatcatcaatgtttttgattaaacaagtatcagtggcaacacataaaattgaatctggtattttgaatgataaggctgggtccccacagctcacactgcatagcttaaactgggaagcttgggaaattgtcagaaacctacccaaggcctgcgctttggcagagtttctatttgacaccatccatttctgtttgaagaactgaagatgctatgaaaagagtatcaagcttaaataaatactgaacgttgaatatgtatcaagtgccttcttgatacatattcaaggctccaagtactgttctggaactacgaagtcaggttcaaatccagcttggcctctcataactttcataagtcccagcctcaccatctaatagagctgatactgctattgtcttcactgtggctttggttttggtttgtttttttttctttctttcttcttctttttttagagaacaaaaggaaatgatatgtagcagcagttggcaaactatggcccatgggccaaatccagcatactacctgttttgataagtaaagttggaacacagccatgcctatttgtttacctggttgtctgtctactttcacaccacacacccaagctgattagttacaacagacactgtcttgccagtaaatcttaaaatatctactttctgtccctttccagaaaacctttacaaacccctgatatataacatagggtcaccagcaactgatggaaggagcacgtgtcactctgctgaaaatggtaacattatctcatacccctggatgggagagaatgcaagtatctagacagcagcactaatgacttctgcatgtcttcctgaagacttgttcaaaggtgacttagcagtcacatggaaaactaagcccaaaatgtaatccacccttaatcatccacaaccttcataagatc

SEQ ID NO: 391850 - DNA, 1000 bp, Homo Sapiens; identical to SEQ ID NO: 195518

SEQ ID NO: 391851 - DNA, 1000 bp, Homo Sapiens; identical to SEQ ID NO: 195325

SEQ ID NO: 391852 - DNA, 918 bp, Homo Sapiens
agctcgggcaaagagttcaacgtaagcaaagcagctctgccctgggggacctctggagcatcccagcttcctgtagaggccccaccacatggccctttcccatcactgggaaccgtcttctgtatcatgccaggattttcccccaaacttctcaacctaatttattcagccaaaacatatatatttcttgaatccttactaaaagaaaggcactgttcaacttaatgaaaatatgtcaacgatataaaacaaaaatgtttaccctcatgcaaattatattccagtgagaaaagacagatcattaataaaataaatatgtaaaatatataatatgccagaaggtaataagtggcacagagaaaaattaagtttggaagagagctcaggaatgctgggagcaggtagatgtgaaggtagttagaatgctcaaggagggagtaataggcagaagaatggcctttctacatgtccatatccctatatggcaaaaaggacttatggatgtgatgaagttatggatcatgagatgaggagattattctggattacccatgttagcccaatgtcatcacaagaggacttaaaagcaaaagagggaggtaggagagtctgaggcaagaagcgtgacagctagggtcagaatgatgtggttgctgcctggaagggggccaggggccaagggatgcaggcatcctttaaaatctggagaaggtaagaaagtgttctctctcccctagagagagtgtgtgttcttttaggctactagaggtgtgctaatttattccagcaatcatagaaaacttatatagataaggtctcactgagaagataacatttgaacaaagattccaaggaggtgagggcaccagctatgcagatatctggggaagagcactcgaggaagaaaaggcaggcaaa

SEQ ID NO: 391853 - DNA, 1000 bp, Homo Sapiens
ccacatatttttcttctactttgtctatacactccaaccatttatatagctttccttctgtccctttttcatttaaaacaaaattacctaactccctaccaccttctcatttttctgtatatataaatgtttgtgtcaaacgtctgaaatttctggcttgtttgtatcacaacgtggcctcatctaaaccaaatacaatgatgtagtctaaaaacagaaaatgacatgtgttttagacctgcaagacactatctgttcaatggctgaggtgagggtctggactacagattttttataaagtatatgcagaaaaattacaaatcactaggaattctttcagttgtgaagaatgtctgacataagatttgaagtgctacctttccagcttatatattaatttgcttatatatttgatatgaataaatgctttttttctcatgggtccttgcgaggctcagagatttatgaatccttttgtttcacattcagaatatatcacatctctaaatatgcagcaaataagtctcctagtgagtgactatagacttgctataatagcaattagccaggcttccagaaaccccagcacatcccataagaccctgggaataagacctaaactcctggggttagtgtataggatatcaaggtgaataatcttgacgcagttataaagatttaatgtacaacgagtaatcagcatttctggactccttttcttttccatttgctttggaaatgtattctgaagaaattcctacaattagagctccctcatttctgatgaaaacctggtgagtacctgtaactattttgtactgtatcttctccaggaagtcccagatgggaacacagctcctgtccaaagtataatatcttttctttttttttttgagatgaagtatcactctgtagcccaggctagagcacagtggcacacttggcacgatctcagctcactgcaacctccacctctcgggttcaagcaattcttctgcct

SEQ ID NO: 391854 - DNA, 1000 bp, Homo Sapiens; identical to SEQ ID NO: 282458

SEQ ID NO: 391855 - DNA, 1000 bp, Homo Sapiens; identical to SEQ ID NO: 282459

SEQ ID NO: 391856 - DNA, 184 bp, Homo Sapiens
gtgtgtaagggggagactggcctttgacggtgtgtgtgtgtgtgtgtgtgtgtgtgtgtgtgtgtgtgtaagggggagactggcccttgactctgtccaaatagcaagataaaatgagatttaaacactttcagtttttgttaagcattttaaaaagatcaaattaagaatgccacttgggctt

SEQ ID NO: 391857 - DNA, 212 bp, Homo Sapiens
ctggtctcgaactcctgagcttaagcaacctgcccacctcggcctcccaaagtggtatgagatatatatatgtgtgtatatatatatacacatacatgtatatatatgtatgtatgtatatgtatatatgtatatatatgtatgtatgtgtatatatatatatatattacacaagagaaataaaaatgaatgaaatagccaactagagaaga

SEQ ID NO: 391858 - DNA, 1000 bp, Homo Sapiens; identical to SEQ ID NO: 282460

SEQ ID NO: 391859 - DNA, 1000 bp, Homo Sapiens; identical to SEQ ID NO: 206309

SEQ ID NO: 391860 - DNA, 1000 bp, Homo Sapiens
ggggctgagacactggggtcaaatatgtcagaggtaaattcgcaacttccattatccttgcccaaacctggagggggctgctctgtgtgcaccagggggaccataggctcaggatggggctcttctgtgcaaggcaatttggggattcagccggtgtcctaatgcctggggtgccacctggatgaatgaatacaaaggcaccagaggaggaggtacttgtgtggatagaggtatctgggactccaggtgggggtcactgaactgaaaacccatctgtcccaagtaaggcatgtgataagagaagggcatctccaaaagaataccttgggcacggtgctactgcaaaagctaactcaagactccccccgcccctagtattggcatggaaaagtctccatgccagcaagtgatacccagcacggaccaaggacatcttagtaccagcagtctctgacacacatgccagaccaccaaggtatcacaactggccacagcccatcccagagacagccgcaccacagcaaggcagccacagcataaagtcggaaggtccttccaccccgactgctgcaacaaaggcacttgcttacaggaagcagtgagaacatacatggttacacatacggacacgcacatcggtgagcatctctcctctggacttgaatgcctctgctctgcgctggcactcagcgtgatacctggcacttggtaggcacttaatgagtgttttctaaatataggaaggaacagggggaatggaaggactgtgtagacatcgtccagtggcttgtttctctaccagtttcatatccagaaagcagcatggcatttcagggtggcgctcaggccatgctgtcagtttcataccgagcatcagctgtgggggaaaagaaggacacgcatgcccagggggctgggtggttttacctccgttaaaaaaaatcaccttccaagagacactccccaagttctgccgaggaaggacacagcacaggggatc

SEQ ID NO: 391861 - DNA, 1000 bp, Homo Sapiens; identical to SEQ ID NO: 282463

SEQ ID NO: 391862 - DNA, 1000 bp, Homo Sapiens; identical to SEQ ID NO: 282464

SEQ ID NO: 391863 - DNA, 1000 bp, Homo Sapiens; identical to SEQ ID NO: 195632

SEQ ID NO: 391864 - DNA, 1000 bp, Homo Sapiens; identical to SEQ ID NO: 282466

SEQ ID NO: 391865 - DNA, 1000 bp, Homo Sapiens
gacagggtcttattctgttacccaggctggagtgcagtggtgcaatcatggctcactgcagcattgacttcttgggctcaagtgatcctcccaccttggcctcctgaatagctgggactacaggcacacgctaccatgcccggctaattttatttcattattttattttattttttgaggtggagtctcactgtgtcgcccaggctggagtgcagtggtgcgatctcagctcactgcaacttccacctcctggtgtgatctcggctcactgcaacctccacctcctgggttcaagcgattctcctgcctccgcctccggagtagctgagaatataggtgcaagccaccatgcccggctaatttttgtatttttagtagagacggggtttcaccatgttggccaggctggtcttgaactcctgacctcaggtcatctgcctgccttggcctcccaaagtgctgggatgacaggcgtgagccaccgtgcccagcaaattttatttttacttttgtagggtgtgtacgtgggggtcttgctatgctgcccaggctggtctcaaactcctggcctcaagcagtcctcctgccttggcctcccaaagtattgggattacaggcatgagccactcttcccagaccaggctttttaattcctttcccatcattccaaacacatcgattgagcacctagtgtgtgttagagcctcattctaggtctctttctgtaagggaccacataggaaatctttgaagagttcttgtaatgctgccctgtggggtaagagtagccacactcagtatggaaatcaatggatgtgactggcttccaacaaaatcctatacatggacactgaaatttgagttccatataatttttatgtctacctaaatattactttcttttgattttttaaaaccgtttaaaaatgtaaaagccaggctgggcgcggtggctcacgcctgtaatcccaacactttaggaggccgaggcaggcagatc

SEQ ID NO: 391866 - DNA, 1000 bp, Homo Sapiens
gaccagcctagacaacagagtgagaccccatctctacacaaaattaagaaaaattagccgggtgtggtggcacatgccagtagtctcagctactaggaaagctggggcaggaggatctcttgagcccaggaagcagaggctgtggctacaccaactgccttccagcctcggtaaatatgagaccatatctcaaaaaaaattaaaaaagaaaaagaggctgggcgtggtggctcacgcctgtaatcccagcactttgagaggctgaggcgggcagatcacctgaggtcaggagttcaagaccagcctgggaaacatggtgaaaccccatctctactaaaaatacaaaaattagccgggcatggtggtgggtgcctgtaatcccagctacttgggaggctgaggcgggagaatggcttgaacccaggaggtggaggttgcagtgagccaagattgcaccattgctctctagcctgggtgacaaagtgagactccgtctcaaaaaaaagaaaaagactggcttccatcctgggcacctttgtgcaacctctagctgcctctggagaagccagctgccatgctgtgagatgccctatgaagggacccatgtggcagagaactgacggcagcctccagctaagaaggaaatgagggccgggcatggtggctcacgcctgtaatcccagcactttgggagggtgaggtgggcggatcatgaggtcaggagatagggaccatcctggctaacatggtaaaaccccattctactaaaaatataaaaaattagccaggcaaggtggcgggcgcctgtagtcccagctacttgggaggctgaggcaggagaatggcatgaacccgggaggcggagcttgcagtgagcttagatcatgccattgtactccagcctggtgacagagcgagacaccgtctcaaaaaaaaaaaaaaaaaggaagaaataaatgaatccagccaacaaccccgtgagtgatcgtggaaacggatc

SEQ ID NO: 391867 - DNA, 1000 bp, Homo Sapiens
  misc_feature (240)..(240): n is a, c, g, or t
  misc_feature (656)..(656): n is a, c, g, or t
  misc_feature (716)..(716): n is a, c, g, or t
  misc_feature (722)..(722): n is a, c, g, or t
  misc_feature (728)..(728): n is a, c, g, or t
  misc_feature (732)..(732): n is a, c, g, or t
  misc_feature (766)..(766): n is a, c, g, or t
  misc_feature (787)..(787): n is a, c, g, or t
  misc_feature (805)..(805): n is a, c, g, or t
  misc_feature (844)..(844): n is a, c, g, or t
  misc_feature (858)..(858): n is a, c, g, or t
  misc_feature (902)..(902): n is a, c, g, or t
  misc_feature (908)..(908): n is a, c, g, or t
  misc_feature (916)..(916): n is a, c, g, or t
  misc_feature (935)..(935): n is a, c, g, or t
  misc_feature (965)..(965): n is a, c, g, or t
  misc_feature (968)..(968): n is a, c, g, or t
  misc_feature (994)..(996): n is a, c, g, or t
  misc_feature (998)..(998): n is a, c, g, or t
  misc_feature (1000)..(1000): n is a, c, g, or t
tcagccacgccatcgcccgggcctgcacctccggcgacctgcccggctgctcctgcggccccgtcccaggtgagccacccgggcccgggaaccgctggggaagatgtgcggacaacctcagctacgggctcctcatgggggccaagttttccgatgctcctatgaaggtgaaaaaaacaggatcccaagccaataaactgatgcgtctacacaacagtgaagtggggagacaggtaaccncccaccccacccacccccagatagttgtgcttgtgccattggccagaaaagggccacccagcttgccccagtggtggggggtgcggggggacgggccctgactggcccacacctgatgtgcctcgcaccatcctcatcctcagcccttccctcgccagctgcttggggcttgtgtcgctttcctcctccaaggcgtccactggggtttgggttgtccaagcagagggagcactgaactaggagtcaggagctctgagttctggccttggctctggcactaaactcgcttagggactttgggaaagtcagtgcctctccagcctcagctgttcccatctatgaaatggtgggggtgactggtgctgagtccccatctgtcatgttcctcaagctgtccctccctccagggcgtgganaaggctgtggtcaacagaaagctatgctaaagggtcatctgcttggatttaacgggggantcccanccacancaancgaagctgctagaaaagtttcctccgggattcantaatatcaaggtttcaatcantcctcacctcaatggccnaaaaacttggggtgaagtggacctgtcagtgaatgaacnttttaccaatctgnggttgcaaaactggggtttggggcccaaaacctttctggtctgngggcanagaaaaantcggggaaggcctgttggnccccttttaaaagaaaggggaaaggccgtnaanggaagggatggcaaatttgccaaaannncnan

SEQ ID NO: 391868 - DNA, 1000 bp, Homo Sapiens; identical to SEQ ID NO: 282467

SEQ ID NO: 391869 - DNA, 1000 bp, Homo Sapiens
acccaaggagagctgatgtgctctttttcttaattttttttttatttcagtagctttaagggtgcaagtggttttttgttacatgggtgaatttgatagtgatggagtcggggatagtggtgaagtctgcacccatcatctgaattgcacattttgtacccaataggtagtttttcacccccaaaccccctcccaccctctccccttttgagtctccagtgttcaccatatcactctgtctgcccttgtgtacccatagcttagctcccactgacaaatgagaacatgcagtatttggtaactcctgagttacttcccttaggataatggccccccagttccattcaaattgctacagaaggctttatttcattcttttttaaggctgagtagcataacacggtgtatatataccacattttctttatcctgtgattggttgacggatgcttcagttgattccgtatctttgcaattgtgaatagtgccgcaataaacatacacgtgcaggggtctttttgatataatgacttattttcctttgggtagatacccagtggtgggattgctggattgaatggtagatctgctcttagttctttgagaaatcaccataagctctctcacagaggtgacactaatttacgttcccaccaggagcgtataagtgttcacttttcaccacatctgcctgttgctgttgcccgtcccactagacctctatgagctcctcttatctcacctgagaaaatcttatactccttcctattattccccagtttttagtaaagttcgttaaacacaagtttatgctagcagggctttggggaaatgagaggaagcctgtccactttgccccatgtgtaaactccagacctctccccatttctcaaagccttccaagcatgaactgagtgtttcacaaactttacgaaagactggggataataggagggaacatacagcagaagaggaaaaatttaacattggacaccagatc

SEQ ID NO: 391870 - DNA, 698 bp, Homo Sapiens
ggccaggagttcaagaccagcctgggcaacatagtgagaccttgtctttattagatagatagataggtaggtaggtaggtttccaagctttggtttcaggagtacaggtataggcctacctgactggccctgggcgaaaatgttcatttaaacttggggagaggctgggcacggtggctcacgcctgtaattccaacactttgggaggccaaggtggatggattgcttgagcccaggagttggagaccagcctaagcaacatagagagaccccatatctacaaaaaaattaaaaagtagccaggcatggtggcgtgtgcctgtagtcccagctactcaggaggctgaggtgggaggatcacttgagcctaggaggttgaggctgcagtgagctattatattatcacacgactgcactccagcctgtaccatagagagagaccctacctcaaaaaaaaaacaaacctggggagagtttgggacctttggagtccaagagttctgagtttgaatcctgatgctgtcacatactacttggccaggccgaacaaggaacttagcctccctgagcctcactttcttcacttgctagatggaggttgtaactcgtgtcttcctcccagggtcgttgtcaaaatgaaacatgaagtggatggaagtaggaggtcaaggcaggtgaattacatgaggtcaggagtt

SEQ ID NO: 391871 - DNA, 1000 bp, Homo Sapiens
ggttgtaaatttgttcagaaataagagtgtgagatgatgaaaaggaatgtttcagggcaaattaatcttgtgagcaatcaacaggccatcaggttaagcgccacattaaataagcttaggaggataggcagggcaggctgaactctaagggaggcacacaagttgacatcaggtatgttaaaagacaaatttaggcaaattatacttaaaagttttattgagcaaagaatgaatttgtaaatcaggtagcctcctgagccagagaaggctcagagagactccagtacagccacagaaaatggaaagtgaagtatgggaaatggaagtgagatacagaaacagctcaattggttatagcttggcatttgccttatttgaacacggtttgaacagttggccacctttgattggccaaaacatggtgtttagcataagagtagattacagtctgtttacacatccagttaggtttcagtttacctgtagggagatacctttaggctgaacttaaaatatgtaaggaggcagcattaagctaaacttaatttaacaggtaaatatctctgtaaacccaaacttagtttggcaatttatgtaagtatttggagaaaggtgagtgagaaataagcatgatattgataatttaggtaaatatgcttttcaaccactgacttgcgtaacaatatttggtgcatctatttgaaaagatatcacttgaagcttaatcactgagattattttcttttcatcataggaggtatgttaattttgctaatttgttagaaattttaaacttttgagagttgaaactacttcttccgaaatctgagtccctatcacaattcacaatttctgattgtctactcaaaacctgttgtcctttgtctatgcctaagcaactcctactgtgcctgaatgtctaattatctctatgatacagagattgtaatgctcagaattaggcccctggggtaaagaagaatctaaacaagcaaggcct

SEQ ID NO: 391872 - DNA, 1000 bp, Homo Sapiens; identical to SEQ ID NO: 282471

SEQ ID NO: 391873 - DNA, 1000 bp, Homo Sapiens; identical to SEQ ID NO: 206704

SEQ ID NO: 391874 - DNA, 1000 bp, Homo Sapiens; identical to SEQ ID NO: 282473

SEQ ID NO: 391875 - DNA, 1000 bp, Homo Sapiens; identical to SEQ ID NO: 282474

SEQ ID NO: 391876 - DNA, 1000 bp, Homo Sapiens; identical to SEQ ID NO: 207010

SEQ ID NO: 391877 - DNA, 1000 bp, Homo Sapiens; identical to SEQ ID NO: 114904

SEQ ID NO: 391878 - DNA, 1000 bp, Homo Sapiens
tgggatataacaatgaacaagacagatacgatccctgttttcatagagcttacaatagagcctggtaaggttatctcctggctctggcttcactaattgctcaaattgatcacaggatagtaccgatgagaccatgctttgaacccaaagtggaccagaagtctggttttccttcatagacatagacctcaactccaattcaggtgataactgtacaaaagcatgttgttagatcaaagtaaaaccaacccttttactagaaaatcagctcagaggccgggcgtggtggcttacaacttgtaatcccagcactttgagaggccgaggcaggcggatcacttgaggtcaggagttcgagatcagcctggccaacatggtgaaaccctgcctctactgaaaatattaaaaaaaaaaaattagctgggcgtggtggcacatgcctgtaatctcagctactcaggaggctgagacaggagaatcgcttgaacctgggaggcggaggttgccgtgagcaaagatcgctccattgcactccagcctgggcagcaagagcgagactctgtctcaaaaaagaaaaaagaaaagaaaagaaaagaaaatcagctcagagagttaatgggttgttaatgttttctttatagataaagtacagcactaatcctaatccaataaatgatagtgaaacaaacaaaaaatttttttacaatgacatccctctctcaataattatacagactgtgagttcctgctttttatcttatagagtttacaaatttgagctaaagtttgtcaagtactaagagaatcttgacaaagcaagctaaaactgtcgatgcctgtttctcagattttgctgaaaactgcatactttatttttgagctgtgaggaaacattcttgtaatctgactaaaaacccctttccttttagagcaaaatggagccatctaccttccaacaccagatcgatgattgcagatccctcttttccagttctccttc

SEQ ID NO: 391879 - DNA, 1000 bp, Homo Sapiens
tgaacatactggctttgctgtaatgctcaaaaaggcagtggtgtcttcattttacagttcattaagccaagtacattttcttatttaaatgacaactttggtgctttaaaatgaggtaccactttttaaagctagctgtgttgagttaaagaaaaaaatcagcacttttttctcccagaaatgtaattgccaaacactatccattcccatcttaaattttacaaggtgatagaatcagctcgttgcagtgatgctggccaaatggtgctcagcaggtgagaatgaaaaaaacccagatttctgtgaactaatacacagcttgagcatttccatgtgctaatgttacacacttactaaaaacaaaaactttggaaatggaaaataatatattagtgcaacagttgacatgcttctttgggcaaagatatattgttttgttccacaatttatacttaaaagtgaaagaacatttaaaacagacttactggccgtagcaatgctggcctgttaactgataactagaacttgggttcacatttatgaaaagtgtgtgaaacctagtagagcatgcatagtaggcactcagtaaatgtttggttccttttgccccttggtaagtttatgttaccatcttcccacctgccattctgactttattaaatcaacctgtggaccagagtgttaatgagatgttattgcagcagagattgagaaaattggtatatcatgcagataacatacaaaatctttttgtaatgtaaaaaatgcagttttattattgcttgtgcctcaactgtttaagtgaatactaaagggattggaggaaaaaaaagctaactatcctaactatgtaagcacccaataatacaggagcacccagattcataaagcaagtccttagagacatacaaagagacctagactcccacacaataataatgggagaatttaacaccccactgtcaatattaggcagatcaatgagacagaagattcacaa

SEQ ID NO: 391880 - DNA, 125 bp, Homo Sapiens; identical to SEQ ID NO: 282477

SEQ ID NO: 391881 - DNA, 1000 bp, Homo Sapiens
gactttcagtgtgtaaagagtaaatctatcaccaatcttgcagcagctgcagcagacattccccaggaccagctggtagtcatgcatccaactccacaagtggatgagctggatattctccctatccaccccccttctggcaacagtgacctcgatcctgatgcacagaatccaatgctgtgatgctgatcttccttgaaaccatagcatgctactcttcacagtgacgttgtactctcctcattctgcactgcaaggccactcttcttcattgtgagatgcacataacaatgtttaggatattgcagtgtaggcttttttaaagaccaaaggtagctgaatggtttttttttaaatgagtacaactctagcattttgaagttccagttgtaaatgtatttgtttaccagtaggtttgtgaaattggttctttgtatgggggatggtcctttttcacacagctaggtcttttcagaagtggtggaaattggcagctggggtactttcagtttggactgatattcatcacacctcagataaaatgcagagtaatatatagttgcactttataaatggtggttaaatggaaatgttcaagccattttatagttgtgatgcacaatataatttaagtgcttctgtcaaagtattcctccagtacaatttgtatagtttgctgcccttgatgagcaaaaagtatttatcttgggcttatctgaatgatcaggatgagatttaatgcccatatcttaccagttcagttatctccagagccatttcaccctttagagtgagtcacatgcagggagtgtgaatgtcagaggtggtttattatccagtctgccttacccttaatctgttcacagatatttatttactaatgctttttttttcttaagagttatgggataggaaaatgaagtgtttgctcttcatttactaaatgattgtaaacttgagtttttcatcaaaataaaattccattgttttaatgtttctg

SEQ ID NO: 391882 - DNA, 1000 bp, Homo Sapiens; identical to SEQ ID NO: 206312

SEQ ID NO: 391883 - DNA, 1000 bp, Homo Sapiens; identical to SEQ ID NO: 206314

SEQ ID NO: 391884 - DNA, 1000 bp, Homo Sapiens; identical to SEQ ID NO: 282478

SEQ ID NO: 391885 - DNA, 1000 bp, Homo Sapiens; identical to SEQ ID NO: 282479

SEQ ID NO: 391886 - DNA, 1000 bp, Homo Sapiens
gtgggttccacctttgtgaaggagaggtctttacttctaactgctcttgaagcccagtgaaggggtctccagagggtaacttgtacaaactggaagtacctgcaaacaaggcaactcattttccagttggatgtcagcttacatggtgaacctcatgatttgcctgagccaaaatgagcaggggagaagaaaacagaagataggaaccaaagcagggaaaaggattgctggaggctgctctcccaccacatggaatgagctttccattggccgagtgatcctgtggaagggagctgggctcgagccatcctcccagtgacactccgcaaaggttgggggaatcacatgtcccattttgtctgggaaatgacccagtttatgccagttgtgccagcatagttattaatagtaacccctttgagtcttaaagtgctcatcctaccaataggagatccactgcttagcttacaaggatcttaacagcagtagctgatggggtggtctcagggccgctgtctacaaaggcccctggatgtgtgggcaagagggtgctgaaagccagtctgcccatcacctgtaaggtcttgcactcacacagggctaggtgtgctccatggtgcttttttgtaacatgctcaatggtgtcttccaggctagcaaaggcccagggtatgctgccagtggtgtgagcagaagagagaggtgaaagatgttgggcaagggtgggatctctcacctaagaaactatgcagagagaggaccctcaggaatgcccatctatccgagggaaatatacatgcattgcccataacttcaatatttttttaaaagatgcagggataacctagcagtgggggcagggactacatctgtaggcagttaaaagaattctttcccctctctcttttaaacatttaaattaaaaaaaattcttttagagacagggtcttgctctgtcacccaggctggagtacagtggtgtgatcacagctcactgcag

SEQ ID NO: 391887 - DNA, 1000 bp, Homo Sapiens
aagcatttaggagcctaggtaaaagctgctagtattcttttaaaagttatatttatgacttgcaatgatagaaaactccttccaattaaatggcattttataatattatgtgtgtacttcacagtgttaaaaataccctcatacgttattgcatttgatcttcacagaaagtgcattttaaccagtactctgggtgcaataaataatatgtagaaatttaagtcctccaattccagcatatccagtgagttttgacagtgtgtttatgtggaatgtttaaggatatacaattgtactttatataaattggttcttgttcttcttaaatgtgacatgaaataattgtgctgctacattatactggaaattaacaggggaaaagggaagagctcttggctcccttgaggttctgctagtggtgttaggagtggttacaactgagcttttagtaaccatttaaccgtatgtaaacttggtttctaattaaaaaaaaatttctttttccaatttggtttcctgggtatttttttaaccttgaaataatttattaatagggttacaacaactttgatacaaaaatactgaaacagcaactaccacctggaatggcacactaagtccacactgttaggattttctccttagaaaggatagagaaataaatggatttagtcctcagaaagcttggattaattgcagataccaggatattaatttccatttacccacttagtcaaatagttttaccatagctaaaggtcacatcattaccatgttgaaacttgggaaaaaaattttattctgcttttctctaagctgactattttctacctgtagcttatttcactgtttcacttttacattctatatgtgctgccaatgaaaaattagtatttgaagagaaaccaaactcatttagcttaaagaccaaggagcattttggcagacctgatataaatggaaatattgacaccatttattaaaaacaaaggcagagctc

SEQ ID NO: 391888 - DNA, 1000 bp, Homo Sapiens
ccctaaacttggagccagaagttgtaggttcaagtactatttctgccatctattaatctgaggaaagtcactaaacaactagacctcacaaaatgttacaggattatagtgaggttaagtcataatgtatttgtattagtaaaagcctcagcttaatgaatctttttttccccacagatgtcactaatgatgaccattatcaatttggctcagaattttgtgggtagcaataatctaaacctcttgcagcccattggtcagtttggtaccaggctacatggtggcaaggattctgctagtccacgatacatctttacaatgctcaggtaggtatgctttcactttctagtgacttgccatttccagttttgaaacaatgtgagatttagttcaccaaaaatacaaaaactcagttaatcagaagatactggcatctagtggcagaggccaggggtgaggcttatacaggaaagcccccccataacaattatccagtgcaacatgtcaattatgctaaggttgagaaatcctgatgtagagcttgggactgagtaaaggagactttgattcttcctaaatatcacaattgaaattttactcctttacaagcctatggaaagtatattatgaatggtcaattttcagctgtcatcccagtcaccctttcagtggcattcaaacagttactaattgctccatccttcttgaaactctttatttggcctctatgactgtagactcttctggttctcttctaccttattagctttctctgctgggtccttctcaccttcccaacctctaaatactggcccattccagggctccttcatcagatctctttccaatgcctacactcaattcccaaatgatctcccattcatccgttctatacctttaaatctccagtcttggtctctcccctgaactcccaacttttatgtctgactgccctcttaacatttcccacttggatatctagttaagtatctcaaacata

SEQ ID NO: 391889 - DNA, 1000 bp, Homo Sapiens
  misc_feature (820)..(820): n is a, c, g, or t
  misc_feature (839)..(839): n is a, c, g, or t
  misc_feature (879)..(879): n is a, c, g, or t
  misc_feature (887)..(887): n is a, c, g, or t
  misc_feature (906)..(906): n is a, c, g, or t
  misc_feature (915)..(915): n is a, c, g, or t
  misc_feature (930)..(930): n is a, c, g, or t
  misc_feature (956)..(956): n is a, c, g, or t
  misc_feature (974)..(974): n is a, c, g, or t
atgtcttacattaaaactgactttataataatacaaacttgatacaaaatgaacaatttctcaattttgaggttaatttaatatgaatagtgaagttgactattactgaagttgtatatgtttttctactttgcagatctaagtattcatatagtgtaaatgacaggatgtggattatactatgaaaaattgatattaaggatttattgagtaaaattttttttgaatttttcaatgcagttcatgtgggtgtatgatgaagatgtaggaatgaattgcagggaggttacctttgtgccaggtttatacaagatctttgatgaaattttgggtgagtacttgcttaggatttaatgcatgtttctattaatatcatcatagtgtccttttatatataaagccagacttaaccagtataaatttgaaaggtgtatctctggcttttatccttctgaatataaatgatcttcagaaaatttataccatgatctgtaatgttttcatatctctgtttcatctttgtttcattttcttcatctatgaaatcaatgtgttatatttgtaatcccatagttggtctgtactcctctatgtgtagtcatctgggatatgctagcatcacagttacctggagtcatcttgaatatggagatgacagggactgattttgcagattcgttgagttggtgggatatgtaaatatgtttttcaccaacaaatcagatatttctgttgggcaagccaagtgtaataaccattgctgtaaatgatctctgtcctctccaaatcacatgattaattaaattatgtgaatgcctanttgactgctaaggaatgcntgtactttgggaatattttaaccaagggcactccaaaaantctcctgntctcccaactcaacagtgnaaacttganggttcctaatggaanttgtatgggtcccaaaaacttctccnggtgggaattgggtgganaagataagagattaaaactggggttc

SEQ ID NO: 391890 - DNA, 1000 bp, Homo Sapiens; identical to SEQ ID NO: 282483
  misc_feature (965)..(965): n is a, c, g, or t

SEQ ID NO: 391891 - DNA, 1000 bp, Homo Sapiens
cttgaatactccagcatggaataatattaaagatttttatcttttttattggttctaagataagaataatgattaatagggacagttgggggcatttgtatttaacagtcagaggtgaaattcttagatttgttaaagacaaactaatgcgaaagcatttgccaaggatgttttcattaatcaagaacgaaagttaggggatcgaagacgatcagataccgtcgtagtcttaaccataaactatgccaactagagattggaggttgttccttactccttcagcaccttatgagaaatcaaagtctttgggttctggggggagtatggtcgcaaggctgaaacttaaaggaattgacggaagggcaccaccaggagtggagcctgcggcttaatttgactcaacacgggaaaactcaccaggtccagacataggaaggattgacagattgatagctctttcttgattctatgggtggtggtgcatggccgttcttagttggtggagtgatttgtctggttaattccgttaacgaacgagaccttaacctgctaaatagacataagaaatattatattttttatctgtcttcttagagggactttgtatgtttaatacagggaagttttaggcaataacaggtctgtgatgcccttagatgtcctgggccgcgcgcgcgctacactgatgcatccatcaagtatatattcctgtttcgaaggaaatgggtaatcttttgaatatgcatcgtgatggggatagatcattgcaattattgatcttgaacgaggaattcctagtaagcgcaagtcatcagcttgcgctgattacgtccctgccctttgtacacaccgcccgtcgctcctaccgattgaatgatccggtgaattattcggaccatactttgtagcaatacatgtaaggaaagtttcgtaaaccttatcatttagaggaaggagaagtcgtaacaaggtttccgtaggtgaacctgcagaaggatca

SEQ ID NO: 391892 - DNA, 1000 bp, Homo Sapiens; identical to SEQ ID NO: 282485

SEQ ID NO: 391893 - DNA, 1000 bp, Homo Sapiens
tttaatcaccgatatggcaatctagatggtgacccaaaagaaatctctccagttattgaccagttcattgagtgtgtttggcagttaatggaacaatttccctgtgcctttgagttcaatgagaggtttttgattcacattcaacatcacatttattcctgccagtttggaaacttcctatgtaacagccaaaaggagagacgagaactcaagattcaagaaagaacatactcattatgggctcacctgtggaagaatcgggccgataacctgaatcttctgtttagagctgatcacagccagactcagggaacctttcatctccctacaacaccatgtaacttcatgtacaagttttggagtggaatgtataaccgctttgaaaaggggatgcagccccgacagtcagttacagattacctaatggcagtgaaggaagaaactcagcagctagaggaagaactagaggccctggaagaagtaagacatacttgctttgttaatctattttctgtgcttatttcttgaagagcaaggcttcatgaaagcctcttaagattcagtgcaatacaaatatttcacatttttagtcagtagaacacctgaaacacaaccccatccaggtcaggactcagataaccgaagcccaaacctaggcatttaatgcatttcacacatctggtttgtggctcagttccacaaatttttggttgttccttattttaggtcaacttgtttggttactgttatttgagagtagtaaaattaatttttttctggaaagtgtgaaaaagtaacagaataaaatcaaatatatgtacttgtaaaactctttccccacttttagaaattatgttaactatgatattaatctataattggtaaaggggagactgactgtaaagtcttatcttttggcttctatgaacttccctgtacttggacagggaggttataataaaatgcttttcctaattggaaaaaaaaaaaaaaaaaaaaa

SEQ ID NO: 391894 - DNA, 171 bp, Homo Sapiens
  misc_feature (94)..(94): n is a, c, g, or t
  misc_feature (152)..(152): n is a, c, g, or t
aatttgcaagtggagatttcaagcgctttgaggtcaatggtagaaaaggaaatatcttcgtataaaaactagacagaatcattctcagaaactnctttgtgatgtgtgcgttcaactcacagagtttaacctttcttttcatagagcagttnggaaacactctgtttgtaa

SEQ ID NO: 391895 - DNA, 1000 bp, Homo Sapiens; identical to SEQ ID NO: 282486

SEQ ID NO: 391896 - DNA, 1000 bp, Homo Sapiens; identical to SEQ ID NO: 282487

SEQ ID NO: 391897 - DNA, 1000 bp, Homo Sapiens
agtcgtctgtccggcgggctgcggggaaacgagacccctcccctagctccgaagctgccggcaaggtgtgcgctggagttaaaacgcaaacccaacaggtaggggggcggcctggctccaacgacgcatctgggatcccgaggctgaaggcgcaactcttgagggttaaaggcgattctaattcctcgactcccgcccctcaaaacgcatcggctggtacctgagcaatatcccccaaatccaccagggatccctgccttccggctggccccagccctctcagaccaagtggtggggagtaggcgcccagatcgagaagaaaaccacttcgaccacaggagagaaagctggctgggggtgacctcggaggtcacgttcggccctctcccccgcagtcaggcctggccgcggcccacccgaggctgagcagaccccgcgtcggacggagaccaggcgttcgctgcggactcgcgggcctaggaaactgcggcggcgctcgcgggagccggttttccgcgggaggatccgcgctgagccgctcgtgggctcccacgcatgccccactccggaacttgccgcgccctcccccgccctttccggaagagcgtgaggaccccgcatccccgcgcctctccagctcgctcctcaatgcccttggaacgcttgaaagctctgcccctcgctgctcccggcgttctgcccgcgccccctccccctgcgcccgcccccgcccccctcccgctcccattctctgccgggctttgatctttgcttaacaacagtaacgtcacacggactacaggggagttttgttgaagttgcaaagtcctggagcctccagagggctgtcggcgcagtagcagcgagcagcagagtccgcacgctccggcgaggggcagaagagcgcgagggagcgcggggcagcagaagcgagagccgagcgcggacccagccaggacccacagccctccccagctgcccaggaagagccccagccatg

SEQ ID NO: 391898 - DNA, 1000 bp, Homo Sapiens; identical to SEQ ID NO: 195619

SEQ ID NO: 391899 - DNA, 1000 bp, Homo Sapiens; identical to SEQ ID NO: 282489

SEQ ID NO: 391900 - DNA, 1000 bp, Homo Sapiens; identical to SEQ ID NO: 282490

SEQ ID NO: 391901 - DNA, 1000 bp, Homo Sapiens; identical to SEQ ID NO: 282491

SEQ ID NO: 391902 - DNA, 1000 bp, Homo Sapiens
accgggcaatgcgaggccttgttaccgaggttgttgtgctgggggcgtttccagcacagtcattcaagggacgtgagctgcaaggatcgtcacttgacaggcggcttaacaccctctcactccaagggaggatacagctgggtggccgggagcacctccacactccaggcttcccagctccaactggcaaagctgctgggccaccctcttctctccctggggctggcttgggaggcagcagctgctccttgtcccagaaatctgagaattcgaagtccccagtacttgcacatgcagccctttaaatgcccagcatttgtccacagtctcaatgtcaatgccaagctgccccagtcaccactgtccttctcaagggggtcctgtccctctacagttcctgatcctgctcctgtcccccctacagttcctgtctcctgccctgcctccttccagccattctcacctgctgggacctcctgtctcttccctacctcttttgatgcctctgctagactgagcaacagctgaggtgccactggagggcatccaatactcaggcgcagagaagaggggctgttaggtccctgactctcccccaacttcgggcttccaccagagcctgaactgagtctcccacctccttcttaggaatactccacctcaaggccccaccaagtctggcttatctcccttcctctcccctcccttctctaccctcctttcttccccaacacttcctccttctcttctgcggacccagctgctgcttttctaggctgggcaacccagatgggataggcctgggaggggtcaggacccacttgacagactgaatctcactcccagatggctacagttaagtttctctcttggtggattgcttagggcaccatcattattttgcctcctcctgcttgcctaatcccttactttcctctgtccacaaatgtcacactgtttctagaaagctacacagaagagtatttcaaccctggtgaca

SEQ ID NO: 391903 - DNA, 1000 bp, Homo Sapiens
ccccccgatacagtgagtgtccccaccaggctgcagggctctggggctttaaagaaaagtgtcaagcagggttaccaaaaaaaccatagtacagccgggcgcggtggctcacgcctgtaatcccagcactttgggaggctgaggtgggtggatcaatcacctgaggtcaggagttcgagaccagcctgaccaacatggtgacacacatacgtacacacacacacacacagattgctttagtcacaaggtgattgcagcaattagaagtgctcattccggcatgggctggtgaggggcacagatggcagccactggactctctggaaatgtcccctcatttggagacaacccctgaagttcagttttgaggacctcaccccaggtcaaggaagaggccctggccctggatgtttgctcgctcttcacctgttgttttctttccaggtcgagaatacagctcttctcgaaggtaaggaagcccatgaccctccactttcttggaagtaacacttgtcctttgatgggaggtcctggctgtcattcctccagcctcaccctgtacccacctccagttggaggggctggtctcatcccttggggaacatccttccctccacagacaagtgccccgatcactgaagcatccacggccccaggtgtgttgatgtgtgtatgccccatcctcacggcccctccctttctctttccaggcgctcaaggtcccgatcccgaagcccccattaccgacattaggcagaagagtggggggtggggaggacaagggggtgggtaaggggctcaagctgtgatgctgctggttttatctctagtgaaataaagtcaaaagttatttaattcccgtcacctgtctcagtgtcatctgtgtggttggtgcagggctctcccaccccagggcccatgggccagcagagccagctgggagggcgcttgggtttacaggccagatgccagtgctgcctgtgtgggacatcttgccccc

SEQ ID NO: 391904 - DNA, 1000 bp, Homo Sapiens
gtcatgtctctagctgggaaatacacatgtgagcctggcgcctgggtccgagggtggaggggctgggcccctggactcctcctgggtctgagggaggacgggctagggccctggacactcaggtctgagggaggaggcctgggttcccagatgcccaaatccccttggtaatgagaccccgcctccaccccactctctgacagtgaacaactggttggcaacggtaacgttgggccaggcgggcatgcacgcaacatactaccacaaagccagtgaccaggtgagtgggtgcagggactagctggtgctgccaggggctgctgggcctggaagtccaggtggggccacttgctaattctcatgtgttgctccggcccctccagctgcaggtgggtgtggagtttgaggccagcacaaggatgcaggacaccagcgtctccttcgggtaccagctggacctgcccaaggccaacctcctcttcaaaggtaaaggtctcggttcccctacgcgggaaacaggcaggaggtgactcaactctgagtggatgtgtgggccaccacaggtgctggaggacagtgtgctgccaccctgtgggcctccacattaccagggaacacttgttaaaaggtaggtggggccgggtgcggtggctcacgcctgtaatcccagcactttgggaggccaaggcgggccgaggtaaggagattgagaccatcctggctaacacggtgaaactccgtctctactaaaaatacaaaaacaaaattagccgggtgtggttgcgggtgcctatagtcccaactactgaggctgaggcgggaaaatggtatgaacccaggaggcggagcttgcggtgagccgagatcgtgccaccgcactccagcctgggtgacaggaacaagactccatctcaaaaaaaaaaaagtaggtggacaccctctactatgttttatgcctggaaaaaaaaatagttaaactccagccttggtaaccccccct

SEQ ID NO: 391905 - DNA, 1000 bp, Homo Sapiens
actcggctcactgcatcctccgcctccaggttcaggcgattctcctgcctcagcctccggagcaggtgggattacaggcatgcgccaccatgccgggctaatttttgtattttcagtagagactgggtttcaccatgttagccaggctggtctggaactcccgacctcaggtgatccgcccacctcggccttccaacgtgctgggattgcaggcgtgagccacctcgcccggcccaaagtggtcttaagcaaacacattccatcatcctggtcgcgggagaaggttggggagctcccaacagaggaccctagtggggagaggattggggagctgccaaggaaggccccaaggagtttggatggacgcaggcatcggtgatgggacccccaaagaggacttctcttcctgcagctccgggattgtggagggctgcgggaggtggaggtgactgcctgcctggtgtggaaggactggcctcaccgagtccacccccacagcctcgtggggaaagactgcaccgacggcatctgcagggtgcggctccggcctcacgtcagcccccggcacaggtacccaccccctgacctccgacctctcatccttgatcatggagattctaagcgactggaggccacccatgaaactttagagcagagggcagcttgggtaaaccctccccactgcctcttctaggtgggagacaggcctggggacagtggagggcctcacttaggcctggagccttgccacacacatattcacatacattttatccctattttgtagaggaagaaactgaggctcagagagggtaaggagcacagataattgatgacagagctgggatttgactgcagacctgacttaactgcaaggtctgttctttctcttactttacaattcatctttttttttttttttttgggacgagttttgctcttgttgccccagctgagtgcatgttcgatctcagctcatccaactccactccccgatcat

SEQ ID NO: 391906 - DNA, 1000 bp, Homo Sapiens
taatttttgtatttttagtagagacagggtttcaacatgttggccatgctggtcttgaactactgacctcaagtgatcctcctgcctcggcctcccaaagtgctgggattacaggtgtgagcccacgcgctggccttctgagaggtttaaaccccagaccgtttctaatgctgggacccctgggcctgggatgtcagcccctgagagcctgagccccacagcagcatctgccagagccctcctgcaggttagggccacacttgcctgctcacgagcactcctctccctcccccgtcaccccctcagttttaacaacctgggcatccagtgtgtgaggaagaaggagattgaggctgccattgagcggaagattcaactgggcattgacccctacaacggtgagcaccccctgcctgacctgaccatcccgtcctcccaaaccccttgacttccgtgctcaccctggtcccctcaccactccaggccccaccgtctcctccagccccatcccttccccgttcccctgtaccccagagagggtctccacttcccaccctcagcctccccatatctcccccgacagctgggtccctgaagaaccatcaggaagtagacatgaatgtggtgaggatctgcttccaggcctcatatcgggaccagcagggacagatgcgccggatggatcctgtgctttccgagcccgtctatgacaagagtgagttgagagtgctgtggccgttaggattgcccttggctgcaggtgtcagaatgtcccgcttacagaggcatgaatggctcaggcgctgtggctcacgcctgtaatcccaacactttgggaggtcgaggtgggaggattgcttgagcccaggagttcaagaccagcctgggcaacttggcaaaaccctgtctctataaaaaatttaaaaattagctgggtggccaggcacggtggctcatgccggtaatcccagcactttggggaggccgaggcgggcaggtc

SEQ ID NO: 391907 - DNA, 1000 bp, Homo Sapiens
cttagtagtaaagaatcttctagagggaaacatttgtgcttttagggataatcttccttgtgcctcactacatccctaagtgggtatgactcttgttattaccacatgcttttttagtatatttcacaaatttacttttaaatattattttagatacggtgtaacatgtgcaattcagaataattttataacaggtcatgaaaaacataactttagttaggattcacaatatttgttctccacataatgagagatgaatgagcctttggagatactgatataaggcaattattttttgcaatgttgaatgtgttttttagtttgattctttttttttcccccaatagggcactacctgccatatcatcttgtattactttttgatgtaaagcgactaatatttacactatgccatattttttttaattatagttgtaaattatgaaagatccttgaattttctacagatctacaactactaatgtaacagacaagggcaatcttggtatttaaatctgagcatggcagttctaccataaaaagtactctatttttctaatttctaggatttttaaaataacatttctgtaagtctgacatactaatagtcactcaagcagtaccatttattttagtttgcatatattttcactgtttttaatttaatgtattgagtctaatagactgttttgcaataattagaataaagatttatttcttctaatcaaagatgcataacagctattatctaggggaccacctaaatgtgatttcaaaattttgttaactattacaaatgtaatccttatatagaaattttaattttgtaaagtagtgtataatattgtaatattaaattcttgttcttaaattcaaatatgtattgatcttcaatgtgctgtgttaaatcttgcttctctgaaaagttggagacaagatttgtcttcctttttacagtttgtaattttcactgttttattcctgttaaaaaaaaaaaaaa

SEQ ID NO: 391908 - DNA, 1000 bp, Homo Sapiens
tatttaagagatttttcaactaagaatataagaacatattgccataaaattttaaaatccctatattctagaggttctatctattttcagttgtatgctccttaaacttatctgtatttaggcttcccccaaaatgaattctaacagaaaaaaaaaacttcggtaaaaaaagaatccataaacactaaatattttaatacctttatttacctcctctctaacagaactaatcagcagcagataatatatttgttacgaagagaattaattttctagttaaacatgcacataaaaacataaaggtgacaatatttggcaatatatgacactaataaaggtaacatttattgggctatccactgggctaagcgcttgactcagatcacctcagttaatccttacagcaaacctataaagtaggtgctattcttatttccattttatagatgagcttataaatgaggaacctcattactgtaatttaatcttcaccaacccagaatttgagttcagtgtttactctggctattaaaaggttgaataagcaaattagaaattaaacgggatttcagaagatatatttaacctactagaaggtcgtacgttttaagacatactgaaaaacagatgctaactgcttccaacaggatgtgtttgggaagatcctgcctgacactataccacattaaaacacttgaagattcaaacttttactagttaaggttgagtgtcctctcactattatccccaatgactggtccaagttagtaaggtattattctacttctatgggtggtacagtatggtggatgtcagctgcggctcccaagttctatttccctcctaccctgacaaagtgtccagaactctacacacccccagcctccccacagcctggtgcaggagccagtctggtgcagaagccagcctgaggatgaactgacccagggaggaaggagtggagagattaaaaaaaaaaaaaaaaaaaaaaaaaaaaaaa

SEQ ID NO: 391909 - DNA, 1000 bp, Homo Sapiens
cctggccctgtccccgaggtggctgggaggtggctcctcaaacagccactttctcatcagtgcccggtgctgggtcaggcatcgactgaggctctgagctaactaggaaacacagtggccttggagggctggggagtgtcatgggggtggggacagggagccaccggtcgcatgtgactgaactcttcaccccagtctgtggctttcccgttgcagtgagagccacgagccaaggtgggcacttgatgtcggatctcttcaacaagctggtcatgaggcgcaagggtaggaggcagggccgctgcccaccctgggccggcacattgtaattctgtcctgcctttttcttcctgtatttaagtctccgggggctgggggaaccagggtttcccaccaaccaccctcactcagccttttccctccaggcatctctgggaaaggacctggggctggtgacgggcccggaggagcctttgcccgcgtgtcagactccatccctcctctgccgccaccgcagcagccacaggcagaggacgaggacgactgggaatcgtagggggctccatgacaccttcccccccagacccagacttggccgttgctctgacatggacacagccaggacaagctgctcagacctgcttccctgggagggggtgacggaaccagcactgtgtggagaccagcttcaaggagcggaaggctggcttgaggccacacagctggggcggggacttctgtctgcctgtgctccatggggggacggctccacccagcctgcgccactgtgttcttctcttaagaggcttccagagaaaacggcacaccaatcaataaagaactgagcagaaaccaacagtgtgcttttaataaaggacctctagctgtgcaggatgcaaacgtctcggggtcagtgactgcctcctgcccctgttggtccctaggcagtgggggcagaagctcccagctgacctgtttctctgggatgagagggaggaga

SEQ ID NO: 391910 - DNA, 1000 bp, Homo Sapiens
attgttggtaattattttggtacttttatgatgtatatttattaaacagatttttacaaatgagttatcctgatcattttcttcaggctgccgtgggcctccggttctgaagttccatcctccggcagaggtggaggtggagcagtgtgagggaggaggtaactcccagcagcttctcacacctgacacccagcctccagcaaagctttgcaggcaccctgggcccagtgtgtgggagggaggctgttgcaaggttataggaaattaccaatctcaggcttggggtggaagcatgctgtttggcctgtggttggagacctctccattgtcattctgtcatcccgttgatttaaacttcctggaccctaattgccagttgaggaaattattttggccaagaagaatatgctgaattcatatagagctgggaaagatctcactaatacaggaagttcctaaggacataggctcagaaatgggactgcactgacatttgttagcagatgctcacctctgagcctcagttttctcatttattagctgggctgttgtgaaaattacataagacaatccacgtaaaatgcatagcagagcggcaggcacgtagtgctaaagaaaaacaagctgttacgcaacgttctttatgtcataccaggagaaacaagtccagagagaatgtcctgtctagggtcaccttgcaggagaaataggtggttaacatatttcatacgtgctcgttttggggtaaacatcttttaagagcattccatctcttaaatctatgtgttattggctgtagtagaaaagtaataaaggcttgaagggtcttatcagttcagtctactgattgtactggacgattctacaggagcaaatgtcacaagaaaccagtaatgtgaaacttggcttagatgctctatcttgaggttttcatccctaaaatggctctcttgcctaggtagagagaagaataaagatgggtatactgaaagcccagact

SEQ ID NO: 391911 - DNA, 1000 bp, Homo Sapiens
agagagggtggaaatctactgaagggccagtccggctcctggaacagccctgggggcaggtgctccctgaagcccataggactctgtctccttggcttctctccctgcctctcccttggcctttctgtagaatttcacaggcaaactcataggtgtccagccactgatatgcaggaaacagcgaatacctggtttcaaaaagggaagccgtgctcaggagcctgaacacaggaggcccgaaacagggcttgtgttgcatggacctgaagccagaggtgagggcgattaggaaattctttcccacatcaggggaaggatgctgttgaaatgggaggcccaaggcatctctgcaggacagagactggacatatgcccagagaggttcaggtccgtgagtctggaatatcctcctcctccccagggacaggggagcaggtctggggcaggcccattggttggaggacggggaaatgagctgtagatggtgcccctttgaccctctgatccatcttcctgtgcctcacagtctgaccaccaacactatgatcacatagttcatgcaggttctcgtaaattcattccttcactctcgactgtgaacaaatcggctgttgccttcatgctgctgaaaagctcgtccaccctggctgtttctgctccatgcccgcctgtctgcacaggggagtgccctgccctgagggaaaccaggcattcttctgggccagacagtctcctggaaatgaggaagggagagaattgtctaaaactgctggaaagttgaagagtacaccacatatacacagaagcatttgtcttttcaacacactttctctccccttcagagggaccagggctgaaacctgagctgattcagcccaaaggagcttggtgactgcagggagtccactatcagcaacctccttcctcgaccccaggagcccagagtctcacctgcccagaatgtgccaatcactcattcattcaacaaacttcctggatc

SEQ ID NO: 391912 - DNA, 1000 bp, Homo Sapiens; identical to SEQ ID NO: 282494

SEQ ID NO: 391913 - DNA, 1000 bp, Homo Sapiens
taccgcagcgcctttggtttagagatggtttgaatggggagaacagctcgaatgcactgttttttcctccaagtaaggtactataaaactgtttataaaatgaaactaatgagatttggagcacactgttacctgatattaagctgttttgatgagtgaggcaaattgctgtggttaacaaatgtaaaaccatcacttttattgatacaggtttgtgtatgtgtgaaattaatcaaagcgtgggcgatgatgaacagtttctgtagaattctgtcaaaggttaagagctagttatttttaagaatgacatgaatctagcagagacagtgattgcctaaatgaccattgtaattaccaattacttcttgaagcagagaatatattcacggcgtgcagtcctctaaatacagaaaggcattagcccatttacgtactaatgcacataatttagctcctgaaaagggcagatgggagcacaatgaaagatataatagataccgcctaatatcattccctaagaatattggattcatcaaagatgaatattactttatgtcagattgttttttataaaccagtcaaaatatatttcatctcatttttgcacgcggtatcagggtgacaatagcaacatcacctttgtcatcaaaatctggccagctgtgggactaggcagacagggtgcctgatggggggcgtttcagccaccctttgtaagccggtgtgtaactcacaggcaggataacttccaggcaggggtgattaattttatttcctttggagtcgatgtcagtggaagcaagagagacacaggttctcagacaggaggatgggagcagggaggtctgagtcgacctcctttcggaaaatgcatcatctgaaatgtcttccggaaggcgacctcctccccagccctgggttcctctcctcaggtgttgaaaatccaatatccaggtatatggagaaggaggagggagccctttctgtctgcacactgatc

SEQ ID NO: 391914 - DNA, 1000 bp, Homo Sapiens; identical to SEQ ID NO: 114906

SEQ ID NO: 391915 - DNA, 1000 bp, Homo Sapiens; identical to SEQ ID NO: 195675

SEQ ID NO: 391916 - DNA, 1000 bp, Homo Sapiens; identical to SEQ ID NO: 195674

SEQ ID NO: 391917 - DNA, 1000 bp, Homo Sapiens; identical to SEQ ID NO: 282496

SEQ ID NO: 391918 - DNA, 1000 bp, Homo Sapiens; identical to SEQ ID NO: 195673

SEQ ID NO: 391919 - DNA, 1000 bp, Homo Sapiens
cacacagcatggctgggccgtgctaggacaagagagtggtctgaatccggggcctggcctggcccgacctgcctctgaaagttctgggtcatagcagtgagatgcccgggcctttcgtccctcgagcaggtggaggaagtgactgccccttgcaggtctcagatggcataacccaggcaggtttgtcctgcagcagggcagggatagtgactgcgccatgctgggagcctgggctaccagcaagatggccttcactcagtccccacccccagaggtgggccagacctgctgggctgcagacttaggggcttagagagccaggggacctgcccagggcacacagtcagcgagagccgggaacaggaggcagccttgggttttccctgcccatggcggtgtgtgtgtgtgggttgtgggtgtgcacaagtgggtgggtgcgggtgtatgtggtgtgcacctgcatgggtgtgcatgcatgtgaatgtgtgtgcatgtgtgcatgcgtgggtatgtacatttgtggatgtgtggacatttgtggatatgtggacatttgtgtgtggatatgtgtgcttgtgtgggtgtgtgcacacggtgtgtacattttggtgtgtgaatatatgtgtgtgtgggtgtgtacatgcgtgggtgtgtccatgtgggtgtgggtgtgcatgtgggtgtgggtgtgcatgcgtgggtgtgtacatttgtgtgcatgtgtgcatttgtgggtatgtacgtttgtgtgtggatgtgtgcctgtgtgtgtgcatttgtgggtgtgagtatgcgtgtgtgtgcatgtgtgggtgtgcatgcatgggcatgtacattcatgtgtggatatgtgcacatgtgtgggtgtgcatgtgtgggtatgtatattctagtgtggatatgtgtacacgtgggtatgtctgtgtgggtgtgcatgcatgagagtgcacacgttgctatatggctctgagcctgctgagtcagggccaaccctctgatc

SEQ ID NO: 391920 - DNA, 1000 bp, Homo Sapiens; identical to SEQ ID NO: 282498

SEQ ID NO: 391921 - DNA, 1000 bp, Homo Sapiens; identical to SEQ ID NO: 282499

SEQ ID NO: 391922 - DNA, 515 bp, Homo Sapiens
cccagcttttttccaatggagaatgacaattcagaattaccgtcttggtgcttgcctggtgtgctgttgcccctagaggccacttaaatgccaaagcactgcactgaagcattgtggctccaagcctgtgtgtgtgtgtgtgtgtgtgtgtgtgtgtgtgtgtgtgtgtgtgtgtgtaagagagtgtgtgtgtgtgattagttccagattttaaaatattttagcaatcaactattttcccttccccaggctttttctcctccgtgacagccagagtaatccaaaggcatttgtactcacactgtgtcatcaccagaaaattaaaaatttccagatcttacctgtaagtattgatgttctcagaccagtccttgtggtttgttttctggtttcattcttaatgcaattttcaagttataaaccgacaagaccggtaagtatcagacagtttgaaggctgcagttaagaaactttcaagaatttctttacaggtttgtcttttgaaattagaaaaa

SEQ ID NO: 391923 - DNA, 1000 bp, Homo Sapiens
  misc_feature (707)..(707): n is a, c, g, or t
tgcctcccaagttgaagcagttctcatgcctcagcttcccaaatagctggaattacaggcattcaacaccatgcccagctaatttttatacttttagtagagacagggttttgctatgttggccaggctggtctcgaactcctggcctcaagtggtccacccgccttggcctccccaagtgctgggattacaggcgtgagccacttcgccagccccaagttattttcacgcattatttttygtatacactgggctcaggttcaccaaaaccactattgccttgggtcctacattccaaagcttgattttattttaatcatacgcttttcatccacctaccccatcccaccctaaaattttccccagacaaggatggagatctgaagactcaaattgaaaagctctggacagaagtcaatgccttgaaggaaattcaagccctgcagacaggtwaggtgcagaccttctcagtgccttgtcccaaaggagacaggaaaatttctgggtcaatttctgggggaygtctttttaaaagaaacattgacaaatcaacaatgtggccaataagagggccccaatgctgggagatgattgttttaggaaatcagcttcatttacaatcccattctcctatatatgggtggtatagaaataaaaataagtagttcaggaataaatttgaaaagtcagtccatacttattctctnwagagtagtgaaacagaatgaagccmgtmtgaaatgactaamatgattarcatttattggatgatagctaagtgcctatcaggccaccaggactctctcgggccacacccagyctaagatgctkgaaggacatgggttagaaccgcagcttgccaacagggcagcgccagcgttcctccccacagttatgcagccacatgcgctactgcccaggagctattctccaaggggtgaggaagtgagccatgtgggcaggtttgggaacagccctggtttacaaggctcatccccca

SEQ ID NO: 391924 - DNA, 1000 bp, Homo Sapiens
taagctcttggtggctacttgaagagggctgggaagcaggaggaaagaagctgtggtgatttttaggttggatggaaatggtgaaaccacctgagagaacacaggctgggccagtttgcgggaaaggttggtgagcatgtgggcatggtggttgaatcatctgtgtctaggcagaaattcctgataggcagttgaggaaaacaagctcagtgttggagtaaaagcttcatcaaattaggtttcagtggtatcccctgacattggaaaaggtattatctgctaatatcttaacattttcttttgtcttgtatttgctttcctctggcaggtgcagagattcttagaagaggaggtgtatcccctgttaaaaccatatgaaagcgtgatgaaggtgaaagcagaattatgtctgtagagttggaagagaattaaacgaaaatcattgttaattgctgaggcatgaaaattgtgttactataatgccttattttacctcgagaattgttaccttaaattagtacagcactttcttcttcccatggtgctttcctgtttctcagtctcacatttctcaacaaggcaaaaacaaagagcgttgaagttgactctgctcttgcatagtaaatgtagttcatacttgatctctgttctttcaaggcatattttccagctgcctcaagtttagtccttttcacgtgttcatttgcttgtaaagtagcaagaaatttctggtcctgtcttctaaaagtgaatttgatctaggtctagcaaaataacctggactcagtgattgagtcaatggtcagataccttttatttcggttatttttggctagtataagtgatgaagtttggaactacagtaaatacttaaaaaaaaaaaaaaaaagaaccaagccctgatgtgaccatggggctgattgagctgaagttgtgcccagctcatttcatcttttgataaggcttatacagcagggaaatgctaattgagtatattgat

SEQ ID NO: 391925 - DNA, 1000 bp, Homo Sapiens; identical to SEQ ID NO: 282500

SEQ ID NO: 391926 - DNA, 1000 bp, Homo Sapiens; identical to SEQ ID NO: 206319

SEQ ID NO: 391927 - DNA, 1000 bp, Homo Sapiens; identical to SEQ ID NO: 282501

SEQ ID NO: 391928 - DNA, 1000 bp, Homo Sapiens; identical to SEQ ID NO: 206320

SEQ ID NO: 391929 - DNA, 1000 bp, Homo Sapiens; identical to SEQ ID NO: 206321

SEQ ID NO: 391930 - DNA, 1000 bp, Homo Sapiens
gtgtgtgatttgatacatccctagggatttatctggcataagtatcaaatccttcatggcttaaaaattaataaacagttttttaatatttctggaaagaccctacctccaccccagctgccaagtcctcaaagattataaattatctatatgagtgtatgtatctgtatacacacatgcaccattacacatacaacataaatatgtatatgtatattcatttgtaaaggcaaaggtgccctggctttttcagataactgaatagaaaaacatttcatacatttaggattatttttctcctctatgtatttactagatattatatttggtttgggttgctttctgctgctgttctccttcacacacagcaaaatatacatttgtttctgtagattgacacaacttatagtaattactcccaaaaagttgtctgttcttttagaaaaggattaaataaggctcgggacccacttcactctactgaatctaatgtacgagacagtactactgcttctttgtgtgcttgaatttgcatgaaagcttaatagcaaaatcttctatctcagtaattatagcaaatagggacctactggtagggagcaggtgttggctcagaaacctgaaaaagacaacccactttcatacagttctattaaaatcccctaagttttctaataaaatgatatagtccaaatatggcaatcgactggcatttatgggagcctctaaacctggaattatggggtttatttttctcccaaatgagctgcaaaagataattattgctgcccagtaaacaaaatgtatgtcaaatcagtaaagaatttgtttagcataatattgccttatctttcagaagctttcttctatattcttgtgtcttcagtacaatccacttttgtttgaaatccatttgcatattatcttactgtgcatttagtgaattctcaataatgttgtatttgctgacaagaataataaattggaccacaactaaaaa

SEQ ID NO: 391931 - DNA, 1000 bp, Homo Sapiens
tgaattgttccttgtactgtattctgaaccaagatctggaagccctccaacattttcaaaacagaactgcttattaatatagagaaaaagaagcagcatcaggataataaacacccaaacagctgacaaaaacccaactgcctctggagatacttttctaaaacaggaaagcttcctgctgactcaaaaggatttttcttcttctgaactcctattatgggaatggatgaaatcacttacagagccacagaaggaaacaaagcaaagccaggatcatgagttggattatctggaggcctaggccaatggggagttattgcttgcagtcactgatcaagcaaataaacttttccttctttcttatgaaatttatttaagaagctgaaattacttaaatgataatgagttgtgagaaaagaattgtagtagatatttgttctctatccaaattgcactgagtggggaggtgtacccataccccagcttcgagaattgactgataacagttcacacctgcacttctccagagaattgtccttgtctgacctgagcaccttgtttagtaatgtctggtaggctatgctccaccttccctgggcagatccactggtctaagacaaacaacccaaccctctaatttctgggaagaatcacctccgtgattaatctaagctccagatctcccagagaaatcatgctgaggctacatttgtgaaactacatttttatctagcttcttcctttgccctttcctgctgtcctcacttccttatgaatttttttctgaaagatcttgattaataaattatttaatcaagatcccccagtcataagttctgtgttttggaatataacctatacaaaaataaattaattggtactagataatgctccgctatgcatctatttcaatgtctattctttggaagttctgtcatcacacatccccaagttttagataaggtttttagctaacagccaggaaaagattcaataaaaa

SEQ ID NO: 391932 - DNA, 1000 bp, Homo Sapiens; identical to SEQ ID NO: 282503

SEQ ID NO: 391933 - DNA, 289 bp, Homo Sapiens
ctaggatttctccactgtaaagttgtatttggggtgatagattttttttcattgctaaaagtatgattttactcacagctaaataagtaataatgttgacattttgtagccatttgacaccattctttttttttttttttttttttttttttttgagacaaagtctcactctgttgccaggctggagtgcagtggcacgatctcggctcactgcaacccaagcgattcctctgcctcagcctcccgagtagctggtactacaggtgtgtgccaacaggcccagctaatt

SEQ ID NO: 391934 - DNA, 1000 bp, Homo Sapiens; identical to SEQ ID NO: 282504

SEQ ID NO: 391935 - DNA, 1000 bp, Homo Sapiens; identical to SEQ ID NO: 282505

SEQ ID NO: 391936 - DNA, 1000 bp, Homo Sapiens; identical to SEQ ID NO: 114907

SEQ ID NO: 391937 - DNA, 1000 bp, Homo Sapiens
cagagaaataaagaacgtcaactgtttttccaaaacgagtatttaatctttctacagctaaaaaaccattgaaagtcttttcccaggactattttattcaaacatcagagattagagaagaattgagcataatccaagaaaatatatgacacataaccagaagtaacagagactctacctttcacgaaatcccttagatacctctggtataatgaagaaaaaatgctggtgggatgcacacacagggatatatctgggaggcatgcaaagaatcctattctcaagctgcctaaaacaattaattcttcaaaaactgcattctgctgtgaaactaagttatttcaaaaacatagttaatatagttgatatcgtttggatctgtgtccccatccaaatttcacgtcaaattgtaacccccagtgttggaggtggggcctggtgggaggtgatttgatcatggggcagtttctcctgaatggctcggcaccatccctcttggtacttgatatggtttggctgtgtccccacgcaaatctcatcttcaattgtagctctcccaatccccgcatgccgtgggagggacctggtgggaggtaactgaatcatggggctgggtcattcctggactgttctcgtgatagtgaatacgcctcacgacatctgatggttttataaagggagcttccctgcataagccttctctcttgcccaccaccacgtaagaagtctctttgctctgccttcgtcttccgccacgattgtgaggccttcccagccatgtagaactgtgagtccattaagcctcttccctttataaattacccaatcgcgggtatgtcttaattagcagcatgagaacacactaatatagtactgtcctcacgatggtgagttcattctcaggagatgtggttgtttaaaagggtacggcacctaccctgtctctgtcttgctcctgctcctaccgtgtaagaagtatctgctccctcttaaccttcca

SEQ ID NO: 391938 - DNA, 1000 bp, Homo Sapiens; identical to SEQ ID NO: 282507

SEQ ID NO: 391939 - DNA, 1000 bp, Homo Sapiens; identical to SEQ ID NO: 282508

SEQ ID NO: 391940 - DNA, 1000 bp, Homo Sapiens; identical to SEQ ID NO: 282509

SEQ ID NO: 391941 - DNA, 1000 bp, Homo Sapiens; identical to SEQ ID NO: 282510

SEQ ID NO: 391942 - DNA, 1000 bp, Homo Sapiens; identical to SEQ ID NO: 282511

SEQ ID NO: 391943 - DNA, 1000 bp, Homo Sapiens; identical to SEQ ID NO: 114908
  misc_feature (681)..(681): n is a, c, g, or t
  misc_feature (845)..(845): n is a, c, g, or t

SEQ ID NO: 391944 - DNA, 1000 bp, Homo Sapiens; identical to SEQ ID NO: 282513

SEQ ID NO: 391945 - DNA, 1000 bp, Homo Sapiens; identical to SEQ ID NO: 282514

SEQ ID NO: 391946 - DNA, 1000 bp, Homo Sapiens; identical to SEQ ID NO: 114909

SEQ ID NO: 391947 - DNA, 1000 bp, Homo Sapiens; identical to SEQ ID NO: 282516

SEQ ID NO: 391948 - DNA, 1000 bp, Homo Sapiens; identical to SEQ ID NO: 282517

SEQ ID NO: 391949 - DNA, 1000 bp, Homo Sapiens; identical to SEQ ID NO: 114910

SEQ ID NO: 391950 - DNA, 1000 bp, Homo Sapiens; identical to SEQ ID NO: 282519

SEQ ID NO: 391951 - DNA, 1000 bp, Homo Sapiens; identical to SEQ ID NO: 282520

SEQ ID NO: 391952 - DNA, 1000 bp, Homo Sapiens; identical to SEQ ID NO: 282521

SEQ ID NO: 391953 - DNA, 1000 bp, Homo Sapiens; identical to SEQ ID NO: 282522

SEQ ID NO: 391954 - DNA, 1000 bp, Homo Sapiens; identical to SEQ ID NO: 282523

SEQ ID NO: 391955 - DNA, 1000 bp, Homo Sapiens; identical to SEQ ID NO: 282524

SEQ ID NO: 391956 - DNA, 1000 bp, Homo Sapiens
gaagcagagttttgccttggaagccagatgaatatggccaattaaagaaagccaaacttacgtttttgaaaattaaattgatcctgatgttctgtcagaacaaattgtacctgtgcatgtttgtcgctgaaatgaatcctgtctaaagctgggccttgctgactttcagtttccacctaagatgatttgggtacagcctgagaatctgttccatgggactatctgcaaaatataacaagaactggaactttccagtaagttcttcctccacaggactcttaactgttctcgttttgtttttgttatcattcagagtcagctggtatgtactttcatgcttgcctgggaaaactcaactgttttttccttcaagattttctgtgatgatttctcaggtactttcaagtagcctgttacctattcagagagtctccttgagctcagaattaaaattgccctgaatttttgaagatccaaaatcttatgtaaatagccattggtagttaagtgggttttattttttagtcttgtgcttgcccttggtctgacataagtgatcagactgccaggagaagatgttagagaagctcactagagcctaccatctgttgaaggcacattttacacagtattccaagcccctagtgcataattagtagtgggtggttctcacatcagcttgacatctggagttagggttgtccgtctggggccttgtctgctgtcaggtgtgtacagacctgtgcttgtagtgtactgcaggcatgcacactagtccactgccaagtgtggccctaggcatgggatcccgggggctccaggaaaatgctattgtgtcatatctggaacacaactttgtcaagtcactctttatgcaccttcctttgctttatcaattgtaaatcagataataaaatgtaaatcagttaataaacatgaggcttcttaaattgtaaaaaaaaaaaaaaaaaaaaaaaaaaaaaaaaaaaaaaaaaaaaaa

SEQ ID NO: 391957 - DNA, 1000 bp, Homo Sapiens; identical to SEQ ID NO: 206322

SEQ ID NO: 391958 - DNA, 1000 bp, Homo Sapiens; identical to SEQ ID NO: 282528

SEQ ID NO: 391959 - DNA, 1000 bp, Homo Sapiens
ttgcatcacgccctctccacccaggcccacctggctgtggacgggccagcccgacctcacactgcctcccacccctctccagatgtggttttcttcatctacctctaccaacggtggatctaccgcgtcgaccccacccgagtcaacgagtttggcatgagtggagaagaccccacagctgccgcccccgtggccgaggttcccacagcagcaggggccctcacgcccacacctgcacccaccacgaccaccgccaccagggaggaggcctccacgtccctgcccaccaagcccacccagggggccagctctgccagcgagccccaggaagcccctccaaagccagcagaggacaagaaaaaggattagtcgagactggtcctcacctgctccggctcctggcgaccactacccctgcgtcccggccccctcgcctcccctccctgtcgccctttccctggacagatcaggccggggcggtgggaggcccgcctcaggtcagggcccagcgtgtgatgtaggggccggggcaggccagggtttgtttgtggaggcgctgtctgtccctctgtccctctgtgtttccagccatctcgccctgccagcccagcaccactgggaatcatggtgaagctgatgcagcgttgccgagggggtgggttgggcgggggtggggccgggcccccctacgggatgcccacggccgttcatcatcttgtccctcgtccccctaccacactccccctcctagaccgccgccctttaacacagtctggatttaataaattcatatgggtgtttaacttaaactcagcactgcccctcctcctcgtgccttccttcctctgttgccttggacaacagcttccagcagggatgaggtggctttcctgggtctgggagagtgacctgacacggtacgggacctgtaaaggtggggattgtgaccttgtgtcaagaaccatacctgggcgggcgacagtgagctcacacctaaaat

SEQ ID NO: 391960 - DNA, 1000 bp, Homo Sapiens; identical to SEQ ID NO: 201495

SEQ ID NO: 391961 - DNA, 1000 bp, Homo Sapiens; identical to SEQ ID NO: 282532

SEQ ID NO: 391962 - DNA, 1000 bp, Homo Sapiens; identical to SEQ ID NO: 195011

SEQ ID NO: 391963 - DNA, 1000 bp, Homo Sapiens; identical to SEQ ID NO: 282534

SEQ ID NO: 391964 - DNA, 1000 bp, Homo Sapiens; identical to SEQ ID NO: 195661

SEQ ID NO: 391965 - DNA, 1000 bp, Homo Sapiens
  misc_feature (730)..(731): n is a, c, g, or t
  misc_feature (765)..(765): n is a, c, g, or t
ggaagtaacacgcagatgatttgcacaaggacacgctttaagaagcagtggacttggaagtccaacacagatctgtctggctctgggctcaaaccagctatggttattgcagccacttccacctgcatccccatcaagcagtcaggaaggctgcatggaggaggccctgcgtcagctgaggcttgaaggaggcctaggagtttataggaaggtaaattggagtaggaggctttctggaagtaagaaaagtcacgtgcactattagcaaagtaggcctgggccggcactgcttcctctttctgcttctctgtttcctgatgacatcaacataaataggaaacgtgggaggctcactctgcctagaggctccagaagaagactggtctctcccaccacacagaggtatggcccggcgtccaggagcagggctgaggggtggggtcagagctggggggaatgtggggagtccaggatgaaaaaggacagggggagcctggggggctcctgtgggtagctgtccctgggacttggaggagttagggcttggctcttaggatgacctgagcccgagctcctagggcggccagtggatggggaggcagccaggggtgccaagctgcttgggtgttgtaggagagctctggggaggactcagcctcgctagcggatctggttggtctggtgggaaggacgcctagtggggtgaagagagctcaggcctgggagtcannacctatagtctgtcttcgctttgtcactaagatnctggttggtagtgagagcaccccctgtccaccctgggcttctgtctcctcatctgtggaatggggagcatggatagtccctgacatcttggtttagaaagagagagaacgcatgctcgtgtgtttgcccgtgtgtgcatttgtgtgtgtgcctgtgtgtgtatgtgcatgtgcgatgtcttggggatgcaggagtgcagagagactaagaggcagagggtgaaacctggaagctt

SEQ ID NO: 391966 - DNA, 1000 bp, Homo Sapiens; identical to SEQ ID NO: 206274

SEQ ID NO: 391967 - DNA, 1000 bp, Homo Sapiens
ttcactgctttctgaaggttggcataaaaccgggtcatgctgcgggggaagaaggagtccaccacgttctgtgggaggtaaccgctgaggtcggtatggaagaatgtgaccaggttggtcttggtgggttccctgtgaaggcaacagcagagctgtgttatgatctgcagcagaggtgctggggacgagcgccaggcaggtgagcagagcccagcccagtggaaatggccatgatacagtgatcgcgtctcatcccttgctgtgccctccacccaggagtcctctctggacctgctgattttcaggatggaaacccatcctgtcggggatgcattccacagcctctcccggcctccagggaggaagaagtccctactcccagcccaaaaacccagtaccctgctgcccgattcactcagcaaatgctttcagagaactcactttgtgccaggccctgagaggaacgaagagatgctgcccttcactatttagggtctgcaacctcctgggggctcctgggaccctttcaaggggtctacaaagttaacactatttttataacaacacgaacatgtgattcgccttctctcacatgcatacagtggggttttccggaggttacatgatatgtgatattgcaacagactacacgcacaagcaggtatgagtttctgttaagcctggcatgaaagagatgggcaaaaatataaaaacaatgccactcttttcacagtattttttgttttaaaaaaatagttttttaaaataaaaatgttatctatgttaacatgcagtgcatttttatgttaaaatatttttaacatttctcaaatttaccagttacaatttcaaatacatcaaataatgatagctataacccccaagaacaaaggccctatgaagccctcaaatatatgtaagggtataataatgccttatgccaaaattttgagaactgctatttagagaactggcgaataatttgagcacctatgaaggg

SEQ ID NO: 391968 - DNA, 1000 bp, Homo Sapiens; identical to SEQ ID NO: 114913

SEQ ID NO: 391969 - DNA, 1000 bp, Homo Sapiens; identical to SEQ ID NO: 282537

SEQ ID NO: 391970 - DNA, 1000 bp, Homo Sapiens; identical to SEQ ID NO: 206323

SEQ ID NO: 391971 - DNA, 1000 bp, Homo Sapiens; identical to SEQ ID NO: 282539

SEQ ID NO: 391972 - DNA, 1000 bp, Homo Sapiens
caaggtgggaggatgacttgactccagcagttcaagaccagcctgggcaatatagggagaccctgtatctacaaaaaaaaaaaaatgtttttaattagctgggtgaggtggtgcacacctgtggtcccagctactcaggaggctgaggccagaggattgcttgagcccaggagctcgaggctacagtgaactatggtcgtgccactgcactgcagcctgggcaccacagggaggacctggcttaaaagaaaaagaaaaagaaacactcaaatgacttgaatacatagaaagaaaatagggagggaattccaggcagagggagcggggaggatgaaagtatggaagtgggagtaacaaagaagcttccttaggaggggcctcaggtgtctggaccatggcaaggggacagcagcaggacacaaagccagagaggccttgaaggtcaaggttaggagcctcgacttccccttgtgggccacaggaagccacaaagctctgtgagcagcaggggacctcggcagagctgagctttggaaatatgccacagagggctggccagagctgagtgaatgaggagaccagtggcagagaagcagtcatcataagtccttagggatcctccgcgcatcctggtgatgaggctggtgtcacggggtcagcccaggcacttgttgcctactccagcccagggccagagcgcacctctcacgtttcagctgagcttgatgccaggggagcctcgctccctgggagtgcatcacaggctcccattcaacatgaccctgcccctgaaaaactcaaatgcaacagcccatggccaggccaggcagctgggtaaggcagccttagggccgcagctatgacagaggcctggcagcagcatgaggaaaacctggcggagggtgtgttggagggaagcattcaccgcccttggcacaggccccggggaccctggccagggttcagagatcagtgacccagatgattgagcaacagagat

SEQ ID NO: 391973 - DNA, 1000 bp, Homo Sapiens; identical to SEQ ID NO: 282540

SEQ ID NO: 391974 - DNA, 1000 bp, Homo Sapiens; identical to SEQ ID NO: 282542

SEQ ID NO: 391975 - DNA, 1000 bp, Homo Sapiens; identical to SEQ ID NO: 195693

SEQ ID NO: 391976 - DNA, 1000 bp, Homo Sapiens
tagcccacacctgggagcggctgcctcacaaagtccggaagctgtactccgccctcgagaggctgctggatccctcatggaaccaccgggtataccgactggccctcgccaagctctcccctcctgtcatccccttcatgccccttcttctcaaagacatgaccttcattcatgagggaaaccacacactagtggagaatctcatcaactttgagaagatgagaatgatggccagagccgcgcggatgctgcaccactgccgaagccacaaccctgtgcctctctcaccactcagaagccgagtttcccacctccacgaggacagccaggtggcgaggatttccacatgctcggagcagtccctgagcacccggagtccagccagcacctgggcttatgtccagcagctgaaggtcattgacaaccagcgggaactctcccgcctgtcccgagagctggagccatgaggaggggctgggactggagctggagcaggcacttgcagccgggaaagccagggtgtgccgggccaagatactcacaggctggccacagctgggcaaggctctccgtggagtggactcgagtccctggagcaggcagtgtggaggcagccatcccctgtgatgactggcagctaaggaggacctcggagtggaccaaagccaggaataacgaatgaccaagggccaaggaagggaggacagagaggccccaggagtgggtggagagtggagtgcgctgggacgttgtgtgcaatagagaggtctccacaccagatgtcttccagattctgtgcctctggctttgttgtccagccaggcctgcagtttattttcacagtggacagagagagagagagaggctgcatgtgtgtaccgtgtgtggcaagggcagggccttggcctggggcaggggcccctgctttctttccacagctttcttccaacagcaggcagtggggctgcgggcctgaaaaaaaaaaaaaaaaaaaaaaaaa

SEQ ID NO: 391977 - DNA, 1000 bp, Homo Sapiens; identical to SEQ ID NO: 282544

SEQ ID NO: 391978 - DNA, 1000 bp, Homo Sapiens; identical to SEQ ID NO: 282545

SEQ ID NO: 391979 - DNA, 1000 bp, Homo Sapiens; identical to SEQ ID NO: 282546

SEQ ID NO: 391980 - DNA, 1000 bp, Homo Sapiens; identical to SEQ ID NO: 282547

SEQ ID NO: 391981 - DNA, 1000 bp, Homo Sapiens; identical to SEQ ID NO: 206318

SEQ ID NO: 391982 - DNA, 1000 bp, Homo Sapiens
aatgagctgtttaaatgaactgttaaatgaacagcatataatgaactgttgagtataactgtagtataaatatactttcgtgtcctgctttctccacttaatgttctgtaaatatatttccacgttgctacataactcgtgattatcatttttaaacagttgcattaagtgtccacagataggtttaaacaatcattctcttgtttaccatttgttactaccttttcactagctgaaggttggaacggacaccctgacttacagcaagttgctttctgaaaagggctaccactgccaacaatgttaacaccaagtaatgtacccacaaagttcaccctgacatcaacactgattctcgtttcaagagtccttttcccatgtagtaaacctcactgcccctcagctttcccgatgtccgttccaacctcagtccttcctatgcagccagccctcacctacaccataccatcaaaaactccttttccaaactgctcaggacaccccgctcaattcattctcagaaacctggccttctacagttcttgcctctggtgttttcttctgtctgtctcctctcccctcctagatctggtgatgtattaggactcccttctttgactcactcatttctgcttcttgctctcagctctacaatcttcctaaactttgacactccctgcatctttgacatacttccaagccctaatcctgcagatccagaagagtaagattcagacacatttcccccagtgggtactttaattttgcttgttcaaatgatctacacttacattttgcaaatctttttttttaaattttttaaattttatattttttttccagccaactcaaggccaaaaaaaatttcttaatatagttattatgcgaggggaggggaagcaaaggagcacaggtagtccacagaataagacacaagaaacctcaagctgtgaggtcaatttgtaattaaaagaatactaagattagatgaacacaacac

SEQ ID NO: 391983 - DNA, 1000 bp, Homo Sapiens; identical to SEQ ID NO: 195623

SEQ ID NO: 391984 - DNA, 1000 bp, Homo Sapiens; identical to SEQ ID NO: 282549

SEQ ID NO: 391985 - DNA, 1000 bp, Homo Sapiens; identical to SEQ ID NO: 282551

SEQ ID NO: 391986 - DNA, 1000 bp, Homo Sapiens; identical to SEQ ID NO: 282552

SEQ ID NO: 391987 - DNA, 1000 bp, Homo Sapiens; identical to SEQ ID NO: 282553

SEQ ID NO: 391988 - DNA, 1000 bp, Homo Sapiens; identical to SEQ ID NO: 282554

SEQ ID NO: 391989 - DNA, 1000 bp, Homo Sapiens; identical to SEQ ID NO: 282556

SEQ ID NO: 391990 - DNA, 1000 bp, Homo Sapiens; identical to SEQ ID NO: 282557

SEQ ID NO: 391991 - DNA, 1000 bp, Homo Sapiens; identical to SEQ ID NO: 195697

SEQ ID NO: 391992 - DNA, 168 bp, Homo Sapiens
gatctgggctagaagaaatctcatctgaacatctgcctactttgctgaggttaagttaactcagccttaactctgaagtaactctgaagatgggaagatgctctcccctgggaacatctgagaccactgaggttcaaagaaatgtcagctcaggccagggagtggatc

SEQ ID NO: 391993 - DNA, 1000 bp, Homo Sapiens
actcagttgtattgccattcttgttttgggggccttgctggggttgaacctaaagccctggctagattaatggcacccaaacagcaacctgggaccccaggagagagaaggaggcgccccgtgcccagcacctctcacttcagaaatacggcgtatctatcctgactctagatctgccccacacagacacctcccagagtcactccatgcctttgggccctcccatcagccagtcacacttacccgtgtgcgcaagcccccttcttccgggaagccgctagggtagccctgtagccctagtcttccccaccatcccccgctgtttctccccgggctggacttagggagagcagactgacatcttcactgtcaattccctcccagccctgtggagcttggtggaatgcctggtgtgaagggtcctggtgaaggtttcgcacttttcagaaggggcacgtacccccactccaaactgagcctacccttctttggtatacattcctgcccccagccaaggtccatgggcgttcgtcatttgcttatctgaggtcactgtggtttttggcttgtagatcccaatttcccagaacctgcccccatgtgggtggggcaggaaacaagttactaatccattccccacttgctgtcgcgttcagaagcctcctggcagacactggagccacgatgaagcccccaaggcctgtccgtacctgcagcaaagttctcgtcctgctttcactgctggccatccaccagaccactactgccgaaaaggtagccagtgtccatgggtgtggcgtgmkgggggatgagagaacgsctgggaagtggggaagagcctccgcatgtgccaccgtgtcagacaagtcgtgtcatccctgtgtgtgcaaaaaactggtgcagacctcccgccagcactaccccaagggccttactgggtattctcccaccctaatagaggggatgatycaaatcatttccatttcccaaattgaggraa

SEQ ID NO: 391994 - DNA, 1000 bp, Homo Sapiens
actctacacttatcatgcagttgttacgtgataatctgacactatggacttcagacatgcagggtgacggtgaagagcagaataaagaagcgctgcaggacgtggaagacgaaaatcagtgagacataagccaacaagagaaaccatctctgaccaccccctcctccccatcccaccctttggaaactccccattgtcactgagaaccaccaaatctgacttttacatttggtctcagaatttaggttcctgccctgttggttttttttttttttttttttaaacagttttcaaaagttcttaaaggcaagagtgaatttctgtggattttactggtcccagcttttaggttctttaagacactaacaggactacatagaggctttttcagcattactgtgtcgtctccgtgccagatgtggcaagatcaccattagcaaatggaaattacatttgaaagccattagacttataggtgatgcaagcatctaagagagaggttaatcacactatagaggcaataagtggtatcagttttcatttttctaattgtttaaactgtgttttataccagtgtttgcaagtaattgggtgttagcttgagatggttaaaggtggtttggggagggacttcgttgtaatggttttgctgttgctgaaaagcatggtgctggtaacagttcaacaatccgtggctgctcattcttgcctactttactctcccactgaagcaggttagctgttgaaggtggtatggaaaagcctgcatgcctgttcaattcttttgtttcttctccttccccctccccctacctccttcccctcactcctcccctccttcgctcgctcaacctcttttgttcagtatgtgtaacttgaagctaatttgtactactggatatctgactggagccacagatacagaatctgtattgttcttactgaaacacagcatggaattaacattaaacttaaataaaacaaacctaaattaaaaaaa

SEQ ID NO: 391995 - DNA, 579 bp, Homo Sapiens
tccgatttagggcgtggaagaaagaagaggaaaggaaatggtaggataaccaacacgggacattataaccttaagaaatatatatatatatatatatatgtatttttttactgaatgatgtgggtcgtattgacacaacaggtttgagatctcccataggtatgactgtgttttgtttctgtggccttcaaagtcctcagaacaattttgatgtcacaggtggcatttaaaacccattccttgctggacctggtagagacgcccccagtccgtcaggtctctcgctgcagttccgcagtttgaccgcaggggacggaatctgcggcggcctggaaaactggcgggcgcgaggcgccgctctctcttgggtcagattctcagctcccagctccccgctcccggctcccggcgcccggcgcccggcgcggagctgttcctcaaacgacacgcagccgaggtgggtgggtgtggggacgcgggagccagtgtcgtcggatcggcccgcagtccgctgtcctgctgagcccggaggccgcctggatggagccgccgctcccggtcggagcccagccgcttgcc

SEQ ID NO: 391996 - DNA, 539 bp, Homo Sapiens
caagtcctctgaagaataactccgcagaccttccacgttatgatttctgcctatctgtctcttcccagcccatagtaaccagccagcttggcacagttaacaacatcattcaagtgaagaaaactgactttgaagtatttgatgctttaatggtggattcccaaaagtgctccgatgtgtctggtatgaacacagttattttataccacatgcgtgcaggtgggggctgtacagtctagacatactcttgtttctcttgcctctcttgagctgaagctgcccagtcagataggcatttatagcccccacttaaaggccacagaacttaattcctgtcaggttgttgaaatttagccctaagggagctacaagtcatttccctggtcatctcaggtattcagtaggtctgcttggccacagaacgcagacagcagaaatggaacctagcttgatctcgtgccaagggcagggctgaagaggcctggagggtggcactgagtcagtgacagcccagcactggggaagcctgtgtctctatc

SEQ ID NO: 391997 - DNA, 294 bp, Homo Sapiens
  misc_feature (50)..(51): n is a, c, g, or t
  misc_feature (53)..(53): n is a, c, g, or t
tacccggggcctgtcctgtgacacggggtgttcttgctgccagctcagcnncngaccacgagctcctccggaatgcaggcgtcttatccaaaccctcctgtgattgtgtcggccaaaggattgggagacagagcagtagaaaagctgagacggagaaaggaatgagaaagacccataacagagggcaaagtagagggtgggtgatggatttgtcaagagacagcaaaagtgaaaagaaaaaaaagaaagcaggaggagaaaagtacttgagaaacgtagagaaacctagatgta

SEQ ID NO: 391998 - DNA, 1000 bp, Homo Sapiens; identical to SEQ ID NO: 282559

SEQ ID NO: 391999 - DNA, 1000 bp, Homo Sapiens
atggctttctgacttgaaactaaatacttgatacttgattttgctgtctgagatcaatctgaaaagtaataataatcactaacatttgttgagcatcaattgtgggccaagtgtcatttcaatcactctgtacatattaactcatttcatcctacaacaacccggtgaggcaagttctgttattctgttttacagttgaggaaacagaggcatagagagcttaagtagtttgcccagtagatagccagaagaggagccaggatgggtctcgggcagtttaacagcacagctgaagtcttaaccactatgccaacagctttttggtcctacacatcccatgggaagaggaaaataaaaaggtatctatttgtatacctttttatttctgatataagaagcagaattcctttcacatgacctatgtctatttaatacgtcattttgaaacttaccaataaaatttcccaagcgccagaaaactgttagtggctttttccattcttctctatttttttttgtgctactaattttgcttctttccctcagaaggctgccggaatagtaaacattcactgacatgtcataattactggaaaatgggcactggaaaatcacattgtaattaattcaaagcatgttttccaaatgtactactttaaattggagcttatatcataatccaaggaaacctttgtgtgtgtactgttcccacattgctcagcctgggatatccaggagtaattcaccttgcgcctgcctccagaccatcttccatggaagggggtgaccccttgcctcttggcaaccactatttctaagctgccaacattactcttgcattatcaacattctaacttcatgggaagggctgtggtgagtttctggaatgtgaataggaagttgtttttctaaacagcctgacactgaggggaggcagtgagactgtaagcagtctgggttgggcagaaggcagaaaaccagcagagtcacagaggagatg

SEQ ID NO: 392000 - DNA, 1000 bp, Homo Sapiens
tacaaagaacaggtaaagagaaagagaaggcctcattcccacattgcctgaacaactgtttttatacgtaactcttttaatctaggttatatccactgtatcctgaaagccatctctttagttggcctattgtgatctcatggctagagcccccacgaaaactttccctggttacttttgagcagcatcttgacaagatttgacagttccccttgtcttgacagagtggagtacctccaagggcaccttgtttttagggatctattgaggcaaattcttccattccgtcaatgataagctgggaaattctttgggagatagagcaattcttacaaactgtttagttaacaaagggctcacacaccaccagtaggagtaaaaatctggatttaccaagacaaacagaaggtctctgctttactaaaggattaatgaggttgggcatgatggctcatgcctgtaatcctagcactttgggaggctgaggcaggaggattgcttaaggccaggagtttaagactggcctgggtaacattgtgagaccctgtctctattaaaaaaaaaattagctgagcatggtggcacatgactgtagtcccagatactcaggaggctgaggtgggaggatctcttgagcctggaaggtcaaggctgcagtgagccatgatcatgatcagcctgggtcacagagcaagaccctatttaaaaaaaaaaaaaagtattaatgataagattcctttcagcaaagagctcctcttataccttaaagatatgattcagttggtcaacttttagttcatatagaacttttcatgtatgatcttgttattcaaaattaatcacacctgtatgatgctacaggaaactcctagatacaatgtgtgtgggaagagtatgggaagctcccctctccaggcctctgtctacattcagtgtcctaatggattttcaaccttttggtcaaaacacactcctaaaaaaacaaacaaaaaaaaaaaaa

SEQ ID NO: 392001 - DNA, 1000 bp, Homo Sapiens
ttgttaaaatgtccatattgcccagagtaatgtatagattcagtgtaatccctatcaaaataccatccttcttcacagaatttttttttaaatcctaaaattcatgtggaaccataaaagagcctgaatagccaaagtaatcttgaccaaccagaactcagctgtaggacttgcattacctgacttcaaatatattacaggctatagtaaccaaagcaaaatgatattggtatgaaaacagacacataaacaatggaacagaatagagagccagaaatcacatacttacagccaaaccgatcttcaacaaagctgacaagaatacacaatggggaaaggacagtctctcaataaatgtgctgaaatggcgagcacatcgagaatgaaactggaccctatctcaccatgtaaaaaatcaactcaaaatggattaaagacttaaaggcccaaaactgttaaaaaaatactagaagaaaaacctaggggaaaaactcttctgaaacattgatctagggccaaaaaaattatgacaaagacctccaaaacacagcaacaaaaaaacaaaaattagacaaatgggggcttaattaaactaaaaactgaatcacaaaagaaataaccaacagagtaaacagacaacctgttgaatgggagagaatatttataaactattcatctaacaggagaccaatatccagaatatataaggaactcaattaataggaaaaaacaaataattccctttaaaactgggcaaatgacatgaatagacatttctcaaaagaagatatacaaacagccaagatgtatgtgaaaaaaatgttcaacatcactaatcatcagagaaatgcaaatcaaaaccacagtgagataccatcttacccctgtcagaatggctattattaaaaaggcaaaaaagagcagatgttgtcaaggatgcagagaaaaggaaactcgggcactggggaccatacaccgataaactcatctttggaaaagg

SEQ ID NO: 392002 - DNA, 1000 bp, Homo Sapiens
gtccaccccggcccggcggcagcacggtgccagtcatctgcatgtgctcctgcggcgtgggggtttgtagacttggaaaaccctgttggcagaaagttaagagctcccaggcctgaaggcaggacacagtgccagcagggggccgtttgcccccatgtgtaagggaggcagggcccagctctcccacggcgaggtgagctgagactttctgagaatagttagagtgggtgcgtgtctgaaatgggtactcctaccagctattgtgtacgcaaagcctgagtacagcctgctggtgtcatggccacgtgtgagcaaggccagcgtcacacggctcgctgtgacccgtcccggagactgaaatgggcctgggtcttctccttgtcctgtgattaaagtcctctcttgaaagtggagagcaaaggcacacagaggtgcgcgctcacaagaattcctcccggtgactgggtaatcaatgttactgctgtttcctttgcaggaaagaccacagcaagattctttcattcgtctcctcstagcctgggggaccaggctcgaactgaccctggacatcaaaggagggattatgtggctgctaaagccatcggcccacagccctgttcacgtcttggtgcttctctttcccagaggctggtcccagccaggcacacacaaaaggcagattctcgtaaacgcagcctccctccctggaggctgcctcctgccctggatctggagtggagctgctctgagattttgagttcttctgcagagatgattaaatatatccaagagacattggaaaacctgctgaacattttacattggtctgctcagcacatggctggatgcggatatttctataattccagaaagtcacacagctcctctgtatgagaccagtgggcgccatttaaaagaacaggatgagaatctaagatatattattaataaatgtaatggattttttttttgttaaaaaaaaaaaaaaaaaaaaaaaaaa

SEQ ID NO: 392003 - DNA, 1000 bp, Homo Sapiens
accacagacacatacatacacagagatcacacaaatacactgagatacacatacactgatcacagacacacctctacacatactccatggataaaaacaccacagagactttgattccccagaaccaccaccaacacaagacagctgagggttaatggggaaaagggacactataccatatcaaagcatagcaaatagattataattattagacattcctatttttaaatcccctgtgtcatttctgcttctcagaatacttcattgaccctttctcctctgtagggctcctaacatcctgctgagtttttttctgtgctgcctgtcttaaaatcatcctcgtcttccaccctcttcttaaggtcccagggccttcacaaaacctctctctcaagttctcattcttttatttgccattgcctgtccatttcatacgcttcagactccactttttattcccaaagaagactactaaggtattttcatgaagaatcatttttctactttagagaaaaattttgcaactcccttagaaggcagaattaacttaggaagttgtgatttttgaatagcaattatggctgggcacggcagctcatgcctctaatcctagcactttgggaggctgaggagggaggatcactttaggccaggagttcaagaccagcctgggtatcacagcaagacccttttctctacaaagaattttaaaattagccaaatgtggtgctgcacacctgtgatcccagctatctggaggctgaggcgggaggattgatgaagcccaggagttccatgctgcagtgagctaggatcgtgccactgcactccagcctgggtgacagagagagaccctgtctctaaaaaataaacaaaaataaaataaatagcaattatcttacttctctgtatatattcttagaatgtttttgtttagtgaggaaaaaagcatcattagtaatttccattgctttatccaatttatctaaaaccaatttgc

SEQ ID NO: 392004 - DNA, 1000 bp, Homo Sapiens
aatttgggcatatgtaggtgagcagcagccaattctactgctggttgccgtattgcaagatggtagattgaataacacctctttctcttcctggtcacatgagtgtcaccctcattgtctgctcttgagaaattccttcccttcaccctcaattactttcaagtttgctatattgggatgatttttgatacggtaacctaggtatgttcattctaagtaacattctctctactttctagaccttttcttcttcctgctaactagggcactgcaatattgaggtgttacaccaaaagttcatctctgaactaagaacaacaacaaataaattgctttaataagagaaattccaaacacaatagcttaaataaaattttttttttttctgttgtgatagtttggcaggccaggtcaggaggagcagctcagctaaatgaagaaccagggacccaatttccttcagtcttgttcctccacctgttccttgagtgcggttctttgtatgattgtagctgaattactgctctgtgttccagtccccagaaataaagggaaggattttccttctaagtaagtaatacatgggtggcatacatcacttccatgcatataatggaatattattcagcctttaaaaagaaggacccggaagttcaaggctgcagtgagctgtgattgtgtcactgaactccagcctgggtgacaaagccagacactatctcaaaaaaaaaggaagaagagggaaatcatgccatctgcaacaacatggatgaacctggaagaaattatgcttgtatgtggattcgaaaaaagttaaatttctagaaactggagagttgaatggtggtttccagaacctgggagatgctgtaggggaggggatgctgggtggatgtatggaaataatggggaagtaaagtctgaaacctgacatacagcactgtgactatagttaacaatattgtgttgtatcacttgtaatttgctaacagcaaagatc

SEQ ID NO: 392005 - DNA, 1000 bp, Homo Sapiens
attaatgaaaaacacggattgaacccctgaaagattggcggaaggattttgcacacacagctgtcagccgtgaaggcacaaaggtgaaaacaatctgatgtggaaggaagaggctctgcctcaaatgctgggaatgatgtggggagaatgacaagacgactgtagagagacggagagcacactgggtacacaggaaactaaggagcaacaaggagtgtgtgtttgacactcacagccattggattcacctcggggtaaccaggaatccctacatgattaatatgactgacatgaaaataagggaggctcagttgcataactggaatctaggagaccgtggaaaaggcaattgccaccccactggtgaaatgtggtgctgatttagacactaaatgaatgaagtagatggatataagatatgtttgtgaggtagaatcattgactggaaacgcttactgggtttgattttcctacttgtttaatcctcgcttaattaatttctttctgagatttattcatcctacacataaatcaatacctggcaaaggagtgacagatatatgagtggtggtggaaatgaagagacttattatagcataatatacaagtctgtgaacagtggctcacgcctgtaacctagcactgcaggaggccaaggtgggtggattccatgaagtcaggagttccagaccagcctggccaacgtggtgaaaccctatctctactaaaaatacaaaaattagccgagcacgatggtgcatccctgtaatcccagctcctattctggaggatgaagcaggagaatgacttcaacccagtaggtggaggttgcagtgagtggagattgcatcactgcactccagcctgggggacacaaggagactctatctcaaaaaataaaaataagaaatacataaatataataaaacacacacgaatgacaaaggcacctgaattccaatcatcgtttttctatttctctataattacttctttgatc

SEQ ID NO: 392006 - DNA, 1000 bp, Homo Sapiens
ctcatcgcactaatttacactcacaacaccctaggctcactaaacattctactactcactctcactgcccaagaactatcaaactcctgagccaacaacttaatatgactagcttacacaatagcttttatagtaaagatacctctttacggactccacttatgactccctaaagcccatgtcgaagcccccatcgctgggtcaatagtacttgccgcagtactcttaaaactaggcggctatggtataatacgcctcacactcattctcaaccccctgacaaaacacatagcctaccccttccttgtactatccctatgaggcataattataacaagctccatctgcctacgacaaacagacctaaaatcgctcattgcatactcttcaatcagccacatagccctcgtagtaacagccattctcatccaaaccccctgaagcttcaccggcgcagtcattctcataatcgcccacgggcttacatcctcattactattctgcctagcaaactcaaactacgaacgcactcacagtcgcatcataatcctctctcaaggacttcaaactctactcccactaatagctttttgatgacttctagcaagcctcgctaacctcgccttaccccccactattaacctactgggagaactctctgtgctagtaaccacgttctcctgatcaaatatcactctcctacttacaggactcaacatactagtcacagccctatactccctctacatatttaccacaacacaatggggctcactcacccaccacattaacaacataaaaccctcattcacacgagaaaacaccctcatgttcatacacctatcccctcctaatactaactacctgactcctacccctcacaatcatggcaagccaacgccacttatccagtgaaccactatcacgaaaaaaactctacctctctatactaatctccctacaaatctccttaattataacattcacagccacagaacta

SEQ ID NO: 392007 - DNA, 1000 bp, Homo Sapiens; identical to SEQ ID NO: 282564

SEQ ID NO: 392008 - DNA, 1000 bp, Homo Sapiens
tagactacttgaaaaggcccctaataaggctagaggtctaagtcccccacccctttccccactcccctctagtggtgaactttagaggaaaaggaagtaattgcacaaggagtttgattcttaccttttctcagttacagaggacattaactggatcattgcttccccagggcaggagagcgcagagctagggaaagtgaaaggtaatgaagatggagcagaatgagcagatgcagatcaccagcaaagtgcactgatgtgtgagctcttaagaccactcagcatgacgactgagtagacttgtttacatctgatcaaagcactgggcttgtccaggctcataataaatgctccattgaatctactattcttgttttccactgctgtggaaacctccttgctactatagcgtcttatgtatggtttaaaggaaatttatcaggtgagagagatgagcaacgttgtcttttctctcaaagctgtaatgtgggttttgttttactgtttatttgtttgttgttgtatccttttctccttgttatttgcccttcagaatgcacttgggaaaggctggttccttagcctcctggtttgtgtctttttttttttttttttaaacacagaatcactctggcaattgtctgcagctgccactggtgcaaggccttaccagccctagcctctagcacttctctaagtgccaaaaacagtgtcattgtgtgtgttcctttcttgatacttagtcatgggaggatattacaaaaaagaaatttaaattgtgttcatagtctttcagagtagctcactttagtcctgtaactttattgggtgatattttgtgttcagtgtaattgtcttctctttgctgattatgttaccatggtactcctaaagcatatgcctcacctggttaaaaaagaacaaacatgtttttgtgaaagctactgaagtgccttgggaaatgagaaagttttaataagtaaaatgattttttaaatat

SEQ ID NO: 392009 - DNA, 1000 bp, Homo Sapiens; identical to SEQ ID NO: 114915

SEQ ID NO: 392010 - DNA, 444 bp, Homo Sapiens; identical to SEQ ID NO: 282567

SEQ ID NO: 392011 - DNA, 1000 bp, Homo Sapiens
gagggtgagatgggaattaagttagcgttgaagaatatgacaggtcttttactctgcggaaaacaatgaaagagaaacaatttatggtttggaaatgaaggttgcagaagagtttgaacttctctagtgtaggtagaggcttaattattttttatttatcagaatctctggcaagaatatggttctgatttgagcatgaaaatgttattaaaatatggctaggacgataatttgaaaaaaatgtaacaacacttgttttatttcttgttgtagaatttctgaagtaatctttttgatgacaaatgttagtagcaaataagtaagaaagctttaaagctaacttaagaggcacctttttggggcaaaaaggtagcttgccaatgtaatgtgtttaaataaaaaaagcaatgaattttgaatgtggaactctttgatattaactttttcttttatctgtcttttttaatacttagaatttctttttctttaaaatacattatttttgaaaaaatatacataagaacttcaaacaatataaaaatttaaaaagaaaaagatacttccaaagtactaccgaagataatcattttaacgctgtgttaaaccatgcttccagatatctttctgaacatatttttgatatactgtgcaattcaatatcaatttataattttgtgtagctatagaatcagaaattttatacagtaacctattatatctcgttggcggtcttgttttctatgtgccattatttaaactgacttttactgctatataaaaaagactttacaactactatataaaaaatactaaatatgttgtgaagtattaccacataggactgagcaatgaggatttgatgtacaaatgtacttgccctttgggtagtaatgcttatactctttaaagggacagtcatatagttatcattttcttcataaatgtaaacattttcttgttctctcttgtagatcgatcttctgaaattcaagttttcaag

SEQ ID NO: 392012 - DNA, 1000 bp, Homo Sapiens; identical to SEQ ID NO: 282569

SEQ ID NO: 392013 - DNA, 1000 bp, Homo Sapiens; identical to SEQ ID NO: 206324

SEQ ID NO: 392014 - DNA, 1000 bp, Homo Sapiens
gaaagtttttaatgtggaaaaagatactcaaagtgtactattaacacaaaaataatttaaacagttcagtagcactagttcattcctctaggcttgttatttcatacacaggaggatgaaatcaacagtaaataacaccagttctgactttttttgtgtatgagtgaaaagatgatgtcaaaattattattaaacccaaataacaaatgataatgtgctgcatgaggctccactgctcctctggtataaagtatgtttcactcttgggtggcccctttctcagctactcagccccttgttggttctatccttactctctccacaagaaatacaagcagagaataaataaatcattttaaagcaggggtggaagcccttgcccttttcctttctaccttttaaaaaccttcagctctcatttgcatatttagggccgtagaccaacttacttacttattaagggaagcagggcccttaaggaatgaacagggtacaggagcctccagcctctttctgtggtagtggtggtggtggtggtgattcccagaatatgccattgacgtgggtaaaaggttggaaatattttcagtttcccaactaagagtcaagaagcaccccaaaattaagagtcctagcttctttctttgtcttcagagataacaaagatcctaaacatagccagttaggacagtatttccggaaagctctgaaaataattaataactacccattacaaggaggcatagcactgaataacactgattggttgcagttattacttacggggagtattatttatttgaaaatgtgaacatattagttgtacttctagaaataaaggtggcacaatagattatgatcctgcaaccatttggacatcataaaggaaatgagtaggaataagtattctttcctagaatgattaattcagatgtggaaagatagatagattaactttccacaaaatgtagtaccccaagctgagaaatgcatggtacat

SEQ ID NO: 392015 - DNA, 1000 bp, Homo Sapiens; identical to SEQ ID NO: 114916

SEQ ID NO: 392016 - DNA, 1000 bp, Homo Sapiens; identical to SEQ ID NO: 282575

SEQ ID NO: 392017 - DNA, 1000 bp, Homo Sapiens; identical to SEQ ID NO: 114917

SEQ ID NO: 392018 - DNA, 1000 bp, Homo Sapiens; identical to SEQ ID NO: 114918

SEQ ID NO: 392019 - DNA, 261 bp, Homo Sapiens
tcatattggtgactctaccaatattatggaagtggtgctttatccctactttattttttaagactttttaaaaaattttcttagagacagggtcttgctatgttgcccaggctggagtgcagtggctatttacaggtgcagtcatagctcactgcagcctcaaattcatggccacacacgatcccttctgcctcagcctcctcagtagttaggactacaagtataccccaccacgctggctaagatagttctttatacaca

SEQ ID NO: 392020 - DNA, 1000 bp, Homo Sapiens
gatccctgtgagcatgtaccagactgtggtgaccagcctcgcccagggcaacggaccagtgcaggtggccatggcccctgtgaccaccaggatatcagacagcgcagtcaccatggacggccaagctgtggaggtggtgacattggaacagtgacatacagccatattatggcatcgttttctagtctacttcaaaattttttacacgtttgcagaggtgcaatcaaatggaattaagtctctcgactttggaaggaaagttttgttaacctttttttttttaaaaggaagaaagccgggattttggaattgcattttttaaagcaccactcttgattttctgggattggtgaagaaactgcattgtcaatttcactgtcccaaaaaagccaaattgtggcaggacttctttctgcggaaatgtgtgtgtatacttatgtgtgtgtatgtgtgagtgtgaatatatgtatatgtgtacatatggacatacacatttacatatatataaagtatatatatacatatatatatatatatgtatgaaacccgcatggaattatctgtatgaaatcaaggtgcgctgtggaaacaataattcacccagtttagtgggtggtagggtacgtggccagacacagtcacccagtttttgttcataccagggtcatgcgttgagctactgacaaactcaggcggaggtgaccatgcccttcaccaaagctgcctcccagtggccacacagaactctccctgctggactcacctgaggaaagaggctccagcatggggtgggtcagagatgtgcttgcaaggtccagggactgcgtggtctgccagctgagatgctcctcgggctggcccaggtgctgaccttgccacaggcagatgaatgtcttgaaagctcccgggcctcagcctcccatctcctctccttcccaggaatccttgatctcatgactattaaaatgttgctctgggttttaaaaaaaaaaaaaaaaaa

SEQ ID NO: 392021 - DNA, 1000 bp, Homo Sapiens
tcatgtccaggttagactctcgtcttcatagccccatgtactttttcctcaccaacctctcctttttggacatgtgttataccacaagcattgtccctcagatgctgtttaacctgggaagctctaagaagaccatcagctatatggggtgtgcggttcagctttatttctttcacataatggggggaacagaatgtttgcttttggctattatgtcctttgatcgctatgtggccatctgcagacctcttcactacaccctcatcatgaatcagcgcgtctgtatccttagtttccaccgtgtggctaattggaataatctatgctgtctcagaggccactgccacattacaattgccactgtgtgctctaataaactggaccacttggtgtgtgagattcctgttctgataaagattgcctgtggtgaaaagggttctaacgagctcacactctctgtggtatgcatttttatgttagctgtcccactatgcttaattcttgcttcctatgctagtattggaagtgctgtatttaagatcaaatcttccaagggaaggaaaaaggcctttgggacatgctcctcccatcttattgtagttttcttattttatggcccagccatcagcatgtaccttcagcccccctcctccatctcaagggatcaacccaagttcatggccctcttctatggagtggtgactccctcactcaacccttttatctacaccctgcggaataagaatgtaaagggggcattacgcaacttggtgaggagcatttcagctttaagtgatagtgggtagacataaaatgaagttattgaacagttagagtaggttgctatggttttatctaacaaattattgtctcataatcaaatatcgctttacatgttcttgcaaaatatgttatgtctccagagctctttgtaaacatgttcagcaaggattatacttggcatagtggcacattatattatggaaatatattaaaatag

SEQ ID NO: 392022 - DNA, 195 bp, Homo Sapiens
cctgtatgagaccaaattaaattgtctaaagtaatgtcacatgcattttatccctttcaggaaacaaaggtgaccctgccagtcactttggtccacctggtccaaagggtgagccaggtagccctggatgtccaggtatagctgcatatttttcttactaaaacaaaaaaagtagtttagtttgaaaagcagaac

SEQ ID NO: 392023 - DNA, 1000 bp, Homo Sapiens
gctgcaccgttattgaaagtttaccatctgactctgagtagcatgaggatcctatcaaaactcaggagttgctcagtaaatgttgattgaactatgactgttctcaacatacaaacgcaagatcatttaggaacacttgtcaaaatgtttttgccccttgagattctattttgggaggtaagcagtgggggtccaggactctgcattttgacagtcccctgatgtttgcatgtagaagtgcagggattattacactgacaaatctttaccatccctaagggggactttccttcccaggggctatctctggaagcccctcaaggataggggccgcatgctgtttctctaggtcagcaactaaacccagaaaacgtttattgagtgaatgatgaaacgacaggtgaatagatgaacgcaaggtgtcgagttaactattcttctacacaagtcctagcagctcccattgcttccagccgcagaaatggcccctggaaggcaagtcttccagcgagtggagtcactcttaactacatttcccaggattccaagggagccgcgcgctctgcgctcatcttcctaccagaaatcggcaagtcactgaccctcgtcccgcccccgccattccccgcctcctcctgtcccgcagtcggcgtccagcggctctgcttgttcgtgtgtgtgtcgttgcaggccttattcatgggctcaccgctgaggttcgacgggcgggtggtactggtcaccggcgcgggggcaggtgagcatgcgaaggttggaggccgcgccccttgctgaggcgcagctggctgctcttttcgggccggcatacgcgcgcagccgcagctgaggtcaccccgctgaagtggtggggaggggaatggttattcttgaggcaccgcatctcttgaggaggaaagagccggaaacacctggtctctcaagcaggtacagcccgcttctccccagcaccccggtgtgggcttcccaaggtcctgcctga

SEQ ID NO: 392024 - DNA, 276 bp, Homo Sapiens
gcaagacagaaaccaccaaagatttggccaaagccttggctaagcaggtaagcaaatgccatctatcccctccctctcttccaggccctctctgcacccctcctgtgggaagtaggcatcaactttaagatggtttagcattaacaggcagcatgggccccagctccttcaagcagagcaaggagagaggagcccactgctgttgaatggtgcggggtaattcagatgggatggaatccaccctgaatgatacccacacactccctcaattaatct

SEQ ID NO: 392025 - DNA, 1000 bp, Homo Sapiens; identical to SEQ ID NO: 282580

SEQ ID NO: 392026 - DNA, 1000 bp, Homo Sapiens; identical to SEQ ID NO: 282581

SEQ ID NO: 392027 - DNA, 1000 bp, Homo Sapiens
gccatcaagtcccctgcccctggtgcccttggacagtcgcccctacagccctttccccgggcagagcaacggaatttcctgagatcctctggcacctcccagccccaccctggccatgggtacctcggggaacataggtaaggagacagggaaacccactgctcatggggcccaggtgttttttcaattcctgagtgttctccataaagacttgagctgtggggtggtagaggcagggggcagtggaatagaaagggagaaatactgacaccccaaccccctaccccccattccggagcccactctaaaagcctaggagtaacaggctcgaggaaggattaatttaaagttctcttctcttccttctccatccaaccacatccagctccgtcttccagcagcccctggacatttgccactccttcacatctcagggagggggccgggaacccctcccagccccctaccaacaccagctgtcggagccctgcccaccctatccccagcagagctttaagcaagaataccatgatcccctgtatgaacaggcgggccagccagccgtggaccagggtggggtcaatgggcacaggtacccaggggcgggggtggtgatcaaacaggaacagacggacttcgcctacgactcaggtaagagactggggtggggcagggtggcatgtgatcagtgttcagttaagcccagaatgtctcccgagtttttttacattgctgtttaccatttcatacatccaacccacccacccactttttttcttcataatttcaaaagaatgttatttttctttctttttctttttttttttgaaatggggtcctgctctggcccagggctagagtgcagtggcacgatctctgctcactgcaacctctgcctaccgggttcaagcgattcttgtgcctcagcctcccgagtacctgggattacaggcaccagcaccgtgcccggctaatttttggatttttagtagagatgggg

SEQ ID NO: 392028 - DNA, 1000 bp, Homo Sapiens; identical to SEQ ID NO: 195165

SEQ ID NO: 392029 - DNA, 1000 bp, Homo Sapiens; identical to SEQ ID NO: 195663

SEQ ID NO: 392030 - DNA, 1000 bp, Homo Sapiens; identical to SEQ ID NO: 282584

SEQ ID NO: 392031 - DNA, 1000 bp, Homo Sapiens; identical to SEQ ID NO: 195668

SEQ ID NO: 392032 - DNA, 1000 bp, Homo Sapiens; identical to SEQ ID NO: 282587

SEQ ID NO: 392033 - DNA, 1000 bp, Homo Sapiens; identical to SEQ ID NO: 282588

SEQ ID NO: 392034 - DNA, 1000 bp, Homo Sapiens
ggatttttggtgaattctgttgagctgatatgcagacgatgaaattggcttgaagaagaaaaagcacctcccagactatttccatcctctgattctcattccaagtgcatcactcgacgggaaaacggggggaaggggggagcccgacacggcacacacacatacacactcgcacacacttccgagcgagtgcacactcgcactcccacccgacagccggccagggacagtcacccccaagatcaatatcgcagtttgaattgttccggcaaatctcccctcgggctcgacggatgtgcgccccagatgtgctgacacatgtccgatgcctcgctgccttggaggtctccccgctcgcgtgtctcttctcttcgcaccagcggcggaaaccgcactagcagcggcggcggcggcggcggcggcagcagccacctgaagccaccaacactgggctcttccagcaaaaacgagaccccgattcgtctggcgccccaagaagacatagacgatagccccccgccgggctgcgccgtgcaattccgggctcccgggagcgcgtagctcgctggctaagcccaggcagtccgcggcaagttgccctcgaagtccgcccccctcaccggggcatggtcggagggtggctgctgcgctccggggcagttcttctccccagagttcttttctctgcaggttcctagaccaggtgcaactcttgcctgcaagtccctgcctccctcctcccgaaaagggggaacaccgcctttccaagtccgggtgccagcagcggctgctgccaactgcgccttcgcccaactccaggaggatccgggactattggaaacccgggctttagaggaacgggcttcccttcttgtctttcttttattctgcttttctttagggaagctctagtgctttggaggcttttgctgggctccaggatactttccgccaacgacactcagcagcttccactgaaggagatttcccccggacgcgt

SEQ ID NO: 392035 - DNA, 1000 bp, Homo Sapiens; identical to SEQ ID NO: 114919

SEQ ID NO: 392036 - DNA, 1000 bp, Homo Sapiens
cccaaagtgctaggattacaggcgtgagctaccgcgcccagccttgatttttatttatttatttgtttatttatttattttttgagacggaatctctctctgtcgcccaggctggagtgaagtggcgcgatctcggctcactgcaacctccacctcccgggctcaagcgattctcccgcctcagcctcccaagtagctgggattacaggcggccgccaccacgcccggctaattcttgtatttttagtagagacggggtttcaccatgttggccagactggccttgaacggatctcaagagacccgtccgcctcggccccccaaagtgcagggattacaggagtgagacaccgcacccggccggatctccccttttccaacggggtttccaggaggatgcctgaccagggtggaaggagaaagaactaggtgcctaacccactctcctggcgagggcaggaggtacgctccagccggcaacaggtgcccgcgtagccgccgcagtgtcacagccccgggggagggacaggtccgccctgcacagcagagagggagcaagaggactgtccgggggttacgtggggacgcgttgagaaacgctggacccagctggagcggccagggcagagggtaggccagaggaggccaccagggagcagcagaggctggcgagaagcgctcaaaagccctttttttttttttttttttttggagacggggtcttgctgtgctgcccaggctggagtgctgtgcagttctcgaccacagctcatcgcagcctcgaacttccacgctcaagcgatcctcccacttcagcctcctgagtagctgggattacaggcatgtgccaccacgcctcgctaatatttgtatttttcatacagacaagatctcactatgttgctcagggtagtctcgaattctgggactcaaatgatcctcccacttcagcctcccaaagtgctgggattacaggcataagccatcatgcccggcctct

SEQ ID NO: 392037 - DNA, 1000 bp, Homo Sapiens; identical to SEQ ID NO: 282589

SEQ ID NO: 392038 - DNA, 1000 bp, Homo Sapiens; identical to SEQ ID NO: 114920

SEQ ID NO: 392039 - DNA, 911 bp, Homo Sapiens
ccattaaaaaaagtaacatttcttgggatcttattttatcacctaacagtataacatggatatttccttgagtcattatttagcaatgtggtttttaataactacataagatttcgttgtatggctagactatcattttatttaaacaattctccattgctggacatgtagaatatctctagtctactagtaaaggcactgccagactttttagatttaattcctttcccttcctcaaacctggtccttatgtgcccatcatttcctctgtcattggctgtaaaaatgctaatttccttttctttgggccaatcttacaaaattctttatttaggttttaaaaatgtaattttagctatccactaatataaaacttataattgcataaagtaggttaaaaatactgtgtagaatttttggtactctaatgaatatagtacttttttaatgattgtaggagtatatattctggggaaatatggacagaagaaaatcagagaaatacaggaaagggaggctgcagaatacattgcccaagcacgacgacaatatcattttgaaagtaaccagaggacttgcaatatgacaggtaagacagagaaatatttatacatgtgtaaagttgtttgacggttgtattaatttgcatatcaccgggatcaaatttagaggaaaaggcaaagaaaagatggtaaatctagcaagtgtttgaatgatttaactgaattacatcattttaatgtgaattttaaaaatcagttcattcattttatttattcatttagcaaatacttgtatccaggcctggggaagcaggaagtgaacaacaacaacaaaaagcccctgacctttggagtttatattctagggagaggaaaagatgattaaccaacaaataagtaacttaggca

SEQ ID NO: 392040 - DNA, 802 bp, Homo Sapiens
ttttgacccagtgatttcatgtttatacaaaatcttacttagattaagaaaatttaggcaaaaactgaaatgcccaactctagggaactcatgatataaattgtcacagctagaggacagattactgtatagtcattaaaaaacaatcagacaaacactttagaacttttaataagatggaaaatactcataacaataaaaatgcaaaaacagtgtgcttaggaggttagaggtttttggtagacacaaaaaaacaaagatatgtgtaaaaaaacgccaaaagaaattggtcatgatgtcaattagagttgttatttctaagcgatagaattgtggggttttttttcctttttaatagatttccaaaaatattctacaatggctatgtattacttttataattaagatgttaaagtcctgtggggtcatttcagaaaataatcattactgtaatgatttttcagtctttccagtgtcagcctgcctttagctaagataattccaatagtaaacggacagatccattcagtttgcagtgaaacacctagtcattttgttcaggtaagaagaaagcttgggagtgttattaaaagcaaattatatttgtggtggtggtcatgtttgtctaacataaagttacattctctgctgagaggttttttcaaaaaatcacagaacttggaactacatgtagagtatggtagagtgtcccatgagagtaataacggaccatagcaaatgtgtaagtttggagtacctttctccgtgttgtagtccaacactgtgggactacattttagtc

SEQ ID NO: 392041 - DNA, 1000 bp, Homo Sapiens
gcccgagctgctgagggaggcatcaccattgcaatcacttctggaggtgctggggctgctggggggagttatcatgatggtgctgattgcccaccttgagtgaggggtggataaactaccctgccccaaacctctacccctaactccaggtcaggggtgcgtagaggttgggggccctggccagggacatctgccaaaggaaggaactgtagcctgggagcaatggttactttggcattagggccttcaagggctggcagtcttacagaggctggagcggtgagaatgagaggccagagggaccatagtgttgggcactgtctgaccatgttgcatttggaaggctaaatggggccatgaagaaggctggaagggacagggggtgatggcagcctacctggtgtcccctaccccacctgttctcggagaaccaagttgctacacaggaagttctccaaggtccagtttcctttctcccaccagttggtggaggcttcagggaagaccagagtcctggacagagagggtaacaggaggagtcggggataaacatcaaacatcaatcgtgtgtcctgatttgggagtgattggggggatggggtgggagagggttaattggtattctcatggcctgattttttttgtttctattccttttatatcactgtgtttgaatcgagggggaggggtggtaaccggaaataaagacctccgatcttccgccccacatgcagtctttgtctttttggggggaatggggccccttgtcttctccacacccggggcccctaagcagcagtgtcgggccacgccccctcggtgggaggtcggcctgcgctggtggccgcagatggcctaaggctggcgggcctttgattggccccggctttgcccttgccacgcccttgcgctgggattggcttagtgctgggattcccacccacccacagcccgccatgggttcagctccagaaccgactccgctccgcactggccttgg

SEQ ID NO: 392042 - DNA, 1000 bp, Homo Sapiens; identical to SEQ ID NO: 282592

SEQ ID NO: 392043 - DNA, 1000 bp, Homo Sapiens; identical to SEQ ID NO: 282593

SEQ ID NO: 392044 - DNA, 1000 bp, Homo Sapiens
aatgcactccctccacctccaaccagagctccccacaactgaccctgccttcttctgcaagctccatttcatcaagggaaacgatccttattgcctcaccatttcccacgtgaagtctgtattgacattctcatagacctgggatattgtgtctgcagcacatagtccaattattttcatgttatctactgacaggtctatttgtctccctgttacactgtgagctccgtgagggcagaaacaatgttagtattttcactgctgtgtccccagcgcctggtccggggcccggcacacagcaggcatataataagcatgtgttgaatcaataaaggcatcaaagaataaaccaatacatcaatcaataaatgaatgaatggcctcagcacacacaggaagatccttcttctaggtctcccccagagagatactggagggcaatggttgctggaggtgtttattggggaagcataattgaatttgtggacacttaagggccggccagccaactcacagccccaagagagagagccaggctcatttaattagcaattacaaggcactgattcctcattagctctggcaaccctcgtctccctcctcagccccagacaaatgaaatctttctctctctcccaggagtactgcctcagtgggtccattaacaagcagagaaaatgagattagaagacacctaaatgccagaggcactttatgaatgggctgagcagagggaggttcaatgtctgggttaggtctaattgtgggaggtttcctggtctatttagaattgccccctgggaatgcaaggtctttcagaaaggaaaaggcacacagatattgccttctggggtcctcaatggaggaggacattctgctatgggtgtctcccagtcaccccaaattaatcatttcaaagtgaacactcaatctgcccagcccctagcttcctcccctgacatgcccatgaatatgacagtccctctacatgcccaagatc

SEQ ID NO: 392045 - DNA, 1000 bp, Homo Sapiens
tttcttctgtagagacaagactctaaaagcatatcaacaatccatatgcaattcatgtgttaatttaaaatgtatgtgctcagtgtttgtagtctagaagctcctttcccttggaggaatgccaagcagtttgcaaaaataaatgctgttagttaaaaaccacataatcacatgggcctactgaataaatatgcatcagtgattatatacttatatttcagtcttgtcaaaagtgaatcactgtttcatttgatgtatttacccagtctttttatccagtttttcttgggcatattctctctgaagacccactgttgcacttctaaatttgacagttaagaaatgagctagttctatacacactgatttttaaaggcgtttctgaataaactaatacttaaaatgtccaaagtcacatctgtacagcattagatttttatatttaatatatatttgactaattaaaagtgaaagttgttacctgaactggatattcatactattttaagggcaagttgcttacatttcaataacaacaaaaaaagaatctgtttcccattgtcctcctactcaactaaaattcatagttggctttaagcccaaaagaattttgaacaatgtgacagaaacaagtaatgtaaaacttattttgttttatttatactttataatagttagatataacagattatggacaacttaatatttcttctttttggctgggcgcggtggctcatgcctgtggtcccggcactttgggaggccgaggcgggcagatcacgaggtcaggagatcgagaccatcctggctaacacagtgaaaccccgtctctactaaaagaatacaaaaaattagccgggcgttgtggcgggcgcctgtagtcccagctactcgggaggctgaggcaggggaatggcatgagcctgggaggcggagcttgcagtgagccgagatcccgccactgtactccagcctgggcaacagaacgagactccgtctc

SEQ ID NO: 392046 - DNA, 1000 bp, Homo Sapiens
tatataagaagtctgttgccagggagccagtattcatgtatatttggcttgtgtgtttatttcgtgtattgagaatgaacacctttactttgcctcattcctagtaccctccctggagttcagatttttttttaaaattttgtatgtctcgtctgattcaatctctctgcttttattttatggtcctagttgtactatcaaatccaattacttttttttaggtccccctgattttttttttttagagcaagagttcttaacatattacatttttattatgaaaaataagaaagttaggtaaaggaaagaaaagtctaactagagctattttgcaggctttagtgtttagggagagaaagaaagtgtgggttaatagccttcaagatagaagatgccctttcatctctgttaagtgtcctcctttagaaacttgagtagaaggaaaactgaccagagtagactgcttccttaagtcttctgggttccaactgtttgtaatatcagcatccaagatgatacgagggaagcacaatgctttggactgtgatttgagatttagaaataaattagatatattattgaggcttagaatcctcaaactttgtattttatacatttagccaataaggaattaatatctggggaaataaatttaggcaaatatttcttttttaatgttttattacctgcttctcctgtgttttagttcaacatttgggcttcttggcctgattttcatacaatctcaatttacgaagctgtaaagaggaagatatttgttctaatctcactcttctaataggaatcaggcaaatgaaagtctaccagacttttaaaatgggctgtttttatactctctaggtgttttgtgttgtaaagaccttattaaggtcaggtaaattggtctgcttgctgttgaaatttgccttctagcaaacatatgtgctttctgtttgaccttgtgtttgctgccaaacctaatacagttgaattgggaaac

SEQ ID NO: 392047 - DNA, 1000 bp, Homo Sapiens
ttacatatcttctgcttcttcctatactgggcagtctcagctgtacgcagcacagcaccaggcctcttcacctacctccagccctgctacttctttccctcctcccccttcctctggagcatccttccagcatggcggaccaggagctccaccatcatcttcagcttatgcactgcctcctggaacaacaggtacactgcctgctgccagtgagctgcctgcgtcccaaagaacaggtcctcagaatggttggaatgaccctccagctttgaacagagtacccaaaaagaagaagatgcctgaaaacttcatgcctcctgttcccatcacatcaccaatcatgaacccgttgggtgacccccagtcacaaatgctgcagcaacagccttcagctccagtaccactgtcaagccagtcttcattcccacagccacatcttccaggtggccagcccttccatggcgtacagcaacctcttggtcaaacaggcatgccaccatctttttcaaagcccaatattgaaggtgccccaggggctcctattggaaataccttccagcatgtgcagtctttgccaacaaaaaaaattaccaagaaacctattccagatgagcacctcattctaaagaccacatttgaggatcttattcagcgctgcctttcttcagcaacagaccctcaaaccaagaggaagctagatgatgccagcaaacgtttggagtttctgtatgataaacttagggaacagacactttcaccaacaatcaccagtggtttacacaacattgcaaggagcattgaaactcgaaactactcagaaggattgaccatgcatacccacatagttagcaccagcaacttcagtgagacctctgctttcatgccagttctcaaagttgttctcacccaggccaataagctgggtgtctaaaaggacagcttctcttccactcaatattgccatttttccaaagaaacatgttaaaaaaaaaaaaaaaaa

SEQ ID NO: 392048 - DNA, 1000 bp, Homo Sapiens
gtaagaataagaagacatggggaaaggtgtttatcatttaaggaactaaggtgaacagaatcaaaaaggggttgtattgtatcttaggaaactaagataagactggaatacagccatcaggatctatttgtaataggatgagagctcagttgcaaatacaagttccattcatttgatgaaagagtctggcctgactgaggctgtgttttgaactcattacagttagactcctgtggctcaatacccatttgtgctggggctgtattgttcttcatttcaacagacatatgcaaatggttctgagaaatgttagagcctgttcttctaaagtgaagttagtctttctcctggttcttactctagaaacaataacattgttgggtgccccctgtctttcacctcacatctatttcatccccaactaatgtcagtggtgctaccagtgcgacagtagactaacgtcctctggtaggaaggactcaactattctaacactcttccacatttctcttaagttgtgctggaagcagaagtgattgagtttcattcattcagtaggtattcaacgcctaccatgtgttaggtgctctcctttgtgctgaggtaaaataagtaaagcagacaccgtccttgacttcattgagctcagggactgagaaagatgaacactaatcaaataatcacagaaataaaaaattttaatggcacattgtgataattgaaacagaggacaaattgagaatgttctgagtttttaaggggcctctgacctatcctggaagtttgaggaaaggcttcctggaagaagtaccactggagatgaggtgtggagctataagtgggcctataggagtggggtggcgaggcgtgaggcatattctaggcagtgtgggacaaagtccttagacaagaagcagcccagggtatccaataattgaaaaaggaggctggggtgactgggggtgggggaggtgctaaagggtgaagaattaggctagat

SEQ ID NO: 392049 - DNA, 1000 bp, Homo Sapiens; identical to SEQ ID NO: 282597

SEQ ID NO: 392050 - DNA, 1000 bp, Homo Sapiens; identical to SEQ ID NO: 114922

SEQ ID NO: 392051 - DNA, 1000 bp, Homo Sapiens; identical to SEQ ID NO: 282599

SEQ ID NO: 392052 - DNA, 1000 bp, Homo Sapiens
cagggcagaaccaagaacataaaccctccaagggatctgcttgatatcccaagttggaagggaccccagatacctgtgaggactggttgtctctcttcggtgcccttgagtctctgaatttgtcgggttctcccatgatttggggtgatttctcaccctctgtccttcccccagcacaaagcactggccttgcctccaggaccttgcttccttctcatcttgcctcattttgcttcccatctgaagagtggaaatggggaactcccccagaggtggatactggggggcaggcctcccaagctgatggacatgagagtagggccctgacaggccttcctcctctcaaacctggcagatgggggcctctctggaagagggaggggccctgtcactgtccagagtctctttttacacttcacctccttctgcagtcagactgaaatataaaaaaggtggtggtggtggtgaaggggctggtggagatgtaggaaccgatctgctatttttaatttcctgtgaggatagagacttgcagttagactcaaagaagtactgtactttcccaggttgactaagaaatgccagtggtggaggtgggtgtttgggaaaggcagggccctgaaatggcctgtccctagggctctccaagcactagccttcccagcttcccgccgccccccctatctcttcctgtctaacttggggaaggggcctgggctgtgaggacagggcccccacaggggatggtttcacgagtgtagtcccggaggccttccctttacagctctcctccagccctgggcacatagcataggctggggacacaggatcctggcctgagaattgaggggaggtggccagcccgcagaggtggggtgctggggctggcatgatttttgccctgcgtcccttctctttggggctcctttcccctctcatacataaaatcgctttcaaattaaaatcgctgttttctggaaaaaaaaaaaaaggccttaag

SEQ ID NO: 392053 - DNA, 1000 bp, Homo Sapiens
tagcgatgcatcactctgaaatattttagtttctttttttcccctaaatctgggtatgttcgtgggaatttgcagcacatgtgaacaacttctgtcattcttgcatgaggcaaagggaattgaaaaccacgattactttagaaaactagtttcacagattggtcactgtataaaagaaggatattggttttggtagcttgtgaccacacaccatttctgatctgaataaattcagaacttataatacagttcagaaattgaatgcagtttctcaatatgaggaaagtattttagaataaggcctatttttcaaaggatctgtggaaatcaatgctatgctctcatttaggagatggaaagagtgaggttaaattatcatttcgattaaatctacagtccagattactggtggatgaattgaatgtacttttttattcatataaaacatttgaaatcagaaatctggagtacttttaaatcccattatttattttgttttaatcgccaggtaattcctgagacaggagtgtcccgaagagcctttgcaattatgtaagaatctccgaggcagttcttatgttcctcaattcaaaagaaccacataactgcaatttaaataacaccccacacacacacaaaataaggtcgaagtttatctcaaaataatttcccctctctacactgggataaatatgtataggaataatagggggaaattcagtgcactgagcattaagctgtcaaaacaggaatgtttaaaatatcctgttagtggtttaaaaataatttgtactctaagtccagtgactatttgccagggagaaccaaagttgagaaatttctattaaaaacatgactcagagaaaaaaatgcagaggccggtaatgaaggaaatgattggatctcattcccaattggtcattcctaagatcacatgttctgagcatctttaaaaggaagttatctggactcaagagggtcacagcaccctcctgaaaac

SEQ ID NO: 392054 - DNA, 1000 bp, Homo Sapiens
caagacagtgttgccttcagtcttggaaagccttagccagggaaacaagggatgcacaagaagtcaatggctatgaatgagctgctgttttgaggttcatttcacttcaagctaaaactccagttcagaaatatatctggtttagaatatgatctggggacctactgccactaaactactagactcaccctgcttatcttgcttttcttctttccttaatggctccagtttcataaaaatctcagttctattttaaattttagatgtttaatgatgtacaaattctcatacagttctgataaatcagggcttttgttctgtcttaaggttttattttctgtttcatttcattttgaggcttcatctttccttacttattggtgttctgtagccaggccatctcctgacttggaattctagcccgggttctagctgtggtcttccagcagcagtgcgcaggaaccttagcttctgaaactggtgttcttcctcctatgtggccaggaaattttgtgcttgagtgttaatcactttctatcgcttatgctttttctttataaatttaagaagtacagcaaacaatgagatggattgcttttctcttctgtttgcataaacgtcttaaaggtcctggaaaacaatttacataattgatttcaaagaaaaattagaatggcatgctgtagcatgtggcataagtaatgttttgggggtttttttgtttgtttgtttgtttgttttttcattttttaaaaagcgaagtagagacaaggtcaaataatggatgtttaaaacatttaaggatcagcctggtcaacatggcaaaaccccatctctactaaaaatacagaattagctgggtgtggtggcaggcgcctgttgtcccagctacatgggaggctgaggcaggagatcacttgaacctgggaggcagaggttgcagtgagccaagattgtgccactgcactccagcctgggcaacagagtgagactgcctcaa

SEQ ID NO: 392055 - DNA, 1000 bp, Homo Sapiens
tgaggaagacttcattcagattatgaactattatttttagtaatccaactactctggaaacatattaattcaacaaatatctattgagcgactgctgggaaaaacaaagcaatgatggagacatatacctcctagagcttgcacgttattgggatagacaattaacctagtaattaagaaggagaatgtgaaggattatgacaagagattcacaaaacaagggttcccattctgatttcaaaactaactgctgatgtcagtgtatttctctagtatcgaactatccaactctcctgtgtatataaatcatacataaatcatcctttggagtgatgatggcaactgtacccagattttccctaaattattacagtaaatttgttgaactttcaaacgtgtacttggaaatatgaccactttgagatttgagcattggcgaacatggaagagagaaggaagcactgttgttaaagagcaaaccgggaaaatccatgataatccttaacactacaatccagaattctcttctaggaagaacgggaagatggtactccatttgcatgtttcttgcctgcattaaaaaaaagtttgttttgttttgcctaggttatatagatcattgagaaagggaaaaaaaatagtattacacaagatagttttgaatattacctggactgtattaataataattcctcctggtgcactttaggagtgcattgatcatgcttctgtttcattattttaaatagataatgtatccagtgctgagggttggcatataaatgtgaccttgaatattcatccatccatgggcactggtgttatgcttgccttggtttctggtaacaacacagtgccctttgctgtgtccttggtggactccacctctgaaaaatcgcaggtaacttaactctaaacctagatgagccttgtttttcttttcttttttaaaatagatacatagcagtatttacctcaaaggacgattttgaagatcaaa

SEQ ID NO: 392056 - DNA, 1000 bp, Homo Sapiens
acaaaatgagaaggcaacttacagaatggaagaaaatatttgagaaccatatatctggtaaaggcaaaagactcccaccggaagccaaccagatgtggctgcctaatcttggattcccagtctccagaactttcccatgggaacctagagaaggactttccctatattccccacctctttgggcttcagcaaaagaaaatggacctcaagggagtcttcaagagctgcttcaaaatttactgttcatcaaagcacttgctgaagactggcttcatttcagaggctgtgctgtgttatggagaaggaggtgaaggagatacggtgcttaccatgaaggagaggtggccacatgaatgcatcgttttaatacagtgcaataagtgaggtccatagagagacccaagtgatgatagcaaccaaccattcaagagggagaggaaagtggccaaatgtgaagctttatgattgaaggtactttatgccccgggctgccttttggatcagaaagatactcaaagctataaagttcacacaaagccaggctttgttatcaccggagtgtgcagaagggcactagccctgagtatgtgccacctcgtacgcctctcacatgcttctccgttttccctacttcactttcctgggttcattccaagacggagaatggaagaaaccagagctaaacttgtgtgcctgcagtccagctgtcgtgcctggagagacctctcttccatgatcatccagggtgaattagaccaggtcctcctgagaccagcagcgtggatgttgtatatccaaaaggaccctgtgggcattgaaatccaactcactcatgcttatttcctgtaatggacaaacttgatgctaatgtgagttctgaggagggtttcgggtcagtggagaaggtggtgctgctcacgtttctctcgacggttatcctgatggccatcttggggaacctgctggtgatggtggctgtgtgctgggacaggcagctcag

SEQ ID NO: 392057 - DNA, 1000 bp, Homo Sapiens; identical to SEQ ID NO: 282600

SEQ ID NO: 392058 - DNA, 1000 bp, Homo Sapiens
aggaatttggcacttaggacacccttgtccttacattgttcatgcatgtatatttcgtcttcaataaaaaagggagttgctcaagggcaagggccccatagagtctcaatattctaattgcctggtgttgcttaataaattagattcggaagggtcccctccagggaggggagcaaagggcaaattaccttaggggtgggagtgcagaaggcaaacctttgagattgagaaaacaaagacggccccgagacgatccagtagcagacattcaagcaagaaaaactcaaatattgttgggaataatgccaaataccaagtaagggcccaggcagtcctgacagcctgcagtgccccaggataaaactaaccctgaggggtgctagcccacggtgaccccctgtctagactctggatctctatttttaggtcgaagtgctttattcttgactcccgaattcccggaaactattaccaaagcagcttagttttctctccaccctgcctgggtcacaaatatgacggcgagccagtcctttcccacaggacgcctcaggcttccgggatggtaggccaagggcttagcaagaaaaaaggcggcctcggggaacctgttctgttaggttccgccagggcctccccctgacctctcgaaggccaagggctgcccatgaacgccgagctcgcccgcggcccgccgattggccccagccgccctggtgactcgacgcacttccgccccgcgcggctcggccacgcccacctgtcctgcagcactggatgctttgtgagttggggattgttgcgtcccatatctggacccagaagggacttccctgctcggctggctctcggtttctctgctttcctccggagaaataacagcgtcttccgcgccgcgcatggagcctcccggccgccgcgagtgtccctttccttcctggcgctttcctgggttgcttctggcggccatggtgttgctgctgtactccttctccgatgc

SEQ ID NO: 392059 - DNA, 1000 bp, Homo Sapiens; identical to SEQ ID NO: 282601

SEQ ID NO: 392060 - DNA, 1000 bp, Homo Sapiens; identical to SEQ ID NO: 282602

SEQ ID NO: 392061 - DNA, 1000 bp, Homo Sapiens
agaggcgtcctttcgcccaaccttcgagaacctcatacccattctgaagacagtccatgagaagtaccaaggccaggccccttcagtgttcagcgtgtgctgaggcacaatggcagccctgcctgggaggactggaccaggcagtggctgcagagggagcctcctgctccctgctccaggatgaaaccaagagggggatgtcagcctcacccacaccgtgtgccttactcctgtctagagaccccacctctgtgaacttatttttctttcttggccgtgagcctaaccatgatcttgagggacccaacatttgtaggggcactaatccagcccttaaatcccccagcttccaaacttgaggcccaccatctccaccatctggtaataaactcatgttttctctgctggagcctgtgatttttggagccctcttcaagaaagctgggttagctgggagtctggtctcctgtggacagcagctagcatgagacagcgcagaggtggctggattcaactgtttaacttttttttttttttctttttgagacagagtcttgctctgtcgcccaggctggagtgcagtggcgtgatctaggctcactgcaagctccgcctcctgggttcacaccattctcctgcctcagcctcccgagtagctgggactacaggtgaccgcctccatgcctggctaattttttgtatttttagtagagttgaggtttcaccttattggccaggctggtcttgaactcctgacctcaggtgatccacctgcctccgcctcccaaagtgctgggattacaggtgtgagccattgcgcctggccaataactacttgttgaatacacaaagtatttggtcggggcggtcacaagccacatagattagactgccagtttcaccctttcacatttgtgtgacctcaggctaatggcttcacctctctgggccttagtcctccattatgggagcttcacacttgctatctcataggactcat

SEQ ID NO: 392062 - DNA, 1000 bp, Homo Sapiens; identical to SEQ ID NO: 282603

SEQ ID NO: 392063 - DNA, 1000 bp, Homo Sapiens; identical to SEQ ID NO: 282604

SEQ ID NO: 392064 - DNA, 1000 bp, Homo Sapiens; identical to SEQ ID NO: 282605

SEQ ID NO: 392065 - DNA, 1000 bp, Homo Sapiens; identical to SEQ ID NO: 282607

SEQ ID NO: 392066 - DNA, 1000 bp, Homo Sapiens; identical to SEQ ID NO: 114923

SEQ ID NO: 392067 - DNA, 1000 bp, Homo Sapiens; identical to SEQ ID NO: 282611

SEQ ID NO: 392068 - DNA, 1000 bp, Homo Sapiens
ctgtcaccaatggcctgtttggctggacgatgcctcggcttgaccttttttgaaaagtgctggttagttcccgcccctggtaaacctggggtaggtgggggttctgtcttaactcgaggggcacctgggatccaggacgcttctagggggctctggctgcccgtgttaatgaaggacagcgcttccgcgagcaccctgggaactgggtcttgggtagcaaagccctcccagagaaaagattgggcacaactaaggctttcctgagcaggaagggggtgaagaccaatcccttcctttggtcctttggtacgcaccccctcagagctgagatggaagacatggctagttcttttcagccttgtggagcctgtcagtcgccatcatacctcgagtgaggcccagctagataatgacttgtccaagatggcacacgtggaaagttgatctgcaccagaacccggatgactgtcaccttgaagcatcctgttctccttctgtgctgtcccaggaagtgtctggcgggcgtgggcagcacagctctacactgtacgattcactagggcatcctgcgagcctcactagccttctggttcatgcctttgacaagcatttttgtgccccctctgcttactgtgacagtcgatgatgaatcttgcgttgccattttctgctgtgggtaactgcgtgcagtgtcttgccttgctttctcttcttactgtcccacagcttggtttcatgttacaaacagaaaagctcgaggctcccaccccgccacatcccaacttcatttccccctcactgtagcccatttccaccccaccacaaagttgccacaggttttctttgtatagaatatttattttgaagctctattttaatagtatttattttagaaagtctactattgtaagagttcttctgtttgtgaagaaaaaaacaagttaaaaactgaatgtactgatttagaaaatatatataaatatatattgttaaatataaa

SEQ ID NO: 392069 - DNA, 1000 bp, Homo Sapiens
cccacatacgctactagaaggctgtacatttaagagagggccatctaggaagcaataataggcattaaaacaacaataaaacaacaaaacaaaacagaaacaaaaacaacttgggaaacggccctcctttcacgttttttctatcccatcgacaaaggcgcgctgtccttagctgcgatgattttgtctcgcctccaaaaagacgcccacgcactatgttgagcacccaagtgaggctacggttcctgcggtcacagagggcagggaggctcaagcacctccaaaaccccgagccctggacagctccccaggcccttcccgcggcgcgaggacaagaggtctccggggccctcgggggagcggcgcctcctcctggttccagcagctctgcgccgctccccacccaggcccgcgagaccagcgggacagtccgcgccgggagaccaactgggacgagccgcgacccacgcaggcgcgctgaggccggggcaggggcgggcccggctggcgcggccggctgcggttggggctggcgggggtgggacgggccaagccgggcagggccggggtggggcgctggcgtttccgttgcttggatcagtctaggtgcagctgcggatccttcagcgtctgcatctcggcgtcgccccgcgtaccgtcgcccggctctccgccgctctcccgggggttcggggcacttgggtcccacagtctgggtgagtggtcgcagcccggggagggggctccttctggagaggagagcgtggtcgcggggcactggattcgcgcggacgctcggccgagagctgtcccggtagctgcgagagggcgggtcggcccgtggcggcgtccgggctgtctgagcgcgccggtccccgcggacctgcgcttggggagggcacgagttgcaaatggcgcgctaagcccgaggtttcttctcttttgcagtcctgcttcaccttcccctgacctgagtagtcgccatggcacaggtaaggcc

SEQ ID NO: 392070 - DNA, 1000 bp, Homo Sapiens; identical to SEQ ID NO: 282612

SEQ ID NO: 392071 - DNA, 1000 bp, Homo Sapiens; identical to SEQ ID NO: 282613

SEQ ID NO: 392072 - DNA, 1000 bp, Homo Sapiens; identical to SEQ ID NO: 282614

SEQ ID NO: 392073 - DNA, 1000 bp, Homo Sapiens; identical to SEQ ID NO: 195684

SEQ ID NO: 392074 - DNA, 1000 bp, Homo Sapiens
ctttgggaggcttaggtggggcagatcttttgagcccaggagtccaagaccagcttgggcaacacagtgagaccctgtctctaaaaacaaatttaaaaattagccaggcatggtggcatatgcctgtagtcccagctacttgggaggctgaggtgggagaattgattgagcttgggaggtcaaggttgcagtgagctgtgatcatgccactgcagcactccagcctgggcaacagagcgagaccttgtctcaaaaagtcttacaagattttcccgcaagagctaaatgccagtcaggcattactaatactatatttccaatctaagtatcttttcatgctcccttacaatacattttaggttatgttctgagacaatctctggattatctatctggaagggtacacaggaacctgtaacactggttgcctctgtcaagggcaactgagtggctggggaacaaagtggaagggtgggggactctttacagaataccatgttgaattctgttccgtgtgaatgtattacctattaaaagttaaattaaaaaaaagtaccaccaggctatggaagctgccagaagttcttttccttagtactctgtaaaaaattaatcactgactacaaaaccaagtgaatactggaaatgagaaggctatctacctggagaacattaatcccttctaatgggaaagaggcaatcactgagattgatgctgcatgtgtgtgaaaaggtacacaatgtttatattctttattcttacagcttctgacaagttgtgtgagagacaaaagcaaacaaagctggaaaagcagctgaaaacttctagggaataactttagtaacttagtagaggaagctaaagcatacacacaattcatgaacgatttctcttcaagccacgacacacacacacacagattaattttttttttttttttttttttttttgagatggaatctcactctgtcacccagcctggagtgcagtggcatgatc

SEQ ID NO: 392075 - DNA, 1000 bp, Homo Sapiens
gggcccctgggtgaggctggagagaaggtaagtgcaacctggggggtgccaagggccctggaggatctgggcccaactcagctctgacctcttcttttccatcagggcgaacgtggacccccaggcccagcgggatcccgggtaaacccactggctgcaatgctcataccagctgacctggctgtgccctttctggttctgacttcttgcccttgacccctgctacccctgctcctcacccctcctcaatgaccacttatccctgctgatacaggctctaaccctcagccccagggacctggctttgaacctctgaccctgctgaactgaccttgattttcactgacctggtctctgttctcctgccaagtcttacccctgccaacctaaatcccaatcttccctgacccctctccagcccccaccccagcctctagccctgtctgtccatatcccccgtccccacccacctgcacagctcttcccttcctctcctccaggggctgccaggggttgctggacgtcctggagccaagggtcctgaagtgagtctgtgactgtggtgggaccaggagtgggacttttgtgtgtccctcccctttcccttcccctcctgggctcacactttctctacattcaggggccaccaggacccactggccgccaaggagagaaggtgggtcctcggctgggggtggcactgtctggtactagggatgtggcagatgggacactgggattttgggctcctaggtgactccctgacctgtccctgctcctatcctctctccacagggggagcctggtcgccctggggaccctgcagtggtggtgagtgacgggaggatggcgctctgagcacagcacagcccttgagcagtgaccctcctatagaacactatctgggctgtgattccacagtgctgggcccgtgagcaggctgggagctctgcggctctccttctgctagaacctgcccccagactcttggctatgatcc

SEQ ID NO: 392076 - DNA, 1000 bp, Homo Sapiens
cactttgggaggccgaggcgggtggatcataaggtcaggagttcgagaccatcccggataacaccgtgaaaccccgtctctacttaaaaattaaaaaaattagccgggcgtggtggcgggcacctgtggtcccagctacgagggaggctgaggcaggagaatggcgtgaatccgggaggcggagcttgcagtgagcggagatgtgcctctgccctccagcctgggagacagagcgagactccgtctcaaaaacaaaagctgttttgatggctaggaagaggagggctgggaagtgtgtggtgggttgggagcagcgcccgagtgccctgagagcaggaagaaggctcaggggctcagtgtgctcactggccgggccgagtgggactggaaggaaatcagtgcgagaactcaggcaggaagcggagagccccgctgcatggccctgccaggccaccagtgcactgagtactcagcagatggttcctaggccttgtgtgacctagggtcagacgccttggtgtctctcttggagggctgcacagggtgcggagagaagcttgacagctgcagtatcgggtgatctatgatgtgactaagggcaggccgtaaaattaggtggcatgtagggaaggcttcctataggagggcacaccaggatgggtgtcgtagtttagctggattccatccgggccggaatgggtgtgttccagcacatgcagagacctggatgtctgggctttgtcagttgagaggacctataggtgcgggcatggagcaggagagatggacggggtgcaggactcggaggcctcggatgctgggccgatgccgggccgagggcctgggttggttccagtcttgatggacacggttgggcctgtagacgttcattcacttagcctacatttcctgaggcctcacatgtgccccgctgtggtgggcaagcctgggggtaagagaggactcagaccccatccccgcctgtgggagaggtaggatc

SEQ ID NO: 392077 - DNA, 1000 bp, Homo Sapiens; identical to SEQ ID NO: 282616

SEQ ID NO: 392078 - DNA, 1000 bp, Homo Sapiens
ctcagatgggcagcagcttggagcaggccaggcagggcctggtccattggaggggctggcactggacttgcctttgaccccagcagcttggatggggtgccgggctcccccatagttcactgactgtctcctttggtcttctcgcaggccctgctggccctgcctcttctggcctggtgtctcctcatgccccctcagtgaggatcttcatgtacctgctcttctgtttgcacacccagcatagcctccttgcaggcagaaggcagtagggcccctgcacactcagtttctctcgttttccttagttatcagtcctgtcctgtcccactcaggtctgtacttagggcagctggcctggatgggcttcactggggccctgtctgtgtgctgagccagtttcccctgctggctgcaagctgtgggttctttctcctctgtgcccctcatgctgatcttctagatgccactcccaaatccccttcatacccaccaggatgtgtgcccagccaggcctccagcacccccagtgcagctcgtgattggaaactcaccatcggcaggcagtggttcggtttaagagatggcattagagggagcccagtctggatgtggacttggatgccctgtgggtatcagttctgctgacactttggcccgaaatagatccagtgctgagcaagcaatgtacaccggagcctcagtgagcccatctgcacagtggggagcatggagggatgggtttggcctgtgcttctgcttattcagtccttcagctcacggaagggatgctagtccgtgaaggtgacctcacagtactggttaattaaactttattgctcactgtccacttttgtgctgaattggagcctctctttgacctctttctagcatagaaatggcagcttctggtaccgaaatgttaaggtaacattttaatgatccatttcatatttttccacactgggaaggaaattgtgattggtccattcagcagcaggac

SEQ ID NO: 392079 - DNA, 1000 bp, Homo Sapiens
ctgcagccgtgccttcgctgaccgctccaacctgcgggcccacctccagacccactcagatgtcaagaagtaccagtgccaggcgtgtgctcggaccttctcccgaatgtccctgctccacaagcaccaagagtccggctgctcaggatgtccccgctgaccctcgaggctccctcttcctctccatacctgcccctgcctgacagccttccccagctccagcaggaaggaccccacatccttctcactgccatggaattccctcctgagtgccccacttctggccacatcagccccacaggactttgatgaagaccattttctggttctgtgtcctctgcctgggctctggaagaggccttcccgtggccatttctgtggagggagggcagctggcccccagccctgggggattcctgagctggcctgtctgcgtgggtttttgtatccagagctgtttggatacagctgctttgagctacaggacaaaggctgacagactcactgggaagctcccaccccactcaggggaccccactcccctcacacacccccccccacaaggaaccctcaggccaccctccacgaggtgtgactaactatgcaataatccaccccaggtgcagccccagggcctgcggaggcggtggcagactagagtttagatgccccgagcccaggcagctatttcagcctcctgtttggtggggtggcacctgtttcccgggcaatttaacaatgtctgaaaagggactgtgagtaatggctgtcacttgtcgggggcccaagtggggtgctctggtctgaccgatgtgtctcccagaactattctgggggcccgacaggtgggcctgggaggaaaatgtttacatttttaaaggcacactggtatttatatttcaaacattttgtatcaaggaaacgttttgtatagttatatgtacagtttattgatattcaataaagcagttaatttatatattaaaaaaaaaaaaaaaaa

SEQ ID NO: 392080 - DNA, 1000 bp, Homo Sapiens
tgggttgatgcctgttttgtaccctggagcaactgaggtttagaaggggctgggatgatgagtcagtgacagagatggtgccagcatcggcctgcaggtggagttaccagatttagcaaataaaatatgagatgcccagttacatttgaatttcagaacacaaatcatgttttagtagcaggaaagcccatgtgttattagggaaaggcttatgctaaaacattatttattgtttatctgaaaatcaagtgtaagtggtgatctgtatttcatctggcatccctatgcaggggcgactaagaagtgggaccaggccaggtgcataatggctcacacggccgtaatcccagtactttgggaggccgaggtgggtagatcacttgaggtcgggagtttgagaccagactggccaatgtggtgaaacctcatctctactaaaaatacaacaattagctgggcgtggtggtgcacacctataatcccagctactcaggaggctgaggcaggagaattgcttgaacccgggaggcggaggttgcagtgagccaagatcgtgccactgcgctccagcctgggcaacagagtaagactgtctcaaaaaaaaaaaaaaaaaaaaaaaaaaaaaaggtgggaccagaggagtgggaggctgagggtggggaggtcaggagggaggtcaaggtctgcccggccaagctgctgtccccaggcccagccataggtatccaacccccttggctgctcctgatggcccagttgcccaccctctgaaggcctgtccacagcagccaagagacccaagcgggtaagtgggctggggtgggcacagtccacgggggtgtagggggcagataagtggagactctgttctctgccaccagctatcccctgcagggggccccagagttgggccttgccctggcctcctgcctggggcccccgcctccatgcccccctgggcctccaactcctgcctccctggcctctggcctgggcaccc

SEQ ID NO: 392081 - DNA, 1000 bp, Homo Sapiens
ggtgtgagccaccatgcctggccagggtcatggatttggtgggacactgttcggtccatgacagtgcctttgtacagatttgccgaaggcaccacagcccccacttgccctttgtgcactgcacagcctgggcatccgtatgtggcatccctgtttggctccttgacgtgacccctctctcctcctcccactcctgagcagaagctggctacccctgtggtagccacacccagacagatgccagatgcctccctcccccgccatgccccagcccaatatcccagcagtccctcccttggtgtctgcagtacctgcccagtggtgaccggccccttctcttcctggcaggcgcacatggaggctgtgcacgcagactggaaggagtacctgaacctgctcatctgcgaggagagccacctcaagtacatggaggactaccaccaggtacttacctttcctgggagtccccccagcaccgggggtgctactctctgagagcgctcagtgcctacctggctcatgtgtggcctcgtgctccttggtccaggagccttgcggggcagccatcccaggcccccagcacccgtgcttctgatggcgtgtgcagacatgtcccaagcttgccggcccctgtccaacttccctggggaccagggccagagtctgattccccaggtcacatggggcccagggtgagtgtgtagggttttaattttggtaaaatctataatatacatgcagatacataaaacaaaatttgcctttttttttttttttttttttttttgagagagtcttgccctgtcacccaggctggagtgcagtcgtgccatctcggctcactacaacctccacctcctgggttcaagtgattctcctgcctcagcctcctgaacagctgggattacaagtgcccaccaccacacccagctaatttttgtattttcagtaaagatggggtttcgccatgttggtcaggcgggtctcaactccttacctc

SEQ ID NO: 392082 - DNA, 1000 bp, Homo Sapiens; identical to SEQ ID NO: 282618

SEQ ID NO: 392083 - DNA, 1000 bp, Homo Sapiens; identical to SEQ ID NO: 282619

SEQ ID NO: 392084 - DNA, 1000 bp, Homo Sapiens; identical to SEQ ID NO: 282620

SEQ ID NO: 392085 - DNA, 591 bp, Homo Sapiens
tttctacaggtcttgctgccattagacaatccatatggaaaaattactggtacagtcaagaggaagttgtcttcaagactgtgacattgtggccaccaataggagtccactctcagctgaggaattccttaagtcatttgtgagtcgtggagatgatacgatgtacgcatcgaaaatttcacactagtatattgatttatagtgttcactttcctccaatatgaaacagtttatttctcttacacctagctcagcaaggcattcttgggattaccttattagtaattatacaaggcttagcggctataatttactttaaaaatgctgagcagtattagaacagttataaatcaatatttctttttggttatcttatgccttcctatcttggagaagctttagaatcaattcattaagaaaataatcatgaattaatgagtgtgtcacatcaattaatttgtgcacaggtttaagaaacaaatattgttttcatcctactgatgcttctaagtaatgcagaaaatgaaataaaattatattgaaaatatcaccattgttacttcattgactgaatatttgatttagatgcct

SEQ ID NO: 392086 - DNA, 1000 bp, Homo Sapiens; identical to SEQ ID NO: 114924

SEQ ID NO: 392087 - DNA, 1000 bp, Homo Sapiens; identical to SEQ ID NO: 282621

SEQ ID NO: 392088 - DNA, 1000 bp, Homo Sapiens; identical to SEQ ID NO: 282622

SEQ ID NO: 392089 - DNA, 1000 bp, Homo Sapiens
tggtatcattagaatttcacatgaagtagcttctgagagtagtgtacagagtgacagatatatcatgtcaccctcaaatttttacataagatatcatttagtccacccaatggctgacattagcaccatctttaacacaattgtttgttcaaatgtacagtggtcccttttaaagttacattttcagactcgttctcattccctgttttaatttaatgagccatcgaatgctacataataaaattgttccctaccagctgaacagggaggagcctgtgcagtttctgacactgattgtgcacataaacaaatacatcgagtatcataacaactcaatcacaaaagttaccaaacatactacttggttaaaattgctagattcttctggctcattctttgatctattctattttacttggtttgcatcttgcctaaagtgcatactccaaacttttggtattatcctcccaatagtcatactagtagcctctctggtgtgataaattctacaggtttttaaattctacaatttggtgtggtgaattctacaaaagtttttaaaaagttttgtgtgcagccatcaacaaataccaaagggtctctctttggctgaaatgacaaaaactcaaagaaatgtgtgatcaggaagacatcataaacctataaatgatggaagcccaatatgatggttactgagatgaatgccaatgctttaaattttggtcacactctcacctaagtgagagcctagagactccaaaatagaaccactcatgctaaatgctacagtctacaactgaaattttaatgaagcaaagagataccagaacagacctttgttttttgttgaaaacaggagattccactctacctgagacagcataataaaagtttcctctgctttaacttttacagaaaagtgacctgaagtaccctaatgttcaccaatttatttatttatatggctttgtttactggttcccacttgacaaaacccact

SEQ ID NO: 392090 - DNA, 1000 bp, Homo Sapiens
ttccaaaattcgtttctcaaatrttcaaaccacaaatttaaaaaatttggttttaaataaatatatattttttcccataagttattagggtacaggtggtattcggttacatgagtaagttctttagtggtgatttgtgagattttggtgtacccatcacccgagcactatacactgcacctcgtttgtagtctttccctcaccccttctcactcttccccccaagtccccaaagtccactgtatcattcttatgcctttgcatcctcatagcttagctcccacatatcagtgagaacatacgatatttggttttccaatcctgagttattccacttagaataatagtctccaatctcatccaggtcactgcaaatgctgttaattcattcctttttatggctgcatagtattccatcatatatatatatatatatatatatatatatatatatatatatatatatatatatatatatataccacagtttctttatccactcattgattgatggacacttgggttggttccaagattttgcaattgtgaattgtgctgctataaatatacatgtgttcaaatatgcaataaatatacatgtgttcaaataatgacttcttttcctctgggtagatatccagtggtgggattcgtggatcaaatggtagctctactttcagttctttaaggaatctctacactgttttccatagtggctgtagtagtttacattcccaccagcagtgtagaagcattccatgttcaccacatacatgccaacatgtactgttttttttgatttttttgatttgggcattcttcgaggagtaaggtagtacagcattcgagttttgatttgcatttccctgatcattaatgatgttaagcattttttcatggtttttagccatttgtacatcttcttttgagaattgtctattcatatccttagctcactttttgatgggattgtttttttcttactgatttgtttgaattc

SEQ ID NO: 392091 - DNA, 1000 bp, Homo Sapiens; identical to SEQ ID NO: 282623

SEQ ID NO: 392092 - DNA, 1000 bp, Homo Sapiens
ttggccgcagcccgctttcctcagggcggcagcgctgaggcggacctcctgccgtggttggcgtttccggaatggagagcacacgttgagtcgtcctcccggaaggggctcgaatgcccggttaataaccccgaacgagactggggctggcgatccctgcattcctttctgctgggcactgccgccccagctcgcctcactgggtgccgggggtgccaggggtgccgcgaggagcctctcttggcttggtataacgccctcgctaaaactttctaggctatcttgtcggggccggtatcccgcccttgtttgccttcctagcattgttttttaaaaagacgagggggtgatggggttagaacgagagaaaaagattctgcagcctcaggaagtgactgaccttcccggaaagtttccgggcgagcccctgagcttcccttaacagagggctaccggcgacgtgagcgggaagtgcgggctgtgaaactggctggatctttttttaccgtggtacttggatctcagtgaatttcctcaaatccctttccctcagatttatcctagttgatataacgtctaacgacttaaaatgaagttgatgttaagtactcccagtaggtattgcttaacattgggggaggccccgtaagttgttgagaatttcctcaggcaataggaagccttgatcacaagggcaaaggaatggtcgagaaaggccagtaaatgtgctcacaggaagtagaataatctccagtttgattagagttaaggggtgaacacttgccaagcaggtaatgactagttcatggagggctgtgaagacgaagttaaggaatttggaatatattctggrcgggattccagtctcttacttggttctcacaacagtcctgtaaaataggtctattgttgtgcccattttagagatgaaaaatttgagtgttacagagttgtataatgcccatgatcaaatactaagtggctaaaccagtagaattcc

SEQ ID NO: 392093 - DNA, 1000 bp, Homo Sapiens
tcctgcctcagcctcccaaggagctgggattagaggcacacaccaccacacccgctaattttgtatttttagtagagatggggtttcaccaagttggccaggctggtcctgaactcctgtcctcaggtgatccgccctcctcagcttcccaaactgctgggattacaggcgtgagccactgtgcccagccccttgttgtttgttgttgttgttgtttgtttgtttttgttgttatttatagcacttatcaccacctcatgtattatatagttattcatgatgtgtctcttcccatcagaatatatacaagagaacaggaaccttgtttggttggtttctatacctccactgttcttactaatgcctggcatttagtaggtgctcaataaaatctttgttttagaaaatgattaataaataatatgtacatattgaatattgtttcctcttttaacaaatctttaataataataaaaaatttaaagcagcaagattgctttgcatcaggcacaatgataagcgctttaaatggagcccatgattcactttcatttatagagcccacatgctctctgtcaggcgcagaaggtgccagccctgcaggagcttcgggggcggagcagaaggccgcctaaaacagcctttgctaagagagcatgcgtaggcgacgcgctggtagagctgtggacctgccagcctgcgaggcggaggacgggctccatctcttagtacacactacggcgcatgctctatggggtcaactggggggctggcaagcggcagcgctggtctggggcggagtctccgaggcacttcccggtggctggctgctctgattggctgaacaaatagtccgagggtggtggcatccgccctcccgacaaggcagaccaggccccctgcaggtcccctatccgcaccccggcccctgagagctggcactgcgactcgagacagcggcccggcaggacagctccaggtgagagtgccggcgccgcgg

SEQ ID NO: 392094 - DNA, 1000 bp, Homo Sapiens
caaaatgtattcaaatgagtacatacagaactaaaaaaataattaaattataggatcttgattgaatcctcaaaaagcataatgttataatggaaaataagaattgtgcttattaaggaattaaaaaacaaagatggctataatcccacaggcatacaagggaatcttaccaaatggtgccttttaaacatgtattcctgttggttctgagttcaaatcttagatagctattaagaattaaataaaatactgaggactaaaggaaattttttttctattctatttcattaggagcattttgaacaatattgcatgaaatactaacgtacatattaaacaatgtatgtatttatatgtccagaggctacaaagaagtaacagaaaaaacaaacaaaactttgttactttgttctgaagaaggccttagacttaaatgtacaagaaacagttatgagtcctatttttaaaattatttttaaaaccccaatgcctaagccacactgtggatgactgaaattggaattatttgtggatatcctagttgcattaccagtcaactctgcctcagtttcttcacctataaaatggtatgacagttgcagtcatcatcaccgtcatcatcattatccttatcatcttcaacttcatatcccagagttgatgaaggatcttaatgtttattaaatggtaaaattattagatgatgaaaaagcttttgtgaataagctctgtttttctctataaaataaaataaaattttactgtaattaaaatatccactgtaaaattagagacaggtttgtgaattaatttgaacatctggcagcaatggtcctaggaaatcagatgattttgtgtgttatgtttataaattatccatggaaggaaagctaccagcttgagttctttgatattgacactaatttatcatttctatttagtgcaaactattcataagttatcaattaaatatttatgcattttaatattttataattag

SEQ ID NO: 392095 - DNA, 1000 bp, Homo Sapiens; identical to SEQ ID NO: 282624

SEQ ID NO: 392096 - DNA, 1000 bp, Homo Sapiens
tcagctctctctccccacctcccccgctttctttttttctgagacagggtcttgctctgttgcccaggctggagtgcagtagtgctatctcaacttactgcagcctccgcctccagggcttaagtgatcttcctgcctcagcctcctgagtggctggaatcacaggtgcaccatcatgcctggcttggtcaccaaacttttactgtaaggggcagactgtcaatatttttggctttgtcgggtgcggtggctcacgcctgtaatcccaacactttgggagtccaaggtgggtggatcacgaggtcaggagttagagaccagcttggccaacatggtgaaaccccatctctactaaaaatacaaaaattagctgggggtggtggcgggcgcctgtaataccagctgctcgggaggctgaggcaggagaatcgcttgagcccaggaggcggaggttgtagtgagctgagatcacgccattgcactccagcctgggcaacacagcaagactccctttaaaaaaaaaaatggcactgtggagcagatggtctctgttggttaactctacagccacagacaatatgtaaataatatgtaaatgtatgagcatggctgtgcgccaataaaactttatttacacaacagactgtgtggctggcctggcagggtggctcacggctgtaatcccagcactttgagaggctgaggcaggtagatcacttgaggttaggagttcaagacttgaggtcaggagttcgagaccagcctggccaacatggtgaaaccctgtctctgctaatatataaaacattacccaggcatggtggcttgcacctgtagtcccagctactggggaggctgaggcaggaggctggcttgaacctgggaggtggaggttgcagtgagccactgcactgtagcctgggtgacagagggagactccatctccaaataagtaaaatttaaaaccacattgattttgggaggccgaggtaggcagatc

SEQ ID NO: 392097 - DNA, 1000 bp, Homo Sapiens; identical to SEQ ID NO: 282625

SEQ ID NO: 392098 - DNA, 1000 bp, Homo Sapiens
  misc_feature (61)..(61): n is a, c, g, or t
ctgataaaagttcagatacaaaggagcactgtaaactgtagagctatgttaagagcattgnagtagtacaacccaagatttgtagaagtatgagttggcgaaattaaatagtgcaaatagatttagttgtgttttctcagagccgccacaagattgaacaaaatgttttctgtttgggcatcctgaggaagttgtattagctgttaatgctctgtgagtttagaaaaagtcttgatagtaaaatctagtttttgacacagtgcatgaactaagtagttaaatatttacatattcagaaaggaatagtggaaaaggtatcttggttatgacaaagtcattacaaatgtgactaagtcattacaaatgtgactgagtcattacagtggaccctctgggtgcattgaaaagaatccgttttatatccaggtttcagaggacctggaataataataagctttggattttgcattcagtgtagttggattttgggaccttggcctcagtgttatttactgggattggcatacgtgttcacaggcagagtagttgatctcacacaacgggtgatctcacaaaactggtaagtttcttatgctcatgagccctccctttttttttttaatttggtgcctgcaactttcttaacaatgattctacttcctgggctatcacattataatgctcttggcctcttttttgctgctgttttgctattcttaaacttaggccaagtaccaatgttggctgttagaagggattctgttcattcaacatgcaactttagggaatggaagtaagttcatttttaagttgtgttgtcagtaggtgcggtgtctagggtagtgaatcctgtaagttcaaatttatgattaggtgacgagttgacattgagattgtccttttccctgatcaaaaaatgaataaagcctttttaaacaaaatccaaacttttaatcaagtcttgatatgtatgactgagaaaaaatacactacatctaga

SEQ ID NO: 392099 - DNA, 1000 bp, Homo Sapiens
agttcatgttcgatctgttccaacagttcagaaaatcaaaagagaacaacatcttctattcccctatcagcatcacatcagcattagggatggtcctcttaggagccaaagacaacactgcacaacaaattagcaaggtagctatcagcatcattacgttgtcctgttgcagtttttctctggttccgtcggctagcacgcagatggtaatagatgtggtggtctgatgggtagcacagggggctgtgcaggaattcccataactgtgagaccactgacttaaacagatcttttgagtaaagttttcttgtcccgcttcatgtctcttccaggttcttcactttgatcaagtcacagagaacaccacagaaaaagctgcaacatatcatgtgagtcacagagcactatggttcagctttagatccctgaacaggtcatagtttaaacctggaacttcacaaaaactaagaaaaggccagttttagggaaaatcttggacacaaagattgagacatacagagtgggttggcatttcatggcacataattattattcctcatttctgcgttactaaaagacagtcagcactgtacctcagagcataggtctggatcaggataggctgggttcagactccagctttgctcttcacaaatgatgaataagagcaggacacaactgctcggagtcccagtgacctcatcccagaaaactaagggtaagaaaaaatctgactcaatacatgcaaatacatgcaaatgtttacaacagtgccttgcccataaaagtcataataaatgttattattattataaagtagctataattatactaatcataataatgtgaaaataatttaattttcattgagtcattaatgagattcagaggaataagcacaagtccaagtatattttggaaaatgattgctatggaatatattggtttagagccttaatagtcaaaatcgtttgctggaaggtagaaagttctacagtcg

SEQ ID NO: 392100 - DNA, 161 bp, Homo Sapiens
ggcaggcactggagataacaatgatgaacagaaattgacttgtcctcatggagagtacatcctagcagaagaatcaggtattattcaaatgataactcaagcaaatgtgaaatttcaaatgggatacatgttgtaaggaaggcagctagtaggaatatttg

SEQ ID NO: 392101 - DNA, 1000 bp, Homo Sapiens
tgtaaaataggtgggcacaagtattacacatcagaaaatcctgacaaaagggacacatagtgtttgtaacaccgtccaacattccttgtttgtaagtgttgtatgtaccgttgatgttgataaaaagaaagtttatatcttgattattttgttgtctaaagctaaacaaaacttgcatgcagcagcttttgactgtttccagagtgcttataatatacataactccctggaaataactgagcactttgaattttttttatgtctaaaattgtcagttaatttattattttgtttgagtaagaattttaatattgccatattctgtagtatttttctttgtatatttctagtatggcacatgatatgagtcactgcctttttttctatggtgtatgacagttagagatgctgattttttttctgataaattctttctttgagaaagacaattttaatgtttacaacaataaaccatgtaaatgaacagaattttgtcttctttttgggtcagaaaaaataatgactaaacagcaacataacatacacagttggagattaatttgggataggtcacttattcaatatctgaattttaaacagcctaaatctattctggcaaaagaaatcaggtgaaccagaataattatccagataattcagtaaaatattttttcttaaccagaattttccagtctggtgaccaatatttattaggatcaatttagaatatctcaattcttctgttaactttgcaagtaagtgtagctttcaggagagaagttctggagacccaaaagcttttgaacttgagcaaggtcagagtctagtcaagtacttgtcttgcacagtgattaggaagtatctttttaagactcaagaagtcaacatggatttgaggagtgttgtatgtaatctccgattttccaatttctcaatttacaactgttgggtcatggagaaagggcaaagcagttcaggccctttgggccttgggtcactt

SEQ ID NO: 392102 - DNA, 1000 bp, Homo Sapiens
attacgacttttgggtgttgaggggtctataagatcaaaacttttccatgataatactaagatgttatcgaccatttatctgtccttctctcaaaagtgtatggtggaattttccagaagctatgtgatacgtgatgatgtcatcactctgctgttaacatataataaatttattgctattgtttataaaagaataaatgatattttttaaaaagtcttggtttttattataaatatgataaatattgctagctataatctacataaccaaaaacctttatagttttttggtgctttttttttgtttttttgttttttttttttttgagatggagtgttgctccgttgcccaggctggagtgcagtgcacaatctcggctcactgcagcttctgcctgctgggttcaagtgattctcttgcctcagcctcccaagtagctgggactacaggcacccaccaccaagtccagctaatttttgtatttttagcagagacggggtttcaccatgttggccaggctggtctcgaactcctcacctcaagtgatccacccaactcagcctcccaaagtggtgggattacaggcgtgagccacggcacccagcctggtatcctctatagtttttaatagttttaaataacatgcaaagatcctgtgaaatggccaacaagcacatcaacatcactggtcatttcagaaatgcgaatcaaaaccacaatgagatactacttcatacccattaagatgactttaagaaaaagaataggaatgctcacagatggctggtaggaatgtcaaaatgtgcagccactgtgcaaaacagagtctgttttggcagttcctcaaaaagctaaacataaatttgtcctataacccagcaattgtattcctaggtacacacccaagaaagacaaaaacgtgtctaaatacaaacttgtacacgactctttataacagcattattcatactcaccaagaggtagaaacacccaaatacc

SEQ ID NO: 392103 - DNA, 219 bp, Homo Sapiens
gatcttctagtcatcttggcttcgtgtatgtgtgtgtgtgtgtgtgtgtgtgtgtgtgtgtgtgagagagagagagagagagtatgagtgtgtgcctggcaacggtgaaatcagtaagaggttaacaagttcttttgtttccccagttgaatttaggcatagtaagtaaacaaaccgacattttaacatgtgcttcagaaaacgggaaaggtaaaagtc

SEQ ID NO: 392104 - DNA, 923 bp, Homo Sapiens
agtcgactcgatcctgatgctgctggcccagggaccacacttggacagtcatcgttctaggaaaacttcctggagtgggaatggtaaaggtgatggcttcttcccattttgcccttttcaaatctgagataggcttccccagcaggctcagtgccagagtccataccctcaatttaaataacaaatcctcctctatatcatgacctttcctccagagggttgtttttcattttttgttttttgttttttttttgagacggagtcttgttctatcaccaggctggagtgcagtggcacaatctcggctcactgcaagctccgaaccccgggttcacgccattctcctgcctcagcctcccctgtagctgggactactggctcccacgaccacacccggctaatttttgtatttttagtagagacggggtttcaccatgttagccaggatggtcttgatctcctgacctcgtgatccaccagcctcggcctcccaaagtgctgggatttcaggcatgagccaccgcacctggccttcaagagcctttatcttaatcatttctgcaaagtcattgccacataaagtaacattgatagcttccagagactagaacatagacatcttggggggccattactgagcctattacatactgtgtgacctagggcaagtcactttacctctctgagccgtaggtcttttatctgcaattgcctctcaattgcacagggaaggcttacatggggtccaaaaagcaagacttctggaagttgcaaagctccaaatataaacaagagtgatattaatagttgagtacttcccctctcacctgtcctctctttctgtggatcacctgtgaactgggctgatctcactctgtttgcttctgtggacctagaaatgatcactgcccccagtgaatatg

SEQ ID NO: 392105 - DNA, 1000 bp, Homo Sapiens; identical to SEQ ID NO: 282627

SEQ ID NO: 392106 - DNA, 1000 bp, Homo Sapiens; identical to SEQ ID NO: 114925

SEQ ID NO: 392107 - DNA, 250 bp, Homo Sapiens
cccctccataaatacagggggggtgtcaaataataataggggcacctcccttcgcactcaatacgtagatgctgagctggcctgggctgggttgacctgggctgagctggactaagctgggctgacctgggctgggatgggatgggctaggatgacttgggctggactgggcgggactgagctggactggcctgggctgagctgggctgggctggactgacctggactggcctgggctgggctgggcggg

SEQ ID NO: 392108 - DNA, 1000 bp, Homo Sapiens; identical to SEQ ID NO: 282630

SEQ ID NO: 392109 - DNA, 1000 bp, Homo Sapiens
ctcacctcacaccctgcaaagaagcacagctagggtaacaatacttctcagactgagaaattactaactgctggtttttaggatgtttttcaagcaagataattgaaaagctgaaccactctgctctttgcttccctgagtgagagtagcaagagggccggatggaaggagccaggaaccccggaaccgacttctgatgcgggtgggacactttttcccaataattactcttcgcttgaatcacaagtgcataggacgtgggcaatttgctccagctaatggttcgtgtgggataggtattgcctgatacagaggcaggggttggaacagccactctgggggccagtaaagccagttttatggaagaagctgtctttgttaaaaaccaaacccaatcaacgtgggggcttcccagcagcagactcaacaccagctacacttttctgaaatccaggcagtcagaaaagcccccggcaccctcagcctaacactgaagcagaggaaatgaaactgaagccatgtttgcagaatgtggatttttgtggtttaggacaaacagctgactatctactcagaccaaatgaccctaatcaagtcaacccacagaggatgaggttctggtttacacaaaagagaggcagtttgctcaccatttaaaataattccttccttcctatacattttttttttcattaagatctgactactggtgcatttaaaatataatgcagttcatactcagcttgtcaagggtaagcaattgtgtaaagtgaggcatatctgtaatggtgtacagtcccagtaactccctgggctccagggctgagggcagcccagctgtcgctcccacaaacaggtggtgtaaaacaatagctctagtgagccgactcgctttccaaaccctccagcagacaagcacccagccagagtgccagtgagaagcacaggccaccactctgccctggtccacacaagctccggtagcccgagctcggatgga

SEQ ID NO: 392110 - DNA, 1000 bp, Homo Sapiens
ttgataaagggagtttaggatataacttcttcatagtcacataaccatcaaatgataggactagaacctgaggtcttctgaacacttgttcagtggttttcctactatattatgctacctgtgaaagccttgggtaagttaaatatttgtaggggtggtagcttagtaactcaccccgtcctccacgatgtcacacgttcagagaggtggtttagtgagctctattcctatactactgggatacttagctgtagctaagggataatactcagtagcaatagctgtcaggtgcagacataaaagcctcaaggaagtatggtcaggattgtggttcctgtgcctgagaatacttcctaaaaatatgatagcctcgaaagtttgttgctcatgaggttctgttccacaaatagctattcttatgcaaatctttatcaacagaaagtgccctttttcttatgattcttatgttggctagactacactacactacattcttttataaatgggttttggtttttaaatcactgtttctgagccttcattcttggtcaagctttaggcacatctgagtgagtagttttggcctgtgtttgcatgtttttgcttggaggagaaagggccaccacaggaaagggaagcctggagctcgtgtacttagatactgtagtccttggccatctactcgtggcaagccgtgttctttctgactacacggggaatgcttgacccagagagatcagattgtcaatgcttgttccactcttactttcaggagaaaatgaacaggatgcggcaacgcattgctcagcgtctgaaggaggcccagaatacatgtgcaatgctgacaacttttaatgagattgacatgaggtagtgtctctagtccctcttatcccctaggcccctttttcttagagaacacgaacttgccccactccttatctagtgctgattctaaaactaacttgtcagggaagaggtatttgtttattgttttttg

SEQ ID NO: 392111 - DNA, 1000 bp, Homo Sapiens; identical to SEQ ID NO: 282631

SEQ ID NO: 392112 - DNA, 1000 bp, Homo Sapiens; identical to SEQ ID NO: 114926

SEQ ID NO: 392113 - DNA, 1000 bp, Homo Sapiens
attagctggtctctgaattaagggggagacgaccttctctaagatgaacagggttcgccccagtcctcctgcctggagacagttgatgtgtcatgcagagctcttacttctccagcaacactcttcagtacataataagcttaactgataaacagaatatttagaaaggtgagacttgggcttaccattgggtttaaatcatagggacctagggcgagggttcagggcttctctggagcagatattgtcaagttcatggccttaggtagcatgtatctggtcttaactctgattgtagcaaaagttctgagaggagctgagccctgttgtggcccattaaagaacagggtcctcaggccctgcccgcttcctgtccactgccccctccccatccccagcccagccgagggaatcccgtgggttgcttacctacctataaggtggtttataagctgctgtcctggccactgcattcaaattccaatgtgtacttcatagtgtaaaaatttatattattgtgaggttttttgtcttttttttttttttttttttttggtatattgctgtatctactttaacttccagaaataaacgttatataggaaccgtctgatagcatggcagctctgtttggctggtggaggcttccttttcccctgcataagttctgagggggcctcacacacaggtggggcctgggataagggccggaaagggtcttgagaggaggtggttgccttaatcccccccgccaacccccttatgttagccaccagcccggaggtaaggggtgcctggaggagcaggaggtcaatagtccaacggcagaaaggtgtcagagtggaggcctccctccccggccccctcctaccccccagagcggcctcgtcctgtctggggtcagataagccacctaagcggggtggggggtagatactcccaccgcaccaaggcctccccttccacagttggctcctttatcactttcccttcagttcac

SEQ ID NO: 392114 - DNA, 1000 bp, Homo Sapiens; identical to SEQ ID NO: 282632

SEQ ID NO: 392115 - DNA, 1000 bp, Homo Sapiens; identical to SEQ ID NO: 282633

SEQ ID NO: 392116 - DNA, 1000 bp, Homo Sapiens; identical to SEQ ID NO: 195482

SEQ ID NO: 392117 - DNA, 1000 bp, Homo Sapiens; identical to SEQ ID NO: 114927

SEQ ID NO: 392118 - DNA, 1000 bp, Homo Sapiens; identical to SEQ ID NO: 282635

SEQ ID NO: 392119 - DNA, 1000 bp, Homo Sapiens; identical to SEQ ID NO: 282636

SEQ ID NO: 392120 - DNA, 1000 bp, Homo Sapiens; identical to SEQ ID NO: 282637

SEQ ID NO: 392121 - DNA, 1000 bp, Homo Sapiens
ctggaatttttattctcctgtggccaccttgtattattcctgtctcattttaacttaattacctctgcaaagactctatctgcagtcacattcagaggtactgggggttaggacttcaaggtggatttggaggggaatgcagttcattctataccaaacggacttgcagtctccatcctggcagaagacccccagtgtgtacaggaccggaaggcagccagggctttgatcactctgtctgaagcctcccagttagtcctctgaaagcagtgctccctgctcctcctcccagcttggagtccataggttatttgcagtttcctcagcaggtacatcttccatctcccgccaggggtgcagtaggggatagttgcctggtcactggattgtctttttttctttctttttttttttttttaaacagactcttgctctgttgcccaggctggactacagtggcccaatcatagctcactgctgctttgaactcctggactcaagtgatcctcccatcttggcctcccaaagtgctgggattacaggcgtgagcctctgtgcccaactgccactagatttttaagcccacatttcacccctgccatctgcctgtcctggtgcttccaagtcctgcactttgctgcattctgtggggcaaggcagtcttccccgcactcctctgcaggctcagctagcatgtccccttcaccctgtagaatctgctcccaccctccgtccccttcccatcttccaaaatcatgttgcaatctggcatctgctgctgttcctctctagctctcttcattaccatgggcccctctgtttcattccttcgctgtcattatgctgggatctcaggaggaagatgagctcaacgtacacgttcagtccctgtgtttacccagaatcctcctggcttctccccaagaagaggtcagagccgcagcctgcggaggagggtgttgaggcagctcagccagcatgaggctggccctgctggatc

SEQ ID NO: 392122 - DNA, 414 bp, Homo Sapiens
atgacaaagaagagaaggaacaatggtcgtgccaaaaagggccgcggccacgtgcagcctattcgctgcactaactgtgcccgatgcgtgcccaaggacaaggccattaagaaattcgtcattcggaacatagtggaggccgcagcagtcagggacatttctgaagcgagcgtcttcgatgcctatgtgcttcccaagctgtatgtgaagctacattactgtgtgagttgtgtaattcacagcaaagtagtcaggaatcgatctcgtgaagcccgcaaggaccgaacacccccaccccgatttagacctgcgggtgctgccccacgtcccccaccaaagcccatgtaaggagctgagttcttgaagactgaagacaggctattccctggagaaaaataaaacggaaattgtact

SEQ ID NO: 392123 - DNA, 358 bp, Homo Sapiens
cccctcagaatgatatttgtcctcacgggaggacatagcctatgaaggctgttgctatagttgcaagcaggaggataatgccgatgtttcaggtttctgagtagagaaatgatccgtaatataggcctcgcccgatgtgtaggaagaggcagataaagaatattgaggcgccattggcgtgaaggtagcggatgattcagccataatttacgtctcgagtgatgtgggcgattgatgaaaaggcggttgaggcgtctggtgagtagtgcatggctaggaatagtcctgtggtgatttggaggatcaggcaggcgccaaggagtgagccgaagtttcatcatgctgagatgttggatgg

SEQ ID NO: 392124 - DNA, 1000 bp, Homo Sapiens; identical to SEQ ID NO: 195826

SEQ ID NO: 392125 - DNA, 210 bp, Homo Sapiens
gaccgagcgcagcggccgggccggcgggcgggcgggcggctgcgagcatggtcctggtgctgcaccacatcctcatcgctgttgtccaattcctcaggcggggccagcaggtcttcctcaagccggacgagccgccgccgccgccgcagccatgcgccgacagcctgcaggacgccttgctgagtctggctctgtcatcgacatttcagg

SEQ ID NO: 392126 - DNA, 1000 bp, Homo Sapiens; identical to SEQ ID NO: 201497

SEQ ID NO: 392127 - DNA, 595 bp, Homo Sapiens
gtcggtttaggactttctgcctccactcttgcacttggaactggaatagcaggcatctcaacctctgtcacagcattccgcagcctctctaatgacttctctgctagcattacagatatatcacaagctttatctgtcctccaagcccaggttgactctttagctgcagttgtcctgcagaaccgccaaggcctcaatttactcactgctgaaaaaggaggactctgtatatttcttaatgaagagtgttgtttttacttaaatcaatctggcctggcatatggtaacatcaaaaaactcaaagacagagctcaaaaactcactaatcaggcaactaattatgctggacccacctggtcactctctaactgggtatcctggcttgttccaatcattagtcctgtaatacctatcttcctccatctcttattcgggccttttgtcttccgattaatctctcaattcctacaaaactgcatccaggctatcactaatcactctatatgacaagtgctgcttttaacaagcccacaatatcaccccttaccccaaaatcttacttcagtctaatctctcccgcttctaggttcccaca

SEQ ID NO: 392128 - DNA, 1000 bp, Homo Sapiens; identical to SEQ ID NO: 206702

SEQ ID NO: 392129 - DNA, 1000 bp, Homo Sapiens
gcggatcacgaggtcgggagatcgaggccatcccggctaaaacggtgaaaccccgtctctactaaaaatacaaaaaaattagccgggcgtagtggcgggcgcctgtagtcccagctacttgggcaggctgaggcaggagaatggcgtgaacccgggaggcggagcttgcagtgagccgagatcccgccactgcactccagcctgggcgacagagcgagactccgtctcaaaaaaaaaaaaaaaaaaaacagaagtggcttccccaagtggggctgcaggattgccccagttttcagacctgtttctaatccagagaggagagtcacagtgccactgtccccaggcaggcagcacagtgatctttctagacatctccttcttttttttttttttttttttgagacagagtctcgctctgtcgcccagactagggtgcaatagcacgatcttggcttactgcaacctccacctcccaggttcaagcgatctccggcctcagcctcttgagtagctgggattacaggcacccaccatcatgccgagctaatttctgtatttttgtagagatggggtttcaccgtgtttgccaggctggtctcgaactcctgacctcaggtgatccacccgcctcagcctcccaaagtgctggcattaaaggcgtgagccaccacgcccagcctccccttactattttgtaagaggcttttgagaaacaatccaagcccttactaccttagttcctcctagagttgactgcacctctcggttaatgttgaagtttctgtggctcgtcatctctgcctaactatgcaattcattcactgttgtattgggtttttctgtttctttgtctatttgttttaggaaaaaatagcccaaagctcactgtgtaattagcatttagaagctgaagatccccaactgctccagcctctgccgctgccatgctttgagtccacgcccaccagccttgctctcttcaataaaccacaagcatctc

SEQ ID NO: 392130 - DNA, 1000 bp, Homo Sapiens; identical to SEQ ID NO: 282647

SEQ ID NO: 392131 - DNA, 1000 bp, Homo Sapiens; identical to SEQ ID NO: 282648

SEQ ID NO: 392132 - DNA, 1000 bp, Homo Sapiens; identical to SEQ ID NO: 282649

SEQ ID NO: 392133 - DNA, 1000 bp, Homo Sapiens; identical to SEQ ID NO: 282650

SEQ ID NO: 392134 - DNA, 1000 bp, Homo Sapiens; identical to SEQ ID NO: 282651

SEQ ID NO: 392135 - DNA, 1000 bp, Homo Sapiens; identical to SEQ ID NO: 282652

SEQ ID NO: 392136 - DNA, 1000 bp, Homo Sapiens; identical to SEQ ID NO: 282653

SEQ ID NO: 392137 - DNA, 1000 bp, Homo Sapiens; identical to SEQ ID NO: 114931

SEQ ID NO: 392138 - DNA, 1000 bp, Homo Sapiens
aagaacccagttctccacccccctcccccacacatatatacagtgcttcaggttgataaggggtgactaggccaggaaaatgtgatatttgtctgacgtgcaaggagaaaaatgagagagatgcttcccttttcatatggattctcagtggtgtgctcttgaaaccatgtctagcaacaatgcaagaggactgcagaagaagaaacacgacagtgtctgtacgcggggagaaatgtggagagaaacccactgaggttcccatgtcctgacagacaaatgcatataaaggaggagagtttaaaatcccaaacagcagacagactaaaatgacgttaggccaatgaagtgccacaaacacaccaagtggaatggatccacttcagtaatggtgctggggaaactggatatccatatgcagaagaatgaaactaggcccctttctttcaccccatataaaaattagctcgaaatggattaaagacttaaatggaacacccaaaactacaaaactgctagaagaaaatagtggttcaagattttaaactaggcaaatattttattgctaagacttcaaaagcacagggaacaaaaccaaaaatagacaaatggtgctatattaaaccaaaacctgcacagcaaagaaaacaatcaacagacggaagagacatctgtagaatgggagaaaatatttgcaaaccattcatctgacatgcgactaatatccagaatatacaaggaacttgatggcaaaaaatatataatctgattaaaataggaaaaagatctgaataaacattttgcaaaagacatacaaatggtatataagtatgtttaacatcattaattatcaaagaaatgcaaatcaaaactacaatgagctatcattttactccagttacaatgactatcatgaaaaagacaaaaaacaaaacaaaacaatagatgctgacaaggatgtggagaacagggaactcatacgctgttggtagaaacatgaatt

SEQ ID NO: 392139 - DNA, 1000 bp, Homo Sapiens
ataaagaggcagattagtaggagaaaaaggcatacaaataaatttaatgtgcataagcactggagaatttcaggatagttatccaatgaccgaatgaggtacacatagttgtatatccatcttaataggggaagagaatatcagagaaatatggccattttgagggttcataaatgataattttagggggaataaataggcccaatgctcagacaatgattagtataatatacacaatagaatattattcatttttacaaagaagaaaattctgacacatgctacaacatcgaagcactggtaagtgaaacaagccagtcacaaagaacactatatattgtataattccacatatataaggtacctagagtagtcgaattcttagagacagaaagtaggatgatggtcaccatagctttgaagagaaggtaggaagttagtgtttaatgggtggtaagtttaggaagataaaaagttctggagatagatggtggtgatagttgcatgtcaatatgaatgcacttaatgtcactgttcacttaaaacagttaaaatagtacattttatgttgtttatatttaaccacagtttaacaaaataagttattgatgatgttaggtacttcatgttgcaacctatcaggaggcataaaatgattggttgattcatttttcatgacagtggcaatcagatttctccattgtaaagttatctttttccctttacaattaggaaattatctgtgtgccagtatttttagcaccatcaacttgccagttaatgattttagcattcattcttgctccttgcctgaatcaaatacttattaggagctattaaatggtggtggtatttcccctgtcattcatctataattgttattcaatgcttttctataataaaagttttccctcatcaattagggctatttggtgacactttatggtcaataaaataaaagtataatcacttaattcattaatttaccaatttccacaga

SEQ ID NO: 392140 - DNA, 1000 bp, Homo Sapiens; identical to SEQ ID NO: 282655

SEQ ID NO: 392141 - DNA, 1000 bp, Homo Sapiens; identical to SEQ ID NO: 282656

SEQ ID NO: 392142 - DNA, 1000 bp, Homo Sapiens
aaatctagataatgcaatcaatagatcaacttattcacctctgtataaactatgatagcaacaacagataaaaacaaaggaactagttgccacttttgatcctgtcacgctctctcattaacacctggccctctgtgttttagacatgactgaagggtgtgggtttcaactcatacacattctagagagtaatttttttcatatttttaggtaaaatagatgtataaatagaagttttaattctattaagttttctttcagtactccaaatgatcatcttatgcacctaggcttcctataccctgctttagaagtccttatttaacagagcacataattatctctttctacaagacctgtttgtgaaaaattgagctaattcggtttttgtcaataggatcaattaaaattctgtaaggatgcttattagctaaaatgcctctgtgtcaatccctgacaaaactgaagattcattttacctgtttagcaaatatgtattttctcagggctgatcccaattcactttattctgtccacgaagcctcatgggggccctagaatcaactgtgacattcttctctcttttttctcttgacatcacccaggtcaacctgaattccctattttgaactctgtgggtaaaagcagataagaataataaatttggatgagagtgtataggacgctatagtgaaggaggagaagtttcagcaatcccctaagggagtaaaagacaggatgaatcattttcttcaacctatggcatacagacctctttccgctacagccacagtgcttaaaggaaacagctaagccatttgatgccttttatgcttcttcttttaaaaaaaaaaaatacaactttgaatgagcctagtcagtaaagaaaggtcaagtgaaactgctacggcacattttgttccagagtctttttctccccctccatactgagcaagataaaggacccagttgtgactgctacacagtggttccttaattg

SEQ ID NO: 392143 - DNA, 1000 bp, Homo Sapiens; identical to SEQ ID NO: 282657

SEQ ID NO: 392144 - DNA, 1000 bp, Homo Sapiens
ttcttgttttttgtttgtttgagatggagtctcactctgtcatccagggtggagcacagtcatgcaatatcagctcactgcaatctctgcctcctaggttcaagcaattcccctgccccagcctcccaagtagctgggattacaaacatgtgccactacacctggctaattttttgtatttttagtagagatgaggtttcaccatatttccatccaggctggtctcaaactcctggcctcaagtgatctgctgccctcggcctcccaaagtgctggaattataagcgtgagccgccatacctggcttccaatctttcatctaggctccagaaccaattccatcacctactgggatgtccacagatatcctactgcagtgagcttcaagaggaaagaaatttctgtttgttttatccactgctgcatgccaagtgcctaatgtactctctggcatctaggaggttctctacaaatatttttgaatgaataagcaaattaatgttttgtgtttttttttgagacaggatctcactctgtcacccaggctggagtgctgtggcacaatcatagctcactgcagcctcaacctttagggctcaagtgagccccccacctcagcatcctgtgtagctgcgactacaggcacatgccaccatgcttggttaatttttttgtagagacgaggtttcgccatgttgcccagggtggtcttgaacacctgggctcaaatgatccacccacctcagcctcctaaagtgctgggattacaggcatgagccaccatgcctgtccaataaatgaactttaaatgtaacatgctcaagtacggtcttattatcttattccacttgcaatatacactctcaggagtgtggtgctgccatctctgcagctactaaagcaaaaatttgagagtcatcttgcatttcactctctgcctcatcttacatatccaattacatctcaaggaacacagatttttcccagagtgtctctcaaa

SEQ ID NO: 392145 - DNA, 1000 bp, Homo Sapiens; identical to SEQ ID NO: 282658

SEQ ID NO: 392146 - DNA, 1000 bp, Homo Sapiens; identical to SEQ ID NO: 282659

SEQ ID NO: 392147 - DNA, 1000 bp, Homo Sapiens; identical to SEQ ID NO: 282660

SEQ ID NO: 392148 - DNA, 374 bp, Homo Sapiens
agcttcagggccccagcatcgaaggaacagggtctgacctcatttgccaccgtagggatggggagactgaggcaggaggtgaatggctcccagcttggagccctttcccctcaggacttggtttccctaccctacgtccgcctgcagggacagaaagacatggtctggaaatggatgccacttctgctgcttctggtctgtgtagccaccatgtgcagtgcccaggacaggactgatctcctcaatgtctgtatggatgccaagcaccacaagacaaagccaggtcctgaggacaagctgcatgaccaagtacggctggagtgtgcctctgctaaggaggggcttgttctaacagggaggagaaagtcaggatg

SEQ ID NO: 392149 - DNA, 1000 bp, Homo Sapiens
gtgggacacacgctcccacccttgcccttgcacagggtttcatccaaacatggagatgccagtgagtgcctggggctcctctcccaggaacaaaccacacccagagctccagcccgagcgaacacatctacatgaaaatcagcctcatgcatcatgcattgtaatttctcatcttggggaccaggcaggagggctgtgtgacatacaactggtaaaatcagtttccgatgaaaacttataaaaggaaaaagccaacccacaaacaaatgaggcgataaatcccctgaggctccgcctggcagggaaacaccagctctgcagcactgagcacaggctggtgttcccactgggggcagcatggaggatctgcgtccagggggcagagtgtgatgacatcacccacatgcacaggaacgataaggctttcttaaaaaacgatcttttctcaacagctcctcaaaaggagctgaggcaatgcatagccctgcaggaagagactggaaatggtcttggagagagaactgcggggcatggtgacagcggtgagaggctgcaggtgcacagatctcaacgaggggccgtgagttccctcactccctgagagctgaggagacttgcccgaaagcccagagcccttcctgagacacagaaaccatcttcaccatctctaagatcccttccatttctgaaggacttccatttctttgtgactgtgggccaccatgggcatgagtcacctgtcaccagagcctggtgtccctgtgcagctgtgccaggtgggcagaggagacaggtgaaggcacattcctcagcgcccgctcacagctctgcccaccgtgcattctgtagagaacctcagcgccctcctccctgccggcagccaggcagggatttaggtggtttctgtttggcctccagtgcttgcctctcccgtgtcctatccgcccagacctcagacctcagagaagcctcctcccacaggaagctctcctgattgatc

SEQ ID NO: 392150 - DNA, 1000 bp, Homo Sapiens
accgccgcagtgccttaccgcctgctgcctggaatcttctaagggcacgccctagggagaagccctgtggggctgtcaagagcgtgttctgccaggtccatgggggctggcatcccagctccaactcgaggagcctcagtttcctcatctgtaaactggagagagcccagcacttggcaggtgtccagtacctaatcacgctctgttccttgcttttgccttcaagggaattccgagtgtccagcactgccgtattgccagcacagacggattttctctaatcagtgtccctgggcaggaggatgacccagtcacctttactagtcctttggagacaatttacctgtattaggagcccaggccacgctacactctgcccacactggtgagcaggaggtcttcccacgccctgtcattaggctgcatttactcttgctaaataaaagtgggagtggggcgtgcgcgttatccatgtattgcctttcagctctagatccccctcccctgcctgctctgcagtcgtgggtggggcccgtgcgccgtttctccttggtagcgtgcacggtgttgaactgggacactggggagaaaggggctttcatgtcgtttccttcctgctcctgctgcacagctgccaggagtgctctgcctggagtctgcagacctcagagaggtcccagcactggctgtggctttcaggtgtaggcaggtgggctctgcttcccgattccctgtgagcgcccaccctctcgaaagaattttctgtcttgccctgtgactgtgcagactctggctcgagcaacccggggaacttcaccctcaggggcctctccacaccttctccagcgaggaggtctcagtcccagcctcgggagggcacctccttttctgtgctttcttccctgaggcattcttcctcatccctagggtgttgtgtagaactctttttaaactctatgctccgagtagagttcatctttatattaaacttcccctgttc

SEQ ID NO: 392151 - DNA, 1000 bp, Homo Sapiens
gggggagggggagggtcgggggggggtgggttgctggggaaggtgggctgactggttccccactctagggcactttccttgctgttctcaattgagggcctgaataaatggactccagcacacagcatctgatgcctgactttttccttcactcgccaaacatttatctgagtgccaaaccatgtatgcaagtagacaagcttttatgagatagtacaaaacatactacatgtcatggcatcagactttgaggaagtagtggtcaaagaagtcttcttagaaaaggtgacatctaatttgaggtctgaatgatagctaggaggtggcctgctaatggtatggctgtcaggaacgagaggcacaagcagaaacagatgtgcaaaaccagggactgcaggctgggtggggcttgcaggcagatacctctctttcagacaaggaaacacttttttttttttttttgagacgcagttttgctctttcgcctaggctggagtgcagtggtgcgatcttggctcactgcaacctctgcccccggggttccagcgattctcctgcctcagcctcccgagtagctgggattacaggtgtgcacctccatgcccagctaatttttgtatttttagtagagacagggtttcaccatgttggccaggctggtcttgaacccctgacctcaggtgatccacccacctcagcctcccaaagcgctgggattacaggtgtgaactgccgccaggcctagccagcattcttgagttgaactcatgatacttaattcctaagagtctccctgcctccaaaatcaaatgtgctccttgctagctgcataactttcccctggacctcaatttactcacctataaatgaaggatttctaaagcccttttcatgattttcagtgaggctaatagcaccattcccaggatgctttcagttcattaaaccactgctgatttgtcggttgttcccctgtggagactgcacactgggatggaca

SEQ ID NO: 392152 - DNA, 1000 bp, Homo Sapiens; identical to SEQ ID NO: 114932

SEQ ID NO: 392153 - DNA, 1000 bp, Homo Sapiens
atccttttgtctgctctgtttgagaagttaaaacacaagctttcacaacattatccatagacagaaagtacctagtggttgccaggggctggaaaagtggaataactactaatgggtatggagtttttttggaatggtgaaaatgtcctacaattggtgttaataattgtaaaactttgtaaatacacttaaaaccaccaaattgtacactttaaaaggacaaatagaaggtatgcggttatgtcttaaaagaagaaaacaaaatacaacattccaaagaaaatattagcagtaggaatcagatcattaaagatgtggcaacaaactgccaagtttacctgaatggctgccttcaggctatccacgccttcatcaagccccaactcctttctgctcatttctgcttctttggcctcttcctgagcctgaaacaggaactcacatgagactcagggccaccaggaaatgcttaaaatacatactctttcccaaaagcaaatctataattctgtttcaattttatgaatatatgaatagacaaaatgaatcgaattacataactatgtcattcattaaatggcaacaatgctgacagcaagcagtagatcctctgattccaattaccatttgttttttacccaattctatttgctagaggtagtaagtactctggcactcataaatcacatgatgataaaaaggaacatgaggccgggtatggtggctcacaactgtaatccccataccttgggaggccaaggtgggaggatcacttgaactcaggagttcaagacctgcctgggtaacatagtgagacctcagttctataaaaaagaaaagaaatgagcctggtgtggtggcatgtgcttgtagtcccagctactagggaggctgaggtgggaagatggcttcagtctgagagttcaggctgcaataagctgtgatcatgcctctgcactccagcctgggtgatggagatgccatctcttagaaaaaagag

SEQ ID NO: 392154 - DNA, 1000 bp, Homo Sapiens
tgtggagattgcagtgtgtctgaggtttgtgtagtagtggaagattttaggtatgtagagcaagttgaaaatggattgagactgcatggtggcataaatgagaaattgcctgtagcatctagtctacttgaaggaagtggagacataaggagagacaaaaacaggtttgtgccataaagtattttttcaaagacaccaagatgtggtaaatgaaaattattagttcacttccctgctgccatgaaactttgccttaagaaggtgctggattccaaggtttgtaaaggcatctcggtaaagactgctttttgaatgcatatgattttgcatcagctagactgagttgattctgaccagacttgatggttttaagtcggaaccgataaattttaaaaaggagaaaaaataatttgacctagtagtataaaacatgaggctttaatggtactttgctatgaaaagaaaacactgtattccttatgcaaaacacatgtatctttcattatttataagtggcctctcttagctcagttactcaattcatacgtagtattttttaaaataattttatatctgtgtaccaccccatatatttcatattactgtttcacatgtacagctttctacttctttgtaagaacaccaaccaaccaaggtttaagtgattaataggcttgagcaccgggtggcagatgttctatgcagtgtggttcaagtttctttgaccgcacttatatgcattgctaatatggaatttaagataccatacacagtctctcatggacctatctctattgtagaattatgacttatgtcttacttggcaaatttttctgaatgtgacctttttttgctgatttgctgggtttgggattaactagcattattttgccacctttatattgtatttataaaaaaaaagtactatcaatcaatcatactactttggattgttgtgctggtgtaatgtggatttaacatcaataaatatttgacaaat

SEQ ID NO: 392155 - DNA, 1000 bp, Homo Sapiens; identical to SEQ ID NO: 215860

SEQ ID NO: 392156 - DNA, 1000 bp, Homo Sapiens; identical to SEQ ID NO: 282669

SEQ ID NO: 392157 - DNA, 1000 bp, Homo Sapiens
tgtgtttttttaaagctaactaccattaagatcattatagaagtttggtataatgaagatttgggtttttcagtccaatgagtttccatattcttgaatgaaaaagatccacatttcatcatttgcctgtttcattttcttttagtacttttgaacttagtttggtcagaaaatactagaattttagtttgatctaaagaaccagcttatataacttgctgttgccatgtacatttgtatgtctttgctgtgtcaaataactggatctgattttagctctttttaagtggtgaaagcaatgcatttttattcttcaaattcagacattgaatgtgtattaaaatgtgtgtgcttacctttaatcctctccccaccgacaattaggaacacgtttctccaattactgttggcaagactaccaagaaaaattgttgaattagaatcccagcaccgggcacggtggctcacgcctgtgatcctagcactttgggaggccaaagcaggcggatcacctgaggtcaggagttcgagaccagcagggccaacatggcgaaaccccgactctactaaaaatacaaaaattagccaggcatggtggtgggcgcctgtaatcccaactactcaggaggctgaggcaggagaattgcttgaacctgggagttggaggtcacggtgagctgatatcacgccattgcactccagcctgggcaacagagcaagactctgtctcaatcaatctatccatcaatcgataagaaccccagattgtatagctacatgttttagcccccttttcaaagtatatgttctccttggtacttattttgacattctgacttttctacatatgctttatcaacctcttaattaaaccatcattgtctattttgagagataactgcgctgcttcccattgtgtgttttaaatgttattgttcagtttgagtcaaataaaaggatatttaatctgtggtgccttgacattaaaagtggtaaagtg

SEQ ID NO: 392158 - DNA, 1000 bp, Homo Sapiens; identical to SEQ ID NO: 282670

SEQ ID NO: 392159 - DNA, 1000 bp, Homo Sapiens; identical to SEQ ID NO: 282671

SEQ ID NO: 392160 - DNA, 600 bp, Homo Sapiens
gggcccatgggtgccccaaaggtcccaggcagatggaggctcctggttggcgtggaggaaggaaaaggatgaaatcggctcccctggccaccccttctagcccagctggagctgcagtccgtgggtctgagccgacccttgggttcatcggcccattttacagatgcggcactacagccgggacgtggcgctctgggcggtgcagggttccggggcggggcaggccgaggcgcccgctccccggggctcacctgggtcagaccctgagccctcgagcagggcatcggcgctgctgcttaaagctggggccgccaggagtgcgatcgctgcggatctgcagctgggcaccgccgcaacgccctgccccgcgacggcaggtgagatgcgggcggcccgtgggaggggtctctgcctgtcctcgtcacccacttccttcccgtttgttgctgctgcagggctgggaatgggggggaccaagcacttcgcagggtgacccggggaagatctgtgagccagtggcctcagcgttgaatgagagctctctcccgggtccgcgctcgcagggactgaagggactcctgaatgtccgcgggacgtgtc

SEQ ID NO: 392161 - DNA, 1000 bp, Homo Sapiens
ttttaaataattttaaaattattttttccagaaatatattttcagaattttgatttttcgggatttcagcatgcagaattgtgtctctctgggctgtgatcagctcatgtctgggatgaggcaggagccttggtggggtgcagggagagcagatgagggtaggagcaggaccagcaaggcaggcagtggtcagagcactcaggccttgggggtgagtgaagcctgttggaggatgctgagcagcggcagcaacaagacctgattgttctggaagactgtctgggctgctgtgtggaggagcggttatggaggacaggtttgaggctggacttagggagggtggggagtcagcgggctcgatgtacacatgagtgtctgagggaaatggaggctcacactaagacatttggcctgagcagctgagaggggctgcggaaggttgaagggtgcaccacagggccttgggaacttgacagtgaggtgggtataaaggctagtggtcaatagatcccagcaattgtgactgacgaggaacagctggggtgtcaggccatctggaccagggccaaacgaggtctggagagggtgggtggaaagaccgagaggggtctggggccatgaggtcaggcgaggcctggacgaggtggaaaaaaccaggagctcagacaccagcaaccaaagaggaaaaggctggagaagatgccggacaactgttctttgccagcctagcagacttgtgggtgctttcctccaacaggagcaggccgtggggctctcacattcatcagcttcctggttcctggaggctgggtctcacccgacctggagagctgcaagagctccatgctgtcactgcaggcccaggactgaaagatcacattaaactgtccttccacctaatgttcactctgtgattctttgtgtacgtgcacctccactcccagacggggaacctcaaggtggtttcctttacatgcccagtcccagggatggctcatgt

SEQ ID NO: 392162 - DNA, 141 bp, Homo Sapiens
  misc_feature (37)..(37): n is a, c, g, or t
  misc_feature (42)..(42): n is a, c, g, or t
  misc_feature (59)..(59): n is a, c, g, or t
  misc_feature (71)..(71): n is a, c, g, or t
  misc_feature (83)..(83): n is a, c, g, or t
  misc_feature (87)..(87): n is a, c, g, or t
  misc_feature (90)..(90): n is a, c, g, or t
  misc_feature (92)..(92): n is a, c, g, or t
  misc_feature (108)..(108): n is a, c, g, or t
  misc_feature (132)..(132): n is a, c, g, or t
  misc_feature (134)..(134): n is a, c, g, or t
  misc_feature (136)..(136): n is a, c, g, or t
gacaaagcagtgagaataataataataaatataatancaaanatagctgaggacttacnatattccaagcntctctaatcatnatgntantntgatacaactccatgnagtaggtaatctcatttttttcanananacggg

SEQ ID NO: 392163 - DNA, 242 bp, Homo Sapiens
  misc_feature (21)..(21): n is a, c, g, or t
ttactcttttctagatattcnatacagtgtcttatacctgagtgttgttcatgctcttttgtctacagcagcttagtttaattgaacattctgtgataaaggaaatgtactccatctgtgtcactgaatgtgatagtcgtgggttacatgtggctgttgactgagcataagaaacgaggctagctcaagggagaaactggatttttaacattatcttctttaagtcggctaccatattgatc

SEQ ID NO: 392164 - DNA, 737 bp, Homo Sapiens
  misc_feature (127)..(127): n is a, c, g, or t
atcctgcattttttaaatgttgctaaaatgagataaaagccttatgcagaagcaaccgcaggcaccccgcaggtaatgctatcgatttccctaataagtgggaaacggcttggggacccttagattngctgttggttctgttgaaatggtggaagtgatgtgaaaagtgttgctagacaacttcattattttccatagacctatctcttatttatttatttccctttaaaataggacagaggtttgctaaacagtttggccattgtagttttaacctaatattttaccttatggaaataatggagtaatttgtgtttttatgttcatattaatttttttaagtactgttaaagaatgaatagttatttttgagcacatatttgttcaactactgagtctccagagtaacacagggcactaaaatgcttttgagaaagaagtgttttattggtctgaatttacctgtttatattaattatatgtacggggaaatgtcttcttcagtcacagtggcttaaatgtacccacttatttcatgtgttttcatgctgttgcctagagaatagttttatattttctcaaatgttaataaagatattttgaagaagctgctactctttttatccccatatctcactgtaaagacaaacacttcatttgtttttaattattttcagccaattatttctttttgtctttcaaggtgatagttatttcctttgtttgaactggagatc

SEQ ID NO: 392165 - DNA, 173 bp, Homo Sapiens; identical to SEQ ID NO: 282672
  misc_feature (45)..(45): n is a, c, g, or t
  misc_feature (146)..(146): n is a, c, g, or t
  misc_feature (161)..(161): n is a, c, g, or t

SEQ ID NO: 392166 - DNA, 1000 bp, Homo Sapiens; identical to SEQ ID NO: 282673

SEQ ID NO: 392167 - DNA, 1000 bp, Homo Sapiens; identical to SEQ ID NO: 206329

SEQ ID NO: 392168 - DNA, 754 bp, Homo Sapiens
ccgcttcccaggccctgcacttccctgacctggctgtggaggctgcttctctgggaggagtgggtgctaaggggcttctccacccacccctccttcttgcctacagaggcggtggcctgttcggcaaccacgtcagctactaccaaagcgacggccggagcgccttcccccagaccttcaccactcagcgcccgctgcacatcaacaaggcgggcagcagccagggcgacactgagtcgccatcccacgagaagctggtggactccaccttcaccccgagcagctactcgtccaccggctccaacgccaacatcaacaacgccaacaacaccgccctgggtcgcctccctcgccccggctaccccagcacagtcagcactgtggagggccacggccccccttgtcccctgccatccgggtgcaggaggtggcgtggaagctcagctccaacaggtaagtgggaggctggccaccccaggcggcacacagggcccacgtgctgcaaccctcaggagacagtggaggagacggaggcctcggccagccacttgtccctcaagcttccaggaggttgctgccccagactccagcaagagcaggaggcactatgctgtctcccaagtcctgcccttgatcagacctggcaggctcagggcaagtcagcagtggcctgcggcgctggttctcccacagggccctctcctctcccacacttctgagtggcagaatgtgatcatcagatgtttgtgttccg

SEQ ID NO: 392169 - DNA, 1000 bp, Homo Sapiens
atttattgagtttcctcattcataaaatggggataataatagtaaatgagttgacacgcgctaagacagtggaatagtggctggcacagataagccctcggtaaatggtagccaataatgatagagtatgctgtaagatatctttctctccctctgcttctcaacaagtctctaatcaattattccactttataaacaaggaaatagaactcaaagacattaagcacttttcccaaaggtcgcttagcaagtaaatgggagagaccctatgaccaggatgaaagcaagaaattcccacaagaggactcattccaactcatatcttgtgaaaaggttcccaatgcccagctcagatcaactgcctcaatttacagtgtgagtgtgctcacctcctttggggactgtatatccagaggaccctcctcaataaaacactttataaataacatccttccatggatgagggaaaggagataagatctgtaatgaataagcaggaactttgaagactcagtgactcagtgagtaataaagactcagtgacttctgatcctgtcctaactgccactccttgttgtccccaagaaagcggcttcctgctctctgaggaggaccccttccctggaaggtaaaactaaggatgtcagcagagaaatttttccaccattggtgcttggtcaaagaggaaactgatgagctcactctagatgagagagcagtgagggagagacagagactcgaatttccggaggctatttcagttttcttttccgttttgtgcaatttcacttatgataccggccaatgcttggttgctattttggaaactccccttaggggatgcccctgaactggccctataaagggccagcctgagctgcagaggattcctgcagaggatcaagacagcacgtggacctcgcacagcctctcccacaggtaccatgaaggtctccgcggcagccctcgctgtcatcctcattgctactgccctctgcgc

SEQ ID NO: 392170 - DNA, 1000 bp, Homo Sapiens
gcggaaccccttgcagaaggacccccagtaccggcggaaggtcatgctcgccctcccctccgtgcggcagatcgatgccacgttcgtcaggttctgagtccttcttggctcctcatgtggtccctctcctcggaagaactgcccagccacgggtttttaacccacctgttgctcctgaggtcgtcactatatcaacagtcacaaacccaatggcaataaaggcactgacgatagctggcgcgcgcgacgccacacaccattttcagatgccgttgcaattaaatcttgccacactgtcctcctgggtgattgttgacagttattgtagccacagagagagaacataagacacgttgcgttcattcgctagaaatccctgtttccttctctcagaaggcagtcacagtccctacctgagtcgtgtgaaacacagggcctgagagtgctttacaggcattcacgggctgtccgagtggcattcgggggctggcctagctggccctagtcttttaacccagccattttcaattttttaaaaattaggtaagttaaaaaagctgggtaaaagctgaactcagccctgtgtgcttgtgttccttagagctctccttcaaagaacgccgggcagggctgactgttttcacgtgtgcccgtcagttctcgccacatcccttgcctgtgggtgaaagctcaggtgtggggagggtgtcctgtgtcccacacggtgctgtgctgctgccagaatacgagtcccattgagcctctccaaagacggcctccaaggatctgaactcttggccactggtatagtggcctcctgttctcaccccattgttattttggcttttttaatataaaatgtacattgacagacacccgaagtctggatttaatgctacctgggcatcgtcacctccccagggtctcagatttctcctcctgcagaatgagggccacatcatgtggtcaccaaggtcccttctgcctccgggactctaga

SEQ ID NO: 392171 - DNA, 1000 bp, Homo Sapiens; identical to SEQ ID NO: 114933

SEQ ID NO: 392172 - DNA, 1000 bp, Homo Sapiens
gacttaaataatgctatttcttaatcttgacttgacattgttgacttcctacaatggaagaggagttagcttctcttacactgtctttcccacaacatattatcacccccaccctcgacacccacatttcctctcctattagtctccctaagcagtttgatattggctgaaacctgcattcacagtttagtataactgtatgtttaccatttcctgttgagccctttattggtttatgattacatttcctttaggtacaacttttgatttttcctggagttaattacattgtttttctcatttgcttggttttctatgctcttgtcactactttacccaaaagtcgctgccctaagtgtaaagctcttcccaacaaagtcatgtgcatcaggtaatatgctccactttctcttcgagatgttcctgagaaccccctgtcttcttgccataacttggacatttcctggattctgaatcatattttcctcttgcttggttttctcttcttgatggagcctgtcctttagtagcctcctgagcttgaatatctaaaatgtctttatttctactgtaatattatcaaatatatatctggtctttgtctctgccttctgatatacaactcctaaaatccttgggatctctaaagtgatgtctttttgtatgctagtaagatgactgatggcggacagctcctatgtagcttcaggatagggactggacatctgaaagaccagggcatgattagaggggttgaaactttcagcccaccccccaaactcccagaggttgggggagagggactgaaagtgacgttgatcgccagtggccaatgatttaatcaatcatgcctatgtaatgagggctcctaaaaacccaaaaggacagggttcagagagcttgtggatagccaaatgtgtgggggcttccaggaaggtggacaagaacacgtccacatgctgagagaatggcacttcgcaactccttgcagacagaagct

SEQ ID NO: 392173 - DNA, 1000 bp, Homo Sapiens; identical to SEQ ID NO: 282676

SEQ ID NO: 392174 - DNA, 1000 bp, Homo Sapiens
ctccagacatcactggatgttgtatgctttccatgtgcaatgacctctggggctgcccagcgaagcaaacaacttgggccctgaggggtaaagtcaaaagcaaatagtaataatcatagtaatagtcacgtttattgagcaactactatgtgctcagatatgccaagggttttacatcaagcatctcatttaatcctcataacaaccctctaaggtggatgatatcatctccatttcacagaagcagaagcaatagtcacgtttatggagcaactactatgtgctcagatatgttaagggttttacatcaagcatctcatttaatcctcataacaaccctccaaggtggatgatattatctccatttcacagaagcagaaggtgaagcttagagaaagtgaacttgtccaaggtcacagagctggagagcagagtgttaagaatttgtacccagctgtgctgactctggagtctgtgtaatctccacaatgggggaagggcaggaggtagttctagattgttgcaggtctcctcccctccctcatcccctttgtctcggtccctgaaatccctcaaaccccgtcgcctaggctttcatctccccatcacacaggagagcctccctcctttcagggactatgacaccccggctgaggtacctaccccagattccagctcacccccgaccccagcacctgctggggcatgccacaaggccccaggctgtgtccccaaggctgtgctctcacctgaggactgtggccaagacgggccaccttgcacaccaagtggctattcaccagcacgctgtgggcagacagcgagcgatggacgaaggcaaagctggacaggtactgcatggcagcagccactccccgctgcatggccaccagctgcaggctgctgaactggccctcccgctgctgaggggaaggggcagggggcagaggtcagtgatcggagacggggagacctcaacatactgcacagcagacaacag

SEQ ID NO: 392175 - DNA, 1000 bp, Homo Sapiens; identical to SEQ ID NO: 114934

SEQ ID NO: 392176 - DNA, 1000 bp, Homo Sapiens; identical to SEQ ID NO: 206331

SEQ ID NO: 392177 - DNA, 1000 bp, Homo Sapiens; identical to SEQ ID NO: 206968

SEQ ID NO: 392178 - DNA, 423 bp, Homo Sapiens
ctgaaagcatttgcttagagcattcagagatggaatagagggaatttatgttaaccagatataattatttcttcttttacatcgctttcatttgattaatggggcaagattacttttctagttgaaagaagatgtaaataagtatgaaattattttgttgcagaatatggctcaagcctggaagatgacgtggtgggggacacttcagggtactaccagcggatgttggtggttctccttcaggtattgcgtggagattaattacagtttgattaaaaagcctgaagttggactgggctgaatctagttaagtaaggtcacttaaaattcttttaataatttgtggtacttgctgattcttactgtgatgattctgactgtatgttgcctgtgcttgtttgtgtttcagaatatctggtctaa

SEQ ID NO: 392179 - DNA, 1000 bp, Homo Sapiens
gtaattagagaaattgtggaagatagcttagtgaccttagctgccacagtaactgatagactttcttgacacttggttctatctgccctatttcttatattatttccattacctgtgctttaaattagagaaattacgtaaagatatccgagcattttcataagggaaaataagttgcataatgtatgtaataagcacattcacgtattttaaaaccatagttcaactttagatgattcctttttacctataattcttgtcatgcttattataatatgtaatctcattttttcctatttctagataatcatgatgttcctgctgctgccatatatttaggtgtaatctttatgtttaaaattttaaaagattatgtaggtatgagcacaactgagaagagctttcacttttgtgatatattttaaagataagttttaatagactcagatattaatttgcttatagattgactgagtttacgttacggcatatacatcttccagacttgcagcattctcttaaaggagacttatccatgacaatgtggagatatatggagtattcaggatcatataatctaattgctttttgttttccataaatgagaaaacagaggctcagacgtatcagatgtatttcccgaaagtctcctgcctctttctattaaattattttgtctcatgggaaaatcacttaccacatcaagatacaagaaaaagtaaaatctgtggatccttttctaacataaatacatttctttttacgtaatttttttaacctggtttacctttcttgtttgatgtcttttaacatcacatttgctttatcaaatattccttagctaaaattctaatttttattaaataattaggtttggtttcaaaatcgaagggccaaatggagaaaaagggaacgttatggccaaatacaacaagcgaaaagccattttgctgccacctatgatatatcagttttgccaaggactgacagctacccacag

SEQ ID NO: 392180 - DNA, 1000 bp, Homo Sapiens; identical to SEQ ID NO: 282681

SEQ ID NO: 392181 - DNA, 1000 bp, Homo Sapiens
cccttcttggtcttctccttctgggcctcatggcttttctgattctgcctcgagtcacacaagccatgcagaggggtctgggaagatccgaggtatctcctggagaagccatctatgatgtcattggggaaatgccgctagcaggactgtacgaggaaatcatggaggccgaggctgtgctccaagatgaggaggacggaagtgtggtgaaggtggacacagaagccgcaggctgaagtacagtggtgtgatctcggctcacggcaacctctgtctcccaggttcaagcaattcttatgcctcagcctccagagtagctaggattacagaaagaaagaacaaaaagaagagaaggagagtaaattcttgtttccaagttagacaagagagttatgattaaatgccaccttgggtccacaagtcttccataagaaaaacaatgaaaggatttctggatgattctattatgacatcacaacttgcagcagaggcagatgtaatgaggcaatacttgacattgttttcagggcatttgctcgtgtcctcggtctcttgccttggcacctgggtggcttgccacccacagcaattgtgactttgaaaggccattccaccgttctatcaatccagctgcttcaggatgatgggcaacgtggtaagaccagtgaattccacgaacatgagcccactgctgcacttctatggccgtaaagatagacaagagaagcacttctagaatggcaggataagaagctctgaaaatctgttcctccagaactgcaatgtgaacaccagctaaagtgttgaaaaatgaatggagcctcagagacctttgggacatcatcaagggtatctaacaggtacaatgggaatcacagaaagagagaaaataaggggacaaaaatactatttgaagaaataatgggtgtaaattccccaaatttgatgaaaaagatccatctacatatccaaaagcttaataaatgaatattcatttatt

SEQ ID NO: 392182 - DNA, 1000 bp, Homo Sapiens
cccgcaagcagcaggagatggtatcttggccacaacagccaaccaacgattcagctcaccagcgccatcgtcagatggcaaggtcagccccggcacgttatccataggaagcgctttaaccgtaccctctttcccagccaactctactgccatggtggacctcaccaactcacttcgagcatttatggatgtcaatggagaaatcgagataaatatgctggacgagaagctgatcaagtttctggccttgcagagaatacatcagcttttcccctcccgggtccaaccttcaccgggcagtgtcgggacacatcagctggcttctggagggcaccacatagaaggtgcgcatgtacacacctgtcaccacatcatcagatctcccctctacgtgtgcgaatggtcaccttgcctccatggagaatctgagcttccagtatctcaaacctccttgtgtgcttttcatgggcttaataaagcaccatggtttttttctgaagagagcaggaacaagatggcaaccacagctttctgatcagacttggggaagtctgctgtaactttctttcatatataagtccacttcgagacacagcaaagcagctaccagtacctttgggtatatgtagtgtactttctgcttacttgctttcaaatatttgaattagaagggcttcccgactgagtgcagtggctcacacctgtaatcccagcactttgggaggctgaggcgggaggatcacttgagcccaggagttggagaccagcctgggcaacacagtgagaccctatctctacaaataattttaaacttacccaggcatggtggcatacacctgtaatcccagctgcttggaaggctaagatgggaggatcgcttgagtctgggaggtcaaggctgcagtgagctatgattgtgccactgcactccagcctgggtgacagagtgagaccctgtctccaaataaataagtaaataaataaataaaattttaaaaag

SEQ ID NO: 392183 - DNA, 1000 bp, Homo Sapiens
cccgggttcacgccattctcttgcctcagcctcctgagtagctgggaccacaagcgcccaccacgtcagcttaatttttttgttttgtttcttgagacagagtcttgctctcttgcccaggttggagtgccgtgtcgcaatctcagctcactgcaacttctacctcctggattcaagcacttctccttgcctcagccacctctttagctgggattacaggtgcgtgccaccacacccagctaatttttgtatttttagcagagaccaggtttcaccatgttggtcaggctggtctcaaactcctgacctcgtgatccacccacctcggcctcccaaagtgctggaattacaggcgtgagccactgcacctggcctgtattcttttctttagtagagacggggttttactgtatttgccaggatggtctcgatctccagacctcgtgatccgcccgccttagcctcccaaagtgctgggattataggcgtgagccaacacgccctggccacttcttgtctttgcaacattttttagatatgtatctgtgttttttggggagcttaatttgctaatggaatctctgttattttcctaacatgcttggtggatacaagagttaagacttcctgtcccgtttagtgtaacaaaagaaagttaagaaatgtggataaaagattgtaagttagaaatggcaagataatcagctatatgaagaatcttggccaggtgtggtggctgaggcctgtaatcccaccactttgggaggctgaggtgggcggatcacaaggtcaggagttcaagaccaccctggacaatgttgtgaattcctgtctctactaaaaatacaaaaattagtcgggcatggtggcgggtgcctgtggtcccggctgctcgggaggctgaggccagaaaatcggttgagcctgggaggtggagggtgcactgagccaatatcacaccagtgcactccaacctggtgacagagagacacatcatctc

SEQ ID NO: 392184 - DNA, 1000 bp, Homo Sapiens
ccatgagctgacggtgcacgaggctgcgtgcgcccacccgaccaagacaggcagtgagctgatggagatcctggatgggatggaccagagccaccgcaaggagatgcagctgtacaacagcatcttcagcctgctcagcttcgagaagattggctacacagaggtccagttccggccgtaccgcacagacgacttcatcacgcgcctgtactatgagacgcccaggttcacagtgctgaaccagacgtgggtcctgaaggctcgagtcaacgactcggagcgtaaccccaacctgtcctgcaagcgtacgctctccttccagctcctcctcaagagcaaggtcacggcaccgctggagtgctccttcctgctgctcaagggcccctacgacgacgtgaggatcagccccgtcatctaccactttgtcttcaccaacgagagcaacgagacggactacgtgccactgcccatcattgactccgtggagtgcaacaagctgctggctgccaagaacatcaacctgcggctcttcctgttccagatacagaagtagggcggggcctcaggatgtccgaggagcccacgggcggcatcccagcaccgctgccctgtccacctggctggcagctgcttcacaggactatctgatcactttagcaaaggaggagaacaaacgaagccaacacagggcaagtctgcatgcgtgcgcgacggggcccccgcctccggctcacccccccgacccctgcctcccctccttccgagggccgccagaggctgggctgacccgaagaggagacggtgcaccaggcgccccgaggctaagagacggtggcagcaaggaggccgagaggcacagcgaccctgccccagcccttctgtgcagtcaggcggcggtgctgctccatccctgcgggttccggcggggcgcgggggccttgctgacatcagacgggatatccgaatatctgatagcaattaaaaggcagccttgtttcgt

SEQ ID NO: 392185 - DNA, 1000 bp, Homo Sapiens
gaatacaagatccttagggaacattgtgggggactttgaagggagtaggtgggacttaaggaagagtgggagaggcttaaattacagtgggaggggcacagagagcagtggccgcgcattggcgaagagcgaggagaggcttaaaaacactccatggagtgaggagactatgaagtgattaggaagattttgccacaggcgtggagccgcgagagaagggtttctaagagtaggaggattttaaagaacaatgagagtggcttagagaggtgggcagtgggagggtctcccaggggacaggtggtgagtctgggaacctgggaggagagagctgatggggagccgaccccctcacctgctcctctgtctccccactactccagagagagcccccacataccactgtattccccgccaccatggatgacgtccccgccccaacccctgcaccagcaccgcccgccgctgccgcccccagggtcccgtttcactgcagtgaatgtggcaagagcttccgctaccgctcagacctgcggcgccactttgcccggcacacagcgctcaagccccacgcatgtccgcgctgcggcaagggtttcaagcacagcttcaacctagccaaccacctgcgctcgcacaccggggagcggccctaccgctgctctgcctgccccaaggggttccgcgactccaccggcctgctgcaccaccaggtcgtccacactggtgagaaaccctactgctgcctggtctgcgagctccgcttctcctcacgctccagcctgggccgccacctcaagcgccagcaccgtggggttctcccctctcccctgcagcccggccctggcctgcccgccttgagtgcgccctgctccgtctgctgcaatgtggggccctgctcggtgtgcgggggctcaggggccggcggcggagagggccccgagggggcaggcgcgggtctgggcagctgggggctggcagaggcggcagctgcggccgc

SEQ ID NO: 392186 - DNA, 1000 bp, Homo Sapiens; identical to SEQ ID NO: 114935

SEQ ID NO: 392187 - DNA, 1000 bp, Homo Sapiens; identical to SEQ ID NO: 195692

SEQ ID NO: 392188 - DNA, 1000 bp, Homo Sapiens
cagatctttctagtcatgttggggcaccttctagtgccttccatgtgtctggcagttgaggggagctttttcctctcagtttcagcataactggaaaactcagcttctgaaatggttccatccatttttgcctcagggagaaataaatgccaagatatgaatgagaaatttcttgcacctctgaatttccatctcccagcttcttttttgctgtttgctttgtttcacaaagtctgataaagtgagacataatggatgcttatctctacaaaagaaaaaaagaaaagaaaaaaaagagagtgggtagagtcgtcaaagaattgccttatgaaataaagtccagtagaatcctaggttataattatcactgggctataattgtagaagaacagtatttctttaaccaataatttttgaattgagaattgttttataaagagtttatgttcttatatacatatagttttcaatatctgcgtatgtgaaaattaattgaaaatatgtccacagagttgcagaacttcacagccctatatcttcatgctgtcttcttgtaaaacatgctgaatctttttttactaatttccgtaaaataattttactgaaaatagttccagttagtacacactggtagtcagtcaaaatgatgatccaggtttcacaaaccttgaagtttggggcttttttccacatttcaagcttcagcaaattagtgaagtctgaattcagtttgggtatttgatttaagcccctgatcaatagcctgactaaaaataattaactgtgacttttccactttttggaccgtgtcagctaaatttaaaaagaggtaagtactatttattaagttggtgcaaaagtaattgcggtttttaccattaaaagtaatggtaaaaaccgcaattacttttgtacccacctaatagaagagtaagtcaaaaaatagcctgcgtgtatgggaggccagtgtagaagaaatggtcaacttaaaagcattcca

SEQ ID NO: 392189 - DNA, 1000 bp, Homo Sapiens; identical to SEQ ID NO: 195614

SEQ ID NO: 392190 - DNA, 1000 bp, Homo Sapiens; identical to SEQ ID NO: 195538

SEQ ID NO: 392191 - DNA, 1000 bp, Homo Sapiens; identical to SEQ ID NO: 195662

SEQ ID NO: 392192 - DNA, 1000 bp, Homo Sapiens; identical to SEQ ID NO: 282690

SEQ ID NO: 392193 - DNA, 1000 bp, Homo Sapiens; identical to SEQ ID NO: 282691

SEQ ID NO: 392194 - DNA, 589 bp, Homo Sapiens
atgagttgagttctcaattcagggaggcctcaccacctaagaacaatttttggagaatggggaggaatcctagcaaaggtctccatgtctaaggatggctgtgggttacaattctaaaggtctttttatttgcttattcaaatataatgacatttaaaaattcctggcaaattagaagtattaagttactaacttaacattttcatatagacctttgtattattttatgtaccagaatcctcaaaagcactctggagttattggcctttttttataaaaatagtgaagcagagagattaaaggagttaactgtaagaaatacaataaacattcatagcctagatttcaaattcactccttatcatactgctgctacaaactcaagataattattaaaatccaaaatagaaatgaagccctgactgaactaaatccttagcaaagataaatgaacttgcttggttttgaagagtagtgtaaagaaactggtttggaggggtctggaaggcaggtcatctgattatgattcctaactgccatgagacaatgcatgagggtgtgtgtgtgtgtgtgtgtgtgtgtgtgtgtg

SEQ ID NO: 392195 - DNA, 640 bp, Homo Sapiens
agatgagggagttggacttctcaccaagaaaaggaaaaagacagcgtgccctaaacgatgacccccatgtttgcagttgacaaatgtgtagactaatggcctcttgtcttctccctgccttcctgttctgttcccctccttcctcttgcctccctcctgccctcaaccctctggctccctagttttcggccacaacatgaagagcagcaatgacttcatcgggaggatcgtcattggccagtactcttcaggcccctctgagaccaaccactggaggcgcatgctcaacacgcaccgcacagccgtggagcagtggcatagcctgaggtcccgagctgagtgtgaccgcgtgtctcctgcctccctggaggtgacctgagggctgcagggaaggcagctttcatttgtttaaaaaaaaaaaaaaaagacggaaaaaaatgtgtcacatactattacatccacacctgcatacacactcgcaacatgtctacacacgtccacacacacagacacacagataccccaaatcctctcagaactgagaggaagctgactattgatcacaaaatggccgccctcagtgagtgaggcctaggaactttccrgaagccccatccatagatcacaagctcagtgggct

SEQ ID NO: 392196 - DNA, 1000 bp, Homo Sapiens
ttacctcaagagctccatcgtcacagaaggaggcggccaagttcgcggggggaggggaggagacagagagtcgaccagtaaagcctcaagggaaatgtagtccaaggcctgagaagcgacgttgctggtaatagaaggtaattcagtaccagcctgggcctggccgcggtgaccgaggcgggccgcgtcgcggagacttctgggagtgcttcctcgctctccgagtgcgcaagcgcagcgcaccgagtggacattttggtctttgtccgcgggtcagtacggcccctgggtccacgtggcgcgaaagtaggaggtgggatctgggcgtctcgggtcggtcggaccggggaggttaaaggggaggattcctgatctttaggggcgcggcgcgagggcagggagtgggtgtaagagcttctggcctacgtgcggggcggagatgggggcctctgaggcgggtttgagcgagtgtgaccgagtttgtcctcaaagtttgacctgatgtttgggattgttgagtgaatgtgaaactgggtgcgggattgtgtgtgattgtgcctaagagggagatgtaggagaccagcattgaggtataacgtttgagctgcacttcccttgtcgaaagtgctgataattataacggtgccatcttcctggagcgtcttttttacttgaaaattgaaggggtggaaaagctaagtggtgaataattttaaaacgagtttttatataaaagcatttctttttaattggagtggcatgcaaatcaccgtgacttttttttttaattaaacgagagtgtttcgaaggaactttagtttcggggtgcctacttcagactattcaagtccccatctttggggtacttaaatagggctgttaaccaaagccctaaactaaacagcattgtacgctttgagaacaatcccatataacggcgccagcatgagggagtcaacggttttaggttaggcacagttatcctcattttttgaagaaa

SEQ ID NO: 392197 - DNA, 1000 bp, Homo Sapiens
ctccctcctagtctgtcctgcgtcctctgtccccgggtttcagagacaacttcccaaagcacaaagcagtttttccctaggggtgggaggaagcaaaagactctgtacctattttgtatgtgtataataatttgagatgtttttaattattttgattgctggaataaagcatgtggaaatgacccaaacataatccgcagtggcctcctaatttccttctttggagttgggggaggggtagacatggggaaggggccttggggtgatgggcttgccttccattcctgccctttccctccccactattctcttctagatccctccataaccccactcccctttctctcacccttcttataccgcaaacctttctacttcctctttcattttctattcttgcaatttccttgcaccttttccaaatcctcttctcccctgcaataccatacaggcaatccacgtgcacaacacacacacacactcttcacatctggggttgtccaaacctcatacccactccccttcaagcccatccactctccaccccctggatgccctgcacttggtggcggtgggatgctcatggatactgggagggtgaggggagtggaacccgtgaggaggacctgggggcctctccttgaactgacatgaagggtcatctggcctctgctcccttctcacccacgctgacctcctgccgaaggagcaacgcaacaggagaggggtctgctgagcctggcgagggtctgggagggaccaggaggaaggcgtgctccctgctcgctgtcctggccctgggggagtgagggagacagacacctgggagagctgtggggaaggcactcgcaccgtgctcttgggaaggaaggagacctggccctgctcaccacggactgggtgcctcgacctcctgaatccccagaacacaacccccctgggctggggtggtctggggaaccatcgtgcccccgcctcccgcctactcctttttaagctt

SEQ ID NO: 392198 - DNA, 1000 bp, Homo Sapiens; identical to SEQ ID NO: 282693

SEQ ID NO: 392199 - DNA, 595 bp, Homo Sapiens
gctcttgttgaatctggccgcccctgtgtgtggcggaggcctgtctccccgctgtgggcgggggctttgtctgacccagccctgaccccccacagtacaagcaggtgtgaaggcctatctccccgccacaggccggggggctgtctgacccacaagcaggtgcccgtgtgcccgctgcaggctgggggcggtgtctgacccagcctcgcctccccacagtacaagcaggtgcccctgtgcccgctgcaggccgggggcggtgtctgacccagcctcgcctcctccccacagtacaagcaggtggagcagtacatgtccttccacaagctgccagctgacttccgccagaagatccacgactactatgagcaccgttaccagggcaagatgtttgacgaggacagcatcctgggcgagctcaacgggcccctgcgggaggtgaggcgggcgccgggcgggcgggaggcagcctccggtacagggccggcctccctctcctggagcccaggagccggtccctgagggaggcgaggtgcctaggctgcagcaggagggactcgagctagacctgcgtacacaccctcccctccccgcc

SEQ ID NO: 392200 - DNA, 1000 bp, Homo Sapiens
cagctcttataggggagccattcatcaggattgaactctcaatcgagctggacagtaataggtgggtctgtgttattccccaggtgagtatcatgacagtcacaatcctaggaaggatgtgaagcctcccccagctctcctccagttgcctgcttgggcagcagagatgatggaatgtggagtctggcgtggtctgaggcctgaatccatgtgcctcatgtatgatgctcaggcaagaggatctctcaattcaagggagagggcctgaatgagccttgctttccaggcctgtctgatggtccaggctgaagcccctcctggcttgcactgccagacctcatccagcaggagctccttggcattgactgcttcaggatagttgcttctgctctgagtgctctctaaagagcagtgctctaccatccaagctgggcttttcttttcttcttgctgatagggaaggcatgggacattgcaggatggaagtggcccccaggccttctcatgcctgggcttggtttggaaggtggtcaggtgatcaataatcctgattggcctggcattgaggagttttcctgggatgtggtcctttcggttttttaaaaattatttttattgatacacatatttgtaggtatttgtggggtgcatgtgatactttattatgtgtgtggattgtgtaatgatgaagtcagggcatttagggtcttcatcaccttgattatcatttctatgtgttgagaacatttcaagttctcagttccagctattttgaaatagacagtccattttgttagctacagtcacccaacccggctgtcagacattggaacttactcctattgaactgtgtatttgtacccattcaccaaactctctttgggctttcagttttacaactgggatgatcctgggaaaactaaagtaaatcagacacccgacgtgtgagctaggttataatatgcccagtggaccctggggacatcttagctttcagagg

SEQ ID NO: 392201 - DNA, 1000 bp, Homo Sapiens; identical to SEQ ID NO: 206332

SEQ ID NO: 392202 - DNA, 1000 bp, Homo Sapiens; identical to SEQ ID NO: 282699

SEQ ID NO: 392203 - DNA, 1000 bp, Homo Sapiens; identical to SEQ ID NO: 282700

SEQ ID NO: 392204 - DNA, 1000 bp, Homo Sapiens
gtagtccaggctggagtgcaatggcgcaatctctgctcactgcaacctccgcctcccaggttcaagcgattcatctgcctcagcctcccgagtagctggggttacaggcacctgccatcgtgcctggctaattttttgtatttttgtagagacagagttttaccatgttggccaagctggtcttgaactcctgacctcaggtgatctgcctgcccctgcctcccaaagtgctgggattacagtcgtgagccactgtgcccagccatgttctttttaaatgtaaatttgataattctttaaaattacccgcttttataattataaaagagaagccagcaccatgagtcagcatattattctgttcagttttataggtaagatacaaattttaggtgaccaaactgattttagtgacctcaatcctaaaatctaagccatttgtttagcttttaatgacattttataatgttaaagggaggactttggagctgttatctcatctagagattgtttggaacatatgtcttccagaataggttgataagctcacaatcatttattgctacgtttttgtttttgttttgagacaaggtctcactccgtcacccaggctggagtgcagtggcatgatcatagctcactgcagcctcgacctcccgggctcaagcaatcctctcacttcagcctcctgagtagctgggactacagggaggcactaccatgccctgctaatttttggatttttttgtagagacaaggtctcactatgttgcccaggctggtctcaaactcctggtctcaagcgatcctcttgccttgtcttcccaaagtgctgggattacagatgtgagccaccacacctggcctcatttctatattttgaaacacggtatgatccattctagaattctagttgttatgttgacatttttctttgaataatcttaactttgcttaaataaattaaagatttcaattctcgatggtttcaaaatcacct

SEQ ID NO: 392205 - DNA, 1000 bp, Homo Sapiens; identical to SEQ ID NO: 206333

SEQ ID NO: 392206 - DNA, 1000 bp, Homo Sapiens; identical to SEQ ID NO: 206334

SEQ ID NO: 392207 - DNA, 1000 bp, Homo Sapiens; identical to SEQ ID NO: 282702

SEQ ID NO: 392208 - DNA, 1000 bp, Homo Sapiens
ggtctttgcctttatccagtgagtttttaggtcaaaggcctagctcctttcccctctccctccccagggtctggcccccacccaggcggttccctggcagccggaggcccttcagtgtggagttgcccttcatagcagcaaccatctcaggcagaaattgggctgggcgcttctcaaacagacggcagaaggagaaggtaatctctgtcaagaaaaattatagtaaattctgatggctgcattaggactggtgctgcccctcctgccccagttggccctagcaaggggtattaacattatagaggcccaaaaagaggaaggaatttgtctagactccaagcaaggctggaactaaatcagaatccaaactaaagactgaacctaaatgttccctataagaaggttctctgcatggacaattctccattcacttccttctttccctaacactggccaccctctatgcgggggtggggatcagagaaaagtctatgaggggagcctggcacagtacatttattttgccccaccaccaccattttgtccacctctgaaaggtaagagcaacttttgggtgaagcactctaaaagagcgatttctcatgtttagtagaggaggaattgaggttggggcttttagaaggaaaatcatgcaggttctatatccattttatagctgaggacacaaggccaagaaaggaacagtggtttgctcactcagattatggcagaaccatagtgaagacccaggaaatgtccaggttctgaataaggaacttaccttgcagagtcagattctgtagcaaaaagagcacctcgctctgacagtcagcgagattcatgtcatggaagctcagtcttttcagggctaggttgtactctggataggaggcagagaccatggaccatggaccttagctttcctagagaacagtgctaggtccccacctactcctctcccttcaccattctggctgggtcctacctttgagtgtttgca

SEQ ID NO: 392209 - DNA, 1000 bp, Homo Sapiens
gaactcgtcaggaattggattaattggctgcccatctttacaagcaccacctctcacgtgcattcattggcttgtgtccacgactatcaaacctaacgcccacccagccggtccataggagtcttccactaggcccggccttacagtccacgtgactcttcagaaccgtcaatctaattctgaagccgccccgcgaatctggcactcgcgtttcattgggcctcctgccttctcagatctccttcatttgcccgcccagcacgggcagctcgcagctattgcctctgagagctgtcagtcactctgagcctcccgcccactgcccctcattgcactccgattggccacctcctacagagctcgcgattggtgtccggggtgcggcggctgcctcccattggcccgccggagtcgtccgtcacgtcggcggcgggaggggcgactctctcccccctcgtcgtcctcccagcggctgggttcccagagtgctccgcggccgtgtggagcgaggccttgttcccgcgttgagccgccgccgccgccgccgcctcctcagcttcagcctccgcgccaggcccggccccgccgcgccatgtcggactacagcacgggaggacccccgcccgggccgccgccgcccgccggcgggggcgggggagccggaggcgccgggggaggccctccgccgggcccgccaggcgcgggggaccggggcggcggcggtccctgcggcggcggcccgggcggggggtcggccgggggcccctctcagccacccggcggaggcggcccgggaatccgcaaggacgctttcgccgacgccgtgcagcgggcccgccaggtgaggaggccgagggcctgaggggcgcgctcgcgcgcgcgcgcaggcgggggagggggcgggggtcacgtgcgcgcgcgcgcgcagggtcgcggaggggggccgggccgtcgcggggtcacgtgggcggtaggcgggggcctggccttcccgctgcgc

SEQ ID NO: 392210 - DNA, 625 bp, Homo Sapiens
tgattaaaaaacatagagctactaatccaggaaagaaaaacgtaatgcttgttaaagatttacgcttcaggtcagctggtatcatgttcgttcactaagaaatggaaaaccgtatccgtattttaaagaatgttccatgttaccgtttcatctgaaacacactctcttattccctagatttcgccgccagctttctgaaccctgtaactcctttcctcctttgccgacgatgccaagggaaggacgtcctatgtaccaacgccagatgtctgagccaaacatccccttcccaccacaaggctttaagcaggagtaccacgacccagtgtatgaacacaacaccatggttggcagtgcggccagccaaagctttccccctcctctgatgattaaacaggaacccagagattttgcatatgactcaggtaggcctgcgctctgcagaattacattcaaggcactttttcacctcccttgtcacattggttagtgttggtatcagactaggtagctcctgaccattttttaataagatctttcagattttgtccgttcattgaaacttcatctacgtgtaaagatttgaactatcaggtcattttgacatgaggtgatggttgaaata

SEQ ID NO: 392211 - DNA, 1000 bp, Homo Sapiens
tcagtggttttgaggatgggccgactcttgtattgcctgctctagtacaatcagcagctaaggcggctcactttccggccgtgctacaataggtaagaactaggatgctttagacgtgtgactgggcagtgggagcccctcacatgatcccgagatgccagacagtgtctctccgcacagggcgtgtgctggtccagaggcccgtttttccagtcgccccacaccccgggtccgcgatcacgctccccccacccatagccgagcctgacgcggcggtggctcatgcgcctttccgtcccagcctttagccacggaccacacgtcccatctcaggcgccccgcccctcccccgccccccgcccccggcgcgcctccccaggctgccggctccggtgtctgagcggccgcgcccgcgagccgtgagcgatgattggctgcgccacggcggcgggcggtccgtgggcgcacacaccctccccgcgcagccaatgggcgtgcgcacgtcactgatccggagcccgcgggccggcagcccctcaataagccacattgttgcatgaaactccggcgcaggagtcccgggctgccgctggcaacatcgtgtcacccagctaagaaaatccgcgggcccgagccacgcgcctgtgaatcggagaggtcccactgcccgagtggagccgggctgagattcttctcaagttgagcctcagtgatcctgtggccgaagttagcgccttgacgtgggacaaccggacacgtcgccaggagagaactgaggcgccttctagcagttgtgacgccaaaatcacgtctccggagacccgcgccctccgccagccgggcgcaccctcgccggtagccttctttgtgcgccgtccggactcccagctcccggcccggcagccgagccccagcacaaagcagtcggaccgcgccgcccgcctcccctctcgcgtctccgcctcggtttcccaactctgcgccgtcgggccgcggcagg

SEQ ID NO: 392212 - DNA, 1000 bp, Homo Sapiens; identical to SEQ ID NO: 282705

SEQ ID NO: 392213 - DNA, 1000 bp, Homo Sapiens; identical to SEQ ID NO: 282706

SEQ ID NO: 392214 - DNA, 1000 bp, Homo Sapiens; identical to SEQ ID NO: 195903

SEQ ID NO: 392215 - DNA, 1000 bp, Homo Sapiens
cacccatgcggataggtcccgccacactcccatgtaccacttcctggtggtgctgtccctctcggagacctgctatacacgctggtcaccatccccagcatgctggctcatctgctgatggagaccaggccatctccatccctggctgtcaggctcagatgtttttcttcctgggtctgggatgcagccactgcttcctccttaccctgatgggttatgaccgctatgtggccatctgccaccccctgcgctactctatggtcatgagacccaccgtttgcctctgcctgggagccctggttttctgctctgggttctcggtggccttgatcgagaccagcatgatcttctcatcgcccttttgcggcggagaccacgtggagcacttcttctgtgacatcgccccggtgctgaagctcagctgcgccaagagtgccagcaaggcgctgggcatctttttcctgagcgtcctggtggtgctgatgtccttcgtcccgatcctcttctcctatgccttcatcgtggctgccatcgtgaggatttccttggcagccggccggcgcaaggccttctccacctgtgtggcccacgtcaccgtggtcgtagtacattttgactgcgcctccatcatctacttgcgtccggagtccggggccaaccccgaccaggaccgcttggtggctgtgttctacacggtggtgatgccactgctgaaccctgtggtgtgcactctgtggaacaaggaggtgagagtggctctgaggaggaccctggcgtggagccgtggggtttttaaataagaatctgcttggctgggcacggtggctcacacctgtaatcccagcactttgggaggccaaggcgggcagattacctgaggtcaggagttggagaccaacctggcaaatgtggtgaaacaccgtctctgataaaaatacaaaaattagccgggcgtgatgatgcaggcctgcaattccagctactgcggaggctgaggcag

SEQ ID NO: 392216 - DNA, 1000 bp, Homo Sapiens
tctgtcccctgttcccaaaggcacagctttcattcccggagaagatattgagctggtcctctgccagctcaagttgagcctggaagataactctcttttccacaacatggacttggaacatgatccatgttttgctctttaaagctgtggcccctggcttgccaccctccctagcccattgctgcctctgtctcttcaccataggcacttctgccaaactagtggagaagtcttggtctaaactgctaataatgctcttccctaaagaacaggataaaagatccaaaatactttttcttaaattcctgtcaagcctggggtccaccccgtaccccttcccacatgaacgctggaactgagatggcttccccatcatcgtctggattttcatttaacaaagtacttgttgtaaatgtgtacttcttgcctaacgtgaggaactaaaaacttgtccatgcataccccagtcctgtagaaataactgttctcgggctttaggttttccagatttccctcagagctctagaaactgagcgatggacagttgctctgcttcttcaggttggaactcttgatacatccttgtttcctgaaattccaaacttaacacctatagttctctcaggctttttttgaaaagttccttcgtttctatttctattccactctatttagctattattgtgcggcacccccaatggttcctttcctctcagcatcgctgtagcttgcctgtacccaggacatgcccttgactggcacaaaccgtgacagacatgcccttgactggcacaaaccatgacagacaaggccacctcctcagaagcggaacaacctattatcttttggcaatgggagctaacttcactgttttcttacaatacctggtttttcctatctttggtttccttttgattatctctcatccatctcagccactattctcctcccctcccttgtgtctacaacaccccattttaccaagtctcccatttaacct

SEQ ID NO: 392217 - DNA, 1000 bp, Homo Sapiens; identical to SEQ ID NO: 282710

SEQ ID NO: 392218 - DNA, 1000 bp, Homo Sapiens
tgtattacttggacttgcacaatccttggaaatgcagtttttcctttttctcttcttctctttattctatgtgggaattatcctgggaaacctcttcattgtgttcacagtgatctttgatcctcacttacactcccccatgtatattctgctggccaacctatcgctcattgacttgagcctttcatctaccacagttcctaggttgatctacgatctttttactgattgtaaagttatttccttccataattgtatgatacaaaagttctttatccatgttacgggaggagttgaaatggtgctgctgatagtcatggaatatgataggtacactgcgatctgcaagcctctccactatccaactattatgaatcccaaaatgtgcatgtttttggtagcagcagcttgggtcattggggtgattcatgctatgtctcagtttgtttttgtcataaattaaccttctgtggccctaataatgtggggagcttttattgtgattttcctcgggttattaaacttgcatgcatggacacttacgggctagaatttgtggtcactgccaacagtggattcatatcgatgggcaccttctttttcttaattgtatcatacatttttattctggtcactgtccaacgacattcctcaaatgatttatccaaagcattcttcacttcgtaggctcacatcaccgtagtggttttgttttttgctccatgcatgtttctctacgtgtggcctttccctactaagtcattggataaattttttgccatcatgaactttgttgtcacccctgtcttaaatcctgccatctatactttaaggaacaaagatatgaagtttgcaatgagaaggctgaatcaacatattttaaattctatggagacgacataacacatttggttgatgagagcacaggataaatgccatggaccatcaagactcctgtgatcaccatgatcactatggaacgcgcacatttttagtattg

SEQ ID NO: 392219 - DNA, 1000 bp, Homo Sapiens
tatcctcatgggctttccctcaagcccagaaatgcagctcctctacttcggtctcttctcagtagcctatactctcaccccgatgggaaatgcagccattgtctgtgctgtgtggtaggaccagcaccttcacactcccatgtacaccctcttgggaaatttctctctcctggaaatatgttatgttactgcaactaaactgctggccaacttcctctccacaagcaagtccatctcattcatgagttgttttgcacagttctacttcttctctttggggtatgatgagggcttcttcctttgcatcacggcctttgacaggtatcttgccatctgccgccctctacgttatccatgcatcatgactaaacaagtatgcactggcctcatcatttttgcatggtcatgtgtctttgtaatcttcctaactctggtgattctcatttcacagctatcctactgtggcccaaatattatcaaccattttatttgtgatcccgtcccattgaagatgctgtcctgttctgaagacatcatcatcacccagctcatttactccacattcaattctgtcttcataattggcacctttctctttatcctttgttcctatgctctggtgattctggctataatacggatgccttcagaggctggcaaacgaaaagctttctccacttgtgcctctcatttggcagttgtcaccttattttatggctctatcatggtgatgtatgttagtcctggatcagcacacccagtaaaaatgaaaaaatcattaccttgttcttttctgtgataacaccactctgtaatcctctaatatatagtctcaggaacaaagagatgaaagattatctgaggaaaatcttcaggactggaaaagatgttaataaaatataaataagagaattttcatttatcaaatgtaactttattatacatgaatatttgtctacaaatttattgttttatttaagaactgctataataatgagcc

SEQ ID NO: 392220 - DNA, 1000 bp, Homo Sapiens
tatatgactatagaaaagttagcactttgggaggctaaggctggcagatcacttgaggccaggagttccagaccaggctggccaacatggtgaaactctgtctctactaaaaatacaagaaaaaaaaaaaaagaaaagaaaagttaatttaacttttctgagctcagtttcctcctcgtctgtaaaatgaatatgtaacacctcactgagttcgtacaaggattaaatgaagcacttaaatgcctaattgatgcagatggctccaagaatttaacatttacgaaatattcactatattttttaggttaagggtacaaaaccattgtgagtacactaaggaatgattatagaggctgatcgaaattctgcaaaaaaagcgtaaattttacgtttcattcaagcagttcagactcacgattttaactagagtaatctggggtttgtttgcttgttttttaaggttccctaacccttggcttcttggggagtttgatgccgcactcagccccaaagtcccccttaactcccaggtttagcggcgacagggggcgcgcggttgacaagggcaggcgccccggggaagtaggagcaggggcgccggtgagccgcagccgcagccgcagccgcagcctagccccgagggagggaggaggagccgagggagacgcgggacccggagccccgcgggccaccgcccctgccggccgcgcagctgggaggatgcggacggcagcgagagcgtgcgcggccacgtgacggccgctataagagcgcacggggcagacgctcggttccccgccgtgcctcctcgctggccgcgctccctcccggtgccggcttctctgagtcaccaacctgaggctgccccggccgcctgcgcacccggcagcaccatgacaggtaccgccgcgcagcccgccgccgccagccccgggaccccggcttcctgcccagccgccgcctcccttctcctccgcctcagccccggagtgttcccggc

SEQ ID NO: 392221 - DNA, 754 bp, Homo Sapiens
tatgttgcccaggcagtcttgatcttccggactcaagtgatcctcccacctcagtctcccaaagtgctgggattacaggcgtgagccatcgcacccggcctcgcagcttttctttctctttattgtcctctctataaataccacgtgttgatgttcatagcctgtggttgctttgtggccatctacaatccatcattgcatgaggtcaccatgtctcctcaggtgagagagagagagagactggatttgctggaaccactcccacacagggcacatacttaggccgaccttttgtagtattgatgtcatcaaccatcatcttatgacagcctcttggtcctctaagtttcttgtaccagcacctgtgccaatgaagtagtggttttcactgtggtgggtattaatagtacagtatccagtctttgcttctcttactttcatttaacttgctcaaggcaaactaaaacctttcagcacctgcagctttcacgtcaatgccatttctgttttctttgagtcagtggcattcatgtatctcaaatatttttctccagggtctatgaaccaggagatgttgctttctgttttctgttacaatttgaggtctgtgctgaactccctgtttaaagcctgaggaacaagaagaatgctggttaaaaatccaggaaagtggtgataatgtagggagatctgtgatggttaattatatgtgtcaacctgaccgggctaacgaatgcccagatggctggtaaaa

SEQ ID NO: 392222 - DNA, 1000 bp, Homo Sapiens
cctctcttccttcctgttggttaggaattccaggattggaagctgcacaacgctggctaggctttcccttctgtgttgtatatctgattgctcttgttggaaatcttatcattctatttgttatctggactgataaaaaccttcaccaacccatgttctactttctggccatgctgtcagtcatgacctgagtctttctacatctactatccccaagatgttgggcatcttctggttcagccttcaggagttgtgctttgggtgctgtgttgctcaagtcttttttatccattttttttgcagtcatggagagcattgtacttcttgtcatgggatttgatcgctatgtggctatttgcaaccccttcaggtagaccaagatcctcaccaacagaattactggtgtgattgctatggttgtggttcttagaagcttatgtatgattgctcccatcatttttctcctcatgaggctgccttactgtggacatagaatcatcccttatacctattgtgagcacatgggagtggctcgtctggcttgtgccagcatcagtgtcaatgtctctcatggtcttgggaatatttttatcttgtttctggatatgtttcttatcatcatctcctatgctagaattttatgcacagtctttcacctcccttcccaagaggcccacctgaaggctcttaatacctgtagctcccatatctgtgtcatcttagcattttttggcccagctctcttctcctttctcactcatcgctttggtcatggcatcccacagtatatccatattctcctggctaatctctatatatagtcattccccctgctcttaacccagtcatttatggagttaggaccaagcaaatccaggagcgggtagaaagtctctttactaaaaattgattgaatgggagagaatttcaggttataaaagtgtaagtcctaaaaagacaaaatttgtgataaaattaataaattgtttttgccaaaatg

SEQ ID NO: 392223 - DNA, 1000 bp, Homo Sapiens
gggctatcagatgacccagaatttcagattgtgatttttctctttttaattatcatgtacatattaagtgtcactggaaatttgaccatcatcactctcaccttggtggactcccatctgcagacccccatgtacttcttcctcaggaacttttctgtattagaaataacctttacaactctctgtttccctatatttctggccaccattatcaccagacacaaaactatttcatacaatagttgtacagctcagttgtttttcttcatctttatgggtataactgaattttaccttctaacagccaagtcctatgatcgttatgtggccatctgtaaaccccttcattatatgaccatcatgaacaagagagtctgcatattgcttgtcttttgtgcttggttggcaggttcttaaatatcttccccccagttattctttttctccggttagattactgtggctccaatgtcattgatcactttgcttgtgactatttctccctattgcaattatcctgcatagggaggcacatggctcctagaagtgattggtttttactctgcaatagtaattctgcttttcactttggcattaatcattctatcctacatgtttatcattaggacaattttgaaactcccctctgctagtcagcgaaaaaaggcattttctacgtgttcctctcacatgattgtcatttccatttcctatggaagctgcatattcatgtacgctaatcactctgcaaaagaaagagcgtcgttgaccaaaggagtagctattctcaatacctccgttgctcctatgatgaatccatttatatacaccctgaggaaccagcaagtgaagcaagcctttaaggacaccatccaaaaggttatgtttttctctggtaaatgaaagtattaataaggtttaaaaaaaaccaagttacagtaaatgctttctattatatatatcctctcaacactctctttccttcattatagttaaacat

SEQ ID NO: 392224 - DNA, 1000 bp, Homo Sapiens
ggctttccctcaagcccagaaatgcagctcctctactttggtctcttctcattagcctatactctcaccctgatgggaaatgcatccattgtctgtgctgtgtggtgggaccagcaccttcacactcccatgtacaccctcttgggaaatttctctctcctggaaatatgttatgttattacaactgttcctaaactgctggccaacttcctctccacaagcaagtccatctcattcatgagttgttttgcacagttctacttcttcttatctttggggtatgatgagggcttcttcctttgcatcatggcctttgacaggtatcttgccatctgccgccctctacgttatccatgcattatgaataagcaagtatgcactggccttatcatctttgcatggtcatgtgtctttgtaatcttcctaattctgttgattctcatttcacagatatcctactgtggcccaaatattatcaaccattttgtttgtgatcctgtaccattggtgatgctgtcctgttctgcagacataatcatcacctagctcatttactccacattcaattctatcttcatgattggcacctttctctttatcctttgttcctatgctctggtgattctggctgtaatacagatgccttcagaggctggcaaacgaaaggctttctccacttgtgcctctcatttggcagttgtcaccttgttttatggctctatcatggtgatgtatgttagtcctggatcagcacacccagtaaaaatgcaaaaaatcattaccttgttctattctgtgataacaccactctgtaatcctctaatatatagtctcaggagcaaagagatgaaagattctctgaggaaaatcttcaggactggaaaagatgttaataaaatataaataagagacaattttcatttatcaaatgtaactttattatacatgaatatttgtctacaaatttattgttttatttaacaactgctataataatgag

SEQ ID NO: 392225 - DNA, 1000 bp, Homo Sapiens
gaatttgtcctcttgggcaacactcagtgtcctgatgtgcaaaatgcattatttgtcatggttttactcacatacattgtgagtatggcgggaaacttgctcgctgtggtggctattattgccagcccctcctttggctccccaatgtacttcttcctcactgcccgttatttatggatgtggcatattccaataccatttcttccaaattgattatagacttactccatgacaaaaagactattttcttcacagcatgcatggggcagctatttatagaccacttatttggtggtgctgaggtcttcctacttgtggggatgtcctacgattgctatgtggccatctctaagccactgcactatttgaccatcatgaatcaacaggtttgtatccttctgttggtggtggctgtgtctgcaggttttgtgagctgtgtgtttcaaattgttgttgtgtacactctctcattctgtggcccaatgtcactgaccactttgtctgtgacatgtacccattactggaactggcgtgcactgatacctactttataggcctcactgttgttgccaatggtctagcaatctgtatggtcatcttcacctttctactaatctcctatggagtaatcctaaacacccttaaaacttattgccaggaagggaggtgtaaagccctttctgcctgcatctcctacattacagtcactgtcctgtttcttgttccctgtgttttcctttttgttagacctgtttcaaacgttcctattgataaattcatgactgtgttttatacagttatcacacacccatgttgaatcctttaatatacacactgagaaatttagagatgagaattgctgtaaaagccaatgtaaaaaaaccctggcataaaaacttaactatagttagaatgagtgttcctcttcttttagtagaggtgtacatagacaacatctatcctgcgagattgttagacttctaagtcaattaaggtttcc

SEQ ID NO: 392226 - DNA, 1000 bp, Homo Sapiens
cacagattatgaactccgtcctccaaggacttacagatcttctagagctgcaggcgcccttgttcctggtgttcctggtgatctaccttatcaccacggtgggcaaccgtggcctgatggctctcatctggaaggatccccactttcacacccccatgtgcttatccctcggcagtttagcctttgcagatgcatgcacttcatcttctgtgactcccaagatgttcgtacattttttatctaagaatcatatgatatccctggttgggtgcatgatccagttttatatttttgcttccggtgcaaacacaggaagtttcctcctggtagtgatggcctatgactgttatatggccatatgtaaccctttgctttatcctctagtgatgtccaataccttctgcattcaattatcaggtgtttcatttattattgtttttttcatcctataacgcatgtgggtttgttatttcaattaactttctgcaagtccaatgtaatacattatttctactgtgatattttacaactgtttaaaatttcctgtactgaccctggagtaatatgctcctggtttttgtattttcagtctttatacaatctttcacttttatgactatcatcgtctcttactcctatgtcctcttggccatcctgaaaaagaagtctgagaagggtagaaggaaagctttctccacttgcagtgcccatctgctttctgtctctttgttctatggcactctcttcttcatgtatgtgtgtcctgggtctggatcagctgcagatcaggacaaaatatattctttattttacatgataataattcctctggtaaatccttttatttacagtctgaggaataaagaggtcataggtgcattgaagagaataataaataaataaacagtttttaaggcaaatttctaacttcttctttttaaactttgcaaaaatagggggcctcgagttatacaaattagccttggctttacaattttaa

SEQ ID NO: 392227 - DNA, 1000 bp, Homo Sapiens; identical to SEQ ID NO: 282713

SEQ ID NO: 392228 - DNA, 1000 bp, Homo Sapiens
gcgcgacgtacttcaatgacaatatcctcaccctgatacggaccctggtgaccggaggagccacgccggagctggaggctctgattgctgaggaaaacgcccttagaggtggctacagcaccccgcagacactggccaatagggaccgctgccgcgtggcccagttagctctgctcgatgggccatttgcggacttaggggatggtggttgttatggtgatctgttctgcaaagctctgaaaacatataatatgctttgttttggaatttaccggctgagagatgctcacctcagcacccccagtcagtgcacaaagaggtatgtcatcaccaacccgccctatgagtttgagctcgtgccgacggacctgatcttctgcttaatgcagtttgaccacaatgccggccagtcccgggccagcctgtcccattcctcccactcgtcgcagtcctccagcaagaagagctcctctgttcactccatcccatccacagcaaaccgacagaaccggcccaagtccagggagtcccgggacaaacagaagtacgtgcaggaagagcggctttgatatgtcttccttcacttcccccattgccaccccccaatcccagtacccccatcggtctgttcacatctctgtgttcatcttggcaagacctactcaatcaagtgatgatgccagttgataaacttccctggaaaacatttacagctattccatttggcaaacttgcttctctgtcaatatttcatcctcctttaaaccaggagggttattaatggcaaaagcattggtcttctttatgcttgatcagtatgactcaaattaaaagtgttctgctgtgtatatcaactcagtagcccacacccagttatctgggagctgatggttcagtcactgtattacccaaatctttcctgccagctgcctttcagacatttgttaaatcccaaccagagaccgggcagatagagagaagtaaatctgaagtgcgtttt

SEQ ID NO: 392229 - DNA, 1000 bp, Homo Sapiens; identical to SEQ ID NO: 206223

SEQ ID NO: 392230 - DNA, 1000 bp, Homo Sapiens; identical to SEQ ID NO: 282716

SEQ ID NO: 392231 - DNA, 1000 bp, Homo Sapiens
gcatctgttgctactgttgaaggcctaacaacctctgaggcaatagctgctataggcctcactccacaggcctatgctgtgatatctggggctcctgctgctatagctggatttgcagctttactgcaaactgtgactggtgtgagcgctgttgctcaagtagggtatagattttttagtgactgggatcacaaagtttctactgttggtttatatcaacaaccaggaatggctgtagatttgtataggccagatgattattatgatattttatttcctggagtacaaacctttgttcacagtgttcagtatcttgaccccagacattggggtccaacactttttaatgccatttctcaagctttttggcgtgtaatacaaaatgacattcctaggctcacctcacaggagcttgaaagaagaacccaaagatatttaagggacagtttggcaaggtttttagaggaaactacttggacagtaattaatgctcctgttaattggtataactctttacaagattactactctactttgtctcccattaggcctacaatggtgagacaagtagccaacagggaagggttgcaaatatcatttgggcacacctatgataatattgatgaagcagacagtattcagcaagtaactgagaggtgggaagctcaaagccaaagtcctaatgtgcagtcaggtgaatttattgaaaaatttgaggctcctggtggtgcaaatcaaagaactgctcctcagtggatgttgcctttacttctaggcctgtacggaagtgttacttctgctctaaaagcttatgaagatggccccaacaaaaagaaaaggaagttgtccaggggcagctcccaaaaaaccaaaggaaccagtgcaagtgccaaagctcgtcataaaaggaggaatagaagttctaggagttaaaactggagtagacagcttcagttgcaatacgtgcactggtctgtcacctcccgagattccaggatcc

SEQ ID NO: 392232 - DNA, 1000 bp, Homo Sapiens
cctctttctggattttaccgaccgttcgcgaaacagctttccacacaatggagcttcatgtcctcgtgcaggaagtactcatcgactgatgtggcagactttgctccctggcaaaagtgagtacccatggcgagctgagtcctccgacggcctcggcagggctgccgggcggccgctctccgggatgcgggttcgaggcccgcgtgctgaaggggagagcggggccaccggcgcgggctcctggagagaacgccagccaggagccagacgggcagccggcggggaagcccgggatccgcccgcctcccgcccggatgtcccttctctgaggggctaaaaatactcttaaggtgctttgcctccaccactgcccccaaccccagcttttacaaactgcactcggctcgcattcgcctttgtcaaaggcatcttcacctgtatccttgagcatgagtttcggcgttgattgtgggattctcagaatgcaaattatttgcgtcaaaataaaaagaaaagaaaaaaagagcggggagggggaaggggcgcagacaggtgatgtgatgaaagccggactcgagactctcccatcagcagcagccgccgccgcagcagcctcgcgggcatccggcggggaaagtttagggttagcaatgctgacctgaaaggtgttgctcctcccaaaagtcagcgggggtaggggcagatgagcagcctccgggccagaagccggagctggacggaggcacctaggcagaggaattgcagcccgggaggaagctggaaggagagcccgctggagaagggaggagggaagggaagaggagttggttaaagtcaggcaaactcaggtaactggagggccggcccgagtgctacggcaggggaaggcaagggctggagtgctggctctttgagtagaaaactatccttttagtgacctctacctgtatcctgggaagcaacccacactgccctgaaaacaagcactaggggattctat

SEQ ID NO: 392233 - DNA, 1000 bp, Homo Sapiens
gcgagtccacagtggagaaaaaccaattcaatgtgaagaatgtgggaaaggattttacacaatttcacaatgctattcccaccagagatcccatagtggagaaaaaccatacaaatgtgtggagtgtgggaagggctacaaaaggaggttggatcttgactttcaccagcgcgtccatacaggagagaaactgtataattgtaaggaatgtgggaagagctttagtcgggccccatgtcttttgaaacatgagagactccacagtggagaaaaaccattccaatgtgaagagtgtgggaagagatttactcaaaattcacatcttcattcccatcagagagttcacactggagaaaagccatacaaatgtgagaagtgtggaaagggccacaatagtaagtttaatcttgatatgcaccagaaggtccacacaggagagagaccatacaattgtaaggaatgtgggaagagttttggctgggcctcgtgtcttttgaaacatcagagactgcacagtggggaaaaacctttcaaatgtgaagagtgtgggaaaagatttactcagaattcacagcttcattctcatcaaagagtgcacactggagaaaagccatacaaatgtgatgagtgtgggaagggcttcagctggtcctcaactcgtctgacccatcagagacgccacagcagagaaacacctctcaaatgtgagcagcatgggaagaacattgtacagaattcattctctgaagtgcaagaaaaagttcacagtgtagaaaagccatacaaatgtgaggactgtgggaagggctacaacaggcgcttgaatcttgatatgcatcagagggtccacatgggagagaaaacatggaagtgtagggagtgtgatatgtgctttagtcaggcctcaagccttcgacttcatcagaatgttcatgttggagaaaaaccttagtgatgtgatggtgcaataaagtcttcactcagtcttcatgaaaaaaaa

SEQ ID NO: 392234 - DNA, 287 bp, Homo Sapiens
taaaatataaaggcataatgtcgttttataaattattttccaattttgaacacaactcgatttttaaagatactttacctgtttttttttttaaatgatgtaatatattagacttgaaaagtaaaagtattggagatctgtgactgaaaaaaaaaaactttatagtgattttattgtatcaagagactttctgtttcagaaattccatgagtgaaaccgtcagactggtcagtggaatgcagcaccctggctctgctggaggcgtctatgagacaacacagcacttc

SEQ ID NO: 392235 - DNA, 1000 bp, Homo Sapiens; identical to SEQ ID NO: 114938

SEQ ID NO: 392236 - DNA, 1000 bp, Homo Sapiens
gtcagcagcaaaaagatagtggtggtcttgagctctggcatggcacttcatccttggacattgccttcttgttactctatttcaatgatactcataaaagcattcggaaggctaaatttcttcccaggggcatggaggagttcatggaaagggaatctcttctccggagaacccgacaagcagatggtatctcagctgaggttactgcctcttcctcaaaacatagcgggcctgaaaataaccagtgttccctccaccctttccaaatcagcttccgccagctgggttgggatcactggatcattgctccccctttctacaccccaaactactgtaaaggaacttgtctccgagtactacgcgatggtctcaattcccccaatcacgccattattcagaaccttatcaatcagttggtggaccagagtgtcccccggccctcctgtgtcccgtataagtatgttccaattagtgtccttatgattgaggcaaatgggagtattttgtacaaggagtatgagggtatgattgctgagtcttgtacatgcagatgacagcaacagtacggctagatcaggtttcccaggaaactggaggagagtttaaaatatcagtgttaaagctgcaagtaatcctgtaccaatctgtaggttatatttcttgccttaagtgttacttaagtctcttcccccacttgtgagctagtcagtttatagaaacagttctgataccagtcccctagcatgaatcagtacagagttgacactaatcagagcccttaatgcttgggtaaaatgtcctctattttactttccttggggctttgtcaaaagtcagcagtcagtagtggtagaacttcagaaattttccaacttttcccagcctgggaaaggtgggtgtccatattttcctagtgtccatattctgacgctctataagatttggggtggtgaaaatagcttgggattttatactcctcttcttgcctcctatgtcctgg

SEQ ID NO: 392237 - DNA, 1000 bp, Homo Sapiens
ttactagaaaaaggctttaaatgaccatcttaaaagtgctgaaagagttaaagcatgggcaaaaaactaaaggaaatcaggaaaactatatatatagccatatatagttatatatatagtaatatatatatagtggtgaaaataaaaattaaaaagcacaatacttgccaggcaaggtagtatatatatatatatatagagagagagagagatatatatatatatatatagagagagagagagagaatatatatatatatatatatatacatacacacacacactatatatatagagaatatatacatactatatatagagagaatatatatatatactatatatataaacaaaattagaatataaacagggagatagaaattatatatttaaaaaagaattaaattcaggagctgaaaaatacttaagggaattcaaaaattcaccaaagaggcttaactgtagcctagaacagaggggaaagaaagcagacattgagtttgaacaccagttatttgaaattatcaagtctgaaaacaaaaaggaaagaaaaaagatgataaaaaataaaaaaatgagcctaagggacttaagggacctgaagaagtagaccaatatacacattataggaattcaaaatggagaagagagaaggggatagattatttgaagaaataatggctgaaaacttcccaattttaaggtaatacatggagataaaaatccaagaagctcaaagattttcaagtaggataaacccaaagagacccacaccaggatacattataatcaaactgttaaaagtcaacaaattttgaaagcagcaagagagcaataacttataatgtacaagggatcctcaataagactacctgtggatttcttagtgaaaaaaaccttacaagccaaaaggcagtgggattatatattttaagttatgaagtggtggggggaacttatcaactaagaatttaatctctcgcaaaactatccttcaaaa

SEQ ID NO: 392238 - DNA, 511 bp, Homo Sapiens
gtaaggagatattgagtttctgttattatgggccccacaagacaaagagctccttctgacccattccttcccatctcttatccctgatgtcactactgagctgggaatcacaggagactagagcacctctagttccatggcgagtgcatcagaagaatcctgatctcatcacctttccagatgctagggaaattactctacatactgttgctctggatcccagtcctgatagctctgacggactgattcttagggctggtgattgggatcttagggtctaaggttatggatgagttcctgaggagcagagatttgcttccccactctctcacctacccactgtatccaaggacctattgtctggcctttcccctccttaggggtggtctgaatggagagctaggttcctttgatgccttcacctcctgcacctcagactggacttcaactcctcagcagggatgctatggggtgtggggacaaacactgacactcaggttctgctttttag

SEQ ID NO: 392239 - DNA, 1000 bp, Homo Sapiens
gagaggaagtgcgaggagacaggacaagatgggaggaggcattggaatctgattttactggttgaaaggtagcgctgtcacagagctgactgatagagcttattccagggcatccttaccattcatcattgtctcactggctcctttccaaaagcttcctccattaagagggtcagagcctcagcctcctttctttctggtgacaatttcctttgttttaggggattttaaattagggtgctgaaggcctggaagaacatgggtgggaagagaatgtaactctaagtcatgtgtgtcattttcctttggggtgagagagtggctgtttgtgtaatgagacctttctctgcataacttccttttgtaagacctcaagggcctccaccagcaggtaatatttcagccatgatccagtgtggggaggcacaggtataagagggaagagcatgagctgagtgtacctgaccacagtggtccatgttcgtggcctatttgctgctatgaggatcaagacttaggggagaagtttgccagtttctaggaatctccagacattgttccccagaaccaagccttaactttggtggcatcttcttgtgaaatgtggagccagaaccacagcttaaatgttagacactaggatgatgcccactttgtgccacatgatggtggctactgcctgtaggcattttccagtgactgaaagaggctgctagtggtcgggatgagatatcatccaatttcctaaaaagactgaacccttcatattccccagaagaataacagctgttccccacctcccacacatctgcatcaagctgaagttctgtgtcctcgtgagctgatttcacctttgcacagatcttgggggaggtgatgacaatacaccctggacctcaactttctctgtctgaagctgcagggggcccctgaagggtgggggagatggcaggcccaccaggataccctgtgctgatcaatcctcttctctcttctccag

SEQ ID NO: 392240 - DNA, 1000 bp, Homo Sapiens; identical to SEQ ID NO: 282719

SEQ ID NO: 392241 - DNA, 1000 bp, Homo Sapiens
cggaggggggcgccctagtcgcggggaacactggaaatgcttcaggggcggactccgaagaccgagtattgcctcgagggactttctgcgccaccccgtaatcgcttgcgctccaggtcttcgtaggtgggggccgggtgggtgaagactgggaccctatgccacgcgcagcactcagaggagggctggggtcccagggccgcagcgcggtcagttcagtccgggctcgagcttcctagcagcgccctccttgggggctggccctgaccctcggtgccgctacgagtgggtggccagaagctggtggtggagagggagagcgtctgcaaggaacgacgaggctggcgccgggaccacgcggcggaggcgatcgaaagagaaacgaggccaggcaaggaggaggaaatccacccgatgaaggcgagctgccgcctaagagggaggagggtcctttcggctgccgctgctgctgttccgggacgccgcctggggagccagcccgctcgtaaggtgcgcgccaggtagctccgcacccagggggcgcccttcctggcccctcccagagcggccgggacggaaggagctgcgcggcgcggcgcggcgcggcgcggcgggtggcgagggcgggctgcaccccgagcgcggcgcccttgagctgcaccgcggcgcaggtttgcgagccgacttgtcagccggccaagaaaaggaagctccgtcccttcccgctcacccggcttccccaccccttgtactctaaactctgcagagggcgagcggcgcggccacggaggcgccgaggaggagcgagccgccgccgggcagcggcgtgccctcgggggagagggcgccggagaggaggcggcggcgcggcggcgagggcgcggcgcgcgatggcagctgcttagcccggcgggcgcggagcagccccgagctgtggctggccaggcggtgcggctgggcgggggacgccgccgccgttgctgcccggcccggagagatg

SEQ ID NO: 392242 - DNA, 1000 bp, Homo Sapiens
agtggacagcagtgtgtgctgatgcagggtgtggggttcaggaaaggctggaccgaggccaagagaacccccttggtctcgatagctaattctgtaggcgaaagggccagagaacacaaagcagttaaaaagtgtgtgtgcatggccgggcgtggtggctcatgcctgtaatcccagcactttgggaggccgaggtggggggatcacttgaggtcaagagttcaagaccagcttggccaacatggcaaaaacccatctctactaaaaatacaaaagttagctgagcatggtcgtggtgcacagctgtaattccagctacttgggaggctgaggcaggagaatctcttgaacccaggaggcagaggttgcagcaagctgagattgcaccactgccctccagcctggttgacagagaaagactcttatctcaaaaaaaaaaaaaaaaagaaaagaaaaaaaagaagtgtatgtatatgtgggtgtgtgcacatgtctgtgtatgtgtgcacatgtgtttgcacaagtgcatgtgtgtacatgtgtgcatgcgtatatgtgcagtgcagcagtgatggcaacccaggtgtttgctcttatgagctttgggcataaaactctccatttgaggcataaatgcccctcccatctgcttctttttgcttcaccgactcttcccgctgcccctccacatggcttaccaagccaacttctttgcctccctgggctctgcaccttgagtcatccactgcttccaccacatgccctgtacatgctttctcagttcccacccttgcttatgttggacctccagcctggaatgctgtctccaggctcacccttaggccacatactgtgtggaatgggcacagtccaaatactcctcctccagcgggctctcttcacttattcctgcctacaactagggctcagagttgtcagtggaatctcatctttacactgtcctgcattcttctcaaactcctgacctcaggtgatctgc

SEQ ID NO: 392243 - DNA, 221 bp, Homo Sapiens
ggcccggcagccgtaccgcagacgagcccgcgcccgcgccgctcaggaggctgagggaagaaaagaataatttaaatgaaatttagtttctataaagaaaacgattaaaaacaaggaaatgagcattgactattaggcacctggatgaagactgggtccagattgtcagtctcctgtaacctgcagaagccctccagttgcactaggaacattcaattgaa

SEQ ID NO: 392244 - DNA, 1000 bp, Homo Sapiens; identical to SEQ ID NO: 195726

SEQ ID NO: 392245 - DNA, 1000 bp, Homo Sapiens
agagagggtgccacgctgtgagggacctgtgttacgagtacgatggctcgcgtcacttcaattcttgaatcactgaattggaggtcagtgttacatcataacccagccaattctagttagcctgttttcttcctaacttctttaatcgttcttcataagtcacaatcgcagcccctcaccgttctgaccactgtcccctggattccactcagtttactcattatcccccttaaaatgtggagcccaaatctgaacccggaaccccaggtgcaatcccactaggacacaacacaatgggttcctgagccctttgatcctctgaatagagccccttgttgctttggtgttttgtctctgtgtgtgcttttatcatcggctgagccacgctgttaactcgcagtgagcctgtgaaccaataactagagaaaaaagatttttcccattgtcctctcgacatatattgggaaacaaattttttgatccgcgttcaagtagacagggcagaactgtccaactgctacgtgatcttttaaagacaaagttagtggcagaccatttacagaaaccagatgttctgtcttttggctctgagcatgctgctaatcttcatcatctagtgtactgaacgagatgtactgaacgagggctgcagagctgcagcaccggcaggagtaggcgctcggtaggacggggcctgcacaacctccccggtagtcagcagagcggaatctaggaaggctcctttcccgcggcgccctggaggcgggggccccaccttcccacgcaggcgctatcaagccccgcctcctcacccgcccgcggcgtggcgtcggaaagagccctcagcccctccctctctggcgctgatacccaatgggcagcctcaggcctttagcgggggcggggcaccccctggacgccgttctggttggcccgcggcccggcgcagcgcatgacgttattacgactctgtcacgccgcggtgcgactgaggcgtggc

SEQ ID NO: 392246 - DNA, 1000 bp, Homo Sapiens
taaccacagtcaaaacttctctctgtctcattggcactattcagaggtccaaaacagtttcctggtctcttggacgccattggtatatattacttctttctttctttctttttctttttctttctttttttttttttgacacagagtctcactctgttgcccaggctggagtgcagtggcaccatcttggctcactgcaacctctgcctcccgggttcaagcgattctcctgcctcagcctcctgagtagttgggattacaggcacacgccaccatgcccggttaatttttgtatttctagtagagatggggtttcaccatgttggtcaggctggtcggtctcaaattcctgacctcataatctgcctgcctcggcctcccaaagtgctgggattacaggtgtgagccaccgtgcctggccggccactagtatatattcttaatgcacttcacacaagctgaggttttcaggccacttgtgttgggaagttcttccttgagtctaacttcagatcctctttgtcatgtttgatgcccaaaggcccaggttaagttcgtgaaactgggccttgcacctcattccccccaccacagaaatggaataatttcttctggatgaaggagtgtgtctggagtatagggacactgagagaaggagggctaaagcctggcaggtcacagatgagtcagatcattctttgggaggagggcagtcatcaacaggacagtctcagaaaagggaggtcagagagcatcagtttcagcctgtacagacagcagccagagtcctcagaggggggaagatttacccagtgtcccctgttatgcagtagctgcttctgaaaaacccaggcccctgactcctggtcatggagtccttcttgtgccctgtttggaggatcctatattctgttcttattctcctggctatgtgggggtcggggagagggaggatattcagctaggcccaggtgctgcccagaccagcccgggccgtcga

SEQ ID NO: 392247 - DNA, 1000 bp, Homo Sapiens; identical to SEQ ID NO: 282722

SEQ ID NO: 392248 - DNA, 1000 bp, Homo Sapiens; identical to SEQ ID NO: 282724

SEQ ID NO: 392249 - DNA, 1000 bp, Homo Sapiens
gcagacattgtgcaagacccttgtacatgtgttcttcaatttaattttcacataaagtctatgaggtaggtcctaatatagcccccgttttacagatgaaaaaactgagcctcagatagcagatcaatacaggattcaaactgtggcccattttgttctaaatccactattctttttaccataccacactgccccctgaatggaatttctctgcaaaaatttgagtcagggtaccctgtgattcatccataccttcagttgctctttatctggaacctagtaaaaatttctatttgcctatcatccaaacatctttgaatgtcagatattttgaggttctagccaagttagggaaaacaatgaactcaaggactcccaggacaattcattataaagtcaaactagcccttcactatatagtcaaactacccccacatttacttaaacttcaagggactctacagcaagaatcagagaaaatggtgctaactggaactatttgagtggttcaggttgggggccacagccaataaggattggctctattattctggtaggctctgctgcctctttaagtaccacatgactaaaacgactgcaaacaattatactagcaggttacctttgtacagcactctatagtttacaaagtttatatacaacccccctctgaaacaccaccatttccaatttcacaaataagaaaactaaagatcagagaaagcaagtaacttgctcaaggacacttatctcaataattggtaaagtacaaatttaaaccccagctctttcacctcaaagttcaatatactactttttaagtgtgaagacactgatattgccttcattttggcaaaacaaccatgtagtgaaatactagaagtcatcaacttaactgattttatttctcactgctaatcttccaggttctgaagtgtattaggccatttttgcattgctataaaaaaatctgaagctgggtaatttataaagaaaaaaa

SEQ ID NO: 392250 - DNA, 1000 bp, Homo Sapiens
ctagttaatcttcttcattttgcaaatgaagagactaaggtcacgagagataatagttgttgaaagccacaaaatcaattaatgacatgataataccatgttacagtgcaatgaagtatcactaaagttccatagataatttgtttatttgaattagagctcaacctttcccactctaattttccaaggaagtaagcaatattattcagtggggacttttctctaacctcttagcaaaaaattgctaatcattttagacttattttgtctatattaaataataataattagcatgtatccattacttactgtattaggctgttctttcattgctataaaggaatacctgagactgggtaatttataaagaaaagatatttaattggctgacagttttgcaggctgtacaagcatggccccagcatttgctcagcttctggggaggcctcagggagattttactcatgaccttatgacagaaggtgaagtgggagaaggcacaccacatggtgagagcaggagcgagggtggggaggtgccagatacttttaaacaatcagatctccaagaactcactcattattacaaggatagcaccaagccataagggatccacttgcatgacccaatcacctcctaccaggccccacctccaacatcgaggatcacatttcaacatgtgctttgagcaggataaatatccaaaccatatcacttactatatgtcagatactgtgatgagtactttatatattttcttcccctctcatttagctcttacagcaacatcgaggatcacatttcaacatgtgatttgaacaggataaatatccaaaccatatcacttactatatgtcagatactgtgacaagtactttatatattttctttccctctcatttagctcttatagcaaccttatgaggaaggcattattagtgttccaattttcggatgaagaaatggagagtaaatgggggagtaacttaaccaaactctc

SEQ ID NO: 392251 - DNA, 1000 bp, Homo Sapiens; identical to SEQ ID NO: 114939

SEQ ID NO: 392252 - DNA, 1000 bp, Homo Sapiens; identical to SEQ ID NO: 206969

SEQ ID NO: 392253 - DNA, 1000 bp, Homo Sapiens
caccattttagaatattttcttcaccccaaaaagaacctggtacccagtagcagacattccctatttccttctagccctaggcaaccactatattgcattaacattttttttttgacttcttcaggattttttactttttttctgctaagtggtacagctccagatggatgaagtattatcagaaaattagctagcctctactgaaagctcaaaatactgattttggtgatgtgttcctttgtacaccaataaaatatttgcatttgaccacatttgagggaaaactagatctagcttttctgtggctttctcttaaagacgttgaataaatgaaaggcttcagggaatctgtctctcagggtaataattatttcctgacttgcggtgagtgtgattacagccatttcatatatatgtcttttagtgtaggattcatggagaaatgcatgattaccaaggatttattgcatacttaactcctgagctctttgttaacggttttgaaggatgttaataaaggaatgtgacaagttctgctgtccgatagttcacattccataagggcacatataagactcattaccacagagttaagtgctaaaatttgcaaatcagaaaaggaagagatctttatggactggtgtagttgaagggaggcctcatggaagaggggaggatttgcaaaagcaaagagggtatttgaagacataccaaaaaagagtaagcatgaaagtcatagaaacatacatgtgactgaggaaaatggaatttcaagtctgtttgaatttatagctagagggaaagagactgtaacagaattgatcttaaagaaaactcagtttccactactgaattttcttattttatgaacgtttctaaaaaagtaaacttgaatttatttatatgcataaaggtgtccaagctgaacttttatatactttgtggtcttacatgaggatttactttctaaaaataatctacttaaaacatgtttttcag

SEQ ID NO: 392254 - DNA, 1000 bp, Homo Sapiens; identical to SEQ ID NO: 282732

SEQ ID NO: 392255 - DNA, 766 bp, Homo Sapiens
  misc_feature (187)..(187): n is a, c, g, or t
  misc_feature (216)..(216): n is a, c, g, or t
  misc_feature (249)..(249): n is a, c, g, or t
ctgcaggaagtgcagagacttggcatctggcaggacttcccatgtaggacactggctcgccaccctatgaccaccctaaccctagaaaaaaggatgcagtactaaagtgtcattcattcaaagccactcctcttttggtattccacccattttccagacggtgacactgaggctcaggaagcagtanggacttgcacaaagccctttgggaagcangctgggaaacagtggaaggagggtgtccattanccccaaggagacacaggatctgggctctgtctttcgccttcctcccagaatacgctgccatcaactccatggtggaccagatcaactcctgtttggaccacctggaggagaagaatgaccacctccacgcccgcctccaggagctgctggagtccaaccggcagacacgcctggagttccagcagcagctcggggaggcccccagtgatgccagcccctaggctccaagagcccccaaccgggacccaaccctgcctccctgggctaggctctggcctgggcactcaccccctggcttagacaccttctcaagggctggccttcagggacccctggtgggtctgcctgcctgggccacccttcctgcctgggcctccccttggcctacctgggccagcccccaccacctggcatgccctcctggggccaagagtgggcctgcaacccacccacttgcctgcccacccaactcctgggcgctccccactctgcccaggccttgagtgtccacattaaa

SEQ ID NO: 392256 - DNA, 1000 bp, Homo Sapiens
aagagatgtgtttgcccacgttccagtgcaggggtggagcacagcccggcttgttacagatatggtgggcctgcccgggggaggtgagctcttgctgggccctgcctgggtgctagtcagggggcttgcagctggggacactgcttggttggcctgcctttttccagattgccaaacaatccttgcgacccttctgcaccgtttgcaaccgctacttcaaaacccctctcaagtttgtggagcacgtgaagtcccaggggcataaggacaaagccaaggaggtaacctgagctccctcagaggacatgggcccagagaggtacagagccttggccaaggctgtgtagcaagttgaggtttatcccagcccaaactcacagcgggtctggagggattgggactctcaggggaggggtggggtgggtaggggcatggccccctggctgttcagagctgacctgagctccttgcctactccctgggcagctgaagtcgcttgagaaagaaattgctggccaagatgaggaccacttcattacagtggacgctgtgggttgcttcgagggtgatgaagaagaggaagaggatgatgaggatgaagaagagatcgaggttgaggaggaactctgcaagcaggtgctggggggagggtgtgggaggcgggcttggtgctggattcccagcccaggacagacctcatcccacctcccggaggccagacactgggctggcatctgtgggcactaatgcatgccacaactgattactgtcaactgccttctgcatgactatgtaattatgcatgatgactagagagtggcagttaaaatatgcaaagcctgactgaaatttggaccagtgtggaggaagggaaagggaacagcatcagtaaaggcacggaggtgggaaactatgtaagtgtgcaaaggaaaagtcagatgatggtgatgataatggagagactgacagcagcagacatctttttgagcacttagtgtgt

SEQ ID NO: 392257 - DNA, 1000 bp, Homo Sapiens; identical to SEQ ID NO: 282734

SEQ ID NO: 392258 - DNA, 1000 bp, Homo Sapiens; identical to SEQ ID NO: 282735

SEQ ID NO: 392259 - DNA, 1000 bp, Homo Sapiens; identical to SEQ ID NO: 114940
  misc_feature (83)..(83): n is a, c, g, or t

SEQ ID NO: 392260 - DNA, 524 bp, Homo Sapiens
actcaccatggagtttgggctgagctggattttccttgttgctattttaaaaggtgatttatggagaactagagagattaagtgtgagtggacgtgagagagagaaacagtggatatgtgtggcagtttctgatcttagtgtctctgtgtttgcaggtgtccagtgtgaggtgcagttgggggagtctgggggaggcctggtaaagcctggggaatcccttagactctcctgtgcagcctctggattcactttcagtaacatctggatgagctgggtccgccaggctccagggaaggggctggagtgggttggccgtattaaaaccaaaactgaaggtgagacaacagactacgctgcacccgtgaaaggcagattcaccatctcaagagaagattcaataaacacgctgtttctgcaaatgaacagcctggaaattgaggacaccgccgtgtattactgtaccacagatcgtccgctatctgcaaacggagatgcttttgacatctggggccaagggacaatg

SEQ ID NO: 392261 - DNA, 1000 bp, Homo Sapiens
ttttcgggggctttacagtggtacagaagcaataggcatttagtagaactcatactttaccatacaaccattttgctttttatttccagtacactattcaataaatgacatgagctattcaacactttttaattacaaaatttgctttgtagtacatgattttgtccaactgtaagctaatataagcgttctaagcacatttaaagtaggctaggctaagctatgatgtttgctaggttaggtgtattaaatgcattttcaacttaagatgggtttattggtatgtgacccccatcgtaagtgaaggatcatctgtatatggagggaagaattgtgaaatacataaaacgtagttgactagtgcttttcagagcatctgcaaataaaattactggggccccaaacagcctgcttttgcaaggaggggagactcctcatttctaagatgtttggaccagattcagcatgagctcctatccctgcccaccccagcccagtctaagtcaccttgtaatttcatgagataagtcctcctcatcctgcttcatcctgcctgagctctaaacacacctacatgaggtacgctcacctgcctagctatcttggatgcaggatcctttgtaccatgttttaaaaatcaggagatgctcactcaaccacctctccctattaactcttactaattttcaatcagtagggaaaagtagtgcattgtctccctctttctctaagaactttaaagtttggtcactgactacttcagttgctggtcttgctttttctgttgttcagaaatagtgtaggtctgctggtagtaagcaaattagcactatgtgggtctcagggatgcctgcgttaataggatggagtcaaaatgcccaggaagaatcctttacccccagcattctttttgagctgccttaaagttgctttaaacagacagtggtgttaaaataaattaataagtaaataaatagtcctcaaaccttcctacaagtga

SEQ ID NO: 392262 - DNA, 1000 bp, Homo Sapiens; identical to SEQ ID NO: 282741

SEQ ID NO: 392263 - DNA, 1000 bp, Homo Sapiens; identical to SEQ ID NO: 282742

SEQ ID NO: 392264 - DNA, 1000 bp, Homo Sapiens
ccagtggtcttggagagctggctggccaccaaatcatactgagaggagaaaggacggaagagtggagacttgggtgatggagatgggggaaagtggacataggtgtattttgcaggtagattagacaagatgtagtgatgagtaagatgtaggggtagggcaaaaaggaaaaaccctggatgaccaggtctgtggctggggaaataggttgaagtttagtagggaaagccaggagtttcatttcagacatgttggctagacaggccttttagacatccaagtagaaatgtgaagtctgcaggcaggttgagtcgaccactgagcagaggtgtgggcatgaggagcggtcatcatagctgccactgtggggctaagtgccatcacccccagagtgcacagagaaatgatccaggctgggtgcggtggctcacgtctgtaattccagcactttgggaggctgaggtgggcggatcacatagtcaggagttcaagaccagtctggtcaacatggtgaaacccagtctctactaaaaaaatacaaaaattagctgggcatggtggtgtgcgcctgtaatcccacctacttgggaggctgaggcaggagaattgcttgaacctgggaggcagagggtgcagtgagccgagatcgtgccactgcattccagcctgggcgacggagcaagactccatctcaaaaaaaaaaaaaaaatgatctggaaggctacgtgacacccatcatttgaaacagcaaaggagacaggaggaaaatgtggcagaaaaaccaggggagaagggtgtctgtggaagccaggagaagaagaaatttccagaagattgaggtcagttggccaacgtagctgaaagatcaggtgaaatgacaaacctgcccactaccatgtttcattgaatataagatgccattgaagataagaatcaccattttatgtgcttctgaggaaaaaatgtaaacatttataatgatgtcatcaaccttcagatg

SEQ ID NO: 392265 - DNA, 1000 bp, Homo Sapiens; identical to SEQ ID NO: 282743

SEQ ID NO: 392266 - DNA, 1000 bp, Homo Sapiens; identical to SEQ ID NO: 114941

SEQ ID NO: 392267 - DNA, 1000 bp, Homo Sapiens; identical to SEQ ID NO: 114942

SEQ ID NO: 392268 - DNA, 1000 bp, Homo Sapiens; identical to SEQ ID NO: 282747

SEQ ID NO: 392269 - DNA, 1000 bp, Homo Sapiens; identical to SEQ ID NO: 114943

SEQ ID NO: 392270 - DNA, 1000 bp, Homo Sapiens
cagcacacgaagtcaaaagagattattctcttcccacagataccttttctctcccatgaccctttaacagcatctgcttcattcccctcaccttcccaggctgatctgaggtaaactttgaagtaaaataaaagctgtgtttgagcatcatttgtatttcatttgtgcgttttgtgccttgttgttttaattttttaaccacattcaagctatcctttggcttccaatgccatggtccacccagaactgcattcactggcccatgttctagttctggtcatgccgactttcccgttttcctggtgaatccctgtaatcacctgagtctcattctgtcaggtgatatccagtaagaaggcaacatgtgcggtgagaaagcccagggagtcctgggtgtgaatttttactttgccatttcttcctgtgtgacacgcggtggggcttcacctgtctgagctccagttcctcatcttgtacgtggcactgttttcttgggagagtcattataaagctaatataaagtacctgtactgtggtttgaatgtgtcctccaaaaagcatgtgttggaaactgaatccacaatgcaaccatatcgggaagtgaatcctaatggctggctggccatggaggttccaactttatgaatggattaatactgattataaaagggcttgaggttgaggcaagttcaacctcttgccctcactcacccacttgcctttaccaagagatgatacagcaaaaagactcaccaaatgccgggatcttgatattagacttcttatcctccagaaccatgaaataggctgctttgctttataaattactcagtctgcgtattatattacagcaacacaagatgggcaacctgatacttaggtttcagttagtggtagatatttttatttcaagcattcctactggagtattagtttcttcataagcccagaatctttgcattttagcaacaacaaataagtctttttttttttttttttt

SEQ ID NO: 392271 - DNA, 1000 bp, Homo Sapiens
tagccttacaatcaccagtatctgcctttgacgtcctctgagacctgctctccttcgtgcagggagtgccatgccctcgtgggtgacagcgtgctgacagagtggactgtgaatattcttcaagtacttgtggtcctgggtcatcaggggttgcattctacccagttacagagggtttcccatcgaggaagccagcagcatcagagaagtggcagggggcctttcctccgtgtgtagggccggccttgctaacccgaaacatttcctagaaatgtgctgcttgctaacagccgctgcttcactttcagctttcagagtccactgctgaatcccacttaatggagaaggaactggatgaactgaggatcagccggaagagaaaatgaagaccccagagacatttattggggagtaggatgtggctgagtgctttttttttggccagactagcggattcagtcctggaagagagtatcatataatgagacccacaggcactggcacccttgggttggcaatagaaggtgacatggaatggagaaaaccaagattccagatggggatagtaactagaaggtgcttcagatgcactgcctgcgggtgccagtctgaaaaccagaccgcacagaggcctggggctgctgatgagctttttggtgctctccacacacaagctcgcaaacacacatgtcccagaatagctctgttgggttgtgttgggagaagcggctggagttcattctctcacccccttatgttggtgtttggcgtgtgacagcagttctacagagctctgtgttggggtcatggatgagcggctctcttggctcttaaaggcaggcctctctcttcttgcctttaaagaatcctccttcctcacacctggcctcctctggcttcagcttctcagcagcaagcaccagccttccacaacaacactatatttttatgctactttcctgtttgcactactacttttttattaaacgatgttaaataa

SEQ ID NO: 392272 - DNA, 371 bp, Homo Sapiens
tttttcgtaactggcagtagtaatctggcggttgacactctcgttgcctgtataggctgatggcccactcacctttttagctgggctcctgacctgtccggccagaaagttgccactggggtaaggtggatggcgtgggggaatagggaagggcctcagcacagtttctgaacacttcttccacaccggattccggaggccgcagatagggaaagcaagggccagtagggcagttttctcttgtgttccctattcttgttgagactgtgaggatggtggagtgaccctctggctgacctttgtccctcctgccaagactttttcttgcaggactattccccacccagtgggtgagtttgcttacttggtgg

SEQ ID NO: 392273 - DNA, 1000 bp, Homo Sapiens; identical to SEQ ID NO: 195946

SEQ ID NO: 392274 - DNA, 1000 bp, Homo Sapiens; identical to SEQ ID NO: 206338

SEQ ID NO: 392275 - DNA, 1000 bp, Homo Sapiens
cttagtaaaacttgcaaaatgaaactaataaatcgttatcaataatgacaatgagggggaaagtattatacttgttgactgtgttttgttttttaaaatggtctccacaagcgctcaatttttttagaggggatattactatatagaatatcttttacaaggcttttataacattttatgctgaaaagcataagaatacgtatttctttagtagcaataattttggaacttgcccttgggcaagcgagactatttcttactatatactaaggagaaaagagccaaattcttaaagcaatatttaagaaaaaaggaatttataacaaattctcatctacatatgacactttctagccagttgtgttgagaagtgcaaagtgacggtttaaacatgtgttgggatttattgaactaattttaaaatttactattcaaactttattttgctctgatgcacattctctatgaaaaataaaagtgtgtcactggtgagtgacagctgttatgagctagaagcgcatgacttattgtgacgatgtcttgcctttctgtggtccaagttggagtacatggcaatgccctcctgctgatgtgcattaaggaaaatctaagtctaatatttggaattaagatatattttagggggaggggacagaagcaatgtaaaatagttgatttatgataaagctcagaatgtcctcttcatttattttcttgttttattttcctttctaaacagaaactgcatttaattccaaaaagtagtattcttatttattatttaaccctttgctgctgctaaaatgtgcacatattcaggctttagtttttccaaaaggcattttttttttggctgaaaaatattaaacatttgaccacagggaagaatcaagtttctaggatgtcataggtatactatgtagcactgaaaaaattgattttaggtgacagccaaaagtagtcttaaagtagcatgagaccttagataatcgacctaaaa

SEQ ID NO: 392276 - DNA, 1000 bp, Homo Sapiens; identical to SEQ ID NO: 206339

SEQ ID NO: 392277 - DNA, 1000 bp, Homo Sapiens; identical to SEQ ID NO: 282753

SEQ ID NO: 392278 - DNA, 1000 bp, Homo Sapiens; identical to SEQ ID NO: 114944

SEQ ID NO: 392279 - DNA, 1000 bp, Homo Sapiens
aaggtgctgtctgcaagaaatgctgagcgtcggggggtcgttcggtggccccagcctacagatcgcacacaagcccccgccccatccctcattggctccgctcggccagacccaccgcccgcccacttgaaaagtgatacaaccagggcgcttcagcccctccttccccgaccccggaacaactcgacgttccagcagggagcagagttcttccctgacttttgtatcccccttaatgcacaacgagccccctgctccgctctccttcagatggcggattccgtatttgcccagacttcctctttaggcccccgcttctttcccgcgtgcctcagggacagtttgccacagccctctcccctccccggtgcctcactctgcagaccccagtcctccgggctaagcaggttgtcggtgaagaaacgcgtcgggtcagcaatctcgctgagcagcatcagctccgccatctttcccccccaccccccaaccaggagacggttcccaaggcccgcctctccccatcaccaactaatcagttgactctttcaaaaaagggggcgtcccggaagctctaccgaccagtaagagacctgggtgctgagcacgtgaatcaacagatgcggatgactgtgtaggcgggcccaatgggagcacagcagcaggaagtaacttccagacagtgccataccgccaagcgcatgcgccaaacaggctccagtgataaagcgcctgggagatgtagtacccagtattaaggtccaccatctcccccagccactactaagtttagtttagacagcttctatgtgtcctcggagatagataagcccctcaaaaggggcgcactgtgaccactgctacctcccctaggaagccaaaagctgagaatgggatatgggctgaaaccttccctctggccccccacccccaaatctcacagcacagaccacaattcacaagttcctgtctcttttaaggtttaacttttaatcagccaaac

SEQ ID NO: 392280 - DNA, 1000 bp, Homo Sapiens
atgatgaggatgaaaccgcaacagatacagggtcggatatggtagattttattgacacacaattatccatttgtgaacaggcagagcaagagacagcacaggcattgttcgatgcgcaggaagttcagaatgatgcacaggtgttggatcttttaaaacgaaactttgcaggaggcagcaaggaaaacagtccattaggggagctactctggaggctgaggcatgcgaatctcttgaacctgggaggcggaggttgcagtgagccagtatggtgccactgcactccagcctgggcgacagagtgactctgtctcaaaaaaaagaaaaagaaaagaaatcagccaggcatagtcccagctaccagggaggttgaggcaagagaattgcttgaacccaggaggcggaggttgcggtgagctgagactctgtctcaaaacacacacatacacacatacatacacacacacacacacacacacacacacaccctgaatgggtgggtttaaatgaagattaaatccaagagggaaaataggtaaattggaatatcaagaaatgatctagagtgcagcacagaaacaaagaaagaaaggctaaaagatgtgaaaaagtgggtgagaaggactaaaacatgctcagactggagttccgttaggacaggagtgagaaaatgccctaactgacgccacaggagcagcagagacgcatcctcactggacctcacccaaatcgcaaattcatgagcaaaacaaatcattgttgttttaggccactaagtttaggtagttttttatgaagcagtagataactggaataagttgtgataccaggagtgtgatgtcgccatattaaaacacacacacacacacactcacacacatacaacctaaaaatgtaacattggctttgggaccagatggtgagtggaagccaaaagggcttgcagaggctgctggtgaggacttaaaagaaatgcaagagaggcttattggaatctaga

SEQ ID NO: 392281 - DNA, 1000 bp, Homo Sapiens; identical to SEQ ID NO: 114945

SEQ ID NO: 392282 - DNA, 1000 bp, Homo Sapiens; identical to SEQ ID NO: 282756

SEQ ID NO: 392283 - DNA, 1000 bp, Homo Sapiens; identical to SEQ ID NO: 282758

SEQ ID NO: 392284 - DNA, 1000 bp, Homo Sapiens; identical to SEQ ID NO: 282759

SEQ ID NO: 392285 - DNA, 1000 bp, Homo Sapiens; identical to SEQ ID NO: 282760

SEQ ID NO: 392286 - DNA, 1000 bp, Homo Sapiens; identical to SEQ ID NO: 282761

SEQ ID NO: 392287 - DNA, 1000 bp, Homo Sapiens; identical to SEQ ID NO: 282762

SEQ ID NO: 392288 - DNA, 1000 bp, Homo Sapiens
  misc_feature (334)..(334): n is a, c, g, or t
  misc_feature (428)..(428): n is a, c, g, or t
  misc_feature (441)..(441): n is a, c, g, or t
  misc_feature (475)..(475): n is a, c, g, or t
  misc_feature (789)..(789): n is a, c, g, or t
gctcttcagataaattcatgtttcatcattttctttgccttcaagttactgagatcatttttggcaagatctgtatcattaatgctgtgttaggaaagaaaagattatgactccacattttactttcaaggttgaagagttaaactgtttaaaaagagtgtatgttatcctgtaaacagcagtatcaggctgtagaatttgtcttctgaaagcagggaacttatatatagcaaagaacttcatagtgctcccatttcttgacaaaacctctcgagaagctcttgattgaaagtcttggctttcatgaatctggcagctttcacaatagtggatntttcatgacaaatcatcttacacagggaattattcaagggttggcacttgaaacagtagaatactttcacaacaagagataagatttctttcangattgatgacagncttgcaccctagcgcatactgatgaagagagcantgggtgaccatgacatggagagcttctgtctttaccagtgccccaatatcagatgtgttgtctggcagtaaggtgtactgtctgcctacagaatactgaggtttcttcaggagaagttttttggtaaagaaactttaccattttgaaagtgttaatgttttctgaagcttccaaaaagattccaaaatgggaatgtttccttgattgtgtcaccatgcttgcatttgatgaaaacttgtagccggctatactgagaaatcatatctgaagaaaggtggtacttccaatctttttgtgacctactttattattgnttttttaatgtcagggttttttttggaatggagaaaagtatttgatagaggtattgcaacagtcttattcttcttcatgctacaagtatatttgactctttctaagatacttgccttcactgttcaactgtgtgactttttgtttgtttagcattacaatcaatatcctagtaggatgatttaatcaatgatttttttttttaaaaaaaaa

SEQ ID NO: 392289 - DNA, 1000 bp, Homo Sapiens
  misc_feature (329)..(329): n is a, c, g, or t
  misc_feature (813)..(813): n is a, c, g, or t
  misc_feature (897)..(897): n is a, c, g, or t
  misc_feature (930)..(930): n is a, c, g, or t
  misc_feature (944)..(944): n is a, c, g, or t
gttcgagatcaccctggccaacatggtgaaacctcatctctactaaaaatacaaaaattaaccaagcatggtggcaggtgcctgtaatcctagctactcaagaggctgagacaggaaaatcacttgaacctggtaggtggatgttgcagtgtgccgagatcgtgccaccacactccagcctgagcaacagagtgagactctatctaaaaaaaaaaaaaaaaaaattaaaaacccaatgaggtggctactgttatcatccccattttacggatgaggacatgggtacatagagattaagtaacttgccaaagatctcacaactggtaagnggcagagcaaaatttgaaaacaaacaatctggttccagaaactgtacttttaacctcatgatagcttcctgaggaatttatgatctgagtatatatagtaagtacctcccctttcagggtaaggcagtaggtaatggtgaacagggaagcaaaaggtgactcaggttgagtaaacaacaccaagcatatctgactcaaggaatgcttcagaggccaggggtgcatgcctgtaatcccagcaccttggaaggctgacacaggaggatcactggagcccaagttcaagaccagcctgcacaacatgacaaaaccctctctttacagaaaataccaaaattaggtgggctttgtggcgcatgcctgtagttccagctacttgggaggctgagagttgggagaatcacttgagcctgggaggtcgaggctgcagtgagctgtgatcgtgccactgcactccatcctaggcaatagagtgagactctgnctcaaaaaaaaaaaaaaaagaaaaagaaaaagaagaaaaaaaggaatgcttcagtctgctccaaagaaaagaatggagtaatgngaagtattaaatgtagcaagatgccactgcagnaagctcacacctgnaatcccaggcactttgggaggctgagatgggagggatcacttgagcccaggaagcc

SEQ ID NO: 392290 - DNA, 1000 bp, Homo Sapiens; identical to SEQ ID NO: 206970

SEQ ID NO: 392291 - DNA, 584 bp, Homo Sapiens
agcccggacgccccacgccgcgcgtacgcacctccttggcaatcaccgcgatgcacaccgccatcttgggaggctcggcgccaggcaccgcgtcacgtgacccgccgctggtcacgcggcctccaaagccccgccccatccgcacacagctggctcaggccccgccccactggtcacgaggcagtccaggccccgcctcccgtccctccgcggactctggccccgccccgcgagtcacgtggccgtccaggccccgccccgcagcccagccggaagggccggcggacgctcgctaggtcggctcgctggccggggctccgcggctcccgtggttgccatggcggcggttgtcgcggcgacgaggtggtggcagctgttgctggtgctcagcgccgcggggatgggggcctcgggcgccccgcagccccccaacatcctgctcctgctcatggacgacgtgagtgcgggcggtgggacggggcagggccggggtggggcggggaggggaggggcggatggagggaggagcgaggtgggggaagggcgggcggggtggggggagaggtgaggggaggccccttggg

SEQ ID NO: 392292 - DNA, 1000 bp, Homo Sapiens; identical to SEQ ID NO: 282765

SEQ ID NO: 392293 - DNA, 1000 bp, Homo Sapiens
agcgcttccgaaagaagtcttgggaggtgtaccagggagtgtgccagaaagggggctgcaggtcagaacccattcagatggagaactccatgggcacactgcggacctccatctccgtggaacgccagattcacaaactgcaggactgggcagggagcagacagtgagcaaacgccagcagggctgctgtgaatttgtgtaaggattgagggacagttgcttttcagcatgggcccaggaatgccaaggagacatctatgcacgaccttgggaaatgagttgatgtctccggtaaaacaccggagactaattcctgccctgcccaattttgcagggagcatggctgtgaggatggggtgaactcacgcacagccaaggactccaaaatcacaacagcattactgttcttatttgctgccacacctgagccagcctgctccttcccaggagtggaggaggcctgggggcagggagaggagtgactgagcttccctcccgtgtgttctccgtccctgccccagcaagacaacttagatctccaggagaactgccatccagctttggtgcaatggctgagtgcacaagtgagttgttgccctgggtttctttaatctattcagctagaactttgaaggacaatttcttgcattaataaaggttaagccctgaggggtccctgataacaacctggagaccaggattttatggctcccctcactgatggacaaggaggtctgtgccaaagaagaatccaataagcacatattgagcacttgctgtatatgcagtattgagcactgtaggcaagagggaagaaagagaaggagccatctccatcttgaaggaactcaaagactcaagtgggaacgactgggcactgccaccaccagaaagctgttcgatgagacggtcgagcagggtgctgtgggtgatatggacagcagaagggggagccaggttccagctcaccaatactattgcacaccacctgtcctgcctc

SEQ ID NO: 392294 - DNA, 1000 bp, Homo Sapiens
cattttagggtgtttgccagcttcccagtaaaaatgatgaaaaagaatatccacacagaagaattgatatcaggtattgttcagactttgttgctgacctgttaacttttccaaacttgtctcgttttctccctccctgtttgtatcttggagttcacattcatatctagagcctttttttactcccaagagccatatgttcttgccaaatgcaatgttagatccaaagtatgtaaagaataatgactgtctacagactccaatttattttctctagatttgcacctcaccatgatgccttccacagctcaaaagtcatttcctgcctgggctaagttagttgtaataggtgataatgcaatttcatttctccacatctctttcagaacaaagttcacagaaacctaaacaaattacaaggttggggtgatttgagcagtctacctcatgatagtcttctcttcaaattattagaccacttaggcttatctttggtattttgttccttattgattttaggagtcctatatttgctaaacttgaaatgcatggtaaaaaaatgtatctactgtccattttttttaggttgatacccaaagatcagtattactgtggtgttctctatttcactgggagtgatattttcaataagaatatgagggctcatgccctagaaaagggtttcacaatcaatgagtacaccatccgtcccttgggagtcactggtgagtgtccatgtgtgtattagagatcatctctcatctggagagaaggttattttcaaagatactttggtttagcaaaccttctaataactatgccagttagtgtagtttctttgtattttagtccttcaggcaacggagagaggatttaatgcataacatgctcctaggccctcagttgagcatcaagcagcgttagttccagctttgttaaaatggattaaatccttgcatgctcagtaaaatatcttattcatcttaaaagggttttcacc

SEQ ID NO: 392295 - DNA, 1000 bp, Homo Sapiens; identical to SEQ ID NO: 282768

SEQ ID NO: 392296 - DNA, 1000 bp, Homo Sapiens; identical to SEQ ID NO: 282771
  misc_feature (249)..(249): n is a, c, g, or t
  misc_feature (736)..(736): n is a, c, g, or t
  misc_feature (940)..(940): n is a, c, g, or t

SEQ ID NO: 392297 - DNA, 1000 bp, Homo Sapiens; identical to SEQ ID NO: 282772

SEQ ID NO: 392298 - DNA, 1000 bp, Homo Sapiens; identical to SEQ ID NO: 282773

SEQ ID NO: 392299 - DNA, 1000 bp, Homo Sapiens
taatacatcatatcaatacaataaagaacaaaacatgatcatctcacatgatcatctcaatagaaaagggaaacatttcacacaatgcaagactaaaatattgtttataaaaaactaggaatggaagggaactttctcagcttgataaagtgcatatacgaaaaacccacggttaatacatgttgagcatcccaaatctgaaagtccaaaatccaaaatgccctaaaatccaaagctttttgagtgctgacatcacgagagaaaatggcctgaagcagcatcttcctgcaaccttttatatgacatttactcacattgagtgaaaaaaatgggttcaatggattggaccagaaatcaggaggtaaagtgtactagtgagaaggagatgagaaatcatgtgaattaagagagatgatctcagtttctgattttccagttcccaatatatttataagaggtctgggtgtattttatttttcacttttgaatgtctatgaagttgtcctttatagtcttccagcaaaaatgtttttatttgccctcatttgggaaaacttttttcatcactgaataatccctgaccagcacaaaaattaaatgggggtaatgtcatgtatataatataaactcttaaagataatgaatacatctacttaaaaagaaaaatgttctttctcttgtggaacttaggtttcagaatggaagtgtattttatattggccaattggactggctgtgaaagaccagtaaccaagcaagagaagtagatgttgctttaatgaggtataaactatatcttgttaaataggtcttatcttagacaagtagtataaatgcacacccaaacatcattcatttgcaatacacaggcatttagaagtgactcacatggattttttccttttattttggaaaggattaatctaagcttctgctgtgtatggacctgtggctacattacaaaattcagttgtgaagctataaaatcaattagtctaga

SEQ ID NO: 392300 - DNA, 170 bp, Homo Sapiens
gtgaactcaagagtagaatgcttccttagcttccctccagagtcaggttttgtgtttctagttcccaagtgcacagcaggagtagtgatgtgcctcactggcttctcatttgcattaagctgtgagcttctttagcgtgggacaggaccctgctcccattgcattctcag

SEQ ID NO: 392301 - DNA, 1000 bp, Homo Sapiens; identical to SEQ ID NO: 282774

SEQ ID NO: 392302 - DNA, 1000 bp, Homo Sapiens; identical to SEQ ID NO: 114947

SEQ ID NO: 392303 - DNA, 1000 bp, Homo Sapiens
aatttatagatcatttgagatgttgagttactttagtttagttttgttttgttttttcaaataagtagagactattgtaaaaaacgagaaaggaaaatgaaatgtgcgtgttgatagcaataatttgtttcttttaaagattctaaaaggtctgagacctgtagcattaattatttgagtgccctcccttctcccctcccctcccttttctcttctcttttttcctctcctctccttctcctttattcattgttttgcttttggagtaggtgttgttcaagtatctgtggtttggttctggcattttgttcccaccatccccttcccccattaacttcccccctgcttgccatcctgcagtagtataaatcatgaataaaaaataattttgctgttgtagtatacattggagaaactggcaggttttatttccattattttatttccactatatctatgataagatgcaattataaggagagaagtgactgttttttattgataaggcaagattttcagaaaaatgagtaaaataattaatgaaacatatttagagcacttaatggtctctgttttcaatataattcttgatttcatttttctctgggaatatattggccttctacagctattactgaattatagaaactggtttatttctggcagaaagctgcagtgccacctgagttccaaattttaccattctttgtaaacagttggatggattatgataaagaagatgctaccaatgaaatagaaaaccaacgagatgagaagactgtgatcctcatgtactcagaggcacttccctcctaagtcaaagaccatcctcactgactatgtgccaacgcctcgtttcaggcttgtgactcaacaaagggcttttccattgatagaagcagtttgggatttgtagttgcgacttcttcgatagttacctgcacgtccattgctggcaactgacttgtcattaaaacctggctctttggttaaggaaaaa

SEQ ID NO: 392304 - DNA, 1000 bp, Homo Sapiens
  misc_feature (904)..(904): n is a, c, g, or t
  misc_feature (960)..(960): n is a, c, g, or t
  misc_feature (982)..(982): n is a, c, g, or t
cgagtccctgaagagagaaggcaaagaacctctggtgttgaaaggtggacttagtagttttaagcagaaccatgaaaacctctgtgacaactccctccagctccaagagtgccgggaggtggggggcggcgcatccgcggcctcgagcttgctacctcagcccatccccaccacccctgacatcgagaacgctgagctcacccccatcttgcccttcctgttccttggcaatgagcaggatgctcaggacctggacaccatgcagcggctgaacatcggctacgtcatcaacgtcaccactcatcttcccctctaccactatgagaaaggcctgttcaactacaagcggctgccagccactgacagcaacaagcagaacctgcggcagtactttgaagaggcttttgagttcattgaggaagctcaccagtgtgggaaggggcttctcatccactgccaggctggggtgtcccgctccgccaccatcgtcatcgcttacttgatgaagcacactcggatgaccatgactgatgcttataaatttgtcaaaggcaaacgaccaattatctccccaaaccttaacttcatggggcagttgctagagttcgaggaagacctaaacaacggtgtgacaccgagaatccttacaccaaagctgatgggcgtggagacggttgtgtgacaatggtctggatggaaaggattgctgctctccattaggagacaatgaggaaggaggatggattctggttttttttctttcttttttttttgtagttgggagtaaagtttgtgaatggaaacaaacttggttaaacactttatttttaacaagtgtaagaagactatacttttgatgccattgagattcaccttccacaaactggccaaattaaggaggttnaagaagtaattttttttaagcccaaccattaaaaatttaatacaacttggtttctncccctttttcctttaaagctantttgtaaaagtttatgag

SEQ ID NO: 392305 - DNA, 1000 bp, Homo Sapiens; identical to SEQ ID NO: 201597

SEQ ID NO: 392306 - DNA, 1000 bp, Homo Sapiens; identical to SEQ ID NO: 282777

SEQ ID NO: 392307 - DNA, 1000 bp, Homo Sapiens
gtggcaggggatatgctacccaactcaactgagcgggccatcactattgctggcattccacaatccatcattgagtgtgtcaaacagatctgcgtggtcatgttggagtcccccccgaagggcgtgaccatcccgtaccggcccaagccgtccagctctccggtcatctttgcaggtggtcaggcctataccattcaaggacagtatgccattccacagccagatttgaccaagctgcaccagttggcaatgcaacagtctcattttcccatgacgcatggcaacaccggattcagtggcattgaatccagctctccagaggtgaaaggctattgggcaggtttggatgcatctgctcagactacttctcatgaactcaccattccaaacgatttgattggctgcataatcgggcgtcaaggcgccaaaatcaatgagatccgtcagatgtctggggcgcagatcaaaattgcgaacccagtggaaggatctactgataggcaggttaccatcactggatctgctgccagcattagcctggctcaatatctaatcaatgtcaggctttcctcggagacgggtggcatggggagcagctagaacaatgcagattcatccataatccctttctgctgttcaccaccacccatgatccatctgtgtagtttctgaacagtcagcgattccaggttttaaatagtttgtaaattttcagtttctacacactttatcatccactcgtgattttttaattaaagcgttttaattcctttctctgttcagctgttgatgctgagatccatatttagttttataagcttctccctggttttttttttttttggttttttttttttggctcatgaatttttctgtttgtcatggaaatgtaagagtggaatattaatacatttcagtttagttctgtaatgtcaggaatttttcaaaaaaattaaaagatggactggagctttttctttgtgaatagaaactggatgcc

SEQ ID NO: 392308 - DNA, 469 bp, Homo Sapiens
  misc_feature (449)..(449): n is a, c, g, or t
aaatgcaaggaaaaaaattacatgcggaacggacaaaatgttctcagagattacttcagaaaaaaaaagtgaaatgcagattgtacttcttcctttagtgcagagacgacttttatttccgccccctcccctccacattcctgacctctccctcccccttttccctctttctttccttccttcctcctcttccaagttctgggatttttcagccttgcttggttttggccaaaagcacaaaaaaggcgttttcggaagcgacccgaccgtgcacaagggccatttgtttgttttgggactcggggcaggaaatcttgcccggcctgagtcacggcggctccttcaaggaaacgtcagtgctcgccggtcgctctcgtctgccgcgcgccccgccgcccgctgcccatgggggagatgcagggcgcgctggccagagcccggctcgagtncctgctgcggccccgccaca

SEQ ID NO: 392309 - DNA, 1000 bp, Homo Sapiens; identical to SEQ ID NO: 282783

SEQ ID NO: 392310 - DNA, 796 bp, Homo Sapiens
acactattttgattgctatagtattgtattaaattttgaaattaagaagtgttcgtttttgttcattttctttcttgagatagagtcttgctctgtcaccccggctggagtgcagtggcacaatctcggctcactgcaagctccacctcctgggttcaggccattctcctgcctcagcctcctgagtagctgggactacaggtgcccgccaccacttccagctaattttttgtatttttagtagagacggggtttaactgtgttagccagtatggtctcaatctcctgacttcgtgatccacctgcgcctggccctttctttatttgtaaaatacatcttctattttaaagacagagggtttatgtgcagatttgtcacttgggtttaatactcccaggaggtgaacatagtaccccacaataagtagtttttagctcatgccccacctcctttcctctcacatctagctcacatttatgtccatatgtactcagtgtttagctcccacttataagggagaaactgcaacacttggtcttctgtttctgagtaaattcacttagaattatggccaccagctacatccatgttgctgcaaaggacatcattttgttctttttttgactccatagtgttccattgtctgtatacaccacattttctttatccaatccaacactgatgagcacctaagttgattttatgtctttgtgttcccagacgaaaccgatgattgggctgcttattctcatgggccagtaatgagatgcagataaactgggaaagaagagcatt

SEQ ID NO: 392311 - DNA, 1000 bp, Homo Sapiens
tcagaggccaaacacataattttatttccatttcagatggtactttgataggttgtgactctgaaatgggttatgtaaagagtattaaagacaaacaaagctgggcattagttagaactttaaggatagatgttaaacagtaatatactatcacaatagggaaaagggtcccatgtgaactgaactcaacttggatttgtgcaaaggtgactaggcatttcacagcgtgaatgggagaatagggagaaggccagcctagacttagaagagtcaggaatgtgaaaaattacaaaaagcggaaagtggttgatgtgaaacccctctgggtttgctaactggtgctttttgaagtaagactcttaccctcccacagagactgggagtcagggccctgtgttcaggggttcgctggaacaaacagttaattctttcggcagctttgagttttcttaagcaggcactttaaggtgagctaggatcaacttagggatgtggccttgagctgtgagaaactgtgttagtgtttgttcaagtctttataggcaaaggttgaggcctagttgagaagggggctcggaggagcttagctagagtttggtcgagaaaagaatctttgttaagagtttaaagcttttttttttttttttttttttttttttttgagactagtgctttctctctttcccaggctggagtgcagaggcacaatcatgtcttactgcagcctcaacttcctgggcttgagcaatcctcctgcttcagcctcccaagtagctatttatttttgagatggggtctcattctgtgagtgcagtggttggaacacagttcactgcagcctcagcctctgaggctcaagctgtctttccacctcagtcccacgagtagctgggactatgagtgcacaccactatgcctggctaatttttataactttttacagagacagggtctccctgtgttgcccaggctggtctggaactcctgggctcaggtgatc

SEQ ID NO: 392312 - DNA, 1000 bp, Homo Sapiens
ggtcagtcgatcgatcgatcccattttcgtcgtccccgttttgaaaacgtcgcgtcgtaaaggctttccccgtgtttgcgtcccgacgtacgtagggggccaagtcgatcggtaaaaaaacgtccgacgtacgatcggatcgacggactttgcagctggactgcatccgatcatgtcgttacgtcgatcgaacgtttgccccgttttgcaaacattcgtttcacccgtcccgtcgttttggggactcccaaaagtctacacccgggcaaagtcttcgtcgatcgatagtcgtaaattgccgtcgatacgtttcgtggtcgactgacgtacgtacgttcgtcagctgacgtttcgatcgtacgcagtcagtcaaagtcgtcagactcccattttaaagtctcccgttttgcccgaaagggtcgtttcgtcgagctgctaagtctcgtcccgttaccccgtcccatttttgaaagttgtttgtacgtccaaacgtccttcgtcgttcgtagtaagtcgtacgtcgatcgtacgtcgttcaggtaccctacgtacgtaccattactacgtacgccagctacccgatcaacgatcaactatccagccgaaggagtaaaggtgctgcaatgatgttagctgtggccactgtggatttttcgcaagaacattaataaactaaaaacttcatgtgctgcagtacgacttgcagtcgatcgatcgaacctgcacttgatttacgggtctacgtaaacgtaaacgtacgtaccccttttgcacccagcccgggacgtcgtctgatcgatctttcaaagtcgataaacgttccgatatgatacgtacgatacgatattcgatacgtacgttcccgtttacctaaactaaacgtacggatcctttaccctgctcccgtaaagggcttttgcagctagctgactcccattttgcatcaaagtccgtacgtacgtttacgtcgatcgactgactttacgtcgtaccagaattc

SEQ ID NO: 392313 - DNA, 1000 bp, Homo Sapiens; identical to SEQ ID NO: 114948

SEQ ID NO: 392314 - DNA, 1000 bp, Homo Sapiens; identical to SEQ ID NO: 282785

SEQ ID NO: 392315 - DNA, 1000 bp, Homo Sapiens; identical to SEQ ID NO: 206345

SEQ ID NO: 392316 - DNA, 1000 bp, Homo Sapiens
aatggcgcaatctcggctcactgtaacctctgcctcccaggtttaagtgattctcctgcctcagcctcccaagtagctgggattacaggtgcacgccaccatacccagctaatttgttttgtattttggtagagacaggtatcaccgtgttgcccaggctggtctcgaactcctgagatcaggcaatccacccatctcggcctcccaaagtgctaggattattggtgtgagccaccactctcggccccatcttttctatcttttatcctcccatggcctgtccccttgactcagattctttttgtttcttcttcttcttttttttttcttttttgagacagtgtctttctctgtcacccaggctggagtgcaatggcatgatcatagctcactgcagacttgatcttctgggctcaagcaatcctcccacttcagcctcctgagtagctgggactgcaggcatgcaacagcacagccagctaatttttaattttttttagagatggtggagtctctctttgttgcccaggctggtctcgaactcctgggctcaagggatccaccctcctcagcccccaaagtgctaggattacaggcgtgagccactgcacctggcctggcttaggttgttgacagttggaaagacatctttctgtgcaggtatctggctaaagagtctcaagggtctgccagtcccaacttgaagaccccctagactggggaatcttctatcatggctgtaatgcactgttattaatgttccctgttacactgagagaaaagtcagtggctccacaacataataatgcttaaaacatgccatttcttcagtgtttctctatgaacactacacatgcattattttatttaatccttgctacaattctatggagttagaatgaatctcccattcctagacaaggaagcaaactcaggttaagtgactgactcaaggccacacatctatgtggtagggctggaagattctgacattcagagg

SEQ ID NO: 392317 - DNA, 1000 bp, Homo Sapiens
tattcgcctacacaattctccgatccgtccctaacaaactaggaggcgtccttgccctattactatccatcctcatcctagcaataatccccatcctccatatatccaaacaacaaagcataatatttcgcccactaagccaatcactttattgactcctagccgcagacctcctcattctaacctgaatcggaggacaaccagtaagctacccttttaccatcattggacaagtagcatccgtactatacttcacaacaatcctaatcctaataccaactatctccctaattgaaaacaaaatactcaaatgggcctgtccttgtagtataaactaatacaccagtcttgtaaaccggagatgaaaacctttttccaaggacaaatcagagaaaaagtctttaactccaccattagcacccaaagctaagattctaatttaaactattctctgttctttcatggggaagcagatttgggtaccacccaagtattgactcacccatcaacaaccgctatgtatttcgtacattactgccagccatcatgaatattgtacggtaccataaatacttgaccacctgtagtacataaaaacccaatccacatcaaaaccccctccccatgcttacaagcaagtacagcaatcaaccctcaactatcacacatcaactgcaactccaaagccacccctcacccactaggataccaacaaacctacccacccttaacagtacatagtacataaagccatttaccgtacatagcacattacagtcaaatcccttctcgtccccatggatgacccccctcagataggggtcccttgaccaccatcctccgtgaaatcaatatcccgcacaagagtgctactctcctcgctccgggcccataacacttgggggtagctaaagtgaactgtatccgacatctggttcctacttcagggccataaagcctaaatagcccacacgttccccttaaataagacatcacgatg

SEQ ID NO: 392318 - DNA, 1000 bp, Homo Sapiens
tattcgcctacacaattctccgatccgtccctaacaaactaggaggcgtccttgccctattactatccatcctcatcctagcaataatccccatcctccatatatccaaacaacaaagcataatatttcgcccactaagccaatcactttattgactcctagccgcagacctcctcattctaacctgaatcggaggacaaccagtaagctacccttttaccatcattggacaagtagcatccgtactgtacttcacaacaatcctaatcctaataccaactatctccctaattgaaaacaaaatactcaaatgggcctgtccttgtagtataaactaatacaccagtcttgtaaaccggagatgaaaacctttttccaaggacaaatcagagaaaaagtctttaactccaccattagcacccaaagctaagattctaatttaaactattctctgttctttcatggggaagcagatttgggtaccacccaagtattgactcacccatcaacaaccgctatgtatttcgtacattactgccagccaccatgaatattgtacggtaccataaatacttgaccacctgtagtacataaaaacccaatccacatcaaaaccccctccccatgcttacaagcaagtacagcaatcaaccctcaactatcacacatcaactgcaactccaaagccacccctcacccactaggataccaacaaacctacccacccttaacagtacatagtacataaggccatttaccgtacatagcacattacagtcaaatcccttctcgtccccatggatgacccccctcagataggggtcccttgaccaccatcctccgtgaaatcaatatcccgcacaagagtgctactctcctcgctccgggcccataacacttgggggtagctaaagtgaactgtatccgacatctggttcctacttcagggccataaagcctaaatagcccacacgttccccttaaataagacatcacgatg

SEQ ID NO: 392319 - DNA, 1000 bp, Homo Sapiens
gtttgtcctgctggggctctcagagacctgtgagctgcagatgctcatcttcctggggctcctcctgacctacctcctcacactgctggggaatctggtcatcgtggtcatcaccctcatggacaggcgcctccacaccaccatgtactacttcctccgcaactttgctgtcccggagatctggttcacctcggtcatctttcccaaggtgctggccaacatcctcacaggatacaagaccattccctcccaggctgcttcctgcaaagtttgctctattttttcttgggcaccacagagttcttcctcctggcggtgatgtcctttgacaggtacgtggccgtatgtaaccctttgcattatgccaccatcatgagcaaaagggtctgtgtccagctagtcctctgttagtggatgacaggattccttctcatcattattccaagttttcttgtccttcagcagccattctgtggccccaacatcattaaccatttcttctgtgacaactttcccctcttgaaactcatttgtgcagacatgactctgatagagctcctgggttttgttatagccaacgtcagcttactgggcactctgtctatgacggccacttgctatggccacatcctccacgccattctgcacatcccctcagccaaagagaagcagaaagccttctccgcctgctcctcccacatcattgtcgtgtctctcttctatggcagctgcatcttcatgtacattcagtcaggcaagagtgaccagaaggaagacaggaacaaggtggcggcattgcttaacaccgtggtgaccctgatgctcaaccccttcatctacaccctgaggaacaaacaggtgaaacaggtgtttaggcagcaggtgagcaaactcctcatataaagctgtgtaaaaaaaaaactgaagctcagcatccccagacaagctaagagaatataggccccttgaaacaactgagcctttccgattcagaaaaagc

SEQ ID NO: 392320 - DNA, 1000 bp, Homo Sapiens; identical to SEQ ID NO: 206347

SEQ ID NO: 392321 - DNA, 1000 bp, Homo Sapiens; identical to SEQ ID NO: 282786

SEQ ID NO: 392322 - DNA, 1000 bp, Homo Sapiens
ccagtgaactacaggctgctgggtgggtgggctggcaagaggtgagtgcagcctttgaccccaactccttctacaacctgtgcttgaccagccttagctcccaacagcagcagcgcaccttggactgaggacgaagttacagaactgagattctcgggtcccagacacgcacctatgtacctcccactggtgtccctgcaaagcctggcgcttttgacatcaataataaaagtggcagggctgagcaacacctcaggagttactctggaaggatggaggagttatgtaacacacgagagtcaggagccctgtggaagtgcttttattagcagtaaggctgatcgtacaaaaaattctcagagcttcataggacaaggtagtacaagtatggatgatacaggactgaggaacgggggacggctcaaaagaaatcaacatcgtctggggcatccaggtcccgatattccacaatggcccttgggtctccacgaaccatcctgtgaggtgagaggtacaggatgagagctgagggctcccaaaagggagtctgcaggcggcaacaaagcttgggcgtctgccctcctcacctgttgcgaggtttcccaggataacctccctggcctcggaaggcatcatagttccctcgaccagcaccatacggggcatgggggtatggagggcctcctgtggggactgcagggcggacagcaccagctatgacagagatcagtgttgagttgcaaaactatgtcctcaattccatcctctgttttcttctcccaaagccacacactcaccaagccccttcatctccctcctgtacttacctccatagcccaagatcgggggccggggctgaccatagggcatcaggccctggggagtctggtgtgggtaggggagtcctggggtcaaacctggggggagtacaacacggacagggacatgaattactgcgggggcggggagggggatacgggtacaattgacttctagggct

SEQ ID NO: 392323 - DNA, 957 bp, Homo Sapiens
atgatcaatgatagccacttcagtggttttatactccttggattcacagggcagcctcagcttcagatgatgatctctggggttgtctttttcttctacactattgccttcatgggaaatatggccatcatcctattgtctttcctagatgaccatctccaagtccccatgtacttcttccttagaaatttggccatcttggatctctgttataccacaaatatagtcccacaaatgttggtcagtatctggggcaaagacaaaagaattacctttggtgggtgtgcctttcaacttttcattgatgtggcactgtactcagttgaatgcatccttctgtccatgatgtcatatgatcgactcaatgctatctgcaagcctctgcatcatatgaccataatgaacctccaactctgccagggccttgtggtcatctcctgggtagttggtgtgattaattgcatcataccttccccttatgccacgagtcttcctcgatgtaggaaccaccacctagaccacttttttgtgtgtgtgaaatgtctgcaatgatcaagattcaagattgcatgtgtggacaccacagccatggaggtaaccacatttgccatgtgcctgattatagttcttgttcctcttcttcttattcttgtgtcatatggtttcattgctgtggctgtactcaagatcaagtctgcagcaggaagacaaaaagcatttgggacctgttcctcccatctcgttgtggtatccatcttctgtgggacagttacatacatgtatatacagccaggaaacagtccaaatcagaatgagggcaaacttctcagtatattttactccattgttactcccagcttgaacccattaatttatacggtaaggaataaggagttcaagggggccatgaagaggctaactggaaaagaaaaagattgcatggaaaaaagaggacat

SEQ ID NO: 392324 - DNA, 1000 bp, Homo Sapiens; identical to SEQ ID NO: 114949

SEQ ID NO: 392325 - DNA, 1000 bp, Homo Sapiens; identical to SEQ ID NO: 114949

SEQ ID NO: 392326 - DNA, 1000 bp, Homo Sapiens; identical to SEQ ID NO: 114949

SEQ ID NO: 392327 - DNA, 1000 bp, Homo Sapiens; identical to SEQ ID NO: 114949

SEQ ID NO: 392328 - DNA, 365 bp, Homo Sapiens
ccctcagagcgctccaaatatccacttgcacatactacaaaaagagtgcctcaaagctgctctctgaaacggaatgttcaactctatgagttgaatgcaaacatcacaaagacgtttctgagaatgcttctgtctagatttgatatgaagatattcccgtttccaacgaaatcttcaaatctatccaaatgtccacttgcagattcaacaaaaagtgtttttcagaactgctctttcaaaagaaagatccacctctgttggctgagttcacacatcacaaacaagtttatgagaatgcttctgtctagtttttatttgaagatatttcctttctcaccatagacctgaaagctgtcctaatgttc

SEQ ID NO: 392329 - DNA, 1000 bp, Homo Sapiens; identical to SEQ ID NO: 282792

SEQ ID NO: 392330 - DNA, 1000 bp, Homo Sapiens
gctcatgcaaaaggtcacacagacaatatttcacacagccagtatttattagtgacatagaatatgccagttattactctaggtcatgagaatagagtgataaataaaatgaatctggtcgccatcggtatatgccatgtaacattttgcagtgactgtgtaccaggcctatgaatttcagtatgcaatttcaataacgatcctgttgtatctgtggtgtttaaaaacatatacatctctggaatctaaaattgagaggatataagtaaaacccagtattagaaatttagtgctggaaatcagactgcagtttaaatctgagcatatagaaagtccctttcttctatgtcagcagatgccttttgtgtgaggtttaggtatactacattattagacataaaccagtgattctgccctatgttttcagaatgacaattctttatgaaactaatagaagaacagaagacaattgcaaaatcatgatgaagatgctagtggctttagaaccaaggaatacaaaaaataatgtgagctgcagttatagggattataaaagttaaaatgggaatgcatttgagtgtttattatgtgatcagtgctaataagagtcatcatttaattttacacttaacaataatcctgtgaggattaagctattattaaatgcatttgatagattacaaaaaggcttaccgttggtaaaaattgacccaaggggaagaggtcacatttttattcagattttctgattctagagtttgagagtctgtccatcattagtgagtagtgacaatactgtgtctaaattatcgacagaatttctgatattcatatgtactatgttgtttcttagagtgtgggcagagattcagggctgctagttccaatgtataggagaaactttcattcattgtgcatttatcattttaaaagttctaggctgggtgcggtggctcatgcctgtaatcccagcactttgggaggccaaggcgggcagatc

SEQ ID NO: 392331 - DNA, 1000 bp, Homo Sapiens
aacactttaacaatgcgtgacaatttcaagctatgaagaaacaaacaaaattttttacaacatctctcaaatctgataggtccacactatcacgattaaattccaggctgatgacactgtgagggcgtatggccagctgtgctggaggactggtcgaggccagagcctgggtttacagagaagcaaacaaacagctgaacaacgagactctaacttcctgattcattctctctacctttttttctcctagtgcaacctaaggggactatgtatcctgcaaagaccgagcccctgcatcaccgcaaccccctggtctgctctgtgagtggtttctatccaggcagcattgaagtcaggtggttccagaatggtcaggaagagaaggctgcggtggtctccataggcctgatccagaatggagattggaccttccagaccctggtgatgctggaaacagttcctcggagtggagaggtttacacctgccaagtggagcatccaagtgtgacgagccctctcacagtggaatggagtgagcagctttctgacttcataaatttctcacccaccaagaaggggactgtgctaatccctgagtgtcaggtttctcctctcccaatcctattttcatttgctccatgttctcatctccatcagcacaggtcactgggggtagccctgtaggtgtttctagaaacacctgtacctcctggagaagcagtcacacctgccaggcaggagaggctgtccctcttttgaacctccccatgatagcacaggtcagggtcaccctgtctccctgggctctaggctctgcctctgggtctgagactgtgtttctggtgctgttaatctgagttgtttgttgtgatctgagaagaggagaactgcagggaccttcctgacatgagaggagtccaatctcagctctgccttttattagctctgtcactctagacaaactacttaacctcactgagactcaggctttctgttgatc

SEQ ID NO: 392332 - DNA, 1000 bp, Homo Sapiens; identical to SEQ ID NO: 114950

SEQ ID NO: 392333 - DNA, 1000 bp, Homo Sapiens
ctccacacttctgacatttctcattcctgtctaagctcttgcgtgttaggtttttggccatcactttcactgctctttaagctcccccagcagagtggagaggtctgttttcccttgtttggattcctagaggcagcacaggccaaacacaaggtcatcactaaggaagtgtgcacaggatgaacgcggtgggtgctgtttaagggaagggtaaagcctttaaagggtaaagggctgagagaaggagcagagagtgtgtttggggtggaggctcccaggaggagtccgtgcaggctgcggtgctggacggatcctcctccagctcctgcttagaggtctccagaaccggctggaggcagggagggggtcccaaaagccttgggatcagaaggggttttcccgcctggtcccccagaccccccgttcgcctcaggaagacggaggatgagcctctgggctgcgcgtggtcggggttatggttgggatcagttaaggttccagtgccagcaccccgcccagggagccccggatggtggcgtctctgttagtgtcttccccggaggccgcccctgtgaccggatccttcgtgtccccacagcacgtttcttgaagcaggataagtttgagtgtcatttcttcaacgggacggagcgggtgcggtatctgcacagaggcatctataaccaagaggagaacgtgcgcttcgacagcgacgtgggggagtaccgggcggtgacggagctggggcggcctgtcgccgagtcctggaacagccagaaggacttcctggagcggaggcgggccgaggtggacaccgtgtgcagacacaactacggggttggtgagagcttcacagtgcagaggcgaggtaagcatggtggggggcggggcctgggtccctgtgaactgggaatctgagtgtgtgtgtgtgtgtgtgtgagagagagagagagagaggaagagagagacagaaagagggagcgcgccatctgtgagcatt

SEQ ID NO: 392334 - DNA, 1000 bp, Homo Sapiens
tgaagtggacagactcggcatgtattttgctcagcttgttaatggattactgtaaaggggatagaataatcaagcttattcctaaggattttgtcttgacaaataagtggatggtggtggtgtttattgagatagggaaaattgtgggaggaaattatttgaagtgagtggttggaaatgatttattgacatttatgtggaacaatcagaaggccaagggaatttaagagactcacggtgagttcagggctggaggtgtttatgttgacagcatcaatacatgtactctgttaaattccagggagtggaagaggatacatatggtaatagcttgtgtgtagaaaaaagaagaatgcccaggccagcaaaggggactgagagggagccccagggatgttggagaaaaaccaagagaacacaatgcttgtaagtcaaggaaaatagattttttttcaagaagaagggagaagccaatgagtatcactaagtgggtgaagtgagaatgtgagagagaagcaagtgctgggtttgctggggttggtatttgcagtcaatggagtatccaggatggaaactggattggactatttgaagagccagcagaagaagtgaggatgaggttaaggttgactgttttgagtagagagcttcagggaaggactgtgctctaggttcaggaagccagctgaatctaaaggaaaaggctaaagaggctgaagagaagcaggaggacctgtgaaccagagatgctcggtcattattatcaaggaaatattagagggcccctgtgtgcagtggtgactgctcatgaagaggtcacacagccaatatttcacacagcccatgtttattagtgacttagaatatgccagctactactctaagtcatgagaatggagtgatgaataaaatgaatctggtctccatcagtacatgccatataacattttgcagtgactgtgtaccaggcctatcattttcagtatgcaatttcaataat

SEQ ID NO: 392335 - DNA, 1000 bp, Homo Sapiens
tgtcactctagacaaactacttaacctcactgagactcaggctttctgttgatcagattttgaagttgtgccttacatcaaggctgtaatatttgaatgaggttgatgcctggaccttgtaactgttcagtgtgatttgaaaaacgttttttcccccagaaacagctagttattttagttcttacagggtagccttcttccccattttgaaagctctgaatcttagggtctcaagtaaagaggttcaatttggaataaacgtcactaaacctggcttcctctctcaggagcacggtctgaatctgcacagagcaagatgctgagtggagtcgggggcttcgtgctgggcctgctcttccttgggacggggctgttcatctacttcaagaatcagaaaggtgaggagcttttgggagctgagtatctccataggcttttctggaggaggaaatatggctttgctaggattagttctcagtatatcagtggccctggataaagcctttctttccccaaatgacctccaatgtcctgataatccagaaatcatcagtgcatggttactatgtcaaagcataatagcttgtggcctgcagagataagagaaaggttaacaagtaggggtcctttgcttcgagatcctgaagcaaattaaggaagagccactaaggctaatgcaattacactggatcctgtgacagacacctcatgcttcatgggtcacatggtctgtttctgctcttctctgccgtggttggtgggggttgtggtgttagagaaatctcaggtgggagatctggggctgggacattgcattggaagacagatttgcttccataccttttaagtatatatattttcctctttttcccaggacactctggacttcacccaaaaggtaataccttttaatcttctttcagaaagagattcggtttccctagaatgatggcagaggtgataaggcgtgagacagaaataataggaaagactttggatc

SEQ ID NO: 392336 - DNA, 1000 bp, Homo Sapiens
cgttgtagagttcccttcaggtcttgaagtaaagtttacacagatctcatcaaacataactgcaagtgcttttccttttttcaaatatgtttgaagtttgtataaagttagtgttgtttgttccttaaatatttttaaatagttactgaagctagatgaacctggggttttgtcttgggaaagcattatagaatggacttactttctctatgacatgtggaactcttcctgttttatgttatttgtcagcttcagtacattgtacattttgaataatttatttattacatgcacatttatttttgtaaagttgttcataatatttagtattatttcatgctgataaatctgtaagactataacaaaagctatgaaatttgtgtaactggagtcttagagggagatgacaaatgggtgatgcacaaagagtgtttgaagaaagactgactattttccaaattcggacaaagacttaaatgtaaaaattcaagaatctgtgcaaacccaaacgaaaataaatccaaagaaatttatgccaaaaaaaatctcgaaagcaacaagagagaaatgacatctcatgcacaggagaaaataaattaaatgacagtggattgttcaatagaaatcatgcagaccagacaaaagtggcacaagatattttaatggctgaaaagaatgttaacctagaatgtatatccagtaaaaacattattataaaatgttccatcatgacattctttttttttctttttcttttttttctttttttgtttgttttttagatggagtcttgctgtgtcacccaggctggagggcagtggtgcgaccatggctcactgcagcctctgcttcccaggctcctgtaatcctcacacatcagcctcctgaatagctgggattacagacacgcaccaccacgcctggctaattttttgtatttttggcagagacagggttttgccatgttgcccaggcttgtctcgaatccctgagctcatga

SEQ ID NO: 392337 - DNA, 1000 bp, Homo Sapiens; identical to SEQ ID NO: 282793

SEQ ID NO: 392338 - DNA, 1000 bp, Homo Sapiens; identical to SEQ ID NO: 282794

SEQ ID NO: 392339 - DNA, 1000 bp, Homo Sapiens
gaatagacacatttgtcatatcagcacataaaatattacagaccacatgttataccacaaacaaatctcaacaaattttaaaaatcaaaaccatatcaaggatattttcttacaacaataaaataaaactagaaatcaataaataataagaaaaactttagaatttttgcaaatatatggaaattaaacaatatgctcctgaatgatcaatgggtcaatgaagaaatgaaaaaaaaattttaatttaaaaattaaaaattttttgaaacaaataaaaatagaaatacaagataccaaaacctgtaaaacatagcaaaagcaatagtaagaggaaaggggttttttttttagcaataaatgcctacatcaaaaaaagaaaaaaaaaagctttaaatgaagaacttaatatgcataccaaagaactagtaagcaagaacaaaccaaacccccaaaaaaataaagatagagcagaaataaataaaataaaaactaaaaagctttacaaaagattaatgaaacaaaaagtggatttttttgagagaagactcaaataaataaaatcacaattgataaaagagacattacaactgatatcacagaaatgcaaaacatcctaagagactattataaatagcaatacacaaacaaatggaaaacctagaggaaatgaataaattcctgggcacatacaacataccaagattgaaccaagatcaaacagaaaccttgaatagaccaataatgagtaatgagattgaagtagctctaaaaagtttcccaactaagaaaagcccaatgctaaatggaattactgatgaattctaccaaatacttaaagaagaactaatactaattcttctcaaactatttcagaaaattggagagagaattcttctaaaatcattctgtaaggctagcattatactaatatgaaaataagactagaacatgaaaaaaacagaaaactgcaggccaaaatccctaatgaacatagatgcaa

SEQ ID NO: 392340 - DNA, 1000 bp, Homo Sapiens; identical to SEQ ID NO: 282796

SEQ ID NO: 392341 - DNA, 1000 bp, Homo Sapiens; identical to SEQ ID NO: 282798

SEQ ID NO: 392342 - DNA, 1000 bp, Homo Sapiens
ctgtgaggtacaggtggtgagctgcagcctcaggctccatttcttagccagctggcacctggatgtcatgctttgtgtggggagagcctggccacctcagggctccaaggaaggaggaacgtggctcctcctccctcaggcctgttcctgagacagagcctggtctcacaagaggggaagggggacctctattattatttttgcctgtattgaccatttctgcctaggtcgtctcagacagcctcatctcccacacatgcacagacttagagagaaaccaattctttggtctattttcttggtagctttactgattgccagggaaaatgaaaaccagaaaattaattaatctctaaaattaaactttacactgaatgttcttgtttctctaattagaacttctgctagcagctgtggctatacacacacacacacacacacacacacaccctcacacctacacgtttgcactccggaactgtcagagggtgtcaggcacagacagactctaggttgcctagacaggcacacacatgcagtcactcccaagctcccctttggtgctctcgtcagcgcctgcttagtggaaggagtccctggagagcaggcactcctggactggggttgtagcccatgacctgccctttggggacacagttctggaggctctgggccaatgaatcagcccaaggaggatgggcaatggcgctcagcctgaatcagtcagctaggtctcttgtggccctgggggctgatgtgattcctgtaggtgtggccccagggtggacagctacagagtgatgggggactcatgtagggcacctggaaggctccatgtgtcctggggacaagggcttgtggggtgggctggggcctggctgggagaagacaggtctctgtcaattgggtgcatcacactgtggcctttttgtcgtggatttaagcgcaaagattgtacaaatcaaactggtggataataaagtcgtggatgactcactga

SEQ ID NO: 392343 - DNA, 1000 bp, Homo Sapiens
  misc_feature (834)..(834): n is a, c, g, or t
tgtatatgagtgcatgggtatgtgtgtacctctacaaatttgtcacttctcccttgatcaatgtttctagaaggcactttttttaattagattttattagtctttattaggatccaacttttggtttattgatttttttctattttatacatttgttttcaattttaattatgtctgctcattattattttcttccttctactttctttgggtataatttatcattttttggcaacttttaaaaaatatatacttaaacatatatatcagtttccctttaaggtacagcattacaaccctcatcttttgctatcttatttttattatttaattgaaaatactggctaatttgtttttatttttattcatgaattatttagaaatacagtgttactgtactttttggtgtttggggatttttctagttgcctttttatgattgacttttagcttaattccattgtagtcagaaaatattctctggatggatttcagtttttttgaaatttgtggtgacttattttatgatctaatacatggtctatgttggtaaaatatcccatgtaatcctatgaagaatacatgttctgtagtttgggagtatcttatttttatatatcagaagtctagtttgttaattgtgttcatatttgtatacatttgttgatatttaatgtgcttctgttagttactaagacattttgttttcatttattactgaaggggggcatctttttacatctttctgtttttttttttttttttgagatggagtctcgctctgtccccccaggcctgggagtgcagtggcgggatctcggctcactgacaacnctccgccacccgggttcacgccattctcctgcctcagcctcccaagtagctgggactacaggcgcccgccactacgcccggctaatttttttgtatttttagtagagatggggtttcaccgttttagccaggatggtctcaatctcctgacctcgtgatcctcgag

SEQ ID NO: 392344 - DNA, 1000 bp, Homo Sapiens
cgtgctccggcgtctccagcctcgcctcagcacccggcccaggtcgctgtccctccagccccagctcacgcagcgctccgggctgcagtaggaagtggacagagcgcccctcccgcgcctttccgcggagcccttggcccctcggacagcccatctgcctgttctgaggattcaggggctgggggtgctggatggacagtgggcatcagcagcagggttttgggttgaccccaatccaacccggggacccccaactcctccctgatccttttaccaagcactctcccttcctcggcccctttttcccatccagagctcccaccccttctctgcgtccctcccaaccccaggaagggcatgcagacattggaagagggtcttgcattgctatttttttttttagacggagtcttgctctgtcccccaggctggagtgcagtggcgcaatctcagctcactgcaacctccacctcccgggttcaagcgattctcctgcctcagcctcctgagtagctgggactataggcgcgcgccaccacgcccggctaatttttgtatttttagtagagacggggtttcaccgtgttggccaggctggtcttgaactcctgacctcaggtgattcaccagcctcagcctcccaaagtgctgggatcacaggcatgaaccaccacacctggccattttttttttttttttagacggagtctcactctgtggcccagcctggagtacagtggcacgatctcggctcactgcaacctccgcctcccgggttcaagcgattctcgtgcctcagcctcccgagcagctgggattacaggcgtaagccactgcgcccggccttgcatgctctttgaccctgaatttgacctacttgctggggtacagttgcttccttttgaacctccaacagggaaggctctgtccagaaaggattgaatgtgaaacgggggcacccccttttcttgccaaaatatatctctgcctttggttttat

SEQ ID NO: 392345 - DNA, 1000 bp, Homo Sapiens
taacagaatcagactcatcttggttgccctctcatttatcagaatatgaacaggatacatacttgttgaacctgaggaggtagtagaaatgtcacacatgccaggagacttatttaatttatatcttcaccaaaactacatagacttcttcatggaaattgatgatattgtgagagccagtgaatttctaagttttgcaggtatcctcagtggtgactggaatacacgctctttactcaggaaatataggacatctatagctacaagaggtgtgatacattccaacaaagctggaggatatgctcattgccaaggagaaggatcaagtttttgacccttgcacacaccgcagtggtttctaatacataaaaagtatggggaaaattgcctggcagcaaaagcactttttcctgacttctgcctaccagctttatgcctccaaactcagctactgccataccttgctctaataaccattccaatgagaaatcaagctcagatttctcttatccaagatattggaaggctccctctgaagcaacacttcggaagactgaaaatggaagccctgactgacagggaacatggaatgatcgaccctgacagtggagatgaagcccagcttaacggaggacattctgcagaggaatctctgggtgaacccgcacaggacacagagctggaaacctggtctcttcctctgagtcagaatagtgccagtgaactgcctgccagccagcctcagctcttttcagcccaaggagacgtggaagaaaatataataatagaagactatgagagtgatgggacatagaagccagcctgctaatcagattgctacttcacagattcatttttgtttcattcagtggtacttcagcagagttaatatacttctctgatgaattacacaacagtttgttaattctccgttcctgtagtctttcatcacgaaaaactaactcttctgtcaccttgaagtaaatagaagatcctcgag

SEQ ID NO: 392346 - DNA, 1000 bp, Homo Sapiens; identical to SEQ ID NO: 114951

SEQ ID NO: 392347 - DNA, 1000 bp, Homo Sapiens
gcgtacagcaagtaaacgggcgtcccggagcctcgatggagcagcagctgtcgattcggcagaccgaagtcctcggcccacttctgcacctgccattactcagggtcaggttgcagaaggtggcgtcctagatgcctctgctaaaaaaacagtggtccctaaagcacagaaggaaacagtgaaggctgaagtgaaaaaggaagacgagccacctgagcaagctgagccagagcccacagaagcatggaaggtggaaaaaacccacatcgaggtgacagtacccacctcaaatggtgaccaaacacagaagcttgcagaaaaaactgaagatctgataagaatgaggaagaaaaagagagaaagactagatggtgaaaacatttatatcagacatagcagtttaatgttggaggatttagacaagagtcaagaggagatcgaaaaacatcatgccagcatcagtgagctgaaaaagaacttcatggagtctgtaccagaaccacggcctagtgaatgggataaacgcttatccactcactcacccttccgaactcttaacatcaatgggcaaatccccacaggagaaggacctcccctggtgaagacacaaactgtcaccatctcagataatgccaatgctgtgaaaagtgaaatcccaaccaaagacgtccctattgtccacactgagaccaagaccatcacttatgaggctgcccagactgacgacaacagtggagacttggacccaggagtcttgctgacagctcaaactatcacatctgagaccccaagcagcaccaccacaactcaaattaccaagactgtaaaaggtgggatttcagagacacgtattgaaaagagaattgtgatcacaggagatgctgatattgaccatgatcaggtccttgtacaagccatcaaggaggcaaaggagcagcacccagacatgtcagtgaccaaggtggtcgtccaccaggagaccgagattgctgatgagtga

SEQ ID NO: 392348 - DNA, 1000 bp, Homo Sapiens
ggtttaactcaaccccattcagggaagcacgtgtgggcgcaggcctggtggaagtggccttacaagggactctgcatccctaatgcccccacttgcccagaaaccctatgctgggccccagaggcaggcctggccatgggacgcctggtgacagtggcaggatggggaggcccacatgggcctgaaggctgaggcctgcagggcagtggggggaccaggccaacaggcaggcagtgccagcatccacaccaaggcaggcagagcatggggctcgaagcgcgggccgggagcgccccctagcgctggctgggcagtgtccctgctacaaacccaaggcccctctcctgtcagggctctggtggacctctggtgggcacagtgggatcctgaatgggtgctggggaccaaagggctgggccaccgggagaacagtggcccatgaaggtgctggtgggccagccccctcctcctcagcgtgcttccttagcgaccccagatggcagggcacagtccctgaagctgccccaccaggggctccctggctgcctccccctgtcccataaggtgagcccatgagagaccccagctgtcagcacaactgaacctccgccatcagggtgccctctagtggttgggtgtgctctaggctggcagggtccccgcccttgctgtctgctgatggctgagggggacatgtctcatgggaggcccagcttccaggacacaactggtggctcctggggtcaccaagggcacctggtttgttcacagctctttgggctgctgtccccatgagggagcacctcccaccccagctgtgggtccatcatttcctctgattaattagggcctaggggtcaagggaggccccgagggaggactctcagtgtgaacaaaccagcagccagggccgcagagaagcctgtgaggtgcccacagggcctggtcccagtgtgggcagagcacctaagggatggcttctgtccactgagaagggtcg

SEQ ID NO: 392349 - DNA, 1000 bp, Homo Sapiens
tcccaagctcagagcagcctctgtcctggctgtgcacattctcccttgattccacttgtgtggagggattgaacacaggcaaagaggtgctgctttgcttcttcaatggcaccttcattctccgttgtcattgacttcaagatgcctcttctacctcttccaggaagcacaggccaggggatctgggtgtgtgagtgggaggagagggcagaggtcccctgaggtcatgcattgtaatcatcatagaaggagagcccaggcctgccctcacgctctccatcataggctgacaccaagaagactcgtcttggcacaatctcacacagctggggctgtagcaaccctttccaacccctttgctggttgctgggcctcattctagcaccttgttcttagagcagattctagcacatcatggcagtgggaccaagcgtggtcccgaggaagggccagagcctggtagagactagggaagggaggtctcctctagactgactcacattgccttgagcttttcagttaagttgctgtaagcacctgggctgaggaggcagtttttgttccttcctgcgttatagcggggccttgtctcttcctctgcaggacacagatctggaggacgtggactgcggtaggaaaccaccctgagggtgttagtacctagtggtgaaacggatgaggtcatttctaaggtgtgttgcccgtggaatctgggcacaactcattggaattccttggagccactgggattcatggctttgtatccaactgcatccaggcctgaggctgctgacgtttgacaccagggccagtagagagtgcccttttgtatcttaagccaagtaagtgaggcctgggggtgggggaggggggaaggggtgggagccaatactgagtgcctgcagcatctactactctgtcttcactattcagaaccttgtaactaaagtatttaaagaaactgattttaaatgcaaattaaagggcagatattctcaaa

SEQ ID NO: 392350 - DNA, 1000 bp, Homo Sapiens
ctcagagcagcctctgtcctggctgtgcacattctcgattccacttgtatggagggattgaacacaggcaaagaggtgctgctttccttcttcaatggcaccttcattctccattgtcattgacttcaagatgtctcttctacctctaccaggaagcacaggccaggggatctgggtgtgtgaatgggaggagagagcagaggttccctgaggtcacgtgttgtaatcatcatagaaggagagcccaggtctgccctcacgctctccatcataggctcacaccaagaagactcatcttggcacaatctcacacagctggggctgtagcaaccctttcctggttgctgggcctcattctagcaccttgttcttacttagagcagattctagcacatcatggcagtggaaccaagcgtagtcccgaagaagggccagagcctggtagagactagggaagggaggtctcctctagactcagattgccttgagcttttcaagtaagttgctgtaagcccgtgggctgagaaggcagttcttgttccttcctgcgttatagcggggccttgtctcttcctctgcaggacacagatttggaggacgtggactggggtaggaaaccaccctgagggtgttagtagatagtggtgtaatggatgaggtcatttctaagatgtgttgccggtggatctgggcacaatcattggaattccttggagctactgggattcatggctttgtatccaactgcatccaggcctgaggctgctgacatttgacactagggccagtagagagtgcccttttgtatcttgagccaaggaagtgaggcctgggggttgggggaaggggggaaggggtgggagccaatactgagtgcctgcagcatctactactctgtcttcactattcagaacttgtaactaaagtatttaaagaaactgattttaaatgcaaattaaagggcagatgttctcaaaaataaataaataaaaggagaccc

SEQ ID NO: 392351 - DNA, 1000 bp, Homo Sapiens
ctgatctggctggacgtgagactccacctgcccatgtatttcttcctctgcaacctctcacttgtggacatctgctacacctccagcagggtccctcagatgctggtgcactgcaccagcaaagaaagaccatctcctttgcccgatgtgggacccagctctttttctccctggccctcggagggaccgagtttttgttgctggccgcaatggcctatgaccgctacgtggctgtttgcgaccccctgtgttacatagcagtgatgagcccaaggctctgcatggcactggcagctgtctcttggctagtgggcctggctaattctgctatggagacggcactgaccatgcacctgcccacctgtgggcacaacgtgctgaaccatgtggcctgtgagacactggcactggtcaggtcggcctgcgtggacatcaccttcaatcaggtggtcatagtggcctccagtgtggtggtgctgctggtgccctgctgcctggtctcgctgtcctacaccctcattgtagttgccgtcctgcagatccactccacccaggggcaccgcaaggcctttgggacctgtgcctcccacctcactgtggtctccatatcctatgggatggccctctttacctacatgcagcctcgctccatggcctcagctgagcaggaaaaggtgatggtactctcttatgctgtggtgacccccatgttgaatcctttcatctacagtctgcggaacaaggatgtgaaggcagctctgagtcgagctctgatgaggagctctgaattaaaacattagagagtggtttgagtaacaagaaggcctcactctgaaaacagtgggcattggactgtgctctccagtataacgtgtgtacgcatgtgtgtgtatgtgtgtgcatctgtgtgtgtgtgcatgtgtatgtgtgtgtgtaagggaacaggtgggaggaccacaatttgtactactctcttttgaggtaatagaaaaatggattt

SEQ ID NO: 392352 - DNA, 1000 bp, Homo Sapiens; identical to SEQ ID NO: 206350

SEQ ID NO: 392353 - DNA, 1000 bp, Homo Sapiens; identical to SEQ ID NO: 282803

SEQ ID NO: 392354 - DNA, 1000 bp, Homo Sapiens
ccaccccaccctcacccccctataaaatgggggtggtgataatgaccttacacagctgttcaaaatcatcgtaaatgagcctcctcttgggtatttttttcctgtttgaagcttgaatgtcctgctcaaaatctcaaaacacgagccttggaattcattcattcattcattcattcattcattccacatatatttattaatctcttcctctaggtctcctccaggagcacctaatccgggggagacagagccggatgagagcttggaaccctactaagttaggactgagcaggggaagggacggcctagggggagtggagcagccgggcactccggtaacaggaaccgtggtttgcccccacgctccttcctcctcacgcccaccaactcgcagcaggacccttgccccccttacacaccctgaatcctccctctttctgcccacactgccccacctccctcgcgttctgcagccgcctccccctgatccccactgcggtctgagccgaggtgtgggggggggctcctgaaatcccaccccagccctggcgattagcgggtagtccagattctccccatggccaccaggtggcaacagcggcgcgcgtttccccggccgggcccgccctgcctcctcccaccgcgtttgctcaacagacttttccggtttcagacagaggaggggagttaaaaagcccagaactactgaattttgtggcaaaaaaaggatgagacctctcggggagagacccctggcagccaatagggccaggaggcaagaggcccaggccccgcccctttggtctgggggcctccctttccccatcgatgcatctagatagggaaacagaggcctggatctcggtgccccagccacacggtggctggtcagagttctgcaaatgccccccgccccgctccggatctgccacatcccagcttctgctcaagccgttccctccaccaggcatgccctcccttgagcgtttatcctcctttc

SEQ ID NO: 392355 - DNA, 1000 bp, Homo Sapiens
gcatgagggattatccctgtaaagggctcgtggtgtgtgtgtgtgtgcgtcctgctagtgttgaatgacggagacctgagtttggattcttgaatccaggtgtattcgatgccgctccggcgtagaacgggttaaagatgcccccagccaggtagagccagactgggagttgtgcaaggtctcaaccccctaaaagcggcccctcaaattgaagatgagtaaatcatagttcgtaaatcagaaagattatccagtactacgttactctgtttatttccctttcgtcatccctgagtcttgggtcaagtccatcccagctctgtcctccaggaatcaagggaaatacgcaaacccgcggtgggttcgcagccgcaggaaggacaaatcttgcccccgccgcggcggccgccccgcgttagctgcctaagagaatctccgtggccggccagtacccgccttggtgaggattctccctcccgcgagaacttctggaatgccgccgggccagattttgcagctgaggcctccgacgccactaatattgggccaagcagggagtgctgctcttccttataaggttttagcgaaagttaagtaagccaattaaagtgcaaaacacacagtctggaacaatacagcgctctataaatggtctccattattatcattatccgttagttataactggggataaaaaaaaaaaaaaaacgacaaaaacctggagaaccggaaaggtctgcaaaaggggcggaacgcgggaacttcgatttggggaaggggtggcgggggagatcccacacaagcagccaatccagctgtcccggggaggaagaggaggagtcaaggcccgcccctggtctccgcactgctcactcccgcgcagtgaggttggcacagccaccgctctgtggctcgcttggttcccttagtcccgagcgctcgcccactgcagattcctttcccgtgcagacatggcctctggcaccaccaccaccgccgt

SEQ ID NO: 392356 - DNA, 418 bp, Homo Sapiens
ggaatgtgccaccgtgcccagccctttttagtatttaagtttaaaagaatctaatttacgttaattaagtttagaaaataggttggggttttttgttgttgttatttttaagaaaatacttttttttaaatttaattttcttattttagaatggaggaaaaattactgtccctgacaaaacttctctagagttgctctgtcagggatgttctggtgatatcagaagtgcaataaacagcctccagttttcttcttcaaaaggtaactatggaagatacagtcatgtggcattatataggtgactgactttctcttaattcattcaatgaaatcaaacattttaacttacatttggtctatacctatttatccttctttattactgagacagtggcttaaaattaaatatatacacatg

SEQ ID NO: 392357 - DNA, 1000 bp, Homo Sapiens; identical to SEQ ID NO: 282805

SEQ ID NO: 392358 - DNA, 1000 bp, Homo Sapiens; identical to SEQ ID NO: 282806

SEQ ID NO: 392359 - DNA, 1000 bp, Homo Sapiens; identical to SEQ ID NO: 206352

SEQ ID NO: 392360 - DNA, 1000 bp, Homo Sapiens; identical to SEQ ID NO: 282807

SEQ ID NO: 392361 - DNA, 1000 bp, Homo Sapiens; identical to SEQ ID NO: 282808

SEQ ID NO: 392362 - DNA, 1000 bp, Homo Sapiens
tcctctgtaagaaggaaggggttggggatgggagagagcctcccttcagagtcaggctgtttataatctgccatttgcaacatcattattcctcactgtgaggacagttttgctcagaggccttgcaaggatggtgtccccaattcctcatccagtgcagacataatcaaaacatatcaccaccgccaaggtcaggttctatcatgttctggaaaagatacctgctgagaggccactgcctgtcaccttgccccacagacctcatcctggaaacttctcatttcatcttcccttctttgaccactagatggaatattttcacttctattcactgaaaccctgaagggacagttttccaaactggacacactgcttgagaagcccaatgctgaagggaaaatgtttttcctttaattgttctgcttaccctaaccattttctaagcacttgcatcatatgagagtgaatgtggaatagatgtttaggatccccactttctgaccttcaactaaacctgtcaacaacagtgctttatttcaaaagggtaacctgagtattacagtgggaatcccctgacacctttctgcagggccttctgctaacttaaggctacccttaccttcactcttgaaacctcaagcctttcagattcctgctcttaaagtcaacagctggggtatgaattattatggggcaggaccatgtactgattttagagcagtaactgcagacaaattgctttcctgacaaaatagagaattcttcttggatgctagtcatcaccttgacagtaccatagcctgttgttacatccagtaacagagccagctatctcgggtgttggaaacatgccacaggcaacttagagcctgagacaccagtacaatgtgttcagtctttcccttgaggcccaagttcaaagaattatttagggattcccaaaggaatgggaattacagtataagttattctgcagaaagtcaagagaaggccataaagc

SEQ ID NO: 392363 - DNA, 257 bp, Homo Sapiens
cggaagggcaccaccaggagtggagcctgcggcttaatttgactcaacacgggaaacctcacccggcccggacacggacaggattgacagattgatagctctttctcgattccgtgggtggtggtgcatggccgttcttagttggtggagcgatttgtctggttaattccgataacgaacgagactctggcatgctaactagttacgcgacccccgagcggtcggcgtcccccaacttcttagagggacaagtggcg

SEQ ID NO: 392364 - DNA, 1000 bp, Homo Sapiens
ggggcggggagggtgtgccgggcatggggtgaggacgcaggggcctcccaggcgcctggtgtgcagggagccggctgcgcggcctcacccgctgctggatggcggcgtgctttcgctccatctcacgcttttccaccgcagagtcgatcaccagctggtccagctgttgggggtggcattagggaaggtcacggaggcctggcccagccccacccctcccaaaggctcacctcggctgccagcttcttcatgtaggggtccagctggtgcaggaggctgtagccctgctggaagaagctggactgggcgtgcatgaaggacagcatctgcgggggcagcacaggtgaggcccaagcacacccggtccagcccccaacatgcagcctgtgctcaggggcagcccccacgcactcacagagtccaggatctcaaacttcttcttggcctgcagaacattgatctgccagagggggagcccacaggtgagccccggaggctgaggcagccccaagccctgcacctgccatagagtccacctgagctgcttgtggttccctgagacccccaggtcgtcttcagctcccagctctgggccagcctcatcctcccatggtcctggactgcttccccatgtctggagttcccacccatgggcaaagcaagaatcgtcactcctgctcaaaatccctccagttctgtacaaggccgttgaggcctccattcgctacagctggtccccgccccccagcccatttctggggctgacctggagcacatagtccagtgccaggtggcggaagcacttcctggtgagggtgagggccccggtggcttcctccacctcgtggggccggtgcctcggggcctgggcgttcctcaccagggacagctccaggtcctcccgcaccttgtcaaactgcttctttgtctccttgaacttccgcacatccctggaggccaagtgccaggtggggtgagagatcagggagggcacctgctg

SEQ ID NO: 392365 - DNA, 1000 bp, Homo Sapiens
aatgtcgaataaattgtgatggtagagctgtcaggagctgctggagggctggacgcagctttcaagggagggaaaagaatggagaaggtgctgaggcttcgcccaagcaacaaggaggacggcactgcagtccactgtgatggggcgggctgcaggtgcagctaccctgggggaatgcatcaagatggagatgctccttagacagcatcagggtggcatttaaagccagggactgagaggagagatggaccaggacatcacctggccaggatgccccagctcaaggccctgcagaggcaggtgggccagggaggcagatgtgtgcacaagagtctctgtgaacagcagaaggcctgaagtctgcagggatgaaggcagacgccactcagggacctccccaggccccagccccatgctaatggccctctgtcttcccaacagcaagctgaggcctcccatagacttggaaaggaagtctcagctcctgtccacctgcttccgcagcgtgtttgccctgccactgctggatgccctggagaagcacacctgcctctttctggagcctcccaacatccagctgtggcccgtggctcgggagcgggcaggctggacgcaccagggctggggacccagggcagttcttcactgctctgagcacctacaggtttgctgtgtgctatatgctgcagtgtgtttgcccacctgtaaaatgggggtgatactaacagggccaatggtacttaacacttggcgactgaactgagacactgggtgagcagtggcgtggaggagcaccctgtaaacagtggcgcgtgtggcctccctccctccctgccagtcctgagagccagcgggaagaggctggcaagccggtgctgcccagccctgcaggccttggccgccatgctatgtggcagggtcaggtctgagttttcgctgagctccccagcagcccaagggaagcggagaggaggggagatgagttccccaaccttgtagg

SEQ ID NO: 392366 - DNA, 1000 bp, Homo Sapiens
gaaggggcgaaagcaatcgacagagtccacgacgatggccgagggaacaacactgtcccgtcccagagctctgaaggaacgcatctgcattctgaaaataggtttctttacgacggaagtcttttttttttttaattcctttttaaatttttaaaattttaaagtctgaaggagaaaaaaaggtctgtaaacaggtgggagcccaaaccccaggctcccccaaaagcagtcacaacccacgcccaagtgcttgtttctgttccttccacggaaccatccattctttacaagtatctatggccacagttcaacaacagtttttttttttttctctttaactttatattccaaatggaaaaatggtgcaatactctggtaataattttcttgcattagtccacaataaaaagctgctaaaggtaggtatacatgttatttctccagagatatacactgtactttttaaacgcagtcacagagtccttgagtaaacatttacacatgaattgtcgccagccctgtcctaggaattctctgtaatgtataggattagctaaaggaagggcgaggacactcagtgcaaagttagaagctaataataacaaccgtttgaccaatgcgccaaaaaaaaagcgtatactgaatacaagggaaaacccacagttaaatcctcacacgctttcaaacacacaaacacagaaaactgcacgccgtgcaggagcacgcgccacacatgcacacacacacacacacttctgtttcaacacgcacacatacacacacgtaggctatgaacttagaaatttttcctagagcctgtttctgtgtactgatgtcaacctggaagtgtagaattagaaagtgttcacatttcactattggcctgctggattcaagtatttgcatgtttgatatgtctttttttaacttttaaaaaatattttttgggataaaaaaatgacatgaaaaagtaatgaaacaagggtaatgtgcataggcg

SEQ ID NO: 392367 - DNA, 1000 bp, Homo Sapiens
ttttccctttaaagcctttttttaggccacattgacagtggtgggcggggagaagatagggaacactcatccctggtcgtctatcccagtgtgtgtttaacattcacagcccagaaccacagatgtgtctgggagagcctggcaaggcattcctcatcaccatcgtgtttgcaaaggttaaaacaaaaacaaaaaaccacaaaaataaaaaacaaaaaaaacaaaaaacccaagaaaaaaaaaaagagtcagcccttggcttctgcttcaaaccctcaagaggggaagcaactccgtgtgcctggggttcccgagggagctgctggctgacctgggcccacagagcctggctttggtccccagcattgcagtatggtgtggtgtttgtaggctgtggggtctggctgtgtggccaaggtgaatagcacaggttagggtgtgtgccacaccccatgcacctcagggccaagcgggggcgtggctggcctttcaggtccaggccagtgggcctggtagcacatgtctgtcctcagagcaggggccagatgattttcctccctggtttgcagctgttttcaaagcccccgataatcgctcttttccactccaagatgccctcataaaccaatgtggcaagactactggacttctatcaatggtactctaatcagtccttattatcccagcttgctgaggggcagggagagcgcctcttcctctgggcagcgctatctagataggtaagtgggggcggggaagggtgcatagctgttttagctgagggacgtggtgccgacgtccccaaacctagctaggctaagtcaagatcaacattccagggttggtaatgttggatgatgaaacattcatttttaccttgtggatgctagtgctgtagagttcactgttgtacacagtctgttttctatttgttaagaaaaactacagcatcattgcataattcttgatggtaataaatttgaataatcagatttcttac

SEQ ID NO: 392368 - DNA, 1000 bp, Homo Sapiens; identical to SEQ ID NO: 282812

SEQ ID NO: 392369 - DNA, 199 bp, Homo Sapiens
gtcgcggccgcgacctgcaggcgcagaactggtaggtatggaagatccctcgagatccattgtgctctaaagcagtgtcactgcgtgggttggtttgtgtagagaggcgtgagcgagcccgttgtccggagtgcacctgctgcctgttctgtccctcccgggagcccccgccgctgtcgccgtcgagtcgccatggaag

SEQ ID NO: 392370 - DNA, 1000 bp, Homo Sapiens; identical to SEQ ID NO: 201498

SEQ ID NO: 392371 - DNA, 1000 bp, Homo Sapiens; identical to SEQ ID NO: 114953

SEQ ID NO: 392372 - DNA, 1000 bp, Homo Sapiens; identical to SEQ ID NO: 282816

SEQ ID NO: 392373 - DNA, 1000 bp, Homo Sapiens
aaactacctccgcaggccaggacccatctagttacaggatacctcgatgttacaaagacgaggcttccagcgcgggggcgtggaggcggctgccagccctgcccgcagcgtgctggcgacccccgggacgccccttccctcccgcgcctctgctccctagctggtgggagcagagcggcaccgggatcacttccaggtcccttgcaccggaggaatgggcggcagcagggtccggagtcggcccggcggggcccacgtggccagcacatcggtcctccgctcgcgatttcccttttccgctctcgggcacgaggtactgaacgccaggtggaagcacagctgtgcagctacaggctctgccgttcagctgccgcgggccggggccggggcctgcggcgtcgtgcgcgtgcgcggaccagttccaggcgggcgagaccgccgcagggcggggcggggcgaggcggccgcagggcggggagggcggggagaggcggccgcagggcggggagggcggggcgcgaagccgggggcgggggccacgcgtggggcaggcggtgctcggctcggctgacgtcggcccgccggcgccccaccagctccgcgcgggcccgggttggccaccgccgggcccccgcccctcccccggccgtgtcccggccggaaccgatcgtggctggtttgagctggtgcgtctccatggcgacccgccggtgctataagtagggagcggcgtgccgtggggctttgtcagtccctcctgtagccgccgccgccgccgcccgccgcccctctgccagcagctccggcgccacctcgggccggcgtctccggcgggcgggagccaggcgctgacgggcgcggcgggggcggccgagcgctcctgcggctgcgactcaggctccggcgtctgcgcttccccatggggctggcctgcggcgcctgggcgctctgaggtgagggactccccggccgcggaggaagggagggagcgagggcggga

SEQ ID NO: 392374 - DNA, 1000 bp, Homo Sapiens
agggctctcctcttgcaactcagtgagtcatgctagagtttagttagcacttgtctaagctgactctgactcactaatcctgagtgccttctctccaaatctggcttttagactgctaacttaccagccaattcctgtttatttcaagtaatgttgttcctacatatgctaacctgctccttctcactcatttctctgatatctacaacctagatttccaaacacctccaaagatgcacagactccgttctttatctcagttagtcatttctagtttctgagtgccaactctggacctgaaacagaacaaaggggatttaaggtgcttgccaggggcatttacagtgccctggagggatatacttcactccctaccccacccctcattcaaacacacatacacacatatacaaccacacacacaagatctggagtcctcacagagtaatacacaaaagctgatccagtttggagactgtttctttcacataggtgggaaccatggaagtgagaactgtaaaacccaccctcacccctctccctgtagtatcaacatgtttcaagtcaaattaaacaagatagagttatcaacagtgtattcatatatatatgcatatatttttatattgatggaaaaataggttacttttgtatgtaactgggagacaaagcaagttgttctgcagtagcataaaagagattctttttcttaggatgcaaaatgaaataataaaaaaattacatgccattggtataactcaagaaattgtgatatttttgatcacggcatttttacttgattgcattatttaaaattacaaagcctatatgaaaaatatttgccctaaattttgtattgccctaagggttttcttgtttaattagtaggtaaaatctaccatcatatccaaatataagtgcctctagcacctaaccaattaaccaagcagaaaaaaaagtgttgtaatcatgcgattattagtcagcataggtcagctgc

SEQ ID NO: 392375 - DNA, 1000 bp, Homo Sapiens
ggttacagtgagctgagatcgcgccactgcactccagcctgggtgacagagcgagactccatctcttaaaaaaaaaaaaaaaaaaaaaaaaattggagggtggggaggcgggaaggagctgagatttgaacccaagtcttactgatgcccaagcctgtgtttaaccactaccctcaccagcctccctggcttctatgaagcacatgacacatcacacaggtgctttttcaaccctgtgttgggaaggcaggggcaggaatcagagaggggaagcaattggcccaagggcactccgcagtccttcctgaagctaggtttcctgagtccagccctgggcttccacctggcaggtgtggagaccagggctgctgcctctgctgcctgatggacattccgcccaggctgggggctgggagagtcttgaatgctcacagtgcattccagggccctatttgtctgtctggaagctactatgaagcagcaaaccccaccctgtccctcgaatgcaggagaaataagggggccaggagttcagatctgaaaatgtccaatgcaccatgcagtttctcaaaggaagctgggtttagctttgtgctgcacacacacacacacgcacacaccagttatgccttcacacccacagacacactcagggaggcacaatccatcataccacacagcccctgcctcagacatacaagtaacatccatgaaccatcgcatattctctctctcttacgcatgtgtcccagacacactcctttcacccggggacacacatcctcctcactccagcatgcacgagcctcagaatgcctgtgttctctcccacacggaccccccaccacccacacatacactcaaactcccacagggccatcctcagaaacacgggctgtccctcccatccactgccagatgcacaaatggcctcatggtcctcgagtgcacaacctgaatacccacctctaaagtacaagaccccctcctgggactgccc

SEQ ID NO: 392376 - DNA, 1000 bp, Homo Sapiens
ccttcctaaacgccaacccccaacccagatcctggtcagtcctgcccagaaaccagccacctcctactctgggtccagccccgcctcccccgcagcccagacgggccctgcgctcaccgcccagacacagcgtcattgtcactcggtacaggatgttgtcaacgatgccgcccttcaggtacaacgggatgtcattgtcctcctggatgtgggggtgtctgatgagaaaggggtgctggctgctccttagagcgcgccccgcctgccccggctcggcgcgctcccggctggcgcgtcggatccccaccccccccgaccccccacctggaagagcttctgtttctcgcgcactcggttctgaaagcggttccgggcggtggagctgaaggagcggatcagcgcctgggacacctgcggggtgggaggtgggcgggtattggaggcacctggaggggtgtcctgaagtgggaccccgctctctgaggcctggacgtggggacagccccatccctagcgagcgtcccaaaggcgaggagggtaatagcttggattctgttacccgcgaactgccagctgggttgggaggggactcgccctggagtctggcctgggggtgaccgggctgcctagagggtcctggaagggagaggacccagaaggactttgttctggggggcctaagtcctgagatttttgttgggggagggtttcctggattaaagggaggaaaccaggtcccgggaacgtggggaccggaatggaggtccccgggagcgtccaggctgcctgagaaggcccgggtgaggccagtgttaagggttcccgagatgtcaagttcaaacccggggctttgggccggggtgggggtccccagttgtctccgaagagtggattgtgggggaagggacccaggctgtttagcggggagtcccaggccctgaaggtggctcacgttccaaggccctagatgcgggggcacttggagagtcgcgtattaggg

SEQ ID NO: 392377 - DNA, 1000 bp, Homo Sapiens; identical to SEQ ID NO: 206354

SEQ ID NO: 392378 - DNA, 1000 bp, Homo Sapiens; identical to SEQ ID NO: 282819

SEQ ID NO: 392379 - DNA, 1000 bp, Homo Sapiens; identical to SEQ ID NO: 206355

SEQ ID NO: 392380 - DNA, 1000 bp, Homo Sapiens; identical to SEQ ID NO: 282821

SEQ ID NO: 392381 - DNA, 1000 bp, Homo Sapiens; identical to SEQ ID NO: 206356

SEQ ID NO: 392382 - DNA, 1000 bp, Homo Sapiens; identical to SEQ ID NO: 282823

SEQ ID NO: 392383 - DNA, 1000 bp, Homo Sapiens; identical to SEQ ID NO: 114954

SEQ ID NO: 392384 - DNA, 1000 bp, Homo Sapiens; identical to SEQ ID NO: 282825

SEQ ID NO: 392385 - DNA, 1000 bp, Homo Sapiens
acagcagcattcccagaaatttctttcggatatttccattcaactcatagagatgaacatggcctttcatagagcaggtttgaaacactctttttgtagtttgtggaagtggacatttcgatcgccttgacgcctacggtgaaaaaggaaatatcttcccataaaaatagacagaagcattctcagaaacttgttggtgatatgtgtctcaactaacagagttgaactttgccattgatagagagcagttttgaaacactctttttgtggaatctgcaagtggatatttggatagcttggaggatttcgttggaagcgggaattcaaataaaaggtagacagcagcattctcagaaatttctttctgatgactgcattcaactcatagagttgaacattccctttcatagagcaggtttgaaacactctttctggagtatctggatgtggacatttggagcgctttgatgcctatggtgaaaaagtaaatatcttcccataaaaacgagacagaaggattctgagaaacaagtttgtgatgtgtgtactcagctaacagagtggaacctctcttttgatgcagcagtttggaaacactctttttgtagaaactgtaagtggatatttggatagctctaatgatttcgttggaaacgggaatatcatcatctaaaatctagacagaagccctctcagaaactactttgtgatatctgcattcaagtcacagagttgaacattcgctttcttagagcacgttggaaacactctttttgtagtgtctggaagtggacatttggagcgctttgatgcctttggtgaaaaagggaatgtcttcccataaaaactagacagaagcattctcagaaacttgtttttgatgtgtgtacccagccaaaggagttgaacatttctattgatagagcagttttgaaacactctttttgtggaaaatgcaggtggatatttggatagcttggaggatttcgttggaagcggg

SEQ ID NO: 392386 - DNA, 1000 bp, Homo Sapiens
tctccgatgtttctccctgagacagcgcctcacttccgtcagccgggcttttctacggtataattttccttgtttgcttttgtccaaattagaactttttatttcatctctaggaaacgttgatccattatcacatacgtatggaaatattatcacacatgctgtgagatacgttgtttttattttcatcaattccttaataaacaaaaggttatagctgggataccttctgagttctcaagttttttgtttcgtgttttcttaaactgccgtcgcacgtccgaaaccgctcactatgcagtgtcatgaccgtctctcttttctggcaaacataaatttggggattgtcatcaattagtctctcggggattgcatgatttccccaaaggctttcacagtctactttgtgcactgagtatctctacaaacttcagtgcatgtttctaccatttgatgctttcttatttggcaatctagcttccacaagagcatttcatgcaaagacttgtcttgttctccactggcaggtaatttcactcggacagagaatcaataggctcaacgtggaaaggttatcgctggaaggtctgtttgattccacggatctctcctttctcactagggaagaaaatacgctgtgctaaatactatacttcattgactattctcaggtcagaaagcgcactttcgacttcttgtccttccgtcgctgagaggatgatggcagctgccaaaagtacctacttggaggttcatcccagcacaaacacacacacacacacgcccccccacacacacacacaaacacactcacacacacacacgcacacggtttcctaggtaaagatttcttccctgccattgctttacctaaaataaggcaactgtgaggccgctgtcccaacccggttacactcctattatatgtgcctatcatcctgaggagtaatttgattcaggtgttctggaagtcatgctgtgggctgtgtctgttgaattc

SEQ ID NO: 392387 - DNA, 1000 bp, Homo Sapiens
tttagctggcttataaactaacacttttactaactgcaaaataggccttctgtgtgatttctgagacttggctagctatcagtaacttgttgcagcatactagccaataaagtgggatggaaaaggtagatgaggggtggggtaggtagggaaatagtgggctaggctggcagagaatgctgaatggatgttcacttgcatgcctctggattttaaaattattgttcacatgactccttttctgtgcgttgggaagcagctacagagcagtagaatccactgaattggtacactgaagcaggcatgccatttaaatgaaggcagttaaccttgactgttgtatcaccagagttaaagaattctggtgcccctctttaagtcttcaggaagtgtttagaggcttattcacattagttaaaacaggccccccccaccttccccaaggcaacagaaaacataaccattagctctcttcctgttttccttcctcatttcatgcttgcttcggctgctaaactgaatttttgttacttagaatattataaagtgtggatgctttctataatgctattggtctaagtgtgattaaatttcattaaggtgtataagcctctaattattacataactggcacgtctgacttttgctatcatttgaggattctactgtatataagtttcatctaacattggcattaataaccacaggtatattccaactaattgttacttcttgtaattgccagactacttcaagagttctcgtaagttttagattttcagagacccatcttcaatactttgaactcattctggtaaacttccttctacctatgtgcaggtccctgtactccagccaacacaggctcagtaactggaaatgaattggctaaaatggtagcaccattgggtttcttaatggagctttaggagttctttatggaaaaaagcacagaactaaattcctcaaaaaacaaacaaacaaacaaaaccacacacac

SEQ ID NO: 392388 - DNA, 1000 bp, Homo Sapiens; identical to SEQ ID NO: 282828

SEQ ID NO: 392389 - DNA, 1000 bp, Homo Sapiens; identical to SEQ ID NO: 282829

SEQ ID NO: 392390 - DNA, 1000 bp, Homo Sapiens; identical to SEQ ID NO: 282831

SEQ ID NO: 392391 - DNA, 1000 bp, Homo Sapiens; identical to SEQ ID NO: 282833

SEQ ID NO: 392392 - DNA, 1000 bp, Homo Sapiens
cctccaatgactcccagtctgaggactgcgagacgcgacagtggcttcccccaggcgaaagcccagccatcagctccgtcatgttctcggccggggtgctggggaacctcatagcactggcgctgctggcgcgccgctggcggggggacgtggggtgcagcgccggccgcaggagctccctctccttgttccacgtgctggtgaccgagctggtgttcaccgacctgctcgggacctgcctcatcagcccagtggtactggcttcgtacgcgcggaaccagaccctggtggcactggcgcccgagagccgcgcgtgcacctacttcgctttcgccatgaccttcttcagcctggccacgatgctcatgctcttcgccatggccctggagcgctacctctcgatcgggcacccctacttctaccagcgccgcgtctcggcctccgggggcctggccgtgctgcctgtcatctatgcagtctccctgctcttctgctcgctgccgctgctggactatgggcagtacgtccagtactgccccgggacctggtgcttcatccggcacgggcggaccgcttacctgcagctgtacgccaccctgctgctgcttctcattgtctcggtgctcgcctgcaacttcagtgtcattctcaacctcatccgcatgcaccgccgaagccggagaagccgctgcggaccttccctgggcagtggccggggcggccccggggcccgcaggagaggggaaagggtgtccatggcggaggagacggaccacctcattctcctggctatcatgaccatcaccttcgccgtctgctccttgcctttcacggtaagtcactccctacgtttccacagcccggctctgctcagccttctcatgctctcccctgacgcctccaccctttccaccgccctacaaactttttgcaacttgtaaaaatatgtcctaatttgtaaagatctgtagccttccccactagtttcccctcctcttta

SEQ ID NO: 392393 - DNA, 273 bp, Homo Sapiens
  misc_feature (176)..(177): n is a, c, g, or t
gccgacatcgaaggctcaaaaagcgacgtcgctatgaacgcttggccgccacaagccagttatccctgtggtaacttttctgacacctcctgcttaaaacccaaaaggtcacaaggatcgtgaggccccactttcacggtctgtattcgtactgaaaatcaagatcaagcgagctnntgcccttctgctccacgggaggtttctgtcctccctgagctcgccttaggacacctgcgttaccgttagacaggtgtaacgccccagtcaaactcc

SEQ ID NO: 392394 - DNA, 1000 bp, Homo Sapiens; identical to SEQ ID NO: 282834

SEQ ID NO: 392395 - DNA, 1000 bp, Homo Sapiens
cttttcttgtgtagatctgagttgaaatcctgtggacactgggcgaattactttttagatctgtagctctgactcctcaggcataaaatgggaataatgcttttacagtttagtggcggaactaaactcccaaaattatttgttatatggatcaagtaataacgtcagtaatgtttttggtacaaagtcattatttaataaaagttattgttccatcttgcttgcccccccacccctgtcatctgcctgcttctttcttgattaaatattgataggatattagatgcccaagatctaagagtgtgctctgtgcttcagaatctgaatctttgcttatctataattcagattttctgtttgtggattccagtatcaggactatagtttaacttgcagacttgatcttacactattctccctcttcgacgtgtgatcattgtaataaggttaagagaaaggcagggactagaatgaagaaattttagttaagagaacaagatacattgtaacatcggtattttatgcagcaatttaacagttgggagatgctggtgtggggggatatcttaggaagaggtagaaatgagacatggcctcagtgggaaggaaggatgaaagatatatttcagtatttgatggcttgctgtcttccttactgtactggccttttccagctctgctgctatctggcagcaatgccaggtcatttcttgtactcttgggaagaaatacgtttttcactttctgaccaggaccatgcctgtggagtagatgttgacaagaaacactgaccagatcaaaatgtgtctcaaggagaatggcacaattttgtgcaaatgaatcaaggaagtcttattgcacaagagtatcctggaacccagtgcaattgattttttagaaaaatatatcacataggggaaaaaaactggaatatgttgaaggagacgtatataatatttagcatccagattgatgacttctgccctaactatgcaatgtt

SEQ ID NO: 392396 - DNA, 1000 bp, Homo Sapiens; identical to SEQ ID NO: 282835

SEQ ID NO: 392397 - DNA, 1000 bp, Homo Sapiens; identical to SEQ ID NO: 114955

SEQ ID NO: 392398 - DNA, 1000 bp, Homo Sapiens
ggaatccttaaaacttcaaaggttctgtggccccaaagggagtgtgcatgccgttcttatagacgtcttgagctgcaagcctgttatgtgtatcgttaggtgctttggttaggtgttttttaacttcagaagtttaacgtcatttcaaaggcctccttctcataatggagtatttcctccatatgcacatcctgagcaaaggtaaccccaattaaagtagtagctcagagttttaaaagttttaaagtggcatacaacagtagaattggggctcatcaattatcaattctttcacccttcaaataattcttttctttattcaatgcctgtagctattgcattaatgaccacagcggtcatctctacctgcgaccatggtatagtagccaagatcaagagagtgatcatggagagagacacttaccctcggaagtggggtttaggtccaaaggtaagtggtactgggttgcgtgccctgccaggttcttttttttttttttttttttttaaatttatttttttattgataatttttgggtgtttctcacagagggggatttggcagggtcataggacaatagtggagggaaggtcagcagataaacaagtgaacaaaggtctctggttttcctaggcagaggaccctgcggccttccgcagtgtttgtgtccctgggtacttgagattagggagtggtgatgactcttaacgagcatgctgccttcaagcatctgtttaacaaagcacatcttgcaccgcccttaatccatttaaccctgagtggacacagcacatgtttcagagagcacagggttgggggtaaggtcacagatcaacaggatcccaaggcagaagaatttttcttagtacagaacaaaatgaaaagtctcccatgtctacttctttccacacagacacggcaaccatccgatttctcaatcttttccccacctttcccccgctttctattccacaaaaccagcattgacaccattctaaa

SEQ ID NO: 392399 - DNA, 1000 bp, Homo Sapiens; identical to SEQ ID NO: 282837

SEQ ID NO: 392400 - DNA, 1000 bp, Homo Sapiens
cccaatgtcatggagaagccataggaattctggccaacggagatgcagcccgtagtcacagacatggtgacggtgcactgggtggctgagagcagcacagcaggctggttctgtaccctcctcagggtcacacatggggagagcaggagggaaagggaggtgcagagactgcaatttccatacctggagcctgggcatgagctgcccgccaccaccctgctgcccttcctggctgctgtgggccagtgctgctctcggggcaacaacaagaagccgggcacactgctcagccactccaagtgttgttggacaatggtcttgggggagtggacaatggtcttgggggagcggacactggaagcccctccctgcccttctggcatagcctcagatctccctgggctctgcttgggttatgggtcaaaaggacacagtctcacaatgcccctgtcttctccacaccctaccctgtcctcaggaatatggtgggaatttaccgcctccctccctaggtccaggctggccggctgaccaagtgtccggtgtcccttctcagtccctgcgcccaggttgggttttcccacatccgtggacacccccgccacaccccctttaggtacctcatccacctctaggtcagttgcagcaagggtgcaacccagctgggcaccttcctggccatggagcagctgctgcagcaggcagggtctgagtgcaccgtggatatctttaacgtggccctgcagcagtctcaggcctgtggccttatgaccccaacactgaagcagtatgtctacctctacaactgtctgaacagcgcgctggcagacgggctgccctgagtcagcactggtcacggtgcaggagaggtttgtgccctgtgggatggggacagcattcctgacacatccacgtgggcctgggctccctggaagggcggcctccactgggccctgtgctgggaaggtacagggtcttggaataaagacctgtggccaag

SEQ ID NO: 392401 - DNA, 1000 bp, Homo Sapiens; identical to SEQ ID NO: 114956

SEQ ID NO: 392402 - DNA, 911 bp, Homo Sapiens
agagtagggtgctgtggtctgagctagagggtgaagctggcggagcaggaggatgggcggtgatagactagagaacaagacctctgtctccgtagcatcctggagcagtctgaatgccagaatggataaccgttttgctacagcatttgtaattgcttgtgtgcttagcctcatttccaccatctacatggcagcctccattggcacagacttctggtatgaatatcgaagtccagttcaagaaaattccagtgatttgaataaaagcatctgggatgaattcattagtgatgaggcagatgaaaagacttataatgatgcactttttcgatacaatggcacagtgggattgtggagacggtgtatcaccatacccaaaaacatgcattggtatagcccaccagaaaggacagagtcatttgatgtggtcacaaaatgtgtgagtttcacactaactgagcagttcatggagaaatttgttgatcccggaaaccacaatagcgggattgatctccttaggacctatctttggcgttgccagttccttttaccttttgtgagtttaggtttgatgtgctttggggctttgatcggactttgtgcttgcatttgccgaagcttatatcccaccattgccacgggcattctccatctccttgcaggtctgtgtacactgggctcagtaagttgttatgttgctggaattgaactactccaccagaaactagagctccctgacagtgtatccggtgaatttggatggtccttctgcctggcttgtgtctcagctcccttacagttcatggcttctgctctcttcatctgggctgctcacaccaaccggaaagagtacaccttaatgaaggcatatcgtgtggcatgagcaagaaactgcctgctttacaattgcc

SEQ ID NO: 392403 - DNA, 1000 bp, Homo Sapiens
gctaggttctggtgtacctggtcacccagcagccatcccccacccggccattgtgcccccctcagggaagcaggagctgcagcccttcgaccgcaacctgaagacacaagcagagtccaaggcagagaaggaggccaagaagccaaccatcaagaagcccctcaatgccttcatgctgtacatgaaggagatgagagccaaggtcattgcagagtgcacacttaaggagagcgctgccatcaaccagatcctgggccgcaggtggcacgcgttgtcgcgagaagagcaggccaagtactatgagctggcccgcaaggagaggcagctgcacatgcagctatacccaggctggtcagcgcgggacaactacgggaagaagaagaggcggtcgagggaaaagcaccaagaatccaccacagaccctggctcgcctaagaaatgccgtgctcgctttggcctcaaccagcagacggattggtgtggtccgtgcaggaggaaaaagaaatgcattcggtacttacccggagaaggccgctgccccagccccgttccttccgatgacagtgctctaggctgccccgggtccccagctccccaggactcaccctcataccatctgctgccccgcttccccacagaactgcttactagccctgcggagccggcacctacatccccaggtctctccactgctctcagcctcccaaccccagggcccccacaggccccccgcagcaccctgcagagcacacagagaggaagaaagggaatcagttcctgcatccgtttctcagaaaacagcacagaacagaagggaatgctgctcaatactggcacacagaccagaggtagccagcagtacacaagactgcaaggcaacaagtacattatcaatgaattagccatctatcactcaaactatgtcccgcattggaagtgtgtcaagcaagagcaccttcgacaacacttttcggccaccactaatgttcatctccactga

SEQ ID NO: 392404 - DNA, 1000 bp, Homo Sapiens
ccaagctgaatcagagagcattcaccacgcttcttgttacatgggtgccccagtaaacagcaataactgtgagaaccagcaaatcagtggagtgcacttcctgttttactggaattccaatttatttgatgaatacttaactgttggggacaatggaggtgtggccttgcctgaaggctggcgagaatttctcccgggtttatctgggagtcacactgccgcctcctctccccagtcgcccaggggagcccggagaagcaggctcgggagggagggagccggaggaaaagaagaggaggagaaggaggaggacccggggagggaggcgcggcgcgggaggaggaggggcgcagccgcggagccagtggccccgcttggacgcgctgctctccagatacccccggagctccagccgcgcggctcgcgcgctcccgccgctctgcccctaaacttctgccgcagttccctttcaagccagcgaatttattccttaaaaccagaaactgaacctcggcacgggaaaggagtccgcggaggagcaaaaccacagcagagcaagaagagcttcagagagcagccatcccggagcaccaactccgtgtcgggagtgcagaaaccaacaagtgagagggcgccgcgttcccggggcgcagctgcgggcggcgggagcaggcgcaggaggaggaagcgagcgcccccgagccccgagcccgagtctccgagcccgagccgcagtcgctgcggctactctgctccggattcgtgtgcgcgggctgcgccgagcgctgggcaggaggcttcgttttgccctggttgcaagcggcggctgggagcagccggtccctggggaatatgcggcgcgcgtggatcctgctcaccttgggcttggtggcctgcgtgtcggcggagtcgaggagcagtaataattcatttacagggagtcttactgccttttcctttccagagcctctcctcacattcccaagctgtttatatgtga

SEQ ID NO: 392405 - DNA, 1000 bp, Homo Sapiens
gtattgtcagttttgttcatcttgattttcatattgggcttcaacaagcaattatggagtggctgcctctgcccccggggatcgtcctcggagggacaggatctgtcaggggagtcactgacccctgaattactggcagctcccaaggcagggggactggaagagcagggagagttgtgcacagcctggagaggggagggcagagtgaagaaatcaaggttagggagggtgaagaagccgcatctggaggacggcgctggggaccgtaacccccggtcatttagcggcagcagagtggggtatgcacaggtgttccaagccaagggaccaactgccccaggaaaggagcccttaaggaagaaaggcaggagtgtggggcaggaagaccggcttcccctttccattccacacggctggctcgcgatattctgtttctcctgcgacagcctggttcctccctgctccccagctcgcctctgccacccttcttccctcagtccagatcaagagttcaagggacggggacagatgatcagaaaggcccagctcaggcaaggaaggggagaaaagggaactcgtatatgcggtgggtgggaatggaaagtagtacagtcactatggtggaggttcctcaaaaaactacaaatagaaccgccatatgatccagcagtcccacgactgggcatttatccaaaggaaagggaatcagtgcatcagagagacacctgcacccccatggtcctggcagcactgttcacaatagccaagatatggaatcaacctcagtgtccaacaacagatgaatggctaaagaatgaaatagtatttcattgtggatgttggtacatctacacaatgaaatactactcagccataaaacagaatgaaatcctgtcatttgcagcaacatgaatggaactggaagacgttaagtgaaataagccaggaacagaaagttaaacatggcatgttctcactcatatgggaaagctaaaaaaaa

SEQ ID NO: 392406 - DNA, 1000 bp, Homo Sapiens
caaagaaacctatggaatgctactttatgtttaagaagaaaaaaaagaaacgggaattgaactcagctctgcatcaagcggacctaatagacatstacagaactctccaccccaaatcaacagcatatatatctttgtcagcatcacatggcacttattccaaaactgaccacttagttggaagtgaagaaatcctcagcagatgtaaaagaatagaaattataacaaactgtctctcagaccacagtgcgatcaaactagaactcaggattaaaaaacttactcaaaaccgctcaactacatggaaactgaacaacctgttcctgaatgactactgggtacataaagaaatgaaggcagaaataaggaagttctttgaaaccaacgagaacaaagacacaacataccagaatctctgggacacattcaaagcagtatgtagagggaaatttatagcgctaaatgcccacaagagaaggcaggaaagatctaaaattgacaccctaacatcacaattaaaagaactagagaaacaagagcaaacacattcaaaagctagcagaaggcaagaaataactaagatcagagcagaactgaaggagatagagacacaaaaaacccttcaaaaaatcaatgaatccaggagctggttttttgaaaagatcaacaaaattgatagaccgctatcaagactaataaagaagaaaagagagaagaatcaaatagacgcaataaaaaatgataaaggggatatcaccaccgatcccacagaaatacaaactaccatcagagaatactataaacacctctaggcaaataaactagaaaatctagaagaaatggatacattcmttgaaacttataccctcccaaaactaaaccaggaagaagttgaatctctgaatagaccaataacaggatctgaaattgaggcaataattaacagcttaccaaccaaaaaaactcaaggaccagatggattcacagtcgaattcttgac

SEQ ID NO: 392407 - DNA, 1000 bp, Homo Sapiens; identical to SEQ ID NO: 201519

SEQ ID NO: 392408 - DNA, 1000 bp, Homo Sapiens; identical to SEQ ID NO: 282841

SEQ ID NO: 392409 - DNA, 1000 bp, Homo Sapiens; identical to SEQ ID NO: 206353

SEQ ID NO: 392410 - DNA, 838 bp, Homo Sapiens
cccctcttaatctcttcctagaaatgagattcagaaaggacaggactgcatccagcctgtttgggaactcagacaaatgtgtgttgtcacagacacaaatagaggtctactatgaaataattggcttgctagtgtgctaatgacagacaatgctgatttgctccaacctcatacagtttcacacataaggacaatcatctatgtttcatgaaagttctatctactttaacattattttgaagtgattggtggtggtatgaattaacagtttaaatttaaatcctaaaattcagtgtgaattttttataatagcataaaaattcaaagatgtccatacaagaaaaattaaaatttggttaggtttagcagagtttgagaatccttactaccctcccacatagtattgtaatgtgaatataggcagttactattacaggcataatgatgattatgtattaagcagaaagaagtatcaccaccagtttttttctttgaatgcccctcagtacttctgcatttataggatggtagactggtttggtttagctctcaaaagtgaaaacatttaaagtttcctcattgggtgaaaaaaattaaaaagagtgagagactgaaaactgcagcccacctacgtttaatcattaatagtgagcccttcagtgaacttaggtcctgattttggagtttggagtctgacctttccccaaagataaacatgattgttgcaggttctgaagagggtcactccctcactggctgccattgaaagagtccacttctcagtgactcctagctgggcactggatgcagttgaggattgctggtcaatatgattctt

SEQ ID NO: 392411 - DNA, 1000 bp, Homo Sapiens; identical to SEQ ID NO: 206365

SEQ ID NO: 392412 - DNA, 1000 bp, Homo Sapiens; identical to SEQ ID NO: 206362

SEQ ID NO: 392413 - DNA, 1000 bp, Homo Sapiens; identical to SEQ ID NO: 282848

SEQ ID NO: 392414 - DNA, 1000 bp, Homo Sapiens; identical to SEQ ID NO: 206363

SEQ ID NO: 392415 - DNA, 1000 bp, Homo Sapiens
gatatcttgataaactggagcccagcaagattacaaagtttgagaatgctttcttgtctcatgtcgtcagccagcaccaagccttgttgggcactatcaggtatgaatgcaattgttggcatctttttttaaagttatgtttaagatatgaagttaaaattattttcaaatctgtagttaggctagtcattaaaactttttccaggtcagaacttacgacctgcttttatttccaaatagggctgatggaaagatctcagaacaatcagatgcaaagctgaaagagattgtaacaaatttcttggctggatttgaagcttaaactcctgtggattcacatcaaataccagttcagttttgtcattgttctagtaaattagttccatttgtaaaagggttactctcatactccttatgtacagaaatcacatgaaaaataaaggttccataatgcatagttgttttctgtcatttgtgttattctttaaaaccaagatcaaattgagaaattggtaagcaaatgcttcttgatctattttacttgaatattggtacagtcaactgggctagataattcaaggctgagctctttgtaagtttttttttttttttttttttttgagactgattctcactctgtcactgaggctggagtgcagtggcaccctgtcggcccactgcaacctccgtctccgggttcaagcaattctcttgcctcagcctcccacgtagctgggattacaggtgcccaccaccacgcctggctagttttttagtatttttagtagagacggggtttcaccatgttggccaggccggtcacgaactcctgacctcaggtgatccacctgccttggcctacctaccacagtgctgggattacaggtgtgagccaccacacccggctgctctttgtaagtttctagagtactttgtgtttaagagaaattcctaaactggaatatgtggcaggctgacaatactgaagaggatagctggc

SEQ ID NO: 392416 - DNA, 1000 bp, Homo Sapiens; identical to SEQ ID NO: 206366

SEQ ID NO: 392417 - DNA, 1000 bp, Homo Sapiens; identical to SEQ ID NO: 114958

SEQ ID NO: 392418 - DNA, 1000 bp, Homo Sapiens
tgccaaacactctccccaggagatccagacccgcctctttcagagacttttaacttaaacatctgtccctacccagcaggcaaactagagctcctgaagctcagtccctgtccttgcctctgtagacaggtcaccttgatgagcttcctttttttttttttaatttttttttattttaggctttattggggcataattgatcccccaaaattgcatacattcaaggtatgcagtgtgatgatttgatatgggggtatattgtgaaaccattaccacaatcaaattaatcagcacgtccatcatcacacacagttaccatttgtgtgtgtgcacgtgtgttcacctacgacgaggacacttggacctactctgcagatctcaagtaaacagaaaatctccctttttgacaaccatcctccaccctttcaatcccaaccttttcctagattatgtccctagctctgtttttatttctgctgtgctgcttcagatccattctgactctgccaaacccttctttgtgagctgatagattgctggattgagaattacagctgggcgcggtggctcacgcctgtaatcccaacactgtgggaggccaaggccggcggatcacttgaggtcaggagttggagaccagcctgaccaacaagatgaaaccccatctctactaaaaatacaaaattagctgggcatggtggtgcacgcctgtaatctcatcttcttgggaggctgaggcaggagaattgcttgaacccgggaggtggaggttgcagtgagccaagatcctgccattgcactccagcctgggcaacaacagtgaagctccatctcaaaacacacaaaaaaaagaagtacaaagtctgagacttcaggccagctctgctacactatatactctaacctctctggtcctacttggtgacttctttccctctggtcgtgttcaagttcccgtcccatccagtcaagcaggtactcattggtaccttaccctgtg

SEQ ID NO: 392419 - DNA, 1000 bp, Homo Sapiens
gcttctaccctgtgtcaccgtgggcagtggcaggtggcctggcactgcatggagccagcacgttgacctccctctcagctccctgctcagggacggtggacaggttgcctactgggacactctaggttgctgggtccatggggaggattgggggaggagaagcagtgccttccctctcgtgtggggtgggggctctctcttcttggtgcctgctgtctttctactttttaatttaaatacccaacctctccatcacagctgcatccctgagagtgggagggggctgtagtggtagctggggctcccaagaacgactcgggaatgtcatctccatcttcacccttcagagagcagtcctttctctgtgcagctggagacgctggtgaggagagccgggtccaggttcttaagaatgaggtgcggaggggctctccggtgctgctgggctgggttgagcaagcctacgcagacaagtgtgtgtgtggaccatccgcacctccagcccccaccccaccctctttgtctcagcgtgttatgtgcaatgacctatttaaggtaaacccattccaactacagcagttcagggctgatccaagcactgcctccctcctgctctgtccaggtggtctggaccataaactcaacttgagagggaaggcttggggttgaggacttgtgatcagaaaaactgaagatggaagttttggccggtgctcattagacatgagtcctcactctgtgtcctgagcccgtgtcattcttccaacctccctgcccccacacacttatcccagacacaacaccatgtggtctggaggtcccagcccccaccctaaaaaggttatccctgagaactccaccagacttgggagcccaagtgcagtgcctggtgctgctcccatctgccgccccccttctctcctgcaattggtttgtactcactgggctgtgctctcccctgtttacccgatgtatggaaataaaggcccttttcctcctg

SEQ ID NO: 392420 - DNA, 1000 bp, Homo Sapiens; identical to SEQ ID NO: 282853

SEQ ID NO: 392421 - DNA, 1000 bp, Homo Sapiens
taatgaataatatacaaaagtatgtcagagggtcaaagatgccttaaagatcacgagatcaagctctctttggatagatgagcaaagagaagccccaggggatgggggatgggtcagtgcctgaaagcaaatcagtgacagaacaaggagtcactttatttctgcaccatgcactgcgatcttaccgcttcattaaagtaaaacaaaattagtcatttgcagatattcttttgtatttaataggaaaaaaatgatagctagattttcttgctttacagtttgtcctacagagtaaactattatacaagaagaagaagtagattgtgcctaatgttttctgtttattttgtttcaggtaagccttcccagtgatccaagctgtgttgaagaaatcttgcgggtgagtttaaacctttatttttgtgccttttaataatgaagcaatctatctgcttaagctgtttaaagtaattactgttctgtttcaaggagtttcatgatggggaatcctgacattctacttcaagacccttctgcttattccagtggcctcatttcttgcctgtcttctttccattttgtaatcaagctagtcttctaatatcactaagcttctgccctatccattcctacatccttctcagacagagacttaccaccttctttaggaaacgttccctgttcaagcaccataccctaaacctttgccttttacctttctgggatctcagctcaatctcactgctgccgcccactatgtggaacatggttaccgagattgattgtggcctataataaggggaagagatgtgggaatgggagaggaggagaagatgagagacttgaaaatgatggcatgttgtggaaaagtgttacttatggaagtgaagtgtatgtgtgtgaatgccttgagggcagaacaaaagttgaaagaatggctataatctcttctgaagttaacaatccaacccaaagaagaaacccaaagttaagcaagaaa

SEQ ID NO: 392422 - DNA, 1000 bp, Homo Sapiens
gacgatgccaggggataggattactatcttccaacaactgaaggcttgtcattcaaaagaaggagaagatgcattctgtgcagctccaaagtacagtctataagtagaagttcctgggggacaagtttttaactcacaaaaaaggaagaatagcctgatgatgctgtctcaacatggagcaggctacttcaagcagtagcaagctccctgtcactggcagtttgcaagcatctgctggatggtccaaatgactttaaattcaccttaagtattaggtcagttaagttagtatttataaaggacctacactgtttagtgctaagaaagggcttgattttttaattgccctgaaataaagtttctttatttttcctcattaggagatgacccattcctggcctactcctctcacttccatgcatactgctggacactctgagcagagcaccttttccatcccaggacaggtcagttctcttccttcctgcatttttgtttgtcttattttaattataccaatcttccaactggattctcagtggcaaaaatggccttggtcttctagtgccataaaatctagactctcttgcccctcagaatagcaatataaaaataatttttattgaaagtgagtctttaaaacaaaatacacacagataccggcatgcgtgtcttactccatagggtgttgccactgtccaagtcgctgtgcctagaacagatgagacagagattgaataactcgtcccttaagaaatatcaaatagatgatggaacagcaacgttcaagattttaaagttacaaaacctgtactctttaatgaactgattttcatttttatcaccttccagttcttgctcacaagcagacagatctttacaaaacaccacatcacactgacagagctttatcttctacagttctattgtcaaatgtttaatattatttttatttaccttctctcaacaagagttgctttattggcatcactttttaaaa

SEQ ID NO: 392423 - DNA, 825 bp, Homo Sapiens
  misc_feature (286)..(286): n is a, c, g, or t
agctggtaacttaattggcatgtatgaaaataaggcttatagacctggcttatacctgtaatctcagcactttgggagsccaaggctggtggatctcctgaacccaggagttccagactggcctgggcaacatggcaaaactttgtctctacaaaatataaaaaaattagccaggtgtgctggcacataactatggtcccagctactcaggaggcagagataggaggatcaccggagtccagggaggtcgaggctgcgatgagctatgaccatgccactgcactcnagcttgggtgacaagtgagaccctatctcaaaaaaaaattttttctttaatttttaaataagaaaataagacttatgtacttgtgttacccttagagttttggtctcctgattattgtgtggcttatgactgttgtattttctttcttgaaatttagaaaattaccaaagaaatggatgacttcctacaaaaattgaggcagaagatcaaaatcggagtggtaggcggatcggactttgagaaagtgcaggagcaactgggaaatgatggtaaatgatgggttgctaattacatctggtaaaaagattacttcttatgaggatattgttgccaagtatcataggctgccctaaaaccttgtccccatatggcgggctttctgcttccttttttgggaaacattttcttggcctttgcttttcctctgcttttaatccagtacatttctggagttactgatggagaactgggtactcagatgtgtgagtagattcacctagaaaggtcagtggctgtatctgcacatgataatctctctg

SEQ ID NO: 392424 - DNA, 1000 bp, Homo Sapiens; identical to SEQ ID NO: 206368

SEQ ID NO: 392425 - DNA, 1000 bp, Homo Sapiens; identical to SEQ ID NO: 282855

SEQ ID NO: 392426 - DNA, 1000 bp, Homo Sapiens
ctccatctctcaagataatatagttggatcaaacaaaaacaacacaatttgtcccgataattatcaaacagcacagctacttgccttaattttagagttactcacattttgtgtggaacatcacacatatcacataaaaaactatattatgaacaaggacttgctaagaagagtcttggtcttgatgaattcaaagcacacttttctggccttgtgtgcccttcgctttatgaggcggataattggacttaaagatgaattttataatcgttacatcaccaagggaaatctttttgagccagttataaatgcacttctggataatggaactcggtataatctgttgaattcagctgttattgagttgtttgaatttataagagtggaagatatcaagtctcttactgcccatatagttgaaaacttttataaagcacttgaatcgattgaatatgttcagacattcaaaggattgaagactaaatatgagcaagaaaaagacagacaaaatcagaaactgaacagtgtaccatctatattgcgtagtaacagatttcgcagagatgcaaaagccttggaagaggatgaagaaatgtggtttaatgaagatgaagaagaggaaggaaaagcagttgtggcaccagtggaaaaacctaagccagaagatgattttccagataattatgaaaagtttatggagactaaaaaagcaaaagaaagtgaagacaaggaaaaccttcccaaaaggacatctcctggtggcttcaaatttactttctcccactctgccagtgctgctaatggaacaaacagtaaatctgtagtggctcagataccaccagcaacttctaatggatcctcttccaaaaccacaaacttgcctacgtcagtaacagccaccaagggaagtttggttggcttagtggattatccagatgatgaagaggaagatgaagaagaagaatcgtcccccaggaaaagacctcgtcttggctcataa

SEQ ID NO: 392427 - DNA, 1000 bp, Homo Sapiens
tgtgcccagccatgtttgtgttttcataatgggaaaattccatactattctaaaagaaaaaatgtctgccttcttatactagagattagcagttgtttgattttccaatagtccctcatataaaaatgctgcattgcatatactttacatagccaatttaaattatttttagaatctaaagatgatcctatagatgtatgaagatattgcaattaggcttgaaggtgctgggaaaaaggaggttccctagagatacattagttatttaatggatgatctgtgggagaacttgtacttttccacaaggtgactgacaatggcttaagtccccttacagaaaaaaaatctgcctggctggtgttgggaggccatctcttactcttgacccagattgccctttgtggtaggaaacagatgagtgactccacttgttcttctcttttctttttctttcttcctttctttttttttttttttttttttgaggagtctcactctgttgcccaggctggatgcaatggcactgtcttggctcaccacaacctctgcctcctgggttcaattctcttgcctcagcctcccaagtagctgcgattacaggcgtgcactgccacacctggctaatttttgtatttttagtagagatggggtttcaccatgttggccaggctggtctcgaactcctgacctcaggtgatccgcccacctaggcctcccaaagtgcagggatcacaggtgtgagccaccgtgcccagcccagcccatgtgcatatattttcgatgttaccatcagtgagcacctgtcagtgtattagctgcctcccacccctcatgctcctcagccaccaccaaccaccacaagctgttttgtcttagactcatggtgctttcccttttctcttccccaggggatcccacctatacctgaacagaatgatgctgctctcccttataaacatctgagtctaacagctgcctgtgagggattctcagaatggtt

SEQ ID NO: 392428 - DNA, 1000 bp, Homo Sapiens
acaccattctcgagagttagaattcgtagacccgcaacacatggactacccttgccaattgttatggttttatttttaaacctattctgtgaaaaagctcctcggtatttcaaacttgaattacaataaaaacaccaggtagggttgtttttaaatgggtctcaccccagtgctgactactgttgtttaccaactacatttcatctggtaactccattgaaactaagtacctcaaccattttttttttttatcataaagccttttttcaaatggaaagttgtttttgaagatcttgacatcagactttttcaatctttgaaaatgatggaaacagttaataaaaatgtttattttagaattcaggtgatgtctggcttgtgaggagctgtttataagtttgtctttgaaaaaggcttgcacacatcactctgagaccagctgtttcctgtgactttaaccttaccttccccagacaattgagctgaacctgtatctgcggtacagtagctgtttgtgatgtatttcttgttcactgtttctggggaatgttttgaaatattttattataaatccttttaagataggatgactactttcaaaattattgttgcctttggcaccaggaattcatagttgtgattggcagtaagtttgaggagtgttactttctaagttttaacaggtagttttgaaattatttccttttttccaaatttaagtagtgcctccctctgtaatgttgaaacaaggcttcaagtggattgtatagcaagagttaccctggttcatgcaggataatgcggctgttatctttgtcatctggaatgggaatctcatgtctttatccttatgtgcaatatttctataataatagactggaaaggccaccagaaagtggctttcaggtacattgcacaaatagtttccttaagtcattataactcacacattgcaagtaattaattttgttttgtataggtgttgcagtttatgaaattg

SEQ ID NO: 392429 - DNA, 1000 bp, Homo Sapiens
cagccacgaaataaaaatgtctatgaacccgagtaatttatctcctgagtaattctgctaactggctgcaaaggattaggatctgcttgtttaaaagactggatggatataaaatagaatcaactgtagtgttaggctgatcatgggaaatcaaagtaagtttgttttctcttgctgttccaacaattataggaaactatggtccaggaggcagtggaggaagtgggggttatggtgggaggagccgatactgagcttcttcctatttgccatgggtaagtagcttttgagttttacaattattattatcttgggagacatagctgcaggagtaaaagctttttaggatcatggttatctttccttaaaatctggttagatggataatttcataacccattttttttttaccctttacttctgttgaaacaggcttcactgtataaataggagaggatgagagcccagaggtaacagaacagcttcaggttatcgaaataacaatgttaaggaaactcttatctcagtcatgcataaatatgcagtgatatggcagaagacaccagagcagatgcagagagccattttgtgaatggattggattatttaataacattaccttactgtggaggaaggattgtaaaaaaaaatgcctttgagacagtttcttagctttttaattgttgtttctttctagtggtctttgtaagagtgtagaagcattccttctttgataatgttaaatttgtaagtttcaggtgacatgtgaaaccttttttaagatttttctcaaagttttgaaaagctattagccaggatcatggtgtaataagacataacgtttttcctttaaaaaaatttaagtgcgtgtgtagagttaagaagctgttgtacatttatgatttaataaaataattctaaaggaaattgtgtaattatagactttttatttttaaataagttaaggagtgggtagtataattaaggtcgttcaaagctg

SEQ ID NO: 392430 - DNA, 1000 bp, Homo Sapiens; identical to SEQ ID NO: 282859

SEQ ID NO: 392431 - DNA, 1000 bp, Homo Sapiens
cccctaagaatgctatgatttcacgtgcaggtctaatttcaacaggctagagttagtactacttaccagatgtaattatgttttggaaatgtacatattcaaacagaagtgcctcattttagaaatgagtagtgctgatggcactggcacattacagtggtgtcttgtttaatactcattggtatattccagtagctatctctctcagttggtttttgatagaacagaggccagcaaactttctttgtaaaaggctggttagtaaattattgcaggccacctgtgtctttgtcatacattcttcttgctgttgtttagtttgttttttttcaaacaaccctctaaaaatgtaaaaaccatgtttagcttgcagctgtacaaaaactgcccaccagccagatgtgaccctcaggccatcatttgccaatcactgagaattatttttgttgttgttgttgttgttgtttttgagacagagtctctctctgttgcccaggctggagtgcagtggcgcaatctcagctcactgcaacctccgcctcccgggttcaagcagttctgtctcagccttctgagtagctgggactacaggtgcatgccaccacaccctgctaatttttgtatttttagtagagacgggggttccaccatattggtcaggcttatcttgaactcctgacctcaggtgatccacctgcctctgcctcccaaagtgctgagattacaggcataagccagtgcacccagccgagaattagtatttttatgtatggttaaaccttggcgtctagccatattttatgtcataatacaatggatttgtgaagagcagattccatgagtaactctgacaggtattttagatcatgatctcaacaatattcctcccaaatggcatacatcttttgtacaaagaacttgaaatgtaaatactgtgtttgtgctgtaagagttgtgtatttcaaaaactgaaatctcataaaaagttaaattttgaaaa

SEQ ID NO: 392432 - DNA, 1000 bp, Homo Sapiens
gtatatttacatgaaatgcacagaataaaaagaattgaaagtgaaaacttaaggatccaaaatgaacagaaaaaagctgctaaaagagaagaagcattagcatcatttgaggcctggaaggctatgaaagaaaaggaagcaaagaaaatagctgccaaaaagaggcttgaagaaaaaaacaagaagaaaactgaagaagaaaatgctgcaagaaaaggagaagcactacaagcttttgaaaaatggaaagagaaaaagatggaatatcttaaagagaaaaatagaaaggagagagaatatgaaagagcaaagaaacagaaagaggaggaaactgttgccgagaaaaagaaagataatttaactgctgttgagaaatggaatgaaaaaaaggaagcttttttcaagcaaaagaaaaaagaaaaaataaatgagaaaagaaaggaagaactgaaaagagctgagaaaaaagataaagataaacaagctattaatgaatatgaaaaatggctggaaaataaggaaaaacaagaaagaattgaacgaaaacagaagaaacgtcattcctttcttgaaagtgaggcacttcctccgtggagccctccaagcagaactgtgttcgcaaaagtgttttgataattctagttcttacattatttggttatttatcggtttgccaatattagccatagatttaaaccattcaattatttatagttagaggaatatattttaattaaatgccagacactcctgctgacaatgaaagaaatactttggaatgtaatcagtgaaagcatttttttgaactgtagataaactgcctcaaacaaagacctaataatcagattgtttttaccattaagatacataagattttatcatgtcctgataattcttatggtggagtgattcatgatctttttcattaagctctgtatgttatttaagtatatttaattccagtaataaaaaggaaatcatctaggtaccataaaaaaaa

SEQ ID NO: 392433 - DNA, 1000 bp, Homo Sapiens; identical to SEQ ID NO: 114959

SEQ ID NO: 392434 - DNA, 1000 bp, Homo Sapiens; identical to SEQ ID NO: 201517

SEQ ID NO: 392435 - DNA, 507 bp, Homo Sapiens
atgggtgccccgacgttgccccctgcctggcagccctttctcaaggaccaccgcatctctacattcaagaactggcccttcttggagggctgcgcctgcaccccggagcggatggccgaggctggcttcatccactgccccactgagaacgagccagacttggcccagtgggttttttgcttcaaggagctggaagggtgggagccagatgacgaccccatagaggaacataaaaagcattcgtccggttgcgctttcctttctgtcaagaagcagtttgaagaattaaccctgggtgaatttttgaaactggtcagagagacgttgcccccgccacgcagttttatccggtaaagcgaatgattagaggtcttggggccgaaacgatctcaacctattctcaaactttaaatgggtaagaagcccggctcgctggcgtggagccgggcgtggaatgcgagtgcctagtgggccacttttggcgagcagctggctgccatggattga

SEQ ID NO: 392436 - DNA, 1000 bp, Homo Sapiens; identical to SEQ ID NO: 114960

SEQ ID NO: 392437 - DNA, 84 bp, Homo Sapiens
tagcccggttatcgaaatcagccacagcgcctaacttctgcagaagcctttgaccatcaccagttgtacggacacgaactcatc

SEQ ID NO: 392438 - DNA, 1000 bp, Homo Sapiens; identical to SEQ ID NO: 282864

SEQ ID NO: 392439 - DNA, 1000 bp, Homo Sapiens; identical to SEQ ID NO: 114961

SEQ ID NO: 392440 - DNA, 1000 bp, Homo Sapiens; identical to SEQ ID NO: 206370

SEQ ID NO: 392441 - DNA, 694 bp, Homo Sapiens
cctttggatatagtcactccttagcaagcacacatgaagcaactttactaagcaatcaaagatagctgatacttatttttactctcagtttacctctctgaaggagaataagctaataaaatattatatgggctgataaatttcagattattatatacaaggctgggatactcccagagcaggctacttcctggcaactaatttccaggtaagggattgcatgactcgtatctctctccacattttttgctcttttaggtcttggcatggtcacacctatcaatgaccttcctggtgcagatacatcctcatatgtgaagggagaaaaacttactcgctgtaaacttgccagcctgtacagacttgtagacttgtttggatgggcacacctggcaaatacctatatctcagtgagttcttcagctttcaattccttttttaaaaaattccagctagaaggcaactatactcttcttacctttacctggaagtccagttttcagacttattctctaaacctagtatgctagatcacaaccaaatactgatttaaaccttatacccaagggagaggctccaattcccccacctttcttctccccttactatctatgttgttccaagttcctttggttcagaccaactgtagaatctatccaggaagaaatccttctggcaaattgtcctctcctag

SEQ ID NO: 392442 - DNA, 867 bp, Homo Sapiens; identical to SEQ ID NO: 282868
  misc_feature (669)..(670): n is a, c, g, or t

SEQ ID NO: 392443 - DNA, 1000 bp, Homo Sapiens; identical to SEQ ID NO: 282870

SEQ ID NO: 392444 - DNA, 1000 bp, Homo Sapiens; identical to SEQ ID NO: 195008

SEQ ID NO: 392445 - DNA, 1000 bp, Homo Sapiens
gaaggcccatgtacatccagctgcagtgggacgagcctgggaagcatgggaagaccccatccctacaaaaaaagtgttgttaattggccaggtgtgggggtgcacgcctgtgctaccagctctttgggaggctgagacggaagatcactttgagccagggggtttgaggctgcagtgagccctgatcatgccactgccctccagcttaggtgacagagacccatcttaaacaaaattaaaaaatttaaaaaggtccatgtatataccaagtatcagtaactgagaaaacattttgcccactggttaagccccataaatagaatccagggcaggggcttggtctgcttcctctctcacattttcctatgttccaacagcaaggcaggcaagatttgcaaaatgtccaaggcccctgtactccaggagggtccaatcatgaggcacctaataatgcctttgggcagaaagtcctagaactcagaagtgccatgaccttgcataggggtaggcctgcagctgaggggtgtcacgtggtgcaaaaggcctcccagctacatcctgggatggggtttgagatggattaatggcctttgcatggcacagaggatgtttgcccccaggtttatcccttaataaaagtgaaattaccagaaaaaattaaggtgcctttcagcccatctcttctgacatggaagaggtttgctgagcggcttatgttctgaatttgtttatgagaactgatcattagtgagactggccacagtatttaaccttgcacatgcatgctcagtgaagcctagacattcagagcagcagaaataaagtaacttatttttctttccaccttgcctgagactggcattttagagacctgttaaaagaaagtcttcacatggctgggtgcagtggctcacacttgtaaccacaggactttgggaggccaaggtgggatagatcgcttgagctcaggagcaagacaccatctcaaaaaatgagaatt

SEQ ID NO: 392446 - DNA, 1000 bp, Homo Sapiens; identical to SEQ ID NO: 282872

SEQ ID NO: 392447 - DNA, 1000 bp, Homo Sapiens
ccggactctcaggcacctcagtgcccctgccccagggcagaggcccaccccgtgggttggtgcagtggctgccctgggctccacgggcagcacagggagtctgtccaggaagcagcccagccggggtcagtattccgtggagccagtcctgagctgggaggggcatttaacacccctgagggcctggggcaggacacagctggccctcctcattgtcaggggaagcaagtgcccaacatctgtaacctcccttccctgctcagtccccaggccaaggttgggacccctctccatccctgtccccagagcctagacctcagggacctaggaaaagcctcttgctccctccccacggcagcagacagggcagggcctccagcccccagagggccggtggggggtgctctcgggccttcctgctctcctaaggttgcggggacagtagagtgctgagccccagacccagtcaccccaagatggccccactctatccactctctagacctttgggaaatctgggtccctctcctgatttgatccattcggccccaactccagagtcgggaatgggagatgaaactagttttccacccacttttggacaagtcccacccctagatctgaagcaagctctaccagcagcgtgtcctggaagcctgcctgcctgcctgcccgtctgcacaggtgtcttgatccagccctgcgtcttcgagcccctgtgccaccggtccccacggcccgccaggagtctctttgtacccactaggcttccctgatgaccatctgtctgtccgtccctgtttttgctgtacataactcctgctgcaccctctccccgcacacccgtcacccatgagagagaaacctctctagggaaaggcagggtggctgcacccagcaactaatccaaatggcaaatattttgtaacaaaatagcccagaggtattttatctgttcaattcatagagttttagagattatattgaaagatgtcacttg

SEQ ID NO: 392448 - DNA, 1000 bp, Homo Sapiens
  misc_feature (13)..(13): n is a, c, g, or t
  misc_feature (233)..(233): n is a, c, g, or t
  misc_feature (442)..(442): n is a, c, g, or t
tagatactagtgnaaataaagatagaaaatcttgatcataatgtcttaagtttgggaactgtgatattaagaaaagaaattcccttctagaggtgctggccaaaaagccttttgggctaacttaagtattaaatttatatatttaaataattatattttaagttgtagaggattttcccaaggattttatgcttacttgaatgttctttgaatgttcagatgcatatcctaanctggatgcttctcaaggccttactgcatatttgtgttgcatatttatgttagttgcaccagggccatttgtagtttgggcaaccgaatgccttaattggaaaaaaggcattgtggtttcccctattatctaaattgttacattttaccatttcattccgaagttggttttactttattaaatgaagatttagttttcatatcgtatacntagctgtatagatttcaaaattaggttgttaatttgtgtcacttactatttttgtgttggtaatgctttaaatgcatacttaaaaatgaagtactgttatctaagctactgtgtttagaaaatgttaagaatgagcagaaatttttatagaaaagataaacggaagaagagataagatactgcgaataggccctcaaacttaaaaaagaaaaaactttgccagttttaaggacatattttgattctttcagtatcttaacacctttttaaacaaagttcttgatagtaccactattattgggtttgttttatgccattattgattcttgatattcaagcatttacaatgtagcatatttgattttcttttttctttctttttttggcatgtttttagcataaatgttgcattttatcttagtgtttggatgaaaacatttgtgttgtttagctttcatttgctttgtatatttaataatgtacctttattttccagtatgcctacattttgtattgcacaataaatttattttaagctgaaaaaaaaaaaaaaaaaaa

SEQ ID NO: 392449 - DNA, 1000 bp, Homo Sapiens; identical to SEQ ID NO: 282873

SEQ ID NO: 392450 - DNA, 1000 bp, Homo Sapiens; identical to SEQ ID NO: 282874

SEQ ID NO: 392451 - DNA, 1000 bp, Homo Sapiens; identical to SEQ ID NO: 282875

SEQ ID NO: 392452 - DNA, 1000 bp, Homo Sapiens; identical to SEQ ID NO: 114962

SEQ ID NO: 392453 - DNA, 1000 bp, Homo Sapiens; identical to SEQ ID NO: 207011

SEQ ID NO: 392454 - DNA, 1000 bp, Homo Sapiens; identical to SEQ ID NO: 114963

SEQ ID NO: 392455 - DNA, 1000 bp, Homo Sapiens
cctgtcctcacttggcacaaccccccaacccggcccccaccgcttctgaggacacgtccctgttcccagcctcctccatcctcgtccctaaaccagagcccttctgtgatctccctgttgtccttccagactaccaaggtggccgagaagggagaagcagttcgtggagggagacgcgggaagaaaggggctgcgacaaagatggcggccgtgacggcacctgaggcggagagcgggccagcggcacccggccccagcgaccagcccagccaggagctccctcagcacgagctgccgccggaggagccagtgagcgaggggacccagcacgaccccctgagtcaggagagcgagctggaggaaccactgagtaaggggcgcccatctactcccctatctccctgagcagcaactaagtttaggcccagctgccagacctcagagatctcaccagcagggtgcttcccatgttgatgacaataaaatgaatgtgttgcaaaccgatctgagtgactccgtgttctctgatggtgaggagggagggaggggggggtaagaggtgtgtggggagggagggaggaagaggtggtgtgtggggagggagggaggcagaggtggtgggtggggagggaggaaggaagaggtggtgtgtggggagggagggaggaagaggtggtgtgtggggagggagggaagaagtgtgtcaggagggaggcaggcgggaagaggtggtgtgtagggagggagggagggaggcagaggtggtgggtgggcagggagggaggaagaggaggtttgtggggagggagggaagaagtggtgtggggagggaggaaggggtgggtggggagggagtgaggaagaggtggtgtgtggggagggaggaagaggtggtgggtggggagggagtgaggaagaggtggtgtgtggggtgggagggagggaggaagatgaggtgtgtggggagggagggaggaagaggtgtgtgggaagggatgga

SEQ ID NO: 392456 - DNA, 1000 bp, Homo Sapiens; identical to SEQ ID NO: 114964

SEQ ID NO: 392457 - DNA, 1000 bp, Homo Sapiens
acacccaggcctcccatgtttccactgtcatcactcaccaaagccaccccacaaccccccactccgggccccctgctcactccaaatccactccttactcacacagcccccaccaaacccgcgtaagtcagagtgcgggtgtcctcaggacggctctgcacccctgcctggggctggccgcgcctggccttccccggacactcccgaccgccagccccgcggagagcctttgtgtgccgttccctcggcctccccacccgctgtggcctctccccaagtgaagagtgagcagatggaagagcagggcttgcccacagctggatgtcaagtccccctgctttcagtccgggctgcagctgaactcacctttctgctctgcccaaggaccccaaggcgtgcccggcaccagcaaggacggccaggacggtgctcccggcgagcctgggcctcccggagatcctgggcttccaggtgccattggggcccaggggacaccggggatctgcgacacctcagcctgccaaggagccgtgttaggaggggtcggggagaaatcaggctctcgaagctcataaaattcaacgtgaggaagcaagtgacaaggacgcccgaagcacagtggacggtcatgaaggagcgggggtgtggcaggcgggtgacgtccaggagagggagcgcccctggctgcccctcggccgccgactggacgcgtgggccttgccagcgagcaccctcattgggctgtcgcctgacagcatacctcaaaaggccctagctaataaacctgtaagcccagcatttgagagaaggtagggtgtgtatatataaaaggttgtgtacaactccacgaggtgaaaaatattcagtaacttgtttgcatagcatttgtgtaaagactatgatctcatcccaataaaatgatatattaaatcttcagattaatgactggctacagagtaacaaaaaataaacaatttaatgtacagtaaattctctccca

SEQ ID NO: 392458 - DNA, 1000 bp, Homo Sapiens
ggccagatggaccagggcattagcaggagctgcaaagtgcaagagggaaagtattctctgcagaaggaacagcttgctcaaaggccctggggtttgaaacaaccaggggtactcactaggagtgttatcagtttggcattttggaaattgagtataagtgcgaagtgagtagtggggctaagaaataagccaggagggaacaggtcaatggaccgttcatactatgctaaatgagtgatttatctctttaccaaacttcaagttcttcgttttatcaatttatggtctaccaaaaagagtattattctgacaaatctgatcttataatttgactttcaatgcaagatgagatcacataccatcaattatatcttctaatctagattgttttattaatcctcttattaaccataattcaagaccattagtcttcctcccatcaggctacctaaaatatttttatgtagtccttgacgatgtgtcatctagattttgtatttgtcagttggaatgtgtattatgtatgtttattatggtaaaatctctggcaaataccctcttaaataatttttacccatagtgtctggattattcacaatgatagagaataatgaaactatgtttttgaacacaagtataacaagagtatacattatttttcagtttataataatgtgcttggcccttataactgcttactatatgggcagagcagaatatgattttattttactgatgaaaaattggatccctggcccctgcctgcctctctgggctcatgccattccacccctacttgtttactgtgttttaaccaggctgacctttcagttcttcaaaagtagcaagcttcatctctccccagagcctttggaataacaatttctttttctttacactttccctttcccctaacacattgaactcacctgtacttacagatgtgtatagtcccctaaaatgattaccctgggaagtcatatacttatttcttgatact

SEQ ID NO: 392459 - DNA, 1000 bp, Homo Sapiens
tttttaaagaaaacatgaaatgtttattaaaataggccatatatgagctgggcacggtggctcacgcctgtaatcccagcactttgggaggccgaggcgggcggatcatgaggtcaggagattgagaccatcctggctaacacggtgaagccctgtctctactaaaaataaaaaatattagctgggcatggtggctcacgcctgcagtcccaactactcgggaggctgaggcaggagaatcccttgaacccaggagacggaggttgcagtgagccgagatcacgccaccgtactccagactggatgacaaaggaagactccgtctcgaaaaaaaaaaaaaaaaaaagaccatatatggttattacaaacctcaaaacattccaaatgttcaatatcataatggacaatattctttgaccatagtgaaataaaattggaagtgaataacaagagaatagcctaaaattctaaataaactcagtgacatattactaaactacactctggttttaaagggaaaccagaaaagaaattttaaaatacttagaaaaaaattacaatgaaaatagtaattatcaaaaatgcgtgggacatagctcactcagtatttagatgaaaacttgtaaccttaaatacatttatgtggagactggaaatattaaaatgtaagaaagctaagcatttatctcaagaaaatagaaaaaagcacaacagaccaaaacccagagaatttaaaggggtgattaaaaaataaagatataaacagaaatcaatgaaatatcaattttttaaaaaaccagtaacaaaactaaaaggtggatctttggaaagattaattagctatatagatctctgtaacaggacttatcaaagggagaaaagacataaacaaaatacagaacaaaaaaagaaaaaagaattactgatataaaataataatgtaaaaataataatggagaggcctaatgaataactgtagtatttaatttgaaaatctaga

SEQ ID NO: 392460 - DNA, 1000 bp, Homo Sapiens
agacaaacgaaaatggaaacacaacataccaaaacttatggaatgagtgaaagcagtgtgatgatagaaatgtaaagctgtaaacacattaaaaacaagaagatctcaaataaacaatggcatatattcaaattcaggtgttaactttaggatgctaatgtaatccccataataaccacaaagggatgagaatagaattattaaagtgtttcaatacaaaaaagcatttcagtacaaaaactaaatacaaaaaaggacagtaatataggaaatgaagaaccaaaaatgttatatcttcttgctgtactgaaaactttattaatatgtcattgccctgtcttttggaacttttttaattcaaaatctattttgtctaatattagtgtagtcacccctgctctcttttgattactatttgcatggggtaacttttccatcctttcactttcagtcagtctatttacatttttggatctaaaatgagtctcttgtagacagcatatatttggatcatattttagaaggctaatgtgtaaaaattatttttagtctttgtttataatttagagactagaaaaagagcaaactaaactgaaaaatagcagaaggaaggaaataataaagattagagcagagataaataaaatcaagaatagaaaaacaatagagaaaataaattaaaccaaaatgtaatatgtatgctcataatacatttagtccatagtatatttgatataaccagctttacttcaatagcatacaaaagctctgcttccttatwagctctgttcctacctgtttccagttactgatgtaacaaattaatatctacacatcatgtgcccaaaaacataacttataattgcccacgcatctacctttaccagaggtcttttatttcttcattcagcttaaagttactgtccagtgtcctttcatttcaatcccgaaataaaatgcctctcatttcttgcagggtaggtattgtggaaaaaagctt

SEQ ID NO: 392461 - DNA, 1000 bp, Homo Sapiens
agacagactacagattggaagaaaatatttagaagccatgcatctgataaggggttaatatccacattatataagtaacttaatagcaaaaaaaaaactttgatttttaaaaatggacaaaggatctgaataggcatttctcacaagacataaaaatggccaacagatatgtgaataaatgttcaacattactaatgattagtaaatgctaattaaaatcacaataagatatcacctcccacctgtcaaaatggctatcatcaaaaagccaaaagataagcattggtgaggatgtgggaaaaggaaatctttgtacactgttggtaggattgtaaattagtacagccactatagaaaacagtgtggagtttcctcaaaaaaataaaaacagaacaaccatatgatccagcaatcccacttctgggtatctatccaaaggaaatgaaatcaatatgtcaaagagataccttccctttcatgttcattgcagcattgttcacaatagccaagatacagaatcaatctattcatccattaacaaatgaataaagaaaatctggtgtgtgtgtgtgtgtgtgttctctctgtttgctgatggcatgatcttatatgtaaaaaagcctagactccaccaaaaaactataagaagtaataaacaaatttggtaaaactgcagaatattaaatcaacatacaaaaatcagtagcatttctatacacatacacaaacaaacacaatggaataatattcagcctttaaaagaaagaaaattctattatttgggacaacatggatgaacattatgctaagtgaaataagccagactcagtcagaaagacaaatacttcaggatctcacttacatgtggactctataacaattgaactcatggaaaaagagagtagaatgatagctacaagaggcaggcaagtggaggagatggggaggtgtttgtcaaagggtacaaagtatcagttagacaggaggaataagtttttca

SEQ ID NO: 392462 - DNA, 1000 bp, Homo Sapiens
agtagctgggactacaggcacatgccacgaagcccagctaatttttgtatttttcgtagagacagaggtctcagtatgttgccccggctagtctcaaactcctgggctcaagcagtctgtcctcctcagcctccaaaagtggtgagattacaggcatgagtcgctgtgcctggcctccaagcactttcaaatgtatcaacttaatcctcacaaaaccctgtgaggtcggtactgttttcatacctattttatagttgaagaaacagacacagagaagcaaagtcacttgctcacagtcacgtggctaggagagcaaggatctgaagcaaggcgatctcttaattaccaagtgatgttcctggagtaaggctctgtttgtttcctttcctgtaaaatgctgcatgcaaaagtataacacagtaagtaaagaagtcagttagcctgcacatactaagacctaaccaaaggagcttattgtttttctccaacttccatgataggtaattagatagtggagacctctgctggccaatatggtagccactaaccgcagctggctcttccaattaaaattacataaagccagaaatgtaactcctctgtctcacttgttatatctccaaggctggatagccacatgtgactggtggtggctggattagctagtgcatataaaacatcactgcagaaagttcagctgagcagcactgagttagatggcctctgaagaggatgtcccacggagagaatccagaactcaggatctttttttttttttttctttgcgacagagtcttgctctgtcacccaggctggagtgcagtggcgtgatctcggctcactgcaacttctgcctcccaggttcaagcaattctcctgcctcagcctccctagtagctgggactacaggcctgtgccaacatccccagctaatttttgtgtctttttagtagagatggggtttcactatgttggccaggctggtctcgaactcctgacc

SEQ ID NO: 392463 - DNA, 1000 bp, Homo Sapiens
ggcctggccgcaccgccaccgcccaccccgcgctccgccccgccccgccccgccgcactcgcggatcgtcacacggtcaggccaccgcgcgtcaccgccccgggctctgctagaaagtgccggggtccagattcctttcaggtgactgggttgggaggagaagtcgctcagcgtaattgtcggagccgaaataaacagagactccgcggccgggcgggaccttacccggaagtcccccagaacagcactacccttcgctgaaacctcgcccgccccctccaacccagagacgaaaagggaaagcatcacggccagaaaccgttggcacaactccacagatactctcccgggccgagccagactccataagtcccgcgcctggcccccggggattgcaggggctgaggagaagggcaacacggggaccttgaagcggggtcgcggcggcgccccagcccgggccagggagtcccggcagcggcacctcccagaaagggcggagccgacgacgccttcttccttcctgaccggcgcgcgcagcctgctgccgcggtcagcgcctgctcctgctcctccgctcctcctgcgcggggtgctgaaacagcccggggaagtagagccgcctccggggagcccaaccagccgaacgccgccggcgtcagcagccttgcgcggccacagcatgaccgctcgcggcctggcccttggcctcctcctgctgctactgtgtccagcgcaggtgagcggtcgccggccaccgggacgccctgtggggacgtggcggggccgagagccggggaaggcgacgggcccagcgacggctcaggcccgggtcctggggaagttggtctggcgatggagagctcggaggttcctcacttgtcctgtttctgtctccggccacgctctctttcctgtggtctggaagagggtggcagtgggggcttgggtgacctgttctgagcttgttccatctgtggtcacctaatttctctgtgta

SEQ ID NO: 392464 - DNA, 1000 bp, Homo Sapiens
gatggtgacctcaaagaagatggaatttcctcccggaaatcaagtggcagtgctgttggaggaaagggaattgctccagccagtcccatgcttgggaatgcaagtaatcctaataaggcggatattcctgaacgcaagaaaagctccactgtccctagtagtaacacagcatctggtggaatgacacgacgaaatacttatgtttgcagtgagagaactacagctgatagacactcagtgattcagaatggcaaagaaaacagcactattcctgatcagagaactccagttgcttcaacacacagtatcagtagtgcagccaccccagatcgaatccgcttcccaagaggcactgccagtcgtagcactttccacggccagccccgggaacggcgaaccgcaacatataatggccctcctgcctctcccagcctgtcccatgaagccacaccattgtcccagactcgaagccgaggctccactaatctctttagtaaattaacttcaaaactcacaaggagtcgcaatgtatctgctgagcaaaaagatgaaaacaaagaagcaaagcctcgatccctacgcttcacctggagcatgaaaaccactagttcaatggatcccggggacatgatgcgggaaatccgcaaagtgttggacgccaataactgcgactatgagcagagggagcgcttcttgctcttctgcgtccacggagatgggcacgcggagaacctcgtgcagtgggaaatggaagtgtgcaagctgccaagactgtctctgaacggggtccggtttaagcggatatcggggacatccatagccttcaaaaatattgcttccaaaattgccaatgagctaaagctgtaacccagtgattatgatgtaaattaagtagcaagtaaagtgttttcctgaacactgatggaaatgtatagaataatatttaggcaataacgtctgcatcttctaaatcatgaaattaaagtctgaggacgagagc

SEQ ID NO: 392465 - DNA, 1000 bp, Homo Sapiens; identical to SEQ ID NO: 206371

SEQ ID NO: 392466 - DNA, 1000 bp, Homo Sapiens
ctcgctgccctgttgtccccaactccatgctggcccttgagcacttgaaatttctcttcgtgtggctttgggtgatgcgctgagcctcagtgtccctgctcttagggctaacgtcgtcgcgctagtgccctcctcaggccgtagtgagggggacaagtgaggtaatggttcagacaactggcacctggcactcagattctctgaacggggaccttggcacttgctggccgtcttcaaaagtcacaaaatatttctgccacaggaaaagtcttaaagaagagtgcacggccaggcgtggctcacacctgtaatcccaacactttgggagactgaggcaggaggatcacttgagcccaggagttcaagaccagcctggctaacatggtgaaacccagtctgcactaaaaacacaaaaattagccaggtatggtggcacgtgcctgtagtcccagctactcaggaagctgaggcaggagaactgcttgaacctgagaggtggaggttgcagtgagccaggatcacgccactgcgctccaacctgggtgacaaagacttatctcaaaaacaacaacaacaacaaaaaaaaaaaacagtgctgggcgcagtggggcgcacctgtagttacagatacttgggaggctaaggcaggaggattgcttgagcccgggaggtcaaggctgcagtgagctaagatcaaagtacaataaatacccaggttcacatcagtttaagacatgaaatacctccgatccagtagacttatgcctacctctcctgggggacatcatctctgaggggactgcttgtcactcagaccacagatcaatgccacttctctgaggccctccttgacctactttaattcccctcatgctcagccaccaaacctgcctcacatgcctttcttcacacagacctgtgtattgtcacctcccatgtactgtgggtgccaccagagcacggactttttcttgcaacatacacagtgccagaaagggga

SEQ ID NO: 392467 - DNA, 1000 bp, Homo Sapiens; identical to SEQ ID NO: 206373

SEQ ID NO: 392468 - DNA, 1000 bp, Homo Sapiens; identical to SEQ ID NO: 206374

SEQ ID NO: 392469 - DNA, 1000 bp, Homo Sapiens; identical to SEQ ID NO: 201656

SEQ ID NO: 392470 - DNA, 1000 bp, Homo Sapiens
cattgatacattgtcagctacaagatcctaaagtaaatctggtctttttcttccatctccagtaaagaagagaacatttaatgctgttaaataaaaaaattggggagtatatagagaagtacccattttttttgttagtttggatggtagctgcagtttggaatactagattttacattgttgccttaagagatgtattttggagggctcccttagtcttacagtttcacttaccttctgcattcaggaccctaggtatcaagagagggcaaagggtattgttggacaaaataggcaactatatagagctagtactttatgtttcaaatgtttgaaagattccaaaaaccacatctctgtttcccttgagatgacaagtaatttttctggattgagtaactgaatttattgagtagctagactcagagtcgaggccatttggaaacagttgcttgtatttttgttcagtgatggtttctagcatgtgcagtcacttggaaggctaactatgctcctttctacagctgaccccacgtcagaaagcaaggaagatcagtggatgggggtcaccgtccagagccaaggtccagggggcaaggtcgtggtaagtgtagagacacatgttcatcctatactgttgggactgctggttatgtgccagcaccaggcttacagcaggggacagcaggggagcatacattctagcgaacttactgctttaaagcaggaatggatgtcaaaaagaaatcagactgggcgtggtggctcatgcctgtaatctcaatactttgtgaggccaaggcgggcggatcacctgaggtcaggggtttgagaccagcctgaccaatatgatgaaaccccatctctactaaaaatacaaaaattagctgggcgtagtggcatgcgcctgtaatcccagctacttgggagactgagacaggagaatcgcttgaacctgggagtggaggttgcaagagcaaaactccatctccgaaaaaag

SEQ ID NO: 392471 - DNA, 1000 bp, Homo Sapiens; identical to SEQ ID NO: 114965

SEQ ID NO: 392472 - DNA, 1000 bp, Homo Sapiens
tggcgacaagagcgagactcagtctcaaaaaaaaaagaagtggagcttcatcagaaccctgtccctgatcgtggccaaggtaccatgatcttctcctttaccttccagcccttccctgggttcacgcagcagtggatgcaggacaagagccctctctcaggagcaggcttaggaccaaggctctgtgctggggcacgccagtacaaccccagacatgccatctcctgtgctcggcctgtgcccactctcatcgatgcacactgctgccatattgtttgttagatgtcgtgaacactagccctgctcacaggtaaaacttggaaggggactcaccatatgagcttctttgtctagtgtcactcccacagggtgcctttaggcctttatgtccaggagcacataactgtctctcactgatttttcctctgcttgaaaggtacccaggaaatgaagtttatgaactgggcgtcctgttttctttccatccatatgtccctgggaaagttattaaactctctgagacttagtttcctccactcacaaggatggtaatttctgcctcactgagatcttatgatgaataaatgaaattgtaagtagaaggtgccaggcacagtacttgacacataacaggccctcagtgcaactaaggcccactgttgtgaaccagtgttttcttaaatgtctaaaagagttacatactatcacatgctttcggtttacctctgttcttcattgcaagaatccaagaattatagaaccagtcttgaaggagagttcaatagagctctacagactattatatgatcatgagttgagaacaaaaaaaagtgtatgaatttagcttctatttgtttctgaattacatggtctgatactgacacccagaaacaaaggaagatgtttcacatgcatgagtttgattaactataattaaagtgattttgtagcttataattcaaaccaacagcttttgagtgtgaaaggaataatattagtt

SEQ ID NO: 392473 - DNA, 922 bp, Homo Sapiens
  misc_feature (231)..(231): n is a, c, g, or t
  misc_feature (567)..(567): n is a, c, g, or t
  misc_feature (774)..(774): n is a, c, g, or t
atgtcctgagggcaagtggggtccccatggtcatcttttcaaacagactgatgccaggggtgtccccaaagtatcttacgagtctgaccacccagctgagcctaagaagcacccgtggtagaccccaaaaatgtttgaataggaaacctgaagaaggccctcctccctgtgtgtcagggctgggctgctgacacgggggctgtgtgcagcgtctctggtgttgggcgtagntgctgcctgcccctgctgacatggaggatttgcctcctttctactgttgcccctttctggagatgaaaattctcgactctttttcacagattcaaagccggaggaaaaagatcctcgatgtgtatgccaacgtgtgtggagtcgtggaaggtaagctgaaaaaaaagcctgggagaggtggtgcccaccccactgacatgaagggctgggcccggagccctgagctcctgtgaggggaactgagggaagccgcccatccagttgccgcactttggtcagaatggccgctggaaactatttcaggtgtggggaaacagaatcttgttcccagatatnggaaggcatctcccagtgcttccatgggccttcccctcatggggcgggagacagcctggtgcaggcacccactgtagggaaacgcagggtcggtgagcagcagccacggagcctcagacctcccgtgtccccagagaccgtgtccacactggcatcatcatctgggaaacgtgatcagtcatttatcctagacttagctgccctctncctgccctcgagcattcccgatgtttgatagccctgggagccttccagccttccctcccagcgggcttctgagctaagtcaggctgtctccccataacctgggcttgagtgtgggcaggttaagaggcatcaggataggaccgtcagt

SEQ ID NO: 392474 - DNA, 1000 bp, Homo Sapiens; identical to SEQ ID NO: 282889

SEQ ID NO: 392475 - DNA, 1000 bp, Homo Sapiens; identical to SEQ ID NO: 282890

SEQ ID NO: 392476 - DNA, 1000 bp, Homo Sapiens
  misc_feature (111)..(111): n is a, c, g, or t
atcataaattgaggatcatctgtaatttaaatggaggtttctatttaaaagagcataatgcatttctcatcaaaagaaggaaaaccagtaatttttaggtcctttatttgngtccctgaaaatcttcataaattctataaaaagagtgaaaacaggtgaatcaaaacacagattccattctgtcgtataaaacagaacatcacaaatcattttcatagatagcttttttctagtttttagagctggatatacgtttttgttttttgttttacatgattcaacggcctcagtaatgtcacttcatagattctacgaaagagtgtttggaacctgctgaatcaaaacacaggttccattctgtgataataaaaaatgtaacatcacaaagcgttttcacagacaggatgtttctagttttttatagttggatattcgtttcttttaaatttgggggggaccttgccctgctgtctttcactacagacataccacagctatatagtttgcatggagtactgggtggctctcaatatttaggaaaattaagattagtggtatcaaatcacaatacaataaaataacgaagatgatggagaccaggggaactgtcttgttttgttttgtttttaagaagatctgcccttgaattttctgtatagagtattgaagaccacagcccctgaccacagcatcacctggcaaacaaatatccatctatcatttggaataaaaatatccataaagtatcaatgctcttggaaacttggattctcacagctcataaatgttttggaaatcctgccaaaaatattttttagatcactagactgaagatttcattgcttgtgtagcagccagttgggcaaagttatctaacacaaagcctattttataataaaatgtggaatagcttatgcaatttattgactactgtactgaaggtgaaaaacacaatggtttcatgggtccttgaagtacactttctgctgaattcgagctc

SEQ ID NO: 392477 - DNA, 1000 bp, Homo Sapiens
tcaccttttggctttcttggcctgatgctgaactctcgaggttcgggatgttgcctaaaaccgtcgacaaacgctatgtttgagaagggaggctacgctggggcgccggaggagacaggcccttaagaaccttccagagatgccttaactgggctaacagctcgccgcgccggggcaggcagaggggtgcggggcgcgctccttccaggacttgccagtccccaagaaccaggccaaccggttccctccactgactcccgcctccctctgcaggcccagccctgcgccgcgcgccctctccccgggcgcccaggcccggcgggggcctagagggcagggatggcccgggcgagggacggggtcccggaggcgggaggcgggaggcgggaggcgggaagcgggaggctggaagccgcgcgctgtcggggtttcccggtgaagggcaggcaaacaaccggtcggtctgggcggagccgggcgggcggggcgagggcggagggcggagggcgcattgcctcatcctgtacattttactggaaatcggacgcatccggaggaggggctgggagcggcccgggcaccgccaatggccgggccgggcgccggggaggtcggcgagcgctgcggcccgttaaataccctggcagtcccgcgccgcgcccgtactggcccgcgccgtccgcccgccgacagctccctgagccagcccgggaggcagccgcgcgcagcgagccggtggcgcaggtgtcggggtcctcgagcgcccagcctgggagcatgattgtggacaagctgctggacgacagccgcggcggagaggggctgcgggacgcggcgggcggctgcggcctcatgaccagcccgctcaacctgagctacttctacggcgcgtcgccgcccgccgccgccccgggcgcctgcgacgccagctgctcggtcttgggcccctcggcgcccggctcgcccggctccgactcctccgacttctcctctgcctcgt

SEQ ID NO: 392478 - DNA, 1000 bp, Homo Sapiens
ataagctcaatttgatttgagactagtacccaagtgcagttttagtatggctcaacatgggtcagatttagtgataaagcaaattctccttggcctcaggcaaatagtttctaaagattctgtgaatagtggacaactgcccatgagcatttgacttcccttactctttgatgatcgtagagaaagacttggtaatttatctaagtatctttaataaatctttcagcagagagattaaacctaggttcagagcatgggtgctctgagggacaaagttggattagtataagggagctggagcagctgatagtggaaaacagaataatgattcaaagagtcttctgtcaccatgtcatattgtgggtctttcagttccatgatatgtttggctctgcatgccaaagtcccagtgattaagcatatataagttgtcaaggaaacaaagcccaaatgtttttaaaacaagtatacagtttttgtcattgtttaagaaagccatttgtttggcatgtgagttaaaggcagttccaatgcctgatggttccccagatctatgaaatgggtggaccattaaccttacatgtaaagattatgttagtaattaagaaaccctaacaaaggtgttaccaaggaacctttgggagtgccttttttgtttttcaagatggacccaaaaaaagtggaggaagatattgttcttttgtgccctcctacctgtgagagatatttgtagtcctatgtgaatgagcttatccctccacaaccaggtgcatatgaaagtgtacatattatgactgccaagtattggaaatgaaaagacctggagtctatgctaggaagctgagatattttggtattgcattggtttttatggtaactaggttttgcatgcaattaaaaatccttatttcttgttctagggcttcccttagttaatggttattataaacctattaattcatctgttttaaccattaaaacctgttttgtttttcgcttt

SEQ ID NO: 392479 - DNA, 1000 bp, Homo Sapiens
gtgcagaggacagctccagggcctcgtgtcttggggaatggagcgctgcgccctgcctggctaccccggtgtctacaccaacctgtgcaagtacagaagctggattgaggaaacgatgcgggacaaatgatggtcttcacggtgggatggacctcgtcagctgcccaggccctcctctctctactcaggacccaggagtccaggccccagcccctcctccctcagacccaggagtccaggcccccagcccctcctccctcagacccgggagtccaggcccccagcccctcctccctcagacccaggagtccaggccccagcccctcctccctcagacccgggagtccaggcccccagcccctcctccctcagacccaggagtccaggccccagtccctcctccctcagacccaggagtccaggcccccagcccctcctccctcagacccaggaatccaggcccagcccctcctccctcagacccaggagccccagtcccccagcccctcctccttgagacccaggagtccaggcccagcccctcctccctcagacccaggagccccagtccccagcatcctgatctttactccggctctgatctctcctttcccagagcagttgcttcaggcgttttctccccaccaagcccccacccttgctgtgtcaccatcactactcaagaccggaggcacagagggcaggagcacagaccccttaaaccggcattgtattccaaagacgacaatttttaacacgcttagtgtctctaaaaaccgaataaataatgacaataaaaatggaatcatcctaaattgtattcattcatccatgtgtttactttttattttttgagacaaggtcttgctcagtctcctggtgaaatgctgtaacgcaatcatagctcactgcaaccgtgacctcctgggctccagtgatcctcttacctcagcctcccgagtagctgggaccacaggtgcccgtcaccatgccccgctac

SEQ ID NO: 392480 - DNA, 1000 bp, Homo Sapiens
tcgggctcagcatgcaccctccatagctaggctgggggctaacgttagtaagaatttactgatttactgagtacctacacgaagtttcacattttcacaaagtagagtcactttaagtttgtttacatgtgacctccacaaacacacacgattacaaaatagtttagttaatcaagggatgtataataaacaagaggtcggaggccccgggccgctcccgcccacctccgcggacgagcgcccccctccgaccccattccctgcggtctgggcgttcaggcccttcggtctgggcgatcccggagaaccacccacggggctttaaaaatgttggtgcccaccacctccccggaacagggcccgctctacctcggtcggggagcgcgggacctcagcgttcccttaacgccaccgtccgcgggtccgctttgcgcaggcgcggcgcccccactcagtacccgctccgggcgtggcatggtgcgcaggcgcgatgtcccccactgcagccccgctcgactccggcgtggtgcgcaggcgcggtatcccccctcccccgccagctcgaccccggtgtggtgcgcaggcgcagtctgcgcagggactggcgggactgcgcggcggcaacagcagacatgtcgggggtccggggcctgtcgcggctgctgagcgctcggcgcctggcgctggccaaggcggtgagtccgtgccgcggaccggggcggggcaggcgggggccgaggcggcggtaggagcgggacggtccccagcgggtccgagcggagcgggcgccgggtccctgcgccctctgtcccgggatcgggaaggggctgagagagccctgggccggtgcgaggggaagccgcggggcggactcggggacccggggagctcggtccttagtagatagtccgcgtccgggtgaaggtcacaaccccgcgggcttgctgggcgtcccctccgccgccttggtccgggcctggggtcctgggaccccgcgggc

SEQ ID NO: 392481 - DNA, 1000 bp, Homo Sapiens; identical to SEQ ID NO: 282893

SEQ ID NO: 392482 - DNA, 1000 bp, Homo Sapiens
tccgagtctccctgtcattcttcctgctctcccatttggggtcgcctcggctctggggcggtctcacgctcccccctccccagcccgttgcgttccccctccttttctctgctctccgctccaccccgctacgtccgattccggaacggtccggcgtttctgctgctggagatgaccgcggggtgggccgggtggcccggccggcgtgagcgcgcacgctggtggctgcaggcgcgggccgtgtctaaggtgtgcggcgccgcggggacgccggtggggctggcgattcccgccccacaagctctccgcattgcctctgctgggaaggacccagactgctgcccccgcccctggcgtcccactttccctgggccgaattgcatttctctctggggctcgcgttcgggctggtcagcgcagtccgggaagctctgggagagccaatataggaaaacgcggcggtttcgttttcggggacaggttgccttccttacgcgaagggttttcccgtggggaaccctcaccccgaggcatttcgggagaggggcatccgcagagaggcgggatgcggcggtgccgacacgcacagctacttaaattcttttgtgtgtcatcagcccgggggagacactttagggcggaaggaaagcctcagccagcttctgcagatcacccctgggatctggcgcgcgcacggagaaaggatgcggccgagggggtgggcggggaggacgcggggaaccggagcggtgcctttgagggagggctggtatcccagcccttccagggccctgtggcggctgcgcaggctcccttcccctcccttattgatctccacgcccggggcagaaataggatctttgagaagtctcaaatgggatctttgagaagtcagatcccatttgaactagaaaaaggagtggaggcgaggtagcgtgcagcctacgctcttgttaacccgtcgatctcctaccatacctcttcccccaccccacctcag

SEQ ID NO: 392483 - DNA, 1000 bp, Homo Sapiens
aaaatttaaatacattttcagagtcatacaaggaattacaggcacaaaaattagaaccaggtgttgcatttgacacatcaatgttgttgttttttttttgctaacctcaaaatttacttctttattaattcatcattttatcaaaaacctgcaatattaaaaatactatactacagaatcgtgacataatagtaaatctggcacagtgaataattctcatgagtttgacctatgtaattctggaaaagagagactgaaaggaagagaggtggggaatgggcaggcaagggaaagaagagagaaataacaagtgtacacataggatgtggagttcagagagaatgaagcattgaaatctaaccaaagcaggggagttgcatttattgtattttgttttttggttaggtagttacctctgattcttgaggaatgatggatgagtagccaaggaagtaagaacacatcatgccaggtagatagtagaggagatttaaactagataatgtagtttaaggtaactctagttttttcaatatggtatgagtgcaaggtagaacttggggagacaaggaaaatatgaatatcaaaaatggctattaatgttgtgcagagttgctggactttattccaaaagctataatgtgccactggagagtattcatttgtttgcttgtgttctacaagtaagacgtgtgtgtgtgtgtgtgtgtgtgtgtgtgtgtgtctgctgggcatgtggcagcataccacacagcaaatataaataagtctagggctattgtgttagtgaagaggaggactatattgtctaaaattagtggcataagaatttacggctagtcaattgttcttgaaaaacctcaggtcatagatcatttttttcaaggttatggaaaatattcacatatgggcagatgtccatactttgatttaccagattaaaaccactgcaaatataagaaatattggattgcttgtcatacacccacctggtggatcc

SEQ ID NO: 392484 - DNA, 1000 bp, Homo Sapiens
  misc_feature (451)..(451): n is a, c, g, or t
  misc_feature (468)..(468): n is a, c, g, or t
  misc_feature (526)..(526): n is a, c, g, or t
  misc_feature (846)..(846): n is a, c, g, or t
tacctctcgtttctgcccagccctctgtggacaggagccctggcccgcaagagggacagagcccgggagagactcgctcactcccatgttgggtttgagacagacaccttttctatttacctcctaatggcatggagactctgagagcgaattgtgtggagaactcagtgccacacctcgaactggttgtagtgggaagtcccgcgaaacccggtgcatctggcacgtggccaggagccatgacaggggcgcttgggaggggccggaggaaccgaggtgttgccagtgctaagctgccctgagggtttccttcggggaccagcccacagcacaccaaggtggcccggaagaaccagaagtgcagcccctctcacaggcagctctgagccgcgctttcccctcctccctgggatggacgctgccgggagactgccagtggagacggaatctnccgctttgtctgtccanccgtgtgtgcatgtgccgaggtgcgtcccccgttgtgcctggttcgtgccatgccctnacacgtgcgtgtgagtgtgtgtgtgtgtctgtaggtgcgcacttacctgcttgagctttctgtgcatgtgcaggtcgggggtgtggtcgtcattcctgtccgtgcttgctggtgcctcttttcagtagtgagcagcatctagtttccctggtgcccttccctggaggtctctccctcccccagagcccctcatgccacagtggtactctgtgtctggcaggctactctgcccaccccagcatcagcacagctctcctcctccatctcagactgtggaaccaaagctggcccagttgtccatgacaaaagaggcttttggnccaaaatgtgagggtggtgggtgggatgggcagggaaggaatcctggtggaagtcttgggtgttagtgtcagccatgggaaatgagccagcccaagggcatcatcctcagcagcatcgaggaagggccgaggaatgtgaagccagatcctcgag

SEQ ID NO: 392485 - DNA, 1000 bp, Homo Sapiens
acaggtttatatgttcttacaaatggatccatagtttgcagtgatttaattcctggttgggatttggcctcccctctcccccatgctaattatttacccttgtaattgtgcatagggaagcactcacccaatgagactttctccaatgtggactctgtgtgtcagtgaatgaatgtagtaaaattcactttggaaggttatcaggcttttaaaaatctagtttatggcaaaaatagccattttccaagtggtggctgactgttgcagggaatgagaatttcataatacactgctatttcagacctctgtttggtcagaaatggaaaagaaaaagccccctttcttcccttttctgttttacttcaagggcataccttggaggtgctcagagaagcgtgaagtttgcactatggtggaggatggggaaagagttctaaagtgtctccagctgtgaacccaggaggtcaagtgggctattaaaatctaacgttgagtaaatgtgatagtgatgagaaaggaattttgtgtactgtaaccttgcagtagagatgcagctgtccttcgtgtgtggaaacacacctctcctttacatagttgggaacctcattagaaatgacctcagctgccccatatctacgttcctttcagcagttgtccaagtaggagtgtatccagtgaagacatatcaaatcacaaagtcattgtcattagagtgtacttgattactgggcatccttgtaatataatttcataccactgacacattatacttgtaagagaacatctttcccagagtgcctcagaccttattgctttaaaatataataatgttttcattacttttattatttgaatgatttagtaaagttgactgaatctggtatagactttgggagtatgtgtgtgaagtttttatcaaactgtaatatttgtgaatggaatgccttgcaatatgaatgttaatataatgtgtaaagggagattaaaaagtttgaatgat

SEQ ID NO: 392486 - DNA, 1000 bp, Homo Sapiens; identical to SEQ ID NO: 206375

SEQ ID NO: 392487 - DNA, 1000 bp, Homo Sapiens; identical to SEQ ID NO: 206372

SEQ ID NO: 392488 - DNA, 1000 bp, Homo Sapiens; identical to SEQ ID NO: 114967

SEQ ID NO: 392489 - DNA, 1000 bp, Homo Sapiens
tcctgaaagcctattctaggtaaatgaggactgtaactgacatgttttctgatgctggagagcagcagccacctccctcctaggacactgcagtgtggtttgctttattttagccagagtggagggggagtgacatcacctaagcccacacgtgggcatgtgcctgggtgatggtgatcaagagtctcaaacccagagactctgggttgctgacatctgagtgtggctggcctcccctggctgaccgctttcagtgccagccacattaatggcccttagccgtctggggttcatttagggacttgggctcaggccaccatcaccagcaatgaactcacaaagaataagatgtggcttttgatttcctaggcttcacctaggccaagactgttttttttgtttttttgtttttttttttttttcaaaaaaaagaaaatgttcttgggtgggtaacagccccaggtctcctggaggcactccgagggggtcagctggaggacagctgcttagctgctgaaggacagtggcttcctgatggtggtgcatttgtttttctgattgggtcctcaggccttgaagctgaagttgactccctcgagggctccctgccttataccccagggaaggaaggtctcgttctcttctgcttggttttctctatgggccacgaattacctctgggagaacaacttcctcactggggggctgaactctgtgctgtctatgcaaggcaatcccatagaggctgctcctagacctcactgcagggtagaggatacgctcctctcagaggcctgtgtgcagacctgtcctctgcagcgtgccaaaatattcatgatagatgtgtgtcctcaccttgcaccctggtccaggtggcatggctggaggagggagactgtctcccctacaaggggggctttctattttaggtaccacccccttaaacacactgaaacaaagccatgccttgaagatgtgaataaaaggagaaagaactgtg

SEQ ID NO: 392490 - DNA, 1000 bp, Homo Sapiens; identical to SEQ ID NO: 282898

SEQ ID NO: 392491 - DNA, 1000 bp, Homo Sapiens; identical to SEQ ID NO: 282899

SEQ ID NO: 392492 - DNA, 1000 bp, Homo Sapiens
tcctttctagggaatttggttagggctgactcatttcctggcttcaggggctaccctgggcccagatttccagggcccggattaccagtgaagcgtcaatccctggatttttattgaaaccattggagaagagccatctcaaataaatctgccaagtatcctagctctttgcaactcactgtgtagtttttgggcatttccttcctctttctcattctgtttccctgttggtaaaatggaatggtgaccaacaagtgacctatggttacctcatagatctgccacttgtctgagggagtcagaatgcacttgtctgttccctgtccaataaaaggcttcacatgctgtggtttgtgctttatttttaggctcaattcagctagaggcacacaacaaagcagaagacaggagtaggcctggacccaagtgaagcgcaggtggggtgtgaatcctaggcagctggcttctcaggcataggtggtgacatactggggccccatgttcccgaagtaggaacgttcccactcactcatgagctcaaagtgtacaggacggcgacagaaattgcaggcagccacagacacatcctggaggggcagccccaccgcagtccaagccagcagcagcttctctgaaggtggtagggggaggggagggaaaaaatgggttagactagatcttccaaatctgtcacagtacagatgagccaagatattgatccccctcaacccttcaagatacctcagggccagaagtagcctactgtttgcttctgtgtgtgccgtgaatattaccatttgtatctggatgctgggatatatattataaaagatttggaagctctcctttgacacaatttgaagccatactgtcctggcctggaccactccctaagtataggatgtgctgtggcccaagaatgactgtctgcttgggaactctaagccctatgaggacaatgataatgacagtaactatactgtgtcattggtgctatgac

SEQ ID NO: 392493 - DNA, 1000 bp, Homo Sapiens; identical to SEQ ID NO: 282900

SEQ ID NO: 392494 - DNA, 1000 bp, Homo Sapiens; identical to SEQ ID NO: 282901

SEQ ID NO: 392495 - DNA, 1000 bp, Homo Sapiens
tattcgcctacacaattctccgatccgtccctaacaaactaggaggcgtccttgccctattactatccatcctcatcctagcaataatccccatcctccatatatccaaacaacaaagcataatatttcgcccactaagccaatcactttattgactcctagccgcagacctcctcattctaacctgaatcggaggacaaccagtaagctacccttttaccatcattggacaagtagcatccgtactatacttcacaacaatcctaatcctaataccaactatctccctaattgaaaacaaaatactcaaatgggcctgtccttgtagtataaactaatacaccagtcttgtaaaccggagatgaaaacctttttccaaggacaaatcagagaaaaagtctttaactccaccattagcacccaaagctaagattctaatttaaactattctctgttctttcatggggaagcagatttgggtaccacccaagtattgactcacccatcaacaaccgctatgtatttcgtacattactgccagccaccatgaatattgtacggtaccataaatacttgaccacctgtagtacataaaaacccaatccacatcaaaacccccccctcatgcttacaagcaagtacagcaatcaaccctcaactatcacacatcaactgcaactccaaagccacccctcacccattaggataccaacaaacctacccacccttaacagtacatagcacataaagccatttaccgtacataacacattacagtcaaatcccttctcgtccccatggatgacccccctcagataggggtcccttgaccaccatcctccgtgaaatcaatatcccgcacaagagtgctactctcctcgctccgggcccataacacttgggggtagctaaagtgaactgtatccgacatctggttcctacttcagggccataaagcctaaatagcccacacgttccccttaaataagacatcacgatg

SEQ ID NO: 392496 - DNA, 1000 bp, Homo Sapiens
aattttcctcgtgactgaaaggttgtttcaaccaaggagaggggctgggaggaaagataagcatctctcatacccctaatcccagctcattcctacctaagtaggaacatccttttgaattcattaacccaaaagatactatatcatctttcattataatcaacagaagtgtctaggtttatctagcagggcaaagacagttttatgatgtgtgtacacttgctacaaggggaaacggaatgacagtggtcctgaaatgaaacattgctgaattcgtacaactgctttacaatttaggcaaaactttaaatgtttcagtgattaattgttgcaaaccgatacaaatctgttccagggaaaatgcaaactaagtaaacaacaaccaagtggacaaatggcaagagagaattctgctaagctatgatggatgttaactcactgttagtaggctgggtgtggtggctcacgcctataatcccagcactttgggaggccgaggcaggtggatcccttgagctcaggagttcgagaccagcttgggcaacatggcaaaaccctgtctctactaaaaatacaaaaaattagccaggcgtggtggtgcacacctgtagtcacagctacttgggaggctgagctgggaggatcccttaagcctgggaggcagaggttgcagtaagctgagattgtgccactgcattccagcctgggtgacagtgagaccctgtctcaaaacaaacaaaaaaatctcagccaatgaaaacacctgaaaatctctgtaaaagagaaagaagtctcttttacatcatagctctgtaaaaattcggcttaaaactaggtcttctagacagttttctagtatagttggaattccttcagaggtctggctggtgtgggagcgggttctggccaccatggagggcctgcagggagctggccgaatctccagtgcacctgcccccaggcctacgcagcagacctacctacaatggtgtcatgcaca

SEQ ID NO: 392497 - DNA, 1000 bp, Homo Sapiens; identical to SEQ ID NO: 282905

SEQ ID NO: 392498 - DNA, 1000 bp, Homo Sapiens
acatgcagtaaagttgactcttggggtgcagtttttgcacacgtagggcacaccaggtccatccccagaacacttcccatgctgtcctattgtggtcatgtgcttctccacccccacccacttagcggtgctacatccctatagttttgctttctctagaatgtcatgtaaatagaaccaaactatatttaacctttggactggcctctccccacagcctaatgcctttgacgttcctgcaggttgctgggtatgttgagtttgtaatttgttccatgccatgggtgttctacagtttatccattcaggtgttgaatgtctgggttgtggccggatgccgtggctcatgcctgtaatcctagcactttgggaggctgagacgggtggatcacttgaggccaggagtttgagaccagcctggccaccatggcgaaaccccatctctacaaaaaatacaaaaatttgctgggcatgttggctcatacctgtattcccagctacacgggaggctgaggcataagaattgcttgaacctgggatgccaaggttgcagtgagctgagattgtgccactgcactccagcctgggcgacagagcaagagtctgcctaaaaagaaaaaaagtctgggttgtttccagggtttggagatgatgaatcgtactgctacagacatgcatgtacaggttttcgtgtaacacatgggtcttcatttctcttgggtaaataggcacaggattactgggtcatttggtaagtatatgtttatttcataagagccaagttgttgtcccgagtgcgtctgtcattttgcagtccaccagcgttgtgagcacccctgtaagttaaacaccacagtaggcagttgctctgtatccctgtcagcacttgatagttgcagtatttgttaactttagcttttctagtagtaggtacataacagtagctcactgtggttttattttcatttccctaatgcctgataacgttgaacatctgttc

SEQ ID NO: 392499 - DNA, 1000 bp, Homo Sapiens
ctcatctcttatcatattttggcatggagagactggtagcagagagaccacatagaagattatgaagatcatcacacaggggaggggtcataaaggattggcttagagttgtggcaataagaagaggggatgattgaggagatgctttgggaagttgaatcagtgcagtttgccagtggattggagatgaaaggaggagggagaaggtctagcagagagccccataagtctttgtcaaatgaaagaacaaatgatttaatgaaaaggaaggttcaaagaggactggggctttgtcctgagggtctggtctatgccacactctcctcacacaccctctccctgcaaactaagaccaaattcatgatggtttcagactaaaagacccttcactgggggaaagactcctaaacttctctctagaggtccttttaccttcttcatcataaggatacctatctgaatggtaaacccaaatatcccagaggagaagaagtaatgtttagtctacaaaaagtaaatcaaaaaggagagaagaggtggatttagccctttgagctagctggccacagtgcctggacccctaggcccagattccactctatccttgtggaatgatagatgtccttaagatcggattcattcctgaccccaaataggcacagcatggttctaggtttaagggtacgttttcctatgaaaataagctcaagaaataatatttggctgggcacggtggctcatacttgtagtcccagcactttgggaggccaaagcaggtagatcacttgagcccaggagtttgagaccagcttgggcaacatggtgaagccctgtctctaaaaaaacaaaagttagccaggtgtggtggcacacgcctgtagccccagctgttcaggagcctgaggcaggagaatgacttaagcccaggaggttgacgctgcagtgagcagtgattgtgccactacactctagcctgggtgacagagtgagatcctgattc

SEQ ID NO: 392500 - DNA, 1000 bp, Homo Sapiens; identical to SEQ ID NO: 195748

SEQ ID NO: 392501 - DNA, 1000 bp, Homo Sapiens; identical to SEQ ID NO: 114968

SEQ ID NO: 392502 - DNA, 486 bp, Homo Sapiens
gccacccttcttcctgtcaccagcctttcctcagtatccacaggtgacaccacgcctcttcctgtcactagcccttcctcagcatccacaggtcacgccacccctcttcttgtcaccgacacttcctcagcatccacaggacacgccacccctcttcctgtcaccgacgcttcctcagtgtccacaggtcacgccacctctcttcctgtaaccatcccttcctcagcttccacaggtcacaccacccctcttcctgtcaccgacacttcctcagcatccacaggtcaggccacctctcttcttgtcaccgacacttcctcagtatccacaggtgacaccacgcctcttcctgtcactagcacttcctcagcatccacaggtcacgtcactcctcttcatgtcaccagcccttcctcagcatccacaggtcacgccacccctcttcctgtcaccagcctttcctcagcatccacaggtgacaccatg

SEQ ID NO: 392503 - DNA, 1000 bp, Homo Sapiens; identical to SEQ ID NO: 114969

SEQ ID NO: 392504 - DNA, 1000 bp, Homo Sapiens
aggctccctgagataaaaactataattcttttgatggcagttacattcccaactcttagcacaagatctagaacatagtatgaactcaataaatttttgttgaatgaaagaaaaatgcaaatttataagccttttcggagacctactgaatcaaactctgagagtggagcccagcaatctgttgtaaaagctgtttgagtaatactgttgcactctaagcttgagaaccactgcaatagaactaagagaacattcatttcaccttcaggcctattctctgacatcacttgaaaaatcctctctgccttctgtaacccttaccaacaacagtgccctgtccatgtaggggaaacttctgggctgtattacaagtgggtaggaaggtataaggatatcatagtgggaagtattgcttagaatgccagtacttgtttgctgtggaaggtttctaggaatggattgcttagtctaaagtaagcactaccaccatccacgttttcactcaacacagtgccttttaattggtgactaacatcaaaacaccttgacaaaccgttaaaacagtatcagaaaccatgtgtacatccctgtgcctcttagattgctaagttctgctctcattcttacttcaaaggacactttttaaagaattgttaatgcttttttataatacaagtcatagccctgttggcaaaaagaaaaaagattcagtgagaaagaaaaatcactgataattccatcatccagggagaaccactgttatttaagtatatggccttccagacttttctgtgcatttatagatatttttaatgggatcaaagtgtacatactgttttgtaactttttttcactcaacaataccatgactgtcttgctgtgtcaagtatatttctacatctcttaatggctgcatgatattccatcatatgtgccacattttattaaactactgttcaatttttaggtttccaactttcattaataaagtgctttaaag

SEQ ID NO: 392505 - DNA, 1000 bp, Homo Sapiens
agtctttgagcctacgagtcatgccaccagccataagttgacctatcacttgagaacctcctcagcaaagatgccagaaaacattcaatcaagttggcaaatgacacagggagctggccctctgaccatcttcctggcaaacctggactggaagggccatttgcagcactgtcctggagctaatacactgtttcactgcctctgccatataatgatgccagcactagccagctggtgggtatttggaggaatcctgcatgaggattgcccaataaggggcaggtacacatacctggcaaagtgatgatgatgtgaattgtttccagtgaggggattgagtcaaaacttggatctcaggtacctcaatttttcccccaatttctggctactactaaaagccagaaagaacagaacagtggcctcaggagatctgagtttgaatccttgctctctaggatgcaggtggcttgaagcagaatgccacacctgcaagttgattagaactgcctttcttcccaggcttgacataggtattaagtcaaaattacatgaaacccagtggtaaaaaagcctctgaaagctgtaacaccctcagtaataacaaaagggatttttatttcacagctaaagggaaaataggtggagaagttaaaaaataatgtctgatcctgttcctaagttccaaactatagccaacactctgatgctgctctttttcttgtaggaccaaccgtcccagtttgcctgggactttctcatttttacagagtcccaaatcctaggaaactggagcaactggtacaactggtcacctactcttgcccctctgtaaatcaagccaactgtgaccatccaatgtgccatcttacagggaaaagttataaccactattcccctataacataatgctaatgattgtacttagtacatttttatacttttatgatattttactgattggaaatgtcatcctttattaaaaataaacatggttttccat

SEQ ID NO: 392506 - DNA, 1000 bp, Homo Sapiens
atgaggacggagagagacagagatggagagagacatagaggtggaaatatacagagaaagataaatgcagagaccaaggcagggagtgtcgggggaagtaaagagggtgtcctgaagaaagaaggatctgttcactcttaccagtctgtcctcgaatgatttgcataaaatgaggaggtgcctgtccacacccccaattcctctctcaggccccagagcctgagacctcaccatgcccccatcagagatgcaaaaaactaaacacccaactagaaatccttgggacctctctcggctgggatctcagagcctttctgtcccctacccctaccccatgtgctgtcgattttgcagatggggacaacctggggcctcccggaactctgccaccctggggaagttgggggagggccttagtcccggatcacaaccccgtctgctccccagaatcctttcctaagaatcgttgaggaccaaagttgtctttgctgacacgtgttgcttttctctttgccttttattgtttcagagaaaaatcaagttgactgtgtcaagtaacaccccaccccttacccccgtccagccatagtggctctctggagacacaggtcacaggcggagggtcccctgatcatccccaaccacacagccagggggacttgacccctgtccacccctgtctcgtgctccctcagacccccacaaaccggccaagcagtccggggaggcttcccctccacacaactcttagcatgtgattgcagatgtgaaatcaaaacgttgtttgttttttgttttgttttgattctaccccgtcggtccagtgtctgcacagacgccttcatttctctgtaaatatgtgacttggaacaaatgtttaacacaaacgagaagtggtcatgaatgcatggtgttgagatgttttgcactattctgactttttggtctctgtaaaaatattttattaacagcagacattaaaaaaagaaaaaccacacac

SEQ ID NO: 392507 - DNA, 1000 bp, Homo Sapiens
acttgaaaagtttaacttgaaaatttgacctttaaactttcatattctaaggtaaataatagcctataaccaacaacagctttcccagaggtcttgaatttaacactaattgtttagttattgtttctatttctcatacatacataacttcgttttttgtggctggaagaaaaagtttctatattttgtatttgtctttgttcttctcatgcacacaatttactgttggtgtttaataatttggagctcataaaattaaaagttgtaattttgaccatttgggctaaaaattatatgagggattacatatgcaatggattagtatttcttgatttgcaaaagaagggaaaatgatggtaatttagctcaaattgcctttctttgaagaaaatttctgaatgactgaaaaccaaatatctatattatcactttcaacctcatgtttctgcaaagtacagaaaaactcctcactgacagtgcacccagcccctgactgggttttcaggattatgtccatgtgcataactgcttggatttcttcttttaaagtccctaaaacatgaatctgttctttgagatcctggtttccttagcagagttgtaggttgcgggtttcattcacgtggaaattctaagtagaacttttgctgccccattttactgttggtgaagggccgttgttaatggaagtttacgttttaaaactcagatgactcagaaaccagactgtgatcattttttgcagcagcaaaatgacttattctgacagcatctcggtttggggcttctgaagaaaaaggatgaagctgatctgttgaaacaactactttcccaactcggaggcaaaaggggctgatagaagataacattcacctaccatttcatcttgtgacccccagagatcacgtttgcgtgttctggctgagttttttattattgtttgttttaaatgattaaataatacacaattaaatgtcaggatagcatctcttgcaaagtg

SEQ ID NO: 392508 - DNA, 1000 bp, Homo Sapiens; identical to SEQ ID NO: 195009

SEQ ID NO: 392509 - DNA, 1000 bp, Homo Sapiens; identical to SEQ ID NO: 206380

SEQ ID NO: 392510 - DNA, 1000 bp, Homo Sapiens; identical to SEQ ID NO: 282913

SEQ ID NO: 392511 - DNA, 589 bp, Homo Sapiens
aagcttcgaataaatactataaatgaaaactatgatgtcagaatagcttgtcgacaaggaggtgaattcagctgatgaacctggctaaaggtaaagaagaatctctggactctgacttatacgctgagctccgttgcctgtgcatcaaaactacttctgggatccacccgaaaaacatccagtctctggaagttatcggtaaaggcactcactgcaaccaagaaaatgaaatagctactctgaaagacggtcgtaaaatctgtctagatccggacgctccacgtatcaagaggatcgttcagaaaaaactggctggtgacgaatctgctgactaatgactgcaggtcgaatcccgtacgggtcatcccagaagccttgcatatcctgcaaggtttttttgtttttataaatcatgatatgtcttagattttgttctttattttaaaaacagactacaaaaatctccatatatttcgtttttcttcagaaaatgaagttaattggctataagtataagcgctttcaggaaagggcttttttttatttcttcgactctagaggatccccgggtaccgagctcgcactggcc

SEQ ID NO: 392512 - DNA, 303 bp, Homo Sapiens
acaaatgtttcaagtatttttttgatttgctatgtttagttgtgtctctagtaagatgagagctgttttcctgaagtagtttcctacttgttaaatttttgacttccttctgtttaactttctctttaaagctattggtgtcagcaaccagagggaaaccactgtagtctgggacaagataactggagagcctctctacaatgctgtgggtaagctgtcatgcatggatgtcaaatgtagggcctttcttcacattgcaaatgtggtcatattaaaatatcttgctaaaaaagcatgcagtcg

SEQ ID NO: 392513 - DNA, 1000 bp, Homo Sapiens
acctagtaaacttggtcccatttgtgtgactcaaagggacatgtccaaagtccaaagtgctgggggcaggggtggggcttaggtagggcatgtgacattcctgaacaggccaagcactgggtgaaactactcaggattcagaagcaggtgggatgggtgggtggaacatgataatcatcccccttctccttcctttccaccctacccttgctcacaactgcaggagctgaggatgggagagaactggggacgagggggccagagtgatttgcagtgttagtaatgcagctggttctatggaaggctcagttccatctgggatccctttatgagcagtggactaggtcttcacattcagcccaggattactaaagcataggaaagaggcggggaacatagacacagctcatgtaaacattccttttgtttatggccgaatcctagccactggactacctgaggcatacagatattctttggctatgggctgacatttgaatacagctggggcctcagggattctctgaaataaagggctgcctccctctgaaggagccaggcagctcctcagagcagctgcccattgcgtgctggacaaggccatgtcaccacctccatggctccccagtttcccagcttgctgtatctctccaccgtaagagactgggagcaccttgatcagttgctctttgcagtgccggtggcagtgtagggggaagtagttgatgggagtgagggaaaggaattggcaaggaaccctgggcctctgtggctcactgcatcaagcagttcttggcaaaggtaaggtcaggatgggctgtgtcgtcttgggtggggtgaagacagggagcagtgggcatgcagatgcggacagggaagggtgcagtggcctggctggaggaggtagggccgtatcccacccagagtctgtcaccagattcatgcctgccccaccccaggctccccaggttcatcctgtgtcgtctcccccacctaccag

SEQ ID NO: 392514 - DNA, 690 bp, Homo Sapiens
gtaggacccccactttcctatcctctcctggcaaatcagcagctcctggctaggggtctttggtgcagggtgcagggtctcatcctacttgtaacagttgctgtccctttaagcaatgaaccaggccgatcgcgatggtggctcatggttgtaatcccagcactttgggaggcctaacaggaaggatcgcatgagctcaggagttaagagaccagcctgggcaacattttatttttactaaaaataaaaaaaatcagccgagcgtgatggtgcgtgcctgtagtcccagctactggggaggctgaggtggtagggtcgcttgagccccggaggttgaggctgcagtgagccttgttcaaacccactgtcactccatcctagagtaacagaacaagaccgtgtttaaaaagaaaaaaagaacattggtcaggcgttctcatttgcataagggtgtggccaaagaggagactcacttgagaattcggcccctgtttgaggggtatggctcagaaactgtccattcacaggtctgcttatctacataaggggtggagtcagatagatggattatttgtatggggtgcagcagtgtgctcatctgcataaagggtgtggccaagacccccatcatctgcctgggggtggggcctggctctcacatcctctgccccctctcctcctttcccctag

SEQ ID NO: 392515 - DNA, 1000 bp, Homo Sapiens; identical to SEQ ID NO: 282914

SEQ ID NO: 392516 - DNA, 605 bp, Homo Sapiens
gaattgtttaggcagcctcctgatgttggcaagaccttaagctgaagggagggaatagggtcctaagaaagaagacttggctgagggaagggccttcacggttgctgtggaatagcatttgggcccgggctgggctttgttgaccttgtcctatctcttggtcagtgtgtcctcttggcatggtaggaaacaggtagatagccacctaagaggttatgtgttcagcctgtagagactatccaggagggctatcttgggaaagtttgtgtactgtttgttaggagatgcagtataagcaaatcttggaggccactaggcaggtgaactttacccacctctaacactttttttgttccttcttaaacctctctttaggccaaagaactccaaacaagcagaaagggaagagaagcgagtcctcggtctggtgctgctgcgaggggagaatctggtctcaatgacagtagagggacctcctcccaaagatgtaagtcagagcaggaagccttgtggaggaggggaggccctactgtgagccaggctctgtgttagattctgtttcattgcagttctcacaggcatcctctggattttgcccccttttt

SEQ ID NO: 392517 - DNA, 1000 bp, Homo Sapiens; identical to SEQ ID NO: 206381

SEQ ID NO: 392518 - DNA, 1000 bp, Homo Sapiens; identical to SEQ ID NO: 282917

SEQ ID NO: 392519 - DNA, 1000 bp, Homo Sapiens; identical to SEQ ID NO: 114970

SEQ ID NO: 392520 - DNA, 1000 bp, Homo Sapiens; identical to SEQ ID NO: 206383

SEQ ID NO: 392521 - DNA, 1000 bp, Homo Sapiens
gaggatacttggtcacatcctcacatggtgaagaataagatggtctcttcatttcccttcaacactagtcccatcgtgaggctctgccctcatgacctaatctaatcctaactgcctcccaaaggtcccacctccacatcccattattggggattagggtttcaacatagggatttgggggaaacacaaacactcagttcatagtgatatctgactgcgattccaaaggtctgaggacacattggccctgttgtttttgctgtgttgtccttggcctcaggtgaacattttagctttagattgcaacattttaagctaaaaacactaagctagaaaattaaacttatctcgtcacattctgcatggtgaacaaactcaaaactcacctgagtgtatcttgttttcatgagaaaaaatgaccggtcatctcccttgccctgttagggacagttagacatgactgctgtatgaagatatgtacatgttaacaattcatatgtacaagctactgttccattttgcctggcccaaggggaggtagctagctagttggggtagcagggcgaattaaccctaatataatagtacatttctaatgccaccaatgaaatgaaaaccagctctcaaacatggcactatatgggatggcattccaaggccaactcagttacagtaactacagctttaactttgatcattttgttaccagaaaggggtcccaatccagaccccaagacagggttcttggatctcatgcaagaaagaattcaaggcgggtccatagaggaaaaggaaatgaagttttaaagaaagtaggaaaataaagagtggttgctccataggcagagtgaacctaagggctgctggttgcccattttattgttatttcttaattatttactaaacaagggctgaattattcatgcctccccttggtagaccatatagggtaacttcctgatgttgccatggcatttgtaaaccgtcatggctctagtgg

SEQ ID NO: 392522 - DNA, 1000 bp, Homo Sapiens; identical to SEQ ID NO: 282921

SEQ ID NO: 392523 - DNA, 1000 bp, Homo Sapiens
catttctttcctccattcctctcctttcctctccctcatttttctccctgcaggtattaaactgacactgtcagctcttctggatggcaagaacgtcaatgctggtggccacaagcttggtctaggactggaatttcaagcataaatgaatactgtacaattgtttaattttaaactattttgcagcatagctaccttcagaatttagtgtatcttttaatgttgtatgtctgggatgcaagtattgctaaatatgttagccctccaggttaaagttgattcagctttaagatgttacccttccagaggtacagaagaaacctatttccaaaaaaggtcctttcagtggtagactcggggagaacttggtggcccctttgagatgccaggtttcttttttatctagaaatggctgcaagtggaagcggataatatgtaggcactttgtaaattcatattgagtaaatgaatgaaattgtgatttcctgagaatcgaaccttggttccctaaccctaattgatgagaggctcgctgcttgatggtgtgtacaaactcacctgaatgggacttttttagacagatcttcatgacctgttcccaccccagttcatcatcatctcttttacaccaaaaggtctgcagggtgtggtaactgtttcttttgtgccattttggggtggagaaggtggatgtgatgaagccaataattcaggacttattccttcttgtgttgtgtttttttttggcccttgcaccagagtatgaaatagcttccaggagctccagctataagcttggaagtgtctgtgtgattgtaatcacatggtgacaacactcagaatctaaattggacttctgttgtattctcaccactcaatttgttttttagcagtttaatgggtacattttagagtcttccattttgttggaattagatcctccccttcaaatgctgtaattaacaacacttaaaaaacttgaataaaatattgaaacctc

SEQ ID NO: 392524 - DNA, 1000 bp, Homo Sapiens; identical to SEQ ID NO: 282923

SEQ ID NO: 392525 - DNA, 1000 bp, Homo Sapiens
taatagaagaaaatcagtgtgtacactgagatccttctggaatactctatcatcttgttggatcatcccttgttagatgggttaactgatccccataatccataagtgggagtctgtgtacaggaattgcctgtgaaacacactgaaaaacggtgcaccgttgtaaggccctgtccgatacactctcttattcctcccatgtgccctaatcatagtcttcatttctgctgaactggactgtgcagcacagcttcccatttaggcctacagccttagacagagaaattggacccagtctttctcctctgactgtgtcccgaactctgtagtatcataagctaagactgttttccaaagagaaggcacagtgcatcccaagtaaactgagaacaagaattctctcctgttgagaaaatatatatatataaatattcaaaactccctccacattctaaaaaaagatcgttcagtgaaaacatctctgaaaaacctggtaatcctatgtcttttacacagtcttgtttcctactaaatggcctagccccacctagtgatatccacaacttggaccgggatgatgtgggatagcaagagggtggaataatgtaaagaaatagaaatgtctgtcttacttgctatgttaagaagggacttcagtctaaaatctgcctttttgtcattttgtaatgatttcccctttatccattgtgtactctgtttgccactttttctaatgtgtatggactttcttctccgtatcttcttcctttaaatacaccaatgatcacaagctcctctgagaagagttctggtcctctgggtgcaccccatctggagcgagaggcagacaaattaaaagatggtaacataaaatccaagtagtgccaggatagagaatgcagccctaaactgatggtttcaacccacaagtcagagttgacttgtcaaagagtggaagaaagaacttttcagccagacggaacagggtgtgcagaaacac

SEQ ID NO: 392526 - DNA, 1000 bp, Homo Sapiens
ctgcatgtatccccgcaccccagaactgggctcctgaacgccaggaacctggggtctgggggggagctgggctccttgttccgagcccttgctccttaggatccccgcccccacctgcccccaatgcacacacagacccaccgggggccacctgcctcccccatcctctcccacacacattccagaagtcagggccccctcgaggagcacccgctgcagggatgcagggccacaggcctccgctctctcctaaggcagggtctggggtcacccctgcctcatcgtaattccccatgttaccttgatttctcatttattttttccactttttttcttctcaaaggtggttttttggggggagaagcaggggactccgcagcgggcccctgccttccacatgcccccaccatttttctttgccggtttgcatgagtggaaggtctaaatgtggctttttttttttttttcctgggaatttttttggggaaaagggagggatgggtctagggagtgggaaatgcgggagggagggtggggcaggggtcgggggtcgggtgtccgggagccagggaagactggaaatgctgccgccttctgcaatttatttatttttttcttttgagagagtgaaaggaagagacagatacttgaaacttggtgtgtggcctggttatttgggacctgggtgtggagggagatgggcgcacgagagtcagatccttcttcactccaagccagagaggttagtggcctggaaaatgggccagggaggtaactggcaaatcaaggaacccgagttggtgaagactgagcctgggaaggtctggagctctgtccaaagtcatgacaggccagaaaggggaggctggaacttgtctggggccctgcagacttagtccagctctgatccctgccggctgtctcagtcctgttggaagcacaacagtccttaaaggaaaatagagaggaacttcgttcattcatgttcatggagttgtgg

SEQ ID NO: 392527 - DNA, 1000 bp, Homo Sapiens
gagttacctgactggtttcaaactgctagtaagtctgtcagtgtttttttttcccccaaatttttattttgaaaaatttctaacagaggagttggaagaatcatgaacacccacgtacccttcacctggaatcaccagttgctgacattttgtcacgcattttctctcacccactgcctgcaccatagacacacatacacacacacatacacatactctttgaaaaatttctgcagaatcatttataacactttatccctgaatacttgtgtgaatctcctaagaacaaggactttctcccacataactgcaataccattatcacagccaagaaaggtaacattgatgtggtgtgattttgtatatagtccattttccacgttttcttaattgtcctagttatgtgcttcatagcttttttttaaattcaggaatacaaccaaggaccattcatgacatttgatttttatgtctttttgtgatttttatgtctttccagtcccctcttttttctaaataactttgttacactgatattttgaagaatccaagctagttgtctcctagaatgcttcctgttggactggcctaaccgtttcttcatgattagatttccactaagcaggttatgtgggtccttcccactgaatcttgttaggagacacttaatgtcaggtgtgccatcattgcttgatgctaggtgggagtatttggttgtcactgttttctaaacaattatttagcttcctgtttttgcttttgcagaaacggaaccaaaagatgcaggatctgagaaatccactggagtggtccggttaaataccgtgaggcaaattattgaacaggtgagaaaattcatccacagaccgtgttttcagaaagaattagattatggtttgctgcagtcacttttaggatagtatctgtacttttaatcattaaatgttaataataaaaaattggccgggcacagtggcttacacctgtaatcccaacactt

SEQ ID NO: 392528 - DNA, 1000 bp, Homo Sapiens; identical to SEQ ID NO: 282926

SEQ ID NO: 392529 - DNA, 1000 bp, Homo Sapiens; identical to SEQ ID NO: 282927

SEQ ID NO: 392530 - DNA, 1000 bp, Homo Sapiens
ctgcaggtgtgagttttacatcctttccaagaggcatttgctaataaccctaactaccgcctatccctgtgacactattttctgcctcagcaccctatttcttttgtagacattttctaagtctgtattttatttatttgttggctttttgtctatttctctactagaatgtaagctccatgagagcaaggatgtgtttgtctgatttcccgttacagccccagcacttagctgagtgactggcacctagtaagcactcagtaactgtttgctgaataaatggaagaatggtcaaaaggctcttcttgatctgatccctgcttgtctgtctggcctcatgctgccastattcctcactgcaccttcagctcaagaaaaacctctttacttgcttctttgaagtgccccttgggcctctgtgtctttgtacctgttgttccctttgcctgaaacaccctttgcctgcccgtctacatggtgaattcctaatcattgatgaagtctcagctcaatagctacctcctctgtgaagctgtccctgatttcttcaggcagatgttttttcccgccttccctgttcccaccgcaatttgtaaatacctccatggaagcactttattgtattgtattgtaatttttttttgcatgtctgtttctactattagactgtaagcaccgtaaaagcagagattgtgctttttcatcctcatgttccccgagcctagcccagtgcctggcacgtaatagcttgtcattaaatatttgttgaatgaatctgtgaatgaacaagagtcatgcagttggaaaagtgttagaagctgtatgtattataaaggaaagaaatgcccttggtggcttccagggtgtttttttttttttttttggtctaaagaggagatctagagagtgttatacaatctctttgaatataagattactcgtttggatttttaaaataatatagatcttcataaataattgcaaagatataaacaagctt

SEQ ID NO: 392531 - DNA, 1000 bp, Homo Sapiens
ttttgtattttttttagtcgagacggggtttcatcatgtcagccaggatggtctcgatctcctgacctcgtgatctgcccgcctcggcctcccaaagtgctgggattataggtgtgagccaccgtgcccagccaacaacagctcactttcaaaatgtatgttactctttagaatgtattcaatcactaatttttgctatgtgcgagttgttcttatagtggccagagtccctcttcaaataggtgataaaatatcttaaagtatgtgaatattcatatgtctcaagttcagttaacaaacaaatataattagattaagccttgatatttctaatagacttctctaataaatgtattttcttaatttctactattattaatgctttttatttaaaattgaggatgtgatacataagaaataaatataactagatagagccttcatatttctaagttttctctaataaatatatttccttaatttctaccactattaatgcttatttaaaattaagcatgtgataactatttgttgccacctcatacaaaataaaataatgtaatattaattatgcttattgtgcatgtgctttgtgtcgacttacggtgtaagttgtctagtagctcagttagcccccacttgccaaactatgtagtcataccaatttttttttcagatggataaagggaggcaggagggttttgtaaccacagagttcatcatcagaggtgaacaggaccaagatttgaacctgacagtttttcttcagagttggaaatcttaatctccatacatacttgaggttttcggatgctcaccaaattttcagttatctaacttaaatacggacaatgtgaaggtcacaaaattactttcagtcatctctaagataaatctcagagagataagcaatttttcagcagatgaaatataattaaaacaagagattacgtaccttctggtcctgttgccaagagatcactggtttcccccaaggctt

SEQ ID NO: 392532 - DNA, 1000 bp, Homo Sapiens; identical to SEQ ID NO: 282930

SEQ ID NO: 392533 - DNA, 1000 bp, Homo Sapiens; identical to SEQ ID NO: 203038

SEQ ID NO: 392534 - DNA, 1000 bp, Homo Sapiens; identical to SEQ ID NO: 114971

SEQ ID NO: 392535 - DNA, 500 bp, Homo Sapiens; identical to SEQ ID NO: 206382

SEQ ID NO: 392536 - DNA, 1000 bp, Homo Sapiens
ctctcgagtaactgggatcacagggacgcaccaccatgcccggttaattttttggaatttttagtagagacggggtttcggcatgttggccagaatggtctcaacctcctgacctcaagtgatcttgccccctcaacctcccaaagtgctgggattacaggtatgagccaccttgcccagccaggatcttctaacatcagaaatgacaaggtctctgggtgcttctggacctggttctggtggggtgcagtggtggggtacagccttgcctgcagagcctcagaccttttcctatgactgcagtggactgacctcgttcccagaggcagctactaacttatgcctggtcctttttccagatctaggaaagaaggacacagagacagtgtacagtgaagtccggaaagctgtccctggtgagtgagggtctccagtgccccagcctgggggatgccccctataatcactgatgggggcttgggagtgggcagagaaaagaagaagcaaagaagggcaaaaaaggggtggcacctcttacaccagcgctgtgggcttcctctctcccaccacccttaaaaagtcacctcgggtcacatttactattcatgtagtcaacgagcgcttcttgaatgcttactgaccccagccggtgacccttacctgctccccacacaggccctggtggctggggttccccaaggtcttggacgtcgagtgttttgctttggagacccccagtagcttcagcctttcttcttgttttcttttttctcttttttttttggggatacggagtctcgctctgtcactcaggctggagtgcagtggtgcaatctcgactcactgcaacctccacttcccggatttaagtgattctcctgcctcagcctcccaagtagatgggattacaggcgcctgtcaccacactcagctaattttttttttttatatttgggagacagagtttcgctcttgatgcccaggctggggtgcaatggag

SEQ ID NO: 392537 - DNA, 1000 bp, Homo Sapiens
cgtaattagaaaatggcaggcaaattctctggagtgttacagcacttgggagcagcatccccttagggactttgggaaagagctcttgaggaagtcaagcattaggtattggaaaacaaaaatagaagaaaaacaaaaaataaactgaagcctacatttcaaaaatgaaagcaaaccagacttttatttttaatactgaagactataaattgtttcaccacgtaggtagatttcaataaatcagagataatgagatggtagaggaaaacatggggggaaacaacttacgaggttcccattatgagcccaacgcaaggctaggcattttcacatatattccatcatttaaccttcatgacgcccccatgtgaagaaataagagtcagaaccattaaggaccaggcatgtggtcacacgggctcagcagtggaacccggtttgttctgcctctagagtctgggttttttccactatggcattttcagaatggaaagactccaaggcagtcagcaagtcagcatagatttcctggtagggaagaggccaggaatgtcagtgtcagacccttctgaggtcaggcgctgaacttctccaagctctgcctttctgcagtttagatcagtcaacttcttaggggtcaaagtatgtgctttttgaagccacagccctccccgacatgtgcgtcagcagatgatggctgaacccaaacccttccctactattggaaaaacaactcaaaaagtctgcacactgatgaggaactctagagcttaatgttgatgtggaaagataatacatttttcaatttaagagtatgtctgagaggctaaaccagaaatgtgtaaatttggtgagactttaaacagcctgtgaccgacgggccaatcttcctcttttccttccagatgtcacactggatccttggcctccagggtccattaaggtgagaataagatctctgggctggctggaactagcctaagactgaaaagcagccatg

SEQ ID NO: 392538 - DNA, 1000 bp, Homo Sapiens; identical to SEQ ID NO: 282933

SEQ ID NO: 392539 - DNA, 644 bp, Homo Sapiens
gggtttgtattatagtcattagtgaataaaacgctaatagatgtctgacacagagaaaaactaatcattatatttagattttgtcaaatatcagcatgttattagtctgcacttttgtgttatcaccagtgactgatcccgttaaaatgcatgtgatcacattattaatgttcttggtcctttaagcatgcttaagtttttctagcataactaacaacaccactgagagaggaagtacatcactattccttcaagggtagactattttaaacaccggtttgttaaattttaaacagtgctgacaatttggggagacaggtggttattttgttttgttttgttttggttttctctctcataggaaacaactatgttattcaccgcaacagctgtgaagttgagattagccgtgtggccaatcgtgttctagatgagctggttagaccatttcaagaaatccagattgatgacaatgagtatgcttgtttaaaggcaattgtattttttgatccaggttggttttcaaaattccactagagaattaatataataaaaattgaactacttttcaatattagaatatttattgtctcacactgtaattaggttaaatctgtacactgcctctcttattcctttgttag

SEQ ID NO: 392540 - DNA, 1000 bp, Homo Sapiens
aggaagtcatgctcgagggagtgtgaagtggttcaggttggtgcagaggcgctcatggcctcctgcttcttgcctaccacttggccagtgcccacccagcccctcaggtggcacatctggagggcaggggttgaggggccaccaccacacatgcctttctggggtgaagccctttggctgccccactctccttggatgggtgttgctcccttatccccaaatcactctatacatccaattcaggaaacaaacatggtggcaattctacacaaaaagagatgagattaacagtgcagggttggggtctgcattggaggtgccctataaaccagaagagaaaatactgaaagcacaggggcagggacagaccagaccagacccaggagtctccaaagcacagagtggcaaacaaaacccgagctgagcatcaggaccttgcctcgaattgtcttccagtattacggtgcctcttctctgccccctttcccagggtatctgtgggttgccaggctggggagggcaaccatagccacaccacaggatttcctgaaagtttacaatgcagtagcattttggggtgtagggtggcagctccccaaggccctgccccccagccccacccactcatgactctaagtgtgttgtattaatatttatttatttggagatgttatttattagatgatatttattgcagaatttctattcttgtattaacaaataaaatgcttgccccagaacttagtctctttgcccagcctcacccctcctggtgctcatcagactcttgccacccctggctcccactccctgcttgcctctggtggagctgcacagagctctgggaagaggccctcttcctccccgcactggggcgatgggcgcacctcagacttacccactgctgctgccaccaccaaccccttgatccctcagtcctcccacacagcttctgtccaccccaggtttccctcaccccacctttgctaagtcttcctca

SEQ ID NO: 392541 - DNA, 1000 bp, Homo Sapiens
  misc_feature (797)..(797): n is a, c, g, or t
ctatataagaaaagggtgctcatttgcatagcccttcctcttctccctcagagaaggcctgggaggggccggaggagaggaaaaaggaaaaactgacaaagggatcctggtccctagacattgctttcccatcctgctactcaatgacagtttctggtttcactgggtcactctcatcttgatgcactcccgggcaagagctaactgaaaggcagctgcgtaacacataccagacacaacagtttatcatgggagagtgaattaaaccaggaacttctcaaaaagacagaaacagaaccctgcatcccaaaacagagacagtgtcgggtatgctatgaggcagaggcaacgactcctctgaggcccaggattcctttgcaacgagattcccggcttcctggtttccaaaggaggctcctgggccaggtggaatttaaccttaggtcgatacatatttttccccaggattggtgaaaatagtgagttagaaatcaagaaatccctacagactagagacataggtaggaaacttggacccaaagcaggtacttgggaagagtgttcagccgccccaccggggaagaaacttgtctagcccccaagaaccaaacttgcctggggcgggatcatttgcggggaggagcgctgggctcgccccccggctctgacgttgaccaatagaaaggcctgggggcggagccagggaaacgcgggaagcagggcggggcctctggtggcggtcgggaactcggtgggaggcggcaacattgtttcaagttggccaaattgacaagagngagaggtatactgcgttccatcccgacccggggccacggtactgggccctgtttccccctcctcggcccccgagagccagggtccgccttctgcagggttcccaggcccccgctccagggccgggctgacccgactcgctggcgcttcatggagaacttccaaaaggtggaaaagatcggagagggcacgtacggagttgtgt

SEQ ID NO: 392542 - DNA, 1000 bp, Homo Sapiens
ctttcctctaaattcttatctttatcccttctcaaagatagaatgttctgttttatatattgaaatatgaatgtgtgtcactgttggctgttagctacttgagggtggaaatgtggtttatctttcccacttagccctctagccaatccccctagtcaggtaagctttgtagtccttacaaagccagtatttaagtgaatttgcatggtgcttcccactttattagggtgtattcacagccatgatcatatttgcttctcaaagcaaatatggaaggcaagaacaagtattaatcaattttatatatgagaaaactgaggaaccaagagaataaaagatttaactgaagatctctaaactggttttgtggaaaagctggtcatagaaatttaaatctttagagttacagtaccggttattttccaagaaacacttgctggtatgtgttgtatcattaaactgtggagaatagttgacaccaagtcgttttctttcaaatacattaaatattttactctgatccttccctgtgtctgccaattactgggattatatgataatttgctcctcgcttaagaacatttaacaggaaacccagatcgagtggctctgttctggcttgggtgggtttgggtatttttgttgctgcttctagtgatggttcttgctttctttctccctctggatctgtcttttggtacaaacacaccggcccaaccaagggaaagggtgaggtggatttctttccctttagcacctaatcttatgatgaaaaacgcaggttcctttctcttaaaattccaagatctttcccttccaatgactccgaagcctgggtggatacctcaactcagggcgcagaacacttggggtctgagtgtgcaaggaccatgcggacctgttcaatcccggcctttgggctccagcccagccttcccggggggaggagccgcatatgcggccaggtcataaacccgtcaggccgccgggctccggattt

SEQ ID NO: 392543 - DNA, 1000 bp, Homo Sapiens; identical to SEQ ID NO: 206384

SEQ ID NO: 392544 - DNA, 1000 bp, Homo Sapiens; identical to SEQ ID NO: 282936

SEQ ID NO: 392545 - DNA, 1000 bp, Homo Sapiens
caggaagtcccctggttaagaaggcaagtggggtttaaacagacccacagtctactcatcaaaccaggtgtccttggcattgtgtccacccagagagctcactgttttcttttctttttcttttctttttttttttttttttgagatggagtcttgctgcatcccccaggctggagtgcagtggcatgatcttggctcactgcagcctccgcctcccaggttcaagcgattctcctgcctcagcctcccgagtagctgggattacaggtgcgtgccaccacgcccagctaatttttatacgtttagtggaaatggagttttaccatgttggtcaggctggtctcaaactcctgacctcatgatccgccttcctcggcctcccaaagtgctgggattacaggtgttagccactgcgcccggccctagagctcactgttttctagttagtccatctggaagtggagcctttttccagtttgcacaaatgtgccatattggcttgtagctggcatgcatccaagtccataggtcctgcctcttcaatcctggctttctagggcctgggatgatcattgctagaactgagagaccagcctggctcagtgaacttcagggcgttccgttcattctttcagtaaatgtttgcagcacatgtgttacatgtcaggcagtgaaaccccccacagcagccttccctctcagaggatacatttgtaaccattacacagtcatcaaaggaataattttttttaatcaccagtgtgcatacagtcatggagttgggtattcccagctaccagggaggctgaggtgggaggattgcttgatgccaggagttagggaatatagtgcaccgtgattggacttgcgaatagccactgcactgcggcctggacgacgtagtgataccctgactcttataaataaataaatgaataaacacaattatgactttgcggatgggagaaaaggttctctgagagcgtattacataagtatc

SEQ ID NO: 392546 - DNA, 774 bp, Homo Sapiens
gggggctggagtttcgccgccgcagtcttcgccaccatgccgccctacaccgtggtctatttcccagttcgaggccgctgcgcggccctgcgcatgctgctggcagaggccgacactgaggaggaggtggtgaccgtggagacgtggcaggagggctcactacaactccggtacgtggcagcagcccaaggttgacggagacctccctgtagccggaccaattacgcatcctgcgtcagttgggccgcacaatctgggctctatgggaatttggaccagcaggagtcgaggcagcaatgaagtggacatccgaggtgaatgacgaattggaggacctccgctgcaaatacgtagtcctcatctcacaccaactatgaggcgggcaaggaatgctatgtgacgggcaactgaagccaaattgagaccctgctgtggcagttttccagggaggcaagggattcattgtgtgagaccagatctccttcgctgactacaaccgacttgctgctgatccatgaggtcctaacccctggctgctggaagtgttcccattgctctcaacatatgtggggcgcctaacggacggccaagctcaaggccttctggctccctgagtacctcggccgcgaccacgctacgggaaacagtgagggttggggggactctgagcgggaggcagagtttgccttacctttctccaggaccaataaaatttctaagagaagccccttaccccacccccgccacccggaaaaaaaaaaaaaaaaaaaaaaa

SEQ ID NO: 392547 - DNA, 1000 bp, Homo Sapiens
gctcagctttgttctgtacgtttcttcctgagctcagacatctcttggctatccctcttgcttctccagatcacggtgctgtctgccatgacagaggaggcagctgttgcaatcaaggccatggcaaaataactggctcccaggtgagtgtgacaaatccctcactgtccccttcacattttgttgtcctcagcagagctgctgtagtcttaattgtttcaggcttcttcctgcccctagcctggctctgtcctccctatccttcctgttgaaggtattatcctgtcttactaatttctctctcctacctaggatggcggtggtggcagcagtgatcctctgaacctgcagaggccccctcccccagcctggcctggctctggcctggtcctaggttggactcctcctacacaatttatttgacgttttattttggttttccccaccccctcaatctgtcagggagcccctacccttcacctagctcccttggccaggagcgagcaaagccgtggccttggtgaagctgccctcctcttctcccctcacactacagccctggtgggggagaagggggtgggtgctgcttgtggtttagtttttttttttttttttaattcaatctggaatcagaaagcagtggattctggaaaatggtccttgtgccctccccactcatccttggtctggtcccctgttgcccatagccctttaccctgagcaccacccaacagactgggaaccagccccctcgcctgcctgtgtctctctccaaacccctttagatggggaccccagaggaggagaggggaggggacctgccccctcctcaggcatctggaaggccctgccccatgggctttacccttccctgagggctctctccccgacacatttgttaaaatcaaacctgaataaaactacaagtttaatatgaagcccccactcagctgcttatttgaattaaatgggtgtatttggaagccacaaaaagactgaa

SEQ ID NO: 392548 - DNA, 1000 bp, Homo Sapiens
attggctctggggacgccgcagctgccgaagcgcagcgcgcggtccccacgcacgccctgcctccgggcggccggcgggctggcccggcgaggagaggagggatgcgcgccctcctcccgctcctatctgcgggtgccaccgcctgcgtcagggacccctggcccgatctttctgcccccgataacagaaaatctctttttcgtcttaaaaaaaaaaaaaaaaaaaaaaaaagcctgtggaagactcagcagaacccaggaagcgcagaattgggagaaaagtctttggctggggctgtttcaagtctctggttcaatgggctgctcgaagccaggactgggtaattctttccagacgtcttgacttctccttccccgccgttgttgcccttctgcctcctccaacttaagggggtcttaacaagatcttctgaggggtggacttctttggaactcgacaggaccttgaagactgggttcttagtccttatcacatatatgggctataatgaataagtctaaacagaaaagtcgaataaactggaaatgatgctttcatcacgtcgcacaaggagctgtttggatcagaagatgacatcctttcacccatccctttcaggttttgacatcctaaaatgtaccttatggaacccatacctgttatgttttcacctgtacaaggcaacagagaaaacatggtagtttttacttgagtagatgtgacttagcaatatgttgttgctgacctccatcccacagcacaaaacatatgtttatatgtctgacagacaaagtatccagaacaaggatttagtaccttcataatcctctgtatatgtggttctagaacttttggtaaagaaactctttatactcttattaattattgagaacctcaaaaaaagtttatatgttatatgtatcaatatttaccacattagacattaaagctgacttaaaaagttaaaatacttaagtcatttgaagtaataataaatgc

SEQ ID NO: 392549 - DNA, 1000 bp, Homo Sapiens
tcgtagatgctgcctagggttgcttgggccactgccctctccacacccatgactgccccttgcttctcaactaaagaatagtgcctcagcgctgcccacaccaccgtcctcctcgctgtgccaccacccctccctctgctctcataggagttaggctgtcgtccccctccagtgcttggctgccccacaggccacacgctgcccaggctctgctgacttctgagcagttttccaggaggccggggggagcaggaggaggaaaggtagcccccgagggatgtccttggggaggggtcagctctggccacaatcctccccaccagtctcacccactaggataggaactgggccttgtgtgctggcttccgctgtcacccagcaaggcacaggctcctgtatttgagactaggatagcttcatcttgagcctgagccttagaatctgtagaggagcctggagtcggatctagccatggctggcagaggtttctagggtgggccccagccgtggcgtgaactgaggatgacccggggcagctggcaggagagagccttggcctgacctggcacagaaagggcagcttcagtctctgcagtgtccattatctgctgttccttcgagggttccaggctgtgtgtggggcccaagcatgccccacccaccctcctgggcccaggcagcacctggagcccacagagtctgtgtgtagccaggaagccccgctcaggtagccaccgccggggcactggctgctctgtcttggtcctgttaaccctccacctcctctcttggactccctccccaccccaaccactctttctttctcctttaacccaatggagactttctgatgcatcgttttctttgctgtgccaaagcaggtcagaagagggagaggaggggctgggggtgaggggccaggccatggccaaggggccagctgcccctcatttatcactctgaccttcacagggacagatctgatttatttattttggtt

SEQ ID NO: 392550 - DNA, 1000 bp, Homo Sapiens
ttcagcatgccaaaggattgtagaactctcagctctgctgtacagagctagcacagacgggcaaaggaacttcctgaggagagagggaatcaatcaatgagatggatacgtcagagattagtttcctaggggtcaagagaaacacaatctccaaaccttctcccaggctgccttgaaggcagagcctgaattttgcgggagtcgaagctccagttttctctctcggaagaggaaaaatgctccagcatgctttttccttgcactatttcctttaccggggaattgagagttgaggggggaagaatctcgcacctcaccagaagacaaggtgaggtctgtactgcctcactgagagctgttgtatggcccccagaaccagcagctgctgggggagcgtggcgaggagcactccccccttgagcgggacagcttgatgccctctgatgaggccagcgagagctcccgccaagcctggacaggatcttcacagcgtagctcccgccacctggaggaggactatgcagatgcctaccaggacctgtaccagcctcaccgccaacacacctcggggctgcctagtgctaacgggcatgacccccaagaccggcttctagcccaggactcagagcacaaccacagtgaccggaactggcagcgcaaccggccttggcccaaggatagctactgacagcctcctgctgccctaccctggcaggcacaggcgcagctggctggggggcccactccaggcagggtggcgttagactggcatcaggctggcactaggctcagcccccaaaaccccctgcccagccccagcttcagggctgcctgtggtcccaaggttctgggagaaacaggggaccccctcacctcctgggcagtgacccctactaggctcccattccaggtactagctgtgtgttctgcacccctggcaccttcctctcctcccacacaggaagctgccccactgggcagtgccctcaggccaggatcc

SEQ ID NO: 392551 - DNA, 1000 bp, Homo Sapiens
tgaagattttggagggtcctccacaataaggtcaatgccagagacggaagcctttttccccaaagtcttaaaataacttatatcatcagcatacctttattgtgatctatcaatagtcaagaaaaattattgtataagattagaatgaaaattgtatgttaagttacttcactttaattctcatgtgatccttttatgttatttatatattggtaacatcctttctattgaaaaatcaccacaccaaacctctcttattagaacaggcaagtgaagaaaagtgaatgctcaagtttttcagaaagcattacatttccaaatgaatgaccttgttgcatgatgtatttttgtacccttcctacagatagtcaaaccataaacttcatggtcatgggtcatgttggtgaaaattattctgtaggatataagctacccacgtacttggtgctttaccccaacccttccaacagtgctgtgaggttggtattatttcattttttagatgagaaaatgggagctcagagaggttatatatttaagttggtgcaaaagtaattgcaagttttgccaccgaaaggaatggcaaaaccacaattatttttgagccaacctaataatttaccgtaagtcctacatttagtatcaagctagagactgaatttgaactcaactctgtccaactccaaaattcatgtgctttttccttctaggcctttcataccaaactaatagtagtttatattctcttccaacaaatgcatattggattaaattgactagaatggaatctggaatatagttcttctggatggctccaaaacacatgtttttcttcccccgtcttcctcctcctcttcatgctcagtgttttatatatgtagtatacagttaaaatatacttgttgctggtactggcagcttatattttctctcttttttcatggattaaccttgcttgagggctttaacaattgtattactttgtcgaagaactaagctt

SEQ ID NO: 392552 - DNA, 1000 bp, Homo Sapiens; identical to SEQ ID NO: 282941

SEQ ID NO: 392553 - DNA, 1000 bp, Homo Sapiens; identical to SEQ ID NO: 282942

SEQ ID NO: 392554 - DNA, 1000 bp, Homo Sapiens
  misc_feature (516)..(516): n is a, c, g, or t
caactctttgttatttgaaaacatgtttatttttcttgtctttattttaacctttgatagaaccattgcaatatgggggccttttgggaacggactggtatgtaaaagaaaatccgttatcgagcagcattttatttacccctcccctatccctaggcacttaaccaagacaaaaagccacaatgaacatccctttttcaatgaattttataatctgcagctctattccgagcccttagcacccattccgaccatagtataatcatatcaaagggtgagaatcatttagcatgttgttgaaaggttttttttcagttgttctttttagaaaaaaagaaaaacaaaaacaaaaacaaaaaaaaaaaatcacaccattgctcacagaattggcatctcatttttgggacctcccatctttctgttttgaaaagtgtacagtagtgcagtgttcctgatgtaactttatggcttacaatgttgacatgtctcaggttcatgtgttgcgattggtgtttnccgtctcaggtagattgcaaagtgtaggccccacacattggaaaaaataataataaaacaaagcaaaaacaggaaattatggattttagttgtatattggtttatgtattttttcttaagtatacagtgcactgtttgaaatgtattgttgagtattactttgtacaggttgatcactttttttagagtgaagaaagaacaaacttgttttttgtgttttttaaaggaatataaaataatgaaggatgtataattgatgccaaataagcttgttctttagtcacaccgacgtcttatttttccctttaggccagttctgtttttaaggtgtacatggacaatgttacagtgtaagaaactccatatccatatgttcccattcgcattttgtattggttcatgtataccatttttacaaaaaaaaaaaagaaaaaaaagaagtactataaaatatctgtcttcttaataaaaaaaaattaatgtt

SEQ ID NO: 392555 - DNA, 1000 bp, Homo Sapiens
cacaaggcaggaagggtaagacagcattcgcagcatattttatttcagaaatgcattttctcctcccagcctcttaaggatagggtgagactgattttattcttctccatcccagaaacacttaggaagcatgtgctgtttgttatctctttctgtaagaagctgtgggggtcacgtagagagtagcctaaggtagtctgcagccagtaacaacgatcaattctgatgggtaggggtggagtcgccatggcattactgcttttagcgtaacacctagctctgtgagacctgcgtgctgtgtctgtttttactttgtggctgtcagtcataggtcccattcccttatcccagtagcaaacccccagcaggccactttccttatttatcactaaagcccacattaaccttgttacaggacaagagggagaaagttgtctgagaacttttgactgtggccctggactttgctgtgctcgtcatttttggacgaaaatttgtaagccagtccttttggagggacaggtctgctccagaagagggcataaagacactgctcaagctccagaaatcttccagcgttgcgactgtggccctggactactgtgtcgaagccaattgaccagcaatcggcagcatgctcgattaagagtatgccaaaaaatagaaaagctataaatatttcaaaataaagaagaatccacattgcatttgagctcaatcttggacattaactttaaaatgcttccatacagatctctcttaaaatcaaatcttgtagcaagtgaaatagcctgaaactagagaactaagagatggcgaccttgtgatgaatgaaactagctttagccttttgtccgtttttccagaaaactgatgggactctgtaaccaaaaaaattatttctaatctagggactcaattaattcaaatctttaagaattgaagccaggcatgggtggctcacgcctgtaatcccagcactttgggaggcagaggtggg

SEQ ID NO: 392556 - DNA, 1000 bp, Homo Sapiens; identical to SEQ ID NO: 282944

SEQ ID NO: 392557 - DNA, 1000 bp, Homo Sapiens
caattactaccagtataattatcacactcaaaattgtttattagtgatgagcatatatcttccttattcctcttcaatgtaaggcagaaggagttcctgtttttagtgagaatttgaaatagaaaaggtcagaatatctctttgttgacagatgtgggatctgttgttgagagatgtagagaaacatgtttgaacatttcactttgtgtgttttatgtgttaagttccaggcaggggaatagaattaaattattctttattttgaaaatacagatatgataaagtcacgttcattaaacaaagaaacacagattctagagcagtcagaaaatgaacttcttaacatctacactagcggcagcttcctagaaatcactgcgctaccggctagtaacggagtcattgccattcagagtgtgcatttttttttcctctttccagttttgctggcccccctaattatccattttctgatgaatattaacatggagggcattgcatgaggtctgccagaaggccctgcgtgtggatggtgacacagaggatggctctatgctggtgactggacacatcgcctctggttaaatctctcctgcttggcgacttcagtaagctacagctaagcccatcggccggaaaagaaagacaataattttgtttttcattttgaaaaaattaaatgctctctcctaaagattcttcacctactttggtctccataacttctatgttttctctccttctgacacactagtgcccccaaattgtgatttgcctatacgtttagggccgggattggaagatgttaacaaccatttaagattcatttctgcagtgggagtgggtggagtttcaccctctgggaaaggggcaggtgacaggtatttatcagtcagtgcctctctagctcttgtaggaagaagcacacgcaggatggagtctagaggatgagcgatattgaccagcaattcatgggctccctccagcagtgcgagggtca

SEQ ID NO: 392558 - DNA, 1000 bp, Homo Sapiens; identical to SEQ ID NO: 282946

SEQ ID NO: 392559 - DNA, 1000 bp, Homo Sapiens; identical to SEQ ID NO: 282948

SEQ ID NO: 392560 - DNA, 1000 bp, Homo Sapiens
ttcctggccctggggccgggggctggggtgtggggcagtctgggtcctctcatcatccccacttcccaggcccagcctttccaaccctgcctgggatctgggctttaatgcagaggccatgtccttgtctggtcctgcttctggctacagccaccctggaacggagaaggcagctgacggggattgccttcctcagccgcagcagcacctggggctccagctgctggaatcctaccatcccaggaggcaggcacagccagggagaggggaggagtgggcagtgaagatgaagccccatgctcagtcccctcccatcccccacgcagctccaccccagtcccaagccaccagctgtctgctcctggtgggaggtggcctcctcagcccctcctctctgacctttaacctcactctcaccttgcaccgtgcaccaacccttcacccctcctggaaagcaggcctgatggcttcccactggcctccaccacctgaccagagtgttctcttcaggggactggctcctttcccagtgtccttaaaataaagaaatgaaaatgcttgttggcacattcatgtgggttgaccatggcttctttaattcatttggagacattttggagtctgtggaatcgggcgggggtgctgctgagaggagtgggatgggaaagcatggactccctttgggcagggggtcctgacctcacacctcctcccagagggtctcttgcaaatcccacgagggtgttggagaaagcaggctggggctctagccttttgggcaggagtctcggacacaggaagggtggtaatgggggacaccaggaaacagccccatgcctcgagatgggagagggctggggcagagcctgtgagggccacagcagggtcagagctgcctcctcagacctggcgtcccagtgggaggaggtgcttggggaggggggtcaggaagaagctgatcgaagacccgtctggtgtgtgttaccttggtgggtctcca

SEQ ID NO: 392561 - DNA, 1000 bp, Homo Sapiens
  misc_feature (142)..(241): n is a, c, g, or t
ttgccatagattagcatcagtgttgctcttttgtcgaccaagtataaacctggaatcattcaatttgattttctatggttcttgaaaatcttggacacaatctttctgcctcctgtacttatgcccaaggttagccatttgnnnnnnnnnnnnnnnnnnnnnnnnnnnnnnnnnnnnnnnnnnnnnnnnnnnnnnnnnnnnnnnnnnnnnnnnnnnnnnnnnnnnnnnnnnnnnnnnnnnnaaagataccagacccagattcatgaatgcaaccaatggaaacgggttgtagtccagacttaggtacatttctcacatgtgagggcttctctcattaaggagagagcacatcctttcaaggtgtgttgctacaatgacgtctgtaaacagaagttggactgggtgacctccaggatccccataccccaattccaagattctaagtataacaaacctaacctgcctgtcccttgcttcatagagtataagttcccagagtggacttatggcccctgacaggtataatgaaaatactgcagagaccacttctgtctccaattgcctggaatttttagagtgtagaactacaggtcttttaggtcaggcgtctggcgattgctccaaatgactggttaatagcaagtaatactacatagttttcaaactaataatccttaaaaacagtaggttaaaaccatcttatctttatgaaacaagaagttaatatacttgcactttgctctcttttaggctattctcatggatcacaactgccctattaaaacaaaaatgtacactcagaataatatccagtcatatccgataggtgaagatgaagaatctgaaagtgactgagatgagatcctcaaaaatcatcaaagtgtttaattgtataaaacagtgtttccagtgacacaactcatccagaactgtcttagtcataccatccatccctggtgaaagagtaaaaccaaaggttattatttcaaaaaaggaattc

SEQ ID NO: 392562 - DNA, 1000 bp, Homo Sapiens; identical to SEQ ID NO: 114974

SEQ ID NO: 392563 - DNA, 1000 bp, Homo Sapiens
cttgtgctcacacaaatctgtaaatgggaacattgtacattgtcgaatttaaatgatattaattttctcaagctatttttgttactattttcctaaaattgaatatttgcagggagcacttatactttttcctaatgtctgtataacaaatttctatgcaagtacatgaataaattatgctcacagctcagttttgtataatgtgccatttatagccatcatgtatatgaacaatcacaggcataagtaggtatcgcttatgttgcacgtgctagaatccttattcctttcttacacttggtaatagcaccagatgtatagttgagtaaacccttttcaatttcagattggcaggcccatccccttgggtatcctctcaactatccattattctttcaactcctggatgagaatgaataactgaggacagttgttcaggacatgctcctaacactttgagatcaatatcccaagagccacttctatgcattcccagacaggccctgggcaccaccatcagggctgaccctgggccacagcatgcctcaggggtcagctctctaggaccagccacttgtcagaatgttatcccctgaggctgaagccacagccatgcttgtctcttccacagaagcacttctcttccacaccctttcaccacagttggcagatttgaaagaaaatatggtaagatgagaaatttacttcaacaagtttgaatgataagtttcaaagcagccctaaaaggaaactaaagaagccatagtggggtctccctattgaagtgccctctgtcataacaaaacttctcctacctatggtttcaaggtaaattcaaataaattctccagagggatctgggcattctatgtcttcttttatctggggtagaaacgacaggttgtgaggctcttatgctaaggacactctatacctttaggagctaaaggggccaacttgcctgttacccatgatacaggattagcacggaatatgtcaa

SEQ ID NO: 392564 - DNA, 1000 bp, Homo Sapiens; identical to SEQ ID NO: 282953

SEQ ID NO: 392565 - DNA, 1000 bp, Homo Sapiens; identical to SEQ ID NO: 282954

SEQ ID NO: 392566 - DNA, 1000 bp, Homo Sapiens; identical to SEQ ID NO: 114975

SEQ ID NO: 392567 - DNA, 1000 bp, Homo Sapiens; identical to SEQ ID NO: 282957

SEQ ID NO: 392568 - DNA, 1000 bp, Homo Sapiens
tccttaattttaaaactcttgatgctggctgggttcggtggctcatgcctgtaatcccatcactttgggaggccaagacaggttgattacttgaattcaggagttcaagaccagcctggacaacatggcaaaacacgtctttaaaaaaagaaaagaaaaaagaaaaacagaaagaaaaagaagaaaaactacttgctgcccttacttgaagctcaattatttaaaacaaagaaaaaatagaaaaatcttttattgctgaaaatgctaatgatcacctgcgccttcagggagtcttagtctttttgctggtgaagggtcttgccttgatgttgttggctgctgcctgataagggcgatggttgctgaatattgaagtggttgtcacaatttcttaaaagaaaacaatgaaatttgccacattaactgactcttccttccacaaaagatttcagtgtaccatgcgatactgtttgataagcattttacccatagtagaacttctttcaaaattggagtcagtcctctcacaccctgccactgttgtactatgtttatcaatattctaaatcctttgttgtaggctaaacaatattcacagcattttcaccaggagtaaatttcatctcacaaaaccactttccaggctctttctggactgtagagttctttccaggctaccttgtggcagtttaagagtctggcatcattttccgctgggacctaaggatcgaggaggtgcttgtgactagactgccaatggacccatcacaaagtttaacccaaccttgatccccgagtcttcacaaatgctcactgaagaaaattcctagaacaattcagggtcctttcataacctctactctgaggtgttaataaaaaaccttagtaacttaaaaaaaatgagctgtacacaaatactgaacaataatgctacatatgttaagtatgtaagaaaaatatatactttgacataaataagaaacggtgagttgataattgg

SEQ ID NO: 392569 - DNA, 1000 bp, Homo Sapiens
catctagattaggctcagaggatcttcccaaaggcaagccccagaggccttcacaaaagaaacaaactacgttcactgagaaacaactggaagatctgaacttgttcaataagaacgtatacccaaaccccagccttcagaaagatatggtctccaaaatggaaatagatccaaaagtactgtaggtttggctcaaaaaccttggagcaaaactcaagaaagccaaatgcaagcatatttggcaaaaacaagaagctcaacaacagcaaatatctgagaatgaggctgggtgcggtggctcactcctgtaaatcccagcactttgcggggctgaggcagaaggatcaggaattcaagaccaacctgggcaacatggcaaaaccctgtctctatgaaaaactacaaaaaatagccaggagccaggtgtgttgatgggcacctgtagtccccgctactcaggaggctgaggtgggatgatcgcttgagcctgggaagttgaggctgcagtgagctgtgatcatgccactacactccagcctgggcaacagagtgagaccctgtctaaaaaaaaaaaaaaaatctgagggtagactcaagaccaatccttctcagggaaatatggacacactacccacatccccaaatgaggcccatcctagagtttacacagatcatcaggcaccctcattccaactaaacttaggccccagtggtagggaccctatagaccaccccagtggccccaaaatagttcattttggctgctgccaagatctgaacatatacggcttctagacacttcagaatcccaagttcattctccaagcttccattttaattcttttggttcctcatctctacaaaatagagacatcagacacaaaaggtcacatattgtaatggtttatgatgattctcatacaaaagaatacttttcagcaggaagaaacaaacttgagatatgcacaacatggatggatttcaaaaacattatgttgag

SEQ ID NO: 392570 - DNA, 1000 bp, Homo Sapiens; identical to SEQ ID NO: 282961
  misc_feature (186)..(285): n is a, c, g, or t

SEQ ID NO: 392571 - DNA, 1000 bp, Homo Sapiens
gagggaacactgaacagtaaaagcgtcattagcgctgcttcattttgtatagggcttttctgtttgttacaagccaaacattgcctgtctttgcttcccgtccctgaatgcctttttgtgccagactgtcccaagaatcctaatttgtattccatagaggtattttatttttaatcctagagcttcttattgatggatcctttagaattgcctacctaaaaggtaaactatactatccttataaatactgatcaatcccagttctccccctaaaaatgaatacatagtaggactatagcaaatgtgtttgatgggtaattctagactgggactatggtacccttttccagagttttaaaattcaaccttcattacagacaaagttttctcccagaaggaatggattgatagattttgattaaagtaagggtggaaggaaatctgtagctggatttaccacaagtgacatctagaaactatagttcacaggacagagcagagccatggagaataagcattgactaccttgagttctcctagtgaggagttctggtataaaatttaagattactaccagtaaccaacttaaagcaaactataggggtccctaattttggatttttccttaagtgtaagaaacaatgcttcaaatgttaagaaataacagtctgggcaaagaacgcatattctataggaagccaggtttacaataggtaagaataaactgtattaagtagatgtaatgactagaaagctgctttgctccctatattgagaaattgtggacatggtatgtgttatccaaagaacattgggctagaagatagatttctatccttagctttggcattattgactggattgacttgaacaagtcgcttaacttctacaagcttgtttccttatttgtcaaattagattacactaggaaacgattctcgaacatgttttaaccttacaactctttgttcaaataaatctttcaatgaatccccaacat

SEQ ID NO: 392572 - DNA, 1000 bp, Homo Sapiens
  misc_feature (980)..(980): n is a, c, g, or t
  misc_feature (987)..(987): n is a, c, g, or t
atcccggcgcgggttccgctgacgcagcgccccgcctgggagccgcgggcaggcgagactggcggagcccccagacctcccagtggggacggggcagggcctggcctgggaagagcacagctgcagatcccaggcctctggcgcccccactcaagactaccaaagccaggacacctcaagtctccagccccactaccccaccccactcctgtattcttttttttttttttttagacagggtcttgctccgttgcccaggttggagtgcagtggcccatcagggctcactgtaacctccgactcctgggttcaagtgaccctcccacctcagcctctcaagtagctgggactacaggtgcaccaccacacctggctaatttttgtattttttgtaaagaggggggtctcactgtgttgcccaggctggtctcgaactcctgggctcaagcggtccacctgcctccgcctcccaaagtgctgggattgcaggcatgagccactgcacccagccctgtattcttattcttcagatatttatttttcttttcactgttttaaaataaaaccaaagtattgataactacagtgkcttggaaacctctgggagtggaaagccaagccaaagttgggctggcagtggttagacagcagaaaggactgcctgaggtgttgctggttggcaggggtggggggactggaaatcctaacttccattcagccctaattgtcaatgccctgggcactgacccacttgggggaggggcatggatggcatggcctttggccctagagagaaacctgaaccgtgggaaccacctttcagacgctgagtcagctgccgcctgaagggggagccctgcactcctatcagctgaaccggtgccagtgcccagcaggcaaggggggcacagccctcagaagctggagcctctgtctctgtagatcagtctctcaagccatccaggcaaggggggcctctncctcggnctgctcttgggcc

SEQ ID NO: 392573 - DNA, 1000 bp, Homo Sapiens
ttccttcaagggggtaaagattggaaccccacactctaacatgaagcttgtccaggattatggacttgaaagcgagggggcacaccatcttgctgccacctatggtgataaggcttttgaggtggccacaatggcaagtgtgactagcaaaaggtggcctattgttggagtacgtcttgtgtcagaatttccatatattgaagcagaggtgaactatgggattaaggagtattcctgcaccactgtggatatgatttcacgttgtactcgcctggcttattattattattattattatttttgagacagaatttcgctcttgtcacccaggctggagtgcaatggtatgatctcggctcactgcaatcaccgcctcctgggttcaagcgattctcctgcctcatcctcccgagtacctggagttacaggctaattttgtatttttagtagagattgggtctccaccctggctaatttagtatttttagtagagattaggtttctccatgttggtcaggacatcaccacgcctggctaattttgtatttttagtagagattgggtttctccatgttggtcaggctggtctcaaactcctgacctcaggtgatctgcctgcctcagcctcgcctggcctttctaaatgtccgggcagcagagcaagccctactcaggattgttgaactaatgggcagagaacagaattgagatgattataagaaacaggaacaacttgaaacaaccaggaagtttctatattatgaaacagactaaattttgatcagaacagttaacagatggctctgaaattagcctactgccttcagacagtgacaggtataagaagagattttgtaagtctgatgcagaccagaaaggctttattaccattgttgatgttccatgtgtattagagagtatcaatgtccaaatggatgaaaatacactccatgaaattctaaatgaagtcgatttgaataaaaatggacaggttgaactc

SEQ ID NO: 392574 - DNA, 1000 bp, Homo Sapiens
ttcacatggtggcagcaaggagaagtgcagagtgaaggctgggggagggagaagccccttataaaaccatcagatcttgtgagaacttgctccctctcacaagaacagcatggaggtaactgccctcatgattcaattaccttcctccagggccctcccaccactcgtgggaattacgggaactacaattcaagataagatttgagtggagacatagccaaaccatgttaagcaccatgttgtgtccagtgaaaaaattaattatgccacaagaaaaatcagaccaaaaaggaaaaaaatacgaagtttaattaatctaagtcatagttattaaggttctccccttcttgaacatattaaacaattttctatgaagcagttttcttataaagtaagtgcagtcacttcatgtggtattttgttgttgttgttgttgttaaccacagattaaaactggaagaggccatgtgacatttgatttccagtcaaactgtgaaagaaaacaaatatgtgaatgctaaaatgtgttttgggtgaaaatatcatttgagcaaaaatattgtagattgtaacttccaacatgtctgtcattattcattaatttattccaaattttctaatacctgggaagcaaagtaatatcttgaattataaaataggcaaaacgaatgacatttagaatcatcactttagtatattgatcccatccctcatgaaaagaaaaagtgggccaggctggtggctcacgcctgtaatcccagcacttttgggaggccgaggcaggcgaatcacgaggtcaggagttcaagaccagcatggccaacatggtgaaaccccatctctactaaaaatacaaaaattagccgggcttgatagggggcgcctgtaatcccagctactaagaggctgagggaggagaatcgcttgaactccggaggcggaggttgcggtgagctgagatcacgccactgcactccagcctgagtgacaaaggaagatc

SEQ ID NO: 392575 - DNA, 1000 bp, Homo Sapiens; identical to SEQ ID NO: 282963

SEQ ID NO: 392576 - DNA, 1000 bp, Homo Sapiens
  misc_feature (1)..(24): n is a, c, g, or t
  misc_feature (162)..(261): n is a, c, g, or t
  misc_feature (492)..(591): n is a, c, g, or t
nnnnnnnnnnnnnnnnnnnnnnnntattctatacagtaaaaaaaaaaaagattttaacaaccccccccccctttttttaaacagcatttgctgacgctgctgtagaacctattgattttccaattgctcctgtatatgctgcatctatggtgagaacaaagnnnnnnnnnnnnnnnnnnnnnnnnnnnnnnnnnnnnnnnnnnnnnnnnnnnnnnnnnnnnnnnnnnnnnnnnnnnnnnnnnnnnnnnnnnnnnnnnnnnnatgacagtaagttgtgattgctaattatttgaacatcatctgtcttttaaaaaatttaaggttcttaaagatatgggattgaaaaaagaaaatattgcaatgtgggaagtaaatgaagcctttagtctggttgtactagcaaacattaaaatgttggagattgatccccaaaaagtgaatatcaatggaggatctgtttctctgggacatccaattgggtaggtaaaaatnnnnnnnnnnnnnnnnnnnnnnnnnnnnnnnnnnnnnnnnnnnnnnnnnnnnnnnnnnnnnnnnnnnnnnnnnnnnnnnnnnnnnnnnnnnnnnnnnnnnattttggttagtcataaattctgtacttcattaaagaagtaaatgctttcttaattttaggatgtctggagccaggattgttggtcatttgactcatgccttgaagcaaggagaatacggtcttgccagtttttgcaatggaggaggaggtgcttctgccatgctaattcagaagctgtagacaacctctgctatttaaggagacaaccctatgtgaccagaaggcctgctgtaatcagtgtgactactgtgggtcagcttatattcagataagctgtttcattttttattattttctatgttaacttttaaaaatcaaaatgatgaaatcccaaaacattttgaaattaaaaataaatttcttcttctgcttttttcttggtaaccttgaaaagtttgatacattttt

SEQ ID NO: 392577 - DNA, 1000 bp, Homo Sapiens
  misc_feature (1)..(8): n is a, c, g, or t
  misc_feature (212)..(311): n is a, c, g, or t
  misc_feature (450)..(549): n is a, c, g, or t
nnnnnnnntctctagtcatgtcatctctgctcttctcttcaggctcctcttcttcccacccctactgtgattgatccttcaaggttctgtgctcagcccttccgttggttcttggatttgtcctttcccgccatgtcttcatcacatccacaacttccactaacacttgcgagcttcaaacttcttagtaagtaaagactccacattgccannnnnnnnnnnnnnnnnnnnnnnnnnnnnnnnnnnnnnnnnnnnnnnnnnnnnnnnnnnnnnnnnnnnnnnnnnnnnnnnnnnnnnnnnnnnnnnnnnnnattgcctatcacataataggagaaccctgcagtgtccagctaagctgatgacttgaagataaatctgcctaaccctgggatgaagtatctgtgaactattttgacagcagatgtaagtcatgatctccaaagaacttannnnnnnnnnnnnnnnnnnnnnnnnnnnnnnnnnnnnnnnnnnnnnnnnnnnnnnnnnnnnnnnnnnnnnnnnnnnnnnnnnnnnnnnnnnnnnnnnnnnttggctatcctaattgatttgtttgttttccaggaggaattttggggaaattaaaacctgcctttctgccaggatcacatcactggaagctccatgactctctttttgtaaaagaaaaaaaaatcacagaaacacccacctcccaaactattctcttttacttcttcccccaagcccacccccaaatataactgttatccagaagctgttatgtcctgtttccatacatgtttttgtacttttactatatctacatacatcaattaaacttatgtcctattgttttgtgaatttatatttgcgtatacattatcatatgtaaaatttgcatttttttattgaaaattatgtttcttgagatttatccacattgaaacatggagctctaaatcgttaattttaaccgctatagagtattccataatttgaataaagcataatttgtttgtac

SEQ ID NO: 392578 - DNA, 1000 bp, Homo Sapiens; identical to SEQ ID NO: 282965
  misc_feature (26)..(125): n is a, c, g, or t

SEQ ID NO: 392579 - DNA, 1000 bp, Homo Sapiens
gtaggttaggagcaaattatcatacattctgtgacatttaaagcctttataggatagtgaaaaatgctggctgagtggattttaagagaaataattgtatttgttaacagtgtctttttttaaaaagttaaggcactctgaaacaaatggaaagtcctatgaaactgtattgtaaagaaaacattatttaattgatatgctgttttgtgagagaacaggcaagacagaactttgtcacttcagtgcagtacatttttctgaaagctacccataaaatcactttcatctcacctacctgatgcaaagcaggtgaaaccttaggagatgatccagtcactgacttgattgagggataagtgtgatttagaaatggaatggccttggatgtctatcagtgaagaaaaatgttctgttagaagatctctctaagagtttttttccttctgagcttccttttcaaaataaaagtgacaattgtagcattgacttgaagtgagacatggttatagataagagagtacaaaatgactctttttcctgtcaattgaaatttaaagaaaagttttaattatataaatagcaaagggctattgccaatactagggtcaaaaatgaatttgagggaacagtgggtaagaaactttatgcctgaataacatttagcagtattgtgattgaaaaattgccatattttgatgtataggacaagtcaactgagatccagagaatcctggatgtgaatgctaaacactggcccttaactcacattcaatgtattttcttcccataacatttagtatagttaatattttcttagaatttgagcccatttaagtggattaatattctacatgtgtgcccctaaagacacatttactcaatattggagaagtagataatgaattaagcaactggtctaggaaaggaaaatttgtttcaaatatgcaggaatgtttggatttggggagagtagaaggagagatttgcttgatttgttgac

SEQ ID NO: 392580 - DNA, 1000 bp, Homo Sapiens
aggaatcctggcctggtcacagagcagagttgcttgcagggtcctagtggccatcgggcctgggcaggacatcatctctcagagggtcagaggctcagagctggtgcagctcagcaggtcacggccctccaccagctctgggttctcccgcatctgcagagacacaggaggctgccagacccactggttctcagcctgggtctcctcctccaggacatccgggaaatggaaggaggtgagggctggaaggctctctgggggcaaaggggcatcactacccactccactgcaagagccaggcctgacctttgcaatgccctcagtgcgagcccagacacccctgcccctccctcaagactcatcctgggccctaggagagccaggtgtcagctgtgtgactctgctgggagatctcacctctcccagcctccaggcctctccctttgctcctggggagaaaacttctgccccatttctcaaggtgggggcccatacataggggtggggcagagcagcttgggcaccctggcaggggctcccaggaaattcggggagtcagggctgtggagggaacttaccatgtggtggctgcttttcccccaccagggcctcagctccagcagctggtgggtgagctgagcacagcgtacagcaaacacgttctccgccacgcagagcactagggcgatgccccagaggcacaggctggagctctgcggggcatggggcagagatggctggctggagttgggggtggagggtggattccaagagcccttcccacccgtgcgagggcctggtgcccctactccaggcctaggtactcacataaatgcgtgtggggtcgaagggacagtcaggtgcgagggccagtagttcagagctcccaaaagtgcaggcagccagcagtgccttgccctgggtggcaaaggtcatggcgatggaggccaagaggccgagggcacaggtcagagaaaggagagcacaggccacgctcgag

SEQ ID NO: 392581 - DNA, 1000 bp, Homo Sapiens
  misc_feature (131)..(230): n is a, c, g, or t
  misc_feature (441)..(540): n is a, c, g, or t
  misc_feature (781)..(880): n is a, c, g, or t
caggctcttcttcgtggggtcccgggaaggccacctgccctccatcctctccatgatccacccacagctcctcacccccgtgccgtccctcgtgttcacggtaagcctgctgcacggccctgtgccctacnnnnnnnnnnnnnnnnnnnnnnnnnnnnnnnnnnnnnnnnnnnnnnnnnnnnnnnnnnnnnnnnnnnnnnnnnnnnnnnnnnnnnnnnnnnnnnnnnnnnagggctcagccagccgcctctctcttccagtgtgtgatgacgctgctctacgccttctccaaggacatcttctccgtcatcaacttcttcagcttcttcaactggctctgcgtggccctggccatcatcggcatgatctggctgcgccacagaaagcctgagcttgagcggcccatcaaggtgagcccggggcctcccgctcacccaggcnnnnnnnnnnnnnnnnnnnnnnnnnnnnnnnnnnnnnnnnnnnnnnnnnnnnnnnnnnnnnnnnnnnnnnnnnnnnnnnnnnnnnnnnnnnnnnnnnnnnggctcacccaggccctgtcctctgccccaggtgaacctggccctgcctgtgttcttcatcctggcctgcctcttcctgatcgccgtctccttctggaagacacccgtggagtgtggcatcggcttcaccatcatcctcagcgggctgcccgtctacttcttcggggtctggtggaaaaacaagcccaagtggctcctccagggcatctgtgagtatctcgctggcccacagcccgtggtannnnnnnnnnnnnnnnnnnnnnnnnnnnnnnnnnnnnnnnnnnnnnnnnnnnnnnnnnnnnnnnnnnnnnnnnnnnnnnnnnnnnnnnnnnnnnnnnnnnggctaacacagctgtcttctctcctgacagtctccacgaccgtcctgtgtcagaagctcatgcaggtggtcccccaggagacatagccaggaggccgagtggctgccggaggagcatgcg

SEQ ID NO: 392582 - DNA, 1000 bp, Homo Sapiens; identical to SEQ ID NO: 195014

SEQ ID NO: 392583 - DNA, 1000 bp, Homo Sapiens
agagggaggtcctgtcctgtctagggtctcccacccaggggagcactctactactgccctcttgccttcacctcacagtgacttccagaaatatcctgacccacaaggacgtaacagaaaatctggagacccaagtggtagagtccagactgagggagccacctggagccaaggatgcaaatggctcaacaaggacactgcttgagaagatgggagggaagccaagacccagtgggcgcatccggtccgtgctgcatgcagatgagatgtgagctggaacagaccttcctggcccacttcctgatcacaaggaatcctgggcttccttatggctttgcttcccactgggattcctacttaggtgtctgccctcaggggtccaaatcacttcaggacaccccaagagatgtcctttagtctctgcctgaggcctagtctgcatttgtttgcatatatgagagggtacctcaaatacttctgttatgtatctgtgattttatttcttctttgggtatagggttgaggggaaataagttttgagtgagaaataaacgttttagctgaaattgtatcccagaagtttgaaataagtagtagaagagggggaaaacaagggagaagtggtggggaagacttggtagattggggccttaagtaaccacctcctttccctctctgcccccatgacttcctgctccaagttacagaagggaaggaaaccattttactctttttattctgctcattaatgatctgaaagaagaagatggggaaaaggggattccaccacaaggctccaaagaaccaagagtgcaaatcagtccatttcactttcactgtctgagatagggtctctaagacccaggatacaagggtggaatgtagctatatggactcgatttgcttccggaccttttccagagcctttctgtccaattgtcgctgacgaatgatgacaagacaagcgaagatcagggccacacacacgacagccccttcg

SEQ ID NO: 392584 - DNA, 1000 bp, Homo Sapiens; identical to SEQ ID NO: 282968

SEQ ID NO: 392585 - DNA, 1000 bp, Homo Sapiens; identical to SEQ ID NO: 282969

SEQ ID NO: 392586 - DNA, 1000 bp, Homo Sapiens; identical to SEQ ID NO: 282970

SEQ ID NO: 392587 - DNA, 1000 bp, Homo Sapiens
gaatgataggtaagtgttgtttaaaaaaatcaccagtacatgatgactaataaaagggcacagggaggaagaaatatataaggatgatggaagttttgaaatcatgggagttttgaaagtggatgactttgcagaatattggtatttatgagagatgctgagaacacgactgtcagcatacaggtttatttccaaattgggttctcagagttcacttaaggtatattggaatcatgtgatcttgtagaaacagtgtaatacatatggggtgagttcatagactagcctgcgaaggattacctgatgcaaaataagactggatcatgatgatgttaggttcatttctgaattttggatgctgggagtcaacttctgtggtttagaagtgaaaaggaagagatgggagacctgggaagcattctgaaatagatgcagaaatttgtctttggtttccttctgccttctttctgccccttctgtctcaggcgcttggtgctctcaggttgtcataaatgcccaatgtgggactagtggaaaagagaatgtcctgcttcctcagaggtagcatacaggagcccatggactgctgcttttggtttaaaaacgtgttttgttcacacagcgttttaaaacatgaatcaggctgggcgcggtggctcacgtctattatcccagcactttgggaggctgaggtgggaagatcgcttaagttcatgagtttgagaccagcttgggcaacatggaaaaacccctatctataaaaaatttttaaaaaatgagccgggagtggtggcgtgcacctatgggcccagctactcaggaggctgaggtgggaggatcacttgagcccaggaggtggaggttacagtgagctgagatggcgctactgcactccagcctgggtgacagagccagacctttctcaaaaaaaccccaaagaccacaaatcaaactttataagagtctgaatttttgtttcttttgaagacagttatctaga

SEQ ID NO: 392588 - DNA, 1000 bp, Homo Sapiens; identical to SEQ ID NO: 282972

SEQ ID NO: 392589 - DNA, 1000 bp, Homo Sapiens
gtcagatggtaaagggttgaggggtctaggtcagggtcacttggaaacaagttcctgggggagcagagcaactttcttctctacttggaagaatatgataaagcacccctagactcactggtttcgagttctagggaagcagatattgatgactcaacagaggaaaggattgtgtaatcattgctttagtcaggggttagcaaactatggtccacaggccaactctggccccctgtctgtttttttaaataaagttttattggcatgcagccacatccatttgctcacaggcggcctgtggctgctccctctctataatggcagagagttgagtcattgcaacagatcggatggctcctagggctgaaaatatctgccatctggtcctttacacaaaggtttgcttgccgaccatgttgggcttagtggaggggtgtaagggatggtcttacatgagtgtgcttccagcacagggagcatggaacccagtggcagtctgtctggatgttttcaaagaggcttctttgtaatagttcgcgattatcttgcaacatgatatccatctccccatccctagtgtggttaacttggggaagtttgctttgtccaagtagagggggctgtagcttgttcacagcccaagaatgcaggagcacgcaggatgctggagcaccagcttttctgacttgttagtgatagcctgggttagggaaggttgtccttggaccacatgggctgggcatgcccctcaattcatggaaagtgactcagaaaagttcaaggtttcaccaagactaagaggtgaggaggaagttctttcagaacataagggtactagggtggtgatttcattctgttctttttttatgtgtggactttttcaagggcacaaatgttttgtgtcaattaaaagcagatttgtatgcattttgttacaatgattatgattttaaagtcttaatagtattatactatacaatctacaaaaagatttgagcat

SEQ ID NO: 392590 - DNA, 1000 bp, Homo Sapiens
ctagggctgtagcaaggagccttgctcccaagggactcatttacacaatcctgtgaacggaccaagagtaaacagtgtgctcaatgctgtgcctacgtgtgttagcccacgcggccagcctgaggagtcagggaaggctcccctaggcaaagcccccaaccagaatcaagtcttaatggttaaagagctccatcacccaaaaaggattgagggcctaccttcaactgaacagctaatgcataatctcagaaactgtgagtcaaaattccctggaataactccactttatccccaatctccttgccacctagaccaaggtccattcaccaccctgtccccagcactgactgcactgctgtggccacactaaagcttggctcaagacggaggaggagtgaggaagctgctgcaccaatatggctggttgaggccgcccaaggtcctagaaggaggaagtgggtaaatgccatatccaaaaagatacagaagcctcaggttttatcgggggcagcagcttccttctccttccccgacctgtggccaagtcacaaagcaccacagctgtacagccagatgggggaagggaggagattagaactgtaggctagagtagacaagtatggaccagttcacaatcacgctatcccaagcagaaagtgatggtggcttggactagcacggtggtagtagagatggggtaaagattcaagagacatcattgataggcagaaccaataggacatggtaataaactattctcaggaaaggggaggagtcatggctttcagccatgagcatccaccctctgggtggcctcacccacttcctggcaattctagccaccatgagtccaggggctatagccctttgctctgcccgttgctcagcaagttacttggggttccagtttgataagaaaagacttcctgtggaggaatctgaagggaaggaggaggagctggcccattcctgcctgggaggttgtggaagaaggaagatg

SEQ ID NO: 392591 - DNA, 1000 bp, Homo Sapiens
catcttaagtggatatactgtacactcatggcttaatcttccaacagatcatcgatttaatgttttcaagggcaagtaataaataatactcagaataagttttggaatttcaacaaaacaaataaaataaaaaaaccaaagtaggaaaattttatccttttttcttgctttttcctttgtttatctgcttataataggtctttaaaacatcctgttttattttcttcttttctactgttgcctgctgtctggtctctctctacaaagtagactgtggaatggaatgctgtttccctattccctacttcctagttgccctaaaggaaaaccacctagtctctttttattgtaaggttttactgctcaatatcatggggaaacacataaaaaataaaaatattttaaataaggttaaacatgctcgtagtatatgtctgagagctaagtcagattgacaagattattgtttcggtttcaccacttattattagcttagtcaagatatttaactgcttctttttctcttcactatgaccttagtcaagatatttaactgcttctttttctcttcactatgaagaggataatggatccctacttcacttggcattataatgattgaatgaaatacctgtagaatgcttaatactgtgcctgacatatagtagtgattcaatgctcattagctcattagttatctatgtccttgaaatatctacacttcccctcttttttttttcctaatttctattgtcgatccttcatttgtatttcaggaaaatgaataaataaatgaattccttcttatccttatttaccacccttcattattttcttaggtgaaggcaaagacaagaacaaccatgagtgttcccttgcctaatgggagcatgataatctttaagaaatcctcagatttcatgacatgtattcccctaaaattcagatcctgcaaagaattatttctgtaatgaattattgcaagtaaaataattagatc

SEQ ID NO: 392592 - DNA, 1000 bp, Homo Sapiens
  misc_feature (832)..(832): n is a, c, g, or t
  misc_feature (864)..(865): n is a, c, g, or t
  misc_feature (926)..(926): n is a, c, g, or t
  misc_feature (928)..(928): n is a, c, g, or t
  misc_feature (950)..(950): n is a, c, g, or t
  misc_feature (952)..(952): n is a, c, g, or t
  misc_feature (959)..(959): n is a, c, g, or t
  misc_feature (963)..(963): n is a, c, g, or t
  misc_feature (991)..(991): n is a, c, g, or t
  misc_feature (1000)..(1000): n is a, c, g, or t
tttctccccacctctcttcctttggttctctgttcccattcccgttttgtttttttgtttttgtttttgtttttttcattttcgtgctgccaggggccgcatgccttacctggacatgtatcagatgctgagacacatgtctccgcccctgggtctggggaagaagtgtccggccagagtggcttacaaggtagactacccttgccgaccaccgacgtccaggcactgggtttttttttcttcttcttctttttttttagtgctgaccagaaacacccggccgactctctttttccaacgtttctcttctttttgtttttgattcttttttttcttttctcgagtcaactgatcatgaccacccttgattctaagcagcacactgtgtccgtcctttctgatgagtgtcttcgtgttttgagactccattatggccgacatgccggggggagggggaggggagcgcccaggtccccttgcacctggtctcccaggtaccaaattgacaaacacgcttcttcagggagtcaaaacccatgcttcccacttctgcccaccgaagcggcccatgcccaggctggggcaggcgcttgcaragaggggctttascccccgaaagcaggcgaggtcccgggtcccgcccctgccacgcacacctgaagctgatctctgacctagggccttggggattcgaaaccttccaaggagcaccaagcctctcttcccctcccttccttcccctggragtttcgtccccagcccccgtccctaatccccccaagaacaccccarcatgcctctccattgttccagagtgggcaggcggccgcanctggacccctggacggtgggcacactgatgcnngccatgcatsctgccttggtggggcctggggcgggcasgcaccatggccgacggggggtgntncatgctggctgaaaaaaccaancntctgctnccancggtttggccccggggccacccttccanaatcctgtn

SEQ ID NO: 392593 - DNA, 1000 bp, Homo Sapiens; identical to SEQ ID NO: 282974

SEQ ID NO: 392594 - DNA, 1000 bp, Homo Sapiens; identical to SEQ ID NO: 114976

SEQ ID NO: 392595 - DNA, 1000 bp, Homo Sapiens
tattcgcctacacaattctccgatccgtccctaacaaactaggaggcgtccttgccctattactatccatcctcatcctagcaataatccccatcctccatatatccaaacaacaaagcataatatttcgcccactaagccaatcactttattgactcctagccgcagacctcctcattctaacctgaatcggaggacaaccagtaagctacccttttaccatcattggacaagtagcatccgtactatacttcacaacaatcctaatcctaataccaactatctccctaattgaaaacaaaatactcaaatgggcctgtccttgtagtataaactaatacaccagtcttgtaaaccggagatgaaaacctttttccaaggacaaatcagagaaaaagtctttaactccaccattagcacccaaagctaagattctaatttaaactattctctgttctttcatggggaagcagatttgggtaccacccaagtattgactcacccatcaacaaccgctatgtatctcgtacattactgccagccaccatgaatattgtacggtaccataaatacttgaccacctgtagtacataaaaacccaatccacatcaaccccccccccccatgcttacaagcaagtacagcaaccaaccctcaactatcacacatcaactgcaactccaaagccacctctcacccactaggataccaacaaacctacccacccttaacagtacatagtacataaagccatttaccgtacatagcacattacagtcaaatcccttcttgtccccatggatgacccccctcagataggggtcccttgaccaccatcctccgtgaaatcaatatcccgcacaagagtgctactctcctcgctccgggcccataacacttgggggtagctaaagtgaactgtatccgacatctggttcctacttcagggccataaagcctaaatagcccacacgttccccttaaataagacatcacgatg

SEQ ID NO: 392596 - DNA, 1000 bp, Homo Sapiens
tattcgcctacacaattctccgatccgtccctaacaaactaggaggcgtccttgccctattactatccatcctcatcctagcaataatccccatcctccatatatccaaacaacaaagcataatatttcgcccactaagccaatcactttattgactcctagccgcagacctcctcattctaacctggatcggaggacaaccagtaagctacccttttaccatcattggacaagtagcatccgtactatacttcacaacaatcctaatcctaataccaactatctccctaattgaaaacaaaatactcaaatgggcctgtccttgtagtataaactaatacaccagtcttgtaaaccggagatgaaaacctttttccaaggacaaatcagagaaaaagtctttaactccaccattagcacccaaagctaagattctaatttaaactattctctgttctttcatggggaagcagatttgggtaccacccaagtattgactcacccatcaacaaccgctatgtatttcgtacattactgccagccaccatgaatattgtacagtaccataaatacttgaccacctgtagtacataaaaacccaatccacatcaaaaccccctccccatgcttacaagcaagtacagcaatcaaccttcaactatcacacatcaactgcaactccaaagccacccctcacccactaggataccaacaaacctacccacccttaacagtacatagtacataaagccatttaccgtacatagcacattacagtcaaatcccttctcgcccccatggatgacccccctcagataggggtcccttgaccaccatcctccgtgaaatcaatatcccgcacaagagtgctactctcctcgctccgggcccataacacttgggggtagctaaagtgaactgtatccgacatctggttcctacttcagggccataaagcctaaatagcccacacgttccccttaaataagacatcacgatg

SEQ ID NO: 392597 - DNA, 1000 bp, Homo Sapiens; identical to SEQ ID NO: 282978

SEQ ID NO: 392598 - DNA, 1000 bp, Homo Sapiens
tattcgcctacacaattctccgatccgtccctaacaaactaggaggcgtccttgccctattactatccatcctcatcctagcaataatccccatcctccatatatccaaacaacaaagcataatatttcgcccactaagccaatcactttattgactcctagccgcagacctcctcattctaacctgaatcggaggacaaccagtaagctacccttttaccatcattggacaagtagcatccgtactatacttcacaacaatcctaatcctaataccaactatctccctaattgaaaacaaaatactcaaatgggcctgtccttgtagtataaactaatacaccagtcttgtaaaccggagatgaaaacctttttccaaggacaaatcagagaaaaagtctttaactccaccattagcacccaaagctaagattctaatttaaactattctctgttctttcatggggaagcagatttgggtaccacccaagtattgactcacccatcaacaaccgctatgtacttcgtacattactgccagccaccatgaatattgtacggtaccataaatacttgaccacctgtagtacataagaacccaatccacatcaaccccccccccccatgcttacaagcaagtacagcaatcaaccttcaactatcacacatcaactgcaactccaaagccacccctcatccactaggataccaacaaacctacccacccttaacagtacatagtacataaagccatttaccgtacatagcacattacagtcaaatcccttctcgcccccatggatgacccccctcagataggggtcccttgaccaccatcctccgtgaaatcaatatcccgcacaagagtgctactctcctcgctccgggcccataacacttgggggtagctaaagtgaactgtatccgacatctggttcctacttcagggtcataaagcctaaatagcccacacgttccccttaaataagacatcacgatg

SEQ ID NO: 392599 - DNA, 1000 bp, Homo Sapiens
tattcgcctacacaattctccgatccgtccctaacaaactaggaggcgtccttgccctattactatccatcctcatcctagcaataatccccatcctccatatatccaaacaacaaagcataatatttcgcccactaagccaatcactttattgactcctagccgcagacctcctcattctaacctgaatcggaggacaaccagtaagctacccttttaccatcattggacaagtagcatccgtactatacttcacaacaatcctaatcctaataccaactatctccctaattgaaaacaaaatactcaaatgggcctgtccttgtagtataaactaatacaccagtcttgtaaaccggagatgaaaacctttttccaaggacaaatcagagaaaaagtctttaactccaccattagcacccaaagctaagattctaatttaaactattctctgttctttcatggggaagcagatttgggtaccacccaagtattgactcacccatcaacaaccgctatgtatttcgtacattactgccagccaccatgaatattgtacggtaccataaatacttgaccacctgtagtacataaaaacccaatccacatcaaccccccccccccatgcttacaagcaagtacagcaaccaaccctcaactatcacacatcaactgcaactccaaagccacctctcacccactaggataccaacaaacctacccacccttaacagtacatagtacataaagccatttaccgtacatagcacattacagtcaaatcccttctcgtccccatggatgacccccctcagataggggtcccttgaccaccatcctccgtgaaatcaatatcccgcacaagagtgctactctcctcgctccgggcccataacacttgggggtagctaaagtgaactgtatccgacatctggttcctacttcagggccataaagcctaaatagcccacacgttccccttaaataagacatcacgatg

SEQ ID NO: 392600 - DNA, 1000 bp, Homo Sapiens
tattcgcctacacaattctccgatccgtccctaacaaactaggaggcgtccttgccctattactatccatcctcatcctagcaataatccccatcctccatatatccaaacaacaaagcataatatttcgcccactaagccaatcactttattgactcctagccgcagacctcctcattctaacctgaatcggaggacaaccagtaagctacccttttaccatcattggacaagtagcatccgtactatacttcacaacaatcctaatcctaataccaactatctccctaattgaaaacaaaatactcaaatgggcctgtccttgtagtataaactaatacaccagtcttgtaaaccggagatgaaaacctttttccaaggacaaatcagagaaaaagtctttaactccaccattagcacccaaagctaagattctaatttaaactattctctgttctttcatggggaagcagatttgggtaccacccaagtattgactcacccatcaacaaccgctatgtatttcgtacattactgccagccaccatgaatattgtacggtaccataaatacttgaccacctgtagtacataaaaacccaatccacatcaaaaccccctccccatgcttacaagcaagtacagcaatcaaccttcaactatcacacatcaactgcaactccaaagccacccctcacccactaggataccaacaaacctacccacccttaacagtacatagtacataaagccatttaccgtacatagcacattacagtcaaatcccttctcgcccccatggatgacccccctcagataggggtcccttgaccaccatcctccgtgaaatcaatatcccgcacaagagtgctactctcctcgctccgggcccataacacttgggggtagctaaagtgaactgtatccgacatctggttcctacttcagggccataaagcctaaatagcccacacgttccccttaaataagacatcacgatg

SEQ ID NO: 392601 - DNA, 1000 bp, Homo Sapiens; identical to SEQ ID NO: 114977

SEQ ID NO: 392602 - DNA, 1000 bp, Homo Sapiens
gtaatataataataaaggaaaatacatacatagcacttactatgtgctaggtatttttgtaggtgctttgtaaacaataactcattgcatcttcacagaaaccttatgagctaggtacttttaaaaaatcacccccattttacaggtgagaaaacaaaggtacagaaaggttaaataattttcccaaggtcacataactaataagcagtggagctgggacttcaaaccagaaagtgtgggtaccatggcgctagtacaggtaaagtacttcacgtgtggtctgtgtcctcactgcatggaaaggtctgcaagtcttattgttggctagtgtcaaatcaagatcccccgataccatacctacaattaacaaatatgttatattccctggtcacataggaaccacacatttcattttgggaacattctggtatgctgttaattttacttactcgtgagactatcaaaaattctaaaaacatttttataaataagaaaaaatttcctctgaatttataccatacttactcctttaacatgtaacagtgtcacttaactttggtatgctttgtaaaggaagaaattactaacttaaaaatatgtttaacccacgacacatctggcttaggatatactatcaaaatgggaaggagtgacaaatctacgatagtcattcaaatttaaaaataaatttgaaaaagacagatacctccagtttggataattaagtcatctcaagtttattattgcaaatttacttaaaataattttcaattatttgggaaatgaaaatggaaagagagcaaaatacactatagtttgacgttactacctatctttattagatgaaaatgaaaaattaatgctagtagctatttgggaaccatctagaattctaattctaaagatttctttctaaaaaggattaccataatacttagcatttaaaatggtaactgataacaataatctcatctaccatcatctaactgtatctaatttg

SEQ ID NO: 392603 - DNA, 1000 bp, Homo Sapiens; identical to SEQ ID NO: 206387

SEQ ID NO: 392604 - DNA, 1000 bp, Homo Sapiens
cctcagcaccagcagcggctaggggagatccagcacatgagccaagcctgcctcctgtccctgctgcccgtgccccgggacgtcctggagacagaggatgaggagcctccaccaaggcgctggtgcaacacctgccagctctactacatgggggacctgatccaacaccgcaggacacaggaccacaagattgccaaacaatccttgcgacccttctgcaccgtttgcaaccgctacttcaaaacccctcgcaagtttgtggagcacgtgaagtcccaggggcataaggacaaagccaaggagctgaagtcgcttgagaaagaaattgctggccaagatgaggaccacttcattacagtggacgctgtgggttgcttcgagggtgatgaagaagaggaagaggatgatgaggatgaagaagagatcgaggttgaggaggaactctgcaagcaggtgaggtccagagatatatccagagaggagtggaagggctcggagacctacagccccaatactgcatatggtgtggacttcctggtgcccgtgatgggctatatctgccgcatctgccacaagttctatcacagcaactcaggggcacagctctcccactgcaagtccctgggccactttgagaacctgcagaaatacaaggcggccaagaaccccagccccaccacccgacctgtgagccgccggtgcgcaatcaacgcccggaacgctttgacagccctgttcacttccagcggccgcccaccctcccagcccaacacccaggacaaaacacccagcaaggtgacggctcgaccctcccagcccccactacctcggcgctcaacccgcctcaaaacctgatagagggacctccctgtccctggcctgcctgggtccagatctgctaatgctttttaggagtctgcctggaaactttgacatggttcatgtttttactcaaaatccaataaaacaaggtagtttgaaggccttcgtggcctcgagg

SEQ ID NO: 392605 - DNA, 1000 bp, Homo Sapiens; identical to SEQ ID NO: 114978

SEQ ID NO: 392606 - DNA, 1000 bp, Homo Sapiens; identical to SEQ ID NO: 114979
  misc_feature (598)..(599): n is a, c, g, or t

SEQ ID NO: 392607 - DNA, 1000 bp, Homo Sapiens; identical to SEQ ID NO: 282986

SEQ ID NO: 392608 - DNA, 1000 bp, Homo Sapiens; identical to SEQ ID NO: 282988

SEQ ID NO: 392609 - DNA, 897 bp, Homo Sapiens
  misc_feature (64)..(64): n is a, c, g, or t
  misc_feature (138)..(138): n is a, c, g, or t
  misc_feature (358)..(358): n is a, c, g, or t
  misc_feature (367)..(367): n is a, c, g, or t
ttcaggtaagtaatggcctgtttttttcctgttggggctcactggagcagacaggggtgatgtnccttcttcatcagggttggttgagttcttcagagctgggaacacacatggtttgaagggttgaaaacccttaantcatttgtgtaaggtttaatgatctgtggcccaggccatgagggagtttggggagcacttcttcccaccctatttttttccatgaggaatacagggatgagacattccactggaggaggaggaggaggataggaggggaacaaaatattggggtatgaccacagccttgtaaaggttggtgtggagtgagcatggaggggggcctccagctgagactgtnctgtgagangtccctcttttttacaggatgaaaggtgagaccccggtgaacagcactatgagtattgggcaagcacgcaagatggtggaacagcttaagattgaagccagcttgtgtcggataaaggtaggtgggaccctggctggctcccattagttggccaggctgtgctgtgctgcaggttcccaaagctcaagataagagatgcgttctttccttcactccctgaggtcaggggaggagtctggggctctgtagagagagctgtccccaggcctctgggggggatgagggagaagacaagtcgtaaggagccctggagatggcaaaagagaacccatttggggagggaggctgcagtccccttcagaggtcctggctaacaatacccttccctggctgtgtcccaggtgtccaaggcagcagcagacctgatgacttactgtgatgcccacgcctgtgaggatcccctcatcacccctgtgcccacttcggagaaccccttccgggagaagaagttcttctgtgctctcctctga

SEQ ID NO: 392610 - DNA, 1000 bp, Homo Sapiens
ttttattcagccctagagtaaataaattttaaaatatttaagttagaaaccataaaaattacagttgagtattatttaaacaaacatgtactaaattcccatcacctgtaaatcatattctgagggataaaggaatatacacattaacacatatagattgaaaacaaaaacctcattgatattgtagcaacataggaaaaatcctgattattttgcacaagttattttttagattcaccatggaaaaatgtttaagccattcataaatatttttgcattctctaaattttacagtgtatgctgttatgaaaatattgaaaagttatgaaaacatgaaaatgaaatagctgagaaaatccctttaaattggctgattctctctctagggaattcctggtcctgctggtcccttaggtccacctggtcctccaggcttaccagtaagtacaagacaaaataaccttataaggtagggttaagttacaaatataacagagacacaaatgctccagatttttatctgtgcttttgcatttgcattttgtagggtcctcaaggcccaaagggtaacaaaggctctactgtaagtacttttccctttgacaatttaattttgcattgaaacctatttaattgcctcttctttatttatgtcctctctcttctttctaacagggacccgctggccagaaaggtgacagtggtcttccagggcctcctgggcctccagtaagtatatgttaacaagagtgatgttctgacagtttgcatctggaagctgccaatgatttctctgaacttataagatagacaaaaagcacattctgccaaaagtgctgattttataggaaacattatatcatttaagtaatcaaatctacatgccaagacttaaattttaattgatttcactcttcaaatataaataacttaattgtatattatagtctgtttttattaatttttcaagagaatcatatactattttgtcacattaatg

SEQ ID NO: 392611 - DNA, 1000 bp, Homo Sapiens; identical to SEQ ID NO: 282992

SEQ ID NO: 392612 - DNA, 669 bp, Homo Sapiens
ggcacgaggctccgacctggggcgtcctggccgcgcgagccgcgggatgggggcccgggccgcggaggaggcgccgctggtgtgtcccttggtggagagggcgctgccggccctgcgcggtttccagccaggaagcttcgggaagcctggacgtctgctcactggagatgacacgtgcgtggggtgttggcattcttgttatttaacacgggaaggaggtgacttcgcctgtgatggacttccagtgtgaacactggccagagtgaccaggctgaccagcaccagccctgatccagatgcagaggccaggatgtgggcccagccctgtgccaggaggctggctggaataaaggtacagatagaggcctcaccccctctgggaccactggcactcagggtgtttgcagcctcagagcccacctgcccccagggccacagctgcatctcctgccctgctgtcattacagggatgggcaggctggcatgggggcagccgctgcccctgcctgggtgttgctgtgtattcctgccggccaggggccactgccaggaccacgcctcccttttcatatccccgattcttaagtttctgctattgtggtattctggtggaaaaaaaaagaaaccgcgtggctgttttttgaactgcctggaacctaagaacctgaa

SEQ ID NO: 392613 - DNA, 1000 bp, Homo Sapiens
cccagagctgagttggggccaggccacctccttccccagctctcttgtctcatgtttgtgggtgagtgtttgcactgagtcccggggcagctgtggagccacctattctttatttcttcacccagtgaccctggtctgtgtgctcactgcccaggtggccatgcaggccctgctgggggcagcgggcctggccttatcagagctacgtcgcagaggtgttgactcacggcctcaccctggccctgggacgggcctggcagtgacttcctgctctgcaactgcagtctctcaggcgtgtgctgcggggatgtgggcacgcaggcccgtgtgagctttggaccgtgaagccagtaaccttcctgcagggccaggctgagcatactatgtccatctccctgggtggacgtgcggctgcctgtccctgaggtgaggtgctcggtctccttcccgctggtctggctcccaagaccagaacatgcgaggacaacagagaacacagaagagagagcaaaacagacagcgccgcacgtccctctggctggcgcccatgcggctctacacgctctccaagcgccactttgtcctcgtgtttgtcgtcttcttcatctgctttggcctgaccatcttcgttgggatcagaggacctaaagtgatccagacttctgcggctaatttttcactaaataatagcaaaaagctaaagccaattcaaatactttcaaatccactgtctacatacaatcagcaactatggctgacatgtgttgttgagttggatcaatcaaaagaaacttctattaagacaagctttcccatgactgttaaagtcgatggtgtagctcaagatggaaccacgatgtacattcataacaaagttcacaaccggacaaggaccctcacatgtgcagggaaatgtgcggagattattgtggctcaccttggctacctgaactacactcagtatacagtgatagtgggatttgaacacctgaagctcccc

SEQ ID NO: 392614 - DNA, 1000 bp, Homo Sapiens
cgagtgaccggcagcgtctgcagggaggatggggacgaggaaaaggctcccactgcgccgggcctcacctttgagtgaggatccagcctccccattctgctccctgagggggcacctgggtctcctggtgactctgtgggcatgaaaggtgctgagctcacagtgcgggggctcccatctggccacccaccgcacgggccgtgagagcagcacccaggcctccgaggtgtccctagggtggctccggggcctggctctgaaaaggatggcccgcttctgccccagacgctgccctggtcacgctcacagcagcccgggtgactcagggtgacacgctcccccgccctccaccgcaagcagggcttagctggtctagggaaagaaggtgtcttttctgcccaatttgtaatccccttactactgaggtgtgtccaagtcccagccagagcgactccttcctgcaccaccccctccctgccaggagccccagcaagcacaaagctgggggtcacggtgtgggggctgccagtggcagcaggtggctggcgtgggattccaagctctgccaccaaagagactccggccgccccaggatgcggcctcggagcatcgtgccagcctccagggatcccagcgccgtttcctctgcacagctcctgcccacgggcaagcgagtgccacctgctccttccactgcagcgtccgggctcccttgccgcagaaggcaggaatccagaggaacggggccagctggcagcgtctgggaaccggcatttgctctgaacaggcagtacccagctcagagcagacgtggttctcaggggctgctgggcacaggctggagtttgtccacagagatggcattatgagcagggtcggtctctcaggctggcccacaaaacccacaaaacccacagaacccgcaggcctctccgcgccttctccatggccctgctcctgaggaaggcccttggccacggggattccgtcccagactcaa

SEQ ID NO: 392615 - DNA, 627 bp, Homo Sapiens
tccttctccagcctttcaatggaatttcccagcccagtcaaaggccaagtgggcccttctccaacctttcaatggaatttcccagcacagtcaaaggccaagtggaccttctccagcctttcaatggaatttcccagcacagtcaaaggccaagtggagtggaccttctccagcctttcaatggaatttcccagcccagtcaaaggccaagtggaccccttctccagcctttcaatggaatttcccagtccttctccagcccagtcaaaggccaagtggagtggaccttctccagcctttcaatggaatttcccagatgggccgaggggaagccggggcgggtcaccaggggctctttaacgagttcattagccaaattatcttgcctgcagcacagggccccggagactgcggggagggtgggagcagagggctggagggtctttctccctcccacctcggtctctgcagaaacagcggagaggggcctgtgtacagaagacaagagaaaggacccagccggcccagctgttgcaagaaaggatcccagtgtgcgtttctgctgcaaacacgacaccccctgttgttccactgggaggagcccagcccagtcaaaggccaagtgga

SEQ ID NO: 392616 - DNA, 937 bp, Homo Sapiens; identical to SEQ ID NO: 282994

SEQ ID NO: 392617 - DNA, 701 bp, Homo Sapiens
tggcgaatggatcagccccaggatcagtgcggatacactaaggttctgcagagaggccacgggcctcagtcaggaaagtggaggagggagggctccaactgggttttgggtctgagtgcgaaggaaggctgagctggggtcaaaggtccccgtactgagaactggggaccaagagccatcagctcctgtgctgcctctgtgcgcagcatttaacatcttgataaaacacataaagaagaaacttatacattgcagcaggctctgcgatttccaggaggagaaggcaaatgagttgacccgcggcagtggtctctggagcctcttcccacctgagggtcccaaagcatgttctctccctctccgggagggtcaaagcccaggcccttcccatcctccctccttttctctcggtgctgagggttacagcagggggggctcagctaagtccggctacggtaagtgctgggcagggcagggcggggggatcaccctctcagggtgggggaccatggggccagcgggagaccatggggccagcggggatgctgggtgttttgacttgcagctttcctggacgcctgtgcaggcagagtcagaatggagtccatgtcgttccttcagtgaagtggctggtggtagaagggtggcaggcaggcagggtggctgctccctggctatgtctcctgactcaagactgggca

SEQ ID NO: 392618 - DNA, 676 bp, Homo Sapiens
ggagggggatgggcgagtgcatgctccggcgcatggcggcgcgggaattcgattcatctttaaggaggcagcaagcccttcctctcccgggcacaaataagcccaaccagcagaccctaccttaactaccgctatttaaattctgcaaagtaccgcggtgaccggaggaaccttcgcaaaggcgcaagggtttgccttaatttggttaatacttggttgagatgccttgcgagaactcgaaagcagttgaattaagaatcttaaatctttctaggacgcggagaaggaaggtaggaaattggggagggggaaagggaggcgtgccgtcaagaaagagttgattatttatttaatttcattcaccaagggagaattcggaggctccatcccggaggcactggggtccgggacgcgggaaaggcttggaaatgtgcgacgcggctgtgtgcgaacgcgtggactaggtcttggctcgctgggagggaagggctgggccggcgctggggaggaggaagggagggaacgggtaggaggaggggaagcgcagtataaaagtcccggccggactgagcgtccgctactccgagtcacttcggtaaggcgggagcccgagcaaggtcaaggagggaagtgcgcggtgccacggaccgacacagttcgctctagcatctgacga

SEQ ID NO: 392619 - DNA, 1000 bp, Homo Sapiens; identical to SEQ ID NO: 282996

SEQ ID NO: 392620 - DNA, 1000 bp, Homo Sapiens
ctgggaggaggccacacggggcctgggatttcaggttgggagggaagctgcttccagcaaggaggtgagcctgggaaggcccctacaggggaatccaccccaggctgcacggggctgtttggtgagggccctgatagtgccccaggcgttcctggggctcggcctgggcacatccaacatgcagggctggggatggaggctgtgggaccgagccaggtctgggtgggagttcctgagataagtgggtctcacatttgcacagccacgcaaagggcctcccggggctccagagagatccacacatgtgacacacgtgtggcccccgcagtgctgggggcagccccctatgcctcccaagctgcccctcctcagggagctcatctgaggcaggaagccaagggccacattagaccccaggctgctgtccacgcgtgcccacccccagatcctcctgctcatccccctcccacatcactttgggacagacccccagccccggggcctccctgcttttcctatctgccccctgccctgagcactgaggctgggcacggggagcgtggaggggcgagcctgcacggtgggccatgaccaggccaaattggcagtctccgggctggggaccagcatggtgctgggggttggccagcctggtctctggtccttactgccaccctgaaaggcaggctgtgtcactcctcaccatgccaggggaccaagagacctgtgcccatcaggcaggggctaggcctggccctgacctggctccagtgtggctcccaagtctcgtttccactcagccccaagacccagccccatctggccaccaaggacaaggcagctgacaggttctgacaaggccggtgacagcaaggccacgttatcagccctgctctttgaaggctgacagagcaggcacgccaaggtccctgtgctcagatctgcgctggggaggctgccagcctgcgctgtgcccttgcccccgggaggtcccatcgat

SEQ ID NO: 392621 - DNA, 763 bp, Homo Sapiens
ggagaggcacccgatatatgttctctaggccttttagaaaacatggagttgttcctttggccacatatatgcgaatctataagaaaggtgatattgtagacatcaagggaatgggtactgttcaaaaaggaatgccccacaagtgttaccatggcaaaactggaagagtctacaatgttacccagcatgctgttggcattgttgtaaacaaacaagttaagggcaagattcttgccaagagaattaatgtgcgtattgagcacattaagcactctaagagccgagatagcttcctgaaacgtgtgaaggaaaatgatcagaaaaagaaagaagccaaagagaaaggtacctgggttcaactaaagcgccaccctgctccacccagagaagcacactttgtgagaaccaatgggaaggagcctgagctgctggaacctattccctatgaattcatggcataataggtgttaaaaaaaaaataaaggacctctgggctggtatattcctgccctatccctccaagaagccttggttcttttaactggagaattggaaaccaagatctgggcattagatgtgctcattgttactgggttgtcactgcttctaggaccccttgacagacaaagcaatgaaatatgtgtttttactaacctgtgtatatggaaaatctataaatatttccaaatgtaaccatctgtatatctatattaagctaacctgagttcatactaatgtctccaactattttctattacagcac

SEQ ID NO: 392622 - DNA, 1000 bp, Homo Sapiens; identical to SEQ ID NO: 282999

SEQ ID NO: 392623 - DNA, 1000 bp, Homo Sapiens
tcaggactcagagaaggcacaggctgctggcgctgtccctctgttgtataactacttaacattcacctagcgtgttctgagttccaaccatggggcagcaattttaagaacattctgttgtcatcctcagaatgactcttcaaggcaagcattttcacctccatttgacagatgaggaaactggactaagagaagtgaaataacttgctgaaggtcatatgggctatcagtgttggagctcaagataaaacttggtgcagctgacctcaatgccattttgcaaatttttattccacttaaggagctgaggatagaatggtgaataaaaccaaacttccttgtagctgataattgaaagggagaaacactaaacaagcaaataaacaaacaagaaaacagaaagggcacttttcatgattagaaggtgagggcagcaggtattcaatggaaatattagatgcgggggtcaggggaggtttttttttgttgttgttgttgttgtttttttacttttttgaagaggtaacatctgcactgaggttatggacaggaaggaactgtgactagaaataatcaaggcaaaagagtagcaaatgtgttggccctgagacagaaaggagctggtatgttcaagtaacagtagaaggctggggtgggggctggagcctggagagcaagggaggagtaggcagtgagcaagaccagcagggttgggtcatgtgtggccttgaaggcaaagtacaggcttccaagtattaagtgtgacgggagctacacgataggctctgataatgtttaggttctttctctgagctgcctctccacagcctgtatgtgccccgggaacttgatcacctggctagcccattataactatgtgtttacatggtgggactcaattttatgtcagccgtggccagaacagctgctggtaaatgcagaagaggctgagtaaatgcaaaatcttaaacaagttaatggataatcacacttgattcct

SEQ ID NO: 392624 - DNA, 1000 bp, Homo Sapiens; identical to SEQ ID NO: 283000

SEQ ID NO: 392625 - DNA, 1000 bp, Homo Sapiens; identical to SEQ ID NO: 283001

SEQ ID NO: 392626 - DNA, 1000 bp, Homo Sapiens
tggtgggacctaagaattaatattttaccaaagaccctagggagtgctaatttctaagtaaacatgggaaatactcttctggaccatccagtggagttttgtgtgtaaaaagacacaaattaatcatgcttggaatgatctatatgcttctatagaaataaagagatatgtaacaatacatacctcctgctttttttgacatttacttttgtaaagttgttctctcttgagtgatttaaaagcaaattgaaggaaaatgacttgtataaaaagttcacatcctcaaataaaatttttcatatccccaaattggaaagaaccgaaatttccatcaagcagtgaatagataaacaagttgtggtgtattcaatgctacttagcaataaaaagaaatcaaggatgtgggtggtggcacgcggcacggcaatggcagcaggcggcagcgatccacgggctgacgatgtagaggaggacacttcacagctcctttttcctaaagagtttgaaacagcggagacccttctaaattcagaagttcatatgcttctggaacatcgaaagcaatagaacgagagtgcagaggatgaacaggaactctcagaagtcttcatgaaaacaatgaaactacacaggccgtttcagtggtttcgaaaacagagagaccattgccagtgttcgtagctctagaaaaaccttcataaatttgagttggtctgtttggccaacctttgcccagagactgctgaggagtccaaggctctaatcccaaacttggaggggtggtttgaagatgaggagctgcagcaggttcttgatgatatccagacaaagcacagctttcagtattaatccctaaacatcactgctgcttggagaaactatggccccacagggtctggggctgatttgcatagacatttcattgtagaagacagttgggaattcctttggagaaaacagcccaacttgctgttgggttaggttgctgtttcaaataatt

SEQ ID NO: 392627 - DNA, 1000 bp, Homo Sapiens
agtcccctttcctaagagacagctcttctctcagtcaggtcctactggggaggaggctattctctggcctcagttcaaggccagcaggtcagaggctggccacagtcattgaaaccacttagacctcacttttgtttgccaaggatggatgaggttgccttggcaaccaggtcagaaggccccagctctgcgaggattttatgggacaccaaaccccatcaccagggcaccaagctttccttagcaaccaggatctggaaaggcaatgtgcagggcagggcagtgctcttcattgggagaagccctcagaccatgaaggccttgttgctagggaacaagcatccttagcaagcaagagctaactgcatgcaggcctttatcatgtggggagggctggggtccgctttgcagagtggagacttgaagcgagttgcttgagggtggggggtctatctcatgcctttactgttgctaggggcccaatctccttagcaaccagggccctagaaaggcagacccttgggtacctatcccagcagagacctggtgtggtttaggccccgctgctggggctcccttcctctctcgctgggacctgggtccctctggacctcagtgctctccccctcttctcctgcaggatgagaaatactggagccggcggtacaagaacaacgaggcagccaagcggtcccgtgacgcccggcggctcaaggagaaccagatatcggtgcgggcggccttcctggagaaggagaacgccctgctgcggcaggaagttgtggccgtgcgccaggagctgtcccactaccgcgccgtgctgtcccgataccaggcccagcacggggccctgtgaggctgccccacatccccacctggcggagctctcctccgccttgctgagacttacgccctgttcccttcctgccctgtggcccacgggccggccagctgggtgccccagggacgtgataatgcagataaatacatttatattttt

SEQ ID NO: 392628 - DNA, 1000 bp, Homo Sapiens
tggtccttggtagagtcgccaagtaagcgttgctttttcactcagggaggtggcttgagggtgcacgcgagtcggataggagcaaacctgggtctcatctcggtgtctcttcttgtctcccggtgtggcgcggcgcaggtgaaggtgtggttccagaaccggcggatgaagtggcggcactccaaggaggcccaggcccaaaaggacaaggacaaggaggctggcgagaagccatcaggtggagccctggctgcggatggcgaacaggacgagaggagccccagccgttctgaaggcgaggctgagagcgagagcagcgactccgagtccctggacatggcccccagcgacacggagcggactgaggggagtgagcgttctctgcaccaaacaacagttattaaggccccggtcactggcgccctcattaccgccagcagtgctgggagtggtgggagcagcggcggcggcggcaatagtttcagcttcagcagcgccagcagtcttagtagcagcagcaccagtgcgggttgcgccagcagccttggcggcggcggcgcctcggagcttctccctgcaacacagcccacagccagcagcgctcccaaaagccccgagccagcccaaggcgcgcttggctgcttatagactgtactagggcggaggggatccgggccttgcgtgcagcctcccaaccatgggctgggttttgtgcttactgtatgttggcgacttggtagggcaggagacgcagcgtggagcctacctcccgacattcacgcttcgccccacgctgctccgactggctgcagcggacactgcccaaagcagaggggagtctcagtgtcctgctagccagccgaacacttctctccggaagcaggctggttcgactgtgaggtgtttgactaaactgtttctctgactcgccccagaggtcgtggctcaaaggcacttaggacgccttaaatttgtaaataaaatgtttactacggtttgt

SEQ ID NO: 392629 - DNA, 1000 bp, Homo Sapiens
gctctgccggcgccagttcccgaacaaagatgccctagtcaggcaccagcaactctcagaccttcacaagcaaaacatggacatctaccgacgatccaggctgagcgagcaggagctggaagccttggagctaagggagagagagatgaaataccgagaccgagctgcagaaagacgggagaagtacggcattccagaacctccagagcccaagcgcaagaagcagtttgatgccggcactgtgaattacgagcaacccaccaaagatggcattgaccacagtaacattggcaacaagatgctgcaggccatgggctggcgggaaggctctggcttgggacgaaagtgtcaaggcattacggctcccattgaggctcaagttcggctaaagggagctggcctaggagccaaaggcagcgcatatggtttgtcgggcgccgattcctacaaagatgctgtccggaaagccatgtttgcccggttcactgagatggagtgagagagagagagagagagagatgacaaggagcacaagaagtggtccatctcccgaattcgctgttaccgcctgtctctttaagggcatgccttgtgctgttaatagatcttagggtgaaccacttcattctgcagggttctccctcccaccttaaagaagttccccttatgtgggttgcctggtgaatggccttccttcccgccagagggcttgtgaacagaccggagaggacagtggattgtttatactccagtgtacatagtgtaatgtagcgtgtttacatgtgtagcctatgttgtggtccatcagcccctcacattcctaggggtttgagatgctgtaggtggtatgtgacaccaaagccacctctgtcatttgttgtgatgtcttttcttggcaaaagccttgtgtatatttgtatattacacatttgtacagaattttggaagattttcagtctagttgccaaatctggctcctttacaaaagaaataccttgag

SEQ ID NO: 392630 - DNA, 1000 bp, Homo Sapiens; identical to SEQ ID NO: 283004

SEQ ID NO: 392631 - DNA, 1000 bp, Homo Sapiens
aaaatgaaaagatggagttgtattttgacaaaaatgtttgtactttttaatgttatttggaattttaagttctatcagtgacttctgaatccttagaatggcctctttgtagaaccctgtggtatagaggagtatggccactgccccactatttttattttcttatgtaagtttgcatatcagtcatgactagtgcctagaaagcaatgtgatggtcaggatctcatgacattatatttgagtttctttcagatcatttaggatactcttaatctcacttcatcaatcaaatattttttgagtgtatgctgtagctgaaagagtatgtacgtacgtataagactagagagatattaagtctcagtacacttcctgtgccatgttattcagctcactggtttacaaatataggttgtcttgtggttgtaggagcccactgtaacaatactgggcagcctttttttttttttttttaattgcaacaatgcaaaagccaagaaagtataagggtcacaagtctaaacaatgaattcttcaacagggaaaacagctagcttgaaaacttgctgaaaaacacaacttgtgtttatggcatttagtaccttcaaataattggctttgcagatattggataccccattaaatctgacagtctcaaatttttcatctcttcaatcactagtcaagaaaaatataaaaacaacaaatacttccatatggagcatttttcagagttttctaacccagtcttatttttctagtcagtaaacatttgtaaaaatactgtttcactaatacttactgttaactgtcttgagagaaaagaaaaatatgagagaactattgtttggggaagttcaagtgatctttcaatatcattactaacttcttccactttttccaaaatttgaatattaacgctaaaggtgtaagacttcagatttcaaattaatctttctatattttttaaatttacagaatattatataacccactgctg

SEQ ID NO: 392632 - DNA, 1000 bp, Homo Sapiens
aactaacccatctatataggacttctaaaaactacgtcaggaatgtaaggttaaatgagaggtagaacttgtagtgtaataggtataatggtagctttcaaagttttatcttctcaaaacattgtcttagccagtgtatttctgagaactcagactgaagcacagaagtcacagtatgcttcttttatttaagcacacagattcatgacacaagtacttgttgaacaagtgttctcattgcagagagatctacttgaatataaaagggtcatcatactagattattaaaaagaattggaaatcttgagttgtggaagaaatgtttatgctttggagatctaaaaaagttatgaatgtaggaattagataagtccagtttgttctgttaatataaaatggttagatatattaaactgcaagtagtatcagcttcaccataagcttgggccttcctccatcttgttttatttaagtctctttaaatgaaattttgttgtcattgtttcagcattcatgaactttcttactatcacaggttctactttaattttccttgccatatgtgtttccattttgtgggacattagccaccacaggaacacaagagttgtcagaagactcctgggtgtacagagcaaatcaagctgcatcagtattataggataccaaacagaatcctttctattaggaaataagaaatcagttaagtgttggctgggcgcggtggcttatgcctgtaatcccagcattttgggatgccaaggtgggcagaccatttgaggccaggagttctaaaccagtttggccaacatggcaaaaccccatctctactaaaaatataaaaattagctgggcatggtggtgcacacctgtaatcccagctacctgggaggcacgagaatcacttgaacccaggaggcggaggttgcagtgagccaaggttgtgccactgcactccagcctgggtgacaaagcgagactgtctcaaaaaacaaaaaac

SEQ ID NO: 392633 - DNA, 1000 bp, Homo Sapiens
ctctttattcttttcggcgtctacggtgacgtgcagcgcgtgaagatcctgttcaataagaaggagaacgccctagtgcagatggcggacggcaaccaggcccagctggccatgagccacctgaacgggcacaagctgcacgggaagcccatccgcatcacgctctcgaagcaccagaacgtgcagctgccccgcgagggccaggaggaccagggcctgaccaaggactacggcaactcacccctgcaccgcttcaagaagccgggctccaagaacttccagaacatattcccgccctcggccacgctgcacctctccaacatcccgccctcagtctccgaggaggatctcaaggtcctgttttccagcaatgggggcgtcgtcaaaggattcaagttcttccagaaggaccgcaagatggcactgatccagatgggctccgtggaggaggcggtccaggccctcattgacctgcacaaccacgacctcggggagaaccaccacctgcgggtctccttctccaagtccaccatctaggggcacaggcccccacggccgggccccctggcgacaacttccatcattccagagaaaagccactttaaaaacagctgaagtgaccttagcagaccagagattttatttttttaaagagaaatcagtttacctgtttttaaaaaaattaaatctagttcaccttgctcaccctgcggtgacagggacagctcaggctcttggtgactgtggcagcgggagttcccggccctccacacccggggccagaccctcggggccatgccttggtggggcctgtgtcgggcgtggggcctgcaggtgggcgccccgaccacgacttggcttccttgtgccttaaaaaacctgccttcctgcagccacacacccacccggggtgtcctggggacccaaggggtgggggggtcacaccagagagaggcagggggcctggccggctcctgcaggatcatgcagctggggcgcg

SEQ ID NO: 392634 - DNA, 1000 bp, Homo Sapiens
ttgaaacaattttagaatttggaacaagcgtcactacatttgataataattagatcttgcatcataacaccaaaagtttataaaggcatgtggtacaatgatcaaaatcatgttttttcttaaaaaaaaaaaaaagactgtaaattgtgcaacaaagatgcatttacctctgtatcaactcaggaaatctcataagctggtaccactcaggagaagtttattcttccagatgaccagcagtagacaaatggatactgagcagagtcttaggtaaaagtcttgggaaatatttgggcattggtctggccaagtctacaatgtcccaatatcaaggacaaccaccctagcttcttagtgaagacaatgtacagttatccattagatcaagactacacggtctatgagcaataatgtgatttctggacattgcccatgtataatcctcactgatgatttcaagctaaagcaaaccaccttatacagagatctagaatctctttatgttctccagaggaaggtggaagaaaccatgggcaggagtaggaattgagtgataaacaattgggctaatgaagaaaacttctcttattgttcagttcatccagattataacttcaatgggacactttagaccattagacaattgacactggattaaacaaattcacataatgccaaatacacaatgtatttatagcaacgtataatttgcaaagatggactttaaaagatgctgtgtaactaaactgaaataattcaattacttattatttagaatgttaaagcttatgatagtcttttctaattcttaacactcatacttgaaatctttctgagtttccccagaagagaatatgggattttttttgacatttttgactcatttaataatgctcttgtgtttacctagtatatgtagactttgtcttatgtgtcaaaagtcctaggaaagtggttgatgtttcttatagcaattaaaaattatttttgaactgaaaat

SEQ ID NO: 392635 - DNA, 1000 bp, Homo Sapiens
catattaagtgctactggaaaaggataaggagtagagaataatagggagaaaagaaatattgtggatatttagggagaaatgttgtggataaaatggttagggaaggcctctccaagaaggtggtatctgggcagagtcttaaaaagtgaaggagtgagccactcaaaaatttctgggaagaatgtctaagcaaagggagtgagcatttgcagaagccctgaggctggatcaagcctgacaagtttaaggacccacacgcagagcagtggtggccagagagctgggagtgacgtgtagagagtggtgagggatgaggacaggatctgtcaagtctctcagccctggtaaaagatttgggttttactctgcatgtgctgagtcctttggagggtgacaaaatatttgcaaatcatatatttgatgaggaacttatagctagaaatagaaagaggtcttataattcaaaaaacataaacaaataatcaaattaaataatgggcaaaggttctgaacagacatgtctccaaagatagacaaatagccaatgagcacatgaaaaagatgctcaactgcattcaccatcagagagatgcaaatcaaaaccacagtgagatactgcttcacacccactacaatgtggctacaataaaaaatacagatagttacaagtgttatcaaagatgtggaaaaaccagaactctcatgggagtgtaaaatggtgtagccactttggaaaacattctggcaattcctcaagaggttagctgaggcaggcagatcatgaggtcaggagatcgagaccatcctggccaacatggtgaaaccccgtctctactaaaaaaatagaaaaattagctgggcgtggtggcatgtgcttgtaatctcagctacttgggaggctgaggcaggagaatcacttgaaccagggagtcggaagttgcagtgagctgagattgagccactgcactccagcctggcgtcagagtgagaccccgtctc

SEQ ID NO: 392636 - DNA, 1000 bp, Homo Sapiens; identical to SEQ ID NO: 283009

SEQ ID NO: 392637 - DNA, 1000 bp, Homo Sapiens
catccttccctcggaccctaaaccctggtgaagcaggggtgaggggtggggcgggttttggtgggggcggggcaaagggctaggggctccagacaccagggtacggggtggggactgattatattgccaaagggttcaacttctttaacaagcccccccgtttcccctgaccttcacgaaagccgaaggaggcggggaaagggggtgagggtcttttccaaagggtactgacctcttcccaacgtctccccctgctcgccagtccgccacacgtacccagcttttgagttcagcttttcaaaataaccacaatcatgataaacttctacaaaacgtgattctcctcccctcccaccccatcccccaagtcaatagtgtgggattcggggagggagagagcgagctaaagggactctttccaagtccggctcccccttttccccccggccgccagggtgcctgcacctacacgcatgcgctgcatgacgcgccccccacacgcatgtcgcacccctcctgcgctccgggaacgcacggacacgggccagggggcggggcgattggggaggaatgaatggcggggggtcttcctgagctccgcggctcaccctccccaacacacacacacacacacacacagagcaataagtttctctcactcaaatgtgggcggggcgggcctagcctgtcgctggtggggggagtggtgagggggcgctctcagggatgggggcggggttcggagacagtgtggggaggggaggtctgcaaatcgtccaactctggtgctaatggcgggtcttctcagcccacccgcagggcagggagggaggggtcggcgtggccccttccccaagcctcccccacgcccaccctgggtgcatgaaccgcccaatgcagaagctgccgcatgtcacccccctctccccaaagaaaaagtgtcatgcccccttcccacccaccctcactccccaccaaaataaacgtttccttttcattt

SEQ ID NO: 392638 - DNA, 1000 bp, Homo Sapiens; identical to SEQ ID NO: 114981

SEQ ID NO: 392639 - DNA, 1000 bp, Homo Sapiens; identical to SEQ ID NO: 283012

SEQ ID NO: 392640 - DNA, 1000 bp, Homo Sapiens
ttataccgactcagattccttaagcatgcagagtcactcgaatgaaaaaacatactcgacctctccctaaaaagatgttgcaacccagtttctctgaattccaccacaaaaagagaccctgaataagaagagcagttttcctatgcatatagagggtgtgtcaaaggtgagctttttggggaccgggaaaaacaaagttgcctgattccgcgcaggtgcacaggccccggatgtacacccggaaaggggagtgtggctgtagaatcatccatccgtctacagctaaaacaatttgccaataaagtacatgtttttcctaagccaaaaataaatacgttaacagaaaaatgatttaggatatagcttgaatgcttaaatatgtgcacctttacaaacctctcagtgtattcttggagttcttgaaatgttgttttaatatttgttgccagtaatgttctttcttcacagccgctccgggaattctgaagttctgggcctttctcagaagactgtaatgtacctgaagtttctgaaatattgcaaacccacagagtttaggctggtgctgccaaaaagaaaagcaacatagagtttaagtatccagtagtgatttgtaaacttgtttttcatttgaagctgaatatatacgtagtcatgtttatgttgagaactaaggatattctttagcaagagaaaatattttccccttatccccactgctgtggaggtttctgtacctcgcttggatgcctgtaaggatcccgggagccttgccgcactgccttgtgggtggcttggcgctcgtgattgcttcctgtgaacgcctcccaaggacgagcccagtgtagttgtgtggcgtgaactctgcccgtgtgttctcaaattccccagcttgggaaatagcccttggtgtgggttttatctctggtttgtgttctccgtggtggaattgaccgaaagctctatgttttcgttaataaagggcaacttagccaagttt

SEQ ID NO: 392641 - DNA, 1000 bp, Homo Sapiens
acggcccacctgggacagggtgggcagtgggcctgtacaggcctaagggctcgtggcccgcggtcgagttccggttcactccgtctcttctctttctctgggtgccgtcctggagcctgtgtcctgagatgaagccgacagtgcggccagggctgctgggggatgggggttgctggaggctccacacctctcatccgcccgctcttgctcttggcccccacaggtcccctggggacctggccgctgccagcactggcgggcacaggccacctggccatcagacctgaggccagagtcccgggagctgcctctgtcactccaattccacctcgacacctgcctccagccctcggccccttcctgaatcttggtgtgtgccccttgggggtcagtggcctccacgcagacagctggtgtggcctgaggggcaactcctccagtcctcagaggactcctcctcctcgggacgcctgtaagccagggccacccaggagccagggagccaggcggacctcccaggaagagccagccgagagcccccaagcccagccccagcacgagcaaggtcaggcccgagaccccgggcaggagaagaggccaccctcgaacgtccgctgtcggcccgtctgtccagcacagggaggcaggcaggagcgagggcccaagtggccggccaggctgggcagcggcccatgcaggagcaggcgagggcaggtgtggccaccaccctagccatctaatcacttatacatattcattttaggatagaaagagtggtagagcagagcctgaccctaaaaagaaagccacatttagggctatcacctccaccctggcttccagcttcaagaggcgtaggtcctccaaagacacggtaagggggagagcaccccagtcccgcgtccgactccacctgccctgccctgcgtgtgtctcccgccccatcaccccgccccggaccctgggctcctgtggcccactctgcccctgtctccctgtg

SEQ ID NO: 392642 - DNA, 1000 bp, Homo Sapiens; identical to SEQ ID NO: 283014

SEQ ID NO: 392643 - DNA, 1000 bp, Homo Sapiens
cagcaaccagctggagccccccagcctggggcagtcccaccaggggttcccccccctggaccccatggcccctcaccgttccccaaccaacaaactcctccctcaatgatgccaggggcagtgccaggcagcgggcacccaggcgtggcggcccaaagccctgccattgtggcagctgttcagggcaacctcctgcccagtgccagcccactgccagacccaggcacccccctgcctccagaccccacagccccgagcccaggcacggtcacccctgtgccacctccacagtgaggagccagccagacatctctccccctcaccccctgtggacatcacggttccaggaacagcccttcccccaccactgggaccctccccagcctggagagttcatcactacgtaaggaaagctccttccgcccctccaaagccctcaccatgcctaacagaggcatgcatttttatatcagattattcaaggacttctgtttaaaagatgtttataatgtctgggagagaggataggatgggaatgctgccctaaaggaagggctggtgaaaggtgtttatacaaggttctattaaccacttctaagggtacacctccctccaaactactgcattttctatggattaaaaaaaaaaaaaaaaagtagattttaaaaagccacattggagctcccttctacccactaaaaaataaccaatttttacattttttgagggggagtgagttttaggaaaggggaattaagattccagggagagctctggggatagaacagggcgcagattccatctctccccaagcccctttttagtgactaagtcaaggccccaactcccctcccccaccctacgctgagcttattcgagttcattcgtactaataatccctcctgcggcttcctcattgttgctgttttaggccaccccagctcagccaatgattcctttccctctgaatgtcagttttgtttttaaaagtcacttgctt

SEQ ID NO: 392644 - DNA, 1000 bp, Homo Sapiens
aaggaaaagaatcacttacttactgtccttttatgactactgtttgtttctggggaccaagccgccttcttgctttggcaggggtgggtaggcaggtcggctttccgactctgaatgccactccactctgcccttggcagctctggatcctggtattgggagctgtatttggtttctcctcgtatggccccattgccctgtttggagtcatagccaacgagagtgcccctcccaacttgtgtggcacctcccacgccattgtgggactcatggccaatgtgggcggctttctggctgggctgcccttcagcaccattgccaagcactacagttggagcacagccttctgggtggctgaagtgatttgtgcggccagcacggctgccttcttcctcctacgaaacatccgcaccaagatgggccgagtgtccaagaaggctgagtgaagagagtccaggttccggagcaccatcccacggtggccttccccctgcacgctctgcggggagaaaaggaggggcctgcctggctagccctgaacctttcactttccatttctgcgccttttctgtcacccgggtggcgctggaagttatcagtggctagtgaggtcccagctccctgatcctatgctctatttaaaagataacctttggccttagactccgttagctcctatttcctgccttcagacaaacaggaaacttctgcagtcaggaaggctcctgtacccttcttcttttcctaggccctgtcctgcccgcatcctaccccatccccacctgaagtgaggctatccctgcagctgcagggcactaatgacccttgacttctgctgggtcctaagtcctctcagcagtgggtgactgctgttgccaatacctcagactccagggaaagagaggaggccatcattctcactgtaccactaggcgcagttggatataggtgggaagaaaaggtgacttgttatagaagattaaaactagatttgatactg

SEQ ID NO: 392645 - DNA, 1000 bp, Homo Sapiens; identical to SEQ ID NO: 283015

SEQ ID NO: 392646 - DNA, 1000 bp, Homo Sapiens; identical to SEQ ID NO: 283017

SEQ ID NO: 392647 - DNA, 1000 bp, Homo Sapiens
gagaactgcttgtgtgggagagagctggttgggttgatcttttccgagtgtgacttacctccttcaaggggatgtttaagcttctcgggcagaagtggtgtgtctattcctgacaccaaacaccgtggtatatgtggttgtcacactcagctagtgatgataaaggtgttcttaaatatgttagctttcagttttcctgaggaagcaattttatggatacttccccctccttctcaagtgaggaatagcagagcaaattttatttggaacttaaaccaatagttataaccaatagtttcaacctcctgcctcaccactgcttccttcctgagctctttccccacacctcaaaaagagtacaaagtgattccatctgcagaggtaaattctttgtttaaaaaagtactgtttttcttatcttttctggttctcctaggtatcagaacaaggtttaatagaaatccttaaaaaagtaagccaacaaacagaaaagacaacaacagtgaaagtaagtgtccccagatgcttgtggcaaatgaaaagatggatactttaaagattaatgttgagtatacatctaccacacatatttttcagcccagagacattttccttttgtcaaacacgtgaaagtttggggagaaaggctgaatctgttgggggagggttctaatttttataggctcttgactccattcccacccttttagttcacgctaagttgctttaaagacacaaatgtcttgctaaaattggtagaaatcttttctcggaaaatctgagttatgctttattagaaatgttctgacactcatttaattttcctcccagttcaacagaagaaaagtaatggactctgatgaagatgacgattattgaactacaagtgctcacagactagaacttaacggaacaagtctaggacagaagttaagatctgattatttactttgtttattgtctatatgccttttaaaaaaataaacttgttatgcaaaat

SEQ ID NO: 392648 - DNA, 1000 bp, Homo Sapiens; identical to SEQ ID NO: 114982

SEQ ID NO: 392649 - DNA, 1000 bp, Homo Sapiens; identical to SEQ ID NO: 283020

SEQ ID NO: 392650 - DNA, 1000 bp, Homo Sapiens
ctaaaaatacaaaattggccgggcgtggtggcgcatgcctgtaatcccagctactcgggagggtgaggcaggagaattgcttgaccctgggaggtggaggttgtggtgagctgggatcgtgccattgcactccagccttggcaacaagagcgaaactccgtctcaaaaaaaaaaaataaaacaacacccagatagatacacatactccttcagacttacagacctaagctgcatttatggggtagtgatgaggtttagaacatatacatattttgttaaaattccccagatgattcttggtatgaacgactatattataaattttaagatgtacttagaaatccttaagacatctagccccgtctctaatagacaacacatttatattgcagatattacttttttttcagtttatgaccaggtatttatgaaggactattggcagggaaaatatgaatatgttaactttagcttatggcatcaatttactaaggaacaacaggctcaccaactgatgtcaaacataaaaacccccacatcagtctgatacgatatggtactactttgaatctgttactagtaccatcttgacagaggatacatgctcccaaaacgtttgttaccacacttaaaaatcactgccatcattaagcatcagtttcaaaattatagccattcatgatttactttttccagatgactatcattattctagtcctttgaatttgtaaggggaaaaaaaacaaaaacaaaaacttacgatgcacttttctccagcacatcagatttcaaattgaaaattaaagacatgctatggtaatgcacttgctagtactacacactttgtacaacaaaaaacagaggcaagaaacaacggaaagagaaaagccttcctttgttggcccttaaactgagtcaagatctgaaatgtagagatgatctctgacgatacctgtatgttcttattgtgtaaataaaattgctggtatgaaatgacact

SEQ ID NO: 392651 - DNA, 1000 bp, Homo Sapiens; identical to SEQ ID NO: 283021

SEQ ID NO: 392652 - DNA, 1000 bp, Homo Sapiens
actaaagcaagattggtgaagtggcagggtttatagagagaagcccaggctgagttcagcttttgttggaagtgagaatccctgacatatagctttcttggagatcccaactctcattcttggtgcaactggcttccagctctccagcagtcactctcctaggtgcatgattcagtgcgtgccatgtgtcattagcttttactgataaccatattctggcttgttcccttaccccctacttctatccaattttctctgctaggggttatcattagcaattgacatgctaaaggttttggagcccacctaggggtaggtgcagctttattggcttttctgtggattctctcagtggacccacaccatctctatgtctctccactctcctgccttcagccatagcaaagaatccttccaaaatcaaactcttcacttttttgactcaagtgttgttgttcagtctctcgcgtgtcaatgtggtcatggttcatgaaaccggaccctcaagatggatgattgcttttaactactgccagctgatgtctctcagcccctgccctcatacaagatttttctcagccttcagcctaccactgcagaatccgatgtgacccaccattagggagtctgcatcttggaagagttggaaataaccctttaacatcaacatgcttcaaagactttttgcctttggcctagtaagatgcctctccagctactgagcccacaagtaacatgagcggataaaaagagacttgtttgtgctagaaatgagggtctatgctatgagggggtccaagactctggcgaaatgtgctttttcatcaatggagaaatgaaaggaaaacacaagcaagaaaaaagttaacttgtattatgtatttttactacacttttcttaaaaatagagcattgggaaaactctgaaagagactgacatttttctcaacaggaatccatacttaacagttctggctttcattaaattttgctctttggt

SEQ ID NO: 392653 - DNA, 1000 bp, Homo Sapiens
attgtggtgggcagcaacatggacaagatctacatcgtgatgaactatgtggagcacgacctcaagagcctgatggagaccatgaaacagcccttcctgccaggggaggtgaagaccctgatgatccagctgctgcgtggggtgaaacacctgcacgacaactggatcctgcaccgtgacctcaagacgtccaacctgctgctgagccacgccggcatcctcaagcctcccacagcttcgcgggcactggccttcctgaacacctctcctggcgtcttaggaatactccacggccgtggacatgtggtcagtgggctgcatcttcggggagctgctgactcagaagcctctgttccccgggaattcggaaatcgatcagatcaacaaagtgttcaaggagctggggacccccagtgagaaaatctggcccggctacagtgagctcccagtagtcaagaagatgaccttcagcgagcacccctacaacaacctccgcaagcgcttcggggctctgctctcagaccagggcttcgacctcatgaacaagttcctgacctacttccccgggaggaggatcagcgctgaggacggcctcaagcatgagtatttccgcgagacccccctccccatcgacccctccatgttccccacgtggcccgccaagagcgagcagcagcgtgtgaagcggggcaccagcccgaggccccctgagggaggcctgggctacagccagctgggtgacgacgacctgaaggagacgggcttccaccttaccaccacgaaccagggggcctctgccgcgggccccggcttcagcctcaagttctgaaggtcagagtggaccccgtcatggggagaactcagccgggaccacaggcgtggctactgcggctggagctgcgatgagactcggaactcctcgtcttactttgtgctccatgttttgtttttgtattttggtttgtaaatttgtagaattaaatcattttccttgttgtgg

SEQ ID NO: 392654 - DNA, 1000 bp, Homo Sapiens
ccacagagtccaggataacattttcaactcacttaaaataaaccatgtatggggactgaatccactgtaagtggtcccaaattaaagactttctgcagttatggtaaatgagaaaaatggacaccaatttcacttgcttacatcaagtcacttctgctagctcacttaataaacacacaccaagtgggaaactcagaaataggaaatgcaaacaactaataaaatatacttcggggacatttaatatatatatatttttaacaacagggtcaatatatgtgctttgtacacatctcttactctgtaaatttgagtattttaattaaattcccatggacagagggagagcatattctgttgatctcagttttcatttgtaaactagggatatacacctacttcaccacgttgtttaaagattaagctacaaaagtaaagtgcctaacactcctgagcaggcatagactgatgttatttttcttccttttttgaatatttaaagagtcactgtgaatatatgttggtgaagatggctctggtcatgacttcccacctcttgtttctaatcagtgctgagcccacaaccatctgtattagcacatttggtaagaagtgtagggaaacaggaaataccaaaggcaattgtgacgaatctatatgttcttctaagaagctgaccactgttcacgataaatttctcttgatttattttcatccctggacctttgttcagtaagaccccatttaccataatatatatttcttctctgtgagtttcacgtaatttcattcacctagggtgagtccttatgatgtgggcactaacctaattttaaacatgataaacctttatgttaaagttcttaatttagtccccttctgcctctcttactgtactttgcactatgtaacgctggatctaccaaacctttggagtttaatctgcttctccaggatgcaagtcaaatcccctactgtcaataaagcactatgatgaaag

SEQ ID NO: 392655 - DNA, 1000 bp, Homo Sapiens
aagccaaaagttgtcagaaacagcaaaagatcccttattattacagagtattttacgtagtctctattttaaggagagaaattaaatagaagggcttcatgcatttaggggagggtgctaaaacttctcaagttcgtcaaacttacaggaatacccaccatgatcattttctctctaattatgtataccacaaaattttcatctggccataggaattcactggtgggtgtaaaattaatgactaaagaaattaagtgacaaatacataaaagaaacagacttgtggggatattgttttaaggtgtattaattactcagtgatgataccactcaatagggcatgccactacttttcttaagatgctaattatgaagcagtgctcacaggcattttttaactagcaaattagtagatggacttttggggtctgtcactttttaaaagtatttaagacttaaattctattagcaccacagtctgccttcagtaatacacctaaaatatttttcaggaccagaagcattcagtttgaaaatttgcagatgcaaaccagtattattactaacgctctgggtcaaagattaggtttttaatattaacagtagtctggtaaatatttagaagtctggcattgagaaacaaaagcttgtacctgactagtatttttatttaaaaaaattagttctgttagcttatttaaattgtgttttatttatccgtagaatttatatttatttcattcctttcatctcactgaaaactgtctgcaggccctttgatttggattagatgtgtgaagtactgtcttttgccaaaaacctcaaattacctgttcttttcaacgtagtgggtttgtgcttgtttggagatcagttcaaaaactatctgtactatctgtactgcctctgatgttaagattttatgtatagcataaggaagctagctctgactatattttcctaagaataaagacctatttttgtagcatgtcttaggatc

SEQ ID NO: 392656 - DNA, 1000 bp, Homo Sapiens
ttgctgtttactatgtatccactgtgttcagacactttaaagacatcatctttaaaatgtgaaagacatttcactctcacagcaactctaggaactcttaagattcctgcactctagacgaggatatggagagtcagagagaccaagtgacttgcccgaggctgctcagcaaatgcctgcatcaggcagtaatcacaatagaggtgtgagaagtgaaaagatgcctgggtgtggaggctgagccctcatgggtggggtgaccgtgcatcctgtctcccgtgttctggtgtaattattgagagcatccccttcggttcttggaagtgcccaggcgggatggaaaattgtatgggcaccctgatttagatcagcagacctagatcagatcaggggtgagggtggggatggatgaggtggggatggggtggaaagactggaagtggtggcaagatggacagctggtgcctcctggacccagtgcctaggctgtcgaggggtctgggttgtcaaggggaagggctttctggaatcttctctttgagagggacaggaggggagaaggctttggtcagttcctgtaggctctgtccagactcctagtccttggggcaggattcaagaaactctccagcagtcctaagggaggcgtttggtctgattgtcagctcaggtggggaaggaggactggagcagggttcagaagagcacagagctcggctgggcgtggtggcacatgcctgtaatcccagcactttggggggccgaggcgggcggagttcatctgaggtcaggagttcaagaccagcttggtcaacatgctgaaaccccgtctctactaaaaatacaaaaattagccgggtttagtggtgggcacctgtaatcccagctactcggggggccgaggtacgagaattgcttgagcctggggaagtggaggttgcagtgagccgagattgtgccagtgcactccagcctgggcaacagagtgatattctgtctc

SEQ ID NO: 392657 - DNA, 1000 bp, Homo Sapiens
ccacggagactggatattggtcccagggacaggctgtgctacctactgggtggtggggagggaagcttctggccatgcttggacattcagaccaaccatcattaatgttaatagaggaaatgcagcaacgtcaaaagcaaggcaggttggttaattagatctggggcccgatgacctccctttcccactgctacagcccttttgacttcccccagcaggaagcgctgtctgtgcggctgagtctgggccacttgcttaattgcatttctggcagggaaggagaggagggatggagaagctctgctcgctgcttccacctcaccatgtgtcctcccctcccctcccttcctctcctccccacaggcggaattgctttcttctgagccgggtgggctctcctgcagggagaatgcaggggtctgtgcttggctcttagcaaagcaggtggcccacagtgacctccaggaggtggctgattttcctttgtgccttcttatttctcagtaggaacttggaagggaagagctctgaaggagccagaggggcagccaccttgcatgagggtgaggaaggagaagcccagccagcctctacccatccctccctcccaattaggctgcactggggccgaacgcttccctgggctcccactgccttctaaggagccaaggagaattccctgcccactttctgttcctccatgcccaaactggcagatgcttctctgggagcaaggccacatgggctgatgcagctttgagtgctcaggttctgttttctggaagttgctggagaagggctgtcagggtgcttctatgaatatgggcttcagctgtagcacttggcagaaacgtgatgtgtcccacaaactgctggtggaggaagaagatgttcgtcagccaattcgacctccagccagcttcttgagcctatttggtttaaaaaaaaaaagtcttctaatcagaagccactgattttataataaataacacttgttttg

SEQ ID NO: 392658 - DNA, 1000 bp, Homo Sapiens
tcctggggatgcctggagcctggctgcatggcctggccacctgatgcccttgtgttctccatggcaggccagcgagaccgaggagaatggctccgacagcttcatgcattccatggacccacagctggaacggcaagtggagaccatccggaatcttgtggactcatacatggccattgtcaacaagaccgtgagggacctcatgcccaagaccatcatgcacctcatgattaacaataccaaggagttcatcttctcggagctgctggccaacctgtactcgtgtggggaccagaacacgctgatggaggagtcggcggagcaggcacagcggcgcgacgagatgctgcgcatgtaccacgcactgaaggaggcgctcagcatcatcggcgacatcaacacgaccaccgtcagcacgcccatgcccccgcccgtggacgactcctggctgcaggtgcagagcgtaccggccggacgcaggtcgcccacgtccagccccacgccgcagcgccgagcccccgccgtgcccccagcccggcccgggtcgcggggccctgctcctgggcctccgcctgctgggtccgccctggggggggcgccccccgtgccctccaggccgggggcttcccctgaccctttcggccctccccctcaggtgccctcgcgccccaaccgcgccccgcccggggtccccaggtgagtaggggctgaatgcggctggagaggctgccggacgggcgtggccgggagggaaatggggctggattccagagcatcggacctggccgccagaaccggccgtttctatcccaggcaatcggactctgggtgccggagccacgccacgtgtggccgagggctggcggagcctgcccccgagggagcgctgagtcccggaggtggtcgtttctggggagggggctgtggggctcgtcccacctgcccccttctttccagcacttgcatggcgcttccctctattttcactcttggcggccgc

SEQ ID NO: 392659 - DNA, 1000 bp, Homo Sapiens
ggggggccaaggtcagggcttggtttattgctgatgtcagggcttggcctggagtcagggtcagggctcagtctaggactctagttgggactcagtcaaggaacagggcccagtttaatcctggcactagggctcagtctagaattaggattgaagctcagtctgtggctaggatcagggtcagacgggggccctttctcaacggactcatgtggccttcctttccgcaggtgcccaggaccccacgcccaggggtggagtctgctgacagcaggcgtctagccacgaagcacagcaggaaggccctgaaggccagcctgacgctgggcatcctgctgggcatgttctttgtgacctggttgcccttctttgtggccaacatagtccaggtaatgccacggcagggggcaggtgagtccggcccttgcaggagaggccctggatcccagcccaggcatggggacaggggagggtaggctgcctctcgtggtgcgtgtgtgtgtgtgtctgctccatacatgctgggaagggtggcctgggtccctgccctgggaccaggcatgatgcatcccctccccccaggccgtgtgcgactgcatctccccaggcctcttcgatgtcctcacatggctgggttactgtaacagcaccatgaaccccatcatctacccactcttcatgcgggacttcaagcgggcgctgggcaggttcctgccatgtccacgctgtccccgggagcgccaggccagcctggcctcgccatcactgcgcacctctcacagcggcccccggcccggccttagcctacagcaggtgctgccgctgcccctgccgccggactcagattcggactcagacgcaggctcaggcggctcctcgggcctgcggctcacggcccagctgctgcttcctggcgaggccacccaggaccccccgctgcccaccagggccgctgccgccgtcaatttcttcaacatcgaccccgcggagcccgagctgc

SEQ ID NO: 392660 - DNA, 1000 bp, Homo Sapiens; identical to SEQ ID NO: 114983

SEQ ID NO: 392661 - DNA, 1000 bp, Homo Sapiens
taactcgtcaaaggtctcattcaggaacgtcgcctgataacactgcaccaccacctccccctccaaggccacagccctctcattctagatcatcatctttagatatgaatcggacctttacagtcaccacaggacaacaacaggctggagttgttgcccatcctcctgcagtgcctccaagaccacagccctcacaggctcctggtcctgctgtgcatcgcccagtggatgccgatggcctcataactcacactagtacctcacctcagcagataccagagcaaccaaattttgcagatttcagtcagtttgaagtatttgctgcatcaaatgtaaacgacgaacaagatgatgaagccgagaaacatccagaagtcctgccggctgaaaaagcttctgatcctgcaagttctcttcgagttgccaaaacagatagtaaaactgaagaaaagacagctgctagtgctcctgccaatgtgagcaaaggcacaacaccacttgctccaccacctaaacctgttcgaagaagattaaaatcagaagatgaattaaggccagaaattgatgaacatacacaaaagacgggtgtcttagctgctgttcttgcatcacaaccttctattcccagatctgttgggaaagataagaaagctattcaggcatcaattagacgtaataaggaaaccaacaccgttttggccagattgaatagcgaattgcagcaacaattaaaggatgttcttgaggagagaatttccctggaagttcaactggaacaacttcgaccattctctcacctataagccaattgccgttaactgtgaacatacttgtttttaagtggttttgggttcaaagccaatttggagacctagacattcagctcactgcttaactcaacattaaattttatgattctgttttgccctatatgttcaccgttgtatttaagtatcttttattttttaatttcgacaataaaaaggtcaggatggcgttt

SEQ ID NO: 392662 - DNA, 1000 bp, Homo Sapiens
agctgatgctgggacaacagatcgggacaattgcccctgcccctgcttcaggtccccaggatgctgccaggaccagctgcacggtgactcccacagcagctggggctggaaaacggtcttaggatttggctgggaaaggcccctaagcagcctttcgtccagtcagtctcaggccaggctcctttaacgtgcgtggtgcctccaaaggtggactcagatgggtttttcccaatttagatataaaaagccccaattaatgattaatggctactgtctttttgattttccatttttttccaacaaacttttttggaatttctgcctatgaccacttgttggcaaaaggatgccagcagacagacaaatgaacaaggagctggcaagaatcaatgggaacacttggaagcagccacctgcttattttgacagtttagttttctcccctgaccacgtgcttatggctgcagtttcatatttggttttataagtgtcagtttaattcaatttaacacttctctgcaaattaaacttagtgaagtcagatgtcagctttccccttctttgggggctctgccacgaataccataactccctcttgctctagtgcctaaaaatgtggaggtctagttcaagtcccactttacagaagagcaaacaggtggtccctaattggcacaaagtatccgcctcttctcccccagcttctattaccaggcatggtgtctcctctgccctctcctgggctcccctttcttgtgacggggtttcctcttctggctgctttcatctacttctgtgtgtatccatggctgctccttaatatttatgccaactattattatcattattttcagagacggggtcttgctatgtcgctcaggctgcagtgcagtggtgcgaccttggcttactgtaggctccacctcttgggccaaagcgatccttccacctcagcctcccaggcagctgggactgcaggcatgcaccaccatggctaatt

SEQ ID NO: 392663 - DNA, 1000 bp, Homo Sapiens; identical to SEQ ID NO: 283025

SEQ ID NO: 392664 - DNA, 1000 bp, Homo Sapiens
tcaacagccggcagaatagctgagtttttcaccgatcttctgacgtggcgtccactggcccaggccacacataatttcctgcgtggcctccatttccacaaagactactttcagcatcctcacttctccacatggaaagctaccactctggatgggctccccaaccagctgacaccctcggagccccacctgtgcctgctggatgttggctacctcatcaataccagctgcctgcccctcctgcagcccactcgggacgtggacctcatcctgtcattggactacaacctccacggagccttccagcagttgcagctcctgggccggttctgccaggagcaggggatcccgttcccacccatctcgcccagccccgaagagcagctccagcctcgggagtgccacaccttctccgaccccacctgccccggagcccctgcggtgctgcactttcctctggtcagcgactccttccgggagtactcggcccctggggtccggcggacacccgaggaggcggcagctggggaggtgaacctgtcttcatcggactctccctaccactacacgaaggtgacctacagccaggaggacgtggacaagctgctgcacctgacacattacaatgtctgcaacaaccaggagcagctgctggaggctctgcgccaggcagtgcagcggaggcggcagcgcaggccccactgatggccggggcccctgccacccctaactctcattcattccctggctgctgagttgcaggtgggaactgtcatcacgcagtgcttcagagcctcgggctcaggtggcactgtcccagggtccaggctgagggctgggagctcccttgcgcctcagcagtttgcagtggggtaaggaggccaagcccatttgtgtaatcacccaaaaccccccggcctgtgcctgttttcccttctgcgctaccttgagtagttggagcacttgatacatcacagactcatacaaatgtgaggcgctg

SEQ ID NO: 392665 - DNA, 1000 bp, Homo Sapiens
gacactggttccgcaactaccctgctgctgctgctgctgcccacagaaaccccatgttacagcttcaatggctgcccttactgccaggatggactctctaccatggctacttgtctgtgtccaaaatcctatttcaaaatggagggcagatacggctgattggtggagctgagccacacgttcataccggggctccaagatagtctgtaaaagtgcatattggcttctcaccaagactgagagtgtgggcaatttcccaaatgtagaaagagagtttagatttggggaagttttttttaagtgaatgtccaccgtaacatgttcagatattgcttgaatgtaaaatagacaccttggtctctatcttgattgactagagtccagcctggcttgagagataagagttgaaaggaaataattctctttaagcctgcgtttatttagtactacctgccattagagacaggactgtaagagaatatggtagaactagcttatattggcttattaaatcatgtagcagagaagagcagaatggttcctctatcattgatcaatgtccatctactgctcactcctttttgagatattagaaagagccatataaagagtttagtaattaattagggaattaaaatacatatcatataccttaatgataagaacatctttttcctccatgtgcgggaatttactgtgaaatattgggcacattcatgtttcatattcatgcaaaggatgatgataatcaagatgccctgtgcatttgagtcattaatattgatatacagtctcttatataaccctttaggaagatttatgtaagacaaaaagaaagtcttcttaagcttgaggaaagattaaattaaaatggaatcttggaggtataaaggtctttagagttcacatagcacaacttggtcatttcacatgtgaggaaactgagggctaggtcttgatggctcagatttcttcaattaattgcctattcccaaattgc

SEQ ID NO: 392666 - DNA, 1000 bp, Homo Sapiens
gcaaaccaccattggaatctagccagaaatgtctgtcagatagttagaattgtaacatctaaacctgccacggatcgaatggtacttacaggtacctctcttagggactctgtgatccctaaaatatcagaagaaaatgtctgtctttctgtccaaatatctacttgacttgggggtaagtcaaaaataaaagtaggtgtccaaggattttacttttggcgaaatctgacgtctcctgagcttattttcattttgtccttggacatagcatagtgcttccctaatgtttctacatatgaccatgaatgatagtgtctctacatttaatttaaaagtctaatggtgacattttgcttatctgagtcacatttcggtaacatatcatcattttgaaagtgcggctatgacgtgctatattaaacaggaacagcctttcagtggatggggattttattaccacagtctttccatagtcatttcaaaatcaaattgttggtgggaggatggattgggttgtgagtaatctacttccatatatcagcctcagaaatggaactatcctttggatattacaggagacactgcagcagattgtttccagaagctggaaaaatatgctccaggagaatttaatcactgggcttttgctgggggatttttagttggcgggactgtcaaggaaatgtgatgacagaaatataatccttaacacaaactggaatctggctttgaatggcatcttccattccctggattgagtcaaatgtttggccaagcagtcagttatctagctgttactgttgggatgaagaactctgttttcatcaactaccatctcacatttctctaaatacttccaagtagcccagagaaaatttagggtacaggtggctatgggccaatttctaaatagctccaattgaagacataaatctgtgttatgaaaaatgatgagttggtactgtaagattcctgatgcatttggaaattttttcaaacc

SEQ ID NO: 392667 - DNA, 1000 bp, Homo Sapiens; identical to SEQ ID NO: 114985

SEQ ID NO: 392668 - DNA, 1000 bp, Homo Sapiens
gtgaaggaccttcactctaagatgttatatttttcttaaaaagtaactcctagtaggggtaccactgaatctgtacagagccgtaaaaactgaagttctgcctctgatgtattttgtgagtttgtttctttgaattttcattttacagttacttttccttgcatacaaacaagcatataaaatggcaacaaactgcacatgatttcacaaatattaaaaagtcttttaaaaagtattgccaaacattaatgttgatttctagttatttattctgggaatgtatagtattgaaaacagaaattggtaccttgcacacatcatctgtaagctgtttggttttaaaatactgtagataattaaccaaggtagaatgaccttgtaatgtaactgctcttgggcaatattctctgtacatattagcgacaacagattggattttatgttgacatttgtttggttatagtgcaatatattttgtatgcaagcagtttcaataaagtttgatcttcctctgctaaattgatgttgatgcaatccttacaaatgattgcttttaaaattttaagctaggaaaagaaatctatagaaagtgttctgttacaaaatgtaactgttaccattggaaatttcacgtcataggaagttagcctttatctaccaactttcaagaacttgtttaataaagcgaaaaactcaaccaaatggtacaaaaccacagtgtaccattaaaatatgcactaagtctcttttttacaaaggctgtattcagcaaggcgctaacttgcttaaatgtgaattactaacttctaaaactgtactttgattcacatgttttcaaatggagttggagttcattcatattacaatatttgtgtgctaaacgtgtatgtttttcagttcaaagtcatgatgtttttaaaatcttattaaagtttcaaaaatctgaagattgtttatctagatgtaaatttttattaaaaagttgcacttatgaaaaagc

SEQ ID NO: 392669 - DNA, 1000 bp, Homo Sapiens
agattttgttgttacccaaatcttcttgtcttaggtcatgctaaatgtgtagaagttgtaaaaacttttaacttaccattactgatgcttggaggaggtggctacacaatccgtaatgttgctcgatgttggacatatgagactgcagttgcccttgattgtgagattcccaatgagttgccatataatgattactttgagtattttggaccagacttcaaactgcatattagtccttcaaacatgacaaaccagaacactccagaatatatggaaaagataaaacagcgtttgtttgaaaatttgcgcatgttacctcatgcacctggtgtccagatgcaagctattccagaagatgctgttcatgaagacagtggagatgaagatggagaagatccagacaagagaatttctattcgagcatcagacaagcggatagcttgtgatgaagaattctcagattctgaggatgaaggagaaggaggtcgaagaaatgtggctgatcataagaaaggagcaaagaaagctagaattgaagaagataagaaagaaacagaggacaaaaaaacagacgttaaggaagaagataaatccaaggacaacagtggtgaaaaaacagataccaaaggaaccaaatcagaacagctcagcaacccctgaatttgacagtctcaccaatttcagaaaatcattaaaaagaaaatattgaaaggaaaatgttttctttttgaagacttctggcttcattttatactactttggcatggactgtatttattttcaaatggctttttcgtttttgtttttcttggcaagttttattgtgagtttttctaattatgaagcaaaatttcttttctccaccatgctttatgtgatagtatttaaaattgatgtgagttattatgtcaaaaaaactgatctattaaagaagtaattggcctttctgagctgatttttccatcttttgtaattatctttattaaaaaattgtacttgg

SEQ ID NO: 392670 - DNA, 1000 bp, Homo Sapiens; identical to SEQ ID NO: 195041

SEQ ID NO: 392671 - DNA, 1000 bp, Homo Sapiens
tgacagagctgtgcccgtttatcttcattgtattaattattacataaagattaacaaatacattgcaaatgcaaattataggatgtttggaggatttattaatgagcatgtattgattgcctattccatatccagtgcaatgctaggtatgtctatggaaggagtattattacttcatttctaaacaaatgaagtcaagcaaattgagatctttctgaaattatgaagacatcttctgataacttatctgttgtatttcctagtctcaaagtcaagaaacccgtatatgtggacctagggctaataggaggtccctatggcactaactgggaaaattacatggtgcttttcaactacagaaagaagtaatgactaatgggcctgtctgtagagaagaaaaggagaagagtacacatttgctggaactatatataattcacagtggagatagttaattctttgctaaaactagggttttatgagtattttttaaatctacatttaagtttttgtttttgtgaaaagttattcagtaagaaaactttataatattaagtagatacagttatgtattaaaaatttccttatatacccttttgccagccaagatactgatattttaaaacaaaatggaaaaatgtccaatacaatattctctttctggaggcttcctacaagtgaaagcagattttgtcattttatttggcctttgcttgtctttgatatatttctttatgtgtttttcaaatacatactgttgtagatttattgtcttgtatttgcaagtatgccggttgagagaactaaaatggttatagtattgtttatcagaaagaggaagtgtacttaagattattttatttatttagatgaaaggcttctacataaatgcactgaaataaatgctagtaatttcttgtatcccacttctttttttgcttctcatggaaatgtttgtacttttttatcattgtcttttatgaaatataatgttctaaag

SEQ ID NO: 392672 - DNA, 1000 bp, Homo Sapiens
cgtgtgctgtgccagggcctgaaggactccccctgccagctggaggcgctcaagctggagagctgcggtgtgacatcagacaactgccgggacctgtgcggcattgtggcctccaaggcctcgctgcgggagctggccctgggcagcaacaagctgggtgatgtgggcatggcggagctgtgcccagggctgctccaccccagctccaggctcaggaccctgtggatctgggagtgtggcatcactgccaagggctgcggggatctgtgccgtgtcctcagggccaaggagagcctgaaggagctcagcctggccggcaacgagctgggggatgagggtgcccgactgctgtgtgagaccctgctggaacctggctgccagctggagtcgctgtgggtgaagtcctgcagcttcacagccgcctgctgctcccacttcagctcagtgctggcccagaacaggtttctcctggagctacagataagcaacaacaggctggaggatgcgggcgtgcgggagctgtgccagggcctgggccagcctggctctgtgctgcgggtgctctggttggccgactgcgatgtgagtgacagcagctgcagcagcctcgccgcaaccctgttggccaaccacagcctgcgtgagctggacctcagcaacaactgcctgggggacgccggcatcctgcagctggtggagagcgtccggcagccgggctgcctcctggagcagctggtcctgtacgacatttactggtctgaggagatggaggaccggctgcaggccctggagaaggacaagccatccctgagggtcatctcctgaggctcttcctgctgctgctctccctggacgaccggcctcgaggcaaccctggggcccaccagcccctgccatgctctcaccctgcatatcctaggtttgaagagaaacgctcagatccgcttatttctgccagtatattttggacactttataatcattaaagcactttcttggc

SEQ ID NO: 392673 - DNA, 1000 bp, Homo Sapiens
agaatatgtttctggagctcttctgtcagattatctcggaaccttgcttcaacaccctgcgcaccaaggagcagttgggctatatcgtcttcagcgggccacgtcgagctaatggcatacagggcttgagattcatcatccagtcagaaaagccacctcactacctagaaagcagagtggaagctttcttaattaccatggaaaagtccatagaggacatgacagaagaggccttccaaaaacacattcaggcattagcaattcgtcgactagacaaaccaaagaagctatctgctgagtgtgctaaatactggggagaaatcatctcccagcaatataattttgacagagataacactgaggttgcatatttaaagacacttaccaaggaagatatcatcaaattctacaaggaaatgttggcagtagatgctccaaggagacataaggtatccgtccatgttcttgccagggaaatggattcttgtcctgttgttggagagttcccatgtcaaaatgacataaatttgtcacaagcaccagccttgccacaacctgaagtgattcagaacatgaccgaattcaagcgtggtctgccactgtttccccttgtgaaaccacatattaacttcatggctgcaaaactctgaagattccccatgcatgggaaagtgcaagtggatgcattcctgagtcttccagagcctaagaaaatcatcttggccactttaatagtttctgattcactattagagaaacaaacaaaaaattgtcaaatgtcattatgtagaaatattataaatccaaagtaaattacaaaatcttatagatgtagaatattttttaaatacatgcctcttaaatattttaaaatttttcttttgattactgagagaaatttccccaatataacaatgcttaaaatgaatgatattcctatagaatcttccttccctattctgtaaaatagtcacttgtccgaagaaagttaaaagttagc

SEQ ID NO: 392674 - DNA, 1000 bp, Homo Sapiens; identical to SEQ ID NO: 283027

SEQ ID NO: 392675 - DNA, 1000 bp, Homo Sapiens
caggaacacctctatctttggtttaaatcttactcttagtttttccgtctaaaaatcatactggtattagtatcaggtaaggaaattaaagtttttaaaatggtttcattctctgcaatatgcaaaatttagattttactttctggtactgtaaagaacctgaagtgatttacacttaatgggtgattaatccagtattctttaccctgaatgtttggatattaaagttcctttatgttttctataacctgtgggatcttcttgcagtgattattgtgtgtgagattttttttctttttggtctatccatattgttatattcactcaggtatttttttttaatcttattccagaatcagtggtttatattgggttactgtttaacaccaaatggaattggcattctgcagatttaattaattatgaaaccagggtctcattttccttgctgatacttgttgaaaatgagattcacattctagtctttattttcctcctgttttgtccctgtgcttgtacatcttccttttatttgtgtgttatagttctattccatttgagaaggcagttggtaagaactagattgcatgtacaaagacaggtttactaagtgctgtacagtggtcctgaggttacagttgaattagaaaaacgaaatgtacttacaggaaataagaaagcaaacctttcaaatgagagtgatgatttctttaaaaaaaatcagttttttttctctcaaataatgttctttatttcacgaaatcgtcaatcttaagcatgagcagggataaacaactcctagaaggaactcaattcattcttcctggattttctctgttgttaaatcacaaaaatgatagtccccaatcgtttctttataggaggttattacatttcattacagtcactgcattttgactgttgtgtttagaatttgaatgtacatccaaaatgatgagtttcaatttaagagccttaataaaatgtgtgagtgtgtctc

SEQ ID NO: 392676 - DNA, 1000 bp, Homo Sapiens
gcccttaggaaatagcacctctggaacctcactgtcacccagccatcactgtggaggttggctcagctcagtgccacctccttcagatgctgttgatgaaaatccttcttgtgcttgaatgttctgggcttcccattgccctccaaatgtatattataaacagggcccaagcctggcgcagtggctcatgcctgtaatcccaatactttgcaggaggccaaggtgggtcgattgctggagcccaggagtttgagaccagcctgggaaacatggtgaaaccctgtctctacaaaaaatacaaaaattaactgggcatggtggtggtgcgtaatctcagctacttaggaggctgaggtgggagaatgacctgagcccaggaagtcaaggctgtgctgagccatgatcacaccagggctctccagcctgggtgacagagtgagactctgtctcaaaaataaataagtaaataaatagcccagataagaagcccatgtagggcaggccttctataagtgcgggcaccaagggcgcctacatccccaggccttgctggggtgcaggggtatatcaacttcccattagcaggagctccccagcggcaagcctggcccagtgggctcggtagtgcccagctggcaggcctgaggtgtacatagtccttcccggccatattaaccacacagcctgagcctggcccagcctcggctgccagaggtgcctttgctaggcccggagccgttggcccgggccggccttgccctattcctctcctcctcctcctcctgggtcccccagggtggctgggcttgggctatgtgggtggtggtggcggggggtcttgggggcctctcagctcccgcccatgcctccctgatgggtgggcccagggcggcctctctctgaggagacctcacccactcctcgctcagtttgaccactgtaagtgcctgcactctgtattctattaataaactaaaataaagggaagacgctgctggtg

SEQ ID NO: 392677 - DNA, 1000 bp, Homo Sapiens; identical to SEQ ID NO: 283028

SEQ ID NO: 392678 - DNA, 1000 bp, Homo Sapiens; identical to SEQ ID NO: 283029

SEQ ID NO: 392679 - DNA, 1000 bp, Homo Sapiens; identical to SEQ ID NO: 283031

SEQ ID NO: 392680 - DNA, 1000 bp, Homo Sapiens
aatatattcttattctatcataggataaatcttcagacaaaaaagtgcaaacaaaagggaaaaggggagcaaagggaaaacaggccgaagtggctaaccaagaaactaaagaagacttacctgcggaaaacggggaaacgaagactgaggagagtccagcctctgatgaagcaggagagaaagaagccaagtctgattaataaccatataccatgtcttatcagtggtccctgtctcccttcttgtacaatccagaggaatatttttatcaactattttgtaaatgcaagttttttagtagctctagaaacatttttaagaaggagggaatcccacctcatcccattttttaagtgtaaatgcttttttttaagaggtgaaatcatttgctggttgtttattttttggtacaaccagaaaatagtgtgggatattgaattatgggaggctctgactgtctcgggtgtcagcttaacattccacagatggggggttagtttttatatcctataatacaaagcatattaaatggcaatatggagtcagtcctgcatttaatgtcttgaacattttaaattacttctattaccatgttgttttttagtagaattgtttcctaaagaaaaccactctttgatcatggctctctctgccagaattgtgtgcactctgtaacatctttggttgtggtagtcctgttttcctaataactttgttactgtgctgtgaaagattacagatttgaacatgtagtgtacgtgctattgagttgtgaactggtgggccgtatgtaacagctgaccaacgtgaagatactggtacttgatagcctcttaaggaaaatttgcttccaaattttaagctggaaagtcactggaataactttaaaaaagaattacaatacatggctttttagaatttcgttacgtatgttaagatttgtgtacaaattgaaatgtctgtactgatcctcaaccaataaaatctcagttatgaaaat

SEQ ID NO: 392681 - DNA, 1000 bp, Homo Sapiens
tactgggttaactttttaaaagcccattacagattaaatagaagagagtgatgtgagtattagtgaccatacacagtaattcagtctagatttcttttcctgtggttggaaagcaaaaatacatgatgtggaaaagcctgaatttcttgtagtcacttttgacagccctctaagggtcattgtctattaaaatagcaacagatctgatgttttccttagtcataattaggtttctttttggtgttgtaattagtgacttttttagagggaaaaaaataggcaattttaacgttttgaatgaatttacatttgacttcacaatttcatttcacttggttccataataagtgctcttttttttcttttctctcttctcttctctttctttttctttctttctttctttctttctttctttctttctttctttctttctttctttctgtctttctttctttctctctctctctctctctttctctctctctctctgtctttctttttttgtgtgcatgtgtacatgtgtgtgtgtgagagagacagacagggtctggtttcttgctgtgtcacccaggctggagtgcagtgcagcctcaacctcctgggctcaagcagtcctccatttcagccacccaagtagctaagaccataggcacatgccaccacagccagctaattttttttattttttttattttttatttttttatatttttgtattgcccaggctggtctcaaactcctgggctcaagcaatcttctgacctcagcctcccaaagtgctgggattataggcatgagccactatgcctggccaatgattgcttttcaataaaaaaaatttttttcctgtaaacaatttttacttgtagcctatacatgttctattttaaatgtcattgtattgttcactaccaccactggtatatctgaaaagtacactgtgttttgaaattataaattttcattctgaatgaggtttctttttttgattttcttt

SEQ ID NO: 392682 - DNA, 1000 bp, Homo Sapiens
cagggctaagaagggagtgggattctggaaggcacaggttctcatagggcttaatttcccgactgaactgataagcctagagtcccttcttattccagggaagccctgagattaagaaaaacaagttattaaccctatgaatttggccaactccatttcaaaagattattttgatacccttaattgtaatctgtgactgttcagaaccaccctaaaacatgtcttgtagtgacattacaaatatgatggaaagttaacaagctccatttgtggttcttcttctctcttgtgttgtattgctggtctacatgctacaaagtatttttaaattttgaaatgttttagtccctggtagcaaattggaaaaagtcagctgggttaataggatagaactaaatcagttagtgtaactgaaatggttatatatataataaagctcggagggaaaattaccaagtgtcttattaagagatagaatgcataaattgttcagatactagaagaaatttgctgaaatatattgctaatagctattaagttttggaagattaagaaaattaaatgaagtgatatgatattatataaaactaatacacttatttgaaagagtagtaattagattcagatctttattctctaaaatcataaataaaagtataacgtacagaagagacaaagacttagagtaacaaagtaatggttggagattgtattgaaaggaggaacctctttttaatgagactcaaaaatacttgacatttcataagaaagtccccaaatgaaatctctgtaatatacaaatatggtatttagtttccaaatgttcaattattactacttattttgtacctagagggctgactttagcatctaaatgactctaagagacatgaaattaaaagaaatatgggccatgcgtatagtcatatcagcaaatcagaaagaaagaacttacaagagccccctggccttattctcatgaaaagtgataaaacagacc

SEQ ID NO: 392683 - DNA, 1000 bp, Homo Sapiens
gaatactacactgaactgggaatgtattatcacctgttagtacagatcccaatattctttttcactgttgtagtaatgttaatcacatacaccaaaatacttcaggctcttaatattcgaataggcacaagattttcaacagggcagaagaagaaagcaagaaagaaaaagacaatttctctaaccacacaacatgaggctacagacatgtcacaaagcagtggtgggagaaatgtagtctttggtgtaagaacttcagtttctgtaataattgccctccggcgagctgtgaaacgacaccgtgaacgacgagaaagacaaaagagagtcttcaggatgtctttattgattatttctacatttcttctctgctggacaccaatttctgttttaaataccaccattttatgtttaggcccaagtgaccttttagtaaaattaagattgtgttttttagtcatggcttatggaacaactatatttcaccctctattatatgcattcactagacaaaaatttcaaaaggtcttgaaaagtaaaatgaaaaagcgagttgtttctatagtagaagctgatcccctgcctaataatgctgtaatacacaactcttggatagatcctaaaagaaacaaaaaaattacctttgaagatagtgaaataagagaaaaatgtttagtgcctcaggttgtcacagactagagaaaagtctcagtttcaccaaatccacattcaaatgagttttaaatttaaattgtaaaaactgatattactgccaaatataagaaaaatattttaagtattggttatgttgtaaattttcaatgtgaatgtcaattagataggtcatatatattcaatttcttcattacttaatgtatttgttgcatggcagtttgttaaagtactatcatgtgtatattttgtcaatattatgtccaacagaaaatattcatgtaagtcatattttttaaggaataaatacatagccttaaaacagtgt

SEQ ID NO: 392684 - DNA, 1000 bp, Homo Sapiens
accctaactcctctgtggctttaccctgttttctctgcctggatttggatcatttcctgcctataggtgctgggggcagttgctggagacccacagagcaaatgagccagctttgctgttttctttttctagacttatcaccagaccccaccacccaccttctcctttcgagaaaggatgactcacaagagtcttgtctacctctggttcctgtgcagttctgtggcacttgccctgggtgccctaactgtatggcatgctgttctcatcagtcgaggtgagactagcatcgaaaggcacatcaacaagaaggagagacgtcggctacaggccaagggcagagtatttaggaatccttacaactacggctgcttggacaactggaaggtattcctgggtgtggatacaggaaggcactggcttactcgggtgctcttaccttctagtcacttgccccatgggaatggaatgagctgggagccccctccctgggtgactgctcactcagcctctgtgatggcagtgtgagctggactgtgtcagccacgactcgagcactcattctgctccctatgttatttcaagggcctccaagggcagcttttctcagaatccttgatcaaaaagagccagtgggcctgccttagggtaccatgcaggacaattcaaggaccagcctttttaccactgcagaagaaagacacaatgtggagaaatcttaggactgacatccctttactcaggcaaacagaagttccaaccccagactaggggtcaggcagctagctacctaccttgcccagtgctgacccggacctcctccaggatacagcactggagttggccaccacctcttctacttgctgtctgaaaaaacacctgactagtacagctgagatcttggcttctcaacagggcaaagataccaggcctgctgctgaggtcactgccacttctcacatgctgcttaagggagcacaaataaaggtattcgattttt

SEQ ID NO: 392685 - DNA, 1000 bp, Homo Sapiens
cccctgaccctttttttttttttgagacccagagtctcattcagtcgcccaggctggagtgcagtggtgcaatcttggctcactgcaacctccacctcctgggttcaagcagttctcctgcctcagcttccccagtagcagggtgcgtcaccacacccggctaattttttgtatttttagtaaagacgaggttttgccatgttgcctaggctggtcttgaactcctgagctcaggtgatccgcccacctcagcctcccaaagtgcggggattacaggcatgagccaccacacccagtcctttcctggcacatttgcagcttgtcaacacagcggaaatcacgggagaatgttgagcccttccctgggctcagctgcttgctctgttcataagctttaatagcccccggggctctgggccaggtgacccggctttaaatccctgctgtgtgaacttaggcaggtacctcccctctctgggctcttcttttccatcaagcagacagaaaacctcaaccccacaaggttgctgtgagaagaagtgggaagctgctggttccctgggcacaggaagtgcttgttccttgttctggagactcaagacattcccagaatcttcttaagcagagctgctggggagtagcccctgtagcaagtaccatgctcttgacaggcagcatgagagcgtgactcccatgacccacctgtgctcaaaaaaaaaaaaaaaaaaaaaaaaaaagcaaaccaggaaaactgactacacaaacattgtagaaagattagaaaatagaagcagaaagaagactcattggccatcccactctctggggtgaatactgttatattttcttctaggcctttttctatgaatatatagaatatagattttgccaccgtggtatcctactatgcacactgttttcttataatctgcttttgcacttaactgtacattgtgaacctctttccatgtcaacaaatacatgtttatctcatcgctgt

SEQ ID NO: 392686 - DNA, 1000 bp, Homo Sapiens; identical to SEQ ID NO: 283037

SEQ ID NO: 392687 - DNA, 1000 bp, Homo Sapiens
tggcacgatctcagttcactgcaacctccacctcccgggttcaagcaattctcctgcctcagcctcccaagtaacttagactacaggcacccgccaccacgcccggctaatttttgtatttttagtataggtaggatttcaccatgttggccaggctggtcttgaactcctgacctcaaatgatccacccaccttggcctcccaaagtgctgggattacaggcgtgagccaccacacccagcctgaatacattttagagtgcctagcctattaaacttttttttccagtcccatgaagctgaggtcttgaagcagctggctgagaaacgagagcacgagaaagaagtgcttcagaaggcaatagaagagaacaacaacttcagtaaaatggcagaagagaaactgacccacaaaatggaagctaataaagagaaccgagaggcacaaatggctgccaaactggaacgtttgcgagagaaggataagcacattgaagaagtgcggaagaacaaagaatccaaagaccctgctgacgagactgaagctgactaatttgttctgagaactgactttctccccatccccttcctaaatatccaaagactgtactggccagtgtcattttattttttccctcctgacaaatattttagaagctaatgtaggactgtataggtagatccagatccagactgtaagatgttgttttaggggctaaaggggagaaactgaaagtgttttactctttttctaaagtgttggtctttctaatgtagctatttttcttgttgcatcttttctacttcagtacacttggtgtactgggttaatggctagtactgtattggctctgtgaaaacatatttgtgaaaagagtatgtagtggcttcttttgaactgttagatgctgaatatctgttcacttttcaatcccaattctgtcccaatcttaccagatgctactggacttgaatggttaataaaactgcacagtgctgtt

SEQ ID NO: 392688 - DNA, 1000 bp, Homo Sapiens; identical to SEQ ID NO: 114986

SEQ ID NO: 392689 - DNA, 1000 bp, Homo Sapiens; identical to SEQ ID NO: 283039

SEQ ID NO: 392690 - DNA, 1000 bp, Homo Sapiens
agatattaaaggtgttagctgattgtattttatctctaaagatttagaactttagaaaatgccgacttcttccatctatttctgaaaggttctttgtggatttatatagagttgagctatataaacattaactttagatttgggatttaaaatgcctattgtaagatagaataattgtgaggctggattcactacacaagatgaacttcacttcataaattaattataccttagcgatttgcttctgataatctaaaagtggctagattgtggttgttttggttaaggtgatatggaggtgggagagcttttagttaagtaagaagctatgtaaactgacaaggatgctaaaataaaagtctctgaagtattccatgccttttggaccctttcctcgcaactaactgtcaactgttgatcaaaaaagtcaaggcattgtatgttgcttctgtggttattattctgtgatgcttagactacttgaacccataaacttggaagaatctttgagcaaattttctcagttgtctgtatgacttcagtatattcctgggaatgccataggattttttgtgcttgatacatggtatccagtttgcatagtatcacttctttgtaatccagttgctgttaagaatgatgtactttaaaggaaaagagaaaactgcatcacagtcccattctccagtgtccatgcaatgaattgctgagcatttaggaagcagcaccaagtctattacaggcatggtgtgaaacttgatgtttgacctgtgatcaaaattgaaccattgtacagtttggcttctgtttgcttcaaaatatgtagaattgtggttgatgattaatttgcgagactaactttgagagtgtaacagttttgaagaaaacattgaatgttttgcaaatgaaggggcttcacggaatgttacaatgttactaatataatttggcttttgttatgcaaattgttaacaccagctattaaaatatattttagtag

SEQ ID NO: 392691 - DNA, 1000 bp, Homo Sapiens
caggcgtcccggcagatggccacccctggacgtctgctctcaaactctggttggcaggcatccgtcttttctgttgatcagcctggtcaccaacccagcagggtccctctttctctcagagtgcttgtgcaaacaccctaggtctgcgcagccctcagacatggggtcgctccaccccagacattgtcctcttcgtgttctggttgctactgccaaagtggtttcactcctacgctggggtgtgaatgtaccctgcccttccctgcagcgtgagggcagcagcgttctcagtgtgtaaattgtcgcttgtctgatgggtgaatgccgtggtggtcactggtggccccttttacgatcaggctggggtgtagcttctgcccagaccctggtgaccagccagtttcttaggaggtggttgagttgtgtgtccccgttggcaggccggcagcaggcggaagctgcacctcagggctgggggcgcgttggggagggctggccctgccaggaagtgtgctgacagggcaggagggctgagcggcagacacaaggcactcctggtccccaccagctgtggcctctgccaccccatgggtgccagtcttaagtttcagagcatcactggtactcaccctggtcctgcagctcctgggcccagagacaggatttcgtgttagcctcctcgtactgtgctggggtgatgataaaactaacaacccaggctggacgcagtggctcacacccgaaatcccaacattttgggaggccgaggtgggtggatcaactgaggtcaggagttcgagaccagcctggccaacatggcgaaaccctgtctctactaaaaatacaaaaattagccaggcatggtggtgcatgcctgtagccccagctactcaggaagctgaggcagaaaaatcgcttgaacttcgggaggcagaggttgcagtgagctgagatcgcaccactgcactccagcctgggcgacagagcgagactttgtctc

SEQ ID NO: 392692 - DNA, 1000 bp, Homo Sapiens
aagctgcttctggaggtgagcgagcgggtgcggaccttgacccaggcctacttctccccggaacggcccctgcatctgtccttcacccacctggtgtgccgcagcgccatagaaggagagcaagagcagcgcatggacctgagtcacccagtgcacgcagacaactgcgtcctggaccctgacacgggagagtgctggcgggagcccccagcctacacctatcgggactacagcggactcctctacctcaacgatgacttccagggtggggacctgttcttcacggagcccaacgccctcactgtcacggctcgggtgcgtcctcgctgtgggcgccttgtggccttcagctccggtgtcgagaatccccatggggtgtgggccgtgactcggggacggcgctgtgccctggcactgtggcacacgtgggcacctgagcacagggagcaggagtggacagaagccaaagaactgctgcaggagtcacaggaggaggaggaagaggaagaggaagaaatgcccagcaaagacccttccccagagccccctagccgcaggcaccagagggtccaagacaagactggaagggcacctcgggttcgggaggagctgtgagtggctgagccagctccttgaggatgtggccacttgacttgtggaaggccatcttgatgccaggacgcacaggaagcccctgtgtgacatcaggagcagaacagcaagctctctgtccctgcacccccaccatcttggggacctacaagggcctggactcagaggacagtgcacaggctagcctggagctcaccaggcctggggagctgggacggggccccgctgccggacctgcagccctggacagatggggaacactgtgcctccctgaacggaaatggcaggggaggaggctgatgctttaaatgaagaggatggtggggttgggaggtataaccctgctcctctctcccagtctgtgcaataaaggtcgtgaagatctctc

SEQ ID NO: 392693 - DNA, 1000 bp, Homo Sapiens
cagaccaaagttaacttacctatttgtggaatttttaaactacttaatagtggtttttccgactcctgtgaagtaaaaagctaggtatgattccagtgatattattctggagtaaaaatatatgctctggtaagtttttataaaccataacataattgcttagtggagaggccaacactgaggagtaaatgaattctgtttagactcagagggacagatctttacgtttgggtccctatctggttttttgaaataataatgagcccatagataggttcaagtagtaactctggctggcacctgagtcacttcttctttattccctcccctgtgctggcctgcaaaggcttccagctttgaggcagtgtagcggttaagtcccagagttctattgttcctgccttgtgtacttaaaagggccctgtggaaactcttgcctacttttttttcctcttttcacaagtgttcagcctcacaggcctacaacaaatccaaacacttctaaatttgctcagaaatatggaggtgctgagaagtgttccagatgtggggattctgtatatgctgccgagaagataattggagctggaaagccctggcacaaaaactgtttccgatgtgcaaagtgtgggaagagtcttgaatcaacaactctgactgaaaaagaaggtgaaatctattgtaaaggatgctatgcaaagaactttgggcccaagggatttggctatggccaaggagcaggggctcttgttcatgcccagtaagatgtaaaccctgaactaaacatcacacactgagaatctcttcataatctaggcacagataatctttaacactaaactactgtgaaattctaccagcattaagtactgtatatcgccctgtacttggataggctggctaactcgtaggaagagagcactgtatggtatccttttgctttattcaccagcattttgggggaacatttcttttacattttaaataaaacttcagcttg

SEQ ID NO: 392694 - DNA, 1000 bp, Homo Sapiens
acttttaccaaagttatgtaacctcagtgtagataattttaaatatttctatttttatattttaaaatgttgaatatactctggaaacaacatttgaagatttgctctgatgtcaactttttctggttataaaacctattagtattgtgtataattctcagggtaggtatactctaataggtgttttgtcaattgctttatttttgtaaaggctagagttagtgcatattgaatatatttatgtacaaataattcctgttgtaacatttagtggacgcgattatctgtatacctcaaattttaatttaagaaagtatcacttaaagagcatctcattttctatagattgaggcttaattactgaaaagtgactcaaccaaaaagcacataaccttttaaaggagctacacctaccgcagaaagtcagatgccctgtaaataactttggtctttcaaaatagtggcaatgcttaagatacttaaaaatacacatacatataagctgaaagcatgtcaagcctatttcatagaaaatagttcttaaacagtattgttcattagaaattgctggggagcattttagagattccataggcctggtagccacctcagcttactaaatcaacatctctggagatggagtgtatatgtgttttgaaacagctgctcaagtggttctgttaaacactcctgcgttacaatcacttaaaatagagcaagcatccccttaggctcttaattgtagtttaaattccagtactgcctactcagacccaaaagttttgttttatgaaaaatttgtattgtgttcaatattgtttgaaatttggggttgttgcataaatgattatggaataacatttggttttaaaataatataaactgacatgttatgctacctgttacacaatttggttttcagttttaattatatgaagctggtaacaatcgtttttgttgtaaaagaattatttttcactaaacagtatgtttaaaactg

SEQ ID NO: 392695 - DNA, 1000 bp, Homo Sapiens
ttttttgtttactccagatttggggtttattttgagtggcatgcttcaaatagttcataaagatccttgcattaaatttctgaaccatttcttcaaacttcttagtgtgtttagacaaggagaacaaaaattgaaaccaaagccctttctgttattttttcaatgaaggtgagaaagaaataccatacaattttctttgtgaaattactgtttattttcatcaacatttaccaagtgccattgacatttataaaaaaaatgatcctttatagttcttacacttgcccttttcaccttaactgaatatgaattgagtgcactaacttatttacttgatatactgtgcatctactctgctttgaagcaaaagaaatataaacacgaggaggaataggaaagacagtgtgacacaaacttgccattgcaattcaaagccctgaaaacgatgggtttaatgcaaggtgattaagctgtgacctcctttaatctcctgaagcaaaataaaatggttacatgcaaaacttctagaaatagactcttaaaatatatacattttgctttgattttggcttcaacccagtgctggaactaggcatccagactagtttgaatgtttgtagctgaatttttatgggtcctcaaaattaaatcgagaattagcctcagttgttgcttcttttgaagtttcagtgacccaagctgggtgtttgtgtcttggctacttgtttaatagcactagaattccaggtgaagctttgagagttgatattcattaagagggctttttttccccttctttccttctcttttgctgtaacaaagggttgaagaaattgccatctgtgtagttttcagtagctgtcaagtgtgtcttacttaccttcccccagacgtagtttaaaatggtaaacacagctgtgatttttagttaagtaaaagagttaatatgatatagatatggaaagctttatggcttcattaaaaagataaaccactacct

SEQ ID NO: 392696 - DNA, 1000 bp, Homo Sapiens; identical to SEQ ID NO: 195043

SEQ ID NO: 392697 - DNA, 1000 bp, Homo Sapiens
attgtgaagttgaagttctcccattaggattggaaacacatcctagaactgctaaaactgagaaatgtccaccaaagttcagtaataatcccaaggagcttactgtggaaacgaaatatgataatatttcaagaattcaatatcattcagttattagagatcctgaatccaagacagccatttttcaacacaatgggaaaaaaatggaatttgtttcctcggagtctgtcactccagaagataatgatggatttaaaccaccccgagagcatctgaactctaaaaccaagggagcacaaagactcaagttcaaaccatgttgatgagtttgaagataatctgctgattgaatcagatgtgatagatataactaaatatagagaagaaactccaccaaggagcagatgtaaccaggcgaccacattggataatcagaatattaaaaaggcaattgaggttcaaattcagaaaccccaagagggacgatctacagcatgtcaaagacagcaggtattttgtgatgaagagttgctaagtgaaaccaagaatacttcatctgattctctaacaaagttcaataaagggaatgtgtttttattggatgccacaaaagaaggaaatgtcggccgcttccttaatagtctcactttgtcaccagtggcacaatctcagctcactgcaacctccgcttctggggttcaagcaattctcatgcctcggcctcctgagtagctgagattacaggcgttaatgaatcacatgatgaatgtgtggagatggcggctagtgggcaacagagcaatactggaatagtgctaatatgaggaaatggtatcatctatttagaagcctcggaacgacgatacataatggctatcttcagcaaagaaatttgttgcttacaatatctcctctccaaaaggcttgtttgttacagtgatgtaaaaattaggttctgtacatcttcatattaaacttactttgtgaaaactttttgttt

SEQ ID NO: 392698 - DNA, 1000 bp, Homo Sapiens
gggggcggggggggggttgtagaaacagtctgatatggtttggctcttgtccccacccaaatctcatctcaattttaatccccacgtgtcagaggagggccttggtgggagatgattggatcacgagggcagatttctcccttgctgttctcatgatagtgagttctcatgagagctgatggttttaaggtgtagcccttcctcgctgtctctctcctgtccccttgtgaagaaggtccttatttctcttttgcgttctgccatgactaagttttcggaggcctccccagccatgtggaactgtgtgtgagttaaacctctttcctttgcaaattacctagtctcaggtagttctttatagcagtgcaaaaatggacgtaataagtcttatgtacttattggtgagagagaaaatccgtgcattgttttcaaaagaattcattaacgtatcaattcaatttctataacctttgaagtggcagtaaatatgtagtaattgatacttgggagatagttgcccacttgggcaaaaacgcatgcagaaggtggagtttttaaatttaaaacatttttaaaatagcaaatgttaatattccagtttccattggtaggaaattttttagataagttcaggcatatgtatgcaatggaaagccactagaaatcttcaggcacacagataatgacagtgcaggttgctcatgaagtatttagtgaaccaggagagttttagaacaacaattatagcatgaccccattttgttagtatgtttttctgtgtgtatgtttagagcaacagagaaaaaaagatgtgggagaggacatataactacttatctctagtggtgggattctgaatgtataatacatatgttgtacttttatgtattttactttgtaacaaagtatctttcagttttataataacagtagagctattttttataaattagcctgatggaacaatcccttatgattaaagattcatgttgtaacctct

SEQ ID NO: 392699 - DNA, 1000 bp, Homo Sapiens
gggtccccagtccccgggccacggatccaccttcccatatggccccccggccgtggctgtgggccagtgcccgctggtggggccaggccccatgcaccgccgccacctgctgctccctgccagggtccctaggcctggcctatcggaggcgctttccctgctcctgttcgccgttgttctgtctcgtgccgccgccctgggctgcattgggttggtggcccacgccggccaactcaccgcagtctggcgccgcccaggagccgcccgcgctccctgaaccctagaactgtcttcgactccggggccccgttggaagactgagtgcccggggcacggcacagaagccgcgcccaccgcctgccagttcacaaccgctccgagcgtgggtctccgcccagctccagtcctgtgatccgggcccgccccctagcggccggggagggaggggccgggtccgcggccggcgaacggggctcgaagggtccttgtagccgggaatgctgctgctgctgctggggggatcacagaccatttctttctttcggccaggctgaggccctgacgtggatgggcaaactgcaggcctgggaaggcagcaagccgggccgtccgtgttccatcctccacgcacccccacctatcgttggttcgcaaagtgcaaagctttcttgtgcatgacgccctgctctggggagcgtctggcgcgatctctgcctgcttactcgggaaatttgcttttgccaaacccgctttttcggggatcccgcgcccccctcctcacttgcgctgctctcggagccccagccggctccgcccgcttcggcggtttggatatttattgacctcgtcctccgactcgctgacaggctacaggacccccaacaaccccaatccacgttttggatgcactgagaccccgacattcctcggtatttattgtctgtccccacctaggacccccacccccgaccctcgcgaataaaaggccctccatctgccc

SEQ ID NO: 392700 - DNA, 1000 bp, Homo Sapiens
ctatcaaaatcctagaagatgttttgtagatgtagacaaggttattctaaaattcatatacaaatttatagcaaaaatattttgaaaaagaatagagtgagaggaggaatcagtccagctgatttcaagatctactatatagctatgtgaaccaagagtgcaatgctggcagaggcacagacacacagatcgacagagccgagatcatcacgggaacaggaccacacaaatatgcccagctgactttaaggtgcaaaagtaattcaatggaggaaggacagcctttcaacaaacggtgctggagcagctggaccagctataggattaaaaaaaaagaactttagcctaagtcttacacattatacaaaaattaacatggctcacatgcatacttaaatttaaaactataaaacttcttttaggaaaaaacagataacctttgggatctaagactaggtagagttgttcttaaatgcaacactaaaagcaacagtccataaaggaaatatcagtaaagtggactttatcaaaactgaaaacttttgctctgtataaaaccctgttaagagggtgaaaagatggccgggcacggtggctcacacctgtaattgtagtactttgggaggttgaggcaggcagatcacttgagctcatgagtttgagaccaggtgtgggcaacatggtgaaaccccatctctataaaaaattagctgggcataggctgggcatggtggctcatgcctataattccagcactttggtaggctgaggcgggcagatcatctgaggtcaggagtttgagaccagcctgaccaacatggagaaaccccatctctactgaaaatacaaaattagccaggcgtggtggcacatgcctgtaatcccagctactcgggaggctgaggcagtagaatcacttgaactgggaggcggaggttgcagtgagccgagaccacgccattgaactccagcctgggcaacaagagtgaaactacatctc

SEQ ID NO: 392701 - DNA, 1000 bp, Homo Sapiens
gggcacagtgtgtcccaggcatttcgcgtttatgttaaaacgggtggaagatagcaagccggcagaggccgggccgctgcacccgcctgttccgaggtgggtagggggtggggggctgttcccaggattcccctctacgctttctgtggtgaccacggattactgcgtgacaacgggaagccgggagccgaggcccggtccctgaccacgcgtgcctggccacccctgcaggaggactgccaccagaagatcgatgacctcttctccgggaagctgtacctcatcggcattgctgccatcgtggtcgctgtgatcatggtgagcgggcgggggcggagggcctgctctctgggctgccccttccgcggggccttgtgctgactgcgccccccaccaccctcctgcagatcttcgagatgatcctgagcatggtgctgtgctgtggcatccggaacagctccgtgtactgaggccccgcagctctggccacagggacctctgcagtgccccctaagtgacccggacacttccgagggggccatcaccgcctgtgtatataacgtttctggtattactctgctacacgtagcctttttacttttggggttttgtttttgttctgaactttcctgttaccttttcagggctgacgtcacatgtaggtggcgtgtatgagtggagacgggcctgggtcttggggactggagggcaggggtccttctgccctggggtcccagggtgctctgcctgctcagccaggcctctcctgggagccactcgcccagagactcagcttggccaacttggggggctgtgtccacccagcccgcccgtcctgtgggctgcacagctcaccttgttccctcctgccccggttcgagagccgagtctgtgggcactctctgccttcatgcacctgtcctttctaacacgtcgccttcaactgtaatcacaacatcctgactccgtcatttaataaagaaggaacatcaggcatgct

SEQ ID NO: 392702 - DNA, 1000 bp, Homo Sapiens; identical to SEQ ID NO: 283044

SEQ ID NO: 392703 - DNA, 1000 bp, Homo Sapiens; identical to SEQ ID NO: 114987

SEQ ID NO: 392704 - DNA, 1000 bp, Homo Sapiens; identical to SEQ ID NO: 283047

SEQ ID NO: 392705 - DNA, 1000 bp, Homo Sapiens
tttaatgatatgcatgtaatgcctttgccatattcctctccttcttagatcacatattcctattttcctgaaaattctgcttttgagaatgctttctgtcccgtaattgtgtatgtctttctttccagctccatgatgcgttatctgggtctggaaacccaaaccctcaaggatggcctggcgcatgggggaaccagcctgctggggcagggggctacccaggggcttcctatcctggggcctaccccgggcaggcacccccaggggcttatcctggacaggcacctccaggcgcctaccctggagcacctggagcttatcccggagcacctgcacctggagtctacccagggccacccagcggccctggggcctacccatcttctggacagccaagtgccaccggagcctaccctgccactggcccctatggcgcccctgctgggccactgattgtgccttataacctgcctttgcctgggggagtggtgcctcgcatgctgataacaattctgggcacggtgaagcccaatgcaaacagaattgctttagatttccaaagagggaatgatgttgccttccactttaacccacgcttcaatgagaacaacaggagagtcattgtttgcaatacaaagctggataataactggggaagggaagaaagacagtcggttttcccatttgaaagtgggaaaccattcaaaatacaagtactggttgaacctgaccacttcaaggttgcagtgaatgatgctcacttgttgcagtacaatcatcgggttaaaaaactcaatgaaatcagcaaactgggaatttctggtgacatagacctcaccagtgcttcatataccatgatataatctgaaaggggcagattaaaaaaaaaaaaagaatctaaaccttacatgtgtaaaggtttcatgttcactgtgagtgaaaatttttacattcatcaatatccctcttgtaagtcatctacttaataaatattacagtg

SEQ ID NO: 392706 - DNA, 1000 bp, Homo Sapiens; identical to SEQ ID NO: 283049

SEQ ID NO: 392707 - DNA, 1000 bp, Homo Sapiens; identical to SEQ ID NO: 283050

SEQ ID NO: 392708 - DNA, 1000 bp, Homo Sapiens; identical to SEQ ID NO: 283052

SEQ ID NO: 392709 - DNA, 1000 bp, Homo Sapiens
gttatctagcttgacaccactgatcatggcagctaaagaagcaatgaagagtaaccgttaacatcactgctgtggcctcatattcttttttccattttctacaagaagccttttagtatatgaaaattattactcttttgggggtttaaagaaatgatctgcataacctgaatgaaagaagcaaatgactattctctgaagacaaccaagagaaaattgcaaaaagaaaagtatgacttttatatgaaccccttctttagggtccaaaaggaattgtggactgaatcactagccttaggtctttcagcaaaccgcctatcagggccatttatcatatgtgagatttgcattttactttgctgactttgttgtaatagatcccattcattgtcccctttggggtatttccaatacttgaatggcagattggagtttttcagagtatttgtttcatctgctagtctttctctccttcatagctttccttttcctggacttgctccttttgagttgcttttgagtttctcatgcctaggtagtgtaatagaaattatgtagctccttatgttggcaaaggagctctatatagtttcactttttataaaagttaggaccagctgttgttacatgtaatattttagttcagaacttgacctgaaggaagggaagaaaagtatttgatttttaccttttttaacaaatgtgaaaaagtcagttttagaaattttgtggtagtaagtttggcatttgttacatgtatagagagaagactaataatctctatttataactaaatcattgagatagaaaaagattcccattgaccgtatatttcttcccatttcgtcttcccttctgcctgtttccccttcaggcttggctctaggaaccaaagtgatttgttcttgttccaacctgggctttgtgactttggttagtgccactaccttcttccctcctttcccccttcaatttggaaataaatttctgtatatgttgc

SEQ ID NO: 392710 - DNA, 1000 bp, Homo Sapiens
cccatggtcatcttgcccttcatgaagcatggggacctgcatgccttcctgctcgcctcccggattggggagaacccctttaacctacccctccagaccctgatccggttcatggtggacattgcctgcggcatggagtacctgagctctcggaacttcatccaccgagacctggctgctcggaattgcatgctggcagaggacatgacagtgtgtgtggctgacttcggactctcccggaagatctacagtggggactactatcgtcaaggctgtgcctccaaactgcctgtcaagtggctggccctggagagcctggccgacaacctgtatactgtgcagagtgacgtgtgggcgttcggggtgaccatgtgggagatcatgacacgtgggcagacgccatatgctggcatcgaaaacgctgagatttacaactacctcattggcgggaaccgcctgaaacagcctccggagtgtatggaggacgtgtatgatctcatgtaccagtgctggagtgctgaccccaagcagcgcccgagctttacttgtctgcgaatggaactggagaacatcttgggccagctgtctgtgctatctgccagccaggaccccttatacatcaacatcgagagagctgaggagcccactgcgggaggcagcctggagctacctggcagggatcagccctacagtggggctggggatggcagtggcatgggggcagtgggtggcactcccagtgactgtcggtacatactcacccccggagggctggctgagcagccagggcaggcagagcaccagccagagagtcccctcaatgagacacagaggcttttgctgctgcagcaagggctactgccacacagtagctgttagcccacaggcagagggcatcggggccatttggccggctctggtggccactgagctggctgactaagccccgtctgaccccagcccagacagcaaggtgtggaggctcctgtggtagtcctcc

SEQ ID NO: 392711 - DNA, 1000 bp, Homo Sapiens
atggtggtcagtgattgtcttcgcattttatatacgcacaggtcaaagagaatgaactctaaatgtttcccagtttctttgctgtcaccccgcagtccccacagtgcccggtgtgagttgtaagaaaatggtggtcagtgattgtcttcgcattttatatacgcacaggtcaaagagaatgaactctaaatgtttcccagtttgatttttctgcttctgtttagccacatgaaatgaagatcacctctgcctatctacaggacattgagaatgcctataagaaaacctttctccctgagatgagtgaaaaatgtgaggttttacaatattctgcaagggaagctcaagattcaaaaaaggtggtagaggacattgaatacctgaagttcgataaagggccgtggctcaagcaggacaatcgcactttataccacctgcgattactggttcaggataagtttgaggtgctgaattacacaagcattcctatctttctcccggaagtcaccattggagctcatcagactgaccgtgtcttacatcagttcagagagctgccgggccgcaagtacagccctgggtacaacaccgaggtgggagacaagtggatctggctgaagtgaacgggccgccttctgctccagctgcatcacagtgatggccaagctgcatcagccgcactctcctggacgccatatagctttaagatcgggggagggtaaataatgcaaaaattgcacagtggaagaaggggtctcacaaaaagcaatccatcctgtagtataggtaatggagttgggggaagcagcttccattctggatgtttggaaccctttagctttgttttggaatggcccaccattctcactggaaaacagtggtctgctgtgaaaggccagctctcggcagcccctgtggtttcagcgctgccgctctgtgtcattcaggttgtgcacattgtttttcttctgacttccagaaataaaagtgtttccatggg

SEQ ID NO: 392712 - DNA, 1000 bp, Homo Sapiens
caactccaccctccattctaagccacccacaaaggccggggcagcccccaaggaagcccagagcaggcagcaaatccaaacaaggaaaagtgccgaccaccaaccacgagggggtgtgcacggcccgggaatctgccgagagggtgaccacccaggggtgagggcgcctccaaggctgcagcagcagagggggtcccgggccttgcagtccagcagcatcaggcaacctggggacagcgcaggggccaaggccactggcccccaggtcccttagattctggggtctgggtaaggccagcctcttgggggccatccccaggaaggaaggaattgtccccttatggaggatgaccccagaggctctctcctcgggcactgagcacagaggggaaatcagcccaaatgtcagacatgacaactgggaggtagaaatcgtggacattggctttttgggtttttttgtttgtttgtttgtttgagatggagttttgctctgtcgctctggctaaagtgcagtggtgccatctcggctcacagcaaccttcgcctcccagttcaagtgattctcctgcctcagcctcccgagtagctgggactacaggtgtgcaccaccacacctgactaatttttgtgttactagtagagacggggtttccccatgttggccaggctggtctcaaactcccgacctcaggtgatccgcccgccttggcctcccaaagtactgggattacaggcgtgagctaccacacccagccagacattgactttcagatgagcagtccagatacagcccagttgcacggctcccatttttttgtcactaggccaccagcagctcttccctccccacttccacgccctcccaaggttctcgctgataggaagtgtcccgttggctcttctattcccctccctgtttcaccactcacccctagtgcctcacacagtccaatgctgagcacaaatgccataggcgttcaataaatgttgttcactg

SEQ ID NO: 392713 - DNA, 1000 bp, Homo Sapiens
ggaggtacaggacagatcaggagagaggtgagagctggggcatggtgaggaagacggtgtggccttggcttgggccaactgagagagaggagcgggggtaagggagaagtaaggccaggtgttggtcctttgtccactggctcagccctgcatctcctgtttctttccagcctgaacaaagaggagatggagttccagcccaatcaggaggacgaggaggatgctcacgctggcatcattggccgcttcctaggcctgcagtcccatgatcaccatcctcccagggcaaactcaaggaccaaactactgtggcccaagagggaatcccttctccacgagggcctgcccaaaaaccacaaggcagccaaacagaacgttaggggccaggaagacaacaaggcctggaagcttaaggctgtggacgccttcaagtctgccccactgtatcagaggccaggctactacagtgccccacagacgcccctcagccccactcccatgttcttccccctagaaccatcagcgccgtcaaagcttcacagtgtcacaggcatagacaccaaagacaaaagcttaaagactgtgagttctggggccaagaaaagttttgaattgctctcagagagtgatggggccttgatggagcacccagaagtatctcaagtgaggaggaaaaccgtggagtttaacctgacggatatgccagagatccccgaaaatcacctcaaagaacctttggaacaatcaccaaccaacatacacactacactcaaagatcacatggatccttattgggccttggaaaacagggatgaagcacattcctaacctgcttcctaatggggatgcttcgccagccaggtcctcacctgtgtgtacaccagcaggacactgatccagtcacagccatacagctgtccacactgaagaacatgtcctacaacagcctgaatcaaatggttagcttaatagataaaaatcccagactacttcagccttt

SEQ ID NO: 392714 - DNA, 1000 bp, Homo Sapiens
aagtgatggggagagatgatccaggaagaagtggaaagcatgacagaaggaaacaacagggttgattcaatgggacacacaccaaatgtaatgacccgcaccagttgggaagttacaaatattcaggccaaaggggttcaaaccccatcctttcccttgcctgtgagtaaagcatactaggagttatgtttgctgggggagtgggtgggttgcagaacttaagaccaggacaattaggtttggttcagggcagaggctggggatgctaacaagatgagagggggcaatctgggggtaatggcatttctcacaaagtccactcggctgatgtgccatagttgtggaagttcctgcatctggcagaacacctggcgcatgctggagatgttgatgcaagccaggacagccttgaggcagaggaggtgggctgactacctcgatgtcctggaatacagctacccctcccagccatgctcatgcctcctctgctcattaccttgggcagatagtaaaagaagggccccagccacagcagcaccgacaggaccactgtgcaggagaagaggcctgccagctagagaaaaggaggaacaggagcaaaaaaggaagagagcctcccacccccacatgagagctggtcttcctgcccactctgcctaatcttcctcggaagtctcccttctcccaaatctccttccacacaacccccttcttaatattctgccattcacatctaaccctcccgctccccccaattaattaaatgcccattattcaccagtctccttgtagatgtccattgttcaagttccccagttttgtagcccacctccaccttaaaagccactgttgggttaccctataagcagggtatatgtgtttagggcaccagcaaagtaagggaaaccaaaaatattagggggagactttgatatgtgatattccttttaaaagacaatgtcattgtgtgaaaaaaataagaattttatctcttaagttt

SEQ ID NO: 392715 - DNA, 1000 bp, Homo Sapiens; identical to SEQ ID NO: 283054

SEQ ID NO: 392716 - DNA, 1000 bp, Homo Sapiens
acattttgatggcaatttaatagtgattttcatgtgtgtcttgataatgtcaaaggtaataaccaggtgttttggcagggcaagttttggggatcagggaaacactcatatttgctaagtacctattatgccataaactgtactgaaagctttttatctgttacctcattttaatctgtagtcaatttatgtggtagacctcatttgcctgttatagatgaggacccagggttctcaggaaaaagcaatgtcttcaatctcactaatagtactgccagaataaactattataaagtatatcatacatgatttagattataagaagaaacatttactaatggtgaaaattctgagcattgtggttgcttacctagaaaaatttagtaacttcttttacttctctgaaaattttaagcttattttttatgatgatttaagaatggtcctgcccacaggcagaggagatagactgcatgagctctcaaagttttttctaagtcttatgatactataagttggtatttttatgatctcaaatgtgttcaatttatttccctttcttaaggtggataatattaatgcagctgtgatggatttgaaaaaaaagaagatccgcagtctaagtgaagaggtcaaaataggagcacatggaaaaccagtgatttttctccatcctaaagactgtggtggagtccttgtggaactggagcaagcttgatttatatttgcaagcaactaaattaattgacctgaaaaagcctatcaaatactatcaaaatgtactatgacattgagtccttcactgcttccatcatgtaaaagttcacagttaaagactgaattacagaaagattaaaatatatacatatataaatacataaatatgtatattatttagattaacaaacatatttgttaatttgaatttgaagaaaatcttgattactaattacttagggaacattattaaaatcatatagaaataaattattcctcttct

SEQ ID NO: 392717 - DNA, 1000 bp, Homo Sapiens
gaagttcaatgtggagaagccgctcatcttcaacacataccagtgctacctcaaggatgcctatgacaatgtgaccctggacgtggagctggctcgccgtgagggctggtgttttggggccaagctggtgcggggcgcatacctggcccaggagcgagcccgtgcggcagagatcggctatgaggaccccatcaaccccacgtacgaggccaccaacgccatgtaccacaggtgcctggactacgtgttggaggagctgaagcacaacgccaaggccaaggtgatggtggcctcccacaatgaggacacagtgcgcttcgcactgcgcaggatggaggagctgggcctgcatcctgctgaccaccaggtgtactttggacagctgctaggcatgtgtgaccagatcagcttcccgctgggccaggccggctaccccgtgtacaagtacgtgccctatggccccgtgatggaggtgctgccctacttgtcccgccgtgccctggagaacagcagcttcatgaagggcacccatcgggagcggcagttgctgtggctggagctcttgaggcggctccgaactggcaacctcttccatcgccctgcctagcacccgccagcacaccctcagcctccagcaccccccgcccccgcccaggccatcaccacagctgcagccaaccccatcctcacacagattcaccttttttcaccccacacttgcagagctgctggaggtgaggtcaggtgcctcccagccctgcccagagtatgggcactcaggtgtgggccgaacctgatacctgcctgggacagccactggaaacttttgggaactctcctcgaatgtgtgggcccaaggcccccacctctgtgacccccatgtccttggacctagaggattgtccaccttctgccaaggccagcccacacagcccgagccccttggggagcagtggccgggctggggaggcctgcctggtcaataaaccactgttcctgc

SEQ ID NO: 392718 - DNA, 1000 bp, Homo Sapiens; identical to SEQ ID NO: 114988

SEQ ID NO: 392719 - DNA, 1000 bp, Homo Sapiens
cccccaaactgcccttctgtttttgtagttttgctttcttccacccaccctctctccgcatgctgtaagttaggggagttagtatcttgaacttctaaatgcaaaaggagattttataataagccatgctacctgtaaatacattattgaggtttgcatttttatttttggaggtatgaaagagttgagtagaccaagtcaaaagaggtgtggggatttatgtttatttttatttgtttggggttgtttggttggtggctgggtttcttgtaacagacctattctggaatagcaaagaaggataccttggtgatctgcaatgtttctgaatctgtttctctttaggaagtgattgccatcaaatttagtgatatgatatttgagtcaaaaatctgaggttatagtaccagctgtcttttctctctggtctcctttttgtcgtctttctctttctgtctaaattggcctctgtcttttcctaaggacttaaaatataacccaaattaatgaagaactgccccaaaacttcagtgaaagccaaggaggtacagaattttttcaggacatctttaaccaatacaaaatttatgtcttaagaagataatttttacaatagtgtagtaatctgataaatgaaaactattggaagtcaatagttttttatattccagctttctgtattcaaacttgtgccttcagcaagcatctcttcactttctttcccttgtcaattgaaacatgaatgtttggctaactcatgatgtaaagtgtctgttaagttaataatacataatttaaagcacttagtctccacaaagcaatttagaaaaatcttcacttgttagatcccatgaagtacctatgaaattctcagcattgctataagcgtttgattttttttaaggaaacttcctgtttaatggaatctgaatccaagatttgctttaatttcactctattcttcccattttcccttattcttcttgttgtctctctaatt

SEQ ID NO: 392720 - DNA, 1000 bp, Homo Sapiens; identical to SEQ ID NO: 195049

SEQ ID NO: 392721 - DNA, 1000 bp, Homo Sapiens; identical to SEQ ID NO: 195050

SEQ ID NO: 392722 - DNA, 1000 bp, Homo Sapiens
gaagatgattgaaagtgtgaggaggctcgtgtgcaagggagaacagggttactatacatattagtgtatatatatacatacatatatatatatatatattgtacatatctaagtttgagtcattcaaactaggtgcaaaatgctgacttcagagtctgaattaacatctctgttcccatatccctgacctgctccctggtcaacgatgctatgaaatcctgaaatgacaggacatacatacatacaagaaaccacatatcaaattagatatgattttcctttgtgtgcaaagtcaaactgtcctagggttgccagtttgaagcatgttatttaaatgaaaaaaaaaatcagtgaaattctcgtgtgagaattctgcctagtttcttcctaaggttgtgtgcagtgttgaacggcgtctccgcaaggtgttggaggatctcattttagggcagtcaggagctgtgcttgctgagttaggtctagaagactcttccctgaaggcaacgggaacacgcgtgagggacgcgaccacacactaacagaggacacgtgcttcagagctgtttaaaactgctgcttgttttacacacacatcttgccttttttcaggctagctgcaataatttttttcttctgtaaaatattttgtaaacaacaacaaaaagctattataaaaagggggtaaaaaaaagaacgctggcattatgatcaggaaaacccattgtcatcgccgaccctccctcccgtcccaccacacgctgctgtcacgacgtaggtgcgaaagacctttttgtacagagatatattttttatgaagaatttgtaaaattattaaatatgctgtaattttttgattaatgtaggtacattgttaaaaaataaatgtttttacaatacagaactgtaattttcccaataatgtaaaatgtaccatctctagctgattttcagttccaatcctattacacatgtattaatattaaagtggcctgttaaaatg

SEQ ID NO: 392723 - DNA, 1000 bp, Homo Sapiens
gatttgtattctctggcatgctcttttcctctctctcatttttctgtagtatgcctgccctcctaccctgctatttctttacatctctctcatgcttaacatggatagctgtgtccagatcttctgtctgctcatccatgtgactcagagaggagggttctgggcaggggggccttgccggactgcatgagaggacatgagttttgctttctctgctctaatattttgcttaagccaagaatccttttcttagagatgttctatatgattcctgtcaggattttctagttttttttggattatagcttgttcatttcttttgtttttagtttggtttatatataatgagggaagaagatgattacattatttttgtcactttgccatcattgtttagaagtcatagaaagaatttttaaataggccaataagtcttaaacttgagtacttggcttagaagaaagtcaaaactccttcctttttgactaagtggtttgtttctggggagctcttaatttctatttttataatcattagcctataaggaaattgtgtcttccttgttctcagggtgatctgctgaccttgttcactcatgaagcatttgggtatcatacttatagtgtctgaaacataaactgtattgagctagacaaggtatagcctcctcttcaagtagcaaatactatcaaaagctataatgcagtaggagcaaggtggtccttgttccagtttttgtctcagttctgctgctgatgtaccatgatcttgggaaggtggtgtctcagtgtggagatctgacacattgttaccgtgcctcctggctggagggacttggagaacaatgcagttaagtagaatggttttaacaatacagagaaatttattcatttagataaaaatctgatttttagaactttaaaagctttgtacagtgtaaatagatttaatgtatttaacatgctttatcagcacaaataaaggattttaaaattttgtc

SEQ ID NO: 392724 - DNA, 1000 bp, Homo Sapiens; identical to SEQ ID NO: 283059

SEQ ID NO: 392725 - DNA, 1000 bp, Homo Sapiens
ctgctggtgtgtgccaccatgcccagctagttttttatttttcttgtagagatgggatatcgctacattgcccaggctggaactcctgggctcaagcagttccccctgtctcggcctcccaaagtgctgggatcgtaggcatgagccactgtgcccagccacaattatttaaaaatattagaattatatagccctggcttggtgccatggctcaatgcctgcgatctcagcactaaggcaggaggatcacttgagcccgggagttcaagaccagcctgctcaacataatgagaccctgtacacacacacacacacacacacacacacacacacacacaccccaccccacccccaccccgggcatggtggcatgcgcatgtagttccagctacttaggaggctgaggtgagaggactgcttgagtgcgtgcgcgcgcgcacgcacacacacacacacacacacagctacttaggaggctgaggtgagaggactgcttgaacacacacacacacacacacacccgggcatggtggcatgcgcatgtagttccagctacttaggaggctgaggtgagaggactgcttgagcccaggaggttgaggctacagtgagctgtcattgcaccactgcactccagcctgggtgacagaatgaaaccctgtgtcaaaaaaaataattatatagctctgtttctatttaattggaaaaacactgacagtatattacagcagtctagctattgcaaaaacattacattaaactagcaaccaggaagagggaacaagacaaaagtaacttcaaagtttacttttcctgtgggagatttggtgggtcagtggtcaggtgttttcacagaagaaaagccatcattaagatttattaggccgggcacagtggctcaagcctgtaattccagcactttgggaggccgaggagggcagttcacgaggtcaggagttcacaatcatcctggctaacacagtgaaaccccgtctctact

SEQ ID NO: 392726 - DNA, 1000 bp, Homo Sapiens
aagccgaggctccactaatctctttagtaaattaacttcaaaactcacaaggagtcgcaatgtatctgctgagcaaaaagatgaaaacaaagaagcaaagcctcgatccctacgcttcacctggagcatgaaaaccactagttcaatggatcccggggacatgatgcgggaaatccgcaaagtgttggacgccaataactgcgactatgagcagagggagcgcttcttgctcttctgcgtccacggagatgggcacgcggagaacctcgtgcagtgggaaatggaagtgtgcaagctgccaagactgtctctgaacggggtccggtttaagcggatatcggggacatccatagccttcaaaaatattgcttccaaaattgccaatgagctaaagctgtaacccagtgattatgatgtaaattaagtagcaattaaagtgttttcctgaacactgatggaaatgtatagaataatatttaggcaataacgtctgcatcttctaaatcatgaaattaaagtctgaggacgagagcacgcctgggagcgaaagctggccttttttctacgaatgcactacattaaagatgtgcaacctatgcgccccctgccctacttccgttaccctgagagtcggcgtgtggccccatctccatgtgcctcccgtctgggtgggtgtgagagtggacggtatgtgtgtgaagtggtgtatatggaagcatctccctacactggcagccagtcattactagtacctctgcgggagatcatccggtgctaaaacattacagttgccaaggaggaaaatactgaatgactgctaagaattaaccttaagaccagttcatagttaatacaggtttacagttcatgcctgtggttttgtgtttgttgttttgtgtttttttagtgcaaaaggtttaaatttatagttgtgaacattgcttgtgtgtgtttttctaagtagattcacaagataattaaaaattcactttttctcagt

SEQ ID NO: 392727 - DNA, 1000 bp, Homo Sapiens
ggccaaggtgggaggatcacctgatgtcgggagtttgagatcagactgaccaaaacggagaaacccagtctctactgaaaatataaaattagccatgcatggtggcacatgcctgtaatcccagctactcaggaggcttgaaccctggaggcagaggttgtggtgagtcgagatcattgcactccagcctgggcaataagagtgaaactctgtctccagaaaaaaaaaaaatttatttgtgtataactttaaaagcagatttttggaagcattgtaattacattaaaagtatacttgttccagctgcgtgtggtggctcatgcctgtaatcccaacactttgggaggccaaggcaggtggatcacgaggtcaggagttcaagaccatcttggccaagatggtgaaaccctgtctgtactaaaaatacaaaaattagccatgcatggtggccggcgcgtataatcccagctgcttgggaggctgaggcagagaattggaattgcttgaacctgggaggtggaggttgcagtgagccgaggttgcaccattgtccagcctgggcaacagagcaagactccatctcaaaaaaaaaaaagtgtatttgtttccttaaaaaaatttttctgaaaagtgggtaatgacataatacagctttcaaattactttatgctgttattttattcttattgtattcacatgtgaaagcatgtgatcaatttttgctgcatcagagatattagagatagttttttattaattgggcatttatgaccttttctataaaagtaaggacattaaaatgtaagatgcatgatgaaaatataagtggagaggctctttgtagttaacctatatgaagtaatgtataaggtaggtcagagtaatacttttctacattatagtgcaagaaataattattgataaaagtatattaaactaaattcgtatattttacttattgtacttttatgtaataaaatgcagtgcatttaaaaattgt

SEQ ID NO: 392728 - DNA, 1000 bp, Homo Sapiens
agactgttgacctctttgaaggcaaagacatggcagcagtgcagaggaccctgatggctttgggcagcttggcagtgaccaagaatgatgggcactaccgtggagatcccaactggtttatgaagtatgtggcccccagggagcttgggtctccgcatggggtgggaggtggcttgttctaaggagcttgcgggaaggattaggggaagcagatagccaagaaaggataaagtgagggtctgggatggggaataatgggtccttaatactccttgacccctccctttccaccctcctgcgctcagtctccctagcctatgaggcaagctagattagggaaaaaaagtgcaacaggaaggcaatgggattgggctaggacgtaacagagggatcagaaaacgggtggaaaacacacagttctaccaagtctttatcctggttcctcctcttctaggaaagcgcaggagcataagagggaattcacagagagccagctgcaggagggaaagcatgtcattggccttcagatgggcagcaacagaggggcctcccaggccggcatgacaggctacggacgacctcggcagatcatcagttagagcggagagggctagccctgagcccggccctcccccagctccttggctgcagccatcccgcttagcctgcctcacccacacccgtgtggtaccttcagccctggccaagctttgaggctctgtcactgagcaatggtaactgcacctgggcagctcctccctgtgcccccagcctcagcccaacttcttacccgaaagcatcactgccttggcccctccctcccggctgcccccatcacctctactgtctcctccctgggctaagcaggggagaagcgggctgggggtagcctggatgtgggccaagtccactgtcctccttggcggcaaaagcccattgaagaagaaccagcccagcctgccccctatcttgtcctggaatatttttggggttggaactc

SEQ ID NO: 392729 - DNA, 1000 bp, Homo Sapiens
caatgttttaagaagctttgtgtgatattcttccaaatgtagttaccaaatataatatggtagaaaaggctaaatcatacttaatgagcaaattgaagtaagcttttaaagtatatttctcttttggtgaaaggccaatggagacattgtgaatttaagtgaacatttgcctcaagatgttaactataaacacactgcatacaattttcttctgaataacaaatgaatgcttattgctgcatgatgtaagcaaaagtcattatttttcctattcatttgaaataagttatggcttaaaatgcttttggagtttatttctcaaaattaaaatctggtcacatgagctttagtttgttttctggtttaaaaaataaaaaggtttctcttaacagtatttccagtgacaatgcaaggtaagtatatcaaaggaaatcaacagttgtgcttgggggctttttgttatgggatattgatttcttgttttttttccgtaacattgtctgctgcaatttaaataaaaattacgacattttaagatatttcatagacaaaccaaacaaaaatatatgtttttactttaaagtgaatgtttttctcttcagctgatctaaaaatgaaagcaaaatatcttatgtagaaatattttgataatatttttacagtgagctttcccatgtttttatgtcttaagtttctttgctgcgtttatgtaggttgcacaagaacttttactcacttgtaattgtgcctcagactttttgaaagtctaccttctaaattgccccgacgatctagattctacatgttaccattggtttattcttgtgctttctgtatttaaaactttggctgtactaagcaaatgcaaggttataatttagctaatagtagtttacagacaattctgatgattatgatttcatttggtttaactaagctgtactagttcatttcataaggaaatgatactgtagacaaatgtaaataaagcctgtgagtc

SEQ ID NO: 392730 - DNA, 1000 bp, Homo Sapiens
gatgctaggctgggtgggcagggatgcacaaggctctactccatccccagagagctcccaaatgcagaaggattcaaaccccatgtgagcgtgcccacaccagccgcccctcctgagcatcagcctgttcagatgagggtacctgggcctctcgttcgcatctgtgttctcatggatgagcgctggtctttactgaccctcccaagcctccccactctgtgccttggctcatgctctttcctcctcccggcatgcccttctcccccatctccgtgtcctcgttcctcaaggtttagccgagacactgccacctccacatagctctccctgccctctttccccctctgggcctcagtggcctttctctgctccctctcagggtactgagcactttctgccttgtcctggagctatctgggtccattgcctgaccccccactcacctgtgtgctccccgtaggtagggccacttctgactgtgtgtccccagatccagcctggggttggggtaggattagtggcctgagtgaggagaggaaggccagctcccagaggactttactgaaccgtactgtgaatatgtccaagtcccaaagccaggtgaggtcagaccccactgcctgaggaagagggctggatgcagggccagctcaacctgaacaatcccctcccactcggcctttcctgtggggccttcaccagcctgctggggtcactgtcgtgcacttggctgcgtggctggttctattggccctaggtgctgctctgttgggtgggatgggagggggtagagggagccaggagcactgggttctccctgagaacactgggcacaagagtactggcctcttctatccctggcactgtcctttgcacttgtttggtggccccaatgtgagtcgctgtaaaaaatgctgccgttactattttctaagaaatgacttttctgtgaaccaacagtaacaaaaacctcagtaaccaaaataaagttctatatttt

SEQ ID NO: 392731 - DNA, 1000 bp, Homo Sapiens
gctctggtcagatccacagccacagaacgggcgctcgatcagcaagcggggcgtgagctgtcagtttgggcctgacgtcaccaaggccttcttggaagagaacaacctggactatatcatccgcagccacgaagtcaaggccgagggctacgaggtggctcacggaggccgctgtgtcaccgtcttctctgcccccaactactgcgaccagatggggaacaaagcctcctacatccacctccagggctctgacctacggcctcagttccaccagttcacagcagtggtgagtcacccctcagggcccctgccccttccatcccggcctggggacaaggaggctgagaccctggtaaggggcgggggtaggttctgccggtgggtgctcaggggctctgttctgacttctgtccatcccacctgccctggtcccacagcctcatcccaacgtcaagcccatggcctatgccaacacgctgctgcagctaggaatgatgtgaggtgacgggcggggcggcctgcatcccagggcccctccaatcccaccggacccaggccctgggctaggggcagagcaggccccgccccagggcaatgttggacccccttttactttgtaaagtttgtatttattcccctttaggtttgcagagggggtaggggcagagtcaggggctggccagagggtctgctccctggacagagaggaaggaggtggagcagctggggctgggggcacagcctgggcattctgtggggaggccgtcctcggggtggggtggggccgagtggctgccctgcccccctcatttgcatggctcctcccccactcaagcaatagggccccgccataggaagacccccagagagagggtcagcaggggggccccgcctgcgcctcccctcctatagccccatggtggggctaggctggggctcacccccctccccagctattttatgtctgtaattaaatatgttaaaataaagtcattatcgg

SEQ ID NO: 392732 - DNA, 1000 bp, Homo Sapiens; identical to SEQ ID NO: 195053

SEQ ID NO: 392733 - DNA, 1000 bp, Homo Sapiens; identical to SEQ ID NO: 283068

SEQ ID NO: 392734 - DNA, 1000 bp, Homo Sapiens; identical to SEQ ID NO: 195054

SEQ ID NO: 392735 - DNA, 1000 bp, Homo Sapiens
cccatgaacttctccaccctgccaatagacttagatataaaggttttaagagctttgttcccttaaaacaacttggggctgcagttgccaatggaaagttgtcttctgctgtaagtcataactgctaggaaagcttcagtacttttaccttcacaggggttccctttttttcccccgccaggcctttaacaaatacaagagagaggggttttgccttcagaatgttgataaggcccctttggctaagagaagaaaaatgaaaaagactagcaccagtaccgagacgcgcagcagttccagtgagagttcccattcttcttcctctcattctcacggtaaaactacacccaccaagacactgcagcccagcaatcctgccgacagcaataacccggagaccctcttccagttctcggactcagtagcttaggcatggtaggagtgtatcagtgatccattgcacctttattccctcagcatatgcctgaggcgatcttttatgcttttaaaaatgtttcccgttggtctcattggaatctgcctcctaatgatttttttcaggaaaacctgtttggttatcctcattcaaaagcactggacagagaatgttactgtgaatagagcacatattactctttttagcaacctagcatgatgccaacaagactattcttgaaagagcaaaggttcctgtaaatttaattagggctagatttgagctgcttgtaagtcacaggttttccagatgtctgccaacaagaaatgactcatactgtgatgataccttttgctttgccttgtggacaatgtgggtttttgaaatttgcacccttcaaacaatgatttatcagagaaaggggtctgttttcaaaaaagattctgtaatgaattttatgtgtggcatatacttatttcttgagagaagattttaacttattgtttttattttatggttacatatgatgataacctgctattattaaactttttctaaaaagtg

SEQ ID NO: 392736 - DNA, 1000 bp, Homo Sapiens
caacctgaagccaggggatgtggagcgccggctcagcgtggaggtgtgggactgggaccggacctcccgcaacgacttcatgggggccatgtcctttggcgtctcggagctgctcaaggcgcccgtggatggctggtacaagttactgaaccaggaggagggcgagtattacaatgtgccggtggccgatgctgacaactgcagcctcctccagaagtttgaggcttgtaactaccccctggaattgtatgaggtgagtagaaccagggcgttgaatggaggcagtttttgcctacttctctgatttcttattcctcctctgacttctgtcttcaattccccacacatgagttgagcacacatttgtgctaggcctgtcttgtgcttgctgaataatccaggatccagagatgaatctgaccctcaagcaactctccaaggtagggacacagtcacagatacttaaaatacaggaagatgtgctaaattagaggtagcccagggcactgaagaggcctaacggaggcactaatccagcctgggggagggtggtcagggaggacttccctgaggaggtgacgcctgaattgattcttgaggttttttaaaattttttaatttatttttatttttatttttatttttatttctgtcgcccaggctggagtgcaatggcacaatctcgcctcactgcaacctccagctcccgggttcaagcaattctcttgcctcagcctcctgagtagctgggattacaggtgaccgccaccacacccagctaattttttttttatttttagtagagatgggatttcgccatgttggccaggctgatctcaaactcccaaactcaggtgatccgcctgccttggcctcccaaagtgctgggattacaggcatgagccactgcgcccgaccgattcttgagttttttattttttttttgagacggagtctcgctgcactacagcctgggtgacagagcgagactctatctcag

SEQ ID NO: 392737 - DNA, 1000 bp, Homo Sapiens
caactcaaagatgagttctaattggcagacttctggcactggcacttgtcctcctgtttctatagaaactgggttggaagtcagagctgcacaaagggaaaggagactggatctaagttacccacgctggtctcgaattcctggccccaagtcatcctcctgcattggcctcccagggtgctgggattacaggtgtgagccatcatgccgaccaagcctttcattttacacacacacacacacacacacacacacacacactctttctctctctctcactcactcacttttttttttgttttttgagacagagcctcgctctgttgcccaggctggagtgagttgcgcaatctcggctcactgcaacctccgacccgcaggttcaagtgattctcttgcctcagcctcatgagttgctgggattataggtgcctaccaccacacccggctcatttttttgtatttttagtagagatggggtttcgccatgttggccaggttggtctcaaactcctgatctcaggtgatccgcctgcctcagccttctaaagtgcttggatttcactcactcttagaatgctgtttctgaaacattaagtattaaaatatagtcatgtggcacataacaggacaaacctcatgaggttatgatatgcatttttactgtatctatgtttagatacatgaatactttgtttggatacacgagtatctttctatgtttagatacagttgcctacagtactcagcacagtaacatgctgtatagatttgtagcctaggagcaataggctctaccatatagcctaggtgtgtgtaggtatactgttcatatgacaatgaaatcatctaacacatttctcagaatgtatccctgttaaataactcatgactatatttaatatattttcttaccagggcggggaattgtttagcatgttttagaattatttctatgtatttccatgcaaaattaggtgaaataaaacctggatgaaat

SEQ ID NO: 392738 - DNA, 1000 bp, Homo Sapiens; identical to SEQ ID NO: 283071

SEQ ID NO: 392739 - DNA, 1000 bp, Homo Sapiens
ggcggaggttgcagtgagctgagattgtgccactgcactccagcctgggtgacagagcaagactccgtttcagaaaaaaaaaaaaaactgtgtctcatcattgcactgttcttttaaaattgtatatatatatttttcttgcagatacactctggaaatgattaaactagtaccacataatgaaagtgcatggaactatttgaaagggattttgcaggatcgtggtctttccaaatatcctaatctgttaaatcaattacttgatttacaaccaagtcatagttccccctacctaattgcctttcttgtggatatctatgaagacatgctagaaaatcagtgtgacaataaggaagacattcttaataaagcattagagttatgtgaaatcctagctaaagaaaaggacactataagaaaggaatattggagatacattggaagatcccttcaaagcaaacacagcacagaaaatgactcaccaacaaatgtacagcaataacaccatccagaagaacttgatggaatgcttttattttttattaagggaccctgcaggagtttcacacgagagtggtccttccctttgcctgtggtgtaaaagtgcatcacacaggtattgctttttaacaagaactgatgctccttgggtgctgctgctactcagactagctctaagtaatgtgattcttctaaagcaaagtcattggatgggaggaggaagaaaaagtcccataaaggaacttttgtagtcttatcaacatataatctaatcccttagcatcagctcctccctcagtggtacatgcgtcaagatttgtagcagtaataactgcaggtcacttgtatgtaatggatgtgaggtagccgaagtttggttcagtaagcagggaatacagtcgttccatcagagctggtctgcacactcacattatcttgctatcactgtaaccaactaatgccaaaagaacggttttgtaataaaattatagctgtatct

SEQ ID NO: 392740 - DNA, 1000 bp, Homo Sapiens; identical to SEQ ID NO: 283074

SEQ ID NO: 392741 - DNA, 1000 bp, Homo Sapiens
ctgcttgccagacatgattgtctgccctgggttttgggttcaggcctcagagtcttcacggatgaggcatctcatgccacagccccagtcagagactcttattccattatcagatgactggaacagaaaaggggaacagtttctgctactgggatttgagtgcatctaacagcagcagcctccgtgtcgagccctcccttctgtgggcggggcggggacaagggggaggttggaaggcgctgagtgagccacctgccccttctccttcctcaggttgtctttctactcgggacactcttcctttgggatgtactgcatggtgttcttggtgctgtatgtgcaggcacgactctgttggaagtgggcacggctgctgcgacccacagtccagttcttcctggtggcctttgccctctacgtgggctacacccgcgtgtctgattacaaacaccactggagcgatgtccttgttggcctcctgcagggggcactggtggctgccctcactgtctgctacatctcagacttcttcaaagcccgacccccacagcactgtctgaaggaggaggagctggaacggaagcccagcctgtcactgacgttgaccctgggcgaggctgaccacaaccactatggatacccgcactcctcctcctgaggccggaccccgcccaggcagggagctgctgtgagtccagctgaggcccacccaggtggtccctccagccctggttaggcactgagggctctggacgggctccaggaaccctgggctgatgggagcagtgagcgggctccgctgccccctgccctgcactggaccaggagtctggagatgcctgggtagccctcagcatttggaggggaacctgttcccgtcggtccccaaatatccccttctttttatggggttaaggaagggaccgagagatcagatagttgctgttttgtaaaatgtaatgtatatgtggtttttagtaaaatagggcacctgtttccc

SEQ ID NO: 392742 - DNA, 1000 bp, Homo Sapiens
actccttaatggctagttctatgcctcctttaagactcacctcagttcaataatcctctcctccaggaagccttccctaaccaccccttccttcagtcttgaataattgcctctcctcagttctcactcctacatattacacttatcacactaaactctaatcattgaataacttatctgtgtccctgactagagcttcagttctttaaggccagggactgggactttttcacctttgtaccccagcacctatctagcacagcatctgactcaatgtttaatgaaaaagcaaatgaacaaaaaatgaatggatgaatgaatgaccttcattatatgaaataaggcccagtatatggggacaggtcatgcctatttgctgttatgtgttcatagaagaggagaagatgatcgatgtctgccaagaaggcctaagggtgaggagtatattttacagttgtttttgtagttgaagttgtttttggtggcattgttgctgtttttcccccaacagtggggatgactctattcattcaggcacacctcttgccaggtaccactttggggccaaaggcatatatggtaacatagctgggcatggttcaaggttgagcaaagcaaccaattctcccccaagatgaaatccctggatggtgctatggctgccttctgaaagcaatttagaaagctctcacctgagtcttccttgttgtaggagttccatttgttatcttcccctaaaattcctggaagttttgttgggcctattcactggatgtcatatggtcattttcagatttattttttagaactctttctagcttcttgaaaacagagcatgcaggaaaagaaaaaggatggcagaagacagacatagggaaatgctttcctacataaatttagcctaaaagcacaaaacaataatcatctttttaaaagcaatgaaaagcatgcaaaatattatggtacatgtcataattttaaaagcaacatctagatcgcg

SEQ ID NO: 392743 - DNA, 1000 bp, Homo Sapiens
ggcaggctgagggcaggtctccagccagagtggtgccccttcttcttgtcctgaggtggacagtacactagatgaatcgggctcctccatggtcagcttttccctataaggtaaaattataccagatatcctctttgtaaaactctgggtgagggcaggggtgcactctcactgctgaggctgttcaaagtaagatcaaagctcctgatataattcaagaaaaaaaatgagggtataaaaaactggagcaaggagtcaaaaatcactgtaactggcagatgacataatctaggaagttcttagagagttttctacaaaaccataaggattagtaacaaaatgcattaagatgttaggttaaaaacatatataaatacaaacaagctttcctacatacaaccaatactaaccctgaaatttccccataaaatatttcatgttaattttttataatcactattggaacctatttttaacactaaaattagtagatctaagaaattactatttatggcattaacattgtgaaaggaaaataaatctttttataaataaatctttgaaaataaatcaattcaaagtcatccctctgctcactgagataaatgcatatctgattttgtaaaataaatatctgaaaataattcagtcatccttcttcttactcagataaatgcatatctgattgcctcctttggaaaggctaatcggaaactcaaaagaatacaaccatttgtcttttatctacttatgaccttgaagcaaacccccctgcttcaagttgtctcatcattgctttgagttgtcccacctttccagatcgaaccaatgttcatcttacatatgttgatttgtgtctcatgtctccctaaaaagcataaaaccaacctgtgctctgaccaccctgccaccctgggcacaggtcatcaggacctcctgaggccgtgtcacaggcatgcatccctaactttggtaaaataaacttcctaaattgactgag

SEQ ID NO: 392744 - DNA, 1000 bp, Homo Sapiens
aagcggcccagcagactgaggccctggccaggtaacctgatggctgagacagaaagggcaggggcgtcctgggatgtggccctccctcgaggccctctgctccctctttgctgcccgtagcactgggagtcaggcccagtctgctccaaccccggcctgggatgaggacactgcacaaattggccccaagagaattaggaaagctgccaaaagagagctgatgccttgtgacttccctggctgtggaaggatcttctccaaccggcagtatttgaatcaccacaaaaagtaccagcacatccaccagaagtctttctcctgcccagagccagcctgtgggaagtctttcaactttaagaaacacctgaaggagcacatgaagctgcacagtgacacccgggactacatctgtgagttctgcgcccggtctttccgcactagcagcaaccttgtcatccacagacgtatccacactggagaaaaacccctgcagtgtgagatatgcgggtttacctgccgccagaaggcttccctgaactggcaccagcgcaagcatgcagagacggtggctgccttgcgcttcccctgtgaattctgcggcaagcgctttgagaagccagacagtgttgcagcccaccgtagcaaaagtcacccagccctgcttctagcccctcaagagtcacccagtggtcccctagagccctgtcccagcatctctgcccctgggcctctgggatccagcgaggggtccaggccctctgcatctcctcaggctccaaccctgcttcctcagcaatgagctctcctccagctttggctttgggaagccagactccagggactgaaaaggagcaacaaggagagggtctgcttgagaaatgccagatgcttggtccccaggaactaaggcgacagagtgcagggtgggggcaagactgggctgtaggggagctggactactttagtcttcctaaaggacaaaataaacagtattttatgc

SEQ ID NO: 392745 - DNA, 1000 bp, Homo Sapiens
cttcacatctaccactagacacccccaaaatctgttatagacatttatggatacatttcctctaaacacaacagggcacagcaaatacgacttcatttggcttcgagttccccaggcgctgtagacacaacatgaatcgggctctctgctctctccttagggagctcgagtcctggtggggagaacaggagtaaacaaggacttgacaaagctgaagagttatcagtcctttgacaaggacaggtggggcagggagcaagacaggtaggctggaagaacagttattggcaagtatgcagagccgtgaacgtcatggcatgtccaaggaattaaatgggagttcatttgggctggggtggaggctgggatcagaccgtggtgggccttcaagctaaggagcttcctaggtgaaaggggagatgtgagccttctctggagggaagtttcatgattgcatctataatgaatatattgcctgttttgtgaatactgacacatgtccatacctaaaacactcctgagttaagtcccatccttcccacaaacagcttcctggctggtacccatgataacaattgagctgaacctggggacccctggttggggaacaggtgagttctatttgagacttccagccctagaaagctgcctccgtccagaaatgcctctcacaccaggagctcggccctctctttgtagctgtgactgtcaccctctcaggctttgtctcatccttcattctgaataagatggcagtgttctcctctggggcctgatccacctctacaccagcccaggaagccccatctgtgcctgccctcaggtggtccaccagtctccccctttggttcccttccagtctcttccccctttctatcccaatcaccaatagaaatgctaacatccctgcctggtagccagactagcccactaaagctcccctgtaaatgggggctccattagttctgctgccgagactaataaagatttggttggctct

SEQ ID NO: 392746 - DNA, 1000 bp, Homo Sapiens
tccatgacagcaaggacttgatgttgttcatcttgttgtcttgagtgcctagaactgttcctgccatgtactaaatatgctcaactgattccaactactttagcatatactactcgagcacatgacagtcttttgctgaggtgctttggcattctttctaaaagatagatgggtgtttcattaatgtggtatccatttgggtttgtgagttcttggatgatgccagtagtatgtaagttaggtaaaatatttcctattttcctcactttggagtttgttttccttatttaaaagggactttgaaatttaagtatgtactgtagctttaaaactgcatttctgcaaaagcacgtgcatttttaaacaatgtaatctttatctttgcagttatgatatgactctgacaaatgcttgtattgccttaagtcaaagatggattactgccaaagaagatgatttaaattcattcaatgccacagacctgaaggatctctcttctcatcaattgaatgagtttttagcacagacgctccagagggcacctcttccattggggcacataaagcgaatgcaagaggtgtacaacttcaatgccattaacaattctgaaatacgattcagatggctgcggctctgcattcaatccaagtgggaggacgcaattcctttggcgctaaagatggcaactgaacaaggaagaatgaagtttacccggcccttattcaaggatcttgctgcctttgacaaatcccatgatcaagctgtccgaacctaccaagagcacaaagcaagcatgcatcccgtgactgcaatgctggtggggaaagacttaaaagtggattaaagacctgcgtattgatgattttagagatttctcttttttaaatggaattcgtaaagaaatataaaacttcagctcacaattaaaactgtctttttagttttggctttttattgttttgttggtgattttactgaaataaagttgagctacttcttc

SEQ ID NO: 392747 - DNA, 1000 bp, Homo Sapiens; identical to SEQ ID NO: 283075

SEQ ID NO: 392748 - DNA, 1000 bp, Homo Sapiens; identical to SEQ ID NO: 283078

SEQ ID NO: 392749 - DNA, 1000 bp, Homo Sapiens; identical to SEQ ID NO: 195055

SEQ ID NO: 392750 - DNA, 1000 bp, Homo Sapiens
ccggctggagtgcatatctagagggtggtacccaaagcccctcacagtgtggagggacccctacggtggggttgcgcctgccctgaaagaggtctccatgcctgatgcagacggcctcttcatggtcaccacggctgtgatcatcagagacaagtctgtgaggaacatgtcctgctctatcaacaacaccctgctcggccagaagaaagaaagtgtcatttttattccagaatcctttatgcccagtgtgtctccctgtgcagtggccctgcctatcattgtggttattctgatgatacccattgccgtatgcatctattggatcaacaaactccaaaaggaaaaaaagattctgtcaggggaaaaggagtttgaacgggaaacaagagaaattgctctaaaggaactggagaaagaacgtgtgcaaaaagaggaagaacttcaagtaaaagagaaacttcaagaagaattgcgatggagaagaacattcttacatgctgggccagtttgaagctttatatatcatttaccaaacttagggtggtgagtgggtgctgatggcagcctggtttgaaaatctccactggagagaagacacagcaggattcagatgcaaatgaccagagcactccaagttggaaagaactgctgagcgggtctgtagagcccatcgctctctcctgtctattcatcagctaggctgaagctcctgacagactcacaccagtatcttgctgctccagaaaggtcgaagatggcagttttcccaaactccggcttgcccagatgtctgctcaccctcattcttctccagctgcccaagctggtttcagataggtctctctctctggcctgcagagttaaaacatctcaataaatataaagtataaaaagaagctggagcccaaccacttcggcacatgttcacaggatctcggggctgtgtcacaagccactgggcactcatatctggctgagaataaatctcttgcaatatttt

SEQ ID NO: 392751 - DNA, 1000 bp, Homo Sapiens
agcgggagctgcgcatcgagaccatcgctgcctcctccacccccacacccatccgaaagcagtccaagcggcgctccaacatcttcacgatatgtgccactgtttccaacttttcatcaacaaaaaggcctttccaactccttccaaattagaagaccagttggtgacacacagcacctctggacatgccccctgtgcggggccggaggcgggccgggccctgggactgctctcagatgagaagcggccgccgagctccccactccagagacccacgggaacctttgtaactaaccccacccccagggaaggctaggagcgccggagcccgcgctgggggctgccggggaccaggcccggccggacgctgcaggctcgctgcatggagaagaaggcagctcggccccacgcccggcgctggccagcgcgacgaggcccagaggggcgggggagtccaagcccgcccggcccggctgctcctggggggcgctttcctgcccctcccctcctctgctccttcctgcatggacctctgccgttcctgctcctgctccggaagccgccgccgccgccgcgcttgccttgccccctctttttggcctccccctatttcctaggatccgcattcgggtggactctgccccaggagcttgacagggtgcagggcctcttctggcctctctcctctctctgtccatccactgtgccccttgggccacgccgacgcgctcggtgccacgtgccgtgtggtgtctgtgccgcagacgggccatctgcccgctcacttgtggactttgcgctcccggttgtcgcgccctgtgctcccgaccagcagccccaccgtccacctcctcgcccccgcttctcttacgcccccgccccgggcgtgctcctcgcgccctcggcctctctgtccttgctcttttgtaaggggcgggcccggctcagtgacctgtgctgctctgtatggtgccgtgtgtaagaataaacccgttggaat

SEQ ID NO: 392752 - DNA, 1000 bp, Homo Sapiens
gtaagcaagcaggaagaacaggcttttgtcctgagtgcaagtgttgctagcgtaggttggaccatataaaattgtggatattcaactggtttgaccccaaaaaagcaacattttcacatagatcaacctaatagtagttccattcaggatgccaaccctgagtctctaccttaaggcagaacacctgaaggggctagagggatcccaggttagtagtgccactggctcacagcagaaactgacatgaagcctctccagaggaaagcatccacaatgtggacaggatccccacagattaaacatagagaaatatgaatccacaaagatcacaaagcatgtacaccaccatgagtgagagtcagctgaaacacaaatagcagacttagacccccagaggacttcagaagttaaaagatcacgcagattagaatctcatagaccaggtttcctgaacacaatgcaattgagttagaaatcaataacaaaagataaatcttaaattcccattcatttggaaacttaaaaactatttctaaataatttataggccataaacaaaatcaaaatggaaatttaaaaatccttggaattgataaaatgaaatatatcacaaaacttacgagatgtagggaaagtggggcttcaagggaaatctatagcactaatgcttatattagaaaagaaggaagcctaaaaattaatgattaaacattccatctaagaagttagagccgggtacagtggctcacacctgtaatcccagcactttggaaggccaaggccagaggattacttaagcccaagagtttgagaccagcctgggcaacatggtgaaaccccatctgtacaaaaaatacaaaaattaactgggcatgagggcatttgcctgtggtcctagctacttaggaggctgaggtcagattacctgagcccagggaagttgtgagccatgctttcaacactgtactccagcctgggcaacagagtgagaccctgtctc

SEQ ID NO: 392753 - DNA, 1000 bp, Homo Sapiens
ggttagtaaaatcatttctattccttatttataggattagtataggaaacattatacttttctctgtacagttttcttttatcatcccccagatttaaagcagtcatctctatggatatgacttctgaatggctctccagaatttcaatcttcattacttctagcatagtaaaactaaatttctcattattccccccaaactgctgtcacttcttatattcctatttctgctattctctgagatactctctgatccttgtctgtgttgaattttctttctctctgatgtctactccatagactgccagaaaaacctgttgatcaaacaaagctgtttattagcttattacagtaagagaaaacccactttgactgtgtcttagtaatatctcacaagggagaagtcaggagaggatattcataaagttttaggacctgggctaggtgattttgaggttggtcttgcgtggtagaaaactggttgttattgaacaaagttcattacttaagagttttggattggcagccttaagacagcagccacactgttgactatacacttagtatttatatgtgtattttatttctctaaaaaaagtcaggaccagtttatagcattgcagctatctgttctttgaagatttggcagaatttttctatgaaaccacctgggattggtacttttttgtggtgtagttcctggataagtttttctttttttcttctagggaaatcagtcttttttaaaccttttatctaacagggtcaattttggtaaacccttttttcttataaaattatcaatttcatctaacttttcaatttatttgcacagaggtctggaaagtaagatctgggcacagagccatgtgcctgtagtcccagctactcagaaggctgaggcaggaggataactggggcccaggagtgcagggctgcagtgagctgtgattgtaccactgcactccagcctgagcaacagagcaagaccatgtctctt

SEQ ID NO: 392754 - DNA, 1000 bp, Homo Sapiens
gcaagagcaaggacaagaggaagagcaggaagagaagcagagaggagagccgcagtcgcagtcgcagccgcagcaagagtgagaggagcagaaagcgaggcagcaagcgagacagcaaggcgggcagcagcaagaagaagaagaaggaagacactgaccgctcccagtccagatctccatcccgctccgtgtcaaaggagcgggaacatgccaagtctgaatccagccagagggaaggtcgaggagagagtgagaatgctggcaccaatcaggagacccggtccaggtcgagatccaattccaaatcgaaaccaaaccttccatcagaatcacgctccagatcaaagtcagcttcaaaaacccgatctcggtccaagtctagatccaggtctgcttccagatcgccctcccgatctagatctaggtcccactcaaggtcctaactggctatggccacagctggaactacccgagaagtcttttgtacatgtttggtagccgtagcacaagtgattggagtagaacatgtcactgctgtacatttttaactcccctaatggtgtgtctataattgttaaatctaagtgcttcctctcagtaaagcctcctggcaccaggccttcctgctcgactgaaaaaaattttctctttgaaaatccccttttactcatggcccacagtagaatatccaaaacgccttggctttcaggcctggcctttcctacagggagctcagtaacctggacggctctaaggctggaatgaccacataggtaggtatggtgagttcaaccatttttgctcttgaattgatgcccttcgatgtatgccatttagtgaaagtgctaagtcttaagtttcctaccactttggtttcatatttttggacttaacaaagttgtgaatagcacagtcgaggaaaattgatacctgcagtaacccataggaaataaactgtagagttccatattctggtattgtgattatattgttttatatt

SEQ ID NO: 392755 - DNA, 1000 bp, Homo Sapiens
ccttctacgagatggcgtccttctctgagaaccgtgcccttcgactgctccaagaatcaggaaacggctttgtccgccacaacgtggggcacctgagcagaatctacccggctggatggagaacagactcctccaactacagccccgtggagatgtggaatgggggctgccagatcgtggccctgaatttccagacacctgggccagagatggacgtgtaccagggccgcttccaggacaacggggcctgtgggtacgtgctgaagcccgccttcctgcgagaccccaacggcacctttaacccccgcgccctggctcaggggccctggtgggcacggaagcggctcaacatcagggtcatttcggggcagcagctgccaaaagtcaacaagaataagaattcaattgtggaccccaaagtgacagtggagatccatggcgtgagccgggacgtggccagccgccagactgctgtcatcaccaacaatggtttcaacccatggtgggacacggagtttgcgtttgaggtagttgtgcctgaccttgccctcatccgcttcttggtggaagattatgatgcctcctccaagaatgacttcattggccagagtaccatccccttgaacagcctcaagcaaggataccgccatgtccacctcatgtctaagaacggggaccagcatccatcagccaccctctttgtgaagatctccctccaggactaggctggaggaagccagtggggtcccccctgagtgggctgggccctctgtccacatgtggggacagggctggtgtggctgctcccagcctcttgctcagagctaggcccccaaattgccttcagccctaacatagtgtctgctgctgcctccctggggaccaggagctagcccagtccctggagctgtccttcattccgttaggaataacactgcagccctctccaccctccggccagcgagtggtcaaggatttttataaaaatcacgataagatt

SEQ ID NO: 392756 - DNA, 1000 bp, Homo Sapiens
agataagggtccaacttcattcttttgcatgtggatatccagtttccccaacaccatttgttgaaaagactctgcattccccattgagtgatcttggtaccttgttgaaaatcactggctatatacacgaatgtttatttatggcctattcttttccaatggtcgatgtcagtctttatgccagtaccacactcttttagttactgtagctttgtagcaagttacaagattaggaagtatgagacctccaacttttttattcttttttcaatattgtttcgtctgtacagggtcatttaagattccatgtgaattttaggatgaaattttctatttttgcaaaaaactctgggattttgatagggattgcattgaatctgtagatccctttgagtagcattgtcttaacagtaagtcttccaatctgttaaccagaatatctttccatttatttatctgtcttaatttctttcagcatgttttgtagttttcactgggcaagtcttcctcagttaagtttaattcttaagtattttactctttttggtactactgtaagtagatctttctcagtttcctttttggattgttcaatgttggcatataaaagtgtaagtgccaggcacagtgtcacatgcctgtagttccagctactcaggaggctgagacaggaggattgcttgggcccaggagtttgagatttcagcatgctatgattgctcctgtgaatagccactgcactccagcctgggcaacataacaagacctcatttcgtaaaaaacacataatactgatttttgtgcattggttttgtatcctttgctgaatttgtttattctaacagttttttggggggtgtgtgggatctaggattttctagatacaatcatgtcatttgctaacagattttacttcttccaaatttggatgtcttttatttcttgttcttgcctaattgctgtacctagaacttcaaatactgtgttgaaggaaggaggc

SEQ ID NO: 392757 - DNA, 1000 bp, Homo Sapiens; identical to SEQ ID NO: 283085

SEQ ID NO: 392758 - DNA, 1000 bp, Homo Sapiens
ttcaagtaggctgttgagcagttgcaggactagtgaatggaatgcttcccccttccctcctttagagtcccattcttatggttagaatttctcctactacacaaacacttcccagtactctttgcttgtcccttaaaagtgggtctttctcaaagctgggattttagagtcctttttgcagcctttctgacaaggaacatctgtttactaacaagcaacctatctctccaatccagtaatcccatttcctgcaaaaccgcattaagtgcctttccccaccctcccatgttcttaatacctggaaaacttaactcatttctttaccctccaaaatataaaatctctggttcattaactgggtcagtctttttagaacttttttctccccaaagaaatatagtactgaggcattaaaacaggagtaactggaagatcagctatttcccaagcagcttccatagctaagagcagtctgcaagtatatgtaccaattacaaaatgaaagttataatctaccggatttaaaatcgtaatttctattctgaattaaatgatttaatacaggttgttttctgtcttgttttagtaaccctccctcagtgtagaatttgtaatcaacctttgtcataaatacacatgccaaactattggaaagtaatttgccagatgaatggatagggtaatgtattaagagtgagacagcagttctgagcccctggctggagtctagtagaggaactgccagaggatcaatatcaacatagacttttagatataattaaaacctattatctaagtcagtattcaaatttgtcatgcttaatctctttgaagacaagaaatgctcttctggttactcccaaagtacctgtacacattctagatctgcactgttacataattataaattggtatttgctaggtagataaaacttaagacattctgaaacatttctatttgtactttttcaataaacttgactatatcaagatgggaact

SEQ ID NO: 392759 - DNA, 1000 bp, Homo Sapiens
ttgaactttgatgggggattcagttctggaaaagaatttggtattttccagtctgctaggaccaattaccttgaaatattttaaaatctcagtaaatagttattgctgaaatggctgttggcagttcttattatgattcagagaagagcaaatagaccttaacttcattttgaaaaagaccaaattaccatacccgagtgagtaatgacaggactacaactaaaacataaacaacattaatgatgaccataaaaagtcacaaaattgctaaatgttataatttagagttgacataaaaattgatggccaggcatggtggctcacgcctgtaatcccagaactatgtgaggctgaggcaggtggatcacttgaggtcaggagttcaacaccagcctggccaacatggtgaaaccctgtctctactaaaaatacaaaaattagccgggcatggtggtaggggcctgtaacccagctactcgtgaggccaaggcaggagaattgcttgagcctgcagcagctgcagtaagccaagatcatgctgtgcctcaaggaaaaaaaaaattaatgtttactgatatttgttgaagtcctacaacatcacctctgagaataggagaaatgaagcaacagttgtgtctagatgtcagaggcatggctgggcctccatctctgcctaagggagatataaaagagttcaaactattgcccatgttccccagggtcagaagttctaattatgatgatagaggctgggttgtaagtagtaagtgaagggtagcagaatatgccatctttggcataagaagtattttgagttgaagacaattgagaaaaaaaatagattaaaaacaaacaaacacctctgccctctccctatttgcctaaaagcaggatatgaaattgtgaaggtgtcttcttactcggggaagaacaaaagttagtcaccagagactttagactcttatcagcctggacatagcaccagagaagtctttttttt

SEQ ID NO: 392760 - DNA, 1000 bp, Homo Sapiens
gaagttcagattggcatttgaagtattgagtgtatgggatctctaaggatttcttagattttatatttaaatattttttaaaccttagaggagtcaacaaactggctcttgattttcagcaccctactctcatgaaaaaagcctgaaaggaccctttcccttataagtaatttaatccaatttctccccattttatagatgaggaaactgaggctcagatcagatgagaactcacttaaatccactcaatgtgtagatggtagagctgggactagcaacattgctgcagcccattgttggcctctctcttcactttatcattgcccaagaatgaggatatgcagtaaacagaattcaggcaagatacctctaagctgttttgaaccctctgatattttgtatttatgtgtttgtctgtctccccctactagaatgtaagctccatggggcagggacttcactgtattttgttcatagtgtatccccagagcctggaccagtgcttggcacataggagatggcaataaatgcttgtagaattaataaacaaggtgaaggagagagctaatgaaatgaaaatcttagtctcatataagaagtcttactactgctttctatggcaagttccttttctattgcatcttcccaaagacaagatgctcatctgcaaaggggtgataagatttacttggagggattttatggaaaattcagtgcaataattgcttttttttttttttttgcagtagcagtttacatagtacagcattctgcaaaaattgcatgaaatgtggacacaagatgtactgtatgacttaattacctgtcattctctgacaccattactacctactagaagttcaaataatttatctttaacattgcaatatctgataaactttttaaaatgtaaataattcaaagccttgaaaatctatcatgaatctgctcaacatttcaaagtgactattttgaaatgcctataaatgctatatacctg

SEQ ID NO: 392761 - DNA, 1000 bp, Homo Sapiens
ccgacaagggctcctggatgcctaccatgatggggcctgctgttccctgagcattcctttcattcctcagaaccctgcccgaagcagcttagccgagtatttcaaggatagcagaaatgtgaagaagcttaaagaccctaccttgcggttccggctgctgaagcacacgcgtctcaacgttgttgccttcctcaatgagttgcccaaaacccagcacgacgtcaattccttcgtggtagacataagcgcccagacaagcacattgctgtgtttttctgtcaatggagtcttcaaggaagtggacggaaagtcccgggattctttgcgagccttcacccggacattcattgctgttcctgctagcaattcagggctatgtattgtaaatgatgagctatttgtgcggaatgccagttctgaagagatccaaagagccttcgctatgcctgcacccacgccttcctccagcccggtgcccaccctctctccagagcagcaggaaatgttgcaagcattctctacccagtctggcatgaacctcgagtggtcccagaagtgccttcaggacaacaactgggactacaccagatctgcccaggccttcactcatctcaaggccaagggcgagatcccagaagtggcattcatgaagtgatcgtagtcatgcctcagaagcagtcccccctgtaaatagtccttggatattaccgtctggttgtcgtctgtcatctcctcctgtctggcccgaggccgccccgtgactgtgaccgagggagggagggctgcctgatccctctcctcgcctgccttctggaagacttcagaagattgagcctcactggtgccaggaagccaaagcttactttgtagaactgacactaaactacccgaaggacttaggtgctttgtgtacttaaccccaggacctccttactttttaatataaagagtgatgttgtatttcgtgttctgcactttttaatataaagagtgatgttgt

SEQ ID NO: 392762 - DNA, 1000 bp, Homo Sapiens; identical to SEQ ID NO: 114991

SEQ ID NO: 392763 - DNA, 1000 bp, Homo Sapiens
ctaggaaggcaaggcaacctttttgcttcttcaatgctcaagtgaagtcacatctacctattactcccagcattgattgactataagaaaggatgcacctgtactctctgctctacagcctcctcttctcattactatttttagcattctccaggcttttactcaagtttaattttgcatgagggttttactaaaattttatatatctccccttccttctcctcgagtcacataatatcagtaccttgttctggtcactgttgggagcttttagatgagacatctttccaggagtagaagggttagtatggaattgattgtgattcttttgggggaagggggttactatccctttggcttaaagccaaatgctgctcatggaatgaacgatctttctctagtttcattcaactgatttccatgagacaatgacagaaaccctacctatctgataagattggcttgtctcagggtgggaagtgggagggtggggcgaagaaaggattacaccagaagatttaggatgcctccttctaagaactggaagttctcattccccattatgaactgagctataatatggagctttcataaaaatgggatgcattgaggacagaactagtgatgggagtatgtgtagctttgatttggatgattaggtctttaatagtgttgagtggcacaaccttgtaaatgtgaaagtacaacgcatatttatctctgatgtgccattggctgaaccttgggttaatttggggtcaaagtcagtttttcttttaaaattgaattcattctgatgcttgacccccatactcccaaccttgtccagtggagcccaacttccaaaggtcaatatgtcgtcctttggcatcccaactaacaataaagaataggctataagggaagatggtcaatattttctgtggtaagaaaagccacagtcattttttctttgcactttggatgctgaaattttcccatggaacacagccacatctag

SEQ ID NO: 392764 - DNA, 1000 bp, Homo Sapiens
tgtccctggctcccgtctatccgggattttagcgtttcctctgtagttttcaagcactgtctcatatgactctcgcaccagcgagaggccaggggagatggtgtctgcctgttaaagaggggccggctggtccacataggtcaagtgacttggccaaggtcaccagagcagagttttgaacttgagctgtctgactcaactgcctgggaagtgcctgcccctcctctggcatccagggagcatgtcctggggctctggctgggacatagccggacacctgcgggccctttacgtctctaaagagagaaagagggaagggcccctgtctagggggtggtttccctccagatgccacccctccgaggtccccttctgcttcttcttgcggtagccagggagggcagcccacgggcaggaagcgggggtgggggtgcagagtcagaggtgcacgtggacagagacagagagacagggacacgtgggcagagacggataaagacagagacccagagaaagccagatatgttgacagacacagagacagacgccagagaggaaggcagacaaagagacgggtggagacaaagactcccaccaagagacgcagaaggaagatgccgacggtaaagacaaaacaggagacgcgcgcaaggagcaggtcagagcccaggctcgctgagagaggaagggctgggctggggcagcccggaggcagagagaccgagagtgcggggcgggctgcccgggcctcactcgggccccgcggccgcctttataaggcggcgggggtggtggcccgggccgcgttgcgctcccgccactccgcgcccgctatcctggctccgtgctcccacgcgcttgtgcctggacggaccctcgccagtgctctgcgcaggtaaggattcgacgctgccccgcgccctggttccccagggccccagcggacgtggtccatccccttctgcatcctccgctggccccgtggttgaactttaatggc

SEQ ID NO: 392765 - DNA, 1000 bp, Homo Sapiens
taggtttatttttagttttttaaggaaactccaggctcttctgtatcagtttacattcctacctaaagtacaagatttttctcttttctccacaccctctgcagcatttattgtttgtagattttgtgatgatggccgtcctgacgccttcagtgataacatcattttggttttcaagcttaactttgaatactgcagaaagttgggaatttgtagtcagggagcagaaggagggatgagaggataatctgttgatggaccagtgctaaatggggacatcagcggtgaggagattcttgctcaactgacctaacagggttcttgtttaaggcggccaaggactggtacatcaaaggtgtgaaatgtctgggaacatacatgtctgtgaacaataaaactccataaaaattttaaaaatagataaataaataaatgaatataaaaaaaagtattctggaatagaatctaaaaaaagagtgaatatatgtatatgtataattaattatattttctgtacagcagacactaacacaacactgtaaatcaactatactccaataaaaattaatttaaaaaaaaaaaagatgtgaaatgaggaaatggttcaaataccgagagtgatcagctatcaagggtggacgattctgtttaaactgatttagcaggattcttgcgaaaactgagctatgcaagcccaccaaggacggaggccaagtttgagacctcatggggaagagacccaaaggagtctgactaaggttgggtcaagaagagtgccttttgtccacacaggacagcctctggggccgagagcagtgtggagacaggcggagagggtctaggcgggtcagcccgtggcatatcttttaggggattaatgaactcactccttcatgaagtggtaaagcaaaacttgagtaaaatcagcttcttagaaaactgtaaagattacagggatatgtctgcctgtgtcaaaaagtcctcacagtttgtacatgaa

SEQ ID NO: 392766 - DNA, 1000 bp, Homo Sapiens; identical to SEQ ID NO: 283093

SEQ ID NO: 392767 - DNA, 1000 bp, Homo Sapiens; identical to SEQ ID NO: 283096

SEQ ID NO: 392768 - DNA, 199 bp, Homo Sapiens
  misc_feature (45)..(45): n is a, c, g, or t
  misc_feature (79)..(79): n is a, c, g, or t
  misc_feature (83)..(83): n is a, c, g, or t
  misc_feature (87)..(87): n is a, c, g, or t
  misc_feature (94)..(94): n is a, c, g, or t
  misc_feature (103)..(103): n is a, c, g, or t
  misc_feature (109)..(109): n is a, c, g, or t
  misc_feature (135)..(135): n is a, c, g, or t
  misc_feature (138)..(138): n is a, c, g, or t
  misc_feature (145)..(145): n is a, c, g, or t
  misc_feature (152)..(152): n is a, c, g, or t
  misc_feature (161)..(161): n is a, c, g, or t
  misc_feature (179)..(179): n is a, c, g, or t
gtgcccactgccctccagcctggtgacagagtgagactccatctnaataaataaataaataaataaataaataaataantaantaantcatgtnctaccaaantatganctactctcccaaactataagccaaanttncaattangtaaaantagtcaaantgaaagcccacacttccngtcctgttttataagcaatt

SEQ ID NO: 392769 - DNA, 1000 bp, Homo Sapiens; identical to SEQ ID NO: 283097

SEQ ID NO: 392770 - DNA, 1000 bp, Homo Sapiens; identical to SEQ ID NO: 206975

SEQ ID NO: 392771 - DNA, 1000 bp, Homo Sapiens; identical to SEQ ID NO: 283101

SEQ ID NO: 392772 - DNA, 1000 bp, Homo Sapiens
taaaaatacaaaaaaattagctgggcatggtggcgcatacctgtaatcccagctactcgggaagctgaggcaggagaatcgcttgaaaccagaaggcggaggttgcagtgagccaggatcacgccactgcactccagcctgggcaacaagagcgaaactccatctcaaaaaaaaaaaaaaaaaagtacattgaattggaaagtcttcaaaaagcagcagtgatgaattttttgagatttttaacaattacaaaaattcagggttttttctaatggatgccacctgagactttattttctgttattttcttgtaataactaaccaaacaagctcatgttgaaaaatgattactaaatttgagctaattgcaatgactggtttcaaaattttccacagtgtatttgagttaaaatttcactgtgaagagtactacgatcactctcgcttattccaaaaatataaatggacacttgagtatttgaattattgaggaaatggttgactgggtaatttttaaaaatcactgggcacaaaaaatatattttgacttatattagtttagagtatttacacttgaaagagtctcatcttttctgaagggtgtttctttcatacacattttattgcactgagttttgtgacccatggcatattaatgaagctgaacaggatgtgaaatataaactggaagcaaaagattaaataaaccaaaattgcattttttctgtagtcttgtccaaaattgggtaaccacttctgatggggtagctcatatccaagaatgagtcacaaaaccagactcgttgaacctggtatatgatgagtcacaaagcaacattctgcctttgttttttcaggacaagaaacttgaattgtatcccactgagttaaaagataaaatatatggcattggcatttctgtacttcagagaggaatatatctgtttgtggtaggaataaaaaataagtgagagaggcaaagaaaaaaaaaaaaaaaaaa

SEQ ID NO: 392773 - DNA, 1000 bp, Homo Sapiens
gaaaaccatcttgatgtactactctgtttttaaataagataataggattatagaaacattagactggcagcaataagttggattgatttgaagaagagaaactgaagaagggaaagggtatcgatgcagctattgtgaaattctacagttgagattcctgacctgattggactggctcagtgggtgtcatagaggatttatttgggaggatttaagttcaaggcacatgagtaggtttaagtcaacaacttgacactgtcaacatgaaatccacactgtaactataagtccgaggaagagccctctcctgaagttaggaatttaacttcagctcttgcattttctgtcccaccggtcatccatttcttctctatccatctccttttctgatatctagttgttatcagtgttgttgaaaagcttaagtatgattcatattcactgtctataaagttcactacacatagtcatgctgtaatgcatacccgcctgaaagcatctggtctctcttttccttctttccaaagataagaataccattcacagctgtttagaatagaaattttatccaaattcttcagtgtttatatttttgttctgttatttcagtgtcttgaatattgtcaaatgacatttattagctactactggtactactgaatcttaataatcaatcttcaagccattaactgaccaatggtttcttctatcttaatgtattagtaattattcatttagagtaaaacatctcccagaacatgaaagaatacaaactttattcatgttacgttgtgacaggagactttgttggatgcgcctgattttcctgccaattcacagcttcattaaaacagtaatgctttgaaatatggcttaggaaacttcacaatgatcattaattacacctaatttctggaagagtatatgcatgtatgtgttgcggtattctcccttgctgtggcaggatgtcacaaatttttatccacattacgaaaattta

SEQ ID NO: 392774 - DNA, 1000 bp, Homo Sapiens; identical to SEQ ID NO: 114993

SEQ ID NO: 392775 - DNA, 1000 bp, Homo Sapiens
attaggcatggtggtgtgtcctgtagtcccagctactctgagataggagaactgcttgagcccaggagttcaagactgcagtgagctatgatcgcaccactgcactccggcctgggtgacagagtgagagtctctctttcttaaaaaaaaggaaggaaataatatagagatcagaacaataattaataaaattagaaataagaaatagcagagaagaaaatttaatgaagtaaaagacgatttctttcttttttttcttttcttttttttttttgagacggagtctcactgtgtcgcccagactggaatggagtggcacgatcttggctcactgcaagctccgcctcccagggtcacaccattctcctgcctcagcctcccgagtagctgggactacaggcgcccgccaccatgcctggctaattttttgtatttttagtagagacggggtttcaccgtgttagccaggatggtcttgatctcctgacctcgttatctgcctgcctcggcctcccaaagtgctggaattacaggcatgagccaccgcacccggcctgtttcttttttaaatcaataaaatgtacaaacttctttcaagagtcacaaaaattaagagaaaacagatatcaccaatatgaggaataaaacaggggatgtcacttcatatcctgtagccactaagataataagaaaatattacacaaagttttatactctaaaacagtttttttactgaaaacttagaagtaatgaagccttttgaggaaccacaaactaccaaacacaaccaagatgaaatagataatttaggtagccctatattaaccattaaagaaactgaatttattttaaaaaatctcctaaaaaatcccaggcccagatggtttcactgcagaattctacaaaacattcaaagagataacaatgcattttcacaatcttttccagaaagaaagaacagtccccaactcactgtgaggctagtatcacccaaatatca

SEQ ID NO: 392776 - DNA, 1000 bp, Homo Sapiens
acatcttaaccaaatgtaacaacactcgctttgagtttatctttacaaacctcgtacctgggagtcctcggctgtttacttctgttatcgcagtacacagagcttatgagacatcaaaaatgtatcgtgatcttaaactgagaggcgcactcatccaaaacaagcagctgaggcttcttccacgagaacaagtgtacgataaaatcaatggagtgtggaatttgtccagtgatcagggaaacttgggaacattctttataaccaatgtaagaatagtttggcatgccaatatgaatgacagtttcaacgtcagcattccttacctgcaaattcgttccataaaaatcagagactcaaaatttggtttagcactggtgatagaaagctcccagcagagtggtggatatgtccttggctttaaaattgatccagtggaaaagctgcaggattcagtgaaggagataaactcattgcacagggtctactctgcaagccctatatttggagtagagtatgagatggaggaaaagccacaggctctcgaggaattgaccatagagcaggttcaagatgatgttgaaatagaagcagatgaacacactgatgcatttgtggcttactttgctgatggaaataagcaacaagatcgggagccagtctattctgaagagcttggcttggcaatagagaaactgaaggatggctttaccctgcagggattgtgggatgtgatgggatgagggatgactgcaggtttctgtggagtttaaaaattagtacagttgcagaaaatcctaaacacattcccataaagtgcaaagttgtagcagtttggtatttgctggtacatactgagagccaggcatccacttgggcactatacataatgctattctggtaggccatggatacacataatttattttaaaggggatgcaataaaatatcattcctgcaacacttttttttatattaataaatatttatttatgtaaaccag

SEQ ID NO: 392777 - DNA, 1000 bp, Homo Sapiens; identical to SEQ ID NO: 283105

SEQ ID NO: 392778 - DNA, 1000 bp, Homo Sapiens; identical to SEQ ID NO: 283106

SEQ ID NO: 392779 - DNA, 1000 bp, Homo Sapiens
aaacaatattaaaaatatcctggcaaatttcacaaattgcccttatcacaccggtaagcagcccgttctcacactgccataaagaaccactgagactgggtcatttagaaagaaaagagttttaactggctctgggttgcgcaggtggtgcaggacgcatggtgctgccatctgctcggcttctggggaggcctctggaaacacagtcatggtggaaggggcagggtaggaggcccatcacaggctgggagccaggagccgggaggcagaggggcagccacacatggagaccaccagatggcaggggactcactgcacaggaccaagaggggtggtgctggacccttcctgagaacccaccctgtgatcccaccgcctcccaacaggcccctcctccaacactgggagtgacaattccacatgagactgggtgggacacagaccaaaccatatcaacacccagggaagggacaggacccagcttctgcagaggagctgctgagagttcccatcagcaggtgaggagagacgcagggaatcgcagcaacgcacaacacatcagcacccgctctgggcagtgaagggaggtggccgcccaacctcaggatcatttccacgaagggaacacaggcctcctacttccagctgctgccctgccatgcactggaacacactgactggggagcggtcttcccttccacctcggagcctcttgctgacaccaaaacaaggaaccctggcttgatgcggtgcctgcatgacctctgccctctgggattagccagaaggagtagtgccatatagtgatggttaacaccaggcctcaacctggctggctggagggaggcccagctggccggtgagatcttgtctcagcctcagctagatggatggataagaggatgagctgttttggaggagactgggctgtgagtcagcagactgagggggaagacctgcctgaatgcagggtaggcaccatccaatcccggatagaact

SEQ ID NO: 392780 - DNA, 393 bp, Homo Sapiens
gctgttttacaaggtgtccagtgtggcgtcttcttggtggaatctgggggagaccgagtccaccctggggggtccctcagactctcatgttctgcctccggtttcccgttcagcacctacgacatgcactgggtccgtcaggttcccggaagaggtctcgagtggatatcaggcattactactacttttacgacatactacttgggctccgtgcagggccgcttcacgatttccagagacaatggcaggaagtctctctctcttcagatgaccaacctgggagccggagacacggccctctacttctgctcacgggggcccttggggccgcacccggggccacactacgctctcgacgtctggggccagggaacaccggtcatcgtttcttca

SEQ ID NO: 392781 - DNA, 1000 bp, Homo Sapiens; identical to SEQ ID NO: 283107

SEQ ID NO: 392782 - DNA, 459 bp, Homo Sapiens
agtcccttagacatgctggctgctcatttgataatctgtgttttgctcagtacaaaaggttgctggctaagttttgtgagcccctctaacgtcaggctggcagtatcttgggttcaattaacaagaaagtctacagtaacattttgtcaatggggaaggacttgaattcacagaactgtctcggaaagccctgggttgaatgcctttgagaacttgatgcataaaatttgcatgactcctcactcctttctggatctctcattggactcaagccagcatggctcacaccacaaaggttaacggcagtgcctcaggaaaagcaggtgatattctcagtggagaccaggacaaggaacagaaagacccttactttgtggagaccccctatggttatcaactagacttagatttcctcaaatatgtggatgacatacagaagggaaataccatcaaaagact

SEQ ID NO: 392783 - DNA, 1000 bp, Homo Sapiens; identical to SEQ ID NO: 283109

SEQ ID NO: 392784 - DNA, 1000 bp, Homo Sapiens
  misc_feature (15)..(114): n is a, c, g, or t
  misc_feature (262)..(361): n is a, c, g, or t
  misc_feature (584)..(683): n is a, c, g, or t
tgaggagggtgccannnnnnnnnnnnnnnnnnnnnnnnnnnnnnnnnnnnnnnnnnnnnnnnnnnnnnnnnnnnnnnnnnnnnnnnnnnnnnnnnnnnnnnnnnnnnnnnnnnnctttctctcctgcaggctccaaaggtttacctggcatccccggtaaagatggccccagtgggctcccaggcccacctggggctcttggtgatcctggtctgcctggactgcaaggccctccaggatttgaaggtctgatgatgccacnnnnnnnnnnnnnnnnnnnnnnnnnnnnnnnnnnnnnnnnnnnnnnnnnnnnnnnnnnnnnnnnnnnnnnnnnnnnnnnnnnnnnnnnnnnnnnnnnnnnatctgtctctctcaggagctccagggcagcaaggccccttcgggatgcctggaatgcctggccagagcatgagagtgggctacacgttggtaaagcacagccagtcggaacaggtgcccccgtgtcccatcgggatgagccagctgtgggtggggtacagcttactgtttgtggaggggcaagagaaagcccacaaccaggacctgggtaggtaccagctctnnnnnnnnnnnnnnnnnnnnnnnnnnnnnnnnnnnnnnnnnnnnnnnnnnnnnnnnnnnnnnnnnnnnnnnnnnnnnnnnnnnnnnnnnnnnnnnnnnnntttctctccttccaggctttgctggctcctgtctgccccgcttcagcaccatgcccttcatctactgcaacatcaacgaggtgtgccactatgccaggcgcaatgataaatcttactggctctccactaccgcccctatccccatgatgcccgtcagccagacccagattccccagtacatcagccgctgctctgtgtgtgaggcaccctcgcaagccattgctgtgcacagccaggacatcaccatcccgcagtgccccctgggctggcgcagcctctggattgggtactctttcctcatggtaaggtcctgcact

SEQ ID NO: 392785 - DNA, 1000 bp, Homo Sapiens
  misc_feature (385)..(385): n is a, c, g, or t
  misc_feature (542)..(641): n is a, c, g, or t
gacctcgtgatctgcccgcttcagactcccaaagtgctgggattacaggcatgagccactgtgcccggcctaatcatggtattttgagatacatactgagcagcacagagcattgtgggactgcctcctttgttccagacattatgcttgtaataattgtgcctaattatatcaactcctacttcagagacattacacaattaactgcacttcataatacctagatctttttctgttcactatttatccaggttgctcccgtcccatacctgtgttacattaattactttccttcagttatgaacttggattttcacttttaaacaacccttattccatgtatgtgttcaatcactcaaaattctctcttaatactagaaaatgntctcatggttttagtcataatccctcaaattttttgtttatgtatataaattttttcttccctcagcacatttggagtttttgatgtccatacggtattctaatgttttaaaacagctgtgatgtgctcttactcccgttttaaaatatttttcttnnnnnnnnnnnnnnnnnnnnnnnnnnnnnnnnnnnnnnnnnnnnnnnnnnnnnnnnnnnnnnnnnnnnnnnnnnnnnnnnnnnnnnnnnnnnnnnnnnnnatgcttatggtgaagcctgatgttttcccatatttaaaatttaggaagagaaaatcttgcatcagttgaaatgtttgaattaaataatctatgctagttcttagggtaaaaatagttacttaactgggcacttgtgaggtaaccattacaatttaagtaaaaatttacaaatgttaatcattaatagtttaatattacttttcatttcaggagtggacgcttctcttgtgagccagctggaggtcttacctctttgactgaaccacccaagggacctggatttggtgtacaagcaggcctttaatttatattgaactgtaaatatgtcactagagaaataaaatatggacttccaatct

SEQ ID NO: 392786 - DNA, 1000 bp, Homo Sapiens
  misc_feature (1)..(223): n is a, c, g, or t
nnnnnnnnnnnnnnnnnnnnnnnnnnnnnnnnnnnnnnnnnnnnnnnnnnnnnnnnnnnnnnnnnnnnnnnnnnnnnnnnnnnnnnnnnnnnnnnnnnnnnnnnnnnnnnnnnnnnnnnnnnnnnnnnnnnnnnnnnnnnnnnnnnnnnnnnnnnnnnnnnnnnnnnnnnnnnnnnnnnnnnnnnnnnnnnnnnnnnnnnnnnnnnnnnnnnnnnnnnnnnnntttactctaaccagtctcctctctcatatttgtcttctaggctaactgccaggccgccaaaggacagtatgttcacacgggttgttctggggctgcttccacccagtcgctcttcacagcctgctatacctactagggtccaatgcccgccagcctagctccagtgcttctagtaggagggctgaaagggagcaacttttcctctaatcctggaaattcgacacaattagatttgaactgctggaaatacaacacatgttaaatcttaagtacaagggggaaaaaataaatcagttattgaaacataaaaatgaataccaaggacctgatcaaatttcacacagcagtttccttgcaacactttcagctccccatgctccagaatacccacccaagaaaataataggctttaaaacaatatcggctcctcatccaaagaacaactgctgattgaaacacctcattagctgagtgtagagaagtgcatcttatgaaacagtcttagcagtggtaggttgggaaggagatagctgcaaccaaaaaagaaataaatattctataaaccttcagctgctatcgggtttcacttttctgctcttgctgtccaaagactcagtgtatttcattacttttgactctactagacatgactgggtttcaacagtaaaggtcttcaactcttgctagtcattggaatcaagccgcaaaattttaaaaactgagatgctcaggccacaccccagctcaattaaatcagaaaccctagacttgggatcc

SEQ ID NO: 392787 - DNA, 1000 bp, Homo Sapiens; identical to SEQ ID NO: 195015

SEQ ID NO: 392788 - DNA, 1000 bp, Homo Sapiens; identical to SEQ ID NO: 283112

SEQ ID NO: 392789 - DNA, 1000 bp, Homo Sapiens; identical to SEQ ID NO: 283113

SEQ ID NO: 392790 - DNA, 1000 bp, Homo Sapiens; identical to SEQ ID NO: 114994

SEQ ID NO: 392791 - DNA, 1000 bp, Homo Sapiens
gctcaggggacagaggagagcatcagaaggtgagcaggactgaggcttagcctcagggaatcagagcagagcagccacaggtgagcagggccggtgggaggcaggacgagcaggggacaggcactagagctcagggcaaggcaaccacaggtgagcagggccggtgggaggcaggacgagcaggggacaggcactagagctcagggcaaggcaaccacaggtgagcagggccggtgggaggcatcactcagctcctagattttggcaggagctgggtagttgctggcagcagacagctgagggctggtgaaagtgcagtgcagcctcctggtgccaggaagggagtgtgagcccatcccactgagcagttggcaagggtgagctgggatggagaagggaaggcattccagggctcggggctgagctctcaggcaggggcaggtgtggctgcagggggaatgtgtgcttgagaccaggagggtcccagggctggccccagcggaccctaggcaggaaggcctctgaggctggcgccccagaaggagcaagatgggctgccaggagccagggccaccagcacaatgaagctgagtggaggtggtgcagggcagtgtagcagcagagggctgccagaggggcccattcagggcctgggcagagtcagccagagcctgtggtgcaggtaaggggaaggggtggtgagcagggccctggggctgagcagaggggatggcctggctgagggcagggcgcttagcctcctcagaggtcaggggcacaccccacctgcagtgggactccagggccactgggccagcggcagagagaaatggggcctccctgtggcctgggggtcctggcaccacgcagggtggggagggccaagggcaggtgcaaggctcctacctgtgctggggggcctgggttgagcccagcagggaccttgccgggggaagctctggagagagggaggaggtgggctggtggccgagaaggccag

SEQ ID NO: 392792 - DNA, 1000 bp, Homo Sapiens
aggaagtgaccaccgggacgggggaggggaaggcaggagccaggtcctctaagagagctgcccaggctggaaggcaacagctccaggccagcaggggcaccctgggccctgaggctgccctttgcttcctgccatcctggccctgggaggagtgggtagagagagcaagtgggtgaggcctcacctctgtccatgtggcattgttccactgttggatggtcacaggtgggggctcgaaggaggccaacacgaagtagtcagccgaggccagctgcactttgagttggtaggtgcagccacagtcggctctggcagcaaacctggtggaggggttgagagccctgtgtccaagccaccgagggctggccccaggggtgggggcaggtgggacctatacattggagctcggagcttcatctcccatcagctgacactgctctgcctgcaaggcccagctggcttcagcgctccctatgccccactgtggcccggggataagctgtctgtccatgctggcctctgttaccccatctgagaagagggacccttttgggcatcctactaaagatatgacctcaaaaatcaaaagacccctccagagaggcctggtctgtccaagccatgtcacctgtacttacaatggaccaggctgtggattcagtgggagagtcaagggggtggcctgtgtaatggggctggcacaaagctcaccctctgctcagcccagccacctctcccccctgcagctctgcatacccctccatcctcaccgctttatcctcagagtggcagccctggggcctgcctagaactggggtcctgcttctgccaccggccaagccagagcctggcacagttctgtgcacagagtaggagctccaaaaagagtcatgggatgaatagggaaaggggcaggggaggcaggtaggtcaggggacctgggggttcccacccagtccagagagggctgaggtcctctgttgcccaagtgcctgtcagt

SEQ ID NO: 392793 - DNA, 1000 bp, Homo Sapiens
agcgtgccggaatccacgctgtcagtgaacatcactgggctgtaccagtacgtgtgactaccgaagctcgagccccgaacccagccgcttccctaggggtccagcagcagcgggcgcgaatcggcacattaccgggggaccgcggggcgctcaggactgcgacaactctgtgggttaccgcgccggcctagcggcccagcgacgccccccagcggccagagaaggccgcgcttctcggggttggcccacccaaccgctctgcgggtaggaccgaggagcaaagcattatcgcgagatcagggccactatttgagcgcatgcgcaagacatgctagtctcttttccggttagcgcggcgtgagaagccatgaggtgagttggtcctgaaagccctatccgcgttcatccgcgccttcaggtgccccgccgagggttcggatcctgtaggccgcgccgcggacccttgcgccacctgcgccgcggacccttgcgccacctgcgccgcggggcatttctcaaggcgggtcggcctgcgggtcgcccttcctaccaggtccgatcactgagagcctccctcttccaccggggcttgggtctgggtctgagctcccgtcgctctacttggtgtccggaatctacgggggagtccgccgtgggccgcccgcccgtctcgaagcctagacctcggaggcttccaggcagtccgagcgtgtggactccgcggccctgagcgccctgtcgcttctctcccgcagcagcaaagtctctcgcgacaccctgtacgaggcggtgcgggaagtcctgcacgggaaccagcgcaagcgccgcaagtgagtgccgaccctggggcacggcgcgggtggcgagggccggcgggtgcttaacccccctcctctctcgaaggttcctggagacggtggagttgcagatcagcttgaagaactatgatccccagaaggacaagcgcttctcgggcaccgtcaggttggcaccgttctga

SEQ ID NO: 392794 - DNA, 1000 bp, Homo Sapiens; identical to SEQ ID NO: 114995

SEQ ID NO: 392795 - DNA, 1000 bp, Homo Sapiens
cagcctcaagccgggccctgctggctgagaaagcggcaggggatgcagaagttaaaacgctctgggctttcaccaccccatccccacctcctccgggaacgctcctgagtcctgtgcgggctagaacttcgaggcccgggaacccaactgggcactggaggctggccctgccggcgcggaccagccctggcctccacgctcagagccacgctgccccctgctggccagccctggaggggcggcccaggacttggcacctcaaggggtcttgcccgcaacctcgcgaaaccaccaagcatctatgtgtttggtcccaaaatcttgactggccccaggacccactgtggatgaggggcagggcgctgctgagtctggtctggtctgagggatcttcattagttgggcactatcccaatccttcttccaagcagttcacaaggtcgcgcgcggcccaggattatgcccccattcctgagaactggggcctctgagtgcgtggaagtggggctagccagtaggtttgcgggtggtgtagacggtctgcgcccaagcggcgcacgcaggttgtggtgtggtttgtgcctgaccatagcttgtactagggtcaactgcagaatcttccttggtttctttatgaagccccaggaggctgcgggccatggttgctccaaaacaaccagagtgcatgggtgaacacacacacacacacagggtgcccttcctagtcccttggctctttctgggatgctatccttggggttgtctatggctgctcttccctagcccctgacatccctccacctcccagaacacatcattccacctccctgaagatcgagcctctgcagttcccggggcctcaggaagctacaaatgcggtgaaatggggaggtttgccagccacgttaatcctttttgggtcaccccacctccagcactgtgaaaacccacccagtccaaggtctgcaactgaatgtcagtatcaagtgtgcatcctcaa

SEQ ID NO: 392796 - DNA, 1000 bp, Homo Sapiens; identical to SEQ ID NO: 283117

SEQ ID NO: 392797 - DNA, 1000 bp, Homo Sapiens; identical to SEQ ID NO: 283118

SEQ ID NO: 392798 - DNA, 1000 bp, Homo Sapiens
gcctgggtagcagagcgagactctgtctccaaaaaaaagtacccaaaggcaagaacctagacttaactatggaaacccagttcccagcatagaagagctgttttatcaaagcaatatatgcatacggtttaaaaagccaaatagtactaaaagtctttcctgctctatccgcctcaaacccaggtcctggtaaagtaccttacagggccgtgtgcccctccccaagggtattccctctctccatccctccatagaggtaaccactacttcatttttcttgtaatcattctgatactttatagttttactccttataatatctctaagcaatacattttacttttgaaaaacaataacaccgacctagctgtgtaagaaaaaggtgatatcacaattagacgaacaatcccaagaacaggtaaactgaacattgactctgagttatagactggcttcggcatcccttggaagttttccagagcctcttctggggaagcagaagtggtgctgagtgagtccttggaaacacggcaccccacgatcagggaggctattgtgtgagccaagaacggggtgtcccccagaaatatggtaacggcagagggctgctctgcattttctgcttctaagctcagcatgtccctgcccccagctttcaggaggagatcaaagcacacccacacctcctcagctggccagctgtgtagcagggagaacggaaatgtcatcggcaccaggcaagccaagtacagataaggatctgcttcaggcccatttcagctttctgtcctcaagttaaaaactatacaactacagagaaccctcaacatggaaaattacactgctccaatctggactgctgccctctgtcctgaggcaggcagagttctctatctgggatctcccttcactgtcattctggggattccctttttctctcctatgttgggtctcctctttcctgtagcccacatgtatgagttagaatacatgtgaaggg

SEQ ID NO: 392799 - DNA, 1000 bp, Homo Sapiens; identical to SEQ ID NO: 283119

SEQ ID NO: 392800 - DNA, 1000 bp, Homo Sapiens
taaatacagttggggagttcaatatttttaaataaactcctataaagcaatatttttgcaatagtagtatttaaatgttatttttaagaatacaattaaaatgaaatgattaatctatcattgtttgcataaattgaatgaatacataagaaaaacatatgtacgtaataaaatatatagataataaaatctggaaacagataaaaatattccctttttacttctgaagaggctaaaagttcaaagaagataacaatacactcaatgataaaaaatagaaagtgagaaattatttttaatattgtaagattcatattcctgtcttcccaaggattattcctttattaataaactttactagaagttttgtacatgctcactgcagcaatcacagataagaaaaaggaaaagaactttacttaaaatacaaatgctcagaaattacaaattttatattttgtacatattttttgataaaacaagaccatagtatgtttgtatgtacaatttaattgatctttttctcactagctataacaaaatacatctttgcacatcaatatacttctgtatctattgccaccttcaatggtcacatattattccatcctgtggatgcaactgaagtttatttataggatccattctttgggttctttttaaaataagtgaggtgaaaaataaagtgcatgtatctttatttcctaagggtgctttagtgtaatggaattgatgggtaaagggcatacgtattttttaattgtagtatttaccaccaaattatctatttgaaaagtaatcagcaacttaaactttaaccaggagtataaaacatcctcacaaatattgtggatagaaaactgtttcattcctcttttatttaaattcttataccagaaatgcgaaggactttttcttatgtacacaagtaacttgcagatctggaaaagtgtactttgcccaattttagagtgtttgatgatttgatttgaaagaattc

SEQ ID NO: 392801 - DNA, 1000 bp, Homo Sapiens
gtcatttgcattgcttattttattgtgaagaatacatataaattgtcatccagatttttaaaataggacattaccttagaattctcctaataaacccttatctccaatatggtgttttctccaatatgtgagcccatatgtggtatttctgtgatccttttggctctttatatgggttgagttacagatgtttcttaaactaactccacttcccccttgaagatcaaagggctctttcattcacaagaacctggaatgattctaggaccttgtggaaggtaccattgtcttgttccctttgagcaccatgtccaattttaatgagtcaaagaatacaacctgaattccattaaagtcaataactctgtatcaagtgcatgcagtactgaggaatacagaaaaaagaaagaatagttttcttcccctcagatagttcatagctgatcttgtaagggagtcaaacatacaacaaaataggttacagtcataacttcagagtagaaatgtggacaaggcacaaaaggcagtagtggtgagtagtttgagtgtgcaatgggagcttcccaaaagaagtgacatcttcaattgggttttgaggggagaaaaataagggttcaccagggtgacatttcaagaggaagaaaccagtttataaagtagtttgctttttctaacactatcacattgagttgaagtctaaactgttaggaggtagcattcatacctgtagacatgatgacccgtttatgtaaattcaatcattgttaattgttgatttgttaatataatatgcttgtgatatgggtttttgtctttctttaatactagttggtgaggatagccaaggttctggggacagaagatttatatgactatattgacaaatacaacattgaattagatccacgtttcaatgatatcttgggcaggtaagtcatgaaacaaaatatgtgcatctgtggcttaagcactttgagagtgaactggcacttaggatcga

SEQ ID NO: 392802 - DNA, 1000 bp, Homo Sapiens
tcgagatagagaagctccagtggctgcaccagcaagagctctccgaaatgaaacacaacttagagctgaccatggcggagatgcggcagagcctggagcaggagcgggaccggctcatcgccgaggtgaagaagcagctggagttggagaagcagcaggcggtggatgagaccaagaagaagcagtggtgcgccaactgcaagaaggaggccatcttttactgctgttggaacaccagctactgtgactacccctgccagcaagcccactggcctgagcacatgaagtcctgcacccagtcagctactgctcctcagcaggaagcggatgctgaggtgaacacagaaacactaaataagtcctcccaggggagctcctcgagcacacaatcagcaccttcagaaacggccagcgcctccaaagagaaggagacgtcagctgagaaaagcaaggagagtggctcgacccttgacctttctggctccagagagacgccctcctccattctcttaggctccaaccaaggctctgaccattcccggagtaataaatccagttggagcagcagtgatgagaagaggggatcgacacgttccgatcacaacaccagtaccagcacgaagagcctcctcccgaaagagtctcggctggacaccttctgggactagcagtgaatcgggacacaaaccacccaccccattgggagaaaaacccagacgccaggaaaagaagaaacaacaaaggcaggagaacagccactttcagacttgaaaatgacaaaaccctcagttgagcctgagcccccggcgcgggggctgctacactacaggacacccagcatcggctttgactgcagactgttcacccacacgagccctgtgcttttggtgtaaataatgtacaatttgtggatgtcattgaatctagaggactttcccctttttatatttgtattaactttaacttattaaaaaaaaaaaaagaaaaagaaaaacgattt

SEQ ID NO: 392803 - DNA, 1000 bp, Homo Sapiens; identical to SEQ ID NO: 195010

SEQ ID NO: 392804 - DNA, 1000 bp, Homo Sapiens; identical to SEQ ID NO: 283120

SEQ ID NO: 392805 - DNA, 1000 bp, Homo Sapiens; identical to SEQ ID NO: 283121

SEQ ID NO: 392806 - DNA, 1000 bp, Homo Sapiens; identical to SEQ ID NO: 218667

SEQ ID NO: 392807 - DNA, 1000 bp, Homo Sapiens
gcatgaatctcattaatcctgattggctgcatagtctggaagatttcttgcccgctcacagaaatcaatcaagacttgggggaccaggtctttgcttgtcatgtgtggacattatctgtgcctggctgagtccccacttgttgctacccaaattttgaaccaagccatttgaaaatgaactgcctctcttggttaggggccctcttcttaaccttcaaaaggcctttgccccagaaggctggcaccattgagtcaggccaacttgtgtggtgaaatgagcaaataagccaacacaggtatatgcatggtgagcaattctggaaacgggtccagtgtttgtggctgtttctctggtgaactgtggtgtggttacccctccctgtggccaagagtggagcacactttaggaatggaaatcctaaagtaaagcaagacactttcaacctgatcccatggcaaaggttactggggtagatgagtccttggctggaaataaaaaagtgccctaaggctccatgatggtggcctggtaggaaaagccctgaacttggagccaaagagtcctgggtttgggctccagctctgtcagttctcctgcacaggaggcttcagtctctgcctctgtaaaatggtgccacatgcacagggttgagatggtattaagtataataatgaatttgaaagtgctttaattgaaaatgtacttgaggctgggtaaggaggctcatgcctgtaatctcagcactttgggaggccaaggcgggcagatcacgacgtcaggagttcaagaccagcctggccaacgtggtgaaaccctgtctctactaaagatacaaaaaattagctgggcgtcgtggtacatgcctgtaatcccagctactcgggaggctgaggcaggagaatcgcttgaacctgggaggcagaggttgcggtcagctgagatcatgccattgcaccccagcctgggtgacagggcaagactccgtctcaaagaaaaagg

SEQ ID NO: 392808 - DNA, 1000 bp, Homo Sapiens
ctaataagggggattacccgttaggtcaactggtagcaatgcccgagtctccttctcgatgaagcttaaggcaaaagcaaatgaatatctaggtcccttcccccccttccccccttccctttcctgggatgagcaagcgggaactgagtcaccctgttccccatccttggcaggaatgctggtgaccttgcattgtggcagattcaggtggcgaggcccattgctcgagatgcacctggtgggtgggtggcagggatcctgggggagtgtttatggggacggaggcagctgaagggcagggaggggtgaccaggtgctgggatcatcgagtgagtatgtgcaggagggattgtagagacacaatgaaacagttgctctgtgttgggaagtgatccagtgtcatcgctgggagtgggagacagaaatgttacttccaaagattccgagtcctgtggtactgccaggagaaccgggggctggggtgatgggtaaggagaggcaccattagccccgccaggcagaggcaagatggggtgggggcggcacctgccaattatgccaaagtcttggagtggcagctggcaccatcaccaaggcacaaatgccagcagagacctggcactcacctgggttgtgattccatagggcccctgtctcctgttggtctcccaggctcaaaggctgacctgataattcaagtgaaggatgcctagttcaaggcctcccagttcctcatcccaggccacctggtcaggtggtcccaagggacaagctaggtcctcctgaactgcagaggctgccaataaactggcaacacaggtgttgcaggaagatatagctgggtcctcatcctgggtctgtaatttattagacgtgtggctttggacaaatgacataatttcccagagcctccttagataaaaaactagggctttgcttaccttggcgtattgttaggaaaattaaatgagttgctcaataaatgttacttcctcctgtc

SEQ ID NO: 392809 - DNA, 1000 bp, Homo Sapiens
gagcaatatatgagcaattaagatagaactaggtcattgaaggactcagaaggaaactggcaaggggctaagtagctgtgagctgctcttcctgttaactgtcctcaggagagaaaagttgtcttgatttattccagagactcctgagaattttgttactggagctataggaactaggactccctcctcagactcatcaggaaatctgggaaaatctcatctccatgctgcagtctccccgcttggcaccatctagggctctgaagatctttaaagtgagcgttaaatgaagcaggccttctggggcatcgtgatggagctcctgaggactgggagggccgttttcttcataattcctacccagtttagggaatgagaaaaggccctgtggctcttaagtctcctgactatatccactagtttggccttgagtttgagacacctggtagatgtacctggctgccctaccaagagatttgatttgtttcttcccgtggtttcaggtgatagaacccaaaggtagctttttaattggagaattgaataatcagcatatgtaagcgcactagaaccctgtgttgaaaactgccaggtgtgggtataagaaaaggccgagagatcaccacctcctcttaccctaccccacacccataaaccagacatgtctcccaggaagcaggtgtccctggacacagaggatgacagggctctacaatctgtgtaattattattattattattattttgtatttatggggcccaagaaaggggccaggagagggtacaccccagctggggagagcaaagcagatggatccagttttctgtgtgttcttacctctgtacttcctcgtagctctgctgacaaagcaagcaggcctcccgtgtccaagaccccattcctcccacttgtgtacacctaggctggcaaatcttggagcctctgggctctgaaaactagacaatgatcattaaacctggcttgagtctctgttctggc

SEQ ID NO: 392810 - DNA, 1000 bp, Homo Sapiens; identical to SEQ ID NO: 283122

SEQ ID NO: 392811 - DNA, 1000 bp, Homo Sapiens; identical to SEQ ID NO: 114996

SEQ ID NO: 392812 - DNA, 1000 bp, Homo Sapiens; identical to SEQ ID NO: 283126

SEQ ID NO: 392813 - DNA, 1000 bp, Homo Sapiens; identical to SEQ ID NO: 283128

SEQ ID NO: 392814 - DNA, 1000 bp, Homo Sapiens; identical to SEQ ID NO: 283129

SEQ ID NO: 392815 - DNA, 1000 bp, Homo Sapiens
tctaatttttaaaataattaaaaaatgttgtgacagggtcttactctgttgctcaggctagagtgtagtagcgtgatcacagctcaccacaaccttgaactcttgggctcaaatgattctatcacctcagcatctcgagtagctgggactacagtcatgggacaccatgactggctaattttaaaaacattttttagtagagatgttttccaggctggtctcaaactcctgggctcaagcaatcctcgcacctcagcatgagccactgtgtctggccctagctttttctaatttaggggaaaaacaaccttgtaatgactgttaaagtcccagttggttttggaaaacaaagagttgattctaaaattgtcatgtacacaagaacaaaggctcaagaatggtaaagacagttttaaaaaacaccaactttgcagagggactgtgctagtagactaattttcgagctagagtaactaaagcagcatggtattggtgtagggttagatgaattgactcactggaactgaatatagagtttaggaagagacatttaggaatctgttatatggcagaggtagctttagaaattagcgggcaaagatagaactaacttcattagattgagctgagatttgaaaaacataatatttgatccttgtgttaccatatccgctaacttcctgatggattgaagactacatgtataaaacaaatctttacaacttttagaagaaatgtagaaaaatatctttgtaatgtgaaggcctcaggtaagacatttctattaagacgtagaaaacacagactttaaaagataagattgataagtttgatggtagtaaaattaaatacttctgttaacaaatcctccataaagaaaataaaaggcaagttactgatcgggagattttatgtgtaatatctagacaataaaaatatatagagaactcttgctgataagtcaggaaaacataaacacctagtagaaaaaatgaacaag

SEQ ID NO: 392816 - DNA, 1000 bp, Homo Sapiens
tcatacgtaagtaattctctttccctttccttcctcatttctgtttttggttctaccactttctgagtaaagccggagatctttgatccaccataagtctgccagtaagacctacattttctttgcaaatttttcttactctctatttgaactgccaacactgtttattcatgttgttaagtacatcataatttaaaaagattcaaagtgccctacaaagatataaactataccttcagataaaataaatatacaaagaaaaatggttaaagagaaaagaatggcagggaaaataagataatacagacgaactgctagttctcaaaaatatataacatgaggttaccaatttgtccctgagcttcctagtagacaaagcaagaagtaaacattcaggtacaagactcataatgtccgtaaatcaaaaagcaaaccatttgataaggaggctcacagctcctcacaatactgagactgactcctgagagatttctcttgtggatcaagtactagagaatatcctcaacgtcatcctcacaataaattaaatatcaacttttatatcactgtttttttttaatgtaaaactggttgaacaaaaccgatgcctgattgaatgaaaacaattctatgaggcaccaagacaatatgattcaagtatgcagctctatgatggtctatttctgagataacaagtaagtctcactccaagtaccaattactactaactggtagtggctgattggcacattgtgatgagatgctaagtttagattgagcaggaatgaatgttctgcttgaccagcaatatctacagtgggccctgtggatgcctgctgtgtattggcagaccctggccagagaattgatttcaacacttttttgcagtgaaaccttttttttcaataaaatcttatgtgaaatcccagtgtatgaaccagataaaagcagaggtgtgggtagtacttaaggtgcctccatggaggtccctagaattgtg

SEQ ID NO: 392817 - DNA, 1000 bp, Homo Sapiens; identical to SEQ ID NO: 283133

SEQ ID NO: 392818 - DNA, 1000 bp, Homo Sapiens; identical to SEQ ID NO: 114997

SEQ ID NO: 392819 - DNA, 1000 bp, Homo Sapiens
gagctgttttgtcctttgtggagcctcagcagttccctctttcagaactcactgccaagagccctgaacaggagccaccatgcagtgcttcagcttcattaagaccatgatgatcctcttcaatttgctcatctttctgtgtggtgcagccctgttggcagtgggcatctgggtgtcaatcgatggggcatcctttctgaagatcttcgggccactgtcgtccagtgccatgcagtttgtcaacgtgggctacttcctcatcgcagccggcgttgtggtctttgctcttggtttcctgggctgctatggtgctaagactgagagcaagtgtgccctcgtgacgttcttcttcatcctcctcctcatcttcattgctgaggttgcagctgctgtggtcgccttggtgtacaccacaatggctgagcacttcctgacgttgctggtagtgcctgccatcaagaaagattatggttcccaggaagacttcactcaagtgtggaacaccaccatgaaagggctcaagtgctgtggcttcaccaactatacggattttgaggactcaccctacttcaaagagaacagtgcctttcccccattctgttgcaatgacaacgtcaccaacacagccaatgaaacctgcaccaagcaaaaggctcacgaccaaaaagtagagggttgcttcaatcagcttttgtatgacatccgaactaatgcagtcaccgtgggtggtgtggcagctggaattgggggcctcgagctggctgccatgattgtttccatgtatctgtactgcaatctacaataagtccacttctgcctctgccactactgctgccacatgggaaactgtgaagaggcaccctgggcaagcagcagtgattgggggaggggacaggatctaacaatgtcacttgggccagaatggacctggcctttctgctcccagacttgggggctagattagggaccactccttttaggcgatgcctgactttgcctt

SEQ ID NO: 392820 - DNA, 1000 bp, Homo Sapiens
gatagaagaactgaagtttcttactcacgtggtttaaaatggagttcaaaagattgccttgagttctgattgcaggggactaacaatgttaatctgataaggacagcaaaatcatcagaatcagtgtttgtgattgtgtttgaatatgtggtaacatatgaaggatatgacatgaagctttgtatctcctttggccttaagcaagacctgtgtgctgtaagtgccatttctcagtattttcaaggctctaacccgccttcaatccaatgtgtggcctacaataactagcatttgttgatttgtctcttgtatcaaaattcccaaataaaacttaaaaccactgactctgtcagagaaactgaaacactgggacatttcatccttcaattcctcggtattgattttatgttgattgattttcagaatttctctacagaaacgaaagggaaattttctaatctgctttatcatgtacttgcatttcagacatggacatgctattgttatttggctcataactgtttcccaaatgttagttattatggacccaatttattaacaacattagctgatttttacctatcagtattattttatttattttagtttatagatctgtgcaacattttgactgatgtcttcaaacctggccgtaggaatacccttcttactgacatatgtacttttagttttagaaaacttttatatttatgtgtcttatttttatatttctttatttattacacagtgtagtgtataatactgtagtttgtattaatacaataatatattttagtatgaaaatttggaaagttgataagatttaaagtagagatgcaattggttctcctgcattgagatttgatttaacagtgttatgttaacatttatacttgccttggactgtagaacagaacttaaatgggaatgtattagttttacaactacaatcaagtcattttacctttacccagtttttaatataaaacttaaggaattc

SEQ ID NO: 392821 - DNA, 704 bp, Homo Sapiens
gctgagaagcacctttaaaagcccatcaaggggtgggggagaaaacaagccctcagtttgatccttaaaaaacatgctggctcaaaccatcctgttcacgaatcatttcgatacaatatggccttcctgaggttcgggaccacgggcccatgaaacacagaaatctggtcagtgtaaaccaatttgttcttccctctgttctccctggtttctctccttcgtctgtatgtgtgtggtgtgtgtgtgtgcgcgcgtcctgtgttattttctcccccttcagacatcgtgaacacccctaaacccgatgaaagagccatcatgacgtacgtctcttgcttctaccacgcttttgcgggcgcggagcaggtactcaacacttgtccgtccgggctgttgtgttactctctgttggttttagttgtgtgtgcatacttgagtgtgtgtttgtgcgcttcacatcttaccttggaatctttctgagtgttttctaataacctcatatggcaagttctaaactgtgaaaacttttttttaacagctttaactttagacagttcctgaaatgtttttatgtgttttacttttaatgcatttcctttatttcattagtaagttgtggaaagtatttgtgctttagaaaaaaaatgccatgaaaattgagccacatgcattgaatggtaaagggggactgtggcaaggagaaa

SEQ ID NO: 392822 - DNA, 853 bp, Homo Sapiens
tttgccactccttgccccaagttcctttccacgaaagatgacagagaattgtgtattacctcaatgacttcttcatctaggttagacaaagtcttaaagcacactccagctctgtggaaggatcccctccagaaagttctacatgttcatatcaggagatgaggaggtcttcagtgaattcaagtgcaatggtatatctggattttcctgccccagttatttttgccttgatttccaaagactaatgttattcagggagtctccatcccatcgtcatgagatcagtggagagttcaggtggacattcagggacccaagatcttggtttcctggacccaaatatttctgtgactaacttgctggatgtttaccgagtttgtgttttagactaatgctctctccccgttattccctacagtctaatcagcctgccgtgtaagtctgtgtgaaaactgtaacaaaggtgtgaaatgattcatagtacgcataagccatgccttcagtctgaccgcaccctaagctagactctgcaccgtctacagcacgccaccctcctcgtcccctctcatcacccacctcgttccatgctgtgtgtgcgcattcccgtcgacagagccgtcctgtttacctattgtgttttacaggccgagacagcggctaacaggatatgtaaggttcttgctgtgaatcaagagaatgagaggctgatggaagaatatgagaggctagcgagtgaggtaaaggaaactggtgacctgcagttctgtccatcctcacgcaggggctgaggcacagagggtgaaaaactactccgtgggggtatatatatatatatatatatatttttcttttt

SEQ ID NO: 392823 - DNA, 1000 bp, Homo Sapiens
agcactcccagtgccccaggcccgctggtgttcactgccctgagcccagactcgctgcagctgagctgggagcggccacggaggcccaatggggatatcgtcggctacctggtgacctgtgagatggcccaaggaggaggtgctgcccaccccgggggcaggagtgaccaggggaggggtaaagagggggccgcataggctgaaggcatcttccctgctcagggccagccaccgcattccgggtggatggagacagccccgagagccggctgaccgtgccgggcctcagcgagaacgtgccctacaagttcaaggtgcaggccaggaccactgagggcttcgggccagagcgcgagggcatcatcaccatagagtcccaggatggaggtaggcacctgtcctttccttcacccccacccctcctcgggccgtgcctccttctggcaccaccctctgactggcctatctgcccaccccaggacccttcccgcagctgggcagccgtgccgggctcttccagcacccgctgcaaagcgagtacagcagcatctccaccacccacaccagcgccaccgagcccttcctagtgggtgagcactgagggctaggggatcccggctctcctgggacagggagctagcagagggagaagggcagaccccaagccaggtcatttaatgcctcctcctccacagatgggccgaccctgggggcccagcacctggaggcaggcggctccctcacccggcatgtgacccaggagtttgtgagccggacactgaccaccagcggaacccttagcacccacatggaccaacagttcttccaaacttgaccgcaccctgccccacccccgccatgtcccactagcgcgtcctcccgactcctctcccggagcctcctcagctactccatccttgcacccctgggggcccagcccacccgcatgcacagagcaggggctaggtgtctcctgggaggcatgaagggggcaaggtcc

SEQ ID NO: 392824 - DNA, 1000 bp, Homo Sapiens
tgcacggctctgctcgcagagggcataacctgggtcctggtttacaggacagacaagtacaagagactgaaggcagaagtggaaaaacagagtaaaaaattggaaaagaagaaggaaacaataacagagtcagctggtcgacaacagaaaaagaaaatagagagacaagaagagaaactgaagaataacaacagagatctatcaatggttcgaatgaaatccatgtttgctattggcttttgttttactgccctaatgggaatgttcaattccatatttgatggtagagtggtggcaaagcttccttttacccctctttcttacatccaaggactgtctcatcgaaatctgctgggagatgacaccacagactgttccttcattttcctgtatattctctgtactatgtcgattcgacagaacattcagaagattctcggccttgccccttcacgagccgccaccaagcaggcaggtggatttcttggcccaccacctccttctgggaagttctcttgaactcaagaactctttattttctatcattctttctagacacacacacatcagactggcaactgttttgtagcaagagccataggtagccttactacttgggcctctttctagttttgaattatttctaagccttttgggtatgattagagtgaaaatggcagccagcaaacttgatagtgcttttggtcctagatgatttttatcaaataagtggattgattagttaagttcaggtaatgtttatgtaatgaaaaacaaatagcatccttcttgtttcatttacataagtattttctgtgggaccgactctcaaggcactgtgtatgccctgcaagttggctgtctatgagcatttagagatttagaagaaaaatttagtttgtttaacccttgtaactgtttgttttgttgttgtttttttttcaagccaaatacatgacataagatcaataaagaggccaaatttttagctgttttatgt

SEQ ID NO: 392825 - DNA, 1000 bp, Homo Sapiens
aggtagcttttaaatggggatttcctttatagatgtaaattttccttacacaagggtaacttctactgtgttttcagaactttgttagcattttttaaaaaatagcttggaataattcttaagccaaagggacatattttgggacagcatattctggttacctaccattatattttggggtggcatattttggtcttatacactgtgttccacaggcaacgaaaagagttcttgtttttcctgcagcaatttgtcattttttaaagagcttagcagttctaagagctatagagtagctgtgctatctcattgtggttttcaattctctagtatgttgagcatctttttgcacgtttacttgccatagatcttctctgcgcctgcgccggcgcggggggcctttgcgagggcggagctgcgttctcctctgcacagccttttggggtaccgcggaggcgaagcagcattctcctcagcacagacgcgggcggttgggtgggacgggggctccgcgaggttggagcggcgttctgctcaccacagacccaggagacaccacgaaggcagagcaccgttctcctcagcacagaccttgggggcactgcctcgctttggcacgactcggggcttcattgatggtgaatacaatcctttctgtttgcagcgctgaatattcagggtcagagaacagttagaagggttcagtgtggaaaacgggaaatcaaaagcccctctgaatcctgcgcaccgagattctccccagccaaggtgaggcggcagcagtgggagatccacaccgtagcgttggaacacaaatgcagcattacaaatgcagacatgacaccgaaaatataacacaccccattgctcatgtaacaagcacctgtaatgctaatgcactgcctcaaaacaaaatattaatataagatcggcaatctgcacactgccgtgcagtgctaagacagcaatgaaaatagtcaacataataaccctaatagtg

SEQ ID NO: 392826 - DNA, 1000 bp, Homo Sapiens
  misc_feature (419)..(419): n is a, c, g, or t
agcttgtttggacacgagtttctgtgtctgggcctttgcactcacactaggcttgccaaatttagcaaataaaatgcaggatgcccagtgaaattcgagtatcagataaacaacacaccatattttagtataagtacacccccaatattgaaagggacacacttatactacaaaatgatgccatgtttatccaaaactcaaatgtaactgagcatccggtattttatccagcaaccctggctctgactttccctgcactcacgtttctcttgttaaagtagtaacagttactgtttatggaggtgtttttggacagggccaagagctgcactaagcattttacatacattatcccagcaaacctgggaggtctagatgattattatcctcattttagagctgaggaaacaggctcaganaggtgaagtaagttgcttgaggtcacacagccaaaggtggcagagctgggattgagcccatatctgtctgtgccccaagcctgtggctttaactgttgaggggatttgggcagcagaggaggtgggacaaagggagggcttcctggaggctgagtttattatttgggaaaccagtaattaaaagcatgtagaacctgaggtgtgagctccccaaccctggcagtgacatgctgtctcctgtcttccagaatctccgccacctccctactctcggctgtctcctcgcgacgagtacaagccactgggtaagtgtgccctccttcctacccttgcagaggtgtgtcccgaactgggtcctcttcagcccagtgtctgtcagcctcagggctggagggctggagggctggaggggaggggttaaagccggattggttgctgtgaaatggggtgaagttgtacaaacactcccacagttgggccaaagcagacccagcttctgcagcaggctatttacatctcgaaattccgcggctcatcattaacctctctgtgacctttttaaacatgggcctgtcgaagat

SEQ ID NO: 392827 - DNA, 1000 bp, Homo Sapiens
tggatctgtacatccaaaaaggagtggaaaattagatgataatcgcccaactttggctcctagacccaaaccttttctctaaaatgggcactggtgcaaataccgtgaggccttcctacaaagaagtgccaatctcaggcgccagggcacagacccagtgcgtgtcacagatcctgtcctgagtgctaggccgggtgacgcccccaccaggattaaagatcaggcgcccgctgagccctaggaagcagtgacagacacctgcgcctaggcggagcgagaagagcctggaatggctccgggctttgcgtcacgcagctccgcccctcggcctatctcacccgacgccgtctccgagggcagggaacggttggcggactgagattggagggatcagctcagactcgatgacgcaacgggaggcggggcgtggccgtactctgattggtgacgggtgaggcggcccgaaatcgtaggacttccgaaagcagcggtggcgtttgcttcactgcttggaagtgtgagtgcgcgaagatgcgaaaggtggttttgatcaccggggctagcaggtgaggcctcctttgggttggcagaggcggcagcggatcaggagtccgagagagcatgggtctgcgaccctccacgaacggaccccggaagcgcccgcccctggctttgcctaggttccccggagtctgcagcaggtgtggggcatgtcggcctcttgaggtgctcagtaactggtgctttgtattaaacatgacagtgaaaaggaaaactagagcatcagtaagtgatgagtgtcgcagtgatgatcctgaggttatcaaggcaatggggtactcaggcgggctccgccccttttccatctttgcctactgttcgtatttatcgtcagtgcccaatattttgctcctgaccacgtgatcatgtcttatactccaggtgttttgtctgtacaagccttttgcctacaaatttgaacacccatgaacattaggac

SEQ ID NO: 392828 - DNA, 1000 bp, Homo Sapiens
  misc_feature (158)..(158): n is a, c, g, or t
acacccaccttggcctcccaaagtccctgggattacaggtgtgagccaccacgcctggcggtgggataattttaaaggatgagtgggagttagtcatgcaggctgataagggagggtagcaaaggccaaggaggagaggaagtgatctgtgatgtggntgaaggaatgccagaatccatagaatccctgctgatatggccccttgttccacagcctgtgacctgacctgcccaatgggccaggtgaatgctgactgtgatgcctgcatgtgccaggacttcatgcttcatggggctgtctcccttcccggaggtgccccagcctcaggggctgctatctacctcctgaccaagacgccgaagctgctgacccagacagacagtgatgggagattccgaatccctggcttgtgccctgatggcaaaagcatcctgaagatcacaaaggtcaagtttgcccccattgtactcacaatgcccaagactagcctgaaggcagccaccatcaaggcagagtttgtgagggcaggtaactaaattctttggggtagggctggtgagaaggtccagatttttaaataaagggattatagtgctaaaagctggcttcccagctaacttggagtaaaaccccgaatccttaccatggcccacatggcactatattatctggccctccatttcttctctgctctcctctcctgttactcgctctacaccaaatcactctactccaactgcaatgggctcctatctgttcctcaaacacacaggcacattcctgcctcaggccttcctgcttgctgcatgtatctgtttaaaatgttcttccccataaatattggcgttggcttgctccctccaattttaagtctcccctggccacccttatcttacggtcatacaatatattttgcggtttgcaggtcccccaaaaaaaaggctttgggaaatttcaaaaatggtgccagaatggccaaaaaattcttcccagggggggg

SEQ ID NO: 392829 - DNA, 1000 bp, Homo Sapiens; identical to SEQ ID NO: 201544

SEQ ID NO: 392830 - DNA, 1000 bp, Homo Sapiens
  misc_feature (889)..(889): n is a, c, g, or t
ggactttgtggaatgaagtttggggttggggtgaagggagcatgtcaaggggagatgtggccctgcttttgggaaggttgtagtgagggtgtacagggccatctcctgacgacccccattcctcttttcccccatcctgtccaggtgagggccctgctgagcccgctacgtccacgtccagctcagactctgctgtcccctctagcatggcctcagctgggtttgccctgggaaggagagctgagaggtgcgtgtggccaagggcttgggtaagctccagcccgggtcacgggtggccaaggcagaggaaccctgcttaactccgtggtgccctgaggtattcgagggtgtttgtcttccttggcttccttttttttatttgagacggaatttcgctctgtcacccagctggagtgcaatggtgcaatctcggctcgctgcaacgtctgcctcccgggttcaagcgattctcctgcctcagcctcccgagtagctgggattataggtgcccaccaccgcgcccggctaattttgtatttttagtagcgatggggtttcaccatttttggtcaggctggtcgcggactcctgaccttaggtgatctgcccgccttggcctcccaaagtgctgggattacaggcgtgagccaccgcgcccggccttccttggcttcttggtcaccacacagagagggcccttcagcaggtcagtctaggtagctaagggacacatggagtcatgtgctcactcatggttgagttggccccaaaggtgtggaagaatggagaagcaaagcattaaccctttggctcagaacctgaaagggaagaggcaccttaggaagggatgagtcactgaggaaccactgcaggcagtttgctgattttncacttactgtcacccactaagagttgatttatcttgaggcacacctgttttacgccggcgccgtggcttagctggttaaagcgcctgtctagtaaacaggagatcctcgag

SEQ ID NO: 392831 - DNA, 1000 bp, Homo Sapiens
accagtgtacgctcgatagtaaccactctggtaccctccgagctcatctccgccgtaccgaccacaaaaagcaatcatggtggcatagcatctgagtcacttgcgggtggcctagtggaggagaaggtgggatcccatccagaacttctacccagcatagccccgtcgcagaatttagtctcaaaggaaacttcaaccacagcactgcaggcctctgttgccagaccagagctggaggtaaatgctgccatagtctctggacaaagcagtgagcccaaagagatagttgaaaagtccaaaatcccaggccgaagaaactcccgaactgaagagccaactgtggcctctgaaagtgtggaaaatggacatcgtaaacgatcttctcgacctgcttcagcctccagctctactaaagacataaccagtgcggtgcaatccaagcgaagaaaatccaagtaaacaagcaggactgcgacttgatacttggaaatgtgtgtgacttttacaaagagcaattttgagctgtgacttttttaaatcaatttctgtacagttagtaattttaataatgtggcccttttcctagtccctgcaacctgtttcataaagtgcaatggggaaagcaggactgttgagcccttttggtgttgcgagttgaagttcaaggtttctaaaatgttgtcttgtattgaaaggagctaatgccattataaatgttactagttttcacatttcctaagcagcctagagtacagggtgagcatttttagatctcctaatgatgtattgtgccgtggaagtactgtgtgtgaatagcagtagtgggggcaaaagcaatcttctcatttggaaatgttgtaaataattttattatatagtgttttggatgtatttgttgtagaaatggaccagtgaataaagagaatctaaggatttgtacaatgtgaaataacgtgttaaataaatgtcattgtcatagaacataaaaaaaaaaaaaaaa

SEQ ID NO: 392832 - DNA, 1000 bp, Homo Sapiens
ccagtttagaacttgtggttgagccgtggattgctggactctggccagccctcagaaagcattttaggtcaagcagaggacaagaggagataagtggcgcactcccggtggcatcacctgcatccttgaggacagaccttgtgaagtcagagctgctacacattgaatctcaagtcgagcttctgagattcgatgattcaggaagaaaggattctgaggttttgaagcaaaatgcagtgaacagcaaccaatccaatgttgtaattgaagactttgagtcctcacttacccgttcggtacccccactctcacaagcctctctgaatattcctggtttacccccagaatatttacaggtacatctgcaggagtctcttggccaggtaaggaagtttttctttatgctatagatgctatttaatcatggatgtttgctttgggcttttaaattattattacattagaagagaggtcaacaaactatggcttactggcccaatgtggcccagagcctttcttttgtaaatagattttactggaacacagccatgcctattcatttaggtagtgtctatgacagcttttkagctgcaatagcagagttagtggttaccacaggggcctgcaatgcctaaggcatttggccccttccagtaaaagttttcccacccaggtattacaaaaggtcttgtattattacttctgtatttgaagaagtagataagaactcagtttcatcattattttggagaactaacaacttggtttctcattttagatgagtcaaacagagatgagttgtgtgggcagtgagttgagtatcacattgcataatagctaatttctccccacaggcagtgtatggtaccctgaagtttttctaacctgcttaaaataagtttccagagcaggcagtctttgaacgcagggctaagccctctttctgttgagtggctgtttggagttccacatggacttttcttacaaaaaccacaccctt

SEQ ID NO: 392833 - DNA, 1000 bp, Homo Sapiens
ggctagcccatgggctgagatctgggcaccttcctgccccgcctgcctcatgcccctgcgaccaggtgcactgtctccccacaaggggaccgggcaggcacagaggcggaggatatgctgtggctggtccacctgtctcagggggaagcatgtccttcactggtgacacctaggccggaggaggagagggcagggccacggacttgctctgggctctaagactgaggccctgggctcagcttaggctgcagagctcacggggctggggccaggctgtgaggtacacagggccaggctccttcctgtccttggtcacagggccacccccttaaccctcgggactactgtggctggacacctctgcacgaggcctgcaactacgggcatctaggtgagcaagggacagaaggagcctggcgcaccttggtggacacgtggggcgaagagtcagtcctggcggggcatcgggagctgggcttacgtctcctggtctgcagaaattgtccgcttcctgctggaccacggggccgcagtggacgacccaggtggccagggctgcgaaggcatcacccccctccacgatgccctcaactgtggccacttcgaggtggctgagctgctgcttgaacggggggcgtccgtcaccctccgcactcgaaaggtgagcctggtggggcagagggcaagggcgaggttatgggggctgctgtgcccctgctcaactgatgccacacagggcctcagcccgctggagacgctgcagcagtgggtgaagctgtaccgcagggacctggacctggagacgcggcagaaggccagggccatggagatgctgctccaggcggctgcctcgggccaaggcaagcagggcgtcccttgtccctggggttgctgtgcctacgctgagagtccccgggccctgatttcgggagatgctccatcacaggtggagcgggaggtgccgggcccctgcctcaacacgcattctctctcccacaga

SEQ ID NO: 392834 - DNA, 1000 bp, Homo Sapiens; identical to SEQ ID NO: 203265

SEQ ID NO: 392835 - DNA, 1000 bp, Homo Sapiens; identical to SEQ ID NO: 114999

SEQ ID NO: 392836 - DNA, 1000 bp, Homo Sapiens; identical to SEQ ID NO: 283145

SEQ ID NO: 392837 - DNA, 1000 bp, Homo Sapiens; identical to SEQ ID NO: 283146

SEQ ID NO: 392838 - DNA, 1000 bp, Homo Sapiens; identical to SEQ ID NO: 115000

SEQ ID NO: 392839 - DNA, 1000 bp, Homo Sapiens; identical to SEQ ID NO: 283149

SEQ ID NO: 392840 - DNA, 1000 bp, Homo Sapiens; identical to SEQ ID NO: 201540

SEQ ID NO: 392841 - DNA, 1000 bp, Homo Sapiens; identical to SEQ ID NO: 283152

SEQ ID NO: 392842 - DNA, 1000 bp, Homo Sapiens
ggtggtgttttcctcacctttgtacctcagcacaaagttaagcaccagttctggagtaacagatcagtttggggccctctgagatatgccgtggtgaaagcaatcatgacagtcctaagacattagggtctagggccggatacgcatcatctgaaattgatgtgattactatgcctatttcacaggcaaggaaactgaggcagaggcaattggctgaggttatccagaaccaggacataaacgtacccagtctcatctcagtggtgtcacccactggcctcactctgcctcctcaacagccctgcctccagcatcaacctctgcctcttcaccagccctgcctccagcaccagagctcaggctctgggtccttcccagtccagcaacgcccctgccctgtgtgagcttgggagcctcacctgctgaccccagccactcttggcagctctccctgttggctggcccttccacgagagcaggacccctggcagggggtgcaaggctaccaccctcccaggctctgctcactgtcagcaggggaggcggggaactctgggctaaaattagattccgggattcttcgtgctcccgcatccgtccgctcttccatctgggcttgggaaaggctgttgtcagaaggccagcgctggaagggcctggatgtcagctcgcaccctcccccgggcttgtctgctctgatcttctcacaccctggactgaccctggccaaaggctcctgcccttggcgtggccttgaggccagcgattgatcagcagtgatttcaggatgaggtgcccctttactgcgcaccactaccccctgggattctatgttcccaccttcctctgctctcccttctcctcccttcctcccttcccctatcctggcccttcccacttccgggtcctcagcgactccccctcctccaagcctcctgttgcctcctgctgatcccctgacccctgccttgcccagggggatggtcctggctcttcctga

SEQ ID NO: 392843 - DNA, 1000 bp, Homo Sapiens
atattcagaccagaaggacttcagggtaaaggtgaccatcctgggaagagatgttctcttcccagggtctcttcctggggaaagcaggtgaaagaaggattaaatgggagctctgggcaggaaggcagaagggcatcaagaagacctcaggacccgatttaaatgaatgaattccactcctcggtttctcaagcttcaggtttcatgtgtccggtagctgccatttgtagctgctgcccactgcattggattaagcagatggaaaacttgaatgttgcagcaagtactgttctagggtaatgctgaacacggggtgtgaagaatacgtttattaaaaagtgagagatgaagcgagttgtagtggctcatgcctataatcccagcactttgggaggccagggcaggcggatcatctgaggtcagaagttcaagaccagcctggccaatatggcaaaaccccgcctgtactaaaaatacaaaaatgaggccgggtgcggtggctcatgcctctaatcccagcactttgggaggctgaggctggtggattacaaggtcaggagtttgagaccagcctggccaatatgttgaaaccccatctctactaaaaatacaaaaattagccaggcgtggtggcaggcacctgtagtcccagctactcaggaggctgaggcaggagaatcacttgaacccgggaggcggaggttgcagtgagccaagattgcgccactgcactccagcctgggtgacagcgcaagactccatctcgaaaaaaaataaaaaattagctgggcttggtggcatgcgcctgtaaccccagctgctcaggaggctgaggcatgagaatcgtttgaacccaggacgtggaggttgcagtgagccaagatcacaccactgcacttcaccctgggcaagagtgagactccgtctcaaaaaaaataaagagatgagaaactgtggttgccatctgcaccttaagaggtcccatattctattacttgat

SEQ ID NO: 392844 - DNA, 1000 bp, Homo Sapiens
tatcacacctgctccccagattcccaccccctcaatgttcctctcacacgaaacccccatcagtccctttggttaattcttacttcctgttcatctctaaagtgttaaattataaaaatgatttttaaatattcaaagaaaaatatcacaaatcctactactcagaaataggtggtcacattacatcagacatctctttatgcatgtgcattcaaaaggaagagtagatagaattttgtaaaacagatgttgtatgtaatttataataaaaagtattagaggaattttacttgaatttattgtttgacctgttaagtatctagagtcctctggagaatactaaggagtctggccagggaaattagcgctgggggccagagggcaagggggatagacctggccaaggaatgtcatttggaaagctaaaggggcagggggtgggggtctttggaaggaaaacgatagtttgaagttacaggaaaatatctggccctgactaagtgggggactggggaagaagctgggctgaggtcaggagaggctgctctgcacagatcctgctccttcccagtgctgcattatcttgaaattttccttccccttccccctagccccaactctccccaactccaaccctgacccagaaagtagagtgatttggaggctggaagacaaaaccatgtaaggtctgtggaaatcacagctgttcagacccgcctccaaccccggccaccccgcccccttgccctagccttcctgtgtccttcccacccttagtcccaggcatctgactaccgggaacctcagccagagtccgggagccccccaccccgtccaggagccaacagagcccccgtcttgctggcgtgagaatacattgctctcctttggttgaatcagctgtccctcttcgtgggaaaatgaaccagaagacaatcctcgtgctcctcattctggccgtcatcaccatctttgccttggtttgtgtcctgctggtggg

SEQ ID NO: 392845 - DNA, 1000 bp, Homo Sapiens; identical to SEQ ID NO: 283153

SEQ ID NO: 392846 - DNA, 1000 bp, Homo Sapiens
ccagtggctggcagaacccaacacatgaacactgagccacttttcctatgcaagccctaacccctaatgccggagagacccacaatggaacacacacccagacggtgcttcgggttggcttctcctgacccccctccccaagccacctcctcccactgggacgccaggtctgaggaggcagctctgaccctgctgtggccctcacaggctctgccccagcccctctcccatctcggaggcatggggctgtttcctggggtaccccattaccaccttcctgtgtccgagactcctgcccaaaaggctagagccccagcctgctttctccaacaccctcgtgggatttgtgagggaccctctgggaggaggtgtgaggtcaggaccccctgcccaaagggagtccatgctttcccatcccactcctctcagcagcaccgccgcccgattccacagactccaaaatgtctccaaatgaattaaagaagccacggtcaacccacatgaatgtgccaacaagcattttcatttctttattttaaggacactgggaaaggagccagtcccctgaagagaacactctggtcagttggtggaggccagtgggatgccatcaggctggctttccaggagggggtgaagggttgatgcagggtgcaaggtgagagttaggttaaaggtcagaggggagggactgaggacgtcacctcccaccaggagtggacagctggtggcttgagactggggtggagctgcgtgggggatgggaggggactgagcatggggcttcatcttcactgcccactccccacctctccccagctgtgcccctctcatcagacccccaagagttgttgatctgggtgttgtggaccacagcgttctcatcaaaacggggattgaggtggaaggcgatgtggttcccagagtgcgggttgatgtggaacctggggtgggcagcccacctggacctttgtccactgagttctgggccttatttcct

SEQ ID NO: 392847 - DNA, 1000 bp, Homo Sapiens; identical to SEQ ID NO: 283154

SEQ ID NO: 392848 - DNA, 1000 bp, Homo Sapiens
cctttcctctctgcacgtccaggctgccccccggtgtggaccccacccaagtttcctcctccctgtcccctgagggcacactgaccgtggaggcccccatgcccaagctagccacgcagtccaacgagatcaccatcccagtcaccttcgagtcgcgggcccagcttgggggcagaagctgcaaaatccgatgagactgccgccaagtaaagccttagcccggatgcccacccctgctgccgccactggctgtgcctcccccgccacctgtgtgttcttttgatacatttatcttctgtttttctcaaataaagttcaaagcaaccacctgtcactggcccaggccctggtgtttgtggaaggaagcctcaggcacctgccatttgctggctttcaggagtcatctttgctcaggcccgtgctgggccatgtgggtacactggtgtaggttgctggacacaggctgactcacatccataaagacagaggtcttagggccgggcgcagtggctcatacctacaatcccagcactttggggggttgaagcaggaggagtgcttgaagccaagagttctagaccagcctggacaacatagtaagactgtctctaaaaaataaaaattaggcagggtggtactgcacgcctgtagtcccagctactcaggaggctgaggcaggaggatcgcttgagcccagagttgtgaaggtacagtgagctaacatcgtgccattgcactccagcctgggcaacagaacaagatcctgtctcaaaacaaccaaaagcccagagagaaagagtgagaccccatctttaaaagaaaaaaaaaaaaggtcatgattgcaaggtcacgattgcaattaaaactgtaaggtggggaaggaggaggaaataagagaagcacctgaggcttgagttctcaggagcacctaggttgggtcccaggtgaaggggcacagaggtaattgcacctcagagctgatgggaggattactatgtca

SEQ ID NO: 392849 - DNA, 1000 bp, Homo Sapiens; identical to SEQ ID NO: 115001

SEQ ID NO: 392850 - DNA, 1000 bp, Homo Sapiens; identical to SEQ ID NO: 283156

SEQ ID NO: 392851 - DNA, 137 bp, Homo Sapiens
ggtgtgattttattgtttctttcttctgagtttggatgctgtgaagctttgtgtcttctttccactgccttcccagtttgcatttggagtttaggttggcactgtgggtatgtattttcctcagtatatattaatag

SEQ ID NO: 392852 - DNA, 1000 bp, Homo Sapiens
cccaggtttccatgtatcagcagtgccccagaaagtgtttcccttcctgagactctagggaagccttggaatgcaaataacttgaaaagagagcctggccaaaaaaagatttttgagccttggtagggttagtgaagcaggtttttagtacaaacacaactcaaagtatgtgtgttattaaaagtagctattttcatggaagtcttttggtactatttgttttggctagagaagtgaaaagctttcttttaaccatgtgaccattattttgcaagatcataacaaacaattctaatatctttaatctcactaaagagtcactaaagttatttgatgtaccttttgaaatagaaaaccaacaactaaatcttctctaacaccatgattttctaatctgtattaaagcgttccaggtatttttgtaatgcaatggatttcaattatgttgttcattttcagcacttacttcaaaagaatgatgctttacaattttgtagttaatttaacatatttttttgtttgcttgaaagggtagaagtaagacatatcaagatttaaaacataaatagcttggaacaccctgaagagcaacatgggagaaactgagaaaagaattgaaacccatagaataagatgtctttccaagttgaaggtatggaatttttgtatgtggatatatgtgcatgtacactagtttttaaaatacgacagtcctggtaaaattgctcctatctgcatgaagtgatctaatattaatgccatattgcctgttctattgataatttcttgctttaaagaagttggttttataactgagggtgtgtctacacaggattattgattcaggcaagttagtcctaaatggctttgagagacttaaatggaagacaggatcctaaaaatttccaggcacacatactgtggcaggatttatttttctggatcaaaggccatgctcactcttgcagggtttctaacccagagaaatgtgggagtcact

SEQ ID NO: 392853 - DNA, 1000 bp, Homo Sapiens; identical to SEQ ID NO: 283158

SEQ ID NO: 392854 - DNA, 1000 bp, Homo Sapiens
tattggttggtcatatcactggaaactggaacctttgattagcaaaattaatattgaaataagaaatagttcttttatattgtgtcatttggacactttcaagtacaaaatggtaataataacttggattgaggcagaaacacctattttatggctatctatctaaacatcttaaaatggccttctctgtaatacactttcttttaaaagacttcactaaatctatctttaaaaggaaaaacaaaagggagaggttgaaaatgcgcgagctgccctgcactgtgtgatgctccctccccgggagacgtggacgggggacgaggcacccgcagacgcccttctgctcactcgctcctctgtgcattcagcgagccacttgccacagatggagcccgtgacggtgtggagggtttcctggaaaggccatcttccaccaggtagaggcgagcgtgcctaggacaggccacagggctccacagaaatacctcaccccagcttcagggttctctctcctgagcctagatttgccagggtcttggtgccacgcaaatggtttcaaactgatctctatggataaatgctgatgttggttaaagaactgaaaaatgtgctcaactgtttcatcttttctattttatttttgtaatttatattgtacacaacccaggaagtaactattttggacatgtatttttataaaccaggtaatttactattatcctggaatttagactaggtttgtttcatttgttgacttagtttccagccaagaaggaaacgactgtctcccccatgtccaggtctcagtttcaagggcagagtccagagagcagacagagttctgtgagagcaggagagcagtctggaaaccctggctgtgcataccgtgtcagccgtgggcctggagatgggagcaggtgagacgcagagccccagtactgagaggaggaagccctcttacagggccccttgcccaccccaagtccgtgtctgaaacacg

SEQ ID NO: 392855 - DNA, 1000 bp, Homo Sapiens
agtaccaagaggatgaagagaagatgttttgcgttgctacgtgaatcagtggatgactcatatttcacttgcatatgaaatataaggcagttaacatcttgtttgtggcttaagcaaggacattaatcctactagatgaaggggaagttggttctgttgtcttaagggatgcccccttgtgattttggtcaactgaatgaaaaagaaaagatagccttggacttttttttcatgggaggtttggaggtcaagcatgtagaaggaaaaggctgtagtcatgaatatagaactgtctgctctccaccttttcctcactctacatttagtcatcacactgaacaggatgtggcctgctgacagtgagtagctgaagtgcctgtttggtaagtaggttagcattcatcatgaactctgaaagccatttcagagtttggctgctgctctgaccctgctgtggtacaaaaaacatggatttttttttttttaactggagtaataccaaattccctttagaagcttgaagtttgatactattgctttccccattataaggattatacagtattaattaattataaggcccaaagtttgttttggcaaataaagtattattctctatcatcatcttttgaattcctgtccctagtatgttctttcatgttctgggtaaaatttccaaccctcaaagagtctaaaacgtctcatttttttttaccacgtcctccccagtaagaagccaaggtacaactcattgtacctacgaggtacaaactcatttgtagaaacaaagtaactagatattcctattgaaataagaatagatatattggtgggccaggcatggtggctcacgcctataatcccagcactttggaaggccaaggcaggaggatcacttgaggccaggagttcgagaccagcctgagcaacatggtgagaccctgtctctacaaaaaaaaaatttataaaaataaaagaaaaaaatagttatatgactaaa

SEQ ID NO: 392856 - DNA, 1000 bp, Homo Sapiens
aaaattaactttatatgactcttcaaaaacagtttgccatcatacctaataatctggtttaaattttaaaaactcatccattttacttaaaatttaaatcaaaaaagaacacaggtttccatgaatttgtctcaggcctggcacagaatagtactccataaatattttgttaaatgatagatgatgaatgctctcactgtccaatcttcacacatcttatagactaagtataaagaatccaagatttatagtgctgaaagtagtttttatatgtttacaaagcattattgtcattactgcattttttttgcccattactccatagagatcagaatatcactctgttgtgtcccctcaacactgaaggagtgtctcactcactttgatgctatactttctacttttgtttatttaatgcttctcaatatgcttgtttaactgttgcagatccccctgaaattaagcttaggaggacttcttcaaccagaaaaacccgttgttctaaaggttgagtcaagggatggcaccgtaagtggagcctgaattttcctaaggacttctgctttgctcttcaagaaatctgtgcctgagaacaccagagacctcaaattactttgtgaatagaactctgaaatgaagatgggcttcatccaatggactgcataaataaccggggattctgtacatgcattgagctctctcattgtctgtgtagagtgttatacttgggaatataaaggaggtgaccaaatcagtgtgaggaggtagatttggctcctttgcttctcacgggactatttccaccacccccagttagcaccattaactcctcctgagctctgataagagaatcaacatttctcaataatttcctccacaaattattaatgaaaataagaattattttgatggctctaacaatgacatttatatcacatgttttctctggagtattctataagttttatgttaaatcaataaagaccactttacaaaagta

SEQ ID NO: 392857 - DNA, 331 bp, Homo Sapiens
gttggcaaggtttaaacataaatccacaaattacattttgcatgttttcttcttttgggtgtgcttcaatttgtccttcagtagttggccaatctttttctctgtgcattcttccaacacgacccatatcaagctacagaatgtcagtaaatactgccactttcccccatgaactccacaatcaggggagtgtttctcactgtgacattatccaagtatgtctcctgtgtagtacttatgctgctctcaagggcatacatggtgattctcctgcccaggcattggaggcaatcccagcacctccatagcacccacctctccccaagaccct

SEQ ID NO: 392858 - DNA, 1000 bp, Homo Sapiens
acttaccagagtgtcagggcttctgtaccctgggttagaatcagaccaaggaagggttcagcagatgttcataagagcagggcacccacaactacccactattttactggcagtattttaggtcagtttccaggactttgcatcccctctgatcctgccatgcatgattggtgaaacctacctctaatctccttggaattggctaaaaaacagtgtgtttataatggaacagactgttataatcaaattcttcctaggaattaacttttgatgactatgagcttagttacagttcggaggttatgaggttatgtaaaccttatctttaaatgtgcatgacagttatcttttactaatgctggttaacttttaaaatcttgcagctcctttttatctctagttctattgttcttgattaggtgagaaccattagatcatacccaactgaggggattggggtcttgtttgttctccagctgttcttcaccctctattgccatggacatgaaggacagactgcacggtcttaacatgttaaaacgaatgacccatgttttctcatattcacattctctagatgagagcatgagagtatagcacaagaatttcatcctttggcagttccatccacccttttgatttctctgcttcattggttctaatattcttggttaaaactgttttcaatggtgtcgactaaaatgtgttatcttgcatatgcgtatttaatatataaaacataaaatacataaatatacatctaaagatgtatgtaatatgtagtacatatgtatagatgctggcattttcagtttagtttcagagattttataatcagacactctgaccctcttggaagctcacatgagaaacaatatttttacaaacatcctacattgttacagacattttagctcacagtcttcattccgaggaataaagagtcaaaatgaacataacactgaatgtctttaattgcactcactattctataggatcc

SEQ ID NO: 392859 - DNA, 1000 bp, Homo Sapiens; identical to SEQ ID NO: 283162

SEQ ID NO: 392860 - DNA, 1000 bp, Homo Sapiens; identical to SEQ ID NO: 283163

SEQ ID NO: 392861 - DNA, 1000 bp, Homo Sapiens; identical to SEQ ID NO: 218943

SEQ ID NO: 392862 - DNA, 1000 bp, Homo Sapiens
ctgcgatttgtgaacaccctgtgatgtaatcaagctctggacaaatcagaggagtctgtcaacctcccaggtgggattgcttatagttaatagactaaacccagagcctcaaagcagtgcctccgtgaaggcaaagagaacacgctgcaaaaggcttccaagaatcctcgacatggcaaggaggagctcgttccagtcgtgtcaggtgggagaacggaggaatgacgggggacatgcttgatcttcagaatcagtgactgattggcattttcctttttgttgtgcaaattaagatagcaccttattatgcattttggaagtggtaggattgggtgttgatattgaagccatttgaatcacctttgtgtaatttgatttagtcttctccagctgtcatttgacaacttggtctctttcattctcttagataatatccctgttcacttttgccgttggagtcaatatctgcttaggattcactgcacatcgaattaagagagcagaaggatgggaggaaggtcctcctacaggtaagtgtcaaaactatttgcattttcaattttttaaaaatattacatacggggtaatcaatgtaagcttattaaaatatttatttttaatacaatcttgcagtataactaagttagtcctaaatttctctgggtaaaaccacctatgtgtataattcaggtgggagagtgtggttttcattagagaacatttatgattgtttcataactggctatttccatttttgtactcaaatttgtaaatgttaggatacaattaaaactcttgttcacagacaaggctaaagtagaagtggtgagaacaggtgttggtttaatattggagctacccaaatctgatttgctgtcacatgatataggatgtagtatttgccactagaaagttctgatgtaggaaaaaggaatggaagtaaaaaaggcagtgagctatctttatgaaacttcgaaatttggctttaagatttacttaa

SEQ ID NO: 392863 - DNA, 1000 bp, Homo Sapiens; identical to SEQ ID NO: 283174

SEQ ID NO: 392864 - DNA, 1000 bp, Homo Sapiens
aatttgaagtcaaagaagtgtttaaaaccattcgattaaaagagcccagagtttcagttactgttcagggaccataggaggaattgaacaatttaccatatgggctgaatcacatggtcccaggtcccaaattgctttacccttcagtaagaagaaattttaaaactgagacaggaggaaaagaaacccacaaaataattccattactgagaggtttttgttttccccttttcatttaggtgacaaaatggaatctcttcaaacgaaaatctaaacaaactaccaactttgaaaatccaatctatgcacaggtaatttttaacaatttttcttagcacagacattttttcttagaaattatttgcttggttaaattggacacacacttagattattctgagcagagtggccacaaatagtcttctttatgaaaaaccgtgtatggtgaccttgggggaataaatggctgattcctgttacattgtattcttagatggagaacgagcaaaaggaaagtgttgctgcgacaccacctccatcaccttcgctccctgctaagcctaagcctccttcgagaagagacccaactccaacctattctgcaacagaagacacttttaaagacaccgcaaatcttgttaaagaagactctgaagtatagctataccagctatttagggaataattagaaacacacttttgcacatatattttttacaaacagatgaaaaaagttaacattcagtactttatgaaaaaaatatatttttccctgtttgcctatagttggaggtatcctgtgtgtctttttttacttatgccgtctcatatttttacaaataattatcacaatgtactatatgtatatctttgcactgaagttgtctgaaggtaatactataaatatattgtatatttgtaaattttggaaagattatcctgttactgaatttgctaataaagatgtctgctgatttggttggtgatcattatagtaaat

SEQ ID NO: 392865 - DNA, 1000 bp, Homo Sapiens
atgacgaaacacccactagcattgatcttttattcctcttccctataaaataaaggccttggaaatcacaattttatttttttaaagaagttgttttagtgcctagagtaagaccgcatcaaatgttgttaaagaacctaatttagattgtgtggtatataccactgtttatctcaatacacagacacctcttacttcttgttataagtgagaactctaaagaaaaatcaaactcccaagttttctgtaaacatacgtggtcttaatagggtcactgtctgaggcaaaatgggttgtcttaaagcaattgctacaaatttgcatcaaagaaactagatagcaaaatacaacaaccatgtaccacccaggcagaagagtcctcacctatacgcagttctgcatattgatcatcatgacaggaagtatttcgttttttaactgatcccaggtgcacagatgtattcataaaggaagacattagatccagccattgtggccaccaggctctgtggacccatctcagtggagaattcgttttggacccgtggctccgtgcagctgtggactcgagtgccatccactggtgtgagtcttgcggggaggccacaggtacagctgctccccgtgaatcctggtctgtgggttgagaaggggctcgggcctctggaatgctctagcgtgtgacgtgttctcaggaaaacgttctgtgccaagtgccgcctcgctgtgtccggcatgggactgcgctggagggtccggcgtggaaggcagacctcctgtacctctatcgttcccatttgtggcatccaaaggcggaaggctcatggcttccccactagaggcggcgtcttgggctttcccattggattgtgaaaggcattaagactgtttggagatgttggctgtatttcctgtcacatcaggttgtatgatgacgaataaaaggtgctgtgacccgtgttttcaaaaaaaaaaaaaaaaaaaaaaaaaaaaaaaaaaa

SEQ ID NO: 392866 - DNA, 1000 bp, Homo Sapiens
csyccraacctaaamcccttacttgaatctgagccgattctccttgttcctttcagttacactggaagaagagcccctccttccttcaagccaagtcatccccttgggctctcaccacttcagtttataccttgcctgtagtccagtctctccatcatcaattccatcagcacaaagacataatttaattccttctaccttaaaaaaacaaaacaaaacaaaacagctctccctctcttagggtgagatgaagtggttggcaacaggccaatgctactttcagaggcgtttgaatcagagtgactccattttgaataggggttgagtaaaataaggctgagacctactgggctgcattcccatgagcttaggcattctaagtcacaggatgagacaggaggtcagcacaagatacacgtcacaaagaccttgctgataaaacagattgtgataagaaaagccagtcaaaacccaccaaaaccaagatggcgacaaaagtgatctctggttgtcctcactgctgattattcactaattataaaattaacatgataaaagacactcccaccagcaccgtgacagtttacaaatgacatggacacatcaggaagttaccctatatgtctaaaaggggaggagccctcctttccaattgtccacccctttcctggaaaactcatgaataatccaccccttgtttagcatataatcaagaaataaccatgaaaatagccaaacccaagccctcagggctgctttgcctatggagtagccattctatattcctttactttcttaataaacttgctttcactttagcctatggacttgccccaaattcttgcatgaggtccaagaaccttctcttgaggtctggattgggacccctttctggtaacactacagccacgctatggaaaatctaaataaaaataaagattgtattttccaaaccatcgggagctatggaagcaacaagggccagaggaagtaaaattct

SEQ ID NO: 392867 - DNA, 1000 bp, Homo Sapiens
taccatacagttctcttttaaacatcaaaccataaaaagtgtattttgtaattttactctgacctgccgcagtcacctctcacttatctcttccacgtactgcacggtcgtatttcatgagctttctgtccatagcacagaaacagagcagaaagtagtacaatcatgttggaccttctttctgttctctttactcttctcacagatcagatcactccatagaagcctgtgggtttcgatggtttcttctatacacctttttggttgaccagtattactatacaatgtaagtgttttaaaaaatacgaaagtaatactctgcaccccttcctacaaagatgataaagcagtcacttctggcgcattttaataatttaaagatttttagtgcaatggcacggtaacctccaaacctgaattagacagagactcactcaggaagtgacaggcccatcatatcaaataacttattcacttttcatgtggcaggaaactggaatatcgcttttaataaaatggaaaaatatgcttctacatatttaccaccataggcgttttgttcatatgagcctggtttgtgcaaaattaaatcagaggcttctacaacatggtttatttatgttgtagcaaagttggctctacataaacattgttcttattttaaaattaacactatgtgttcagttttcttgtgggcttctgaaagttgccatcttccctccgtggagctccatttgctattttcattatacactatgaggtaaaatgtaataacaaaagagagagaagtaccactgtggctagatatatacacacacatatatatatggatggatgtaatatatgtagcacacacacatagatgtatataggatacacactcatgtatgtaaacgtatacatatgtgtatatatgatacatacacatacacacacacgagagacagaaggaaagagaggaagagagaagcaaacatgtaggaaaaaatataaatcagcc

SEQ ID NO: 392868 - DNA, 1000 bp, Homo Sapiens
tgaagaacctggacaactcagtgcacctgtgcaacaactccatccagaagcacctggagaactcatgccatcggcatccactgcttccgccagacaacatgtggtctagccagaggttccaggcccacctgcaggagatgggtgccccaaatgcttggtccaccatcatcgtgcctggcatgaaggatgctgtgatccacgcacttcagacctcccaggacaccgtgcagtgtcggaaggccagctttgagctctatggcgctgacttcgtgttcggggaggacttccagccctggctgattgagatcaacgccagccccacgatggcaccctccacagcagtcactgcccggctctgtgctggcgtgcaagctgacaccctgcgcgtggtcattgaccggatgctggaccgcaactgtgacacaggagcctttgagctcatctataagcagcccgtcaccacttccccagcctccacaccaaggcccagctgccttctccccatgtactccgacaccagggccaggtcctcagacgacagcacagcaagctggtgggcactaaggccctgtcgaccacaggcaaggccttgaggactctacccacggctaaggtcttcatttccctcccaccgaaccttgatttcaaggtggcacccagcatcctgaagccaagaaaggctcctgctttcctgtgcctccgaggcccccagctggaagtgccttgttgcctctgccctttgaagtcggaacaattcctagcacctgtcggaaggtcaaggccaaaggcaaattcaaggccagactgtgacaaacccagggctgaggcctgccccatgaagaggctgagccccctgaaacccctgccccttgttggtacattccagaggcgcaggggcctgggggatatgaagctagggaagcccctgcttcgattccccactgcccttgtcctggatccaacaccaaataaaaagaaacaagtgaagtaaaaaaaaaaa

SEQ ID NO: 392869 - DNA, 1000 bp, Homo Sapiens; identical to SEQ ID NO: 201547

SEQ ID NO: 392870 - DNA, 1000 bp, Homo Sapiens
gcatggctaaattttatttttagtatagacgaggtctcatgttggccaggctgctgccaaacccctgacctcaagtgatccacctgccttggcctcccaaagtgctgggatcacaggcgtgagccaccatgcccggcgaatgcactattatttcttatggttttctaaacccgatttgaacttctgcattttacattcccttagaattcagagttttagaaaagacttgttttcatcactttggctcatttgggacaatttcaagtctgtgtttttatcagtctctggaaatttatgaaagctgcaaatcgtctccagtagctcttttattccctttaaacttctgccatctagttccatgttataaaaaatataacgtgtttgggcagtgtttaggccacagccacccatgtgtagccacccctacacatgggtggctgtggcctaaacactgcccacgagaaaagttctgaagtgggcccttctggccccacagcctgtccgcaggggctgtggcctctaggtcgggcctggggctaggaagagggaaaggtcagtgcacgaggccacccagctccatgtccatgcccatggcccttctgcagggcatcctcagacttgttttcaagcccatgtgttagagatttaggaatgtgtcatttttctcctgtgacaccctaaaagagggttggggagagcgtataggactgagggcacagcccgcatgaggcacacacgtgtgaggccagcgtacacaggacacgcacaggagacaccatccttcccggtagcacgctgccagcaccagcaggggtctttaagtaaggactggcacaagtagaatgccttcttaggaaaatgatccgcagctcaggaggctgctgcgtggggaccgggaggggcaggtgcattcagggcgtctgtggcaggggcccagggctgcacccaagcctggagcttagatgaccccaggagcagcaggaagggcccatctggcatc

SEQ ID NO: 392871 - DNA, 1000 bp, Homo Sapiens; identical to SEQ ID NO: 115002

SEQ ID NO: 392872 - DNA, 1000 bp, Homo Sapiens; identical to SEQ ID NO: 283178

SEQ ID NO: 392873 - DNA, 1000 bp, Homo Sapiens; identical to SEQ ID NO: 206977

SEQ ID NO: 392874 - DNA, 1000 bp, Homo Sapiens; identical to SEQ ID NO: 283179

SEQ ID NO: 392875 - DNA, 803 bp, Homo Sapiens
  misc_feature (427)..(427): n is a, c, g, or t
ggacatatcttcagggcctggagactgaagccacctatgacgcagccacccaggagtttgtgatacacagccccacgctgactgccaccaaatggtggcctggagactgtgagtatacattcacccccttccttaatctccccaattgaaggaatttggaaggccaaggttagaccttggcttaagggtccaacaggccctcagatagatttctctgttattcgttctgaccttgggcaagtcagttcaccaacctgagcctcaggttcttactctgtaaaatatgtgggattattaacatttcattagtgagtggctggaaagtccccaaaggaactttgaagtagaggagacaatcgatccatgaagagacaaggcctcactcacacacacaccgcacaaacacacacacttggtctagtcctangcactcctcacaaccccggttcctctatctcccgagttagtggcagagcttgccaccagccagagcacaggccctgtgatgacacagtggaaagaatacgcctgcctgcccctgctgcagacacccaggaaggctcacgcccattaccagcccccatcaggccaccaacgccgtacctcctgctgtggccaccaggtggcggccacatcaagcgtccctgaggcttggtgatttaccaagccccaacgagggatttccccttcctcaaacttgagaatttcacctccaaggacacatctgtggcacttggggacccacaccttgtgtggaaaaaatttaaaacaaatatgctgggcccaactaaggcagggggagt

SEQ ID NO: 392876 - DNA, 1000 bp, Homo Sapiens; identical to SEQ ID NO: 283181

SEQ ID NO: 392877 - DNA, 1000 bp, Homo Sapiens
atttctttgcacacatctctttactatgtagttaactctttgtattcctattttgtcgtttgttttttttttagtggagtcacattcaagacactgttatttgtttgttgtggatgtgagtacattgctgtagaatatagaactccccatattagcactctttcctttattttctttttgttatgctctaccaccttacccaaagtttcagatttttagtagctcatagtaacatattattgtggcctttttcccacttcattttttttgtgacaagagttgccacagaagccaaagaaraacgaaattaaaacaaaacaaacaaaaagtctaaaatttgctcaccctgtctgacaagtatgttttatcgtttcaagaaatgcggttaacctcgcagtactaaaactgaatgaacaaggcctgttggacaaattgaaaaacaaatggtggtacgacaaaggagagtgcggcagcgggggaggtgattccaaggtcagccccagtgagaaaagtaatgggtaactcaatgcaaaacaaagtaagcagcagctatgcacagtgtgggcactccgtgccaccaagtttccaacgctaagctgaagagtgcaattggatgaccaggacacttgacttcttctttctttcttcctgtacttctctttccctctctttctccatatctcaaggaaaaatttgtaactaatggatttgttgcaaactgttgcacctgctggttacttccagcgatacattaatgctcatttggctctgcaaatcttaccgtttgcttaggccaaatggcgcatcaatgactatcgctcttacaaagctcttgaatcagtattatgtaatgaataacataaaataacattgataatgttatttatgttattttccacgtgaagaaccccagtaaatcttgcagtattgaaactcagtgagcaaggcgtcttagacaagctgaaaaacaaatggtggtacgataaaggtgaatgtggag

SEQ ID NO: 392878 - DNA, 1000 bp, Homo Sapiens; identical to SEQ ID NO: 283182

SEQ ID NO: 392879 - DNA, 1000 bp, Homo Sapiens; identical to SEQ ID NO: 283184

SEQ ID NO: 392880 - DNA, 1000 bp, Homo Sapiens; identical to SEQ ID NO: 283185

SEQ ID NO: 392881 - DNA, 1000 bp, Homo Sapiens; identical to SEQ ID NO: 283186

SEQ ID NO: 392882 - DNA, 1000 bp, Homo Sapiens
cagtgcagattttccatataatccaggacaaggccaagctataagaaatggagtcaacagaaactcggctatcattggaggcgtcattgctgtggtgattttcaccatcctgtgcaccctggtcttcctgatccggtacatgttccgccacaagggcacctaccataccaacgaagcaaagggggcggagtcggcagagagcgcggacgccgccatcatgaacaacgaccccaacttcacagagaccattgatgaaagcaaaaaggaatggctcatttgaggggtggctacttggctatgggatagggaggagggaattactagggaggagagaaagggacaaaagcaccctgcttcatactcttgagcacatccttaaaatatcagcacaagttgggggaggcaggcaatggaatataatggaatattcttgagactgatcacaaaaaaaaaaaaaacctttttaatatttctttatagctgagttttcccttctgtatcaaaacaaaataatacaaaaaatgcttttagagtttaagcaatggttgaaatttgtaggtactatctgtcttattttgtgtgtgtttagaggtgttctaaagacccgtggtaacagggcaagttttctacgtttttaagagcccttagaacgtgggtattttttttcttgagaaaagctaatgcacctacagatggcccccaacattctcttccttttgcttctagtcaaccttaatgggctgttacagaaactagttcgtgtttatatactatttcctttgatgtcctataagtcggaaaagaaaggggcaaagagaacctattatttgccagtttttaagcagagctcaatctatgccagctctctggcatctggggttcctgactgataccagcagttgaaggaagagagtgcatggcacctggtgtgtaacgacacaatcagcacaactggagagaggcattaaagaaccagggaaggtagtttgatttttcattg

SEQ ID NO: 392883 - DNA, 1000 bp, Homo Sapiens
aagactggaatgtgaggattataattccaaagcaccagaagatagataagataatgcaatgagacattttatgactcaaggcaaagttagttatgagattcagaccaaaccttagacgtgcagtaattgaaatatttgccacagaaggggtataaggacatgacattcaagtaagctaacctttcactagctttagactttgaactcagaaaacatatttggtgaaaagcttatggtcccctttagtatgtattgcttgattaaagtattattttagaaaatggtgagctgcttccattttgaaataaaaataatttttactaagtgaattatattcagtgaaaaaaatggaagctacaattacaactttaatttttttaagttttaagaatacagccatttaaaaaaattaagcaaatctgcttcattttagacagtagaaaatataccattatcttttagaagaatagagatgtgaaatatgcaaattaagcctttagaagtaaagcacacatgaagttcaaagtttaatttctagaattgtgaatcaatagcagtggatgatttgtactttatagcttagtgtcggagaaatctgattaaaaaatgctttttctgtttcatcacataaacataagtaaaattgctctgaaacaacaatatttgacaagaattagcagttttcttttttgacataatctatcaaatgaagggaaaaatatgtcctgggttttgctttgagagtgattactaaatctgacccttaaggaaaggaaggagagaacaaagaagggaggaaagaaagggaaggaaggaggaggaaagggaaaaaaagaaggaagagaggaaggaaagcaggaaaaaggggaaggagagagaaaagacaaaagaaaggtagcaaggaaagaaaaaaagacaagaaaggaatattaaagaggacaaaagaggagtgaggaaaggaggaaatggaagagggatggtgggagacaggagggagaaa

SEQ ID NO: 392884 - DNA, 1000 bp, Homo Sapiens
tgtatgtctatgggtgccctgaaggacctgttgcgccacaccagtgggctgagcaagttaagcctggagacgtatcctgcccctgaggagagtttgaattccttggttcgtgtcgattgggagatcttcgccctacttcgggctgagctgatgtgtacactgagggaagtcaggcagcccaagaggatcttcattggtcccaccccctgcccttcctgtggctcatcaccgtctgaggaactggagctccatctttgctgctagggaaggcgtgcctagcggggtagagaaatccaaagttctcttccaggcactgggacactaaaatctactatgtaggtgcaaactatttttctcttttcttatttatttcattttttaataattccaaaatttttattaaagacaatttgagacagggtttctctgtgttgctctgggatcctcctgcctcagctgggcttatgggatcctcctgcctcagcttcctaaagtgctgggattactggcatgagtgactgtgtccaggccacatgcaacttaaaggaagcacagggaagtgctcagtgtgagggaaaaaaacataacagcagggggcaaggctggaggaaaatgttgaggtgacatcaatgagaacttcagggacccgtgtcctacagagtcggaaagagaagctaaagttctacagtgatgagaatgttatccctgcaaggatggttaccaaggaatatcagaaataaagagcacctgaatgaaaacttttaacctgttgtagcaatttatccaccagaaatatctagttattgagttactgatggaaaaataatgaaatactactttgtctgtgattgagtttcagctgtagaacatcaaagcaaccaaatagaatttgatcattttaagtatttcccacccgttcttgttctttgttttgttttggagacaaaatctcagtttgtcatttaggctggagtgcagtggtgcaatctgggctcattgt

SEQ ID NO: 392885 - DNA, 1000 bp, Homo Sapiens; identical to SEQ ID NO: 283187

SEQ ID NO: 392886 - DNA, 1000 bp, Homo Sapiens; identical to SEQ ID NO: 201660

SEQ ID NO: 392887 - DNA, 1000 bp, Homo Sapiens; identical to SEQ ID NO: 283190

SEQ ID NO: 392888 - DNA, 1000 bp, Homo Sapiens
gctgatgggccccaagctgctggcagagacggcagacatgatcggtgtccgggagctacgggacgccttccgggaggtgcggccactggggctgagggcgggcagggctgcgtgtctgccgtgagtgaggggctgcgcgtgtgaatgactgtcagtgaccagacgccacaaccaacgccgccacagttcgacaccaatggggacggccgcatcagcgtgggcgagctccgggcggccctcaaggccctgctgggggagcgcctcagccagcgggaggtggacgagatcctccaggacgtggacctcaatggggacggtctggtcgacttcgaaggtaccccctgccgcacatagcaacacacgccctggaagggtcctagcagataagaaaccgcacagcaagagtcaccactgggcaccagaccctgtgccacgcactcccatgtcctctcctagttaattatcatggagaatccgagaggaaggaattgttatccccataggcaagagaagaaagtccattctcaggaaagcctaggcacttagcaaaaaagcaagtagatggagtcaagatttgaatctgggcagcctgatccagaacccagctcttcctctatgctgcattcccataaaggggtaaaatgattaaataataatagaagccaaggaaaattactatgtggaaatgtattgccataagtaggcctcaaagttgctcctgagcttcctagctgtcaaagcaaaaaggaaaacaagttccattacaagggtttgtttgtttttcccccataagacaaagcctcctcttcccggctctgaggcctattccctatcagatccagaggatgcccttgaagaccctcccctcaaccacactcccacccgccccaaggcctgcagatgatcctcactcctagcgcagtccagagaacagacccaaaaccttggcttcgtcctggcagagtttgtgcgaatgatgtctcggtgagcctgtacagaa

SEQ ID NO: 392889 - DNA, 1000 bp, Homo Sapiens; identical to SEQ ID NO: 115003

SEQ ID NO: 392890 - DNA, 1000 bp, Homo Sapiens
ccctgcaacgcaagcatgagggcttcgagagggaccttgcggctctcggtgacaaggtgagaggacccaaagtcatcttctgtctggcatttttgccccagaaagagcagagtcttctgttctgcagagcatacccccttactgcaagctcattcaccactttcttcccataggtaaactcccttggtgaaacagcagagcgcctgatccagtcccatcccgagtcagcagaagacctgcaggaaaagtgcacagagttaaaccaggcctggagcagcctggggaaacgtgcagatcagcgcaaggcaaagttgggtgactcccacgacctgcagcgcttccttagcgatttccggtacggagccatgttcactcagacttctggaacatagagccttctttgtaggggtcatttttattgtgaaaatagtacatgctcagcagggtacaatggctcacacctataatccaagcactttggggggccaaggcaagcgaattgcttgaactcaggagccggagaccagcctgggctacatggcgaaaccctatttctattataaaattttaatttaaaaatcaaaaacggccaggcgcagtggctcacgtctataaccccagcactttggtaggccaaggcgggcagatcacctgaggtcaagagttcaagaccagcctggccaacatggcgaaatgccgtctctaccaaaagtacaaaaattagccaggtgtggtggcaggcatctgtaatcccagctactcaggaggctgaggcaggagaatcgcttgaacctgggaggcggaggttgcagtgagccaagatcgtgccacttgcactccagcccgggcaacaagagtgaaactccatctccaaaaaaaaaaaaatttaaaacaggaaaaagtagtacataatcaatgtaaaatagtcaaactactgaatgccatattgttaaaaataagtctctgcagccgggcacggtggctcacgcctgtaatccca

SEQ ID NO: 392891 - DNA, 1000 bp, Homo Sapiens; identical to SEQ ID NO: 283192

SEQ ID NO: 392892 - DNA, 1000 bp, Homo Sapiens; identical to SEQ ID NO: 283193

SEQ ID NO: 392893 - DNA, 1000 bp, Homo Sapiens; identical to SEQ ID NO: 115004

SEQ ID NO: 392894 - DNA, 1000 bp, Homo Sapiens
aagcaagcctctcgcctcggcctcccaaactgctgggattacagatgtcagccgccgcgcccgcccgtcctgcagcgaggtttgcaggacatggggtgggcctgggggcagagatgggaatagggcggaggccaagggctttactgcgggtgacaagacgcctgcgacccgccaggccacctagaatccccaggacaccactggtttgaagcccaactccgttctcttccccagacttcaggggataaggttctcccgaaagcagatcacagagcggggctggagaagccgggcctgaagctgctcatggggcgctggcctcaggcagcgctgcgcctcccgccccggcgcgcaccccagggcggactcagcccccagccccggcccgcgccccacggcggactcagcccctagccccggcccgcgcctcacccctcggtgtactcggcctgcagcagccccaggtaagcctcccacttgttgccgacgatcttgccacaagtgaagcagcgtacagggatgatcatggcggcggcgcgtcccagactgcccggcccggccgggccgcacgcgaagaaccccccccaggccccgccccgggcgcgtccactgttgcgggagaatcggctccgctcgttctccgctgctctggccgtccctccaccggccccggcaccgctggccgcagtttccgccgcgatgggggcttcccgtgcgtcccggggctcctgggcctgtgcgtcccggggctcccgggcccgcgcggccgcggcagcagcagaccgcacacccccgcccaccgtcttggtgcatcccggcgctacggcgtctgagcagggccgtaaagctgcggcggcggttcgcgtttctcgtgtccgcttgactgacagctgcgcggcgggagcgggcggcgcgagcgggaggcggcggcgcaggtactgcgcctggggcttgtgggggcgtgcggccagggtcccgtggccggaggtgtccgaccggg

SEQ ID NO: 392895 - DNA, 1000 bp, Homo Sapiens
tggggtgggtggtccttctctgggcctcactctttgggagggggctgttctgggaggggtgaaggaggaggtgttgacaatctcccctttgcttcaggggtccggccagtctctttctcagactgggagaagctggatgccgaggaggtggcccggggccagggcacggggaagcccagggagaagctggtggatcctcaggagatgctgcgcctcctgggccactgagcccagccccagccccggcccccagcagggaagggatgagtgttgggaggggaagggctgggtccgtctgagtgggactttgcacctctgctgatcccggccggccctggcttggaggcttggctgctcttccagcgtctctcctccctcctggggaaggtcgcccttgcgcgcaaggttttagctttcagcaactgaggtaaccttagggacaggtggaggtgtgggccgatctaaccccttacccatctctctactgctggactgtggagggtcaccaggttgggaacatgctggaaataaaacagctgcaaccaagagccatggttgatgggggactttttttggaagggttggggtcgggggtcaccttctggccgtagctcccctaccatcaccaggtggcgctgcagagacggctccctgctcaggggcctcattgggggcttgatggggctcggcagccaggcctggcatagccacccttcctttctccgctcggccctgctgtggctgcgggttgcctgtcttctgtccacactagggctgcccgggaccgggaccgggaccacccctccctggggagccctcagtacaatcaaaacagaaaagaaatgggagcgggggactgagaagcagcttgtcccctgtacctctgggtgccccaggcgagtctagcctggggcccattctttggctctcaaagccttcctgcttccgtttccagtcagacacactggcctttaaaaatagtgcctcagtctccctaggg

SEQ ID NO: 392896 - DNA, 1000 bp, Homo Sapiens; identical to SEQ ID NO: 283196

SEQ ID NO: 392897 - DNA, 1000 bp, Homo Sapiens; identical to SEQ ID NO: 283199

SEQ ID NO: 392898 - DNA, 1000 bp, Homo Sapiens; identical to SEQ ID NO: 283200

SEQ ID NO: 392899 - DNA, 1000 bp, Homo Sapiens; identical to SEQ ID NO: 283201

SEQ ID NO: 392900 - DNA, 1000 bp, Homo Sapiens
tgtactacccaagcacctgcttagcatgtgtgtgtagctgtgtgtgtgtgtgtgtgtgtgtgtatggatatgtagaattgtatttgttggtatatgcataggtgtatgtatggtgtgtgtgtgtgtgtgtgtgtgtgtgtttgaagattaaggaaaagaacacctatctctccaactctctgatcctgaaatatctattccaaaggaaaatcatattttagggtagatgaatcagactatcctgtgtccctaaaaaagcaatcccgagaagttgtgacatctatcccttccccttcctgaaagttttaaagaaagcaggagctggccgcaagactctaggcctccttcatagcctctctcctctaagataggcatgcattgttaaactcttttctccttaattctcctttattcccctgccacccagtagttctcatgtaggacctctgaaggcagagtgagagcagaaaccccacctcacatgaagggaagggcatctccatgatggtggatcccaaaacccctctgggtcgcaccctgccagagccttccttggtgcctgtcccttagtgcattcaggtcatggcacctgggcaggggtgtccctgtattctgaatgatgggctttctcctcaccctgagcctcctcaactttaagcttattttgatcactgtctcaaatttaaaaattctgcagcaacctggctctgtgtggtgttttcccagtcccatattatgtccagtcatacttcttctttctctgtcactttgtccctgctttcttgattcccttgtcttgttcttcagtattttgtttttctcaaaaatgctctagaactttccttggcacatataaaagcacggctggaactggttgctcagagctgctgtgaccgtgagcacagatctcttcgtgtcaggtccctctgcaccctcccgttcaggtctcttgaccaggcccctacatgacaggaatccttgcctctcaaagaatcctctc

SEQ ID NO: 392901 - DNA, 1000 bp, Homo Sapiens
atagaactgggatttgaaccctatgtggtcttacccagaaatgtgctatcttttaagaggttgagattggttttagaaattctgcagaacttcaacatccaaatttgtggaaatacttttaactgatttagttttatacagacttgtgtctactccaatgaaaaggtttccttttttttccgagacaaggtcttgctctgtttcccaggctggagtccagtggctccaggcggctcactgcagtctcaacctcccaggcttaagcggtcctaccacctcaacctcctgagtagctgagactacagatgcatgccaccatgcctggctaatttttttacttttgtagagacaatgtctcactatgttggccaggctggtctcaaagtcctgagctcaactgatcatcctgcctcggcctcccaaagcactgggattacaggcatgagccactgcactcagctgaaagggttttcttgactaccattttccactgactttaggaacattttctggtttctatataaaggactgacttatcaataagccacatttttccccttcctggaaatatccttgagtctgtaggatttctctcctccacccaccccccacaccaagtttcattaatatgaataactttccatgtttcttgtgttcacagaatggcctgggaatttttagttgagccaaaaagatgaatgagctgtgcccattacaaaccttgttggttatctgactgctccacagctctaaattcacactcatgtaggtggaagatagcggagaagtaagttattaaaggtgtggtattattaacagtttgtttaatgctcattaaacaaagttaactgcctacttagtttattcatttagtattctttaagagataaccctgaggatcatattacacttcagagttatgtctaaggtgtttcatatttcaattctcccaggttttaagaggtagggatcaaattttggagtcttgatggtgtttatg

SEQ ID NO: 392902 - DNA, 1000 bp, Homo Sapiens; identical to SEQ ID NO: 283202

SEQ ID NO: 392903 - DNA, 350 bp, Homo Sapiens
taggcccttggcatggacttttcaatgcttttcccttttccttcttcatcccttggttcaacatggtccttccagatattcaagtacatcagcttcaacaaaaccatgacccagctctcctccacgctggcccgctgtgccaaggacatcctgggcttcgccgtcatgttcttcattgttttcttcgcctatgcccaactcggctacctgcttttcgggacccaagtggaaaactttagcactttcatcaagtgcatgtgtgtgtcctgtccccttcactcctccctggcccctcaccctccagctccacgggtgtatgtatccttggggaagatgggtacgtgcgtgtc

SEQ ID NO: 392904 - DNA, 1000 bp, Homo Sapiens; identical to SEQ ID NO: 283204

SEQ ID NO: 392905 - DNA, 1000 bp, Homo Sapiens; identical to SEQ ID NO: 206705

SEQ ID NO: 392906 - DNA, 1000 bp, Homo Sapiens
caccatcaccctggtgaccagcacacagtcatcgcccctggtcaccagctcggggtccatgagcacccttgtgtcctcagtcaacgctgacctgcccatcgccactgcctcagctgatgtcgccgctgatattgccaagtacactagcaaaatgatggatgcaataaaaggaacaatgacagaaatatacaacgatctttctaaaaacactactggaagcacaatagctgagattcgcaggctgaggatcgagatagagaagctccagtggctgcaccagcaagagctctccgaaatgaaacacaacttagagctgaccatggcggagatgcggcagagcctggagcaggagcgggaccggctcatcgccgaggtgaagaagcagctggagttggagaagcagcaggcggtggatgagaccaagaagaagcagtggtgcgccaactgcaagaaggaggccatcttttactgctgttggaacaccagctactgtgactacccctgccagcaagcccactggcctgagcacatgaagtcctgcacccagtcagctactgctcctcagcaggaagcggatgctgaggtgaacacagaaacactaaataagtcctcccaggggagctcctcgagcacacaatcagcaccttcagaaacggccagcgcctccaaagagaaggagacgtcagctgagaaaagcaaggagagtggctcgacccttgacctttctggctccagagagacgccctcctccattctcttaggctccaaccaaggctctgttagcaaaaggtgtgacaagcaacctgcctatgccccaaccaccacagaccaccagccgcaccccaactaccccgcccagaagtaccattcccggagtaataaatccagttggagcagcagtgatgagaagaggggatcgacacgttccgatcacaacaccagtaccagcacgaagagcctcctcccgaaagagtctcggctggacaccttctgggactag

SEQ ID NO: 392907 - DNA, 1000 bp, Homo Sapiens
tccaagacctttaccagtaaattatgtttctgtatgtaaaataaccccttattagagagacagtgttatatgtatttacaaaattatataagttccattgggattgtattgattttgtattttcccaaaatagtactttgaattgatagtcctttatgcaatgtcttagcaatagtctctataatgcccatccaggagaagtgggtagtaattcttcatcatgaaaatgatatattacatatttagtatcttccctttgcagtattgcacttttgtttaactagaatacacctatgagatagccaaagtttcaaacacagttatcttagtttaccggtggagtatttcaacaccaaccacatttcccttcctccctctaattctacccacatgatctttattccttcctttcgccaattaaaaaaaaaaaaaaggaaaaaaaatctgtagatcttgtcactaaaatctaatttatatcaaatttatgagagaaagtattttcctaattatggtcaaataaatttggttaacatcctagtgattctctttctatataataaggcaattacagttttcaaagcattaagtctaacataactttaaacattctcttaggtttcaagacacttctatttaatattcattggggaaaagttgtccagctatcagctaagaaaacacatgcaaatatggttgtgtaaagttaagggttataaggaaaaaaaaatcagtagaattacataatactaaagttgcagttgaaagaatatccaagtatgtgttggtagttactaaaagaattatagctgttattgccttgtatttatagcccttgtttcaggttttatgattcaagtcttagtccaatctttcttttggacatttgcaatatttaccagttgtgttttgtgtagtctgaatttgctttctgtagttgagcaaacgtcttaaaaagtcatttgtaatttattaaattactttctatgatgttctatagagc

SEQ ID NO: 392908 - DNA, 1000 bp, Homo Sapiens
ggctcgcatccccctcaaccccgtcctccgcgactacctgagctccttccccttccagatttgaccggcagcgcccgccgtgcacgcagcattaactgggatgccgtgttattttgttattacttgcctggaaccatgtgggtaccctccccggcctgggttggagggagcggatgggtgtaggggcgaggcgcctcccgccctcggctggagacgaggccgcagaccccttctcacctcttgagggggtcctccccctcctggtgctccctctgggtccccctggttgttgtagcagcttaactgtatctggagccaggacctgaactcgcacctcctacctcttcatgtttacatatacccagtatctttgcacaaaccaggggttgggggagggtctctggctttatttttctgctgtgcagaatcctattttatattttttaaagtcagtttaggtaataaactttattatgaaagttttttttttaaaaaaaaaataagttttctagcgagtgtgctttggccaaaagtttaacttggttctgaacaggtccaggggagagggtcctaaggctgacctgctgggctgcaggtggtgtacggggcctgccctgtggctgggcatccctcacggttccacccacaactctccagggagagaaacggttggtctagttttggcgtgtgtccggtaagacagcagctcgcgtttgagcactttgtgcgtgccagccctaattctgtgctttgcatacttaaatttacttaatcctataaagagaggcacaaccctgtgaggcacgggctcttatttccattctacagaagggaaaactgagtaaatctgcctgtggccattcctgtcaaagacaacacttgggcctttttttggctgtccactaaacatctgcttgaaatggataacagagaggaaacttctttggttctatgaccacaacagcttccaggaaggggtgggggtgggggcttagtgagt

SEQ ID NO: 392909 - DNA, 326 bp, Homo Sapiens
aagtgcctgacttggtttttctcattcatcactgtgcactttgatttctaaccttagcctcgcggatgatgccagtttgttctgtgatttttccccttttccttctccagatgtccaaatggattcttcggacagagatgtttggagaaactgcctttgcgattgtacatgccagatcctaagcaaagtatgtttgaagatacaaacacaagtccctgctccttagaaagcttctgggtgcagtccccccaatgtagggcatagggccaggggtgttggttgttttgatctttggctgttttgttttgtttctcttttcttttttg

SEQ ID NO: 392910 - DNA, 1000 bp, Homo Sapiens
ctccctgagccaggctgatgaaatgatcagtgaatgtgctcccaaccgtgtcagcttcttcaggcttctcttcagtaatgcatgtcactctggcctgtagcagcagcaggagacacatgttatctaactttagcagtttctctggccacctagggtcacattagagtcttccactaattctctgaagcccatggccccagtactcctagactccagaatatgtaacaggagtgaggtcctggaataagtcaagtctgggctcccttggagcaggtaagccctgagaaacatttaggcacggtgttccctgaggtaccagaagagccttgtggcatttcctaagccagggtggcactggtgggaagggcagtgagtcgttgcagaggtgggtgggtgatgatgcagctattccttgtgcaacagtgaccttcagacagaggaactggtgggcctagaagcactgcctggcatgctgactatcagggcttcctgaaagccgtggcctggaccttcttgccttctgagtcatagagccaggcaggcatcctggggctgccaggcacacacacacctaacctgtaggctgtcggggtcaaggcaaagaccaaacaccaggcatgcctgggactgttgtcaccttttattctagtggggcctacctgcttccccaaatcaaagatgcatctataccaggaaattaaaataaagtaaaaagaaatagtttctttatagaggaaacaggagagaatcagaccagaaaccagagtaagatttataacagctgagcacttaatttggctctctgagcagacagtaaaacataacaggatgcatgattatcacttgacattttttcctggcaccacattccaagcagaattgattccttgtactcttacgtggaggatatagagtaataaaacacgtaatttatttgaaagcatttatagagaagacaaacactggtcatgagcttcaggtacccttcattccctcatct

SEQ ID NO: 392911 - DNA, 1000 bp, Homo Sapiens
cccgctcccccgtcctccgaggtggcagctgcgtagaagtctggaacgttttttcttagagttccagaattgtgactgaagtgtacccagagacacaaagaaatacagaagtccagaatgatcaaatgagatcactacccaatgaaatgataggccgaggagccagaaattgtcctactacctgctttccaggtccagattccacgagagccttctgggctcccaccagagaccctcagtgaagactctgttgaagactttaagaccatgctagaaagcctcccggcagaggttcaggaagttctgctatgaggatgcagctggccccagggatgtcctcaggcatctctaggaccttgctggacggtggtggctgagacctgatatccacacaaaggagcagactgtggaaatgctggtgcaggagcaattccaggctgtcctgcccgaaggagctcagagctcaagcacagagatgtcatcctggaatcagaatcactggctaagtcttgctgcttgcttcttgctcagcctgcatatgagaagtcaaccaagcattctcttggatgcaagatccaactgcacccatgggaaatctgaacttccactttctttgagcttgtctttggttgtaataagaatccatcaaaacccatgtctggatctctctttggctgaggcagctttatttcctacagagtttctctgtcctcttgttaggacaatcagcctgctgctttgggcttttccaagagcctatttttcatctgctggatgcctctttttttttttttttttgcactttgtgacatgctttaatatatatattttttatgtatccaaagaggtaatcaactttaactttcagaattcatgaatcttggtttggtggcatgaatgaaaggttatgtaaccccaccagtaactcatttggggtgcccttgaaatattaaagtttggtcctcaatcaaaaaaaaaaaaaaaaaaaaaaaaaaaaaaa

SEQ ID NO: 392912 - DNA, 1000 bp, Homo Sapiens; identical to SEQ ID NO: 219337

SEQ ID NO: 392913 - DNA, 1000 bp, Homo Sapiens; identical to SEQ ID NO: 283208

SEQ ID NO: 392914 - DNA, 1000 bp, Homo Sapiens
ggccaactgttcattcaagtactccagctagtgaaatacttgtgtttttatggaggaaattctatactatggatatatttgggatttgggatttgggaaactcttgggtcacatactttggcaatgtcaaggatccatgaaattcaaatgtcttcccctacctccccatctccaaaattgtgagctaggtttggtcttcataattcgggacccaagagcctagcacagtacctgggagagagtcagccctcaagagaagtctgttaaacgaatggataaatgaatgaacaagtagatggctggctggctggttggacggatagatggacgaatgaataaggcgggcatagctctgaatgtggagtcagaagaccagccaagggagtcctcaaggctggggcctgtgctttttgggggcattttcattctctgggattcacacaaagaaaggactcactaaatgtttgctaaaggaatgacatcctcaattatctgaaccttggtttccccatttgtgtaatgtggatcatcaccattcccctccatgcagactaagtggattaaatgagcttcttgtgtgaggagctctgttacactgtaaagtgctgcaccagtgtcagccatcgtgaatggtgcaatgaccataatttcaaggtcaagagtcagggtagtgggatggtaaagggaaaaagaagtcagtgtgtgcaaaggaaggtgagcagggcagcccggctggcacagaggagcaggagagctgcctgggagggcacagcagggggctggcagccagaggctggtcctggattcccagtgtgctcctctcctatggccctggccagccatcaaacctgtctccaggaactctgggaagccaggcagcagcagcctcttcttaaccacataaaagcagctcagccagggtccctgaagcagcccatctgatgctggcatggttgtgagatttctaacagatgacactgtcaattaaaggtctcccctc

SEQ ID NO: 392915 - DNA, 1000 bp, Homo Sapiens
ttttgatatctctttattatctggcttaatataactggatataatgcatatctgtggtgacatatattaagtctgtgatgatatcacattttaattagcctctgtaaaatgccactgtatacttttaagggaaagagagttttaaaaagcagctactattgtgaaagtagttttgatgtcatgaatgacctgaaagggcataagggaccttcaggagtccccatgctatgctggctgtttcttgcaagttctaaaacatctcttaattaccctgacctttttctcattttcagtctttccttttttattctcccgactttaaacataaagagttaagaaccactgatgtagatttactgaaactgttacaaaatacaggcacatattactggaaggatggatccagaagaactgctatgaagaaaaggagagaacttaaattaggtgattttatggaacttggaagactagaatttccaagtaggatagggatggtcagcactgtttcaggtaaggtaacttgatttgatcagttcatctagttaatctttaattatgtaaactataagatgctgatatagtaaccagagtttacatttatagtgagaaatgtaatagggaaatagatcagaatgtttgtttccaactgtggctctctgaaccttttcgaaaatcaaaggatagctgtggactttcccctaacaaatgtagctcctttcaaaattttgcatgcggtcatggatcaggcaaacgggacagatatagttcgtgattcacacaggcctatccatcagtgtactgcttcacctccctgtcctgttctgtgactttgtgagcttggaatttgaagtcttcctgttgtctggttacatcaaactgttcttgcagttctatcttggaaatatacatgcaaattaaatttaaatcttaaatttctccttttctggactccatgaatacccccaaatattgctgacattcgttagacagtacgtttaca

SEQ ID NO: 392916 - DNA, 1000 bp, Homo Sapiens; identical to SEQ ID NO: 283210

SEQ ID NO: 392917 - DNA, 1000 bp, Homo Sapiens
  misc_feature (971)..(971): n is a, c, g, or t
  misc_feature (979)..(979): n is a, c, g, or t
ggacaagcccagagtcctgggttcccggggttcgagggtacatctgctctggcccttcccatcccacacagccagggagacccccccagggtcaggcacgaggttggcacctcagagtctgcccacccaaaattcctgggacattcgggaagtcctttgttttaccattcctgcacctgccagcccgagtgagggtcctcctcggcctttccacagcgaggcctccctccggctccctcaggtgtcagctcggcccatcgccccctgcacctgtccccactcggtctactcccccccacccactcaccaaggatgctcagaggcctgcccagtcattggaggagctgaggctgctctggagccccgaggctgcccagcagtggccgatgtggaagctgcagagcctggggagggagctctgggcctggcctctgccctaccctgcagcctccctgacctctgctcctcttcccagcacagcagcccccgggtctgcacctccagagcccaccctaccaccagacacagagcccggaccacctggacctaccctccagccatgacccttccctgctcccacccacctgactccaaataaagagcttctcccccagctctgggcaggcctatctgtggggacggaggggctcgcaccggctccctgggaggcctgctgggagggggagccacaagggaagctggggagatgttggacctagcaagggccaaaccacaagaggcacgatgtccaacaggctgtggggctgcgtgatgtcctggaggggcctccggaagagccgccctcggatctcaggctcagcttgggacgggcagggctctgggcaggagcacttgggaagccactgggagggccggagtggggacacggcgtcagacctgcatcagtgggtccaccacagggctcccgccccgggggtctcagtgggatcctccgagcgggtccactttancatcctgngctcagtggcatcactggata

SEQ ID NO: 392918 - DNA, 1000 bp, Homo Sapiens; identical to SEQ ID NO: 115005

SEQ ID NO: 392919 - DNA, 1000 bp, Homo Sapiens; identical to SEQ ID NO: 115006

SEQ ID NO: 392920 - DNA, 1000 bp, Homo Sapiens; identical to SEQ ID NO: 203310

SEQ ID NO: 392921 - DNA, 1000 bp, Homo Sapiens; identical to SEQ ID NO: 115007

SEQ ID NO: 392922 - DNA, 1000 bp, Homo Sapiens
cccttttgcccacccactctccctccttggctctgccctctagcccagaaggtctgaggcaatgggggcaagcttggagccgacagtgctgagcaggcaggagccaagagaggggaagcttgagcctcacgcagttaggggtgcgctggagagggtggggcccgactccgccacaccccaacggtccttccccctcctcaccactcccgcccccacccccaatggatctgggactgcccctttaagagtagtggcccctcctcccttcagaggaggacctattagagcctttgccccggcgtcggtgactcagtgttcgcgggagcgccgcacctacaccagccaacccagatcccgaggtccgacagcgcccggcccagatccccacgcctgccaggagcaagccgaagagccagccggccggcgcactccgactccgagcagtctctgtccttcgacccgagccccgcgccctttccgggacccctgccccgcgggcagcgctgccaacctgccggccatggagaccccgtcccagcggcgcgccacccgcagcggggcgcaggccagctccactccgctgtcgcccacccgcatcacccggctgcaggagaaggaggacctgcaggagctcaatgatcgcttggcggtctacatcgaccgtgtgcgctcgctggaaacggagaacgcagggctgcgccttcgcatcaccgagtctgaagaggtggtcagccgcgaggtgtccggcatcaaggccgcctacgaggccgagctcggggatgcccgcaagacccttgactcagtagccaaggagcgcgcccgcctgcagctggagctgagcaaagtgcgtgaggagtttaaggagctgaaagcgcggtgagttcgcccaggtggctgcgtgcctggcggggagtggagagggcggcgggccggccccctggccggcgcaggaagggagtgagagggcctggaggcgataactttccatagtctcctccct

SEQ ID NO: 392923 - DNA, 1000 bp, Homo Sapiens
gcccaactaaaatctgaaagtgaagacttacagcaggtactatttagaatttcacctgtttttcttttttctctttttctttgaggcagggtctcactctgtcacccaggcttagagggcagttgtgcaatctcagctcactgcaacctctgcctccagggttcaagcaatcctcccacttcagcctctcgaggctgggcctacaggtgcacaccaccatgccaaacgaatttttgtattttttatagagacggggtttcaccacacctgggctcaagcaatctgcccacctcagcatctcaaaatgctgggattacaggcgtgtgccaccacacccagctaatatcctgatttagattgttgctcagtatttagtatctcatgtataaaagatagttccattaacactagaaaaagaaaaataattatattgtggttagactgtaggaaatctttttggcactgtagtagcatttaggaggaatttaaaaaaaaaaaaaaacaggatctccctctcttgcccaggctggagtgcagtggtgcgattatggctcacagtaacctcaagttcctgggatcctcctgcttcagcctcccaagtagctagaactactgcaggcgcatgccaccatgcccagctaatttttaaaaagttttcatagagacagggtctcactgtgttacccagaaggtcttgaactcctggtctcaggagatcctcctgcctcagcctcccaaagtgataggattacaggcgtgagtcaccacggctagccagaatttctttcttaatagatttctattcttactgctagcattaaaaacaaaaaagcaactagtatgattttatgtataaattaatctaaaattgattaatttgcaggttattgcaagtgttttgaggaatttgtcttggcgagcagatgtaaatagtaaaaagacgttgcgagaagttggaagtgtgaaagcattgatggaatgtgctttagaagttaaaaag

SEQ ID NO: 392924 - DNA, 1000 bp, Homo Sapiens
gtgtcgcccaggctggagtgcaggcagtgacaacctccacctcctgggttcaagcgattctcctgcctcaggctcctgagtagctgggattacaggcatgcaccaccatgcctggctaatttttgtatttttagtagagacggggtctcatcatgttggccaggctggtcttgaactcctaacctcaagtcatctacctgcctcagcctcccaaagtgctggattacaggtgtgagccaccatgcccagacagaaattttcaataagtcttgctcatattttactaagggaaaactaattaattaaatttttttctaggttgtgagaactgctttattggatgctgctggtgtggcctctctgttaactacagcagaagttgtagtcacagaaattcctaaagaagagaaggaccctggaatgggtgcaatgggtggaatgggaggtggtatgggaggtggcatgttctaactcctagactagtgctttacctttattaatgaactgtgacaggaagcccaaggcagtgttcctcaccaataacttcagagaagtcagttggagaaaatgaagaaaaaggctggctgaaaatcactataaccatcagttactggtttcagttgacaaaatatataatggtttactgctgtcattgtccatgcctacagataatttattttgtatttttgaataaaaaacatttgtacattcctgatactgggtacaagagccatgtaccagtgtactgctttcaacttaaatcactgaggcatttttactactattctgttaaaatcaggattttagtgcttgccaccaccagatgagaagttaagcagcctttctgtggagagtgagaataattgtgtacaaagtagagaagtatccaattatgtgacaacctttgtgtaataaaaatttgtttaaagttaataattgtgttagcatttccatgattagaagatactgaaaattgaaagccagttgaagggcaggctgc

SEQ ID NO: 392925 - DNA, 1000 bp, Homo Sapiens; identical to SEQ ID NO: 283216

SEQ ID NO: 392926 - DNA, 1000 bp, Homo Sapiens
actataagtagcaaaaaaaagaaaaagatgatgtatctcacaaccagaaatgcagaatttgatcgtcatgaaatccagatatatgaggaggtagccaaaatgcctcccttccagagaaaaacattagtattgataggagctcaaggtgtaggccgaagaagcttgaaaaacaggttcatagtattgaatcccactagatttggaactacggtgccatttacttcacggaaaccaagggaagatgaaaaagatggccaggcatataagtttgtgtcacgatctgagatggaagcagatattaaagctggaaagtatttggaacatggggaatatgaaggaaatctctatggaaccaaaattgattctattcttgaggttgtccaaactggacggacttgcattctggatgtcaacccacaagcactgaaagtattgaggacatcagagtttatgccctatgtggtatttattgcggctccggagctagagacgttacgtgccatgcacaaggctgtggtggatgcaggaatcactaccaagcttctgaccgactctgacttgaagaaaacagtggatgaaagtgcacggattcagagagcatacaaccactattttgatttgatcatcataaatgataatctagacaaagcctttgaaaaactgcaaactgccatagagaaactgagaatggaaccacagtgggtcccaatcagctgggtttactgatgattcagtaaggttaacaatgaaaattaaactcttaaaaagtgactgcaacaaataaaccttctactgagaaaatacatcacagatagaagattatctgctaagtccaggcatttttatggtgtagattgaaataatagtacacttctgaatttttatataaaatgtggttggaaggtgtactaatatataatttatcttaatttttctaactttgtatggataatctttatcttcatatcacataaagaaatgcgttgaagcaaaaaaaaaa

SEQ ID NO: 392927 - DNA, 1000 bp, Homo Sapiens
ccatgtggaagtaagtagttcttcctgtaggagctgttacagatggaatatccattttggctgaaagccaaggggggggggcgggggagtaagccttgcatgcaaaagaagaaacatgtggaccgtacaagcagactccagccaccaggtttattttcatgctataaataaagttccctattagttcccattttcttatgttctacatgagatacagagacccagatattggcgtggtgaataatcaactgttttgtatacctaaataccaatgagataataagcgagacttgtaaagcactgaaactaaggctaacagcagcacaatccactatcaaaggatttaaatgccagaactgtgaaacattctctgtaggtgccgggacagtctggtggctgacaattaacgtccactccagcaccgagggctggacacttgtggtttctgttcacctttcctggcttggagcccagatctgtctcatgagcagagtaactactgaggaggcttctcggatggaaagttggttttaagccagaaatctggagagatgtcatgccaggcagcagcccccacgggcccaggcctttgtggggcagtgtcactgtctggtgtgccaccagtacccatgctgcaaggagtgggcttggctgctgtggttggcttgtccttcagtggttttcagattgtgtgcagttatcatgaggagtttgttgctgggagtgtacaggaaaagggaggaaaaggcatcgcagttgtccagtcattggaggatgaagtacgtcactcagggtgaatgatggttgggacgagagttgcctgtcttcagccagtgcctgtctcatatgtgggcgggactctgagcagcctggcagcgagggtatgtataaaatgcttggcctgcaccagggctagggagaggacgacaccaaggaggtcactgcgtcgtaggagagggccagcgtctgccgttacgaagagttgcaagagctgtgccta

SEQ ID NO: 392928 - DNA, 1000 bp, Homo Sapiens
accagtgaaaggctcatctctggaacaccagcttcattctaattaagatgtaggcataaaaatatgctccagaccaggcgtggtggcttacgcctgtaatcccagcattttgggaggctgaggtgggcagatcatctgaggtcaggagttcgagaccagcctgaccaacatggagaaaccctgtctctactaaaaatacaaaattagcctggcttggtggcacatgcctgtaatgccagctactcaggaaggctgaggcaggagaatagcttgaatccgggaggcagagattgcagtgagccgagatcatgccattgcactccagcctgggcaacaagagcgaaactccgtctcaaaaaaaaaaaaaaaatccactctaaaaccaaatgtggtctaggattgacaggggtaccaacatctattaaagcctgctttatataggcactgtgaaagtcacaagtggcagcaggtgacaatgaacagtggcaggagggaggaatgaatgactgttacatgtggtgtcttatttaattctccaaacaacatgtgtggggcatcattttccacatttcacaggtgaaggtattgaggctctgaggggtggtaatatgtccagggtcagacagctagtgaatgacagaggcaggggtgagccccgtcctcattccaccaggctgctgtgggattagctggcatccaccagctaagtaaccaagagctgtctatttagcttcctgtaaggctttatagttctgaggccacgtgctgtagcggccctaaggaaaagaaatccctggacttgttctcttttcttccctccccatgtggacatttgggtctctctctgagctccctggatgcggaggatttgaaagctgaattttgcacttgtgtcctggatgcttccatctctacgtttattattaattttttttaaaaaattgaaaattaaaaaaaggatatcactctgtcacccagcctggagtgcaatggcatgatc

SEQ ID NO: 392929 - DNA, 1000 bp, Homo Sapiens
ttgggtgacatggaggatgccagcttcaagtgggcctacacaggaaaggactctgagcagatccaggctgtggtgcaggcagcaccatccctcagaccccctggtgctgaaggtggcagggctggggaaagatgcaggatggagtgaactgagcatcagtcgggaaagtcacaaggagggctggattctggagtaagttcatgtcatccatagagaaatatatgcccctctctagcaactagtgttgtggcctgatcagatagaattctgccacaggacactgagaccacgtaattccacgtggtgtatgaattggttctgtgtgacctacagagttatgattggacaggcccaagtgtccatcatgagatggaaatggtccatgtggaatgagcccaaaccccaagttaacaccccatctgcccagaaaatacctgcccctgaggtggcactgaacaaccaagcagacaaatggaagttagccagccttcactgggggccatctcaggccttgcagggtgggaacatgcatgcaggaatcacaatagctccctttatgtgcccatcctgccaggtcactcagtggccttggtcggtgggagtcagtgctgctggacccataggtagcctccaaaaggtgagactcccacctaccaaggccgaactagctgctgccacctctgaatatccaacttgtcaggattagacacccggataggccctgatgtgccctgcttaggcactatttctttaggtgatcaaagtgccactaaatgacacattgaccacattaagcctcatcatggaagggcagagattcatcctcactgggacagaaacttcctccatgggtaggtttcccccactattctcagactctcagcagaccactgacattctgacccacaggtttggttactctcagcacagcctcttcctgggggacccacctcacagggaaatggaagtgggtgcagcatggaccatgaccaggggatcc

SEQ ID NO: 392930 - DNA, 1000 bp, Homo Sapiens; identical to SEQ ID NO: 283217

SEQ ID NO: 392931 - DNA, 1000 bp, Homo Sapiens; identical to SEQ ID NO: 115008

SEQ ID NO: 392932 - DNA, 1000 bp, Homo Sapiens; identical to SEQ ID NO: 283219

SEQ ID NO: 392933 - DNA, 1000 bp, Homo Sapiens; identical to SEQ ID NO: 283220

SEQ ID NO: 392934 - DNA, 1000 bp, Homo Sapiens
ctccagcctgggtgacagagtgagaaaaaaaaagttattcccaacaaaaatttacaggctatagaagcataaggaaccatgttcaggtcaccacccggggtctccctctcttgccaatgccctgcccttcttccagccatgggaaaccactgcagccatgggaaaccactgcagccacatgggaggaccccaggacttcgagaagagcccgagggacagatgtagccctcccccaccacctcgggaggcctcgctggcggtgtgtgggctgctgcaggagctgtcctccatccggcaattcctggaaaagcgggatgagatccgagaggtggcccgagactggctgcgcgtgggctccgtgctggacaagctgctattccacatttacctgctagcggtgctggcctacagcatcaccctggttatgctctggtccatctggcagtacgcttgagtgggtacagcccagtggaggagggggtacagtcctggttaggtggggacagaggatttctgcttaggcccctcaggacccagggaatgccagggacattttcaagacacagacaaagtcccgtgccctgtttccaatgccaattcatctcagcaatcacaagccaaggtctgaacccttccaccaaaaactgggtgttcaaggcccttacacccttgtcccacccccagcagctcaccatggctttaaaacatgctctcttagatcaggagaaactcgggcactccctaagtccactctagttgtggacttttccccattgaccctcacctgaataagggactttggaattctgcttctctttcacaactttgcttttaggttgaaggcaaaaccaactctctactacacaggcctgataactctgtacgaggcttctctaacccctagtgtcttttttttcttcacctcacttgtggcagcttccctgaacactcatcccccatcagatgatgggagtgggaagaataaaatgcagtgaaaccc

SEQ ID NO: 392935 - DNA, 347 bp, Homo Sapiens
gtgcagctggtggagtctgggggaggcctggtcaagcctggcgggtccctgagactctcctgcgcagcctctggattcaccttcagtagctatagcatgaactgggtccgccaggctccagggaaggggctggagtgggtctcatcctttagtagtagtagtagttacatatactacgcagactcagtgaagggccgattcaccatctccagagacaacgccaagaactctctgtatctgcaaatgaacagcctgagagccgaggacacggctgtgtattactgtgcgagccaattatggttcgaccgagtaaataactactactacatggacgtctggggccaagg

SEQ ID NO: 392936 - DNA, 334 bp, Homo Sapiens
gcaggagtcgggcccaggactggtgaagccttcgcagaccctgtccctcacctgcagtgtctctggtggctccgtcactagtgctgattactactggggttgggtccgccagcccccagggaagggcctggagtggattgggtacatttattatggtgggagcaccaactacaacccgtccctccacagtcgagtttccattttaatagacacgtctaagaatcagttctccctgcagttgacctctgtaactgccgcagacacggccgtctattactgtgtcagggatgggaactccaactggggccagggaaccctggtcaccgtctcctca

SEQ ID NO: 392937 - DNA, 1000 bp, Homo Sapiens
tcccacctcagcctcccaaagtgctgggattacaggcatgagccaccatgcctggccccccccaggtataatataatataaatataaatttatattatgaattatatagattctccctttatatacttataaattttttataacagattttcaaatgtagagaaaaatagcctaatgaaccactatatcagccagctttaacaattgcctacattttgcgatcttgttttctttatctttacccagcgttttcatactatggtacttgaaaacatccgaggcatctgtcatttcacccaaaaatactcagggccgggcgcggtggctcacgcctctaatcccagcactttgggaggctgaggtgggtggatcacgaggtcaggagttcgagaccagcctggccaacatggtataaccccgtctctactaaaaacacaaaaattagccaggcgtggtggtgggcgcctgtagtcccagctacttgggaggctgaggtgggagaattgcttgaacccaggaggcagaggttgtagtgagccaagatcatgccactgttctccagcctgggcaacagagaaagactccatctaaaaaaaaataaaaataaaaaataaaaaaaaaaaattggtcagtatgcatctttgacaatagcattttctaaaaattttatgaaatttccataccattgggaacttaacaaagccaaggctatttatgtttttcatatcttgcaatcatataaagttggttttctgatatgtgctaaaacagcaaaatgtgtctttcgtgaagcattggagacagtgacttcccagcatgtgtccagttgtacagaagtgctattccctggcccaggggcagttgtacctttagcagggacaccaggaccatcagcctgctatacatagccagcatggctttggagggctggtaccccttgttgtactggttttaaaacactcctgccaatgtagtaacatgaggcatatttactttaaat

SEQ ID NO: 392938 - DNA, 1000 bp, Homo Sapiens
ctgtctcttcctacacatcgggcgaggcctatattacggatcatttctctactcagaaacctgaaacatcggcattatcctcctgcttgcaactatagcaacagccttcataggctatgtcctcccgtgaggccaaatgtcattctgaggggccacagtaattacaaacttactatccgccatcccatacattgggacagacctagttcaatgaatctgaggaggctactcagtagacagtcccaccctcacacgattctttacctttcacttcatcttgcccttcattattgcagccctagcagcactccacctcctattcttgcacgaaacgggatcaaacaaccccctaggaatcacctcccattccgataaaatcaccttccacccttactacacaatcaaagacgccctcggcttacttctcttccttctctccttaatgacattaacactattctcaccagacctcctaggcgacccagacaattataccctagccaaccccttaaacacccctccccacatcaagcccgaatgatatttcctattcgcctacacaattctccgatccgtccctaacaaactaggaggcgtccttgccctattactatccatcctcatcctagcaataatccccatcctccatatatccaaacaacaaagcataatatttcgcccactaagccaatcactttattgactcctagccgcagacctcctcattctaacctgaatcggaggacaaccagtaagctacccttttaccatcattggacaagtagcatccgtactatacttcacaacaatcctaatcctaataccaactatctccctaattgaaaacaaaatactcaaatgggcctgtccttgtagtataaactaatacaccagtcttgtaaaccggagatgaaaacctttttccaaggacaaatcagagaaaaagtctttaactccaccattagcacccaaagctaagattctaatttaaactattctc

SEQ ID NO: 392939 - DNA, 1000 bp, Homo Sapiens
ctgcctcttcctacacatcggacgaggcctatattacggatcatttctctactcagaagcctgaaacatcggcattatcctcctgcttgcaactatagcaacagccttcataggctatgtcctcccgtgaggccaaatatcattctgaggggccacagtaattacaaacttactatccgccatcccatacattgggacagacctagttcaatgaatctgaggaggctactcagtagacagtcccaccctcacacgattctttacctttcacttcatcttacccttcattattgcagccctagcagcactccacctcctattcttgcacgaaacgggatcaaacaaccccctaggaatcacctcccattccgataaaatcaccttccacccttactacacaatcaaagacgccctcggcttacttctcttccttctctccttaatgacattaacactattctcacctgacctcctaggcgacccagacaattataccctagccaaccccttaaacacccctccccacatcaagcccgaatgatatttcctattcgcctacacaattctccgatccgtccctaacaaactaggaggcgtccttgccctattactatccatcctcatcctagcaataatccccatcctccatatatccaaacaacaaagcataatatttcgcccactaagccaatcactttattgactcctagccgcagacctcctcattctaacctgaatcggaggacaaccagtaagctacccttttaccatcattggacaagtagcatccgtactatacttcacaacaatcctaatcctaataccaactatctccctaattgaaaacaaaatactcaaatgggcctgtccttgtagtataaactaatacaccagtcttgtaaaccggaaatgaaaacctttttccaaggacaaatcagagaaaaagtctttaactccaccattagcacccaaagctaagattctaatttaaactattctc

SEQ ID NO: 392940 - DNA, 1000 bp, Homo Sapiens
ctgcctcttcctacacatcgggcgaggcctatattacggatcatttctctactcagaaacctgaaacatcggcattatcctcctgcttgcaactatagcaacagccttcataggctatgtcctcccgtgaggccaaatatcattctgaggggccacagtaattacaaacctactatccgccatcccatacattgggacagacctagttcaatgaatctgaggaggctactcagtagacagtcccaccctcacacgattctttacctttcacttcatcttgcccttcattattgcagccctagcagcactccacctcctattcttgcacgaaacgggatcaaacaaccccctaggaatcacctcccattccgataaaatcaccttccacccttactacacaatcaaagacgccctcggcttacttctcttccttctctccttaatgacattaacactattctcaccagacctcctaggcgacccagacaattataccctagccaaccccttaaacacccctccccacatcaagcccgaatgatatttcctattcgcctacacaattctccgatccgtccctaacaaactaggaggcgtccttgccctattactatccatcctcatcctagcaataatccccatcctccatatatccaaacaacaaagcataatatttcgcccactaagccaatcactttattgactcctagccgcagacctcctcattctaacctgaatcggaggacaaccagtaagctacccttttaccatcattggacaagtagcatccgtactatacttcacaacaatcctaatcctaataccaactatctccctaattgaaaacaaaatactcaaatgggcctgtccttgtagtataaactaatacaccagtcttgtaaaccggagatgaaaacctttttccaaggacaaatcagagaaaaagtctttaactccaccattagcacccaaagctaagattctaatttaaactattctc

SEQ ID NO: 392941 - DNA, 1000 bp, Homo Sapiens
ctgcctcttcctgcacatcgggcgaggcctatattacggatcatttctctactcagaaacctgaaacatcggcattatcctcctgcttgcaactatagcaacagccttcataggctatgtcctcccgtgaggccaaatatcattctgaggggccacagtaattacaaacttactatccgccatcccatacattgggacagacctagttcaatgaatctgaggaggctactcagtagacagtcccaccctcacacgattctttacctttcacttcatcttgcccttcatcattgcagccctagcagcactccacctcctattcttgcacgaaacgggatcaaacaaccccctaggaatcacctcccattccgataaaatcaccttccacccttactacacaatcaaagacgccctcggcttacttctcttccttctctccttaatgacattaacactattctcaccagacctcctaggcgacccagacaattataccctagccaaccccttaaacacccctccccacatcaagcccgaatgatatttcctattcgcctacacaattctccgatccgtccctaacaaactaggaggcgtccttgccctattactatccatcctcatcctagcaataatccccatcctccatatatccaaacaacaaagcataatatttcgcccactaagccaatcactttattgactcctagccgcagacctcctcattctaacctgaatcggaggacaaccagtaagctacccttttaccatcattggacaagtagcatccgtactatacttcacaacaatcctaatcctaataccaactatctccctaattgaaaacaaaatactcaaatgggcctgtccttatagtataaactaatacaccagtcttgtaaaccggagatgaaaacctttttccaaggacaaatcagagaaaaagtctttaactccaccattagcacccaaagctaagattctaatttaaactattctc

SEQ ID NO: 392942 - DNA, 1000 bp, Homo Sapiens
ctgcctcttcctacacatcggacgaggcctatattacggatcatttctctactcagaaacctgaaacatcggcattatcctcctgcttgcaactatagcaacagccttcataggctatgtcctcccgtgaggccaaatatcattctgaggggccacagtaattacaaacttactatccgccatcccatacattgggacagacctagttcaatgaatctgaggaggctactcagtagacagtcccaccctcacacgattctttacctttcacttcatcttacccttcattattgcagccctagcagcactccacctcctattcttgcacgaaacgggatcaaacaaccccctaggaatcacctcccattccgataaaatcaccttccacccttactacacaatcaaagacgccctcggcttacttctcttccttctctccttaatgacattaacactattctcacctgacctcctaggcgacccagacaattataccctagccaaccccttaaacacccctccccacatcaagcccgaatgatatttcctattcgcctacacaattctccgatccgtccctaacaaactaggaggcgtccttgccctattactatccatcctcatcctagcaataatccccatcctccatatatccaaacaacaaagcataatatttcgcccactaagccaatcactttattgactcctagccgcagacctcctcattctaacctgaatcggaggacaaccagtaagctacccttttaccatcattggacaagtagcatccgtactatacttcacaacaatcctaatcctaataccaactatctccctaattgaaaacaaaatactcaaatgggcctgtccttgtagtataaactaatacaccagtcttgtaaaccggagatgaaaacctttttccaaggacaaatcagagaaaaagtctttaactccaccattagcacccaaagctaagattctaatttaaactattctc

SEQ ID NO: 392943 - DNA, 1000 bp, Homo Sapiens
ctgcctcttcctacacatcgggcgaggcctatattacggatcatttctctactcagaaacctgaaacatcggcattatcctcctgcttgcaaccatagcaacagccttcataggctatgtcctcccgtgaggccaaatatcattctgaggggccacagtaattacaaacttactatccgccatcccatacattgggacagacctagttcaatgaatctgaggaggctactcagtagacagtcccaccctcacacgattctttacctttcacttcatcttgcccttcattattgcagccctagcagcactccacctcctattcttgcacgaaacgggatcaaacaaccccctaggaatcacctcccattccgataaaatcaccttccacccttactacacaatcaaagacgccctcggcttacttctcttccttctctccttaatgacattaacactattctcaccagacctcctaggcgacccagacaattataccctagccaaccccttaaacacccctccccacatcaagcccgaatgatatttcctattcgcctacacaattctccgatccgtccctaacaaactaggaggcgtccttgccctattactatccatcctcatcctagcaataatccccatcctccatatatccaaacaacaaagcataatatttcgcccactaagccaatcactttattgactcctagccgcagacctcctcattctaacctgaatcggaggacaaccagtaagctacccttttaccatcattggacaagtagcatccgtactatacttcacaacaatcctaatcctaataccaactatctccctaattgaaaacaaaatactcaaatgggcctgtccttgtagtataaactaatacaccagtcttgtaaaccggagatgaaaacctttttccaaggacaaatcagagaaaaagtctttaactccaccattagcacccaaagctaagattctaatttaaactattctc

SEQ ID NO: 392944 - DNA, 1000 bp, Homo Sapiens; identical to SEQ ID NO: 206981

SEQ ID NO: 392945 - DNA, 1000 bp, Homo Sapiens
ctgcctcttcctacacatcgggcgaggcctatattacggatcatttctctactcagaaacctgaaacatcggcattatcctcctgcttgcaactatagcaacagccttcataggctatgtcctcccgtgaggccaaatatcattctgaggggccacagtaattacaaacttactatccgccatcccatacattgggacagacctagttcaatgaatctgaggaggctactcagtagacagtcccaccctcacacgattctttacctttcacttcatcttacccttcattattgcagccctagcagcactccacctcctattcttgcacgaaacgggatcaaacaaccccctaggaatcacctcccattccgataaaatcaccttccacccttactacacaatcaaagacgccctcggcttacttctcttccttctctccttaatgacattaacactattctcaccagacctcctaggcgacccagacaattataccctagccaaccccttaaacacccctccccacatcaagcccgaatgatatttcctattcgcctacacaattctccgatccgtccctaacaaactaggaggcgtccttgccctattactatccatcctcatcctagcaataatccccatcctccatatatccaaacaacaaagcataatatttcgcccactaagccaatcactttattgactcctagccgcagacctcctcattctaacctgaatcggaggacaaccagtaagctacccttttaccatcattggacaagtagcatccgtactatacttcacaacaatcctaatcctaataccaactatctccctaattgaaaacaaaatactcaaatgggcctgtccttgtagtataaactaatacaccagtcttgtaaaccggagatgaaaacttttttccaaggacaaatcagagaaaaagtctttaactccaccattagcacccaaagctaagattctaatttaaactattctc

SEQ ID NO: 392946 - DNA, 1000 bp, Homo Sapiens
tgagtctcagtcttaggttgtctcaaagctcaccatgtaaccttagataagtcattcctctaaaagtatctatctctaagcctcatttttttctgcaaagcaagggagttggtgattactaaggtacttatcgtctagctctaaaatctatgactctgcaaatagaaactgtttgaattaaaaaaaaaatcaaagtggcagaattaatgttacagggaattaaaattagatcagattcaccctaattcaagcagtttcctgaaacttttgaaatgcctaacatccaaatgtcaggttttaaggcagagtgtctcaaccttggcactctagacatttttggttggataattcttggggagctgtcctgtgggtttatggaagtttatggcctctacctagtaggtaccaatagtacaccccctaccccttattatgtcagccaaaaatgtctccaaatattgccaaatgagagtggaagggaggcacaaaatcacctgaaaatcactgctctaccttaagaaagcaggattttcctacaccatagggatgcactaggtacagaagacaggcatcctgagatactttccttccagttaaatcaaaacctcgccctcttaaaacacagcatctgcatagaagattatctctgttttacttgaaagagaagaggttagaagatgagacagtaacatccatccagtgtatattcccttcctgcagagagaataggaaaactttctgatgctaatctacccaaatgactctttatttcatctcttctcttaggcaatcttcgctccactctcagaaaacagccctcaaagccaagctgatggaatcaaaggccaagcgccagcctcaggtagaggttagtgcctggagacccagctccttcaagggcattgcaagaccaaggaccagagccaggctaaatgcagctgctgaaggtcaaggcgtgcctggtgaatgaagctgggaccaaccactgcctgctcacagg

SEQ ID NO: 392947 - DNA, 1000 bp, Homo Sapiens; identical to SEQ ID NO: 201661

SEQ ID NO: 392948 - DNA, 1000 bp, Homo Sapiens
aatgtataatgtgaggaaattgggtgccagtgccacctgggcctgtgggttgtcttgcctgggaggaggaagcaaactaactgaaggaaatggtcctttttccagcccgtgacctcacagccccaaccagaaggtgccaatgaagcagtccccacccccgtggtggacccagatgcacctccgtcccctccacttggcgcacctggactccctccagctggctcacccccagactcccatgtgttactggcagctcctccaggacaccagttgcaccgggcgcactacgacctgcgccacaccttcatgggtgtggtctcattggggtcaccctcaggagaagtgtcgcacccccggaaaacacgcacagtggtgcagcctagtgttggtgctgctgctgggccagtggttcctccatgtccggggaggatcagacacttcaaggtctaggctagacatggcagagatgaggaggtttggcacagaaaacatagccaccattttgtccaagcctgggcatgggtggggggccttgtctgctggccacgcaagtgtcacatgcgatctacattaatatcaagtcttgactccctacttcccgtcattcctcacaggacagaagcagagtgggtggtggttatgtttgacagaaggcattaggttgacaacttgtcatgattttgacggtaagccaccatgattgtgttctctgcctctggttgaccttacaaaaaccattggaactgtgactttgaaaggtgctcttgctaagcttatatgtgcctgttaatgaaagtgcctgaaagaccttccttaataaagaaggttctaagctgaatgtggtcatgcttattgcgacttcatcccagctcccctcacatgcatagccttttaccccaacaaacacagtgtccctaatcaaaaccaaagtgaaaagagaaccaaaagagaacaaaaacctgctgtattgccagatacaggaaaaagtgagactaggatc

SEQ ID NO: 392949 - DNA, 1000 bp, Homo Sapiens
aatagctccaaatgaaccacagttttttcccaatggaggatttttttttaattcttgtactaaaaaaaaaaaatccataccaaatatttttacaaattaagattgatgtaggttttaaaaaaggcatttgtatgttgttagcttacatatggggctaggtaatttcattgcttaaaaagatgcgcctaggctccctcttggtggctggatttctttttcttcgcccgtggtggccatggtttttaatagggccaccggaatcatggtttcttttttttttttttttttggagatggagtctcgccctgtgacccaggctggagtgcagtggcacgatctcggctcactgcaacctctgcctcttgggttcacgccattctcctgtgtcagcctcctgagtagctgggactacaggtgaatgccaccacgcccggctgatttttgtatttttagtagagatggggtttcaccatagtggtcaggctgttctcgaactcctgacctcaggtgatccacctgccttggcctcccaaagtgctaggattacaggtgtgagccaccacacccggccccagagtaatggtttcttgactttctgtagcccttgttccttagtctgctgtgatatttatgttgacctttatcattttctattctgaacccctcttagcatttaatgtgaaatctaagaaattagaagtagaatggcttttattgttttgacacctttgaaattattattaataatttttccagagcaaaaaagcaaacacgctcaataagactaaacaaaacaaaatataaatgtacatcatttaatgtcccagtggctctattctacctgtaagaaaatgatacaaaaccacctaagatattttgaagcctgacaaatcagcttcatggaaaaaggtaaaaaatgcatttttcaaccgaaagggcagatccaatagaagacccgctccttaaataaacataaaatgtaaaaagttggaaaaaaaaa

SEQ ID NO: 392950 - DNA, 1000 bp, Homo Sapiens; identical to SEQ ID NO: 115009

SEQ ID NO: 392951 - DNA, 1000 bp, Homo Sapiens
ctacttactctgaagtctgggcttcagtttgctcagccatctgctttgctgtgtgagtgcagctatcatctatctgtagcaacaggaaagtaatgagggcgacagtggggcacttgctttgattccctctttcccatgccctgtcttaatatacttctctgcagctgctttcctgcagcttaacttgctctcagattgagcactttcaagctttttgtgtatttctgtctttggcaggatttggcataggaattggtgcatggaggagaggagtgtatgataaaggatccatgcagtccttcctttattacacatatagtctggcttgctgtggaccaaattaatattctcctcccatcagactacaaaaaaattggactaccacgctacaagtgtgtctcccccattccacctccggatccctccccaaccctccagtgtttgaatactgctgtgttacttccaggccgttcaacgtcaggctcagtcccctctaccagtcatgattcacattactactaggctgtatcctttttgaggctgggaaacagtcaggctttcgtcattggaagtgattctgcagacttctgactcaccttatcaggtgactctggttaaggaaagcttttgagtggtgaactcaaagactccagttgaatcaggaggcaaaggcaaaaattagcataattatatttaaaatcctcaggaagtgggaagagaatactgcctcccagcctcaattgctgatatgttattggagacaggcttttgaaactgctccagctatttctctgtaacctttagttaaaatataagtagaaaggagacaggaggctcaggaaattttctaaattgctagtataatatctatatgtatacacacatatacacccgtggagggagaggaagagtatacagtcctgtttgaatcatttggaggatttttttgctgaataaagttctcaagaaaattttctaaaaaaaaaaaaaaaaaaaaaaa

SEQ ID NO: 392952 - DNA, 1000 bp, Homo Sapiens; identical to SEQ ID NO: 115010

SEQ ID NO: 392953 - DNA, 1000 bp, Homo Sapiens; identical to SEQ ID NO: 283234

SEQ ID NO: 392954 - DNA, 1000 bp, Homo Sapiens
gccaggagagtgggggacaagctacagggctgggagggtgagttggggtttgggtgggatgggatgcctgcgtcgctgaggaaattggaaattgaggcgagggcaggcagaggcctggactcggcctgttgtccccaccccaggtgcactttgatgaggggaaggctgtctacctgaagctggacttgctggtggatggtgtgctggccctgcgctgcctggaggaattctcagccactgcggcgagttccctcgggccccagctccgcctctgccaggtgtctggtctgttggccctgcggccagggtcctccctgcggatccgcaccctcccctgggcccatctcaaggctgcccccttcctcacctacttcggactcttccaggttcactgaggggccctggtctccccgcagtcgtcccaggctgccggctcccctcgacagctctctgggcacccggtcccctctgccccaccctcagccgctctttgctccagacctgcccctccctctagaggctgcctgggcctgttcacgtgttttccatcccacataaatacagtattcccactcttatcttacaactcccccaccgcccactctccacctcactagctccccaatccctgaccctttgaggcccccagtgatctcgactcccccctggccacagacccccagggcattgtgttcactgtactctgtgggcaaggatgggtccagaagaccccacttcaggcactaagaggggctggacctggcggcaggaagccaaagagactgggcctaggccaggagttcccaaatgtgaggggcgagaaacaagacaagctcctcccttgagaattccctgtggatttttaaaacagatattatttttattattattgtgacaaaatgttgataaatggatattaaatagaataagtcatagtctctctctttattggggctcaggggacactctcagggtagctgggggccacgtgaaggggggc

SEQ ID NO: 392955 - DNA, 1000 bp, Homo Sapiens
ccaaggttctaggcttcattctgctggtggatttctcactgcacaggccccagccttgaggtgtgcctcttgtcagggaaatgggaggccctagtagccacatctattttaacatcatgtggttcttaatctcatatttatcctttctgctgcctgtgtgctggttccatagtaaaccaacaagaaagtacagtacccttatctgagttcctgtctgcattctcatcggtccttgaactggcccagcccttgaggtgttgtgcttaacagcctctattactgaaagtgccaacaaatatatagcagctcacacctataatcccagcacttttgggaggccaagacaggtggatcacctgaggtcaggggttcgagaccagcctggccaacatgatgaaaccccatctctactaaaaatacaaaaattagctaggcgtggtggctggcatctgtaatcccagctactcaggaggctgagataggagaatcgcttgaacctaggaggcacaggtcacagtgagccaagatggcaccactgcactccagcccaggcaatagtgtgagactccatctcaaaaaaaaaaaaaaaaaatgctgggcgcggtggctcacacctgcaatcccagcactttgggaggtcgaggtgggcagatcacgaagtcatgagatcgagaccatcctggctaacatggtgaaaccctgtctctactaaaaatacaaaaaaattagccgggcatggtggtgggcgcctgtagtcccagctacttgggaggctgaggcaggagaatggtgtgaacccgggaggcggagcttgcagtgagccaagatcacaccactgcactccagcctgggtgacagagagagactccgtctcaaaaaaaaaaaaaaaaagatatacaaggcagcacgttgtaaaatatgggccacattgtacttgcacagtagatgtttattgaaggaaagacatgtaacttgctttcaagtaatcttataatctaga

SEQ ID NO: 392956 - DNA, 1000 bp, Homo Sapiens
gatgggaggcaggctgaagaattccaaataagtaccatgctttttatgaaaagaaccttaaaagaacactttccaccttggatttctattttttatttttatcttttattcaaaaccaggaatccacgctggaaaaacaaggagttaaacccccctaaaaggaccatagtttataactgtccccaagaaacccaggaagaactcagggctcatcctggagtctgaagccagaaaacctcactttgccttttcctcaaagtgtgccgtgtgattcagtcctcttaattcctgtggtacttcaggtgagggtagaggatgaagcttgcagagagcaggggactatgtggaggagaggctccatttttcaggagactgggaaacattggatkgaacacatgatatgtgagctgggaggtgcagagaggccagggaggagagggagcctgagacaaaaaagggcaggcctctttccgtgggggaatggaattgcttgcctatggcttcctggggtcatttccagctcatgcgaaacaccatgtgatttatctcctaccctccaaatgtgtctgcaggtattctagaaggatttgacccccctcacccatgtggtgtgcagggctgcccagctggttatgaatgcaaggactggatcggccccaatgatgggatcacccagtttgataacatcctttttgctgtgctgactgtcttccagtgcatcaccatggaagggtggaccactgtgctgtacaatgtgagtagagctggtggggacctggaaggaggagggaagaaccctggatggaggcttctgtggttgtttggcctggctagtccggggacagggagggctatggatataggtgtattgggatgggaggtgaagactcaactgggataagccttagcagtccataaccctcttttgtctggcctgttgctacgtacaagtacacagcttcttaatacgaccaggaaattacatcctatgttggatagg

SEQ ID NO: 392957 - DNA, 1000 bp, Homo Sapiens; identical to SEQ ID NO: 283235

SEQ ID NO: 392958 - DNA, 1000 bp, Homo Sapiens
aaatttctgctctttataaattacccagactcaaggtgttctgttatagcaacccaaaatggactaagatagatgggtttcattattcccacattttacatgggaagaatctggagctcagagaggtaaagtaatatgcataaggtcccagagttaggaagcagcagagctgggattgtaatcctgcaacagcttcccatctcactcagagtccaagcatggtactttcaatagccctgcacaatctgtctacctcacaccctcctattctactcctgcctcacttggctccagcctcaccagactccctcctatgacttctatgtgctagcccttcctgctggcccgtgttgttctcactgctcagactgctatcacatctgataactgcatggtctgcttcctgatctcctccaggtcaagactcaattgctgatttctccatgaggagttcctgattatactcagatactcactcacatacgcacaatcttcacccgttacttacctgcctctctgatttgtctccaatatacgtatcattattgaacacaccacatcttttatttatcttgtttattatctgtcttctcctctagaatgggagcttcaaagggaaggaattaaaattttatctgttttgttcattgctctatctccaactctcacaacagtgcctactatatagaaaatgctcaataaatatttgctgatgcaataaataaaaaaatgtaactaagcaaccaagccccaaagagtctgattttattaatattgttttctgtctcctcacaggaagccccttggcatcacgcacctccctctgggctatggcatctctgagccagctgagtagccacctgaactacacctgtggggcagagaactccacaggtgccagccaggcccgcccacatgcctactatgccctctcctactgcgcgctcatcctggccatcgtcttcggcaatggcctggtgtgcatggctgtgctgaagga

SEQ ID NO: 392959 - DNA, 1000 bp, Homo Sapiens
cagccttcagcccctcccggggagaagggccttgcttccctggaagaagcactgtgagactgttccccctgcctctctggcctcttgtctccccttttccaataaacttggggacctgctttgtgtgctgcaatgtcttgctttcttggggttccccacacccaccaagtggtgagcaccccagcctgatgatatggcctgaagactagagtcgttctggcctgttctccgcctggacacccgtagggccttgtccccagatggttctgtcatctcctggccaggcagtgctgactgtgctcacagcaccttctacctgtcacacctgtcagtctggatggctctgaaggggaccgaggaggccagaagtcagccggaaggcagtgcatgtgcatgcgcatgtttatatgtgtgcacgtgtatgcgtgcttgtgtgtgtgtttgagttttgcccccttcttgcatacacggtccccactttctcttcctagcatatcttcactctgccccccagccatccttccacgtaggtaccacagcaacaaccaccaaaagtgccagcagccacccttgggggctgccctgtgtcagtctggaccccaccccattgccacatcctcctcatgctgcccaccaaacagggaaagatgagagccttggcacctgcccctggcccacccttcccccatgcatacacctcctgagtacctggcagccttctccacagctgacatgaggacaccttctactcactccctcaactgccccactcactgccctcatccgagatacctcacagcttcaaccccaaggctaagaggctcctctgcccgctgcttggcccaatctctcctgtcctcctcttggaaagctctggagagctctggaagactttgagaagtccctaaccccaccctcgaggaatcaggcctggaacagtccttgcaaggctgcagcccacctccagggtagcgcactgccttccttgctggcctcttca

SEQ ID NO: 392960 - DNA, 1000 bp, Homo Sapiens
ccaggctccctaaaccccgagatggcttttctcccagtggcttctctccggctgtttctcttcctgggttgttggtgtaactccagcatgcaagtccacgaggtggggtgcaggcggacaggcgggctttgcaatgatccccgtactcctgcccctgctcgtggtgtgaggcccagccctgtccactgcagggttgtgtctgcaagctccaaggaggcctgggggttgggtggggtgggctgcctgtgtgcactactctttgtgttcctgggttttcaataaacttgccaagctcacctcacagggactctggcctctccttctggatcacactggggttggaggagttgcctcctagactccaccagatcacagcctgcctagctgaggtagggcagagactggtgtcctgggcacagggaaggcactgaggaaagagggcccaggccattcgctggagggactgacagttctgcagggcataggagaggtagcaaaggctccaaaaacaagtggcagccagcccactgcccacttccccccaccactgggaatagccttgtgctcagaggcaccctcccctgaccaaagtgaaccctgccatctgttgctccccaggtctcacccaccctcagttcccccagttcatcagttcatataggtccttcctggtctttctgttcccactcgtgtctccatccaactcattcatcacgatgctgctagaaaggcctttctcacataaaaaactgactgtggttccccgcagctcatatccttcggtagctccccgttgcctcccagaaatagcccaagctccttaacatggcatacaagccctgtgtgatctgcccgtagacttccacccccagccatcccctccacacagcccactgcccacctctcatcttttgtctattcatccaacaaacatttgagaagtgcctaccacataccaggcatgatgctgggaaaatggtaattgacaagattcaattcc

SEQ ID NO: 392961 - DNA, 1000 bp, Homo Sapiens
ggtgtctgattcccatccctccattcccctcacctctctagcaaccatatttctagatgactcctctagtgtgatctatcagtttttgctcaaagattgtatgaacatgtctcaacatcagcctggtccaagtagagtttggtgtgcaatttgctaaccacactcctgaagaagcagatggcagtgggttcaggtttgcctgtagtttaaaaagactcatgttgctggtccctcagagaaggaagataattaatcattggttctaaaggattctgggtcataacatgtctgagatggaagagaattctgacctgtgtctctgtccacatgtgtgagccattcccagggtggtgtggtctgcggggacctggactccactgcctcctgtggctcagggggtgtggccatcagcagtggtgcactgtgttgcccctctgcagtgggggcctgctccagtgcccaatctgtgcggtttgcatagagggggtgggactctggacggacctgttctgatgggggcagtgtgggttggggagtggaaatcttttctcttgcatgaccaaatgtcagtttagtaatttccccttacagagaacccagaactaactctcctgtttccttcttattggagttaacaatttactttctctgtgtaaaccctgggtttgacattattttcacttccattgcttctccccttccctgtggttcaggaatgaaatagaaaggcttttttttgaatgaatttctcggtcattgtcttccccaattaacttcaggccagcagatgttaaattaagtcctgactgtgtgccagatcctcttggaacggagccagctagagggtgtggagtatgtgggaacatctctgcgctttgccctcggatgacaggggctccagatgctgcctcagcatggaagggtggtgtgggtgtggagctgggctcctcacttgctctgagagattgtatattcccagagtcccccaactattcatatg

SEQ ID NO: 392962 - DNA, 1000 bp, Homo Sapiens; identical to SEQ ID NO: 283238

SEQ ID NO: 392963 - DNA, 1000 bp, Homo Sapiens; identical to SEQ ID NO: 283239

SEQ ID NO: 392964 - DNA, 1000 bp, Homo Sapiens; identical to SEQ ID NO: 283240

SEQ ID NO: 392965 - DNA, 1000 bp, Homo Sapiens; identical to SEQ ID NO: 283241

SEQ ID NO: 392966 - DNA, 1000 bp, Homo Sapiens; identical to SEQ ID NO: 283242

SEQ ID NO: 392967 - DNA, 1000 bp, Homo Sapiens; identical to SEQ ID NO: 283244

SEQ ID NO: 392968 - DNA, 1000 bp, Homo Sapiens; identical to SEQ ID NO: 283248

SEQ ID NO: 392969 - DNA, 1000 bp, Homo Sapiens; identical to SEQ ID NO: 283249

SEQ ID NO: 392970 - DNA, 331 bp, Homo Sapiens
cctcgtgagttctgacatctgagcatgcaacggctcccttgctttctctcatctttagatacttgttacgtcctctcctttgccatcatcatgttgaacaccagtctgcacaaccccaatgtcaaagataagcccactgtggagaggttcattgccatgaaccgaggcatcaatgatgggggagacctgccggaggagctcctccgggtaagcaaggaagaatggtcttcattcagttcaagaaagagttcactgggaacaggatcgtcttttgtaggaaggaagaaaaaacatacaatttatcaagggtctcctcttttaatttgtttaa

SEQ ID NO: 392971 - DNA, 1000 bp, Homo Sapiens
cggtgggtctgggagtggcctcaccctggattcagcctaggaatctcttcaccctcagctgtccagccctgctgcctgtctggggatgtgtggcctgggcagagggcagtttaaagcacaaaaccacatggggaaaacacaaggttgcggggactttctcatgtgcctgatgtggtggagggagacaccagcaggtggctgcagtgacgttagggaacataacacttctttgccctgctagctctcagctctggggggcatcccccgatgtggtctgggctgggagcaggcatatcccctggttgttgcctgtgcctggtctgttcaccatcgtgtttgtgtgggcagagcctgccctgcaggagcagtgactttcttcccactgtgtgtcccggacctgtggtatgtgtccctttgccatcccaaacaggcaactgcttgctgctctccttgcttggcatagcctcctggtcagtggccaatgccccacaggccttcctgggcctggccctcctctcctgactcccagatccttccctgccctcttgtgtgcaaggacagattttgcagggaaagttctgtttcttctttgatacctttgttctgtcccctgccccatccccagcactcatgatcttgaagcccctatcacactctagttcagtcctgtgaaccatgtcctgagggccttgcagggaagtaggaaatagaaactcctccacaaagagccgaggatcagagaagacccctgagatgaatcagggccctgccctgcccaccaactcttttctagcaatcatgtcctgcccaggctgcaggcttcattaggctcctgctgtcctccatgatgtgactagcacaaggtgtatatatgttttgtacctctgccgatggctgtacatagtgtatgaaagttatttaagccccatgttgtacatttctgttcctagattggatgtgtgtgttctaagaagttgtcataaataaaacctgaatgacc

SEQ ID NO: 392972 - DNA, 1000 bp, Homo Sapiens
agatgttttcagaaaatcaagtcacagtaacaatttgccacttttttctgttataaatcttcttacttaaattttgaatatttagtttttctcagttacccatttgtgtgtgtgtgattccacttagaaattcttaaaaccagatttttctttcattccgtttggatgtctacattccttatcaaaggatataaatactgtgtatgcttttgaattttatttttaggaaaattctgaagccagctatcacaggtttgttagctaataatagtattttcttttagttgagttaggtttttccccatctcctgtagagcgaatttacatattgtattgggtaagtgttcactacttttcctgattaagggatctgtgctggggaacaaagcttttgcagtaccttatattgtagttaaaattttatttaacatatccttcagtgagctcatttcacactgtagcctcttccttaaaatttgtggtgctcctgtaacagtaagaactaattctgaaataaaagacatctcctaatgctgtgcaaacatagtttacatgtattgaaggaggcagttgttaaattgagtgaccaatttaagcaatcagatatttgaaaactgcaccctttagttttgaaactgtgaattagaaacacttttcctgctgtattactacctgctttaacatccaaatatacagtgattttaaatgataacatactgtggttattagattaacagcttgattttgaatgttcagatgataatgcagaagacatcacttctagtaaggattttgactagtgcattgatgttgaagttggtgccatttcaaaatgtggcaggtgataatcttttaccataatttgcataaaactgtaatagaagtttattttgagatgttagtatattatgtactatgcatttctgtggtatagatgttgtggatatatttaagtatttggttacatggttttacaataaattacaatactgcaggctct

SEQ ID NO: 392973 - DNA, 1000 bp, Homo Sapiens
atgggatacacgtgctcatctgtctgtcctcctttcctctccctccccgacgttctagttagcttgttgacttgttaaaccttctgttcttaaaatgaaaagctagcttacctcaaagaatcttgtttccattcggaaaccaacgattttgtgttttagaatggacagccctcccctcaccactccctaccttggcctggtgtccttgagacatacggtctttgcttagtcgtgtgttggctgctttgagcaggaacaaggcctccaggccctgaggtgggaaggaaggattggatgccactgccctcctccccactttagcatgtaggggccagcccatctcttccagcagggtcctgctgagttaccatagcaaccagcaactccagggtaccacaacagacaatggctcagcgagccgacgtgtggggatgatgcaggggttttggcccagccagaggacccagagttgagcttcaaatgctagagaaggggagaaacaggatggaagggtggtttaaggaactggcaggggtctttgagtcacatagagaagccgttgaaggaggtagggcaggttatctctgttccagtcacccccttccagccccatcccacttctgtttcaaactaaagctcccacctcgaacattgaccctttgttagaacaaagcaaagcatatctttagacaacagtgttaaaatgagcctcaaatgtatgtggatgagatctctaagaagagggtcttctggttttgatttttaaagaagagtatcctagtaaaatattaaaaaaaaattaaaaagtttttaaaaaggaaacctatgctatttaaattggagcccagttgtaacttggtaaaggcaagcttctgtacctttgttataattaattgtatacctgtgtatgtaaatataaggcattcctattttgcagttcagaacaaaaaaaacttatttgtaatatagaataaagtttattaaaaaataataaaaatgc

SEQ ID NO: 392974 - DNA, 1000 bp, Homo Sapiens
tgcgggcacctgtggccaagtggagcagaggtggacatggggttggattgttttgattatttatagttacacaaggacttctcccagctgaccctcaggatgccccaagtcaggaagaccattaagaataggaggagagggctctgcctcaactttcctaggaaagagcccacctcggagatagctacggtttcctctggtggagatggtgaggatgaaggctggagagtgagggaggaggctctgctggccgcagagaacacagggatgggagggtccctagccttcgggcacctccagggccagagagcaggctcagagcagctagtgtggagctcagcatccccaccccacccctcctccctgtagagctgatttgaggcctccttctggggctgggctctgcaggccaggtgggtgtggcctgtgttttcccttctgttctttctgcctgtactggatctgttattttcagggaaacaggccccagggcccccctgagcctcaccctaagcccttaggcctctgagagtgctgttgggttctatttatttatttatttgttcctttgttccctacccgtgcccccagtgtcttccctgctgagtaccaggagaggtcctgccccatcctctctctgaagccagggcccttccattccatttagcctttggatcatcctggctgggagaagtgggaccgagccacccagccccactatccccaagcagccctacagccgggatgggaggcacgtggcctctcttttatccgtctatttattttgtaagtgtattcgtgtggaggaggttgttgctttatttttttaaggctctggagtgttgtgtatggtttcttttcacatcccagcctcccatgggcacttctaagaagagaggggatttcttggaaaaggagagaggaatcccctagagcagggaaagcagtgcctgccagctgttgtgcaccttcctgagaaataaatatcctctaaattttc

SEQ ID NO: 392975 - DNA, 1000 bp, Homo Sapiens
tccagcctcactttactttctgtggcctgatgaggaccatgggtgattttgtgtacccaaagcgctggggactgcccaccgtgtggcccagtcactgggaaggagccccagagagccggctgtctgacatgatggctcagggtggtcatccaggttgaaaactgaccgtgtgatgtttgatttgggcttcatttcgtgtgtaggagcacggttagactcactgttaaggaagctggatgcacttctctaaaaggctgcactttccgtgagcacttttcgtggtacaatccacatgacccactttctcccctgggggacgttggttcagaggttggtagcacttggggagagtatcttaacacagtttcttgacagcagctctggaacttagtatttctgccccgagttttgccacactgagactttgagtagctcctggtggactcaaccctgttcaactcagagacgggcctcctctcactgatgcaaagctttaaggcttctctgactgttctgaaactcttcgtattcttgtcaagtctaaagagactgaagaaaagatttaaatactaataaaaatcagtagataatttctgtaggttctgctggaggaatacaaactgtttggtgttttaaatttaagtgtagaaattgtagaatgtggaattagcacagatccttcctggctttctgtttcacttgatcatttagcccagaccacccaggatgttttccaaaatgttccacaggcgtgtcccgctggatccatttgtccttgtcacttggagaaaggccagtccctgtgacggggcagccctctctgtccctcggtcagctcgtgtgaatcctgggacctcttccggtcggctctgcccgctgttctggggtcgactgccacgacttttgattcaagaagcttcctccaggcgggagcggctatttttcctaaatgagaattgttacattgcaaattgttgaataaaatattttgcgctccttc

SEQ ID NO: 392976 - DNA, 1000 bp, Homo Sapiens
tcggttgcccattatcctcaaagggattttgacaaaagaggatgcagaattagcagtgaagcacaacatccgaggcatcattgtttccaaccatggcgggaggcagcttgatgaggttcctgcatctattgatgctctgagagaagtggtggctgccgtcaatgggaaaattgaagtgtacatggatggtggggttcgaaccggcaatgatgtgttgaaggcactagcccttggagctaggtgcatttttcttgggagaccaatcatttggggccttgcctgcaagggtgaagatggtgttaaggaagttttagatattctaaaagaagaactccacacttgtatggccctttcaggctgccggtcagttgctgagatcagtccagacctgattcagttctccagattataaaggacctactgagattgcctacaagagaaagacaagcttttcaacatagtgtgtgatgctgttcttcttgggtcccattcataatagaagtttaagccctctaccctcaaaaattgagacagatggagaaaagataggctaaagctaccagagggtgcatttggatgaagaaataacatctaatgttctacaggaaactagagttaacaattaattgactatatcaaaaagccatgttctagcaagaaaggaaatagttagatctgatgtgacataccagttaccttcatttgatcagtagtgcattatacataattgaaatgtcatactgtgccataattatgtgtaattactatgtatcaattaaaatatcaatatatgttcaaaaagaaatggggacagggttatcctgattttattcattccctcctgcaagaaatatttttaaaacatcaatatatgtagtcaaattctgaagcatagtacagcatgtgaattattcaagtttctgtcacagcatgttacagaaatattatgatctattgcctaatgtccattgttaacagaagctgacctcaataaaaaaac

SEQ ID NO: 392977 - DNA, 1000 bp, Homo Sapiens
ccgggtgatgccacagggggcagggtggggaggggtcttgtaagggcatggaggagtcagcttggggtgcagcaaaggaaaagtggggaaccaagacagctgggtggggtgtgctactgggccagtgcctggggagacagcctgggggggatgggctgggcaatccggggtaggggggaggggtgggggagtgggggagggggaagctggcctggggtaagcagcaggccggagccacaggccaagtcctaggagaggatgccttaactgggcccccaccagctacctcgccatgcctttcgcgacacccatggaagcagagctggcccgcaggagcctggcccaggatgccccaccgcttcccgtgccaggggtgcttctgaaggagttcactgtgtccggcaacatactgactatgtcagttcaggaccaggacagggatggggcctgggtgggtggcggtcacagcgtggcagggtgggggctgggatccgcctacaccccacggtcaggctgctagaaacctgggaacaccccagcacagggtctcagaacagagacctggtacaccaggcccgccgccacccgagggagcccagggagatgggtgcagaggtgtcgcctttaacgtgatgttctctgcccctcacatttagccgactgactgctgcagaccaccgccaactgcagctctccatcagctcctgtctccagcagctttccctgttgatgtggatcacgcagtgctttctgcccgtgtttttggctcagcctccctcagggcagaggcgctaagcccagcctggcgccccttcctaggtcatgcctcctcccctagggaatggtcccagcacgagtggccagttcattgtgggggcctgattgtttgtcgctggaggaggacggcttacatgtttgtttctgtagaaaataaaactgagctacgattccgtgtctgagtctcttttcggcgagcgaaggcaccttcggacttgcatgc

SEQ ID NO: 392978 - DNA, 1000 bp, Homo Sapiens
tgcagcctggagagaagttgggcatcgtgggccgcacaggctccggcaagtcttccctgttgttggtgctcttccggctgctagagcccagttcagggcgagtgctgctggacggcgtggacaccagccagctggagctggcccagctcagatcccagttggctatcatcccccaggagccctttttgttcagtgggactgttcgggaaaacctggacccccagggcctacataaggacagggccttgtggcaggccctgaagcagtgccacctgagtgaggtgattacatccatgggtggtctggatggtgagctgggtgaggggggccggagcttatctcttgggcagaggcagctgttgtgtttggccagggctctcctcacagatgccaagatcctgtgtatcgatgaggccacagcaagtgtggaccagaagacagaccagctgctccagcagaccatctgcaaacgctttgccaacaagacagtgctgaccattgcccataggctcaacacgatcctgaactcagaccgggtgctggtgctacaagcggggagagtggtagagctggactccccggccaccctgcgcaaccagccccactccctgttccagcagctgctgcagagcagccagcagggagtccctgcctcactcggaggtccctgagcccaatcccacaccctgcagagttctcccctctctctgatccaggccgggcctatacagaggtgctggctgcttgtttacattctcctctggggctctacctctccacacttccccagaagggaaaagggcaccctggattactctttggaaatcactccttggtgggcagcatcctgaggcttccccagaaccaggcctctgctctggccctcttgcatctggaacgccaggtgggtttttctggcataggagcccacttgcattttcatagttttatttgataaaattccatcttacattctgtgtattaaaaaaataatatttct

SEQ ID NO: 392979 - DNA, 526 bp, Homo Sapiens
ctggcttcccaggatgatacatctaaatttgttgagatttcctaccgataatgattttataaaaagcatatgcatttattatccacttactatttctaagtacatagtcataaaagcaaagttacctaaaatgaaacttttattctaggtccagtggcattgcagagcacggatggttgcaggagccaacttttacattgttggacgagaccctgctggcatgcctcatccagaaacagggaaggatctttatgagccaagtcatggtgccaaagtgctgacgatggcccctggtttaatcactttggaaatagttccctttcgagttgcagcttacaacaagaaaaagaagcgtatggactactatgactctgaacagtaagtcttacattctctgtacaaatctttgaagtacttcgtggtctagctgctcccagggatttagcttattgtctaatctttactgatgacaggttttgtggtactcatgtcagagaaaggtaaacccagaaaagtaatttcccaa

SEQ ID NO: 392980 - DNA, 1000 bp, Homo Sapiens; identical to SEQ ID NO: 283255

SEQ ID NO: 392981 - DNA, 1000 bp, Homo Sapiens; identical to SEQ ID NO: 283256

SEQ ID NO: 392982 - DNA, 1000 bp, Homo Sapiens
ttgccacattttgagggtatggatttgcacttgatggatattcgtcaaatggctgagacctcgtgctttccttccttttccttccttcattcctttccttttcctcccaccccattcctcctttcctttaatatacttaaaaaactgtccatgtgcctgctccagaacaattgccaaatgatgaatttgtcaatgaccaagttgttgaattagttttttcttttatttatttagttttagttgactggctttgtcttgtcttcataagaaagaagcttttgtgttgaggactgttgtgttcgtttctgttcctaattcccacttctggaaataaagatcaagtagcagggagaggggagacttgagggcataaaaatcataagatcagaatgtttctgagcatgcagaattcttatgactatatttaacattaatatatttgtatacaagggagaatatataagaatttggccaggtacggtagcttacgcctacaatcccagcactttgggaggccgagatgggtggatcacctgaggtcaggagttcgagaccaacctgaccaacatggcaaaaccccatctcaagaaaaaatacaaaaattagccaggcgcggtggcgcatgcctgtagtcccagctactcgggagactgagacaggagaatctcttgaacccaggaggtggaggttgcagtgagccaagaccgcaccactgcactccaacctggatgacagatatctatgacaccttcttattatcttagtgtcttttgaagagattttacattttatgaagtacaatataatagttttttctttaatggaccatgttttggtgtcatattgaagaaatctttatttaacacaaaggtcatgaaaaaattttacatttagaagtttcctcattttaaatatcacatttagatcaatgcctttttaacacatctattgacaggattgtatgatttttaatttttggacaattgaaacaatgaattac

SEQ ID NO: 392983 - DNA, 1000 bp, Homo Sapiens; identical to SEQ ID NO: 283258

SEQ ID NO: 392984 - DNA, 1000 bp, Homo Sapiens; identical to SEQ ID NO: 283259

SEQ ID NO: 392985 - DNA, 1000 bp, Homo Sapiens; identical to SEQ ID NO: 283261

SEQ ID NO: 392986 - DNA, 1000 bp, Homo Sapiens
aggcgactgcatatcatttccggggatggcttgagtgagtgtcagagctgtaccttcccgagtcctctagtttatctgcctcggttcctcgcttccagacgaggaaacaggcccagagaggaaagtgacttgcccagggttgtctcgctggtccacaacacaggtctcctggtggggaccccttggctgacacgacagccccaggaggcagtcaagctgcgactggtacttcctggtgagaaagacttgagtgggcagcggggcccatggagagcgctgcagcctggagcaagtcccccaccactgtgattctgccccagcctccagcttgtttctttctgatcacaactcggaattactttatttacattttctatcagctgggagcaatctgtccctctgcttccccttttggtgctgagcacagagcagacatcaatgaatagctgttatcttaaggtgtgcagtgactaggccaaggacatccggtggttagagaaggacgcgcctgcgatgccagcctcaagtctttgccttcctggaactctgctccagggtcgcacctgcccaaaggaaggcctggaggcgggggccagggcgatggggctgggccaggcgtggaaaaagaggagctaggagcagacagggttggaccagaggcggggcggggtggggaaagggttggtggggatcggaggcggggctatgaatagaccggactgggccaaaaggaacaaggcgaggattgggcggggccagagggaaataggggcggggctaggcgccgggagcttccacatgcgtcccgagcccgccagaagctgctaggcagaggctgctgtcccggcgggagctgtggcgcggagcggcccctctgctgcgtctgccctcgttttgtctcacgactcacactcagtgctccattccccaagagttcgcgttccccgcgcggcggtcgagaggcggctgcccgcggtcccgcgcgggcgcggggcgatgg

SEQ ID NO: 392987 - DNA, 1000 bp, Homo Sapiens; identical to SEQ ID NO: 195012

SEQ ID NO: 392988 - DNA, 1000 bp, Homo Sapiens
cttatttcacaggttatacagcagagcgggttttgtgttttcattcctatttccacccttcatttggttggtggactccacaacctcaccctaccctacactttgggagcacaaatttggtgttgaaacaagcttaaatttcattttagggcatactgggcttactctcctcccagctgtctgtggattgatttgattttaatgttcgagttttacagcaacagctgaaaaccatgaactattctaggaactgtgttggaactctttaaaataaagaaaagaggaggaggaggaggaagaaagaaaaccaacttaagaagccttgactttggaggacagaaagccaccagccaatggagaacaaagagatgtttccctttcctttctttcaccttgtcattctgggtttccttctgcttcactctttccttcccccttaaaagtggtattcctggttggtctgtctgtctgtccttgtccttgtggtgatcctggcatggtgatatgctccactttgcattatccatggtctcttaccagcgcacaagtcagtggggaggatctaaccacgcctggtggtgaggaagctgaatttccaggcctgcgtcccatgtagcctctccatgaactgcagaaggcatgttctgcatggttaccagtaagtggctccctctcaccgtgttcattgtcaaatgagagcaaactttaggtgttggctccattgtacactctacttgctctgctcccctccctccaaccagggttcatgtcagtgcacaccccatgtgccctggcgaagctggtgctgtgagtgatgtttcccatacaactcagggatgccaggtggcttaccctgagatagtcattttgggcacataacagtgtaggaatgaaacatggatttcattgatatttaaatctgtcaatttcattttttgttaatgttttcccctgatgactttttagcaatttaacaaataaaatggacaattgtcttaac

SEQ ID NO: 392989 - DNA, 1000 bp, Homo Sapiens; identical to SEQ ID NO: 283264

SEQ ID NO: 392990 - DNA, 1000 bp, Homo Sapiens
atcaccccgtcacgggcctcagagagcagcgcctcttccgacggcccccatccagtcatcaccccctcatggtccccgggatctgacgtcactctcctcgctgaagccctggtgactgtcacaaacatcgaggttattaattgcagcatcacagaaatagaaacaacgacttccagcatccctggggcctcagacacagatctcatccccacggaaggggtgaaggcctcgtccacctccgatccaccagctctgcctgactccactgaagcaaaaccacacatcactgaggtcacagcctctgccgagaccctgtccacagccggcaccacagagtcagctgcacctgatgccacggttgggaccccactccccactaacagcgccacagaaagagaagtgacagcacccggggccacgaccctcagtggagctctggtcacagttagcaggaatccccttgaagaaacctcagccctctctgttgagacaccaagttacgtcaaagtctcaggagcagctccggtctccatagaggctgggtcagcagtgggcaaaacaacttcctttgctgggagctctgcttcctcctacagcccctcggaagccgccctcaagaacttcaccccttcagagacaccgaccatggacatcgcaaccaaggggcccttccccaccagcagggaccctcttccttctgtccctccgactacaaccaacagcagccgagggacgaacagcaccttagccaagatcacaacctcagcgaagaccacgatgaagccccttctctattaagaatacaaaaattagctgggtgtggtggcacacacctgtagtcccagctacttgggaggctgaggcaggagaattacttgagcctgggaggcggaggttgcagtgagccaagatcacaccactgcactccagcctgggcaacagagcaagtgtctaaataaaaagaaagaaagaaagaaaggaaggaaggaaggaaggaagg

SEQ ID NO: 392991 - DNA, 1000 bp, Homo Sapiens
tctgtatgggctgtacttggttaacttgattttagaaaaaggactaacagaattgctaaagaaatgcatccaataaatgaaaaacagtaggaagatcaaatgtttttgtcaaatatattcacaacttgaccagattagctgtcctgtttgtaatgcaatattaatatgtcttttgggaaaaagcctacatatggaataaaataagtattgaagaatttttctttgtaacaatttagtagtcactgtttattgagaaattgttttttattttgtaaaataacatgatgttagtgttgaactcttaaacagaaagaaagcttaatataacagcttatagaacttgaactactaaatatgaaaataagtcatttgaaaaaaatacagtatgtaaaatttgttcattcgttgaggtaatggtgctatgtttttacaaaattgttcctacaccttttttctacttcaggtattttatttcaaccatttccatcaattgaactgttaccattgcctttttctgttgagaaattgcctctgaaaaatagtgctatttttcagcttaagtgttcttaagtgaatgaaattttcaaagtactagatcaccttaaaattatttcacgtactgaagacaattaagtccgttatgtttagagtagaaaatgtttaggttaaagagcatctgtcaacagaatctacaaaaaagattcccttgcatttgaattagttctctattctcctattgctaaatgtgtgatatatagagaggatgtataaaaggaaatggaaatagactatgtacttgtctggtttttgtttgtttttattttggaatgcttataagcctcctttacactgaataaggaagtagtttttgttttcttttgacctgtaaaatacctcacatggttgtttttacacatgaaagaaaaaggtatatgcgaacatacctgatatcaagaggagtatgcaccaaataaattttagctttgataaaactttccat

SEQ ID NO: 392992 - DNA, 1000 bp, Homo Sapiens
cacccgccacctcagccctcatgtcagacaccctctgcctagattcattcttgggctgcctcacagaccgctcctccgtgcatgccgggggcagcctctgccttggtgtctgcagttccaaagctgtcactgatggtgcatcctcatccagaactctgcttccctatccagagcacccatggaggccccactctccccactgtgcccagatgagggggagcccactctctctctccactgaccctgcagtgagggtgagagatgctgtgtgtcaaaacacatttataaacccttgagcagagctactggcttgaccttgggctgagtgtgggtcagcaccattttctccactgtaatttataaattgtgagaggcagtggggcagcaagttcatgtaatgtagcaaggacattccaggaaggctaacccctggcatttatggcaggtatgacaggagggcagcacagaaaacatgaaatcagtcagcatctatgcaatgcaatacatgcctcatcttactcagattgaagttaaaaaaagattttaaaactagcattcatgctgggcgcagtggctcatgcctgtaatcccagcactttgggaggccaaggtgggcacatcacttaaggtcaggagttcaagaccagcctggccaacataatgaaaccctgtctctactaaaaatacaaaaattagctgggcatggtggtgcacacctgtaatcccagctacttgggagggtaaggcatgagaattgcttgaacctgggaggcggaggttgcagcgagccgagatcatgccactgcaccactgcactccagcctgtgtgacagaatgagactccatctcaaaaaaaattaaaattaaaatcaaaaaataaaataaaggccaggcacggtggctcacacaggagaatcacttgaacctgggaggcggaggttgcagtgatctgagatcacaccagtacactccagcctgggagatggtgagactccgtctc

SEQ ID NO: 392993 - DNA, 1000 bp, Homo Sapiens
ctgtacatatggtataaagtgtttatatttggttccatattcatttgctaaattctcatgacacagagtgaaatatttcataaattagccatttatctctgggacccaaataaaaataggatgaactaatttgttcaatgcctttagctaattacaatacatgcagagtttagaaacagactaaaggtcattgtagttaagtctttttcaccacaaatttaagcagtggatgatgggtggcaggaaaggtattgctttatttctttcaagttcatgttgattataaactgtagcccctgtgatttctttacttgtaaatgtggaatttatttgtgtgttgcttaatctaatttgctgctttttaaattatttaaaacgaattttggaaattgataaaatttatcattacgaaagactgctgttagaaagttatggtaggtgattttaaatccttggtatttaaatatgaaacttcaaatataatttctcagagctgtggtctacctgtatcattaatttcaatggctgtttttctgggcagaaatagataaaatactttttttccaaaaacagtttcaaggtatgtaaaatcctgaatgctttttcactgaagagaaagacaagcatggttaatgtagaattatttacttttccattgaaactattttcctgcataaatgatcaaaatttattttataatcctttaaaatacttatctttcatattagtcattaatttaattacaatattaatttgaatttccaggataatttcccggagttggttgcatgcattatctttcataattttacatagttcttttgttatataatgaatttactttacatgctagtgtttcaagtattgtatgaggattttcacaatagtatcactgaatgatgtcaccagagctctgagaataatatttgtaagttaactgttttatggggacattgaaaatattgtatttttgtagggtctattaaaatgagtgtcactt

SEQ ID NO: 392994 - DNA, 1000 bp, Homo Sapiens
ggataaacaaatgtgctataatacatacaatggaatattatttagctttaaaaaggaatgaaattctgataaatactacctcaggataaaccttgaaaacactatgctaagtgaaataagccagacacaaaaggccaaatatgatgccacttttatgaggtaccagcataggcaagttcacagaaacagaaaggagaatagtggttgccagggactgcagggaggaggaaatggggggtggggttattgtttaacgagtacatagtttctgtttgggatgaacaaattctggaaatggatagcgatgatggttgctcaacattttgaatgttaatgccactaaattgtacccataaaaatggttaaaatggtaaattttgttatgtatattttatcataatttaaaaaatatatctagaatgggcaagaaggattctcctcattcctctcttgacttgagaatgatcagtcaataggccctgaagtctgaatttgtgaaaatttccttgggtgacaaacttgtttgattactctatttagtgtatcccaaagttattaccacataatcttttaaacaataaaacaaataccccttagaaagtcttctgcaaacccatttctgaaaatggtacattatagggtgggtatagatgcatagatatgggattatgtatgatatatatatatatacacacacacacaaagggatagagagattacctctcttaacccccattttaattactatgtctaggttttttaaataaaaatcttttctttttaacatgtttcttttcttttccggaatattggaatattctgttcttgatccagatgaaatctgattgagcagtgtacttacaagttgtactgtgtatgtgtttcctatattgttatatttcaataagaagcttaaaatgtttaaaaataaatggttaaaaggttttatgttatgtatattttaccacaataaatgcaaaaaataaaaagtctgtgttct

SEQ ID NO: 392995 - DNA, 1000 bp, Homo Sapiens; identical to SEQ ID NO: 283265

SEQ ID NO: 392996 - DNA, 1000 bp, Homo Sapiens
ggaggaaacgcaaccaagaaaggaaggcaggtgggccccagcaaaggagtagctgccagggctcaacagctacgctctgtgacagcgcagagctcagcggcggcctttccctccctccgccaaggactcacggccaagccagctctcggggccttttttccactgcccatttggctactctgctgcaccaagcttgggagccagcctgccaacagccacctgggcctggcctccccactggctggccttgaggttggcagagtgggttgtggcgcttcctctctctgtgtgggaccaggacagtggcttaagtctccactccaggaaagaatcaaagtttctagagttgtgagaaaaccagagagtggctgtcctgattcttcactgtgaggggcgttcttcatgttctcccagctgttccaagactgggccgtagaattccatgtttcaggagcctaagaccctcccagagcccaggggcttcaccgcagaccccaagccattgagcacatcacccaaagcagtggccaacatcgcggacccctgtgccttgtcacagatgggtgctggtcctcaggcgttggggacactgctgggtcgatggggtcggattctgccagtttctgctctgcagccaaagatggtcagaagcattgtcacttcagtaacatcaagtgctcaaagacatggcaaccgttcagtggtacttaagtattcaaaatatacaactacagattctctgacagaaaccagcacggggtcttcaccttcattcaccccacaggcgacatgcgagggagaacagcatctcagtggtgatttccaaaccaagcctttgttttcggtgtggggttttgggggtttgctttaatgtttttgaaattgtaaatgttgggctttgtattttgatgtaaactgagcataatggcattttagggcctgtgaccaaaaatgaagcttgtaacgaccatggatctgaataaacatgtccttgcttctg

SEQ ID NO: 392997 - DNA, 1000 bp, Homo Sapiens; identical to SEQ ID NO: 283266

SEQ ID NO: 392998 - DNA, 1000 bp, Homo Sapiens; identical to SEQ ID NO: 197781

SEQ ID NO: 392999 - DNA, 1000 bp, Homo Sapiens; identical to SEQ ID NO: 283269

SEQ ID NO: 393000 - DNA, 1000 bp, Homo Sapiens; identical to SEQ ID NO: 197220

SEQ ID NO: 393001 - DNA, 1000 bp, Homo Sapiens; identical to SEQ ID NO: 283270

SEQ ID NO: 393002 - DNA, 858 bp, Homo Sapiens
ttttcatttcccagtacctttgcagcctgggaggagcttttgctgacggatgcacagggaaagatcatgtttgacacagtgggtctctgcagcacatgggagagttttactcctgttgccaaggctggagtacagtggcacgatctcggctcactgcaacctccgcctcccaggttcaagcatgtacctctgcctcccacatagctgggaatacaggtggaatatcacccttacctcaaccaaagcaaactcctggagtactgtaagtccaaggacattgtcatgactgcatattctgccttggggtctgactcagacaaagactgggtgaaaaaaggaaacccagttctccaggaggatccaatactcaatgccattgctgaaaagcccaggcgaactccagcccaggttgccttgtgctaccagctgcagcgtggggtggtggtcctggtgaagagcttcagtgagaagagaatcaaagaaaacttccaggtttttgacttctagctgacaccagaggacatgaaaaccacagatggcttgaacaagaatatacgccatttgtaaatgtctatcttttctcatcacccagattatccatttcttgatgaatataaagaaaagagtctgtggttgttccagagtttattgatttgggttgagatgaatagagaatatctcatggatgggaagttttctagtttattccagattgattagcctgctcagtcacaagttggcctaagaccccggatcagaaaataaaagtatctaaacctagttttctcttgattcccgcccccaccccacccccacaactgccaaaataaagatgtatttgaaataaaaaaaaaaaaa

SEQ ID NO: 393003 - DNA, 1000 bp, Homo Sapiens; identical to SEQ ID NO: 283271

SEQ ID NO: 393004 - DNA, 1000 bp, Homo Sapiens
aacacattctgattacattttttgtttgtttgatttgaaacaaagtctccctctgtcacccaggctggagtgcaatggcaggatttctgctcactgcaacctctgcctcccagattcaagcaattcacctgcctcagtctccagagtagctgggattacaagcgtgtgccaccatgcctggctaattgtttgtatttttagtagagatggggtttcaccatgttgttcaagctggtctcgaactcctgacctcaagtgatctacccagcctcccaaagtactgggattacaggcatgagccactgtgcctggccacattttacattttttaaagcctttcatctagtcatatttgtctcttgaaacagtcctgggcaataaaaacgtgatagggccccatttcataggcaaataaaccaaaagctcagagattaaatatcagacacttttttttttttttttgagaaggagtctcgctctatcgcccaggctggagtgcgatggtgtgattttggctcactacaacctctgcctcctgggttcaagcgattctcctgcctcagcctcctgagtagctaggattacaggtgcatgcaccatgcccggctaatttttgtattgttagtagagatggggtttcaccatgttggtcaggctggtctcaaactcctgacctcgtgatccgcccgcctcagcctcccaaagttctgggattacaggcatgagccatcgcgcccggccataaggcacttttactcaaagactgcaaggtaggtaaaggatcacaaatttcaaattcagataatgcttaccagaaatgtgatgataagctataaagcattatttaaatgtaaagcatgattattctaagtatactatgtgctcttaaaatcccttgccaaatgacacgtgtcgagtagtctgctactttctgaattatagcaaaacgcacagatccctggttataaatgtccattgagtatacatgaaacatgagctc

SEQ ID NO: 393005 - DNA, 1000 bp, Homo Sapiens
ggggactggaagaccaccttcaccgtggcgcagaatgagcgcttcgatgcggactatgcggagaagatggcaggctgcagcctcagcttccgctctgagctgtgagaggggctcctggagtcactgcagagggagtgtgcgaatctaccctgaccaatgggctcaagaataaagtatgatttttgagtcaggcacagtggctcatgtctgcaatcccagcgatttgggaggttgagctggtaggatcacaataggccacgaatttgagaccagcctggtaaaatagtgagacctcatctctacaaagatgtaaaaaaattagccacatgtgctggcacttacctgtagtcccagctacttgggaagcagaggctggaggatcatttcagcccaggaggttgtggatacagtgagttatgacatgcccattcactacagcctggatgacaagcaagaccctccctccaaagaaaataaagctcaattaaaataaaatatgatttgtgttcatgtagagcctgtattggaaaggaagagaaactctgagctgaaagagtgaatgcccggtggggccacatatggtcacctctcccccagccttcagctccccaggtcaccatatctggggaggggagaagggtttggagaagtaaaacccaggagatgtgtggaggggggatgtctgtttaatcccagcacatcctctgctgtcctgccccaagatggtggaggacgtcgagtccgccgggcagcgtcactttttcttgggctccttagaagctaccaggtacctctgggccacactgagatgaggggagtagccgcctgcataggaggtgtcttcaaacaggatagtatagtccctcctgggggttgtgggggtaggtggccaaggaagggtagaggagcaagcccccggggctggttgtcaactcactttgttggctggaattggttgtaacttgaccacctcgggcaggatcccactgctcatccccaa

SEQ ID NO: 393006 - DNA, 1000 bp, Homo Sapiens; identical to SEQ ID NO: 283275

SEQ ID NO: 393007 - DNA, 1000 bp, Homo Sapiens
ccgaggaccctctttagcctcttccctggcttggctgcagctgcagtctggtactcgcccattctgctcttcttcacctccgtattttctctctcacggaagaagaattccattctcccatcccaggaaggagagtgccctgcgtgccacgaaagagcccaggacccacaggacaaatacgtcactggcagacctgccttcgccagcgccagcccatctctgaaacctccagcatttgtgccccggtccggcccctcccaggcctgactctttccgtgaacggtcactgcgcaggatcaagctacaatgaagaggagggaggcagtctgcgcgcaccgccattttctaggaactgggaagcccccccaccccttaggaagatccatccctgtggaaccttgcccaggcttaccagcctttgctgaggttgatctattgtccctccttgtccccatcaaaatatccagcactccaccttcagggagtagacttgaccctcaaatagcaagttcagccttcccaggtctaggttccctgggaggtcaagattcgtctggttccttagtacagagggctagctgtgagttggaatccccctatgagctttagaatcagtcaagaggaattgggccccttcccttcatccctcttcttttccctttttgtcccagagctcagctctgactcaaaagtttttccatttaccatcaacatggaaacttggctcctcacgtaggtatattatcccccttttgtacatggtcttgttgatccaaactccctttctgtgaaagaggcctgtggggctcaagaagcctggtcagccagccaggctagtcccacatacctcagaaccagtttaataaaggctctatgtcattcttttttaaaaaaaaaaaaaaaaaaaaaaaaaaaaaaaaaaaaaaaaaaaaaaaaaaaaaaaaaaaaaaaaaaaaaaaaaaaaaaaaaaaaaaaaaaaaaaaaaaaaaaaaaaaaaaaa

SEQ ID NO: 393008 - DNA, 1000 bp, Homo Sapiens; identical to SEQ ID NO: 115013

SEQ ID NO: 393009 - DNA, 1000 bp, Homo Sapiens
agcagaccacagcacccacaccattccacagtcccaactcgggagcagaaacgccgtggtccagcaggagaagaggaaacaggctgctggcaccctgctcaccttgggtggtggggggggcatgagcacgggaggttccatatctgcccccacctcccttctccccacctgggccctcagtcctgccctgctctcctcagtgttccagagctgcagatactgggggagaagtggggcagcccgagagagcgctcagggatggggctagagctgggggcggacaagacacaaggcccagctgcagagccccggatgtcagggccaagtcttgcaggtcataccccagaaagagcgtggccctgtaatgggttgcaagcccctggggacacacctggagctgtcccggaagccccaactgctgttgcctggctcgaggcctcactcacccagcttgtaggtgagcacaaagcctgccgtccacacggtccccggcacggctagcacgtcccgcagaaggtgcgcggtgtggggacgctgctcggaagggggctgctgtgggagccgccgcagggctggtgcagcccaggccagggccgcggccagccagtaggtggcagccaggagcagaaagagttgcggccacgagaaggtgggcagcagcgccagcagcgcgcccccagctagcgcggcccccagcttgtacgcgaccacctgcacggtattgcccggccccagttcggccggctccagcagctgcacagccagcgcgtccagggccacatcctgcatggcggcacccaggttcaacaacagcagcaaccccgccacagcggcgggcagcccggcctggccagctccaggagggggcagcccggcaagcagcccacacaccaggcccaggcccgccgtgctgcgcgtcacccaggccctcgccgagccctgcgcgtccaccagcggggcccaagccagcttgagcagccacggagcgtacagaaccttg

SEQ ID NO: 393010 - DNA, 1000 bp, Homo Sapiens
tactatatctcataatgattcaagagggtgactgatacatactgtataagagcattgtgatgtcttctttttttttgaaatggagttttgctcctgttgcccaggctggattgcaatggcgcgatctcggctcactgcaacctctgcctcccgggttcaagcgattctcctgcctcagcctcccgagtagctgggattacaggcgtgcaccaccatgcctgggtaattttgtagttttagtagagacggagtttctccgtgttggtcaggctggtcttgaactcctgacctcaggtgatccgcccgcctcggcctcccaaagtgctgggattacaggtttcagcaactatgcccggcccagttatcagctattttttatattacatttgattacctttaaaattatatcactctttttttttacatttcacttttaagggaaggcttgcatattttgaactatttttttctttggcatttaatcatccttagcatttctcaggcagtcttgggttaatatggaaataacctttgtatacgttcttaatcttatttttaaaaatttttgcattttatgttgacaaatatattattgtgccacactttctatattaaaactagattaaatatattttacatatatttatttaaaatttttccagcacctatcaaaatacttttttgtgttccaattaaggtagtcttaatgcaaacttacacttttgaactggaatattaaatttatacacttagatcttagaatttatggttaagttcttttttgttttttatttttaggaacagcatatgccatatatgagctggctgtggcttcatttcccaagaagcaggagtgacttcagtcatcccagcaatcgcttggttcagtttcattcagctctctatggaccagtaatctgataaataaccgagctcttctttggggatcaatatttattgacttgtagtaactgccaccaataaagcagtctttaccatg

SEQ ID NO: 393011 - DNA, 1000 bp, Homo Sapiens
agcgtgctaaagctttgcatatccctttttctgtagatgaaattgtcggcatgcctgttgattctttcaatagcatgttaagtagatattatctgacagacctacaagtctcacttatccgtgacatcagacgaagagggaaaaataaagttgctgcgcagaactgtcgtaaacgcaaattggacataattttgaatttagaagatgatgtatgtaacttgcaagcaaagaaggaaactcttaagagagagcaagcacaatgtaacaaagctattaacataatgaaacagaaactgcatgacctttatcatgatatttttagtagattaagagatgaccaaggtaggccagtcaatcccaaccactatgctctccagtgtacccatgatggaagtatcttgatagtacccaaagaactggtggcctcaggccacaaaaaggaaacccaaaagggaaagagaaagtgagaagaaactgaagatggactctattatgtgaagtagtaatgttcagaaactgattatttggatcagaaaccattgaaactgcttcaagaattgtatctttaagtactgctacttgaataactcagttaacgctgttttgaagcttacatggacaaatgtttaggacttcaagatcacacttgtgggcaatctgggggagccacaacttttcatgaagtgcattgtatacaaaattcatagttatgtccaaagaataggttaacatgaaaacccagtaagactttccatcttggcagccatcctttttaagagtaagttggttacttcaaaaagagcaaacactggggatcaaattattttaagaggtatttcagttttaaatgcaaaatagccttattttcatttagtttgttagcactatagtgagcttttcaaacactattttaatctttatatttaacttataaattttgctttctatggaaataaattttgtatttgtattaaaaattaacttttcccttttatacaga

SEQ ID NO: 393012 - DNA, 1000 bp, Homo Sapiens; identical to SEQ ID NO: 197116

SEQ ID NO: 393013 - DNA, 1000 bp, Homo Sapiens
tgccgcatcaagacgttctcatcatgtgttacgagtggcgctccaggatgatgcttcttgaaaactgtttagttgaaaaatggagagatcaacttagtaaaagatccatacagtgggaagagaggctgcgggaacagcggaggaccgttcaggacaagaagcgaacagccgggcgcaccagtcgtagcaacaccccgaaaccaaagggaaagcctcctgctcccaaaccagccagccccaagaagaccattaaagctaggagtgcccaaaagagaacaaacccaaaaaaagtgtgagccagctgctttccagaacggagactgcctccaaggatgaggccagccactgcccagccagcctggggaaggccctgctcccctcgccttcacaactgcagtactcctcagacacatcttgcagatttttcttaatgatatgcttcaatttttctttttaagccgccacaaactgtagtggtaggtatgtcctttggtatggaaggtatatgaaagctcaaatcttgtggacaaatctccttgcggcagtcagggtagccttcaaaggcgcccactctgtgcgatctccaagggggggggggggagatgctttggttcttaccatttgacctaatatgtgcattgtaaaataaatgccatattacaaagaaaacactttttttttttacaatctgttatatttcagtttgacttgtcatattagaatgttcgtaatattttaaatgcgatcggaaatacgatgatttgaaggaagaaagcaagaggaacgaatgtctaaaagatctttatgtgtttactgtttgcggaagaatttctgtgatgaaagggaatttttgaactatctagaaaagtaggatatggaaaactgtaatgattttttttttcacaaagaaccctttcagctcgtttttagctagaaactttagaaactaaaacaataatgatgataactaactaaataaataaaagggaaaggcaaacac

SEQ ID NO: 393014 - DNA, 1000 bp, Homo Sapiens
aacctactgctaatctgagggcctcagcatcacttccagatccttgcttggagcagtctctctattgactctctcagatcgctccactgctccatgggctatcaagtaactaactgcatacctgccgttggcatcatcagaacagtccgaagaaatagtctccactcactaattacctcctatataacgacgtatgcttcctgtagttcagtagtttgctctcatcgataacgtgcattgggaagtttccagactgcaaaaactaggagctcgcattcatttcccaagtgtgacccttagatgcttagttgactcgctgcatatttgctcttgtcttcagaaaagaaaggaagaagtatcgttccaacgaaatgtttccagaaaagtgtactataaactttcattccaaaaatggtgtcataagcaaacaactcacttgtcaaatttcaaatggtattgaacaaaaaaagaaagctgttgtgtttttgttttgttttgttttcatgaaactgtgattttcaacttatgaatgctataatgtcccagcgcgggtaagctcacgctgtgtgaacatgaagttgtataaaacaaaccaaccaacctacacacaaatgttttccataggcactgtataaagaaaaatgtatgtttattaactcaaatcagtttttccagagaggaaacgtcactgagatgaagaggcgggtaaattggtttgttattttttaaaaaaaacttgcatgtttaaaaaaaagttgattgcttcaaatttctgctactaacttcaagctatgggagtttggcagtagtcacttgaggattttttttccaattcttttctttttgttgttaaagctgtacttcagtgaacagaaaaattgccaagcaaactaatggctataaaagcgtaatttgcatgtgtgggcataaactacagagcctcattgccatgaggtattgtacaaagttttaatacattttgtaaataaaattgtaaaga

SEQ ID NO: 393015 - DNA, 1000 bp, Homo Sapiens; identical to SEQ ID NO: 283280

SEQ ID NO: 393016 - DNA, 1000 bp, Homo Sapiens; identical to SEQ ID NO: 283281

SEQ ID NO: 393017 - DNA, 696 bp, Homo Sapiens
tccacaagccttgtggttatgggaaagacaggatggaaatagacatgttggctgctgagagacaggttagagcctgcccccttaggagaaggttataacgtggtggttatttctctaatagaggtacttggaaggctccatcgcccctgaagacaaaggaagctgctcattgctgcctgggcctccatttgccagagagttacacatcgaaattgtgtcttctccccactacagcactaatggaaattatgacggtgttctttaccggcactttcagatacccaggttagctacctaaccttttaaggaggatagcttctcaccctcattacattcctcctatcccatgccttagaaccaagtaccccagaggccctggttaaaagaagccacatttgcggctaggtgctgtggctcacgtctgtaatcccagcactttgggaggccgaggtgggcggatcatgaggtcaggagattgagagcatcctggctaacatggtgaaaccccgtctctactaaaaatacaaaaaaaaaattagccaagtgtggtggtgggcgcctgtagtcccagctacttgggaggctgaggcaggagaatgtgcgtgaacccgggaggtggagcttgcagtgagccgagatcgcaccactggcactctagcctgggcgacagagcgagactccgtctcaaaaaaaagc

SEQ ID NO: 393018 - DNA, 1000 bp, Homo Sapiens
ccaggaatgaaggtcacagatctccatccagcaggctctttactccttcccttccctacccccgcctctttccctttctttctctttccttcatttttacttgtctggttgtgctttccttttccatttcttattttttctttctcttctctattcttgactttcctcctcgtccatttctttccattgctcatttagtaaaactgcgtccgtgcagatttccccgtgagccgcctcgccggcttctgtgcggggcaaaccctgcggagaggcgagggcagcgcgtgtgcacgtgtgagtgtgcctgtgagagtgtgcgcacaggagtgtgctcttgtatgcacgcgtaaaggggactgtgaatgtcgccgttgaagtgtgactgtggaatgtgcgcgcgtgtgtgactgcgtgtatgagtgaatctgtgtcagttggtgtgacacttaggagtgcatgcgcctgaatgagtgcgtgtgtgagtgtgcacacgcctgtgtgagtgtcccctgtgtgagcacgcgtgtgttcgagtgcccactcctccccgcgctgcaaagtcagggggcgggccgggcggcagggggcctgcccgctggattcccgcatgcttgttccggggcggtcgggtctaaagggctttatgcactgtctggagggtggggactggcgcgggtagaaaacgggatgcctcgggcgtgggggcaggcttttggccactaggagctggcggaggtgcagacctaaaggagcgttcgctagcagaggcgctgccggtgcggtgtgctacgcgcgcccacctcccggggaaggaacggcgaggccggggaccgtcgcggagatggatcgcgggccggcagcagtggcgtgcacgctgctcctggctctcgtcgcctgcctagcgccggccagtggccaaggtaagagcccagccggagcctctcgtggagcccccacttccccggctgtggcagggtcgggtccgcgggaggccggaggg

SEQ ID NO: 393019 - DNA, 1000 bp, Homo Sapiens; identical to SEQ ID NO: 201510

SEQ ID NO: 393020 - DNA, 1000 bp, Homo Sapiens
taaaatttgaaaactcttcttatgtctgtctgcttttccctgtaggatttatgtagattatttaatactcaagttcagttcaaataagcaacatttagcttggctgtgttaatatatcaatgatatattgacatctgtgtttatataggaacattaattttgctaacatttattgctttgctcatttttcgatagttgccttgctttcattgacttacaattaggaggtttcccagacatcatatgtgactttgttactgaattgttaggatgaagatgatttttcagatgcgtatttgagcaaattgacaagtaagatctatagtttgtgttcatgcacacatttcaaaaattttaggaaacccagtgtttgaatgcagataagtttgatctcagtgaacatgtttaacaataaaataagatattaaatccagtcatctcacctgtatttggctacaatgtgatataaatggcataaaataataggaagaccaagtgcaagtggttccttgactttttaaactgtagtaccaaagtctttattcaaactgtctgggaatccttaattcacattctgatatttaaaaaaaataatacatggtgttaaaacaccaggagaacaatttgatataaaaataaaagcatttctttctacattttagcatggaaataaccagcctgcaagaactggcacactgtcgagaacaaatcctcctactcagaaaccgccaagtcctcccatgtcaggccggggaacactggggtaagaattcaactacattttgcaaaagaattcatatgctaaaggaaaagatgtttctgtgacttaagtaagtgtatgggatccatgccacactaccctctctatgtgacgctaccttttacaaattcattttaattcctattttcctgaacagaatcccaaatgaatctgccagctttgtaatattctctataatctgtactaggaaagtttttatgtatgtataaatggcatgat

SEQ ID NO: 393021 - DNA, 1000 bp, Homo Sapiens; identical to SEQ ID NO: 198048

SEQ ID NO: 393022 - DNA, 731 bp, Homo Sapiens
gagcttaaactgaagcaagttcggtggacgccggcggcgccctgatctaaagaaacgactcagggactgcggcgcttgcacgtcaacgggaggtgtgagcccaaaggtctggacccagaaatgggacgtcggtcatcagatactgaagaagaaagcagaagcaagagaaaaaagaaacaccgtagacggtcctcctcgagcagttcttcagatagtagaacatacagccgaaagaaaggaggaaggaaatcaagatcaaagtcaagatcttggtccagagatcttcagcctcgttcacattcttatgatagaagacgcaggcatcgatcaagcagtagctcttcttatggctccagaaggaaacgaagtcgaagtcgttcaaggggtcgagggaaatcctatagagttcagaggtctaggtcaaaaagcagaacaagaaggtccaggtcaagacctcgtctccgttctcatagtcgtagcagtgaaaggtccagtcacagaagaacgcgtagtcggtctcgggatagagaacgacgtaagggcagagataaagagaaaagagaaaagggagaggataaagggaaggacaaggaatacataacatcaaacgtgggaatctggaaacatcaaagctggatttagaacatcttgccaccagctgaacaggccaaagccagactacagctggttcttgaagctgctgcaaaagctgatgaagcattgaaagccaa

SEQ ID NO: 393023 - DNA, 658 bp, Homo Sapiens
ggattgtctcaatcaaaaaaagatttcattaacccaactctcatccctgataaacactgttagttatctagagaaagaagaaaattgtcccaatacagtcacctctttgccacacccagccaacagcagacgtgatggaagcctgaagaacaccctgccacgggcacaggcagaggcacaggcaccctgtcgtcctgattatttcaccttgtcacgggcagaggcacaggcaccctgtcgtcctgattatttcaccttgtcacggacagaggcacaggcaccctgtcgtcctgattatttcaccttgtcacaggcacaggcaccctgtcgtcctgattatttcaccttgtcacaggcacaggcactctgtcgtcctgattatttcaccttgtcacgggcagaggcacaggcactctgtcatcctgattatttcaccttgtcctagagtgtcctgccaatgggacagatgcaaaacaaataaaagccccggcttctgaaaagaagcacacagaaatgtcattattttcaaacgaggtgttcccgtatataaaatttgatgttggttgggcatctaacagtattatggccagaggactcagaccacagctgcatccctgtgaggcacagactctccagggcacgcgggtcccgcctggga

SEQ ID NO: 393024 - DNA, 816 bp, Homo Sapiens; identical to SEQ ID NO: 22881

SEQ ID NO: 393025 - DNA, 369 bp, Homo Sapiens
cattaggtgtcaccaaagtgttaacaattccttgggaatttataaacaaaaaatatctagactaaaaatagaatataaggcccctctggaaccactgcacacctttccctctgttctcagattaaactgctgcataaaatgaggttatttagcctgtttttaaggaaggcttctattgcacatgcatctctttggttggtaataacatgtacttttgttaaaatatttccataatgaagccctgttgtgtggttagctgggtgtggactttcctccctttcttgggggccctcctactcacagtcaagttgccctttagaactaaagatctggtaggattgggtctttattcaatagcccctcgtgccg

SEQ ID NO: 393026 - DNA, 1000 bp, Homo Sapiens; identical to SEQ ID NO: 283291

SEQ ID NO: 393027 - DNA, 1000 bp, Homo Sapiens; identical to SEQ ID NO: 283293

SEQ ID NO: 393028 - DNA, 1000 bp, Homo Sapiens
ttatggcctaacgatttgtgtgtcctgaaagatggtggccataattaggagcagtttgtgttttacttccaccagaaccgggcaaggacaaccctcctaatattcttggggtctgagggtaaggaatgctgttttggatctctagcctgtcagcaaggagggcatattcaattatcaagctccaaaaatgcctgtgcacagatgcaaaacacctagagttgtgtgatgagttgatgcccgagagctcccaaactgagaggggacacaagcagttccacagtcctccctcctagattctgtgactccagtaagtgttgacaattcactggtatgtgaaattacctctccttttaagttctctaataatgtgcagtctctgcaagcctcagccagtaccggagctgggtaaggctaaataagcttcccgaggtgcttgcctggctgctgggctgcctccctggccgtgcctgggtccttgagtagccctcattgtggtgtgaggcagcgtttttgtcctgcaggtacagtaggtactggattaaacaggtctgctgttgcagacagaaaccaggcaccgttctagcacagagctgtgtttggattggagtttccagggccttatcaggagccacccctagtgacacagccagtgccagaactaactttgactttcactcttcgccaagggcttgcagaacaccttaaaggaaaaaagatggaggcgcttagagttcagatgttcatgccatgctcctttgaaagcttgtatctgtaagtgaagttttattctggaaataatcccgggaccacttaagaggagcagttttttttctctttaagggggaggataaaggaagagaagggtttattgggagttaaaaatactgaagctgttacttctcactggctttaatcagcttcagctgtaacctctggtaggtggctatgacaaggataacaactaatttgggggtgggggtgggggtggtagatacaattg

SEQ ID NO: 393029 - DNA, 1000 bp, Homo Sapiens; identical to SEQ ID NO: 283295

SEQ ID NO: 393030 - DNA, 613 bp, Homo Sapiens; identical to SEQ ID NO: 283296

SEQ ID NO: 393031 - DNA, 1000 bp, Homo Sapiens
gatcccacatccagcttgccatcaacacagcctagggttgtggccaccccgcatcccccagatggtcctctggccaccagacgcctgtagacagaggttctaggagggggtgacagtcttgccaactaatacctccccctatccctttggttccacatccaagggtagggccctgaccccaggaagtgtctgtctctctctctctgtctcccacccagctgtcctgaactccctacgccagctgggcacatctaccagtatcctgaccgacccgggccgcatccctgagcaagccacacgggcagtcacagagggcacccttggcaaacctttatagtcctggccagaccctgctgctcactcagctgccctgggggctgctttccctgggcacgggctccagggatcatctctgggcactcccttcctgccccaggccctggctctgcccttccctggggggtggagcagggtccaggtttcacacttgccacctcctggaggtcaagaagagcagagtccccgtccctgctctgccactgtgctccagcaccgtgaccttgggtgactcgtccgctgtctttggaccgctgtgtttcaatctgcaaaatggggatggggaaggttcaatcagcagatgacccccaggccttggcagctgtgacattgggggcctaggctggcaactccgggggctcaacggtggaaagaggaggatgctgtttctctgtcacctccacttgctccccgacaggtggggcacagacctctgttcctgagcagagaagcagaaaaggaggttccctctctctgctccttcactgctgacccagaggggctgcaggatggtttcccctgggagaggccaggagggcctgatcccaggagacaccagggccagagtgaccacagcagggcaggcatcatgtgtgtgtgtgtgtgtggatgtgtgtgtgtgggttttgtaaagaattcttgaccaataaaagcaaaaactgtc

SEQ ID NO: 393032 - DNA, 1000 bp, Homo Sapiens; identical to SEQ ID NO: 115015

SEQ ID NO: 393033 - DNA, 1000 bp, Homo Sapiens; identical to SEQ ID NO: 115016

SEQ ID NO: 393034 - DNA, 1000 bp, Homo Sapiens; identical to SEQ ID NO: 283299

SEQ ID NO: 393035 - DNA, 1000 bp, Homo Sapiens; identical to SEQ ID NO: 204036

SEQ ID NO: 393036 - DNA, 1000 bp, Homo Sapiens; identical to SEQ ID NO: 204037

SEQ ID NO: 393037 - DNA, 1000 bp, Homo Sapiens; identical to SEQ ID NO: 204038

SEQ ID NO: 393038 - DNA, 1000 bp, Homo Sapiens; identical to SEQ ID NO: 115017

SEQ ID NO: 393039 - DNA, 1000 bp, Homo Sapiens; identical to SEQ ID NO: 204040

SEQ ID NO: 393040 - DNA, 1000 bp, Homo Sapiens; identical to SEQ ID NO: 204041

SEQ ID NO: 393041 - DNA, 1000 bp, Homo Sapiens; identical to SEQ ID NO: 115018

SEQ ID NO: 393042 - DNA, 1000 bp, Homo Sapiens; identical to SEQ ID NO: 204043

SEQ ID NO: 393043 - DNA, 1000 bp, Homo Sapiens; identical to SEQ ID NO: 283308

SEQ ID NO: 393044 - DNA, 1000 bp, Homo Sapiens; identical to SEQ ID NO: 204044

SEQ ID NO: 393045 - DNA, 1000 bp, Homo Sapiens; identical to SEQ ID NO: 115019

SEQ ID NO: 393046 - DNA, 1000 bp, Homo Sapiens; identical to SEQ ID NO: 115020

SEQ ID NO: 393047 - DNA, 1000 bp, Homo Sapiens; identical to SEQ ID NO: 204047

SEQ ID NO: 393048 - DNA, 1000 bp, Homo Sapiens; identical to SEQ ID NO: 115021

SEQ ID NO: 393049 - DNA, 1000 bp, Homo Sapiens; identical to SEQ ID NO: 204049

SEQ ID NO: 393050 - DNA, 1000 bp, Homo Sapiens; identical to SEQ ID NO: 204050

SEQ ID NO: 393051 - DNA, 1000 bp, Homo Sapiens; identical to SEQ ID NO: 204051

SEQ ID NO: 393052 - DNA, 1000 bp, Homo Sapiens; identical to SEQ ID NO: 115022

SEQ ID NO: 393053 - DNA, 1000 bp, Homo Sapiens; identical to SEQ ID NO: 283318

SEQ ID NO: 393054 - DNA, 1000 bp, Homo Sapiens; identical to SEQ ID NO: 115023

SEQ ID NO: 393055 - DNA, 1000 bp, Homo Sapiens; identical to SEQ ID NO: 204054

SEQ ID NO: 393056 - DNA, 1000 bp, Homo Sapiens; identical to SEQ ID NO: 115024

SEQ ID NO: 393057 - DNA, 1000 bp, Homo Sapiens; identical to SEQ ID NO: 204056

SEQ ID NO: 393058 - DNA, 1000 bp, Homo Sapiens; identical to SEQ ID NO: 204057

SEQ ID NO: 393059 - DNA, 1000 bp, Homo Sapiens; identical to SEQ ID NO: 204058

SEQ ID NO: 393060 - DNA, 1000 bp, Homo Sapiens; identical to SEQ ID NO: 115025

SEQ ID NO: 393061 - DNA, 1000 bp, Homo Sapiens; identical to SEQ ID NO: 115026

SEQ ID NO: 393062 - DNA, 1000 bp, Homo Sapiens
cttaaggccgtggtggtggaggcagtggaggttactatgggcaaggcggcatgagtggaggtggatggcgtgggatgtactgaaagcaaaaacaccaacatacaagtcttgacaacagcatctggtctactagactttcttacagatttaatttcttttgtattttaagaactttataatgactgaaggaatgtgttttcaaaatattatttggtaaagcaacagattgtgatgggaaaatgttttctgtaggtttatttgttgcatactttgacttaaaaataaatttttatattcaaaccactgatgttgatactttttatatactagttactcctaaagatgtgctgccttcataagatttgggttgatgtattttactattagttctacaagaagtagtgtggtgtaattttagaggataatggttcacctctgcgtaaactgcaagtcttaagcagacatctggaatagagcttgacaaataattagtgtaacttttttctttagttcctcctggacaacactgtaaatataaagcctaaagatgaagtggcttcaggagtataaattcagctaattatttctatattattatttttcaaatgtcatttatcaggcatagctctgaaacattgatgatctaagaggtattgatttctgaatattcataattgtgttacctgggtatgagagtgttggaagctgaattctagccctagattttggagtaaaaccccttcagcacttgaccgaaataccaaaaatgtctccaaaaaattgatagttgcaggttatcgcaagatgtcttagagtagggttaaggttctcagtgacacaagaattcagtattaagtacataggtatttactatggagtataattctcacaattgtattttcagttttctgcccaatagagtttaaataactgtataaatgatgactttaaaaaaatgtaagcaacaagtccatgtcatagtcaataaaaacaatcctgc

SEQ ID NO: 393063 - DNA, 1000 bp, Homo Sapiens
ggagagaacgggcagaaaggagaacccagaccaggtcgaggaaatggtagaaaccgaaaacacccgcaggccacaagcccgggatctgtctcccgaggctggtggctggctctgactgtgactgagatggcgctgggtggtctcgatgtcccctgctgaccccgctgctttgctcccgcacttgcagggagaacaacgagaactccaattctaacagccacaacccgctgaatggcagcggcaagtcggtgttaggcagctcggaggatgagaagactccatcggggacgccagaccactcatcatccagccccgcactgctcctcagcccgccgccccctgggctgccgtccctgcacagcctgggccaccctccgggccccagcgcagtgccagtgccggtgccaggcggaggtggagcggacccactgcaacaccaccatggcctgcaggactccatcctcaaccccatgtcagccaacctcgtggacctgggctcctagaacccatttgccttgatgagcttgccttttgtgacttgacactggggacgtggagtggcggtgtccaggggcgccccgcccctgcggccccaccaggtactgaaagacccgcaggctgagcgggtagaacagccgggtagggcagatagctgtctatgttggttcttgtttgggatttattttcaacaagttacttttaggatccttttggggctggagactgagtcttgaaccacagaagggaataaattatacaccactgtcattctctctctccctctgtctcttccttttaccctctcttgtcttgccttttccccctttcctcttcctttcccttccttctcttttcttttttctgctttctgtctttctccctctccttgtattgctttccttctagatttctagcttgccaccgttcattctctccttctgtctctccctttctctctccttctctgtttctcctctcttctctcctgccagtctcttgc

SEQ ID NO: 393064 - DNA, 1000 bp, Homo Sapiens; identical to SEQ ID NO: 283330

SEQ ID NO: 393065 - DNA, 1000 bp, Homo Sapiens; identical to SEQ ID NO: 205911

SEQ ID NO: 393066 - DNA, 1000 bp, Homo Sapiens; identical to SEQ ID NO: 283332

SEQ ID NO: 393067 - DNA, 1000 bp, Homo Sapiens; identical to SEQ ID NO: 115028

SEQ ID NO: 393068 - DNA, 1000 bp, Homo Sapiens; identical to SEQ ID NO: 283334

SEQ ID NO: 393069 - DNA, 1000 bp, Homo Sapiens; identical to SEQ ID NO: 115029

SEQ ID NO: 393070 - DNA, 1000 bp, Homo Sapiens; identical to SEQ ID NO: 115030

SEQ ID NO: 393071 - DNA, 1000 bp, Homo Sapiens; identical to SEQ ID NO: 115031

SEQ ID NO: 393072 - DNA, 1000 bp, Homo Sapiens; identical to SEQ ID NO: 115032

SEQ ID NO: 393073 - DNA, 1000 bp, Homo Sapiens; identical to SEQ ID NO: 283339

SEQ ID NO: 393074 - DNA, 1000 bp, Homo Sapiens; identical to SEQ ID NO: 205920

SEQ ID NO: 393075 - DNA, 1000 bp, Homo Sapiens; identical to SEQ ID NO: 205923

SEQ ID NO: 393076 - DNA, 1000 bp, Homo Sapiens; identical to SEQ ID NO: 115033

SEQ ID NO: 393077 - DNA, 1000 bp, Homo Sapiens; identical to SEQ ID NO: 283343

SEQ ID NO: 393078 - DNA, 1000 bp, Homo Sapiens; identical to SEQ ID NO: 205931

SEQ ID NO: 393079 - DNA, 1000 bp, Homo Sapiens; identical to SEQ ID NO: 283345

SEQ ID NO: 393080 - DNA, 1000 bp, Homo Sapiens; identical to SEQ ID NO: 283346

SEQ ID NO: 393081 - DNA, 1000 bp, Homo Sapiens; identical to SEQ ID NO: 205939

SEQ ID NO: 393082 - DNA, 1000 bp, Homo Sapiens; identical to SEQ ID NO: 115034

SEQ ID NO: 393083 - DNA, 1000 bp, Homo Sapiens; identical to SEQ ID NO: 205952

SEQ ID NO: 393084 - DNA, 1000 bp, Homo Sapiens; identical to SEQ ID NO: 115035

SEQ ID NO: 393085 - DNA, 1000 bp, Homo Sapiens; identical to SEQ ID NO: 283351

SEQ ID NO: 393086 - DNA, 1000 bp, Homo Sapiens; identical to SEQ ID NO: 205912

SEQ ID NO: 393087 - DNA, 1000 bp, Homo Sapiens; identical to SEQ ID NO: 205913

SEQ ID NO: 393088 - DNA, 1000 bp, Homo Sapiens; identical to SEQ ID NO: 115036

SEQ ID NO: 393089 - DNA, 1000 bp, Homo Sapiens; identical to SEQ ID NO: 283355

SEQ ID NO: 393090 - DNA, 1000 bp, Homo Sapiens; identical to SEQ ID NO: 283356

SEQ ID NO: 393091 - DNA, 1000 bp, Homo Sapiens; identical to SEQ ID NO: 283357

SEQ ID NO: 393092 - DNA, 1000 bp, Homo Sapiens; identical to SEQ ID NO: 115037

SEQ ID NO: 393093 - DNA, 1000 bp, Homo Sapiens; identical to SEQ ID NO: 115038

SEQ ID NO: 393094 - DNA, 1000 bp, Homo Sapiens; identical to SEQ ID NO: 115039

SEQ ID NO: 393095 - DNA, 1000 bp, Homo Sapiens; identical to SEQ ID NO: 283361

SEQ ID NO: 393096 - DNA, 1000 bp, Homo Sapiens; identical to SEQ ID NO: 115040

SEQ ID NO: 393097 - DNA, 1000 bp, Homo Sapiens; identical to SEQ ID NO: 115041

SEQ ID NO: 393098 - DNA, 1000 bp, Homo Sapiens; identical to SEQ ID NO: 205919

SEQ ID NO: 393099 - DNA, 1000 bp, Homo Sapiens; identical to SEQ ID NO: 283365

SEQ ID NO: 393100 - DNA, 1000 bp, Homo Sapiens; identical to SEQ ID NO: 205921

SEQ ID NO: 393101 - DNA, 1000 bp, Homo Sapiens; identical to SEQ ID NO: 205922

SEQ ID NO: 393102 - DNA, 1000 bp, Homo Sapiens; identical to SEQ ID NO: 283368

SEQ ID NO: 393103 - DNA, 1000 bp, Homo Sapiens; identical to SEQ ID NO: 205924

SEQ ID NO: 393104 - DNA, 1000 bp, Homo Sapiens; identical to SEQ ID NO: 205926

SEQ ID NO: 393105 - DNA, 1000 bp, Homo Sapiens; identical to SEQ ID NO: 115042

SEQ ID NO: 393106 - DNA, 1000 bp, Homo Sapiens; identical to SEQ ID NO: 115043

SEQ ID NO: 393107 - DNA, 1000 bp, Homo Sapiens; identical to SEQ ID NO: 205932

SEQ ID NO: 393108 - DNA, 1000 bp, Homo Sapiens; identical to SEQ ID NO: 115044

SEQ ID NO: 393109 - DNA, 1000 bp, Homo Sapiens; identical to SEQ ID NO: 205934

SEQ ID NO: 393110 - DNA, 1000 bp, Homo Sapiens; identical to SEQ ID NO: 205935

SEQ ID NO: 393111 - DNA, 1000 bp, Homo Sapiens; identical to SEQ ID NO: 115045

SEQ ID NO: 393112 - DNA, 1000 bp, Homo Sapiens; identical to SEQ ID NO: 205937

SEQ ID NO: 393113 - DNA, 1000 bp, Homo Sapiens; identical to SEQ ID NO: 205938

SEQ ID NO: 393114 - DNA, 1000 bp, Homo Sapiens; identical to SEQ ID NO: 205940

SEQ ID NO: 393115 - DNA, 1000 bp, Homo Sapiens; identical to SEQ ID NO: 283381

SEQ ID NO: 393116 - DNA, 1000 bp, Homo Sapiens; identical to SEQ ID NO: 205942

SEQ ID NO: 393117 - DNA, 1000 bp, Homo Sapiens; identical to SEQ ID NO: 115046

SEQ ID NO: 393118 - DNA, 1000 bp, Homo Sapiens; identical to SEQ ID NO: 205944

SEQ ID NO: 393119 - DNA, 1000 bp, Homo Sapiens; identical to SEQ ID NO: 205945

SEQ ID NO: 393120 - DNA, 1000 bp, Homo Sapiens; identical to SEQ ID NO: 115047

SEQ ID NO: 393121 - DNA, 1000 bp, Homo Sapiens; identical to SEQ ID NO: 115048

SEQ ID NO: 393122 - DNA, 1000 bp, Homo Sapiens; identical to SEQ ID NO: 283388

SEQ ID NO: 393123 - DNA, 1000 bp, Homo Sapiens; identical to SEQ ID NO: 205948

SEQ ID NO: 393124 - DNA, 1000 bp, Homo Sapiens; identical to SEQ ID NO: 205949

SEQ ID NO: 393125 - DNA, 1000 bp, Homo Sapiens; identical to SEQ ID NO: 115049

SEQ ID NO: 393126 - DNA, 1000 bp, Homo Sapiens; identical to SEQ ID NO: 205946

SEQ ID NO: 393127 - DNA, 1000 bp, Homo Sapiens; identical to SEQ ID NO: 205950

SEQ ID NO: 393128 - DNA, 1000 bp, Homo Sapiens; identical to SEQ ID NO: 205951

SEQ ID NO: 393129 - DNA, 1000 bp, Homo Sapiens; identical to SEQ ID NO: 205928

SEQ ID NO: 393130 - DNA, 1000 bp, Homo Sapiens; identical to SEQ ID NO: 115050

SEQ ID NO: 393131 - DNA, 1000 bp, Homo Sapiens; identical to SEQ ID NO: 115051

SEQ ID NO: 393132 - DNA, 1000 bp, Homo Sapiens
tcttttgccctcctttccactcctgtcctctttcctataatgtgggccccaagataggagtttctgaatagtcttcaagatgtaactctgtgtctattattttctattggaaaggagacaaaattagggttgttttataaatggtgccacagtttttagtctgacagcttaaaaagctttactgtgctaggtacagacttcagagtgtgatcaagccagtggtgagttattttagtcttcagaagtcagtggaaaactggacagtttagaacacaaatatatgttgggtttttttttccctctgtgaaactcagggaaataaatttgcttttttcttattttttttggtcctggaattttcttttctcagaatgttataatagaaagaaaaatggactttaaaatcagaattgaattcaagttctgtgtcatttgtctgtaattttgggcaaattatttctcatctctgaaccttaagttcttcatctttacacataattttttcaagtaccttttgctgcttcccttcaagcttcttttatttcagtattcccagtgttctttctcgttttcactgtattctcctccaaaatattatcctaacttttaaagtatttcttgtgttgtttcttatctattctccaaacgaatgttttggttttttaaaaaaatgtaatatggtacagacacactgggaagcaatttcatagaatagtctttatgaaaataatttgatatagaaattaggtaatttaggtgagaaatgttttttactgggtataggcataaatcttgggaaaaactctagggcagggggtgaatcctgaaatgacagtctgtttctaattaagacgtttttgtgaactaactattctataattaagacttctaagacagttataactactttgtacagatatttgtcaaatattttcagaagatggctgatccttggcaggaatgcatggattatgcagtaactctagcaagacaagctgga

SEQ ID NO: 393133 - DNA, 1000 bp, Homo Sapiens
tggtggtaggccctccaacctggtggcctcgtagtccacaggatcatcgtcatagtcctcggcaatgatctcttcctctggttctggtagaacaaggtggggatgaggagagcagataaggaccaggggacctcatcctacatgtagagcctagagacacgcactcacattcacacaagccacacataaaagacacgtgtgtgtgtgtgccgggaagaatatgaagtatctttcacattccaaatccaactctctatattaggaggtttacaaaaaaaggttacctaaatctgtgtctgggttcagatgatgagttctactgttagccaaagctatctggtttcagagttgatagggattcatcaaaaaatttactcatcttggccaggcgtgatggctcatgcctgtaatcccagcactttaggaggccaaagtgggtggatcacgaggtcaggagttcaagaccagcctggccaagatggtgaaaacccgtctgtgagactagcctggtcaacatagtgagacccctgtctctacaaaaaaaaaaaattagctgggcacagtggcacacgtctgtagtcccaactactcaggaggctgaggcaggaggctcatttgagcccaggactttgagcttgcagtgagctattatcgtgccactgcactccagcctgggcaacagagtgagaccctgtctctaaacaaataataaataatatatataccataggcacaggtcattcaataggcttaaaagaaaatccagcctggccaacatggtgaaaccccatctctactaaaaaatacaaaaattagccaggcacagtggagcacgcctgtggtcctagctactcgggaggctgaggcaggagaatcgcttgaacccgggaggcagaggttgcagtgggccaagactgcaccactgcactccagcctaggtgacagagcgagactctctcaaaaaaaaaaaaaaaaaaaaaaaaaaaagtaaatcaatgat

SEQ ID NO: 393134 - DNA, 1000 bp, Homo Sapiens; identical to SEQ ID NO: 283398

SEQ ID NO: 393135 - DNA, 1000 bp, Homo Sapiens; identical to SEQ ID NO: 201504

SEQ ID NO: 393136 - DNA, 1000 bp, Homo Sapiens
ctgagagtgtcctttccctcatctctgcctgatgaagttctattcatctttaggactgatcttaaatgtcatcttcataaagtcttcctggtcaaattttccctgtaagcatactgagttacttttttctccatatacctaaagataattttgcatatgtctctgttataacatttatcaccgtactgcaatcattttttaaatttctgccacattagaactgtacaatatgagatacgtgaatataggactgggccttctttagatccccaaatttagcaggtgcctaacatcatccaatctgtcacccattaatattgctttaagaataagagccatcttacatggcaacaaccactagtgaagattgtatttattaacttgttagtgtttgtcatcacggtgacatacacatattcagaaaaatgagtcaatattaataattaaagacgttactgtgatgaagtttcctgaaatctgagctcatctgtatacccatatccaatgacttgaatgtctcaatcaattcattggctagcacaattctcaagccttattagggaccataatttctatggttgacatcttaatgctgagtaggagccggaagctttgtggactctcaggttcatgcacctgaaagtcctgtgcttaagtgtgtgcatgatcttgctcagaagcaccaagaacaggggtgagaagagagaatgtagaacatccattgttatacaagaggcagtgacaacagagatggcctatttaacttacttcaaaagcctttaattctcaagcaccaggaaaacaattttagagctgactacaatagatcttttgctagactgttctgaagactagttttttagaaagtaaaaccatattaccagaatattaatccacaataaggttgaatacaatttgttaaagaacagactccatgtactattacaaaaatgaggtctgacctgaaacaccatccatttgaaatatttaaaaaaaaaaa

SEQ ID NO: 393137 - DNA, 1000 bp, Homo Sapiens
ctagcattgcacaaaagattcggatgactagtggtgttactggtgattggaaagttatgaatatccttcataggattgcaagtcaagtagctgctttggaccttggctataagcctggggtggaagcaattcggaagaaccctcccaaggtgctgtttctcctgggagcagatggaggttgtatcacacgacaggatttgccaaaggattgtttcattatttatcaaggacatcatggtgatgttggggctcccatagctgatgttattctcccaggagctgcttacacagagaagtctgctacatatgtcaacactgagggtagagctcagcagactaaggtagcagtgacacctcctggcttggcaagagaagactggaaaattataagagcactctctgagattgctggaatgactcttccatatgatactctggatcaagtaaggaacagattggaagaagtctctcctaatcttgttcgatatgatgatattgaaggggctaattacttccagcaagcaaatgagctctcaaagctagtgaaccagcagcttcttgctgacccacttgttccacctcagctaactataaaagacttctacatgacagattcaattagcagagcctcacagacaatggccaaatgtgtcaaagctgtcacagagggtgcccaggcagtagaggaaccatccatatgctgaagcttctactaggatcccagttttgccgcagataattaatggacaactgtagtgcagtgatcctttacaggtttatttctttgtaaaaaaaaataataataatttgaatcatgtaatatttaaggttatactatgcctatttgaaaatgatattagttatcaactttgcagtttgaaaaacatgtattgtgtgtaaaggttaaataacaaaactatgcagatgctcttaaaagcattgataacctttgtgacgaacataaagagatccttaaattatgaaaaaaaaaaaaaaaaaa

SEQ ID NO: 393138 - DNA, 1000 bp, Homo Sapiens
agatgaggtgaacattcttcttattcccattcccattctggaatcctttttgcctctagattaatgggaatccaacatcagtgaagtgccctttgctgctgctgccagccattctgactccagagccagtgaataggtgctgcttccatcactaggtggaataacaggagcatgtgctgccaatcagcatggttgcctagcaacaggaggagatgctattcattgtctatcagtgtgggggcacaatatattttagtttaaggtgcttgatgaacacaatgattacatggaccctccatgtcagccttggaagttgtgattctgaggctgggaagctggactatctttggaagctaaatttggaagtgaaagggggatgtaggatatgatcatctggctacatagataagtattgcaaaataggatttgggtttctggctatggcttaagctgtaagaataatgggctcctggcaaaggataaagtgtatcatgaaacaagaaataatgtgtctggcaggcatgcaattctcattgaatatgaggaagtgggagacaaatgcctagataatctgaaaaacaaaaaagagattttacagaggacaccaggtataaagtagaaacaaccacagtgggaaagatacacagagtgaatatcaaattttagtacaagacagtactctgtctcctagatcttattgagatttggaagtgtcatgcaacatggtcactttgtggtcaccaactgtcctaaaaagatttgggacaaattccacagtgtcatggtatggatgaaaaaataggcactattgagaacacttaaagaacaagaaccgaaggtttttggctgtttctcatcatctcatggaaaggtgggcagggatcagggtgccacagaacccttcgtgtgtatctgtgttttagcgaaggaaccctctgctcccctgtggctctctctatttattgagaaagtggaaaacaacaacaacaaaaaaaaaaaa

SEQ ID NO: 393139 - DNA, 1000 bp, Homo Sapiens; identical to SEQ ID NO: 283401

SEQ ID NO: 393140 - DNA, 1000 bp, Homo Sapiens; identical to SEQ ID NO: 219661

SEQ ID NO: 393141 - DNA, 1000 bp, Homo Sapiens; identical to SEQ ID NO: 283406

SEQ ID NO: 393142 - DNA, 1000 bp, Homo Sapiens
acaaaacacaaagtaaagacttgaggggattgaaaccatcaggatgaatgtaagccagacgggggcaaattgcagaatgtcaattgccttaacctaggaaaggtaaatttctaaaaatgataccaaatggttaaaaatcactaaatgaggaattgaagagaatttcaggttagaaggttgtaaaaagtgaaataattgtccaaagtcaccaaactagttcacgagaaagctggaactagaaactcatgcctctcaatccagtgttctttccactgtaacagattggcaccatagaacatgtttgactcaaggcagtaaattaagtacactgaagaaaaagataagaaaaaagtgataaaatgtaaagtctttgattcagacccaagtattacagctgctatggcaaaaaatagccacaatttctaagtgactttaaccaggaaaaaaagaaagagatgagatttgaaaaggaattaaatttcaagaatcaacaggaagtgatgacagccttccctatttggtagtttcaggcctgaacttttgtcattaaggtaataattcaaagtgctttaatgcctggactgaccacactaaataacaaaattataacccgttgagctacggtcagttttataaactgtgcctaaaatttcctgagttcaaatctgattataaatgggcaataaattcatctgttcattgggctgatttactttattttctgggtgcatttaaaatcttttttattgtggaaactttcaaacatacaaaaagagtacataataaatgattcccttgtacccatcattcaatttcaataagtcacattttgcctttcaaattttacctattgccactaacatcctttttttttctggagtagctgaactgatttaagatgaaggaggaaaaataaaggatgaaaggaatattttcaatctgttattcattgatactctagccaaaaagattccagattatgaggcaaaaaaaaaaaaaa

SEQ ID NO: 393143 - DNA, 1000 bp, Homo Sapiens; identical to SEQ ID NO: 283412

SEQ ID NO: 393144 - DNA, 1000 bp, Homo Sapiens
gtcatatttgctagttattccttagactcctgagttcaggcatcagatacttgataaacatactagaccaactaacagatttatgcagctagctctattcttacaccagggatactctgtcagaaatgccaatggaatagcagccacaaggtctgtgtgctactttaaacaaatcaatatctcaaaaggaaaaggcgtcgtctgtcactaattagatcaaattaaaatgtgctgctgtatctcctttgaatattcatgaggtgctctcaatcagaagccctaagtctgagaccagaaacttaagccagaaaaaactaaatactgtgagattcagataactcggtcctttgccaactagaacttcaaagagaagaggaatagcttaggtgcagagtaagcctcctgaaaagatgacaaaatcagcttaatgcagaatcgtggggttcccacccaacctaaagatggatcgtcaaaatagcccaggagctgataatcctagactctgttgacacacaggacacatagtttagcctctcttgtgatttacttgtccttctgtctggcggaaaccatggagattacacttgtccttatttgaattctggacttcatttttcatgaatgaagtgattcaaaaaatacagctgggtctaagcatgaattctaactttcaaaaatcacagatcttaaaaagtctgtattgaactgggtgcagtaactcatgcctgtggttccagcatgttgggaggctgaggcgggagggccacttgagccctggagttcaagaccagcctgggcaacagagtgagatcccatctctacaaaagactttttgaaaaattaggtgtggtggcacatgcttgtagccctaggtgctcaggaggctaaggtggaaggatcacttgagcccaggagttggaggctgcagtgagctatgattgcactactgcactccagcctgggcaacagagcgagatcctgtctcaaaaaaaaaaaaaaa

SEQ ID NO: 393145 - DNA, 1000 bp, Homo Sapiens; identical to SEQ ID NO: 283416

SEQ ID NO: 393146 - DNA, 1000 bp, Homo Sapiens
ttaatcttccgataagcctaattataagccagtcttgaaatctactggccacaacagaatagttttgctgtattttattttatttatttttgagatgaagtttcactctgttgcccaggctggagtgcagtggcgcaatcttggctcaccgcaacctctgcctcccgggttcaagtgattttcctgcctcagcctcccgagtagcagggactacaggcacctgccaccacactgggctaatttttgtatttttagtagaagtaaggtttcatcatgttggccaggcttgtctcgaacttcttcgcccaccttggcctcccaaaatgctgggattaattacaggcatgagccaccgtgcctggccgttttgctttagtttttcatgaggttcttcataagctcccccttcagaataggggagaagcagctatagattctggactcctgggtgtcattctcagcttgggccacattgttttttaaaaacgatgtagtttttatggatcagtgtttccccattcttgaattggtttaatcttgttcttaatcaagtagaactcaaatacttaaaacctcatgcctttgagacctcacattcaagcattgtcctggaagaagcctctagaattgcttgcttaacaagagctttcatcagggtttgggttccggaggaggctgatgctggttgctacgtcatcatccttagatggatgcagtttggactgatgagggcagacgggtgagcagggcacaggggagttgtgcgaggcccaggcaggtcgtgagatgagctgctccacgacagtctagatcctttgcctttcctgccccctcaggtgtttggcttcagcttggggtggcccttaaaaggcaactacgggccgggtgttgtggcctgtaatcccagcagtttgggaggccaaggtgggtggatcacctgaggtcacaggagttcgagaccagcctggccaacatggtgaaaccctgtctactaaaaata

SEQ ID NO: 393147 - DNA, 1000 bp, Homo Sapiens
gaagctaaaaagaacaaagttaaaattacctttaatccctccaacagaaaaagccactgttaacagcttatttttccagcatgtcaattattgagcaagatcatcatttttcaataactatggagcatttacatagtggagacacatcccataatttaatcctcagtatcagacatgcggttgttttccatttttgctattataaataattctgcaagtgaacatcatctatatgtaccttgcatatttatcctattaggacaaattcctacaatcagaattgccaggtcagttttcatttgacctttttgggggaggcctctgaagtccagtctggccaggcataacaatcttcactcccattcagtcttcaatcagaggcttttttttcccacatgactccgccctcaggattactggcactcttttaaacagtgaggtgtgtgtttggggttttttggtttagtttagttgtcttttgtctacactggcttttattgttaaactagtgtaataacaaaattaaaaatttttcaaagggaaaggcccctagagtcctaccattctttcctaagaagcagctgtttctctttttctgtaagtagagagtactttttatatctctgttgattggctggatgagatagtggctaaaaggtataaggtttttttctttttcctttgttattaaagtagtttaaatagatgataaattcaaatggggccgggcgcagtggctcatgcctgtaatcctaacactttgggaggcctgaagcaggaggatcacccgaggtcaggagtttgagaccagcctggccaaaatggcgaaaccccatctctactaaaaatacaaaaattagccaggcatggtggcacacacctgtaatcccagctacttgggaggctgaggtgggagaatcacttgaacctgagaggcggaggttgccctgagcggagatcgcaccactgcactccagcctgagcaacacagctagactct

SEQ ID NO: 393148 - DNA, 1000 bp, Homo Sapiens; identical to SEQ ID NO: 283418

SEQ ID NO: 393149 - DNA, 1000 bp, Homo Sapiens
aaggattttctttaataaatcagcatatcttacttgtagacatatagattgaaatgtctagcaggtaattagtagctcagaagtcaacttagggagagataaacagagctgggatcatcttcatggatgtgacaaataaagtcatgacattgaataagacagccaaagggggcagtacaaggttgaatgccaacaaaaattaacatagataagaactcaaggaattatttagattcagccattaaacaatcatggtaacgagtaagagaaaacaaaacaaactaaactatttatatattatttttgccatatgttctattgtagatgttctaggtgcttgaaatacacacacccatatcctactcttgagtcttggttaatttcccctcacatttgtttaatgcatgcttaatatttttgatcctattattgattgcaaaaagactatagacagtctcatctccattattgactgcatatcaatacaatatcacaaagtactgtactatgctttaaccatttttgcctagtaacaaatttattactccagcaatttaatttgcttgctgtgattttttgtacctcaacgtttttagacattccattttaatctaggtttttcaaagcagcactactgacatttggatggcataatattatgttctgagggctgctctgtgtgttgtaagatgtttagcaacatgtctggtctctgctcaccagatgccagcagcacccccacttccagttatgacagtcataaacatcttcacacattgccaaatgtctcctgggaggcagaatcacctcctaactgcttgccctttgaaaaccactcatttagattgatggggttcagaacacactaccacaaaatatggcatcttggcatttcagaaaacagcaaaaacaggaagttcactctgtaagcttctcccacccttctcccctgaagcaggccataaaagaatcctctgacgtttctataaagtaggtcata

SEQ ID NO: 393150 - DNA, 1000 bp, Homo Sapiens; identical to SEQ ID NO: 283420

SEQ ID NO: 393151 - DNA, 1000 bp, Homo Sapiens; identical to SEQ ID NO: 201562

SEQ ID NO: 393152 - DNA, 1000 bp, Homo Sapiens; identical to SEQ ID NO: 283421

SEQ ID NO: 393153 - DNA, 1000 bp, Homo Sapiens; identical to SEQ ID NO: 219688

SEQ ID NO: 393154 - DNA, 1000 bp, Homo Sapiens
acggcttccgggcactggcaggcctggccttctgcgaccctgagaagcagcacatctggcacatcccaggcctgtggcacggagcacctcccatggccgcagtgagcttggcctacagtgaagccatatttgaattgaagagatgcctactcgaaaacatcaggaacggcttgtcgaaccaaaacaaaaacatccagcagctcattgagctggtgagacggctgtgagtgtgcagagaaacccagttcaggtgtaggaggctgctgtgggcagccctgtctgatggggcacccgtgtggggctgtgctctggtgcctgagaatggctggtgcccaatcgacatgagaagacgaggaaaagacagggtttggagtctcctcaacagtgttaaaagaggaagtgacctcacagaccagctcagagatgttaccaagaatatcacagcccccagggtagggagacaagcagcagtttgttctgtctcagctcctgtcaaggatcctgcggggtgggccctctgtatagctgctctctgtcactggcccctggagtgggagcagcgtccttagtcactgcaggcccaggcgggcaggtggtcccaggacagaggtggggaagttgtcctgaggaagcagaagtaggccttgctcccgcccaacccaagggcctccagtggaccagcattcaagatgtgagtgcccgtggtgtgcaaggcactcccatggcaccgtatttattgactgatctgtgaaggcttccctgacccctgcccaggaagagttcactggtcgctctgttgtgccccacagcactttgttatacctctgccacacacttcacgcagcgcgttgtaactcatgtgtttacatgtctgtccccccagactgtgagctccttgagggcagggactgtacattctccagctctgtgtccccagggcctggcacattgtagacgcttaataaatgtctgttaaatgaatgagtgcacaagtgatggt

SEQ ID NO: 393155 - DNA, 1000 bp, Homo Sapiens; identical to SEQ ID NO: 283426

SEQ ID NO: 393156 - DNA, 1000 bp, Homo Sapiens
ccttcactgactctgttttcagactcagcccacttgcactcaagtgaataaacagccttgttgctcacacaaagcctgttggtggtctcttcacacagatgtgcttgacaaaagggaagggtggatttgtccttctggttacatatgttctgctcactcattttgaatttaattaaacaaggattgcccttaccttttcatactttgtaagaaaccataaatacttatgcaccatgatttttttaaagaaacactttttattttgaagtaattatagtctcataggaagttgcaaaagtagtacatagagtccctgagtactcttcccccagtggtgacaactgtagtataatatcaattctgggaaattgacattggtacaataccaaatatactatgcctttttctctaaggcatgatgttgcagtagcatccttgtacatgtagctaggagaacttgtactaagcccagataaatagttgaagtacaagggcaaggagtgtgtctttgatattttaatagaaatcacctattgccctctagaaaagctgtacccttttccagtggcagagaaccttcctgaaaggcagtcctgtgtaatggtgtccatttcatcacacccttaaaacactcagctttaacaaacatgcagatttttgctgatgtgggagaaaatattaattattaatgatattaaggtgattatcttttcgtatgtttatagatatttgtatttctttttaaatgaactgctcatgacctttgtctacttttatttgggtttacttctttctcatttattcctataaactctttataaaaggaaattaaccatttgattgtcatatgttgtgaatatttttaccattttgacttttgaatttatgtctttttaatgaattgtagaagtttaaaatctttatggaataaatttatttagtttttcgtttatggaaaaaaaaaaaaaaaaaaaaaaaaaaaaaaaaaaaaaaaaaaaaa

SEQ ID NO: 393157 - DNA, 1000 bp, Homo Sapiens
ataaactgacataatattagagaaataaacaggctgctcacacaacagactgcaaggggaagttagaaaaagctcaagcatttttttctttgtttttcgtgtgtgtgtgtgtgtgtgtgtgtgtgtgtgtgtgtgtgtgtttttctgacataaaaaatgtgtccatttgcattaacttgggcagatagcttgcagcaacaaagaaacacacgctttacaactcattttaaaataaaatcttttctatgtatcattccttagaaaagttctcttcttgttttaaacacattcctgataacttctaaagatgaccaaaataaaacagaatatctacagagatcattttctgaattttttgtacatccaaggataacaacataaaaaaaataaaactggacagcatttcacatccaagtgcacagaaccatttttgcaagattaaataatgtaaacattgggaacagccaaatcagcgaagaatgccaacacctcaaaacacctggtgttgccgcttcattaagtggttcaaaatccagatctataattgcgcaatattcaccgtatataaaaagaaatggatattaattttgacaaatagctgcaactgagacttctttttatttctttatatgtgtatatagtgaatttttattatttttaaaattttatttatttttttatttttatttttgcagaggagcccagagccttctcctcctcctcctcctcctctcgcctcatctgtctcccggcctgataccagatacaggttgttgatttcatcgtgggtagcaagctagtaataaatttcaaagtgctttctcttttcatgctttttgccaataactgttaccgccgttcttattctctcccttaactcattgtctttgggggagttagacaccaggaggtgccttgtcggtcatatttttcagcacgtcatcaatcctatcatcttcaataacaacccgcttgctccggccgatctggcccagcttgg

SEQ ID NO: 393158 - DNA, 1000 bp, Homo Sapiens
tggctactcatagcaacttgtggggtagacaaagtgcactttacagatgggcaaactgaggtccagagtccctgaattgtacatgtcagaaccaggattgaatctagaagtcttgggctcctgacaccaaacaggtgctcttaacttgcagaatgtaggttcctttgattcagttcggttcaaacaattcttgaatataacccatgtgccagagactttgctatgcaagagagcctctagttaggctcaaaccgtcttggtctagtgccttacttaagaacagggacttgtattatttacttctctgtccccaggcaggaccttgatccaaaaatgctttgctgttgtttttggccttaatctgccagaaactagagggagcagatggccacagcaatgtgggttatgaggatgtgatatcaggcagggttgaaggatgaattgagagccctgcacccaactacttctgtgtctgtgcctaggcccttgtcagggtagtctctatctgagagtgtagctggtcagcctggtcccatttctcatttccagtcacctccccctcttgccatcccatataatggggttagtctcctggacagatctcatacagaggctgctgggatctgctgtccaaatgaccctttggacctatttcccagccatgttccaagatgatggtgaggagtctagccccacagccagtatgctatctctattcagataactcccagctcacaggcctcccaccaggctctcacccactctgatgttttcactcctgactcctaagaagcagattggcaatttagtgtgagtctgtcagacagcctagagagtaatcaatactgagagaaatggacatatttcctgtttattcaaaatcctgatgaaaattttaaggagcactatttgggaagggatgactgggaaccttgcaagaacaaacagcttaaaattcatgaacagaaatagcaacgtttattcatgatgtttcaaattc

SEQ ID NO: 393159 - DNA, 653 bp, Homo Sapiens
atctacaccaacccataattattctttacgatgatccaccttttataatgtagatgtttaaaataaaaaccaaaggaatgaccaatgagagccacagtccctaggaagaactgtaaatgaagacgaatccacatggcacaggatttctcccaacatcctcaaacgggaatcatccgaaggcatcgattctacagcccaaagcctttgtccacaactcccaggggtcagagcttccttctttcgcgccaggccaaagttgctacgtgggatccgatgttgtcgccagactttcagccaaaatcagccttcaaattaacctggaccgcccaacctccgtgcctttccgttacgccgtctcaagggcaaacattccaccctaactcgccagagggtgaactgcccccaaatctaactgaaaacacttgcccttctcaagcctaacgagctgggcctgcagcgcttttctgccaccactgactacgatgacatagcaaaaaaaaaaatatacctatgaaatccttcgagatcttcactctcaagatccctgggaagcgcacatacaccaccacatggaagctgacgggaaaggaagagtcggtgttttagcaagaaaagagggtgccctaacggcaggagctacgctagatactggc

SEQ ID NO: 393160 - DNA, 1000 bp, Homo Sapiens
aatcagagcaatgcggtactggcataagaacagacatgtaggccaatgaaatagaattgagagtccagaaataaacctatacatatgattaaataatttttgagaagagtaccaagaccattcaataggtaaaagtctcttcaacaaatgatgctgggataactggacatcaacatgtaaaagaatgaaatcagaccctacctcacggcatacacaaaagttaacttaaaaatggaacaataacctaaatagaaaagttaaattgatagaactcttagaagaaaacttagggatacatctgtatgcccttggttatttatgacaatggactcttacatgacaccaaaagcccaaccatcaaaagacaaagcagatacattggattttatcaaaatttaaaacttggcacaggcttgagcatccaaatcagaaaatccaagatccaaaatgctccaatagaaaatctgaacttgagcaccaacatgacacacaacaaaaatgctcatttgaacattttggagttcagatttgggaggcttaactggtaagtataattcaaagttccaatatctgaaaaaattcaaagcccttctggtcccaagcatttcggataagagatactatactcaatctgtacatcatagaacattatcaaggagcaaaaaaggcaacctataggagaaaatatctgcatatcatggatctggacaagggtctaatttctaaaatatataaagaactctaataaatcaacaaaaaaacaagcaatccaataaaaaatgagcaaagaacttgaataaacatttctccaaagatacacaaatagccaataagcatatgaaaagatgttccacattattaatcattagggaaatgcaaatgtaatccataatgaggtatcatgtcactcccggtaggatgcctcctcaaaaagttaaacaaagatttccacatgactcagcaattccattcctagtatacagccaaaagaaaaaaaaaa

SEQ ID NO: 393161 - DNA, 1000 bp, Homo Sapiens
tgggctgaacaaaatctggcttgacattctcgaaccaccaaaaaagctccgcaataaaaaccataacattcggcttcaacactaatggcgcatacagcatatcttccaaggtgagataaaaacatttattaagatattcattggagaattctctcagaagccgaatattatacagactgtcggccatcgacgttacctcctttaagcatatatcatccagtttcatctgctctgggcaataatagtgaatcacagctaagagagcagcaccatcactgccgtctctcatcaaatcctccaacaacgggaagtagggtgactgcctatcagaaaggtgctctcgtcgatagcggaccttttgatgagctggactttccaataactgttgttttaatttaacttctttctctgttatctctctcattttaagatttaccttgttgatccagaacaccatggcatcctcgaggtcgtacggaagttctttcgaggcactgaacgttgagaagcgcttgacactggccaccaccttctcgatgctgatcatctccacagtgtaggccatcatcagggcatccaccattgccatgtgggcactcatttttatgggtgcgcgactgaggtcggactctgtcacgggggtgtcatcactctccatcacatagatccctttccgggacagggcctggatgacagactggtgtccctgtaaggcggccacctggtcccctttcaggatgaggctgcagacacggcagtacagctcgctggacaggagaagcttgataacaggcggcttaatgtgctcctgctcatactggtcaacgtagaaagggtctctgaggtcctcagggatgttatctcggccgtaggccttggcgcagatccactgcaggttggcggcgatcttggcgcgcgccgcgtcgtagcggtccaggggcacgaggtcggcggcgccgtccggcggggcctccatcttcctccagccctcggcggcggc

SEQ ID NO: 393162 - DNA, 1000 bp, Homo Sapiens
gtccctctgctagctcctgagaagtctcggaacacacgctggtgactgtgggctgccgtgggacattaactgcagttttaccagcgctcagtgcagatggagactggtcagcactaagattggcattagcatgcagtccagatgcagcgaacaggggaggagtgacggcagccacgggtgaaggggaagcatgtgatgaggtggtcgcatgggctggggtgaaggcagacgatggtgatgggatggatgtgacttttggtgaaaacacagaaccaaaaggccgtggtgccttattgtaggccatgttgtttgtggaagtgactttggacacagcaggagatgtaatgggcacaggtttaactacttctttaggttctccctatgtaaaacaaaaataaacatacacaaaaccacaccaaacacatgcaaaatatatttcaccgaaaagaacacagagctgattttttaaaagacaaacacaatcaggttagcagctcaaacatcatgtttccagataaaaacaatgggctgataaagcataacgtgcatgctaactagtcccaacatgcataacacagatgcacacattaggtataatttttaaaaataaaaatgaaagtagtttcaaaatatttcggaaatacagcaggaaaactatcagaaagcctaaagcccctcatcagtgtcaacctaggcatattccaaaggaaaaatgtttaaataccctacaataaacaaaacattgctaactgaggtgttttttatgttaaaatatccaaagcccatctttccatctttcaaagcccatagtcccatttttcaaacatgtttcatttctctccagagtggaatcatttgtttcacgcagaaggagcagcacatttctaactctttaagtttaaaaaaacaaaaaacacagggaataagataattttcacctaactcaggaatgtgcaaactctaattaataatcttaaagaatttgaaaaaaaaaaaaaaa

SEQ ID NO: 393163 - DNA, 803 bp, Homo Sapiens
accgtttaaactgttttacctcatttggaaacccacagcctcaaataaatttgctgtccaagagcaccatctgctggatgaaggtatttaagctaccccattgagggagagggaaaaaaagtctataggttaaatgccactatgtctaacaccttggtgtgaaaagattcccatgcctcaccaacaggtttcttataaaggagctcttgatttgacaaaattctaatacaagagaaatctggaactgacaaaaattcactatcattgaatttagttcatcttaaatattgcttatcataaagtaaacatttctgagctggaaggaacgagagagagcagttaattcaatttcttccccttgtagatgaagactctgagaaaaacacagagctttcctgtctttccttttttctgagagattcaaagcctccacgactctgtttcccccgtcccttctgaatttaatttgcactaagtcatttgcactggttggagttgtggagacggccttgagtctcagtacgagtgtgcgtgagtgtgagccaccttggcaagtgcctgtgcagggcccggccgccctccatctgggccgggtgactgggcgccggctgtgtgcccgaggcctcaccctgccctcgcctagtctggaagctccgaccgacatcacggagcagccttcaagcattccattacgccccatctcgctctgtgcccctccccaccagggcttcagcaggagccctggactcatcatcaataaacactgttacagcaaaaaaaaaaaaaaaaaaaaaaaaaaaaaa

SEQ ID NO: 393164 - DNA, 540 bp, Homo Sapiens
atgccaattatcaaggaaataatgttttcttaagttccctaaggcagaagatttaacatgcaattctaccagatcccttcctattcccccaacaccttttctctaacccccatatcccaaataataataataataataataataataataataataataataaaagcagttggttcagtgattctgaattaaaaggataatgttttgcaatgttcaagttgtaaaaactggccgagtattggctgtgtggaagactaaagctttcattctaacattcagacatagcaatccaaacccttgttcctgctgtaaatgaacttgatggagcatgggcagatttcagtgatacgagaaaggggactggtcatctatagaaaaatctgtgagagaacttggaagtggactgcgtttatcaatacagtcacaatgttaaatgaacaaaattcttgaacagttttttttcaaaaaatgttcaggtttatttgtggaaatgcaagatttctatgaaaatagtttttgtatggaaatttttgtaatact

SEQ ID NO: 393165 - DNA, 1000 bp, Homo Sapiens
  misc_feature (193)..(193): n is a, c, g, or t
tccatgtgcaaagtacatactcaataaagatttgaatacagagctactgaaatggggaagatggatggaggttacaatgcacttaccatctgcagcacctattttaacccctccaagttgggttgactgtaaagtgaaccagttctgatcctatagagaagtcattgtgaatggtaacaattttttaaaaatncgcttgcttttcagactcggcatataaattaaattaacaacaacaaataaccatgagtccagaagttggcccaagattgacttcacctatctacaaattaaccctttgcatctcttctttgatggaggccaaattcaacacatggagtgttgaaattattctaagtgcagttttaaaaaatagattttgttaatgaaaattaagtctatcctttgcggagttccagaggcacttccagaaacctctgttggaaagcattgtttacccaagctcgcattacagagtcccctttcccccaaccagaaacttgaaactttctccctatttcccgcgatccttcctttttctatcaccgacccgtctcgcaggcagcggtcaagttactttgagcgacaaatagacccaccccttcaggagagtgcccgtccccgccccgaagaggttgattggcaggccacgctcggagatccgccagccgcgtagcccagtttcgggagagtccgcccccgacccgcccccgacccgccccgtaggcttgttttggcgtcagctgcgcgctgtgatgacgccacgacgctaacgcccgagaatggcggcggcggcggcggcggcggccgctgccattgcccggagatggccggcagagccgccgagacgccgaagagcccgccgcccgcgcgaggtgaggcggcccggcccaggacgacggcccgacgggcgggaggggcagccgaactgtggtcgtggtcgctctctggcgctccggggcctgcccctggtcagcctgcagcgtcggcccgtgccccg

SEQ ID NO: 393166 - DNA, 1000 bp, Homo Sapiens; identical to SEQ ID NO: 115053

SEQ ID NO: 393167 - DNA, 1000 bp, Homo Sapiens
gttgcagtgagccgagatcatgcgttgcactccaacctgggtgacagtgagactctgtcttaaaacaaaacaaaagaagcaaagtttattttgctcagagcttcacagttttaggggctggaaagtgcaagaacctcatgcagtatctggcaaagggctgtcccaggatggaagggcagaaggtggaagcaaatgagagacacgaaattgggccaaatgtcgtccatccatcaggagccactcccatgataacagtatttatctattcaagagggcagagccctcatgatctaattatcttttttttttttctcctgcctcggcctcttgagaagctgggattttaggcgcatgccaccacaccccgctaatttttgtacttttagtagagacggggtttcaccacgttggttgggctggtcgcaaactcctgatctcaggtgatccacctgagatccaccactttggcttcccaaagtgctgagattacaggagtgagccacctcgcccagctgacctaattacctcttaaaggccccaccctgcccagtgcagtggctcaggcctgtaatcccaacactttgggaggctgaagtgggaggactgcttgagttcaggagttggaaaccagcccaggcaacacagcaagatcctgtctgtatgaaaaaaaaaattttttttttaattagccaggtgtggtggcacacatctgtagttccagctgctcaggaggccaaggcagaggactgcttgagcccaggcagttgaggctgctgtgagccatgatcaacccactgcactccagcctgggggacaagagtgagaccctgtctcaaagagaaaaaaagtcccatctcttaagacagtagcaattgaattttttatttcaacatgagttgtggcagggacattcgaaccatagcaccaaggttctccccaaagctctccaagaccttctttgatctggttcctgccccctttctgatccgttgacctgcag

SEQ ID NO: 393168 - DNA, 1000 bp, Homo Sapiens; identical to SEQ ID NO: 283453

SEQ ID NO: 393169 - DNA, 1000 bp, Homo Sapiens; identical to SEQ ID NO: 283456

SEQ ID NO: 393170 - DNA, 1000 bp, Homo Sapiens
tttttgagacggagtctcgctttctcacccaggctggaggctggggtgcagtggcgtgatctcggctcactgcgatctccgcctcccgggttcaagcgattctcctgcctcagcttcccgagtagctgggactacaggcgcgcgacaccacgccggctaattttgtatttttagtagagacgggggtttcaccatattggccaggctggtctcgaactcctgacctcgtgatccgcccgcttcgggctcccaaagtgctgggattacaggcgtgaaccaccgcgcccggcccatttgccccattttacatcaccactgccgtcacaaacaaagttctcgtaagaaccgccaagcggcgcgtgggcggccgccccatcccactacaattgcggcctcgcagcctgacccggggcgccaacgctcaatccggttctcgcgggaagatacacggtttttaagaaagaacttctaaccccactccaccgcccaacggtcacgtgacgcgcctgcgtcctcgcctcaaggttttttctggtcgcatattggctgttaactcggctacggggtgtagcgaggtgcattccggaagtaggtcctttgacttttgcttcctctacggaggcaagtaacaacccggcggtcgacgcttagcggaagttcgtcaagtcgcagttgcccccgcacagcggatgtgggtcgcctcttaggtgacgctgggaagtgcctgcaaccttcgccgctgccttctggttgaagcactatggagggagagaggaagaacaacaacaaacggtggtatttcactcgagaacagctggaaaatagcccatcccgtcgttttggcgtggacccagataaagaactttcttatcgccagcaggcggccaatctgcttcaggacatggggcagcgtcttaacgtctcacaattgactatcaacactgctatagtatacatgcatcgattctacatgattcagtccttcacacggttccctgga

SEQ ID NO: 393171 - DNA, 1000 bp, Homo Sapiens
  misc_feature (848)..(848): n is a, c, g, or t
  misc_feature (883)..(883): n is a, c, g, or t
  misc_feature (905)..(905): n is a, c, g, or t
  misc_feature (931)..(931): n is a, c, g, or t
  misc_feature (939)..(939): n is a, c, g, or t
  misc_feature (954)..(954): n is a, c, g, or t
  misc_feature (985)..(985): n is a, c, g, or t
aaaggttaattaaaaaaatgattgaatataatttttaaaaatgtcaggcaatacaataaatgctgtttaatgagaaataagcttcgctcctccctgctgtgttgcttccatcaaggcaagctctgctactacttattaaccacattatttccacaattttatatagactcctgactgaggttctctgaatatcaaaattggatattacttcaataacatgggcaaaattaaggctttcgacctgcctgattttccttgtcaaggcagtttgtccccatttcccacatgggatctgcagggctgggtcccatctctcagttccctgaaagagatgcagtgggctatggctcatgacacaccctcgcctggcttctaacatgtctgtgtaaacctgggcaggaatcgagcccactggaaacatggtgaagcagccagccaagttcactgtggacaccatcagcgccgggcaaggagacgtgatggtgtttgttgaggacccagaagggaacaaagaggaggtatgttggaggatgctgcctctcctttccagcacctcatggagcttttggggcttgtaatgcggccagggactgtgcctccattttcatttcagctcacaaccaaaagtgttttttaccaaaaggatactgaggcttatagctgttaaagtaacctgcccaagaggtgagccttgaaatcaaatttaaattgattgccagggacacagtgtttaatgaaataaaggatactttggatttagcaaaggtgccttgtcagttgaggtttatgtatgtatttatttatttatttatttatttattgagacagagtttcactcctgttgcccnggttggagtgcagtggcacaatcttggctcacggnaacattcacctactgggttcangcgattcttctgccttagccccgctnatttttgnaaccccaagtaactngggatacagggacctgcaccacgctggctanttttggatttttagt

SEQ ID NO: 393172 - DNA, 404 bp, Homo Sapiens
ctgcagtgaaatggtgaaaggaatcagagagaaaacactcatgttgcagtttcataatttgtatcataagtgataatcaaatcagtactttcgtgaaagcaatttatgatatcttattatattcagaattgaaaacaaataatagcaggccatggttcattttttgtggaaagcagtgagaggttggtgaagacaagagaaaaagttgttacagattgaaccaacagagtaacattgaaaaggtcatctgatgcttgattctcccactttgtagtacaaaggaccatgggaaatctgcaagagccttgaggaatctgaaagaatcgatgctgtcccttaaccttctgccatctctccaaggacatgcagaataatgtaaataaatcagcgaaatagatctgcag

SEQ ID NO: 393173 - DNA, 1000 bp, Homo Sapiens
gtcctttgcaatacctcattcagccaagtatttgttctcttcctcattcagtataaggcagcgttcaatttgcttagaaggcaacattagaagggtagagtttaatcagaaacatagaattttaaagtgtgggttcaactgaataaatttgaatttctgtaggaagtaaagaattaaaaaccgatttaaagattgcaatatataatcatttttaaagtatttgattaaatctgataggttttccagaaatgaaaaaaagtcagttctaaaaccaaagctgatatttagaaaatgtgaaaatgtaaatcagtcctatccataatagtttctctaaaactttatcttaaagagtcattttaaaagaatataactattcaaaaatgtaactgctatcttaagttttaaaataagttaagacattttaaaatatgaatactgtagtttaaaagaaagaaactgggggaaggaaaagtagagaaagaaatgccaattccaatgcaaagctttatttgccaagttttcttagaatgacttttaccaatttatgaattcttgtaaacagaatgtataatggaaatactgaaacactgttgcctaaagtggcattattcactgctactgtgatgctactgtaatgtaataaattattaaattgttgcaaagtttttgccttaaaattttgtgtgtcttgaaaactgtggtgttaaaggtattgagactgtgcaaatgctgggcacgcttggcatgagataatcggtttttatttttataaaattttaatgtaaccatgaagtgtgtttatttgaagaacacaaaccaaagttatgggataaaaaaggttgtgggatgaaaaagttacaggataaaaaatgttgtggaaaggttgtggcaaaaaaagttgtggaaaaaacgtaaaagttttatgaaaagctttaaaaaaagtattatgaaaaagaagttacgggattaaaaaataagtcatgggatataaataaaaata

SEQ ID NO: 393174 - DNA, 1000 bp, Homo Sapiens
catcagacacttggtgctggaatctccgaggctgggagggactgggagcgccccagttctgtgtcctgactgggtggggtggaggggctgctccacatctcacagcgttctctggctgcagaatctccagccaagtcctccgtgctcgtggtgggaatcgtcatcggtgtcttgctactcacggcagcggctgtaggaggagctctgttgtggagaaggatgaggagtgggctgccaggtggggggcagcgggaggaagagcctctgagagagggacagagaccccaagagaggggcacacagacctgggaggacagagacccagagaggggggacagagatcagagagaggtggagacagaaacccagagatgggagaacagaggtgcagagagagggggacggagacagagacccagagacgggggaacagagacccagaggggacagagagaggtgcggacagagggagggggagacagacccagaggagggagcaaagatgtagaaagaggggggacggaaaattgggagaaggggagacaaaggcccagaaggaaggggatagagactgaggaagagtgtgtgagacacacacacaaatgggggacgccagtcagacccagagcgcctcagagattctgatgacctctccctctctctctctcctcagccccatggatctcccttcgtggagacgacaccggggtcctcctgcccaccccaggggaggcccaggatgctgatttgaaggatgtaaatgtgattccagccaccgcctgaccatccgccattccgactgctaaaagcgaatgtagtcaggcccctttcatgctgtgagacctcctggaacactggcatctctgagcctccagaaggggttctgggcctagttgtcctccctctggagccccgtcctgtggtctgcctcagtttcccctcctaatacatatggctgttttccacctcgataatataacacgagtttgggcccgaaaaa

SEQ ID NO: 393175 - DNA, 1000 bp, Homo Sapiens
cctcctgcagcctgcaactgtggacaactggagccagatccagagcttcgaggccaaaccagatgatctcctcatctgcacctaccctaaagcaggtgattgcagggtaggagggacagcaaagacctgctgagccagcacaggctcatcacttaagttagaattccccttcttaggaaacctgctccttcttattgttccacaatgggttttggagctcagggctcacacaggatgcctgatatccgagttttccaggaaagctgctatgctctaccatgcactggtcttgggtggagagacccttgcctgtgctgctccactccctacagagatccaaagtccatccctcatggacttctatcactcatggcaaacaggattctgacccaaggggagggtgatgcaaacaccaaggctctacatcctcttcgtttactcgggactcttcagggaagattgtctaacagatttctgcttctcatccttcctttctgagcctcagggacaacgtggattcaggaaattgtggatatgattgaacagaatggggacgtggagaagtgccagcgagccatcatccaacaccgccatcctttcattgagtgggctcggccaccccaaccttctggtgagagcacctccctctttctctcttcctgctttctttccctctctcttctgttttcccctgtcttttctcacttttctcctcttctctcctctctctctcccccatctctccttcctcttttctctctccctccctctctccttcctcttctctttctctctcattttcactgtcatatgtttcttccttttatcttcctctcatcctctgtctacatattatttaagattttttaccaaaagtgaatcaccaaatgaaaaggatgtgtgctagggtcagattctgccttattttcttcttaagccctccctctgatcatgtgcaactgtagatcacattgaagatgtgaaaaactgtaagccattt

SEQ ID NO: 393176 - DNA, 1000 bp, Homo Sapiens
  misc_feature (391)..(391): n is a, c, g, or t
  misc_feature (407)..(407): n is a, c, g, or t
  misc_feature (520)..(520): n is a, c, g, or t
ctcaaaaggaccattcttaaggacagccgatttttccgttacttgcacacagctgtgatagtgagtggaaccatgctggtgtttggaggaaacacacacaatgacacatctatgagccatggcgccaaatgcttctcttcagatttcatggcctatgacattggtaagtttcccaaaaccattttctcttcaggcatctttttgcctatactataagcagcatttaaaaggagactgaaaatattgccagttcaaaatgatcaggccatttgaaagaggtccaaatggtattttttatattcatttgactaatgttacacatctggtaaaaattatttctacattaaattctttttgaaatcactcctgttaattgcttgaatgctaattnttaaggctgagttgangtgtctagtctctcctttgtcatgttatgcctacctggtagtgttacatagttgcaaccaccagcattgtgttaaaattggttcacgtattagctttatctcattccctaganaactggtttctcacatggtcttggtgtggcaatataccagcccagaagagggcagtatttgttcatgcaaagcaaatgcataccggatgatctctttcataaaaattgtcagatgttcattttaaacaaattattatttttttgattgtggtaaaatacacataacatttaccatcctaactatatttaaatgtctagtttagtgatattaaacacattcataatgttataaatccatcaccgccatccatcttcagaactgtcttcatcttgtaagactgaagctgtatacccattaaacaataatgtcccatttcttcctccccacaatgcctggcaaccactattatacagtctgtctctgtgattttgactattccaagtcatacattcgttcccccagacatttgtgtgccagccactcagtttgtacattgaggagatcagatgaataacttaaagccctaagcctccaagtag

SEQ ID NO: 393177 - DNA, 1000 bp, Homo Sapiens
  misc_feature (908)..(908): n is a, c, g, or t
  misc_feature (934)..(934): n is a, c, g, or t
  misc_feature (937)..(937): n is a, c, g, or t
  misc_feature (960)..(960): n is a, c, g, or t
  misc_feature (980)..(980): n is a, c, g, or t
  misc_feature (983)..(983): n is a, c, g, or t
tgtataatttagcatctattacactcatgtaaatatggagtaagtattgtaaactatttcattgcggggattgtgggtgttatacatacatttaggactgcaattttttggtattttttgtattgtaaaataacagctaatttaagcaggaacaagagaactaagggaggtctgtgcattttaaacacaaatgtgaagaacttgtatataaacaaaagtaaatactataatacaaacttccttctgaaataaaagtagatctggtaaaaatgtggcttttgttctgagtgtttcattttgattttgcattgttttgcctatatttacattttggtcattagaaccttaagggaaaaaaaaaagcgtttaccagttttcagactgcgtcagagggagcacttgacagttaacggaggtgagggtgaaaacccctggcaggtacctcagacagccctccaggcagcttgtgagccacagaccttccacacagcctttgtgtgcctacagggcagctgggcccgtgggggcagggacagatctgagcagtgaggtatggacagccgtctcactgctccactaaccacaccactgtctccagtggtgctgttatccctccactttgcgctctcctcacaggctcctgaatgtcctctaggttgtctccaaactgctaaatctcaggtgtgctgacaggtctcagccgtggccagtgttttcctcggccttgaagttttgaggaagttactcccattggcaaggccttgtttgggggcctcctgtgtgtcctgccccttttatttggctcctgccctcagaatgggtcagagtcatgtatttcagtgcagagtgcagattcccagtgctagcagtctcttccagaggatgaggtcattgaagaaggaggaacncaaaacggtccttcttttggggaagnggnaggtacttggccaggccttagtnaagaggacctgaagaggctnctncaaacttagtttgtttt

SEQ ID NO: 393178 - DNA, 1000 bp, Homo Sapiens; identical to SEQ ID NO: 201556

SEQ ID NO: 393179 - DNA, 1000 bp, Homo Sapiens
aaacctatcatgtcagccagcgggcccacacgtcggaccccggttggccaatcacaacaggggggcgtggccttaccttctcctgctcgccctcagccgcggagcctctgcggaggctgagccccgcgaccggagcgccgctctccgcttctccacccagctaacttctgctcgtctttcagagcattgtctcctccagggacttgcctggccctcctccccctccgcccccaatgggttcggtctcctttgcgctttcgcagcccagtgtttgccgcggttcccgcacggtcaggccccaggactggcttgcgagccccggggggcgggtcgtgtcgtgtccttttctctctggctaggcaggtgtgccgcaaatatttgacgaatagatggatggcagacattaactgcgtgcctggccctatgagggcggcggcgggacagggtgagcggagagacagaactgtccccgccccaccccgccacccattcctagggttcctagtcccgggaaggcaactacccaaagacgcctgggttgtcaggctcaatccttgagcctcaaccaaggagcagaggggtgcgggtaaacgaggagtggggcgaggaaagcgggatgggaacaagtggcctgtccccgcacggcccgcggctcagcctcggccgtctgccctgcactaccaaggccgaccactagaggtcagcgtcgcgccgcactcttcacccgcatgcccagagggcggccgggatgtggagggtgaacgctgtgggcagctcgggggctgaaagctgggaagagaaatctgaagaacagccccatctctttcgcctgcacacttggaactcagcaagaagggactgtttctaggtgggctgggcgcgagcagggactgtcccgagctggtataggtgagaatggagttggggggggacactaggtctccggggttcacccacctggagctggaattatcacttccgaaataaagcgcgtgtcctt

SEQ ID NO: 393180 - DNA, 1000 bp, Homo Sapiens
cccttacccacaaaaagcaaccccggaagctggcctgctctaaatcagacctgctggaagccaaattgctctctagtaactatccaggaagctaaataataacttctgtaacaattgactcaaaatgttcaggactggattaataactgatggcttccctaatttttgtccccgattccaacttaggacccaccagagaaagccaaatatggtcccctgaccaagcacacaggatgttcgcttctagtgagccgcctccagcttccccgcattgataacctccaatcagggcacacctgaagccttcgcctttttccactataaagctctcccactcgtctgcccacctttgagtctctgccaaattgcaaatgatggtgtctgactcccttgctgtagcaagctctgcataatagcttgtgcttattctctttgggtaggtcttcatttcttttcacaccagataggcatcatctttgaaaacatctttactgggtctcttgtctccctcctgcagccactgatctaaatcacagacttttttagaaagagggaaaatagtaaagaaagaaagcgattgagttgatgctcccagccactgtctgtaccctgaattttgtttttctgccatatgtcaggtggcctctcctggaccatcgtcactgtttctcctgcttccctgcagctgcagacacaggagcactgtgtaggtctggccttgagcacccacccacccagtacagagccagcccctgctgttctgaatcagtgcagtgaccacttagaacacagtgcccatgcctctgtgatctgaactgctctttccagttccatacaatgttaagaacccacttaagaatgttttaatcattcagtagtttttcgtggtatataataaaaaagtgatttaaatacaatctattttattttagattatatcattaggggttattttacaaagttacctttaaatactattgtaaataaaattaataacaaa

SEQ ID NO: 393181 - DNA, 1000 bp, Homo Sapiens
cgctggcgcgggggtggagatttgtatgtgcgaagtcgggaagagggggaaccacctctcgaaaaccccggtcgtcgccctcccaggccgggagagtcggccccgcgcgcccccaaaagctccccagcggccggccctctctacgtcatccgcaccctcccgcccgctcctgaactttaaaccacactcggaagaacaacctggaggagggggatttctcaggagccagcggccttctcacgctgctagccgtcacctcccggctcccgccgttccctgcgctcccgaagcccaccccaagctcccgctccctcgaccccctcccaagccagccgccgcagcagcgccgggggcgtatgcgtgggggccggcggggagcgtgcgcgggacaggcaggggcggggcgctgggggcggtcgcgcgcgcggcggccgcgaggtcgcccgcccacgcctccgggtgagggttgctgcgtcgggcctacgtcagccgcgggaaattcccctcccgccaggctgctccgctctcggctgggccagcactcggctctcccccgtccgccccctgcccctggctcccgtacggtggacggcgacgctgggtgacccggggtgcaagaattcaggggttgggaaggtgtgagccgcaaacccagcggagggcgggaagaaggaggaggcctctagggtggtcgggggactgggggccccgccggcagaggtccctcggcctcctgactgactgactgcggccgcctccggccaggacgctgggagctgcctgcgggaaggtgcggggagcggagccatggcctccggtgagtgttcatggggcgcgggcctgggccgggggaaaggagctcttctgaagggggtcctgccgcagtgagtttagggagctcagtttttgctggggcgcgttctgtctttaaaatctcatatggtaaaattgtcagcttttaaaaaagttacctgcttcagggtttgcgtgcagaagagtc

SEQ ID NO: 393182 - DNA, 1000 bp, Homo Sapiens
ggagccacctgacttctgctgtcccaagtgccagtatcaggcccctgatatggacaccctgcagatacatgtcatggagtgcattgagtagggccggccagtgcaaggccactgcctgccgaggacgtgcccgggaccgtgcagtctgcgctttcctctcccgcctgcctagcccaggatgaagggctgggtggccacaactgggatgccacctggagccccacccaggagctggccgcggcaccttacgcttcagctgttgatccgctggtcccctcttttggggtagatgcggccccgatcaggcctgactcgctgctctttttgttcccttctgtctgctcgaaccacttgcctcgggctaatccctccctcttcctccacccggcactggggaagtcaagaatggggcctggggctctcagggagaactgcttcccctggcagagctgggtggcagctcttcctcccaccggacaccgacccgcccgctgctgtgccctgggagtgctgccctcttaccatgcacacgggtgctctccttttgggctgcatgctattccattttgcagccagaccgatgtgtatttaaccagtcactattgatggacatttgggttgtttcccatctttttgttaccataaataatggcatagtaaaaatccttgtgcattagtcgtgcgtatctttggcatagattctgagaagtgacaccactgagcatgggcgatggcgtagatggtacctgagcccccttcctccttggagcttggtttcccatctctccccaccccctatttccctagccttgccaaggaggaggtgggaaagcccgtttgggtttttgtcattcgctaggccatgcagttctctgttaagagtgagcttaaacatctttcctgaggctttaaggaccttttttagttctgcttctgaatgggctgctcatatcatatatatatatgtatatgtatagttgtgtatatgtatgtgtgtgtg

SEQ ID NO: 393183 - DNA, 1000 bp, Homo Sapiens
tgggggtttggggcatttcacaggtttctgagtctaagaccctggatggtgcccactggaggatataccccaccactggggccctcctgctgctcactgcccttcagctctgtgaccaggtaaggctccactgcagctgcagaaatacctggagaaacagctcctgggctattcctgggcctgttcagcataggacagtgcatgggctgggtgccacatctgctgggaaagagggtgggcatgagtatgggtgcatgcagttatgcgtgcgtatccagggacctgcacccagacccctaggacggagccagggaaaagaacccccacccctcaacacagaattagccatgagaagaagcctgggcaacagcaactacaggccgtgtttctcctccaaccgtgatgtaggtgagtgcttatggcttcatcactgagggccatgagcgcttttctgatcactactatgatacatcatggaagcggctgatcttttacataaaccatgacttcaagctggagagagaagtctggaagcggctacacgatgaagggataatccggctgtaccagcgtcctggtcccggaactgccaaagccaagaactgaccggggccagggctgccatggtctccttgcctgctcgagggcacaatcaagcttatcgatacgtcgacctcgagggggggccggtaccaattcgcctatagtgagtcgtattacgcgcctccaaggcacaggatacagtgggaatcttgagactctttggccatttcccatggctcagactaagctccaagcccttcaggagttccaagggaacacttgaaccatggacaagactctctcaagatggcaaatggctaattgaggttctgaagttcttcagtacattgctgtaggtcctgaggccagggatttttaattaaatggggtgatgggtggccaataccacaattcctgctgaaaaacactcttccagtccaaaagcttcttgatacag

SEQ ID NO: 393184 - DNA, 1000 bp, Homo Sapiens; identical to SEQ ID NO: 283460

SEQ ID NO: 393185 - DNA, 1000 bp, Homo Sapiens
attcataattttgtatatttttcttaaagagggctcctcaaattataaaaccttcagttcccacaaggtctacacatccaaccttggctccatcatttattttctgtgtgatcttggggaagtcacttgtgctttctgagccagtttcctcttctataaaatgtgaatgacaatttggacaggtgaggattcagaaatcctcatgaccttattccatttttgaaaccattagtagacgaagacactcaaacaaaaattagaccagaatataaagattggaaaagatgtaatatacaagcaataatggtgagcaatgaatccagtaaaacctaaatctaagttaatggaaatgatgtggttgttgcaaacctctaatgcagtttatgaagaaagaatttttgtaatagaagagacattatgcaagaacaaatttaataataagctgtatctataattccagactttttttccctgcaaaacctgggaaacaagagggatgaaggaatataaacatcctaaaagcctcatattgttgaaggagactttgaaattcttggcgttgatagatacatgctcagatatttattaaacatttacagataccaaccagcaaaataaaaagggaattggaacttctgtacctcccttttcttttatcatgtgggaaagtctcaaagccctggcactgggagctgctcagaaggcaagggccacatgtgcccccagcttccccccacccccagcacagggccaggaagccactgctggtggctccctgtctgctgcctcccgagcagtaggtcccagcgaggtggggtggtaataggttgggctgggagcagattagcaaaccctctcctccccgcaaggaaataaccaggccagataagactagccataaaacaaaacaagggctgctgtcacttggctctctggctggagcttgaggacgcaaggagggtttgtcactggcagactcgagactgtaggcactgccatg

SEQ ID NO: 393186 - DNA, 1000 bp, Homo Sapiens; identical to SEQ ID NO: 283461

SEQ ID NO: 393187 - DNA, 1000 bp, Homo Sapiens
gtgtgttgatggcggcaggctaacccagccaacggggtgccactgccgggcaaggtgaggagcaagaagatttccagggctgggaggtagagggccaggatcccaaggagagggcttactgcgaggagcagcccaggatggataaggagttgaggccccagggatgctgagcctgcacaagtggaagtgactggctaccagactctgaaaaacctaagtcctttagggaagaccacaaaagcatccaaccacagtctgcgctgcagcccggcagaactaagtcttgggcgccgcgacgcctttcctacggaataggtcctggaaggaagaccatttaagtctttccccccaggactggcgaggagagcacgccttcccttccgaaggtgcgttaccagattgctgccgtttttgtgctgggtcatcagagcagattcccctccaggttacagattaaacttaactctacccgtgctgaaaatggccggagcacgccgcctcgcctcccctccccaaggctgccggagccgccggcccctgcctccttttcgacgactgatcgtccaaggactggcgccggatccaacacctttccccagctctgcgcgtaccgcgctctttgggaacgaattggtccctgtctgcttccaagggtccctggaaccttctgcagctgtgcctctccagagctccgcctcattagtgccacgttcctggtttgaaaaccatagtacttcaacctcttctagatgggagttaacctttgccctctgaaagaaaggtttgataagcaaagagagtttggtgagcaagatccttgaggtaagagctgatctctgacgtccgctgggaactggccgctctgcaggtttctgtatcacattttctgcacatgtccattagaattggagatggggcgtatctagtgttgaataaaggcccggcagcctcccagatgcaccctgtctaaaaaaaaaaaaaaaaaaaaaaaaaaaaaaaa

SEQ ID NO: 393188 - DNA, 1000 bp, Homo Sapiens
  misc_feature (917)..(917): n is a, c, g, or t
  misc_feature (923)..(923): n is a, c, g, or t
ccgccttggcctcccaaagtgctgggattatagatgtgagccactgcacccggcctcgcccacctgacttctatacccagccagagcctcgaggctctagcccctccctcagggcccctcagctgagcccttgcccacgcctgtagctggaggaggcccagaagcagcggcatgaccgtcttgtggctgggcagcagcaggtcctgcaacagctggcagaagaggagcccaaggtgaggccatgggcgaacaggtgggcagacggtgtgcaaggcagccaggcctcgcctgtgatgcccatccttctcccacagctgctggcccagctggcccaggagtgtcaggagcagcgggcgaggctcccccaggagatccgccggagcctgctgggcgagatgccggaggggctgggggacgggcctctggtggcctgtgccagcaacggtcacgcacccgggagcagcgggcacctgtcgggcgctgactcggagagccaggaggagaacacgcagctctgaactggctgagcgaggtggccacagggccagggcgggcgctgggtggagggcaggaggcaatgacactaatgctttttttttttttttttaactttttatctagaaattttatttttttaaacccggggcaagtacctcagctaactcccttcatcctcctggggcccctccttcctgccctcagtcttaggttagggccttggtcagggctttgctccctgtgacacccacaccctcgagctagcagcgtctcctcccttccccgggagagctggctggagacttggagctccgggaagtaggagtcacatttttttctctattctttggggattttttttacatgaataaaagtggatttcagggcaccctgtgtgcagtgtgatttggggtgacagnactctnggccctaagtttcctcatctataaaatggactttgggcatttggtggggttgaggtcacgcctccagccacgggctg

SEQ ID NO: 393189 - DNA, 1000 bp, Homo Sapiens; identical to SEQ ID NO: 283463

SEQ ID NO: 393190 - DNA, 1000 bp, Homo Sapiens
  misc_feature (902)..(902): n is a, c, g, or t
  misc_feature (973)..(973): n is a, c, g, or t
ataattccctctgtctgaattcatggaactttgactgccaaggttatattttcacactgattacctattatctttctttctttctttctttcttttttgccttgaagctgttgcacactgctaaatcccaagaactatcttacactgtagaaggactgaaaccttataggatatatgagtttactattactctctgcaattcagttggttgtgtgaccagtgcttcgggagcaggacaaactttagcagcaggtaagcaagttttaatggatatgaaaaatctgttgcctatcaagaaaaaaaacttataatattcaacaccttctctacttgagactttatatttgtcttctcctccctcactaactctgattgcttcttacctcaacagttttaaacaacaacaaccaaaacgtaacttaaagaggtacctaggagctacgagttacagctgtgtcataataagaaatataattagtggtagagtgactccactctacaactagaaatatatagaatatacaactagaaacatatacaaatatatagaactagaaatacatagaaatgtaattagttgtagcgtgactccagggcttaactaccaacctgtgtcctagcagtgtcctgacaattgtgagaaacaatcaggaagcttcttatgaggacgttaggatacttcttccctcagtccagacattttttgtaggcttggctctactcactcctgatccatgggaacatctagaaattactgtgtggcctggtgttatatttggctttcatgaaataggtaaatgtttatctattgttttattaagaagaagctcttaagttaataaaatttaaataaaagaattggtattaaagtataatctgagtagaaatgggttggataattngtgcttgcttcattcaggactaactggatcattccaacccggatacatgtattagtaaggacttattaaancccaatatttagccttaatataatttc

SEQ ID NO: 393191 - DNA, 1000 bp, Homo Sapiens; identical to SEQ ID NO: 115055

SEQ ID NO: 393192 - DNA, 1000 bp, Homo Sapiens; identical to SEQ ID NO: 283466

SEQ ID NO: 393193 - DNA, 1000 bp, Homo Sapiens; identical to SEQ ID NO: 115056

SEQ ID NO: 393194 - DNA, 1000 bp, Homo Sapiens; identical to SEQ ID NO: 283468

SEQ ID NO: 393195 - DNA, 1000 bp, Homo Sapiens; identical to SEQ ID NO: 206016

SEQ ID NO: 393196 - DNA, 1000 bp, Homo Sapiens; identical to SEQ ID NO: 283470

SEQ ID NO: 393197 - DNA, 1000 bp, Homo Sapiens; identical to SEQ ID NO: 283471

SEQ ID NO: 393198 - DNA, 1000 bp, Homo Sapiens
gatttatgagaaacaaaaattaaattgtagtcaacagttagtagtttttctcatatccaagtataacaaacagaaaagtttcattattgtaacccacttttttcataccacattattgaatattgttacaattgttttgaaaataaagccattttctttgggcttttataagttatatattttactatttttatcttatacattcactttgctcacatccaagactcaatttaagaagactgaggctataattaatttgccataagtgtccagtctatgtttctagcagtgaccacaaggatcttcttttgtaagactcttaaactgccttcgaagttttgagacagtgtaaagcattgctcctcaaagtgtggcccagggacagatggtgctgcatcacctggagcctgttaaaaaacacagatctcaggggccactcaaaactattcaagtcaaattgtaagttctacagcatccccaggtgattcatattgcattgaagttgagaagcactgctctaaagcttaccttttgaaataaaatgtgtgcttggaatagagagggaaaaaaaatcagccaaactgctgcaacatgcaaaagcagagtcatctgcacagtttaaaaaaaatcataataagcaggaaggtttaaatatttttaaagagtaaatatgctgaaataaatatgctgtaagttataaagtaagtacacgttgggctcacagactgccatcgctgtacagatggcagagtaatgcaaagacagggtggaaagtgtgtgtgtgctgccataaatagcgatgcaccagcatctccattcatgtctgcggcgctctctcacatgcctccctgcccatcgcagttgtgctgagccgtctcaggagggcagctcactgcagcacaaccatcaataagtgtgtctgctatatatctcacattaaaatacaatcttggagagctgaatgtgggaattgcagctacttgggaggctgaggcaggga

SEQ ID NO: 393199 - DNA, 933 bp, Homo Sapiens
tctgagcaagcatccctgaggtcaggggcgcgcgtgtgcgctccggagagggtgggagcggcctggagtgtggatgcacagggtgtgcgcgccctgagtgcctagcggcccttggccggccaggcggctggacctggtaggccgggtgcagagccccgggtaccctcctgccccctgcggcgctcccgcccccgtcgccaccccctgcccccccgcaaagtgatgtcgaaataaaaagccgcgttgcggccggtgggggagagagaggcagcgtgagcgccaggaaggtagcgaggccagcgtcgccccgggactcgctgctcaagtctgtctattgcctgccgccacatccatcctagcagggccccgtcgcccaccaggcggacaaaagcggtccgctgaacaccatgcggccgctcggcgtgccgcccaggctctgctggtgagcgccgccaccccgcgcccaggtcccgcgagcccgcctgccgcgcacctcgccctgctcccagctctactccaggccccgtccgcccgggggcgccgcccaccgcgcctcgctcggtgagtttcttccacttccaccttccctgggcccggcccttcccgcccccggcccggcccgcctggcacccgaatcgcttggtccgtttgccctgtggcccctacctttggggctcgccttggccctgccagagaccggaaaccctggttatagggactttaaccagagggagtatttggttacctgggcacagcaggcccgcctcgggcctcttgtcttcccatttctcggagccacaggccacgagaccctggcattcccagagcctcgcaaagcacccccgcctcccggcccccgaactggggcctttgtctcggccgcccccaatccccaggccaccgcggcggatgcgtccgagccgggccgccgag

SEQ ID NO: 393200 - DNA, 1000 bp, Homo Sapiens
ctcctgagtagctgggactacaggcgtgtgccaccatgcccggctaatttgcgtatttttagtagagaccggttttcatcatattggccaggctggtcttcaactcctgacctcaagtgattctcccaccttagcctcccaaagtgctgggattacaggcatgagctactgcacttggccttttctcctggttttaaaactattatatgctcattacaaaatatttggtcaatgaagaaaagaatatggaagaaaatcaaatgcatgcatacttctaccactcagagatatcctctgctaacattttgattgattttcttccaatctttttttttttttttctttttgagacagggtctcactctgctgcccaggctggagtacagtggcatgaccacaacacatcacagcctcaagtgaccttcccacttcagccttcccagtagctgggactacaggtgcacgccaccatgttcacctaattttttactttttgtagagatgagacttcaccatgttgctcaggctggtcttgaattcctaggcttaagtgatcttcccgctttggcctcccaaagtgctgggattataggtatgagccactgcatgtggcctattttcttccactgttgttcggcgtggagaatattatatacataattacgtaaatgatatcatactgtatataccttttttcctactccttccttaagttatatcataatgagactaccaattattagactttttttcttttttttgagacggagtctcggtctgtcacctaggctggagtgcaatggcgcgatctcagctcgctgcaacctctgcctcccaggttcaagcaattctgcctcagcctcccgagtagctgggactacagacacgtgccaccatgcccagctaacttttttatttttttattagagacagggttccaccatgctagcaggatggtctcaatctctcgacttcgtgatccgttgacctgcaggtcgac

SEQ ID NO: 393201 - DNA, 1000 bp, Homo Sapiens
gattacataatcagaagtgaaacactctttagaaaacacgaaagaattgaaagtgtaacaaataatctcttggactacagtccaatcaacttagaaatccagactaagaaatttactcaaaaccatacaattacattgaacgacttttgggcaaataatgactactcctgaatgacttttgggcaaataatgaaattaagacagaaatcaagaagatctttgaaactaatgagaacaaagatacaacatgccaaaatctctaggataaacccaagcagtgttaagaggaaaatgtataggactaaatgcccgcattggaaagctagaaaaatctcaaattaacaacctgaaaatcacaactaaaagaacagagaaccaagagcaaaaaaaattccaaagctagcagaagcaagaaataatgaaaatcagagatgaactgaaagagatacagacacaataaaaaacattcaaacgaaaaatgaatcaagaatctgggtatttttttgaaacaaattaacaaaatagaattctagctacaataataaagaaaaaagagagaagattcaaataaacacaatcagaaatgacaaggaggagattagcacagacttgacagaaataaaaacaaccatcagagaatattatgaacacctctatgcacaagaactacaaaatgtagaataaatggttcctggaattatataccctccaaagactaaacccagaagaaattgaattgctgaacagaccaataacaagttctaaaattgaagctgtaataaatagcctaccacccaaacaaagcctaggaccagatagattcacagctaaatggtgccaggcataaaaaagaagacctggtattatttctactaaacctatttcaaagaattgtggaaaagggactcctccctaagtcattttatgaggccagcatcatcctaacaccaaaacctggcagagatgtaacaaaaaatgaaaacttcaagccaataggcct

SEQ ID NO: 393202 - DNA, 1000 bp, Homo Sapiens; identical to SEQ ID NO: 283472

SEQ ID NO: 393203 - DNA, 1000 bp, Homo Sapiens
ctggttttcacactgaaagttccgtatcctaataagcctctcatcctcagcaacggaggacagttgcccactcaaagccttgtgacattctagggtatcctatttctacatggtgggaatctagaagacggagaaagaatttctcattcccgaaggagcatggattatccttggttgtagtgtttatgttccacatcacgtggattcccgaaggagcatggattatccttggttgtagtggttatgtccacatcacatgggatattttatttttcaggcctcttcatgtgcttgtgtgcaacgcagcaacttttgctctaccctggagtctcaccaaagatggcctggagaccacctttcaagtgaatcatctggggcacttctaccttgtccagctcctccaggatgttttgtgccgctcagctcctgcccgtgtcattgtggtctcctcagagtcccatcggtgggtttgaattgcatatttgttcacttatcccctttctcataccagctaatattcccccaaggctctcattctgaaaataattttcattagtcctgcttgagacatgtgggtggactcagcttggctcacttaatttttccaggtcttttttgttcgcctgcgattgtgggggactgtttagaaggactttctagagcaaggaagattgcctttacgactatacttcaagctcctcattgattttcgcttacagatggaataataacttcatgaaaaactcaatggcatgaacctattattggatttgtaattcaacaacttcaacatcttaccaagaagaatgtgcagttattctagcaggagaaacaatgcaattagagcctgcgagatgaaatcaaattgttttataatgagaaattagggaattcgaggcagacattagctgtgtaattgtggaaagggaagaactgtagttagagcatattagaaatctggccgtgcctcttttggttaaaatttcaattaaaacatcag

SEQ ID NO: 393204 - DNA, 1000 bp, Homo Sapiens; identical to SEQ ID NO: 115058
  misc_feature (649)..(649): n is a, c, g, or t

SEQ ID NO: 393205 - DNA, 781 bp, Homo Sapiens
  misc_feature (112)..(112): n is a, c, g, or t
ccttctataaatccaaacaaacctctttttaaaaaagaaccaaatgccctttcaactgaagaatgtgatgtgggtctcttgaactctagaatcctctgatccttctgaattntccatcatccagctcacctcatttatgtttctgccgctcacacaggttcacattcagaatgccacccttgctggaggagttgctgtgggcacttgtgcggatatggcaattcacccatttggttctatgattattgggagcattgcaggaatggtctctgtgcttggatacaagttcctgactgtaagtacagcagatgttctgagtcaaactctgaatctgcaccttttttctcacatgtcccaccagcagaaaaaaagctactaagttttattttataaacatttttatttggagaccatttgccttctttttggaaataccactcccatttcagtggttcagtggttctactctgccctgacttctgtgtaacaggaaagaatccagtatcaattatttataatttagtttgaattaaatgttaagtacatggccattactttcctttgggactgctccattgaagttgttgttgttatttgtcttatgtaattaaggactctgctcttttaagagatttaggatgtcggccaagcatggtggctcacagctataatcccagcactttgggagctgaggcaggcacatcacctgaggtcaggagttcagaacagcctggacacatggtgaaccccccgtctctactaaaaaaaaaataccaaaatt

SEQ ID NO: 393206 - DNA, 1000 bp, Homo Sapiens
tttagcaagctttccatgcacccacatgttgttttatgccttacctgtccttttcctttttttcccttaggatactttttcttatttagaaactctcaccatgcctaccgtccttcacatttcctatccccaaagcactttttgaatgttttcttagtttaattttgtacaagggagaattaaggcccacttttggcacattgaacctagttcatgtcctgcatgccctgcagctcccctctgccctccaatccattttctttatactggtgctttcgccttcctgttagtcattgctatttcatcatagcctccttttatccttcctacttcatttcttttcttccctcaagtttacgttgtttgttttttaattattttagaccaagatcactccatggatgaaatgacagctgtggtgaaaattgaaaaaggagttggtggcaataatgggggcaatggtaatggtggtggtgccttttcacaggctcgaagtagcagcacaggcagtagcagcagcactggaggaggagggcaggtaagtgataatcatagagtggggaaggtgttgagaagatgtaaatattcttagataattgccttactcttcacagaaagcctttttagggagagactaaaccattttatagataaggaagtaagagaatggagatccccaaagacaaaggagtttcagcaatacagataggtcagctttttgtttctgttttttgctccttgtctgcactacgttgctgtttatttgttgtatactgccccctaggctggcagctgggtgtctctaactcctttcctcccccttattttcggccaggagtcccagccatcccctttggctctgctggcagcaacttgcagcagaattgagtcacccaatgagaacagcaacaactcccagggcccgagtcagtcagggggaacaggtgagcttgacctcacagccacacaactttcacagggtgccaatggctggcagatc

SEQ ID NO: 393207 - DNA, 1000 bp, Homo Sapiens
cagaaaggcaggtctacggtggcatatgggatttcctggtacttcttctttaatagaaactatcttcacagatcatgacatcaggtcagctgcagttctcactgggaccaataaacaatagaagcamcaaccataaagacttaagaggacaaaggaaaccaaacctcactgtgtgtcttcaagatctgttcacatagttgcaggaagttgctgtagacaaagtacattactaaagaatgaagcccacccaggacatcacagcaacgaaagaactatttctggtaactgtggaccaggtgagagccacactgtagaacagcagtgctgccctctcttctttggcgaatgttatgaagacattctgatgcacttaggatcatgattcatgttaaatgtaaattaattgtaaaaataatacatcttgctccaaaatgtggtgacaatttagaagctgtccacatagccagaccactctgtaaatcacagaacctagaaagtaaaaatgtgccataattaggacagcagaaagtaacagtaaaataaagttttaaaaaaaaaaacagaaaataaggatttatctatttgtatttgcttaagaagaggttacctataggatgcagggggaatgggattgatgggcatggggtatactgtgaaaggaaaataaaatcttgggaccaaattcactaagcgaaaaggaaaagttaagcttgggaattgagtcatggaatatgcaaaaaacttccttttgttcctaaacagataaggtacaagacaaaaggccacaaatctctccaggtggtttccctcacctgacaatataaattaacagcttatcttcataggtaagggacaaagacaacaccagaaaccatccctcaccagccgagacaaaacatagatgtactgagctgaaagcaaaactgttcctctgcctgctgctttcactgtaacatatagatttggtgagcagtaaatgtagatttactgagctgaatgc

SEQ ID NO: 393208 - DNA, 1000 bp, Homo Sapiens
gggatcatgccattgtactccagcctgggtgacaagagcaagactcggtctcaaaataaataaacaaataaattaataataataattgtgccaggtatggtggctcatgcttgtaattccagcactttcacaggctgaggtgggaggatcacttgagcccaggagttcaagaccagcctgggcaacaatgtaagacctcatctctatttttatttaaaaaaaaagaaaaaaagaagaaaagggaaaacattgggagatatgcatagaaaagagtgcagaaaatatatgaacagcttaaatattcacaaatgaacaaccatgaaaccaccactcgggtcaaaaatcttgagagctcccaaaaatccagatagaactctttctcacagcctagagccatctggtggtgtctgctgtggtagaaggaaatgagtggtgtgtccaaattgaagtgtgacgcaaagggcatttgggaaagttttcattaaagcaaaggcttaacataacttgttttagggaaagatgagtgtggagggggtagttattacaaggatatagtcactcttctagtggtgcaggccaggtgggcccaaaactggagcttagccagggagggttcctggctttgtccaggaaataattcaagggcaacccagtggtgttagtgacttttcttgaaacagtactgcacagtagcagaggtactgctctttgcagagcagggctaccccataggcattgagcacaaagtagcagctcagggccagttctgtagtcatatttagtcccattttcaattacatgcaaattaaggggtgggttattcagaaatttctagaaaagggctgataaattttgggtgttgtcatggcagtggcaaactgtcatggtgctggtgtgcacgtcttatggagatgtgcttttggtgccttttccctgttccagctgtcttcaatctagtccagagttaaaccccgcctcctccttcactaggatctttaga

SEQ ID NO: 393209 - DNA, 1000 bp, Homo Sapiens; identical to SEQ ID NO: 283476

SEQ ID NO: 393210 - DNA, 1000 bp, Homo Sapiens
agcgaggccccgtgccgcgccagaagccaccctgagaaaggggcaccgggacaccgaggggttcccactttctcctcagcctgtgacgcccgcgtcctcgggtgggttcgaggggcgcctgggcacggccagccgaggctctcgagagccccagtgtcgttttccacctcaggcctcctttcctgaggcagagcccgggacctcgcgctctcgcctcaggctccggcccacgctcccgcccggccgccaggcgcgcaacggaaagcgcccccgccccgccccgctccgcccactgcgtgacgcgcacccggccgagccaatcagagctcgtggcgcgcgccccacacgccggccccctccgcccctcagcttaagaaagggcgcgcggacccggcaggccagagtgccgagcagcgcggtgggtgcggctgtgagacggcaggagacttctgccccgcggtgcacgcgaccctcgagacgacagcgcggctactgccagcagcgaaggcgcctcccgcggagcgccccgacggcgcccgctcgcccatgccgagctgagcgcggcagcggcggcgggatgctggcgctgctggccgccagcgtggcgctcgccgtggccgctggggcccaggacagcccggcgcccggtagccgcttcgtgtgcacggcactgcccccagaggcggtgcacgccggctgcccgctgcccgcgatgcccatgcagggcggcgcgcagagtcccgaggaggagctgagggccgcggtgctgcagctgcgcgagaccgtcgtgcagcagaaggagacgctggccagcgcgagggccatccgcgagctcacgggcaagctagcgcgctgcgaggggctggcgggcggcaaggcgcgcggcgcgggggccacgggcaaggacactatgggcgacctgccgcgggaccccggccacgtcgtggagcagctcagccgctcgctgcagaccctcaaggaccgcctggagagcctcgag

SEQ ID NO: 393211 - DNA, 1000 bp, Homo Sapiens
gtttgtcgttttaaaatcaaatccttagaggaattattcttgattccttaaggcaagtcagtctctctcttcatttgatgtagttgataagttgaatttcagaacgatttgttagaaatgagctttgtgacaagaacatacagagcattgaatgaatgaagactttgttaacatagaaccaaatactggaatacatgttttattgcccttttatgtagtagtcctaacaaatagcttcaggagcatgctgaagaataaggaaataggccgggcgcagtggctcacgcctgtaatcccagcactttgggaggccgaggcgggcggatcacctgaggtccggagttcgagacgagcctgaccaacatggagaaaccctgtctctactaaaaatacaaaattagccaggcatggtggtgcatgcctgtaatcctagctactccggaggctgaggcaggagaatcgcttgaaccttggaggcggaggttgctgtgagccgagatcgcgccattgcactctagcctgggcaacaagagcgaaactctgtctcaaaaataaataaataaataaataaataataaagatggtctaagggataattgagttggaggaatctaaactgaggagcagaataaatagtcaaaggagtgtaggtttagatgacaggcagaattagacagtggctttattgcagaaaatttaaaacatgtagaagagtggagggaagagtttaatgaccctccagtcatagatgtgccacagttgtcagtgttttaccagtttggtttcatcaccccacaccctccagctttttaaattactttttttttttttttttttttgagacagaatctcactctgtcgcccaggttggagtgcagtggcacaatctcggctcacttgcaacctccgcctcctgggttcaagcagttctcctgcttcagcctcctgagtagctgggattacaggttcccgccaccatgcccagctagtttttgaattc

SEQ ID NO: 393212 - DNA, 1000 bp, Homo Sapiens
gctgagactttgatgacttaagtaacttgcctaaagtgacacagctggctgagccaggattcacactcgaatctgctgaccccaaactttgaataacactctctccattgagttttaagatacctttcaaagttctccctcattcttatgtccaacattattgaaaagattaagcctttggagcccactacttctcagtgggattaactgcagagtaaactaaaaggtttgttccaacaattatttcctatgaatgataaaggtcctgatagttttgaaattgtgactgtttttcttgaatgcctgaaactttttggaattatgtgattttatttttcacagtaagacctatacccaccggcgcctgaagttcctctcctcgaagttccaggtccatcagatgcttaacgagatggacgagttaaaggagctgaaaaacaacccccaccgagatttttataactgcaggaaggtaaacattttagttgctcaggggtaattcctgggcaaaaacaattcaattatttattgagaagcacaagaaaagagtgtgtttctgattaatctaagatttctacaggttcagtggattttagtaaaaacagataatagattatgtccaatgggttagggttaagtgccatttctatcgttttccccatagaaaggtttgccacatttttggcacaaaaaattatagttatcctcaacaacgaaaatagcaacaacaacaaaacatcaaaaatgaccattctagaatttgaaagatcttccttctagtcctttttctttgaattcctgactgtaagaccttggaggaagggatgacatattttcatttcagtgtcttcatttgtcaaattgggaactacacctgcacaatccagttcacgtgaggattgtgaatatcaaatgagctagcctagagattgtgaaatccaataaactagacacacttccaagatgtattctgaccattaaaatgattacaaggaagtgg

SEQ ID NO: 393213 - DNA, 1000 bp, Homo Sapiens
ctcctggtgcgcccgagcctcccggcccctttccgtgcagcgagtgccgcgagagcttcgcgcggcgcgccgtgctgctggagcaccaggcggtacacacgggcgacaagtcctttggctgcgtcgagtgcggcgagcgcttcggccgccgctcagtgctgctgcagcaccggcgcgtgcacagtggcgagcggcccttcgcctgtgccgagtgcggccagagcttccggcagcgctccaacctgacgcagcaccggcgcatccacaccggggagcggcccttcgcctgcgccgagtgtggcaaggccttccgccagcggcctacgctcacgcagcatctccgcgtacacacgggcgagaaaccctttgcctgccccgagtgtggccagcgcttcagccagcgcctcaagctcacgcgtcatcagaggacacacaccggcgaaaagccctaccactgcggtgagtgcggcctgggcttcacgcaggtctcgcggctcaccgagcaccagcgcatccacacgggcgaacggcccttcgcctgccccgagtgcggccagagctttcggcagcacgccaacctcacccagcaccggcgcatccacacgggtgaacggccctacgcatgccctgagtgtggcaaggccttccgccagcggcccacgctcacgcagcatctgcgcacccaccgacgagagaagcccttcgcctgccaggactgtggccgccgcttccaccagagcaccaagctcattcagcaccagcgcgtccacagcgccgagtagctccagccgggacgcactgtgtccgccatggtcagaacacctacctcccctggttattgtgaggctggcgattacataagtataagcaggtccgcccagggcttggctactgtaggtgtccaataaacagtagatggaactgggtctcaccactcagtgcctcctacctgtgcgtcttatcccaccttcagccccgagtgctggctgtgtgctccttg

SEQ ID NO: 393214 - DNA, 1000 bp, Homo Sapiens; identical to SEQ ID NO: 283480

SEQ ID NO: 393215 - DNA, 1000 bp, Homo Sapiens
cccaggttacatgtggagcttttcctcagacaaagcctctttagataggttcccccagataaaggtgggccatgccaagagtcggacagaaatccaggaaaactcagggcctcagcatgtgcactttccagaaacacaaggctgaacctcactcccgggtgaaggaggcagctttttgagggttgctcagtggccttgggaaatctgtatcagcgtccagtggtaggaaaggctccacaggtggcaatcccactgcaatggctaccactcccgagagtcccctagagtccgtcccaggggtgctggcatgaagtcagatgctctgttatcttcttgatcctctccctcttcccccttttctcttcctctctgctgtcatctctgctcttctcccacttcttcatttttatagtactattggtattattattaagacactgaaatacctctcatctagccatagagcaggcatttgatcttgattgaatgaatgagtgacagaatgaaggaacaacaggcctgctcaatgcaaccttctctggggactgtgtaccctgagccattatgacacagaatcagtccaaacaaggtgttaatcatattagctgtgagtgcttcgcagagtctgaagggcaaagaactccacaggtcagtttttattgtggtggagggaagagggggtagcagaaaggtccacagagaggaatttctcatccctccaccttttgtcttagttttgctgagagcagacctcatctgtgggtggcactagagttaacccagtctctctaaatgaaagagttgtacacgtatggccagggagttctgaggagcctgcccttcccctgcctcgtccttgtgaaacagggatctctccagcagaaaggcaaattctgcatgctcaggcagggtgaggcagtcaatgccggccagctttcagaagacccttatgccagagaggcccagtctttgagttgtaccctcctcgtcccatttgaaa

SEQ ID NO: 393216 - DNA, 1000 bp, Homo Sapiens; identical to SEQ ID NO: 201666

SEQ ID NO: 393217 - DNA, 1000 bp, Homo Sapiens
gcctgtggagaaccagttataataaacacgacaggcatcctgggagtgagctcagggcatttgggaagtgcagaaggacatgcacccccgctggaggggtgcacctttgaagtcagctggaccaaggaaaggccctgccctgaaggctggtcacttgcagaggtaaactcccctctttgacttctggccagggtttgtgctgagctggctgcagccgctctcagcctcgctccgggcacgtcgggcagcctcgggccctcctgcctgcaggatcatgcccaccaccgtggacgatgtcctggagcatggaggggagtttcactttttccagaagcaaatgtttttcctcttggctctgctctcggctaccttcgcgcccatctacgtgggcatcgtcttcctgggcttcacccctgaccaccgctgccggagccccggagtggccgagctgagtctgcgctgcggctggagtcctgcagaggaactgaactacacggtgccgggcccaggacctgcgggcgaagcctccccaagacagtgtaggcgctacgaggtggactggaaccagagcaccttcgactgcgtggaccccctggccagcctggacaccaacaggagccgcctgccactgggcccctgccgggacggctgggtgtacgagacgcctggctcgtccatcgtcaccgaggtaagagagtgagctcagggctcagatggagaagcaaatggtggagattttctcaaggaagcaagcagggaaggcccggctcttataaaccctgcctggacatctctttggcctgcatgtatcttacaaaatcctagtttccaaatgagaacatgcagcttctaatttgtctggagaataactggattagttaaaacgtcctcagatgctgacaataatgattctagtttgtgcatgtcccagcaataaggaacaggccaaagcatattaggactcctggaaatgttgccaagatagggatattgtggatcc

SEQ ID NO: 393218 - DNA, 1000 bp, Homo Sapiens
acagcattcggggttgggtgattctgaacttgaaagctctgtgacctggacagatgtgcctagttctctgaggcttggtttttttaatctgttaagtgaggctaatgaaacctgcctcttgggactgatggctcagctgagggacatagccaggccctggcatgcagtgggtgcctggtgcccaaggcaggctggaggcctgtgcaggtggttggtggggccctaagagctctgggtcactgccacaggtcagcagacatgtggcgcttgggctgcctcatttgggaagtcttcaatgggcccctacctcgggcagcagccctacgcaaccctgggaaggtaaagtttcttgcccctggctctttgccctgctcacccctctgcagctggctacccctgccctgacactgacccctcccctacagatccccaaaacgctggtgccccattactgtgagctggtgggagcaaaccccaaggtgcgtcccaacccagcccgcttcctgcagaactgccgggcacctggtggcttcatgagcaaccgctttgtagaaaccaacctcttcctggaggagattcaggtgagcccccaacccaccctgggcttcgaccctatctttttcattctgcccctaccctgcttttcagggtacctcacaattgaccctcaggagacaagcatggactgtggagttaggccaatccgggttcaaacccaggctccagctcatacttactctgtgacttcccttggctgaagttcagtcccaataatagtacaggttgagcatccctaatccgaaaatgcatgatctactccaacactggaaactttttgaccaccaacattacaatccaaggaaatgcccattagagcattttgcatttcagatttttttggattacagatgttaaattggagccaggcgcggtggctcatgcctgtaatcccagcactttgggaggctgaggtgggtggatcacctgaggtcaggaattc

SEQ ID NO: 393219 - DNA, 1000 bp, Homo Sapiens; identical to SEQ ID NO: 283482

SEQ ID NO: 393220 - DNA, 844 bp, Homo Sapiens; identical to SEQ ID NO: 283483

SEQ ID NO: 393221 - DNA, 321 bp, Homo Sapiens
gacatcgtgatgacccagtctccatcctccctgtctgcatctgtaggagacagagttaccatctcttgccaggcgcgtcaagacattagacactttttaaattggtatcaggtgaaaccagggaaagcccctaagctgctgatcttcgatgtcaccaatttggaaacaggggtcccggcaaggttcagtggaagtggatctgggacagatttcactttcaccatcagcagactacaacctgaagacattgcaacatattactgtcaacagtctaaaagtgtcccgtacacttttggccaggggaccaagctagagatcgaa

SEQ ID NO: 393222 - DNA, 1000 bp, Homo Sapiens; identical to SEQ ID NO: 283485

SEQ ID NO: 393223 - DNA, 1000 bp, Homo Sapiens; identical to SEQ ID NO: 283486

SEQ ID NO: 393224 - DNA, 1000 bp, Homo Sapiens; identical to SEQ ID NO: 115059

SEQ ID NO: 393225 - DNA, 1000 bp, Homo Sapiens
tggcagaaaagaaggtaccgtccgtgcccgtagcctggccaggaaaatgacagtggtcgggctcgttagacacactgactttgcagctgggaaggcaaaaaaacaggctcagaagagaggtggtttccccagaggatgggcacgggctgtgtgaacacctcctccctccaccccactgctggggcagctgtcctgcatctgcatgcccccaggcctcaccagccgttccttctttttttctccagttcccagagatcgtggcccccctcctgacctcaatagatgccatctccctggagtgtgagcgcgtgctgggagagatgggggaagccccagccccggagcagtacctcgtgctggaagtaagagcctgtctgcaggaaccggggttactgagtccacaccactgtccaaggcagtggctctgcaatctggctgtgctcagaatcccccggaagctagcacatagaggtcaggacctgcctctggcctatgctctcagctgggcccaggtctgtgcgtgccatataagcgtatcttattttcaggcctcttcctgggtgattccgagtaattgggagagtgcaagggaggccagggcctggctcgtgctaagtgcaatggaaacaggtttgggtcacttctaaggagctctggcccacgtaggtagatggggatgtggctgatgcagagtgctctgtcggtgcaggggtgacttcttggtcactctcctgctattgctaacttcatgggtgcattcaacaactacttgtcaactgcctgctttgggtcagacagatcctaacattggtttttcatcattgcaaccccatccactgccatttgcataattctagtgtaagaggttgtgacctggtactttgggtgtgatcaggcctgtgtgtgaatccagctcacttctgctggacgtgtggcctcgctagagtgacttaagaatgctcaattagacgggcgcaatggctcacctgtagtattaagc

SEQ ID NO: 393226 - DNA, 1000 bp, Homo Sapiens; identical to SEQ ID NO: 283489

SEQ ID NO: 393227 - DNA, 1000 bp, Homo Sapiens; identical to SEQ ID NO: 115060

SEQ ID NO: 393228 - DNA, 1000 bp, Homo Sapiens; identical to SEQ ID NO: 283491

SEQ ID NO: 393229 - DNA, 1000 bp, Homo Sapiens
aagggatgtcccagctcatcaccatggcctgcggctcctgctccaatgaaaacgccttaaagaccatcttcatgtggtaccggagcaaggaaagagggcagaggggcttctcccaggaggagctggagacgtgcatgattaaccaggcccctggctgccccgactacagcatcctctccttcatgggcgcgttccatgggaggaccatgggttgcttagcgaccacgcactctaaagccattcacaagatcgacatcccttcctttgactggcccatcgcaccgttcccacggctgaaataccctctggaagagtttgtgaaagagaaccaacaggaggaggcccgctgtctggaagaggtggaggatctgatcgtgaaatatcggaaaaagaagaagacagtggccgggatcatcgtggagcccatccagtccgagggtggagacaaccacgcatccgatgacttctttcggaagctgagagacatcgccaggaagcatggctgcgccttcttggtggacgaggtccagaccggaggaggctgcacgggcaagttctgggcccacgagcattggggcctggatgacccagcagacgtgatgaccttcagcaagaagatgatgactgggggcttcttccacaaggaggagttcaggcctaatgctccctaccggatcttcaacacctggctgggggacccgtccaagaacctgttgctggctgaggtcatcaacatcatcaagcgggaggacctgctaaataatgcagcccatgccgggaaggccctgctcacaggactgctggacctccaggcccggtacccccagttcatcagcagggtgagaggacgaggcaccttttgctccttcgatactcccgatgattccatacggaataagctcattttaattgccagaaacaaaggtgtggtgttgggtggctgtggtgacaaatccattcgtttccgtcccacgctggtcttcagggaccatcacgccca

SEQ ID NO: 393230 - DNA, 1000 bp, Homo Sapiens
ggcgcccctgggagacaactggacaagatttcctactttctcctgaaacccaaagccctggtaaaagggatacacaggactgaaaagggaatcatttttcactgtacattataaaccttcagaagctatttttttaagctatcagcaatactcatcagagcagctagctctttggtctattttctgcagaaatttgcaactcactgattctctacatgctctttttctgtgataactctgcaaaggcctgggctggcctggcagttgaacagagggagagactaaccttgagtcagaaaacagagaaagggtaatttcctttgcttcaaattcaaggccttccaacgcccccatcccctttactatcattctcagtgggactctgatcccatattcttaacagatctttactcttgagaaatgaataagctttctctcagaaatgctgtccctatacactagacaaaactgagcctgtataaggaataaatgggagcgccgaaaagctccctaaaaagcaagggaaagatgttcttcgagggtggcaatagatccccctcaccctgccaccccaaacaaaaaagctaacaggaagccttggagagcctcacaccccaggtaaggctgtgtagacagttcagtaaagacaggacctggatgtgacagctgagcaaacagctagagctttggcagctcagcaggaggctttgccaggcatggacgcctgcctccctcctgtggaggtcaggaggaagtgcaggaagtggcatgagtcaggctccttgagctcacacagcaggagaacaagtacaagtcaagtacaagttgaaggctcatttcccagttcccgcaaatgcatctaaaaagcagctctgtgtgaccaccataaactctgctaggggatctctaaaaaggagtcaggcttatggggctttgcaaataagtgctgccttggtgctcaggaaaaggtttgtgttgcacaaaacacaaattccactgc

SEQ ID NO: 393231 - DNA, 1000 bp, Homo Sapiens
  misc_feature (850)..(850): n is a, c, g, or t
  misc_feature (862)..(862): n is a, c, g, or t
  misc_feature (950)..(950): n is a, c, g, or t
  misc_feature (952)..(952): n is a, c, g, or t
  misc_feature (987)..(987): n is a, c, g, or t
cgaaagccacttgtagggacctttagagagttagcaataaggctggagaaggaaaagccggcgcgcccgcggcccgcgcgatttcccgccgagcccgcgtccccggcggcgggcgggctccgggggcgcccgggccgcggcggcggcggcggcgcgagctgcgcctccgggccggtgaatcatcccggcagacaccaagagccgcggcagcagagaggagcgctgaaacatggctgaagcggccacgggctttctggagcagctcaagtcctgcatagtttggtcttggacgtatctgtggaccgtgtggttcttcatcgtgctattcctggtctacatcctgcgggtgcctttgaaaatcaacgacaacttgagcacaggtaaggcctgggagccgggcccgcggcgcccacccctcccccgccccggaaagttagtgcaactcgcgcggggccgcggccaggcgcgcgctcggggacgcgccggggcccgcgcaccggaggcccgcggctacccgccagcaacgcggcggcttaggcggcggggccsggcagctgggcgcgcgggggcggccggtggccttcacggccccgcggaggaagagctgcgccgcgcacagcccgcaaggcgggccgggccgggccggcagccgccctgctgcgtcgctggtggtcgggagacggagaagaacgggttgtcgcgggcgaaggagttcccaggacaccccctcgggtgtctgcgccggaactccgagggttccccggagttasaccgaktccttcctcacgccctcccggctgtgggtgccaakcggccgaagtgtggtcggggaggcgccctcccgcccggnckcggaggcccnagggcggctgcckgagggtgctctgcggcgaagccccctgacccggccgggctgtccgggcggckccctccgtgkcccggagttgccntnttgccgggcgtggggctgtctctctggttgggtantggggaatagggg

SEQ ID NO: 393232 - DNA, 348 bp, Homo Sapiens
ggtcttcctttcctatttactcttatggatacttattttattctagtcaatggttataatcctttacaatcattattattttagccagcccctccaagttggctcctgtgttctttgggctgtacccttaattctttgagtcttgtcttgtttgcacaagatgctctgggcttatattatatttcccccatcccagccatttctccaaggaatgtttccttttagtggagaatgatatttagaaaccaaatgctgaggctgggtgtgctcattgccattgagttatacctttaccttattgactggtttctactgttctattcagagacccctggcacaagatccctg

SEQ ID NO: 393233 - DNA, 1000 bp, Homo Sapiens; identical to SEQ ID NO: 283495

SEQ ID NO: 393234 - DNA, 978 bp, Homo Sapiens; identical to SEQ ID NO: 283496

SEQ ID NO: 393235 - DNA, 1000 bp, Homo Sapiens; identical to SEQ ID NO: 283497

SEQ ID NO: 393236 - DNA, 1000 bp, Homo Sapiens
gtgttgcgggagtggttggtgatggtgaaaataactgtagtgggccttggctcctcacatatttgttcggatatacagtaatcctgtcccaagggccagtggcttctctctacatgacagactcaaattgtgaggctgctttttttcttgtattcgcaggtggcattggaaggccttcggcctaccatcccaccaggtatttcccctcatgtgtgtaagctcatgaagatctgcatgaatgaagaccctgcaaagcgacccaaatttgacatgattgtgcctatccttgagaagatgcaggacaagtaggactggaaggtccttgcctgaactccagaggtgtcgggacatggttgggggaatgcacctccccaaagcagcaggcctctggttgcctcccccgcctccagtcatggtactaccccagcctggggtccatccccttcccccatccctaccactgtgcgcaagaggggcgggctcagagctttgtcacttgccacatggtgtcttccaacatgggagggatcagccccgcctgtcacaataaagtttattatgaaaacaggctggtgtggggacatggggacagataagtacatttaggttgggtggctcaggtgaagtagtgcggcttcttcacattgatgccatactcgctgagggcaggggtcaagtcctccatggttagagtgtacttgcggtcctgagggaagagggaagagcaccaactgagcacaggaatcccggacttcaatcccagatgggtgaccctgagtaagtcttacacctcccctacgattcagtttccccaaaggggtggcaggataagcctccactgttgtggaaggtaattactgattcattaagcctcccctcacaccttgctcttgctccgggagctcgccggaggccgtgccattcattttgcagtgctgtagggcatcattggcaatatctgagatgaatttctgggcagctaaggagatgagccgaattc

SEQ ID NO: 393237 - DNA, 1000 bp, Homo Sapiens
atctgaagaagctgcacacgcaggagcgggcggtggaggaggtgaagctggccatcaagccatactatcagaagaaggacatcaccaaggaggagtacaaggacatcctgaggaaggccgtccacaaggtgggcacccggagagaggggcagacacaggccggggagagaacgagctggagggacagatgtgtgcagacagatggacgcggatgggagacggggaggaggtcagtctgggaggtgaggagggtgacaggattttctcaaggccacctgggcctgttccgctggccctggggcacccatcgtctagggggacagagggactttggcctggttattggggaagctcctcctaccgcagttccaagctgcgcccaacagtcctgggtggatggggccccgggagcctggtggtgactccaactgtccccggccccccagatctgccacagcaaaagtggggaaatcaacccagtgaaggtgagcaacctggtgcgggcctacgtccagcgctaccgctacttccgcaagcacggtcgcaagccaggggaccccccagggcccccacggccgcccaaggagccagggcccccagacaagggtggcccgggcctgcccctgccccctctctgagagccctggccagctcttcgcccctcacctctttgaaactctggacgtatttatggctccacctccccacctccctcccccgtcagtgggatgactgggggagggttgctgcagggaagaggagagccccctgccctgccctgccccgtgtccacctcccttgcccccaagcctgtccccagtgcccctcccttctgtttgtgcccctctccccaatttcattaaagatttcatgaaacattacccctgagccccatggttctaaccctttgttttcggagacaaatttgccagagggttggggagggacccccaggaggctgaggatgggagacagagaccagactgtgacttggggcagc

SEQ ID NO: 393238 - DNA, 1000 bp, Homo Sapiens
ggttacattggaaaggtttcagagcagtatgtgttttgagcagtttggtcttgaaggttggcagaaatgtagattaatagtaatgatgttgtggtaaaacttggacatgtttatgtacttaacattttacttaggagtacattatccctaagacaattaattttggcagataataaataaggtgctaattaatggatgctgtattttcctggcaggaggttagctgacatttaagatctggaagttaggttttatttgagtcctatggtattttctgtagtcataggagaagtaaagtgctgataaaggaagatggtttttactgtgaatatagactagccgcaggtgggaagaagctgagagctggttgctgaccagaccaggggatggtgaaccagtgatggagatggggtttggagacaggtcgtagagccgttttatgcccctgcccataagctgcactgcctccacctttccttccacccctcaccttatgttctgtgttgtcacctagatgcctttgaagatgagaaacccccaaagaagagccttctctccaaagtttcacaaggaaagaggaaaagaggctgcagtcatcctgggggttcagcagatggtccagcaaaaaagaaagtggccaaggtgactgttaaatctgaaaacctcaaggttataaaggatgaagccctcagcgatggggatgacctcaggtgagatgtctgcaaagctttgtctcgggtcttgatttttctcatcagagaattgtgaataatgaaaacctctattcttacttgtcactggggtccatggaagattggatctttaaattcttctaggtacaactcagaccggtaagagctggaaacttttcagataagaacagtgacagcatgcagtaagtgatttattcatgcttccacagctggacagtggcaaaagcaggagaacccaggtcttctgactcctggtccagtgctctttctactacacaaaaatatta

SEQ ID NO: 393239 - DNA, 1000 bp, Homo Sapiens
aaagtagatttgcacggctttggtgagctcttagctcgggaggaagagtgaagaccagaggaactttgcctagcaggaatcatttgactgttccatgtgcaggtgtcttgattctgtgatagcttattagcttattatagttggcttctctgcagccttcctttgggttcactgccccctcctggacacttccctcccccaacatggtgttaacagcagatcagagcctcagcaggtgttcgcttggtggtggtagtaaacgtgaggttgggtgcctgcgcacagcggcctttaccccatcctgatagtctgcagctggagctctcacaggctctggacagcagaggagaagaaaaacctatgaaggggaggagtggtggaggcaaaaggcacaaaaggctgcagattagggtttgtaagtggacacatcccccaaaagacaggccagtccacgttcaaggctgtttgcctagcacagcttctctgggccccctaggagctcggcctgctccagggtggctgaacctgaggagggagcctgcagggctgcgctctccactgtcccgacttcccgcagtggggcttgtggactgagttacctttgtgtcctgtgttggttccacagggattgtgtgcacactctgcattccagggacacgtggctgaagaaagcaagagtggtgaggcttggagaagtaccctacaaggtaactggagctggggggtccctgtggggagtggtgacacaggcctgtagctgagcgggagagctgggggcagagaagtgatgatgagcctcccagtcctgcccaggatcctgatcagaaatgtctcactttcccggcttgagcaggattcaaggaggagagaaacatttaaattgtcttattaataagacatttgtaagaaatggatcttccaaaacacaaaagaaatctaggccaaaaagtaggcctcagactcctgttgtgaattcaaaggttctacaggttggaattga

SEQ ID NO: 393240 - DNA, 302 bp, Homo Sapiens; identical to SEQ ID NO: 283499
  misc_feature (152)..(152): n is a, c, g, or t
  misc_feature (164)..(164): n is a, c, g, or t
  misc_feature (230)..(230): n is a, c, g, or t
  misc_feature (238)..(242): n is a, c, g, or t
  misc_feature (289)..(289): n is a, c, g, or t

SEQ ID NO: 393241 - DNA, 1000 bp, Homo Sapiens
cgaggcaggctgcggagacgttcccttggtgggccgcgggaccaccaccccgccagaaactcggttcgctcaccctaagaattttggggcaactggacttctccaccgcccgcttccggacccgctccggcgccgcttccggacccactcctcggcgagcgcaggaactcgctctcccagcaggccccgcgcggtgcgtctcggggcgcgttccgggtcctatgacggctcggctcgatgcgccactacggccccacccgcggccccaccccctggctcccggctccttccccgactcccgcgagttccagtcccagcttccagctccccagccccgccctcagcgcgcgcgctctcccctccccgccctcgcttcttcgcgtgcggcccccacagccaatgaggttcagggccgcgtgcgcagattcaaacggcggctcttgagggaggctgggcgcgagattcggcggtgcggacaaaaccctgcaggagactgcgagccctgcagaactgctagctgcgggggagagggcaggggtcgggcgcctgtgcggagccgggctggggccagggcagggaggctgacaagcggcgggagaagccggcggagggcgggatcgcgcctcctgacatgttgggggtatcctggcgggccgggccggggctaagagcggcgctgcgggccggggtcggggtcgggtcgcggtccgcccccgctgtccctccgtcctgccctgtcgaggacgtgcgttccgcactcggccgcctccagagggagcgagggaagcggctagaggatcggggagaaggagcattcgccggaggtggaggaggctgacccgcgtccccgcccagcctgctcctatgcggtacttgaaggatggcgaagaggtcgcgcaggtgggtggcacccctttcgcccaggcctgtcggcgccgtctcggctcagatctctttcctatcccgctgcccccttcccgcacataaggcccttaatggc

SEQ ID NO: 393242 - DNA, 1000 bp, Homo Sapiens; identical to SEQ ID NO: 283500

SEQ ID NO: 393243 - DNA, 1000 bp, Homo Sapiens
actccagcctaagcaacagtgagactgaaaaaaaaatagagagagagagagtgacagagctgagtgccaaagtctttagtgagtaaggactatgtttgtcagatggcacaatgaagacggttggatagctccatagtcaaatggcctggacttcaacagaataggaagagtgcattatataagagggtaggttagtaatggtctgaaagaggtaatgggaacaatgagctcagctgtttactgtgaagtaactagggtaaacatgaacaaatagcacttgagagggcttagggaatgcattctccacaggagggaccatgggtttgattatttcaaggaagtagagggaatgctttagagtagttaaggatacagaaagtttgtatgatggaaaggtttagagagtgttatagaagaggtggtctctgccttctcaggtgtttattctcttttccttactatgttataatgcacaaattatctctactgtagaatcaagattctacatgattttataaatataaacagatttcatattttttagggtacataaagtttttctttctcttcccattgactggttttcgcatccctgcatttgctgctgcttacgtatctccttttctgtttcaggactcatatgaacgagcaaaacatatcttgaaaactcatgcaaaggagcataagaatctcgcagaagctttattgacctatgagactttgatgccaaagagattcaaattgttcttgaggggaaaaagttggaagtgagatgataactctcttgatatggatgcttgctggttttattgcaagaatacaagtagcattgcagtagtctacttttacaacgctttcccctcattcttgatgtggtgtaattgaagggtgtgaaatgctttgtcaatcatttgtcacatttatccagtttgggttattctcattatgacacctattgcaaattagcatcccatggcaaatatattttgaaaaaataaag

SEQ ID NO: 393244 - DNA, 1000 bp, Homo Sapiens
agttctataatttatgtacaacaaaaaaaagtgtgtagcttggtgaaatttacatatgtgtatacctttgtgattactacccagataaacatataaaacattttcattccttctgccccttcctatcaatggagccactcgcttcccccagtcaactactgtcccgatttctatgaccatgtattattttcaaatgtttttaaacttcatataaacggagtcatacagtttattcttttgttcacattgtattcatccatgttgcatgtataagaatttttgtttgttttttatttttgctttgtatcaagggttggcaaactatggcctgtgggccaattccaacccactgcatgtttctgtttataaaattttattgggctgtgttcacccaccactatgcctggataattttttgtatttttagtacagacggggtttcaccgcgttggccaggatggtcttgatctcctgacctcgtgatccacccgccttggcctcccaaagtgctgggattacaggtgtgagccaccgcgcccagcccactctcaagattttgaagacatttgcctttgttttcctccagaaactttatagttttagctgttggatctgtgattatcaccagttgatttttgtgtatggtgtgagggggggatcaagatttattttgtatatggacatccatctactctacacatttattgaaaaaaacaacacctttcttttcccattgaattgcgtggggactttgttaataaatgaatggtcatatatttgggtctgtttctggactctgttctttccacttggactaattatccattcttgcatcagtaccatacttttttaattactgtagtttatggtaagtcttgacatggtattgtaaaccctccagttttgttcttttaaacaaatgttttgactatttaagtgctttacatttccatataaattttcaaatgtgcttgtcaatgtccattaaaaaaaaaaaaaa

SEQ ID NO: 393245 - DNA, 1000 bp, Homo Sapiens
cagtttccccatgagtaaacagaagcggggtgggagacagtctggaggagatggtccctaaaggctcatcctagtttccccgctgtggagggaggcaggatagcacagaggttacgtccaggagctccggaaccaggcagcctagggttgggtaaattctagctccatcacttagaaaccgtgtgaccttgggcaagcggtttcattttgctgagcctcagttttcctcatctgtaaagatgctcaaatcatgtctcccaggggttgtactgagatattaacccatgtctcagagtagtaggtgccaagtaggcagatgtgactgttattagcagcagtggcatcagtgttaagttgtgctgagaagtgatcagattctaagcatctcagtccctgtagagaaaggtgggaaccccctaccctctggaggacggtggtggagggctagacagtctggctgggctcagggacctcctgggtccctgacctctccaggactgggaacagcagtggggcaggaaggagggaaggaagtcggggacatattcatgtgtgtgctgggggtgggggagcaggaagaaggacaggaaactccctcccatcccctcccccaacttccctttcctccaatttctgctggacaccctcacaggcatccagggggtccctgattcctgtcccacctggatggaggtgggggagggctaggatgggaggaagaaagtcggcttgtattcatctgtagggaggaggtaggaggcccccaccccacccactgccaggcctggcggagaggaaagggtgcactctgcctgaagccatccctctcccatccggaggaaaaggccagaggaagtggagattttggcaaggtgaccgcggggaggggcttgtccgctgcggggtctccctcctaccagggagctagaggacagggctctgaggaccccaaaaaaccccacctcttccctgagccccccacggcagggcatgcacctag

SEQ ID NO: 393246 - DNA, 1000 bp, Homo Sapiens; identical to SEQ ID NO: 283503

SEQ ID NO: 393247 - DNA, 145 bp, Homo Sapiens
gaccctttccagtcccttcccttcctcagtcccaagtcggaacacggggctgggagaccccggaaacagtcaccggtgtcgtcgggttgtgagagtggggagtggaccggactgacctcttccggacccgacggccaatggtagg

SEQ ID NO: 393248 - DNA, 1000 bp, Homo Sapiens; identical to SEQ ID NO: 283506

SEQ ID NO: 393249 - DNA, 1000 bp, Homo Sapiens; identical to SEQ ID NO: 283507

SEQ ID NO: 393250 - DNA, 1000 bp, Homo Sapiens
  misc_feature (307)..(307): n is a, c, g, or t
ctcagaaaagtttcaaatttttaaaaaccaaacacttttgttatacagaaactctaaggttgattttttttttaactcacctgaaattttattaatgatattgtagaaaagctatcacaagtagctatccatttcttcttgtatattctatggaaatctccaaagtaaggctaaaattatgtaaatccttaaaatcattccctgaaataaatattcattggtactgtcattgttctaaataactcattttaggagttggtaatctaactgatgcttcttatgacttgagtacttcatacacatttcnttagtttcctttcacttttttaaaaattacagattcctttaatatctctgatctattatgagttgtctccttttactaattttgtatctaattttgtcttttcaggtgaggtgaggtatatctgttcagctctgggttgtcgccaatgggatagtgacgaaatggaacaagaggaagacatcctgcttctacagcgtacccaaaaaactgttagagctgtcggacctcgcagtggcaatgagaagtgtgtattcagataatgttgctgttggtattatttagaaatacacctaataccaaaatttatcagatttctgtttgtggagattttgactattttgttgccttaaaagcatatatatatatatttttttgatacggagtcttgctctgtcgcccaggcttgagtacagtggcgtgatattggctcactgcaacctccacctcctgggttcaagcgaatctcctgcctctgcctcccgagtaccggggattacaggcacgtgccaccacacccaactaatttttgtatttttagtagagacggggtttcaccatgttggccaggctggtgtccaactcccgacgtcaggtgatccaatgtgggtcctaaaataaaaatggtttcatggttattaacaaattctgaactgaacttctcaccatatgcttcgggatatgataaccacaggg

SEQ ID NO: 393251 - DNA, 828 bp, Homo Sapiens
  misc_feature (788)..(788): n is a, c, g, or t
gattgaggattaagtaccatgatccctagggaatgtgcacctcaaagggtttaagtagatgttcaataaatactagcactctttgctacccttcccttttctttactagcagtacttgtctggcacagaaaaattgtcactattttcctgttagcccattttaaaaagaaatatgcttgaaaatatctagtttgttgtattttttctttgtagtcatttaaataattctctttactttttcgcctccatgcacacccactgtacttttgtctgttgtattctttccagccatccaacatattctttacaatggatgatgtggtcaaggttggagactttgggttagtgactgcaatggaccaggatgaggaagagcagacggttctgaccccaatgccagcttatgccagacacacaggacaagtagggaccaaactgtatatgagcccagagcaggtgagtttttcagacctttacttactagcacagcagcagatgtacctgatgaatctcttctcatgttttcattaaaatacccgttaatctaaaacccaataagtctgaaaattatgaaaactggcagtagtgttccagtagtggaatagtgacacagctaagatgtagtttctacaacctgaattggggctggattaagaaaaatacaacacataaaatgcactcaccccctgaacaagcacctgacagcaaccaggaatttggaaagagactttgaatgccaccctcccaaacttaactcgtttgccttgtgtagactgtgttggaactgntttcagagccagctagacccagaggtactatactgagctg

SEQ ID NO: 393252 - DNA, 1000 bp, Homo Sapiens
cacgcgaggcgtctgcgtggagcggcggcaccgggagcccggccgctcgagccaaacgccgcggacggagcgaggccgcagcgccccctggtgtccgcaacgggcagcgcgtcccggtcgggtcccgcatggtcagtggccagcaggggtggatgaaggggtcccagccgcctgagacccccggtggggacacaggatcgcggtgagatacctgggagtcacgggtgctcgcagacgcagctgaccccagaggcacaggtaccgacacaggtccacacctggaagccggtgcacagtgctcggcacagatgcaaagcggcaggtgtgcgcaggtgcgtgtcaacgccaccctgggaacccaggatggctgcggacactcacggagcccgcacccaggaacccgctcgtagtaagcgcttaataactaggcactggctgaatgaatgaatgaatgaatgaacacggcgcttcgcaaaaccaggaaaaggcagaggctcacagaaccagggaacgatgggctggggggagcggcaagaattacgcaattatgcaggggccgctgtgactaccaggcaccccctccaactccccccctacaagggctgctctgggtcagagaacgtccaccgcgctgactgctggggctgggggctgggggcgcagatcagaaagaatgggcctgaattgctcccaggctgggcatgtggcgcccgcgtctggggctccagtgggtgggtggcccctcccgcatggacggcgggcgcaggggagctcggtgctgatgtctctctcctttaataaccaccctgcgtgagtggctgacgcagcagccggctgccgctgacggggagtggggcggctgtagtgggggggcccgaggtgcagagggggtggtgatgaatcacacagctgctgcctgggggagggggtcttgagcccatgaggggtcccagagaccttgtcactggagacagcgcccctggctacccccacctcgatc

SEQ ID NO: 393253 - DNA, 1000 bp, Homo Sapiens; identical to SEQ ID NO: 283512

SEQ ID NO: 393254 - DNA, 1000 bp, Homo Sapiens; identical to SEQ ID NO: 283514

SEQ ID NO: 393255 - DNA, 1000 bp, Homo Sapiens
cagaaaggataagtttaacatgcagggtacatcaatagggccaatttaaaaaatgataacacatattagtatgtcattttctatagctcagctatcccctaaaatctgccaactatatgtgtatcttgtctgtttacctctcttatttattatctccatacagtataagttattttttttccattttgctctcagcacttaccctgctgtattttgcacccttggtttgtaaattcacttgaaagtagccttgcagagagatcttaagccccatcagtcaccaaagtggttcccttcatcacaatctgccctagaggaaataggcaagtaaaatgatatataaagccatactatgtgctttctgagtatatactgcacttacctttgtgagcggctgtaggagggtctatcctcgaagctagcattttctggcatttaagtttgtgataatcactgttgtttgagttatttattagatattatttatttaatttatttctctcttcctttcacgaaaattcctttagccccatagatgtgcttgcaaacccttcctaaaattttatttggaaagtagctcataattttgctaagaactgctgagttttggagtgaggggaaaggaaaaaatagagaattacctctgtgataatttttataaaaagcagcaataattcgaatggctatgcaagttaatgtttttagagtcttttcttcagtctaaaatgagccagagttattctttaataatctgctgtttatgcctttggggagtatggtacccatgagccaagcctccctgaaattgtacagagggattttataattgaattaaaatttaggaatgcaatagcttgtaaagagcctgctctccaacatagggtggtctcattcttctggagacttttttagataaagtaaaataattgtttaaatattttgtttaaaatatgactgtttttcctccctttttcctagcagaaataaagctgtaagtctt

SEQ ID NO: 393256 - DNA, 1000 bp, Homo Sapiens
tcattcagcaaaacatttattcatgtaatatcccttacttggtattctaacttatattttcaactcattttaggaacttgaagtcagtctcaggtaaagaacaatgaaagagaaatctcagcttggtattggtaatggtggtgataatctccacctggagacactaggcgtatgttaaattatcgagcttgttatctttcctgggaagtgattatcatttgtttctcttgtgacagcggggagtgttctgcatgaggaactaatatgataccagaaaaacaggtgaaatgccagttacagaaacttattaccaacgactatctaataactgcgatgacagaaataggtcaattgaaccatgagtggatggtgaaaaaaatttacacttcacagaagtttttctttctttttttttttttttttttttgagacaaagtctcgttctgtcccagactggagcactattcacaatagccaaaatatggaatcaacctagatgtccaacaacagataaatggataaagaaaatgtggtttatacacacaaaggaatactattcaaagaccagaatgaaatcctatcacctgaggcaacatggatggaaatggaggacattatttaagtgaaataagccaggaacataaacatgcacattcccactcatatgtggaagctttaaaaaaaaaaaaaaaagctgggtgcggtggctcacgcctgcaatcccagcaccctgggaggctgaggcgggtggatcacctgaggtcgggagttcaagaccagcccgaccaacatggagaaaccctgtctccaccaaaaacacaaaattagccggggtggtggtgcatgcctgtaatcccagctactcaggaggccgaggcaggagaaccgcttgaacccaggaggcagaggctgcggtgagccaagatcatgccactgcactccagcctgggcaaaaagagcgaaactccatctcaaaaaaaaaaaaaaaaaaaaaaaaaaa

SEQ ID NO: 393257 - DNA, 1000 bp, Homo Sapiens
aaaaatagaaaaaattagccgggtctgctgcggacgcctgtaatcccagctactctggaggctgaggcaggagaatctcttgaacccgggaggcggaggttgcagtgagccgagatcgcgtcactgcactccagcctgggcaagaagagcgaaactccgtcaaaaaatatatatatatatattttaatctatgccctgtacttgagggatttgtgctctcggggaaattaccgaacgtctctgagtcacttttccgtctaatagacgtgatgcgatgaagaaccaataaaaaacacactttgaatggcttcggaaacttcgaagggaagtgaatacatttttcttttctttctttctttttttttgagacagtctcgctctgtcgcccaggctggggtgcagtggcgcgatctcggcccacttcaacttctgcctcctgggtttaagcgattctcctgcctcagcctcccgagtagcttggattacaggcgtcccaccaggcccggctaatttctgtatttttagtagagacgggttttcaacgtgttggccaggctggtcttgaactcatgaccttaagtgatccgcccgcctcggcctcctaaagtgctggcattacaggcgtgagccaccgcgcccggcctgtgaatacatttttcttattgcttgacgctgggtcatacaattcacttttttgttgtgcagattaaaaccaaaacaaagcaattaggagagcgttgttgtcgaggtgttttgttccaaggtaggacccgtagcttctcccctgcccctcagctgggagtagcggcttctgattggacaatgccggtccgccacgacgcaggaaggccgcctcattggtccgcgctgtcgggcttcggcggcttttctctttagcgctcagggcgctgacccactgctcttcctcttaagaaagtgctccattccttccggcgcccggagctgctggcccaaagggatccggagcgagctagggcag

SEQ ID NO: 393258 - DNA, 1000 bp, Homo Sapiens
taccacagatcctgtccaggccactgcttcccaaggaagtgcgactaagcccatcagtgtatcagattatgtcccttatgtcaatgctgttgattcaaggtggagttcatatggcaacgaggccacatcatcagcacactatgttgaaagggacagattcattgttactgatttatctggtcatagaaagcattccagtactggggaccttttgagccttgaacttcagcaggccaagagcaactcattacttcttcagagagaggccaatgctttggccatgcaacagaagtggaattccctggatgaaggccgtcaccttaccttaaaccttttaagcaaggaaattgaactaagaaatggagagttacagagtgattatacagaagatgcaacagatactaaacctgatagggatatcgagttagagctttcagcacttgatactgatgaacctgatggacaaagtgaaccaattgaagagatcttggacatacagcttggtatcagttctcaaaatgatcagttgctaaatggaatggcagtggaaaatgggcatccagtacagcagcaccaaaaggagccaccaaagcagaagaaacagagtttaggtgaagaccatgtgattctggaggagcaaaaaacaattctgccggtaacttcttgctttagccagccactcccagtgtctattagcaatgcaagttgcctccccatcaccacatctgtcagtgctggcaacctcattctgaaaactcatgttatgtctgaagataaaaacgactttttaaaacctgttgcaaatgggaagatggttaacagctgaaaggaggttcatctttcaaatttgtgaccacaccatggaagcatttacactagctttttatatatataatatatattatataatgtatattttttttaaaaaaaagatattactgggggcatccatttcctgtggactctttgatacttcaagccctcttgcattagcattatg

SEQ ID NO: 393259 - DNA, 1000 bp, Homo Sapiens
ggttttctccccttgacttaagctgtgatggtctctgttaacttggagaaaggccagtggtctgtacaatgtgcctttatcttttgtctgactgcagtcccctttgagactagatctctggaaagcttggcaccttcagccacggctgcctctgctgaactgttccgtgagttttgtggtgtggtgtgaggtacacagtgactgtttggaggacgtgggtgtgtgcattgtaagctggcctctccagagcctcactgagtctccacaccttccctaggaagcatggaggagcttggcactgggggtcccaggaccagctgtgcttgttcactagttgagaattagttggagaatgttctggaaagcagttcctttaagctggtcccagttatattgggttactctcttcttagtctttggaatttttctgatgaaaaccttttaacctttatactgaacagggcattgtctcactataggaggagatctgcagatggggccaagaattacttcgaacatgaggagttaactgtgagccagctcctgctgtgcctaagggaagggaatcagaaggtggagagacttgaagttgcactcaaggaggccaaagaaaggtatgaaataggttaacttgaaatatgtgtttttttaaaacagctttcctgagatataattaagataccatacagttcacccatttaaagtatacatttcagtgttttttagaatattccaggcttgtgcaaccactgttactacaatataattttagaacattttttcccccaaacagcactcactgtctgctcctccaggcaatgtgctttctgtctctatagatttggccattctagacatttcatataaatggaattatacagtctgtggttttttgtgactggcttctttcacgtagcataatgtgtgtgagggtcatctacaacgtagcatgtatcagtacttccttgtgcttgctgaataacctgtcattgtctatata

SEQ ID NO: 393260 - DNA, 1000 bp, Homo Sapiens; identical to SEQ ID NO: 283516

SEQ ID NO: 393261 - DNA, 1000 bp, Homo Sapiens
gatgaaaagcaatagatatatattcttttattatgttaaattatgattgccattattaatcggcaaaatgtggagtgtatgttcttttcacagtaatatatgccttttgtaacttcacttggttattttattgtaaatgagtacaaaattcttaatttaagagattgtatgtaatatttatttcattaatttctttccttgtttacgtaaattttgaaagattgcatgatttcttgacagaaatcgatcttgatgctgtggaagtagtttgaggaacatcctatgagttttcttagaatgtataaaggttgtagcccatccaacttcaatgaaaaaaatgaccacatactttgcaatcaggctgaaatgtggcatgcttttctaattccaactttataaactagcaaaaaagtgtttgcttattccaccagttctactgtgacatactcgagtataaagacatgtagccataacggggagtggggggggagtctccatgcctttgaagggcccgactgccttaaatcttcctcaaccaaatacgtattttattagtgattgagagaatctgaatgtaggatgggttcaactgcacaaaaggaaaagatttttaccactttttttatatagatataaagtgaagcaacccgccttagtgctgaaatatgtagtacatgaatatgccttgtttaattacagaaaattccaaaacttgtactatttttttttccatgtagaaaggcaggaatgtctcctaagctttcctggcagcagatgaatcagcggtagctttagtttgtcgtaggtacagttggagcactatatgtactctctggactactttggacagaagtaggtttttgaatgtaacaagataagtcaacttgagttgtaatatattttgggaaatcagctcactacaaattgtagactgtaaacattgtactgtaaatgttttgtagttttcccccaataaaatttttgggaaaaaagggaattc

SEQ ID NO: 393262 - DNA, 431 bp, Homo Sapiens
aaaaatttggctgagagggccctagtgaaaaacaaatttaactattaccatatgaatgttgttgcctgagtagtgttgatgccaaattgctgagaacaaggtattggaaataatctgtaacaatttttgtaaagatgttttggcatgaaaatgaggagccattttattttgaaatactgaaaagcatgagtgaaaacataattagtatctataaaatgtgaataaatagagtgctttgctttaagtgacctttgatgaattttagttctttctttctttatatatttttttctttttgagacagagtctcactcttgttggccaggctggagtacagtggcacacgatctcagctcactttagcctctgcctcctgaattcgagcgattctccgtcctcagctcccgagatgctgggattacaggcacgtg

SEQ ID NO: 393263 - DNA, 1000 bp, Homo Sapiens
tgtaaggaagttccaaaaaccatgtaattcactcctaacttcttaattatctcctaagaacaagaacattctcctacctgttttcattcatcctcaagataatgatgttcagctcgcagatgctatgattctcataagccagtaagaaaaatggtgtctgttttccctgtaacacaggattcactcaatggaattaattctactctgcctacttcacagggtgcattgccagaggtctgctctctgtaagcctctcgaagaataggaaagtatttctgccctccaaaagcttacagtgctgtggaaaatgttggcaaatcagatgaaataatacatatgcaagtacttaagttttatcaacttttaatgccattatatacatgaaagacactatttttctctctattttctctcaaagaaaatgggatttaggaaaatgggaaagcatcaaaaaacatcagagggactgtagtagcatttggaaaacaatgacagtttttttaagatattcaaaggcatagtatgtcttaaaactattatttttttcttatcagaggaatataatgtgattgtactgccttgtaatttcaagtattgtgcaccctattaactggtgttcctttttttaaaatatttatttctctgcatataaccttgcttttttccttcaacttttaagttctggggtacatgtacaggatgtgcacgtttgttacataggtaaacatgtgccatggcggtttgcagcacacatcgttccatcacctgggtattaaggcctgcatgcattaattcctcctgatgctctccctccctgatgccggaaccccttgcactgacaggtccccatgtgtgttattcccctgtccccacccatgtgttcttaccattcacccgccacttgtgagaatatgcagtgtttggtttcctgttcctgccattagtttgctgaggaaaacggcttccaagtccatccgtgtccctataaaggatgtgatcc

SEQ ID NO: 393264 - DNA, 330 bp, Homo Sapiens
gagctcactcagccccactctgtgtcggagtctctggggaagacggtaaccatctcctgcacccgcgccggtggcagcattgccagcaactatgtgcagtggtaccagcagcgcccgggcagttcccccaccactgtgatttatgaggataaccaaagaccctttggggtccctgatcggttctctggctccatcgacacctcctccaactctgcctccctcaccatctctggactgaagactgaggacgaggctgactactactgtcagtcttatgatagcgaaaacccttgggtgttcggcggggggaccaagctgaccgtcctaggt

SEQ ID NO: 393265 - DNA, 1000 bp, Homo Sapiens; identical to SEQ ID NO: 283519

SEQ ID NO: 393266 - DNA, 1000 bp, Homo Sapiens; identical to SEQ ID NO: 115062

SEQ ID NO: 393267 - DNA, 1000 bp, Homo Sapiens; identical to SEQ ID NO: 283523

SEQ ID NO: 393268 - DNA, 1000 bp, Homo Sapiens
cttagtaaagacttggggaaaaaaaaagggagttatatttttattttgatctacctcatggattatgtgagagacttataaaataggtaagtttataaagtggctttgttcttactggtctagtgaagttatgataaatttctgtctcggtgattgagaactacacaatcaaaaatgtattcaaactagctcaccctggcccaccaaaaccgatagtacatctttcccagctgcgagttcagtgacctcatactagtaatttaaagtctgctctgatgggaatatttataccatagaaaccagcaagagttcagttagccgtaaaaaatcaaggactgcctgtaacttaaaataggaagattaatactatttactgcatttatggaaataaaggagacaagttctttatagatgcataaaaagcaatacaattcagcacttgctttttttttaactgcacaaactaggaatagaagggaacttcttaatagaagaagttctacaaaaaaaacctagagccaacatatttaattgtgaatttttgaaaagcgtattcctccagagatcaggaaaaaggcaaaggtgcccactatcaccactttttctcaactttgtacagattctagccagtgcaagcaaaagaaatgaaaggcttacagataagaaataaaattgtcattcacagatgacatgattgtagaaaattgatataaacgtagaaataatgtgaatttaacaaggttgcaggatacaaagtcaaaattatcttagcaacaattagaaattgaaattatgagagtggtgtgtgcctatagtcccaactattggggaattgaagtgggaggatcacttgagcccaggagttcgaggctgcagtgagctattaccacaccactgcactccagcctgggtgagggaacgagaccctgtctcaaaaaaaaaaaaaaaaaaaaggaaaatactaattacaatagtatcagagagcatcaaatgcctcaaa

SEQ ID NO: 393269 - DNA, 1000 bp, Homo Sapiens
agaaccacagggagggagcggccagaccctccacggccttagggcatccctgagattccgtcaggaaagggatgtaatcggatcaccctgggaacagtggggaaaattgactccagggagtcaggaggattcaaggacaccccccaccactgtctctctccagcagagcccacacgatgaagacccccaggcagtgacgtatgccgaggtgaaacactccagacctaggagagaaatggcctctcctccctccccactgtctggggaattcctggacacaaaggacagacaggcagaagaggacagacagatggacactgaggtgagtcctttcctctccaggcccccaggcctcccccacccccaccacgttccttccctctcactctcccccgctgcaggctgctgcatctgaagccccccaggatgtgacctacgcccagctgcacagctttaccctcagacagaaggcaactgagcctcctccatcccaggaaggggcctctccagctgagcccagtgtctatgccactctggccatccactaatccaggggggacccagaccccacaagccatggagactcaggaccccagaaggcatggaagctgcctccagtagacatcactgaaccccagccagcccagacccctgacacagaccactagaagattccgggaacgttgggagtcacctgattctgcaaagataaataatatccctgcattatcaaaataaagtagcagacctctcaattcacaatgagttaactgataaaacaaaacagaagtcagacaatgttttaaattgaatgatcatgtaaatattacacatcaaaccaatgacatgggaaaatgggagcttctaatgaggacaaacaaaaaatagagaaaaattaataaagtcaaaatgtttattcttgaaaacattaatgatacatgaatcttggccacaatgagaaaaataaaaatgaaaaaagagcaggcatccatttccatac

SEQ ID NO: 393270 - DNA, 1000 bp, Homo Sapiens
attagagttaatttaaataaataaatatttttgtgaacataaacactaattttatatcatttagattgatttttgtctagaactcattatagagtaccttgttttcagaaaatctaatgcgattgcaatattataggtgttccttctctatatacggtatttcaactagaaatccttactgtaaatatttcagacaatttagagtcaaactctgcagttgaaaatatatttaagaaaatatttaagaaaatatttcactggcacttacatgaatgaaaaatggccattgcctttttgatgacaaagtaatatataccaaataggtatgatacagatgattatattaacattcagatattattgtagcaatttcctcttccctgatgggaaatcttgaaattgctcttcatgacaaaaattaagacgtaaatgttatttcccagtggcctaaaagttagaagaggcatgagagtattcctgtgtgttctcttgatgttatgtgttgtacatctttctcagttcagataccataaaaaaaactgagtattttctgggcagttggaaccagtcactaataaatgaaagcaatttttgttctccttatccatttcagttgtttggatgacaaataattgcatgtaactgtcccaaattcacctacttagacaacagagacttgaaaaacattaaatatgatatttgtgtgtgcgggagcctggcttgaatttaccctttataacaaattttggtattttctactaatctttcacattcttctatgatttgtcaccattttaactttatggaaaatggtcaatttataatttctatctcccctaggggctgatttgttaaagtatgctttagttaagtaagagtttcttactcagttggggaatttaaataatgaagtataatcatgcgattgaagatgtgcattatggattaggttctatgccaaatttgttcagaaacatttaaatataattcttacctagat

SEQ ID NO: 393271 - DNA, 1000 bp, Homo Sapiens; identical to SEQ ID NO: 283524

SEQ ID NO: 393272 - DNA, 1000 bp, Homo Sapiens; identical to SEQ ID NO: 283525

SEQ ID NO: 393273 - DNA, 1000 bp, Homo Sapiens
cactagagcagccttggggactgctaggatgaagccctaaagaatgcaacctagtcaggttagctgaaccgacactcaaaacgctactgagtcacaataaagattgttttaaagagtaatattttgtcctcataatttgatatgtctcagcatttgctatgttcaaccactgtgatcagaacaagaaagaagtgtacacaacagtggagaactctggcagagatggccacgggactgcaagaaaagaaagcataagattaggaatagacctttgcattttcctacacaggtagagtttaaggaatgttattttctatgctgtattgaatatgccagttatggagaccaattggtttaatggcttatctagttattagctatgaaactttggttaagtcaagtaacttaaacaaagttaagttcagggcagctgaatcaacactcaattcctaacaagtcctttgcatctcaaactctccctttgtatttgcttctggagaacctaacctctgaagttgactatttgaaaagccaatgaaactgtcaatctactgtgacactagtagtataaaaaagaaaatgcatatcaaaacaacatgagtaatgagaaaagcagataccgtgtgactactgcagatcttgaaaaattatgaaagtacttaagaataacttataaccaataaatatcaaaatgtatatccaaactatgtattcctagataaatacaatttataaaaattggtaaaagaataaatagaagatctaaatggtcctataaatgttggataatgtaatccttaattacatctctccacaactagttttaaaactgacaaagagaaaacctgaattgtccgtaaggattaactagaaagcctataattaaaactaccctgggatggccatttaattaaaaaacaacataccagcatatgcaaaatcttcccggggagaagagaaagaatatttcttcaggtattttagagctttgtgtaatctc

SEQ ID NO: 393274 - DNA, 523 bp, Homo Sapiens
ctttggccatcacacaaaaagaaaaaaaatggcaaattttcaaatgttgaagagatgatagaatgaccttttcttataagtaaaggatttgttttggcagggttgtggagttgctcagtgcttgaagattgtctgccaagttgggagattagacagaggaaagagtgcaatcttgtacgtaaagtcattactgtggactgagacttttatgaatgtaagtagacaggtgcagcatttagcaaacatacccagtgttttcaaataaatataaaaggcctgatatctgggaaatcatctaattgttatttccaaacagaaagaaaatcagaatcattcctattctctgaagtcgtctgcttcatttaatgtcatagagtttccttataagaatcttccaattgaggatatcaccaactccacattggtaagtcattggtttaggcaaatagaataaatttactcaattcaaatgctgtacatgtttttattttgttttttaaaaaacgacagcttaacttttttg

SEQ ID NO: 393275 - DNA, 1000 bp, Homo Sapiens
agaatgaaaagtaagggaaggaagaaagggactgtaatgatgatacttgatgagcattacttattatatgagggaagataaattttatgaaatacaatttaaatgttcttagtggtaatatagtcacccaaaaaatacttttcgtattctacactgatgtgacagtaataatggtttttcttcaactgacagatgggcttttttaaacgggtccggccacctcaagaagaacaagaaagggagcagcttcaacctcgtgaaaatggtgaaggaaactcagaaacttaactgcagtttttaagttatgctacatcttgacccactagaattagcaactttattatagatttaaactttcttcatgaggagtaaaaatccaaggctttactgctgatagtgctaattggcattaaccacaaaatgagaattatatttgtcaaccttctccttataaataagttcagacatacatttaataacatagggtgacttgtgtttttaggtatttaaataataaaatttcaagggatagtttttattcaatgtatataagacaggtagtgcctgatttactactttatataaaatagtacctccttcagttactgtttctgatttaatgtacggaactttatttgttgttgttgttgttgttgttgttgttgttttaaagcagtccaaatttggaccttagcaatcatgtcttttgtataggtacttaatgttaatacatattacactacagtttacttttcagaatactaaagactttataactgcatgaacttggatttttttaatcactcatatggtagaattttataaacacatacatgataccatccaaattcttgcttttaataacaaaggtacaatattttgttttagtatgaaaatctggtagatcctattacacttctgtttatattaaatccacaatattttattacatttttaacttgtataaattttaggtcaaatccttcaagccaacctatac

SEQ ID NO: 393276 - DNA, 1000 bp, Homo Sapiens
atcacccggggaacagtgaggaaaattgactccagggggtcaggaggattcaaggacaccccccaccactgtctctctccagcagagcccacacgatgaagacccccaggcagtgacgtatgccgaggtgaaacactccagacctaggagagaaatggcctctcctccttccccactgtctggggaattcctggacacaaaggacagacaggcggaagaggacaggcagatggacactgaggtgagtcctttcctctccaggcccccaggcctcccccacccccaccacgttccttccctctcactctcccccgctgcaggctgctgcatctgaagccccccaggatgtgacctacgcccagctgcacagcttgaccctcagacgggaggcaactgagcctcctccatcccaggaagggccctctccagctgtgcccagcatctacgccactctggccatccactagcccagggggggacgcagaccccacactccatggagtctggaatgcatgggagctgcccccccagtggacaccattggaccccacccagcctggatctaccccaggagactctgggaacttttaggggtcactcaattctgcagtataaataactaatgtctctacaattttgaaataaagcaacagacttctcaataatcaatgaagtagctgagaaaactaagtcagaaagtgcattaaactgaatcacaatgtaaatattacacatcaagcgatgaaactggaaaactacaagccacgaatgaatgaattaggaaagaaaaaaagtaggaaatgaatgatcttggctttcctataagaaatttagggcagggcacggtggctcacgcctgtaattccagcactttgggaggccgaggcgggcagatcacgagttcaggagatcgagaccatcttggccaacatggtgaaaccctgtctctcctaaaaatacaaaaattagctggatgtggtggcagtgcctgtaatcccag

SEQ ID NO: 393277 - DNA, 1000 bp, Homo Sapiens
aggagggggtacctggggggtgtcttcctggaaccactgctccgtttctcttcccaaatgttctcatgcattcattgtggattttctctattttccttttagtggagaagcatctgaaagaaaaaggccggactcgggctgttcaacttcaaaagacaccaagtaccagtcggtgtacgtcatatccgaggagaaggatgagtgcgtcatagcaactgaggtcagtgcaggcagcagccgctccctcctcctcggcatgggagcacctgaagctggagcacgggaatcggtctcaggctaacttcccatttgtcttgtggccccccaggtgtaaaatggaagtgagatggcaagactcccgtttctcttaaactaagtaaaattccaaggatatatgccccaacgaatgctgctgaagaggagggaggcctcgtggactgctgctgagaaaccgagttcagaccgagcaggttctcctcctgaggtcctcgacgcctgccgacagcctgtcgcggcccggccgcctgcggcactgccttccgtgacgtcgccgttgcactatggacagttgctcttaagagaatatatatttaaatgggtgaactgaattacgcataagaagcatgcactgcctgagtgtatattttggattcttatgagccagtcttttcttgaattagaaacacaaacactgcctttattgtcctttttgatacgaagatgtgctttttctagatggaaaagatgtgtgttattttttggatttgtaaaaatatttttcatgatatctgtaaagcttgagtattttgtgatgttcgttttttataatttaaattttggtaaatatgtacaaaggcacttcgggtctatgtgactatatttttttgtatataaatgtatttatggaatattgtgcaaatgttatttgagttttttactgttttgttaatgaagaaattcctttttaaaatatttttccaaaataaattttatgaatgac

SEQ ID NO: 393278 - DNA, 1000 bp, Homo Sapiens
gagatagttaaaatttaatctgtcccatctgaaatgaaccctgtagtaaaaccctggttaataagatcatcttagataatttcataattaatatgaactatatggctaacctacccaagtctaccctttttcaagggtgtaagtaatcttggctccatgtggattgactcttttttctttctttcctgtacaaattactgatgagatgtacactagaattgccttatagctgaaatggaaatcagctttagatgaaattaaatttctttctttcaaatactaaatctggctgaaaataaaaagcattaagaaaaaaacaattgtgggaaaaccacattttcttttaatagacttcagatgaggctttttgggttttttagttgttcttttttttccttctacagtttttctttctcatttgctgtctaatattttcttctgtttctcacactccaattatataaagtaccagaatatttggaaaaagtaatagtattgccaatattttatttctatcttttgctataattgagaatatgtagcttttaagatgtcaaaaccaaaattttatatgttttcaaggattaaaatgctgattctgcccccagttccagttccaaagattaaaggaatcgatccagatctcctcaaggtaactaataattttatctaaattgtagctagtactaattaacacctgaagactcctgtcatatgttgaactcctggagaaaatttttttaaatattctatttcttaaaaataagaaaacgtcatatgtatttaaaaagttacacactaatttatgtttttttttatatgttttgttactgttgttcttattgtaaccataattaatctctgaacattatttgctaattcatttaattattatgagtttcttttcatagatcttcattttctttctattttctaggaaggaaaattagaggaggtgaacacaatcttagccattcatgatagctataaacccgaattc

SEQ ID NO: 393279 - DNA, 1000 bp, Homo Sapiens
atcacattgtaagaagaaaccggggtgggtggtgtctccaggtcaatcaacttctgtactgggctctgaccacaatcggttttcagaccacaatgttaggagggtatttttacatccctccagttaacaaatacagcactggcatggttcaccttctcctgcaggtgaccattgacggcaggaattacattgtcgatgctgggtctggaagctcctcccagatgtggcagcctctagaattaatttctgggaaggatcagcctcaggtgccttgcattttctgcttgacagaagagagaggaatctggtacctggaccaaatcaggagagagcagtatattacaaacaaagaatttcttaattctcatctcctgccaaagaagaaacaccaaaaaatatacttatttacgcttgaacctcgaacaattgaagattttgagtctatgaatacatacctgcagacgtctccaacatcttcatttataaccacatcattttgttccttgcagaccccagaaggggtttactgtttggtgggcttcatcctcacctatagaaaattcaattataaagacaatacagatctggtcgagtttaaaactctcactgaggaagaggttgaagaagtgctgaaaaatatatttaagatttccttggggagaaatctcgtgcccaaacctggtgatggatcccttactatttagaataaggaacaaaataaacccttgtgtatgtatcacccaactcactaattatcaacttatgtgctatcagatatcctctctaccctcacgttattttgaagaaaatcctaaacatcaaatactttcatccataaaaatgtcagcatttattaaaaaacaataactttttaaagaaacataaggacacattttcaaattaataaaaataaaggcattttaaggatggcctgtgattatcttgggaagcagagtgattcatgctagaaaacatttaatattgatttattgttgaattc

SEQ ID NO: 393280 - DNA, 1000 bp, Homo Sapiens; identical to SEQ ID NO: 220469

SEQ ID NO: 393281 - DNA, 1000 bp, Homo Sapiens; identical to SEQ ID NO: 283531

SEQ ID NO: 393282 - DNA, 1000 bp, Homo Sapiens; identical to SEQ ID NO: 115065

SEQ ID NO: 393283 - DNA, 1000 bp, Homo Sapiens; identical to SEQ ID NO: 115066

SEQ ID NO: 393284 - DNA, 1000 bp, Homo Sapiens; identical to SEQ ID NO: 283532

SEQ ID NO: 393285 - DNA, 1000 bp, Homo Sapiens; identical to SEQ ID NO: 283534

SEQ ID NO: 393286 - DNA, 1000 bp, Homo Sapiens
ggatttaagagagctttcatcatcacagggcagacatatacacgaaaagtggatattgaagtactgtctgtgctggctagcttgggggcatcagtgcacaagatttgcaccgacatacgcctcctggcaaacctcaaggagatggaggaaccctttgaaaaacagcagattggctcaagtgcgatgccatataagcggaatcccatgcgttcagaacgttgctgcagtcttgcccgccacctgatgacccttgtcatggacccgctacagacagcatctgtccagtggtttgaacgcacactggatgatagtgccaaccgacggatctgtttggccgaggcatttcttaccgcagatactatattgaatacgctgcagaacatttctgaaggattggtcgtgtaccccaaagtaattgaacggcgcattcggcaagagctgcctttcatggccacagagaacatcatcatggccatggtcaaagctggaggtagccgccaggattgccatgagaaaatcagagtgctttctcagcaggcagcttctgtggttaagcaggaagggggtgacaatgacctcatagagcgtatccaggttgatgcctacttcagtcccattcactcccagttggatcatttactggatccttcttctttcactggtcgtgcctcccagcaggtgcagagattcttagaagaggaggtgtatcccctgttaaaaccatatgaaagcgtgatgaaggtgaaagcagaattatgtctgtagagttggaagagaattaaacgaaaatcattgttaattgctgaggcatgaaaattgtgttactataacgccttattttacctcgagaattgttaccttaaattagtacagcactttcttcttcccatggtgctttcctgtttctcagtctcacatttctcaacaaggcaaaaacaaagagcgttgaagttgactctgctcttgcatagtaaatgtagttcatacttgaaaaaaaaaa

SEQ ID NO: 393287 - DNA, 1000 bp, Homo Sapiens; identical to SEQ ID NO: 283535

SEQ ID NO: 393288 - DNA, 1000 bp, Homo Sapiens; identical to SEQ ID NO: 220471

SEQ ID NO: 393289 - DNA, 1000 bp, Homo Sapiens; identical to SEQ ID NO: 283539

SEQ ID NO: 393290 - DNA, 1000 bp, Homo Sapiens; identical to SEQ ID NO: 115067

SEQ ID NO: 393291 - DNA, 1000 bp, Homo Sapiens; identical to SEQ ID NO: 283542

SEQ ID NO: 393292 - DNA, 1000 bp, Homo Sapiens; identical to SEQ ID NO: 115068

SEQ ID NO: 393293 - DNA, 1000 bp, Homo Sapiens; identical to SEQ ID NO: 115069

SEQ ID NO: 393294 - DNA, 1000 bp, Homo Sapiens; identical to SEQ ID NO: 283546

SEQ ID NO: 393295 - DNA, 1000 bp, Homo Sapiens; identical to SEQ ID NO: 283549

SEQ ID NO: 393296 - DNA, 1000 bp, Homo Sapiens; identical to SEQ ID NO: 283550

SEQ ID NO: 393297 - DNA, 1000 bp, Homo Sapiens; identical to SEQ ID NO: 220474

SEQ ID NO: 393298 - DNA, 1000 bp, Homo Sapiens; identical to SEQ ID NO: 283552

SEQ ID NO: 393299 - DNA, 1000 bp, Homo Sapiens; identical to SEQ ID NO: 220475

SEQ ID NO: 393300 - DNA, 1000 bp, Homo Sapiens; identical to SEQ ID NO: 283553

SEQ ID NO: 393301 - DNA, 1000 bp, Homo Sapiens
gctgggcctgctttgcggagccctggggccgtcgcacctatgtcacctggattgccctgatggtgttcgtggcacctaccctgggtatcgccgcctgccaggtgctcatcttccgggagattcatgccagtctggtgccagggccatcagagaggcctggggggcgccgcaggggacgccggacaggcagccccggtgagggagcccacgtgtcagcagctgtggccaagactgtgaggatgacgctagtgattgtggtcgtctatgtgctgtgctgggcacccttcttcctggtgcagctgtgggccgcgtgggacccggaggcacctctggaaggggcgccctttgtgctactcatgttgctggccagcctcaacagctgcaccaacccctggatctatgcatctttcagcagcagcgtgtcctcagagctgcgaagcttgctctgctgtgcccggggacgcaccccacccagcctgggtccccaagatgagtcctgcaccaccgccagctcctccctggccaaggacacttcatcgtgaggagctgttgggtgtcttgcctctagaggctttgagaagctcagctgccttcctggggctggtcctgggagccactgggagggggacccgtggagaattggccagagcctgtggccccgaggctgggacactgtgtggccctggacaagccacagcccctgcctgggtctccacatccccagctgtatgaggagagcttcaggccccaggactgtgggggcccctcaggtcagctcactgagctgggtgtaggaggggctgcagcagaggcctgaggagtggcaggaaagagggagcaggtgcccccaggtgagacagcggtcccaggggcctgaaaaggaaggaccaggctggggccaggggaccttcctgtctccgcctttctaatccctccctcctcattctctccctaataaaaattggagctcttttccacatggcaaggggtctccttggaa

SEQ ID NO: 393302 - DNA, 1000 bp, Homo Sapiens; identical to SEQ ID NO: 220477

SEQ ID NO: 393303 - DNA, 1000 bp, Homo Sapiens; identical to SEQ ID NO: 220478

SEQ ID NO: 393304 - DNA, 1000 bp, Homo Sapiens; identical to SEQ ID NO: 283559

SEQ ID NO: 393305 - DNA, 1000 bp, Homo Sapiens; identical to SEQ ID NO: 115070

SEQ ID NO: 393306 - DNA, 1000 bp, Homo Sapiens
tctctgtgtgtttgacacagactccaacgattactttacttcacccgcttgtaagtttttggctgagaaatgtttaaataatcagcaactccattttctacatattggttcctgccaagacggccgccagttagaatggggtcttgaaaggacaagactttcatccaacagcacaaagaaagaatcctgtggctatgacacctgctatgactgggaaaaatgttcagcctccacttccaaatgtgtctgcctattgcccccacagtgcttcaagggtggaaaccaactctactgtgtcaaaatgggatcatcaacaagtgagaaaacattgaacatctgtgaagtgggaactataagatgtgcaaacaggaagatggaaatactgcatcctggaaagtgtttggcctagcacaattactgctaggcccagcacaatgaacagatttaccatcccgaagaaccaactcctacaaatgagaattcttgcacaaacagcagactggcatgctcaaagttactgacaaaaattattttctgttagtttgagatcattattctcccctgactctcctgtttgggcatgtcttattcagttccagctcatgacgccctgtagcatacccctaggtaccaacttccacagcagtctcgtaaattctcctgttcacattgtacaaaaataatgtgacttctgaggcccttatgtagcctgtgacattaagcattctcacaattagaaataagaataaaacccataattttcttcaatgagttaataaacagaaatctccagaacctctgaaacacattcttgaagcccagctttcatatcttcattcaacaaataatttctgagtgtgtatacaggatgtcaagtactgaccaaagtcctgagaactcggcagataataaaacagacaaaagcctttgccttcatgaagcatacattcattcaggggtagacacacaaaaaatgaaataaacaggtaaaatatgtagc

SEQ ID NO: 393307 - DNA, 1000 bp, Homo Sapiens
ctacggggaatacagagatctcttccgtgattttgggacccactacatcacagaggctgtgcttgggggcatttatgaatacaccctcgttatgaacaaagaggccatggagagaggagattatactcttaacaacgtccatgcctgtgccaaaaatgattttaaaattggtggtgccattgaagaggtctacgtcagtctgggtgtgtctgtaggcaaatgcagaggtattctgaatgaaataaaagacagaaacaagagggacaccatggtggaggacttggtggtcctggtacgaggaggggcaagtgagcacatcaccaccctggcataccaggagctgccgacggcggacctgatgcaggagtggggagacgctgtgcagtacaacccagccatcatcaaagttaaggtggagcctctgtatgaactagtgacagccacagattttgcctattccagcacagtgaggcagaacatgaagcaggcactggaggagttccagaaggaagttagttcctgccactgtgctccctgccaaggaaatggagtccctgtcctgaaaggatcacgctgtgactgcatctgtcctgttggatcccaaggcctagcctgtgaggtctcctatcggaagaatacccccattgatgggaagtggaattgctggtcaaattggtcttcatgctctggaagacgtaagacaagacaaaggcagtgtaacaatccacctcctcaaaatgggggtagcccctgttcaggccctgcttcagaaacacttgactgctcctagcagatgatacagcagtgggctacatacaatgagagccctgagccctcaagaactcatgccagctcagccctacaccagtttccacctggagttcatgcaagggcaaaaggcagtgccatgcaagctgtttaaaataaagatgttaccttgtaaaatgcaagttgatttaaataaatactgagttaaaggcttaaaaaaaaaaaaaaaaaa

SEQ ID NO: 393308 - DNA, 1000 bp, Homo Sapiens; identical to SEQ ID NO: 283562

SEQ ID NO: 393309 - DNA, 1000 bp, Homo Sapiens; identical to SEQ ID NO: 283563

SEQ ID NO: 393310 - DNA, 1000 bp, Homo Sapiens; identical to SEQ ID NO: 283564

SEQ ID NO: 393311 - DNA, 822 bp, Homo Sapiens; identical to SEQ ID NO: 220480

SEQ ID NO: 393312 - DNA, 1000 bp, Homo Sapiens
tcctttggcttactcaaactctgaacagtgtcaccttgcaggctgtggtggagctgacgctgggagtcttcataatacagcacagcggttaagcccaccccctgttaactgcctatttataaccctaggatcctccttatggagaactatttattatacactccaaggcatgtagaactgtaataagtgaattacaggtcacatgaaaccaaaacgggccctgctccataagagcttatatatctgaagcagcaaccccactgatgcagacatccagagagtcctatgaaaagacaaggccattatgcacaggttgaattctgagtaaacagcagataacttgccaagttcagttttgtttctttgcgtgcagtgtctttccatggataatgcatttgatttatcagtgaagatgcagaagggaaatggggagcctcagctcacattcagttatggttgactctgggttcctatggccttgttggagggggccaggctctagaacgtctaacacagtggagaaccgaaaccccccccccccccccgccaccctctcggacagttattcattctctttcaatctctctctctccatctctctctttcagtctctctctctcaacctctttcttccaatctctctttctcaatctctctgtttccctttgtcagtctcttccctcccccagtctctcttctcaatccccctttctaacacacacacacacacacacacacacacacacacacacacacacacacacacagagtcaggccgttgctagtcagttctcttctttccaccctgtccctatctctaccactatagatgagggtgaggagtagggagtgcagccctgagcctgcccactcctcattacgaaatgactgtatttaaaggaaatctattgtatctacctgcagtctccattgtttccagagtgaacttgtaattatcttgttatttattttttgaataataaagacctcttaacattaa

SEQ ID NO: 393313 - DNA, 1000 bp, Homo Sapiens
ctgaccgggagatcaaggtaaccctggtgtttgagcatgtagaccaggacctaaggacatatctggacaaggcacccccaccaggcttgccagccgaaacgatcaaggatctgatgcgccagtttctaagaggcctagatttccttcatgccaattgcatcgttcaccgagatctgaagccagagaacattctggtgacaagtggtggaacagtcaagctggctgactttggcctggccagaatctacagctaccagatggcacttacacccgtggttgttacactctggtaccgagctcccgaagttcttctgcagtccacatatgcaacacctgtggacatgtggagtgttggctgtatctttgcagagatgtttcgtcgaaagcctctcttctgtggaaactctgaagccgaccagttgggcaaaatctttgacctgattgggctgcctccagaggatgactggcctcgagatgtatccctgccccgtggagcctttccccccagagggccccgcccagtgcagtcggtggtacctgagatggaggagtcgggagcacagctgctgctggaaatgctgacttttaacccacacaagcgaatctctgcctttcgagctctgcagcactcttatctacataaggatgaaggtaatccggagtgagcaatggagtggctgccatggaaggaagaaaagctgccatttcccttctggacactgagagggcaatctttgcctttatctctgaggctatggagggtcctcctccatctttctacagagattactttgctgccttaatgacattcccctcccacctctccttttgaggcttctccttctccttcccatttctctacactaaggggtatgttccctcttgtccctttccctacctttatatttggggtccttttttatacaggaaaaacaaaacaaagaaataatggtcttttttttttttttaaaaaaaaaaaaaaaaaaaaaaaaaaaaaaaa

SEQ ID NO: 393314 - DNA, 1000 bp, Homo Sapiens; identical to SEQ ID NO: 283566

SEQ ID NO: 393315 - DNA, 1000 bp, Homo Sapiens; identical to SEQ ID NO: 283567

SEQ ID NO: 393316 - DNA, 1000 bp, Homo Sapiens
ctcccctacgcgccgtgtatccagccttagctcgcaccgacttcaatttcccacccatctccagtaggaaattgattttgaaaaagtaggctgccgccaccacggcattatgatcccttccccctgctgatcaatctgcagtttgtgaacttcacaagaatggtgtgtgcccgttccctggcgtgtgtaggcctggccgcagtccaggggtcagcaggaggaaagggttcacataggctctcaggtgccagtcttccagaaagcaaggactgcccttcattcagccttgctgacctcccagcctttctaaggctcagccccacgggactctggtggctgccagcttgtgagctatctatctatattcatttcatagccaaacaggagacccctttgcaggacttgcacacagggaggctgtagccaggaaaccctcttcttccctggtctggctctgctggagcgggtgggaaccaaacaccttcagtgctggtggccctcaggcccacaggtttaaggctgaggctgccctgacccttccacagtcatttcttctaggttttcttggcccagcactgcccatcccaccccatgaggctcactcattgcagatcccagcccaccctgcccctttcttccccaccctggaggctctctctgcctagtctacagtactgacagaaagcaaggacatgcggcctgcatggtgggagctggttgaattgtctttattaacaaacaggatatccaaggccactacattgaggaggggggaggggggagggaggagaagggttacttgctgctcacactatatacagatgcaagcaaggggcgtggagagtgagggctccctgctccctccctccaccggggaagggcatgggctagaagaggagaggggggtcgggaatggggggaatgttttggctggcggggtcccccctccattccctggagtttgggggaaggggaatcattaaagtgctttcagaaaatg

SEQ ID NO: 393317 - DNA, 1000 bp, Homo Sapiens; identical to SEQ ID NO: 283568

SEQ ID NO: 393318 - DNA, 1000 bp, Homo Sapiens
caggctgcgcgcagcccaagagatggcgcggaagttgtcggagctgccttacgacgggaaggcgcggctggctggggaggggccccccggcgcgcctccaggccggcccgagtccttcgcctttgtggatgaggatgaggacgaagatctctctggcaagagcgagcttcctccttcccttgctctccacccctctactactgcccctctgtccccagaagagcccaatgggcctctgcctggccacaaacagcagccggaagcaccagagcctgcaggtcaaagaccctccatcttccagtccctgcttcactgcttgctgggcagagctcgccccacaaagaagaaaacaacccaggattccacagatttagtggataacatgtcacctgaagagattgaggcctgggagcaggagcagctgagccagcctgtctgttttgattcctgctgtattgaccagtctcccttccagctggtggagcagacaaccctgcacaagactcataccctgttttcactccttggcctccacctcgcttacgtgaccagcatggggaagctcaggggcgtcctggccctggaggagctacagaaggccattgaggggcacaccaagtctggggtgcagctccgccctccccttgccagcttccggaacacgacttcaactcgaaagagtaccggggcacctccatcttctgcagagaactggaacctgcctgaggacaggcctggggccactggaacaggggatgtgattgctgcctccccagagacccctgtgccatctccttccccagagccccctctctccctggccccaggcaaggtagagggcgagttggaggagctggagctggtggagagtccagggctggaagaggagctggccgacatcttgcagggccccagcctgcgatccacagacgaggaggatgaggatgaactgatcctttgaccccctcccacgacctcctcataaagaccgtggagaggc

SEQ ID NO: 393319 - DNA, 1000 bp, Homo Sapiens; identical to SEQ ID NO: 283569

SEQ ID NO: 393320 - DNA, 1000 bp, Homo Sapiens; identical to SEQ ID NO: 283571

SEQ ID NO: 393321 - DNA, 1000 bp, Homo Sapiens; identical to SEQ ID NO: 115072

SEQ ID NO: 393322 - DNA, 1000 bp, Homo Sapiens; identical to SEQ ID NO: 115073

SEQ ID NO: 393323 - DNA, 1000 bp, Homo Sapiens; identical to SEQ ID NO: 283574

SEQ ID NO: 393324 - DNA, 1000 bp, Homo Sapiens; identical to SEQ ID NO: 115074

SEQ ID NO: 393325 - DNA, 1000 bp, Homo Sapiens; identical to SEQ ID NO: 115075

SEQ ID NO: 393326 - DNA, 1000 bp, Homo Sapiens
acagtcgggacaactgccgcctggtgcctaaccccggccaggaggacgcggacagggacggcgtgggcgacgtgtgccaggacgactttgatgcagacaaggtggtagacaagatcgacgtgtgtccggagaacgctgaagtcacgctcaccgacttcagggccttccagacagtcgtgctggacccggagggtgacgcgcagattgaccccaactgggtggtgctcaaccagggaagggagatcgtgcagacaatgaacagcgacccaggcctggctgtgggttacactgccttcaatggcgtggacttcgagggcacgttccatgtgaacacggtcacggatgacgactatgcgggcttcatctttggctaccaggacagctccagcttctacgtggtcatgtggaagcagatggagcaaacgtattggcaggcgaaccccttccgtgctgtggccgagcctggcatccaactcaaggctgtgaagtcttccacaggccccggggaacagctgcggaacgctctgtggcatacaggagacacagagtcccaggtgcggctgctgtggaaggacccgcgaaacgtgggttggaaggacaagaagtcctatcgttggttcctgcagcaccggccccaagtgggctacatcagggtgcgattctatgagggccctgagctggtggccgacagcaacgtggtcttggacacaaccatgcggggtggccgcctgggggtcttctgcttctcccaggagaacatcatctgggccaacctgcgttaccgctgcaatgacaccatcccagaggactatgagacccatcagctgcggcaagcctagggaccagggtgaggacccgccggatgacagccaccctcaccgcggctggatgggggctctgcacccagccccaaggggtggccgtcctgagggggaagtgagaagggctcagagaggacaaaataaagtgtgtgtgcagggaaaaaaaaaaaaaaaaaaaa

SEQ ID NO: 393327 - DNA, 1000 bp, Homo Sapiens; identical to SEQ ID NO: 283577

SEQ ID NO: 393328 - DNA, 1000 bp, Homo Sapiens; identical to SEQ ID NO: 283578

SEQ ID NO: 393329 - DNA, 1000 bp, Homo Sapiens; identical to SEQ ID NO: 220483

SEQ ID NO: 393330 - DNA, 818 bp, Homo Sapiens; identical to SEQ ID NO: 115076

SEQ ID NO: 393331 - DNA, 674 bp, Homo Sapiens; identical to SEQ ID NO: 115077

SEQ ID NO: 393332 - DNA, 743 bp, Homo Sapiens
cgcgcctagcagtgtcccagccgggttcgtgtcgccatggggcagatcgagtgggccatgtgggccaacgaacaggcgctggcgtccggcctgatcctcatcaccgggggcatcgtggccacagctgggcgcttcacccagtggtactttggtgcctactccattgtggcgggcgtgtttgtgtgcctgctggagtacccccgggggaagaggaagaagggctccaccatggagcgctggggacagaagtacatgaccgccgtggtgaagctgttcgggccctttaccaggaattactatgttcgggccgtcctgcatctcctgctctcggtgcccgccggcttcctgctggccaccatccttgggaccgcctgcctggccattgcgagcggcatctacctactggcggctgtgcgtggcgagcagtggacgcccatcgagcccaagccccgggagcggccgcagatcggaggcaccatcaagcagccgcccagcaaccccccgccgcggcccccggccgaggcccgcaagaagcccagcgaggaggaggctgcggtggcggcggggggacccccgggaggtccccaggtcaaccccatcccggtgaccgacgaggtcgtgtgacctcgccccggacctgccctcccgccaggtgcacccacctgcaataaatgcagcgaagccgggaaaaaaaaaaaaaaaaaaaaaaaaaaaaaaaaaaaaaaaaaaaaaaaaaaaaaaaa

SEQ ID NO: 393333 - DNA, 1000 bp, Homo Sapiens; identical to SEQ ID NO: 283581

SEQ ID NO: 393334 - DNA, 1000 bp, Homo Sapiens; identical to SEQ ID NO: 283583

SEQ ID NO: 393335 - DNA, 1000 bp, Homo Sapiens; identical to SEQ ID NO: 115079

SEQ ID NO: 393336 - DNA, 1000 bp, Homo Sapiens
tattgagtacaaagttgggaaattcccatttgctgctaacagcagagctaagacaaatgctgacacagatggcatggtgaagatccttgggcagaaatcgacagacagagtactgggagcacatattcttggaccaggtgctggagaaatggtaaatgaagctgctcttgctttggaatatggagcatcctgtgaagatatagctagagtctgtcatgcacatccgaccttatcagaagcttttagagaagcaaatcttgctgcgtcatttggcaaatcaatcaacttttgaattagaagattatatatttttttttctgaaatttcctgggagcttttgtagaagtcacattcctgaacaggatattctcacagctccaagaatttctaggactgaattatgaaacttttggaaggtatttaataggtttggacaaaatggaatactcttatatctatattttacataaatttagtattttgtttcagtgcactaatatgtaagacaaaaaggactacttattgtagtcatcctggaatatctccgtcaactcatattttcatgctgttcatgaaagattcaatgcccctgaatttaaatagctcttttctctgatacagaaaagttgaattttacatggctggagctagaatttgatatgtgaacagttgtgtttgaagcacagtgatcaagttatttttaatttggttttcacattggaaacaagtcagtcattcagatatgattcaaatgtctataaaccaaactgatgtaagtaaatggtctctcacttgttttatttaacctctaaattctttcattttaggggtagcatttgtgttgaagaggttttaaagcttccattgttgtctgcaactctgaagggtaattatatagttacccaaattaagagagtctatttacggaactcaaatacgtgggcattcaaatgtattacagtggggaatgaagatactgaaataaacgtcttaaatattc

SEQ ID NO: 393337 - DNA, 1000 bp, Homo Sapiens; identical to SEQ ID NO: 115080

SEQ ID NO: 393338 - DNA, 1000 bp, Homo Sapiens; identical to SEQ ID NO: 283586

SEQ ID NO: 393339 - DNA, 1000 bp, Homo Sapiens; identical to SEQ ID NO: 283587

SEQ ID NO: 393340 - DNA, 1000 bp, Homo Sapiens; identical to SEQ ID NO: 220484

SEQ ID NO: 393341 - DNA, 1000 bp, Homo Sapiens; identical to SEQ ID NO: 283590

SEQ ID NO: 393342 - DNA, 1000 bp, Homo Sapiens
ttcgactagaggggatgcagatatgtatgatcttcccaagaaagaggacgctttactctaccagagcaagggctacaatgacgactactatgaagagagctacttcaccaccaggacttatggggagcccgagtctgccggcccgtccagggctgtccgccagtcagtgacttcattcccagatgctgacgctttccatcaccaggtgcatgatgacgatcttttgtcttcttctgaagaggagtgcaaggatagggaacgccccatgtacggccgggacagtgcctaccagagcatcacgcactaccgccctgtttcagcctccaggagctccctggacctgtcctattatcctacttcctcctccacctcttttatgtcctcctcatcatcttcctcttcatggctcacccgccgtgccatccggcctgaaaaccgtgctcctggggctgggctgggccaggatcgccaggtcccgctctggggccagctgctgcttttcctggtctttgtgatcgtcctcttcttcatttaccacttcatgcaggctgaagaaggcaaccccttctagagggagccatgagggtctgggcttcagagctaggtctttggggaagtcctggctgactgccttagcagtgggggtgggggtgggggcaggggcaggggctttatgtgtttttgcttggggggcgctgggcctagcccagagtagtgcttgctccccctgccttgtcccaccagggaggcagcagactcaggccctccatggtcctctttgtcattttgttgacatgcattcctccttttgtcatcttgttggggggaggggattaaccaaaggccaccctgactttgtttttgtggacacacaataaaagccccgtttatttgttaaaaaaaaaaaaaaaaaaaaaaaaaaaaaaaaaaaaaaaaaaaaaaaaaaaaaaaaaaaaaaaaaaaaaaaaaaaaaaaaaaaaaaaaaaaaaaaaaaaaaaaa

SEQ ID NO: 393343 - DNA, 1000 bp, Homo Sapiens; identical to SEQ ID NO: 115081

SEQ ID NO: 393344 - DNA, 1000 bp, Homo Sapiens; identical to SEQ ID NO: 115083

SEQ ID NO: 393345 - DNA, 1000 bp, Homo Sapiens; identical to SEQ ID NO: 115084

SEQ ID NO: 393346 - DNA, 1000 bp, Homo Sapiens; identical to SEQ ID NO: 220486

SEQ ID NO: 393347 - DNA, 1000 bp, Homo Sapiens; identical to SEQ ID NO: 220487

SEQ ID NO: 393348 - DNA, 1000 bp, Homo Sapiens
agaggaactgacaccattgattttggcaactcagaagcagttcaattacacacacatctgtgctggagcatctgccttcggaaagaaccttttgcccagagtagcagccaaacttgaggttgccccgatttctgacatcattgcaatcaagtcacctgacacatttgtgagaactatttatgcaggaaatgctctatgtacagtgaagtgtgatgagaaagtgaaagtgttttctgtccgtggaacatcctttgatgctgcagcaacaagtggcggtagtgccagttcagaaaaggcatcaagtacttcaccagtggaaatatcagagtggcttgaccagaaattaacaaaaagtgatcgaccagagctaacaggtgccaaagtggtggtatctggtggtcgaggcttgaagagtggagagaactttaagttgttatatgacttggcagatcaactacatgctgcagttggtgcttcccgtgctgctgttgatgctggctttgttcccaatgacatgcaagttggacagacgggaaaaatagtagcaccagaactttatattgctgttggaatatctggagccatccaacatttagctgggatgaaagacagcaagacaattgtggcaattaataaagacccagaagctccaattttccaagtggcagattatggaatagttgcagatttatttaaggtagttcctgaaatgactgagatattgaagaaaaaatgaatcaggatcatgccttaaaaagaaaacttttgttaaagtattccactgaaatcacagatatttgtgggtattataacaatcattggaaagcatggagagctacatttcataatttgagggaaaatttctaacagatgccagaatgcttgtttatgggattgctgtgtttccttttaattatttgtggttccaaacaattattgtttgaacttttttaattctgtactaaaatctataataaagcttttccacagctttaaaact

SEQ ID NO: 393349 - DNA, 1000 bp, Homo Sapiens; identical to SEQ ID NO: 220488

SEQ ID NO: 393350 - DNA, 1000 bp, Homo Sapiens; identical to SEQ ID NO: 283596

SEQ ID NO: 393351 - DNA, 1000 bp, Homo Sapiens; identical to SEQ ID NO: 115085

SEQ ID NO: 393352 - DNA, 1000 bp, Homo Sapiens; identical to SEQ ID NO: 220489

SEQ ID NO: 393353 - DNA, 1000 bp, Homo Sapiens
gatatcctctcagctctcttccctgggggcagatatttcccaatacataccactttgaataggatgataggaaataaatgatgtactacattaaattaaattattgtattacatttttgtacacatcagtcattcccacgcttggctgaaaatcaggatcatctgagaaacttaaacaatttctgcattcttaatctccactgttattctattatatcagaatcgctaatagaaccaagaattctagaaaatttcctggtgattctgatgcagcctgtccactaacttgtctttgagaacaatggagatatcagttatcaatgttatttttaaccacccccttcttttttgttgttgtgggttttttcacataaacacatacattgccaattttccagggctcaaaaagtttccttttattcatattttcacatgacgtaaaattttatgtgcttcacataattgtattttagcagggtacatattaggggatggagagggggtacaatttttaagcatttgcagctgcaactctatagacttttgacaaattctttttcacactgatgtagataacagcttaacatttacatagttcttactacttgccacacactgttctaagtggtatatacatatgacatatatattaaaatgtaggaagaaaaatgtttgagtacctgatgaaaatgaatagagagtatgtaatctttgaaagctgaatactgcgtgttctcacttataagtgggagctaaataatgtatacacatggacacaccagagtgtagaataatagacactggagacttggaagagttggagggttggcagggggcgatgataatttacttaatgggtacaatgtacattattcagggggtgatggttacagcccagactttaccactatgcaatatatcaatgtaacaaaactatacttgtactccttaaatttatataaaaataccttaaatctaaaaaaaaaaaaaaaaaaaaaaa

SEQ ID NO: 393354 - DNA, 1000 bp, Homo Sapiens; identical to SEQ ID NO: 283600

SEQ ID NO: 393355 - DNA, 1000 bp, Homo Sapiens; identical to SEQ ID NO: 220490

SEQ ID NO: 393356 - DNA, 1000 bp, Homo Sapiens; identical to SEQ ID NO: 283602

SEQ ID NO: 393357 - DNA, 1000 bp, Homo Sapiens; identical to SEQ ID NO: 220491

SEQ ID NO: 393358 - DNA, 1000 bp, Homo Sapiens; identical to SEQ ID NO: 118901

SEQ ID NO: 393359 - DNA, 889 bp, Homo Sapiens; identical to SEQ ID NO: 115086

SEQ ID NO: 393360 - DNA, 1000 bp, Homo Sapiens; identical to SEQ ID NO: 220493

SEQ ID NO: 393361 - DNA, 1000 bp, Homo Sapiens; identical to SEQ ID NO: 220393

SEQ ID NO: 393362 - DNA, 1000 bp, Homo Sapiens; identical to SEQ ID NO: 283605

SEQ ID NO: 393363 - DNA, 1000 bp, Homo Sapiens; identical to SEQ ID NO: 115087

SEQ ID NO: 393364 - DNA, 1000 bp, Homo Sapiens; identical to SEQ ID NO: 115088

SEQ ID NO: 393365 - DNA, 1000 bp, Homo Sapiens; identical to SEQ ID NO: 283608

SEQ ID NO: 393366 - DNA, 1000 bp, Homo Sapiens
tgtttgacaacgacttcccagctctgcagcctgatgcccccagtccaggacccagtgatcatccccttttccaagcaaagtctgctcgaggagtctgtaaggtcatgtgcttccacccctggtcggatgtaacgctgccactcatgtcggtccctgagatccgggctgttgttgatgcatgggcctcagtcacagaggagctgggtgcccagtacccttgggtgcagatctttgaaaacaaaggtgccatgatgggctgttctaacccccacccccactgccaggtatgggccagcagtttcctgccagatattgcccagcgtgaggagcgatctcagcaggcctataagagtcagcatggagagcccctgctaatggagtacagccgccaggagctactcaggaaggaacgtctggtcctaaccagtgagcactggttagtactggtccccttctgggcaacatggccctaccagacactgctgctgccccgtcggcatgtgcggcggctacctgagctgacccctgctgagcgtgatgatctagcctccatcatgaagaagctcttgaccaagtatgacaacctctttgagacgtcctttccctactccatgggctggcatggggctcccacaggatcagaggctggggccaactggaaccattggcagctgcacgctcattactaccctccgctcctgcgctctgccactgtccggaaattcatggttggctacgaaatgcttgctcaggctcagagggacctcacccctgagcaggctgcagagagactaagggcacttcctgaggttcattaccacctggggcagaaggacagggagacagcaaccatcgcctgaccacgccgaccacagggccttgaatccttttttgttttcaacagtcttgctgaattaagcagaaagggccttgaatcctggcctggaatttgggcagatatagcattaataaaactgtgcatctcaaaaaaaaaaaaaaa

SEQ ID NO: 393367 - DNA, 1000 bp, Homo Sapiens
ccagcgtgcgcaggctgacgcccagctgcgagatcaccttcatcgagtcggaggagggcagtggccggggcgcggccctggtctcggcggtggcctgtaagaaggcctgtatgctgggccagtgagagcagtggccgcaagcgcagggaggatgccacagccccacagcacccaggctccatggggaagtgctccccacacgtgctcgcagcctggcggggcaggaggcctggccttgtcaggacccaggccgcctgccataccgctggggaacagagcgggcctcttccctcagtttttcggtgggacagccccagggccctaacgggggtgcggcaggagcaggaacagagactctggaagccccccacctttctcgctggaatcaatttcccagaagggagttgctcactcaggactttgatgcatttccacactgtcagagctgttggcctcgcctgggcccaggctctgggaaggggtgccctctggatcctgctgtggcctcacttccctgggaactcatcctgtgtggggaggcagctccaacagcttgaccagacctagacctgggccaaaagggcaggccaggggctgctcatcacccagtcctggccattttcttgcctgaggctcaagaggcccagggagcaatgggagggggctccatggaggaggtgtcccaagctttgaataccccccagagaccttttctctcccataccatcactgagtggcttgtgattctgggatggaccctcgcagcaggtgcaagagacagagcccccaagcctctgccccaaggggcccacaaaggggagaagggccagccctacatcttcagctcccatagcgctggctcaggaagaaaccccaagcagcattcagcacaccccaagggacaaccccatcatatgacatgccaccctctccatgcccaacctaagattgtgtgggttttttaattaaaaatgttaaaagttttaaacatgaaaaaaaa

SEQ ID NO: 393368 - DNA, 1000 bp, Homo Sapiens; identical to SEQ ID NO: 115090

SEQ ID NO: 393369 - DNA, 1000 bp, Homo Sapiens; identical to SEQ ID NO: 283612

SEQ ID NO: 393370 - DNA, 1000 bp, Homo Sapiens; identical to SEQ ID NO: 220496

SEQ ID NO: 393371 - DNA, 1000 bp, Homo Sapiens; identical to SEQ ID NO: 115091

SEQ ID NO: 393372 - DNA, 1000 bp, Homo Sapiens; identical to SEQ ID NO: 283614

SEQ ID NO: 393373 - DNA, 1000 bp, Homo Sapiens
tccccaaagagattcagaaggcagacttcaggcagaccctcagcgctttcctcatgggattcgccagctagctaattatgttcacagcaaaggactgaagctagggatttatgcagatgttggaaataaaacctgcgcaggcttccctgggagttttggatactacgacattgatgcccagacctttgctgactggggagtagatctgctaaaatttgatggttgttactgtgacagtttggaaaatttggcagatggttataagcacatgtccttggccctgaataggactggcagaagcattgtgtactcctgtgagtggcctctttatatgtggccctttcaaaagcccaattatacagaaatccgacagtactgcaatcactggcgaaattttgctgacattgatgattcctggaaaagtataaagagtatcttggactggacatcttttaaccaggagagaattgttgatgttgctggaccagggggttggaatgacccagatatgttagtgattggcaactttggcctcagctggaatcagcaagtaactcagatggccctctgggctatcatggctgctcctttattcatgtctaatgacctccgacacatcagccctcaagccaaagctctccttcaggataaggacgtaattgccatcaatcaggaccccttgggcaagcaagggtaccagcttagacagggagacaactttgaagtgtgggaacgacctctctcaggcttagcctgggctgtagctatgataaaccggcaggagattggtggacctcgctcttataccatcgcagttgcttccctgggtaaaggagtggcctgtaatcctgcctgcttcatcacacagctcctccctgtgaaaaggaagctagggttctatgaatggacttcaaggttaagaagtcacataaatcccacaggcactgttttgcttcagctagaaaatacaatgcagatgtcattaaaagacttactttaa

SEQ ID NO: 393374 - DNA, 1000 bp, Homo Sapiens; identical to SEQ ID NO: 220498

SEQ ID NO: 393375 - DNA, 900 bp, Homo Sapiens
gccaggacctttcaggccagacaggagcacctgaccaaaggcttcacagccgccctcaccgcccggccttctacggtgtccagagacagttagccaggcctgggctgggcacactccaccttccctagtcaccagctggtttcccagaggagaaggctgagacccgagaagggagccagcctgtcccatgcctgcctggggagccctgttcctgctctgggccacagcagaggccaccaaggactgccccagcccatgtacctgccgcgccctggaaaccatggggctgtgggtggactgcaggggccacggactcacggccctgcctgccctgccggcccgcacccgccaccttctgctggccaacaacagccttcagtccgtgcccccgggagcctttgaccacctgccccagctgcagaccctcgatgtgacgcagaacccctggcactgtgactgcagcctcacctatctgcgcctctggctggaggaccgcacgcccgaggccctgctgcaggtccgctgtgccagccccagcctcgctgcccatggcccgctgggccggctgacaggctaccagctgggcagctgtggctggcagctgcaggcgtcctgggtgcgcccgggggtcttgtgggacgtggcgctggtcgccgtggccgcgctgggcctggctcttctggctggcctgctgtgtgccaccacagaggccctggattgagccaggcccccagaacccctggctccaggccagggggccagtccctgaggcaggtccccagactccaccaagcctggtcagcccaaaccaccagaagcccagaataaactggcagctcagctgttttatataaaaaaaaaaaaaaaaaaaaaaaaaaaaaaaaaaaaaaaaaaaaaaaa

SEQ ID NO: 393376 - DNA, 1000 bp, Homo Sapiens; identical to SEQ ID NO: 115092

SEQ ID NO: 393377 - DNA, 1000 bp, Homo Sapiens; identical to SEQ ID NO: 283617

SEQ ID NO: 393378 - DNA, 1000 bp, Homo Sapiens; identical to SEQ ID NO: 283618

SEQ ID NO: 393379 - DNA, 1000 bp, Homo Sapiens
accggctgcttacacagatgctgcctccgtctgtggctgaggccttgaagacggggacaccagtggagcccgagtactttgagcaagtgacactgtactttagtgacattgtgggcttcaccaccatctctgccatgagtgagcccattgaggttgtggacctgctcaacgatctctacacactctttgatgccatcattggttcccacgatgtctacaaggtggagacaataggggacgcctatatggtggcctcggggctgccccagcggaatgggcagcgacacgcggcagagatcgccaacatgtcactggacatcctcagtgccgtgggcactttccgcatgcgccatatgcctgaggttcccgtgcgcatccgcataggcctgcactcgggtccatgcgtggcaggcgtggtgggcctcaccatgccgcggtactgcctgtttggggacacggtcaacaccgcctcgcgcatggagtccaccgggctgccttaccgcatccacgtgaacttgagcactgtggggattctccgtgctctggactcgggctaccaggtggagctgcgaggccgcacggagctgaagggcaagggcgccgaggacactttctggctagtgggcagacgcggcttcaacaagcccatccccaaaccgcctgacctgcaaccggggtccagcaaccacggcatcagcctgcaggagatcccacccgagcggcgacggaagctggagaaggcgcggccgggccagttctcttgagaagtgaggcccggccccggacagggtctgggccctgctccctgtcccatctgcagtggaccccaggcacccccctttgaggaggtggggtgaactgctccttggcagggatttgtgacactgcattgctgggctgtgttcctcgggctcttctggaccttgcaccgtggataccaggccatgtgccatggtatttgggtcctgggagggtgggtgaaataaaggcatactgtctt

SEQ ID NO: 393380 - DNA, 1000 bp, Homo Sapiens; identical to SEQ ID NO: 115094

SEQ ID NO: 393381 - DNA, 1000 bp, Homo Sapiens; identical to SEQ ID NO: 115095

SEQ ID NO: 393382 - DNA, 1000 bp, Homo Sapiens; identical to SEQ ID NO: 115096

SEQ ID NO: 393383 - DNA, 1000 bp, Homo Sapiens; identical to SEQ ID NO: 115097

SEQ ID NO: 393384 - DNA, 1000 bp, Homo Sapiens; identical to SEQ ID NO: 283622

SEQ ID NO: 393385 - DNA, 1000 bp, Homo Sapiens; identical to SEQ ID NO: 284692

SEQ ID NO: 393386 - DNA, 1000 bp, Homo Sapiens; identical to SEQ ID NO: 283623

SEQ ID NO: 393387 - DNA, 1000 bp, Homo Sapiens; identical to SEQ ID NO: 220503

SEQ ID NO: 393388 - DNA, 1000 bp, Homo Sapiens
atgtgttttactgaactactggaaagttttgccaaagtctttcttgcggtcaatgggacagtgggcagtgatcactggagcaggcgatggaattgggaaagcgtactcgttcgagctagcaaaacgtggactcaatgttgtccttattagccggacgctggaaaaactagaggccattgccacagagatcgagcggactacagggaggagtgtgaagattatacaagcagattttacaaaagatgacatctacgagcatattaaagaaaaacttgcaggcttagaaattggaattttagtcaacaatgtcggaatgcttccaaaccttctcccaagccatttcctgaacgcaccggatgaaatccagagcctcatccattgtaacatcacctccgtagtcaagatgacacagctaattctgaaacatatggaatcaaggcagaaaggtctcatcctgaacatttcttctgggatagccctgtttccttggcctctctactccatgtactcagcttccaaggcgtttgtgtgcgcattttccaaggccctgcaagaggaatataaagcaaaagaagtcatcatccaggtgctgaccccatatgctgtctcgactgcaatgacaaagtatctaaatacaaatgtgataaccaagactgctgatgagtttgtcaaagagtcattgaattatgtcacaattggaggtgaaacctgtggctgccttgcccatgaaatcttggcgggctttctgagcctgatcccggcctgggccttctacagcggtgccttccaaaggctgctcctgacacactatgtggcatacctgaagctcaacaccaaggtcaggtagccaggcggtgaggagtccagcacaaccttttcctcaccagtcccatgctggctgaagaggaccagaggagcagaccagcacttcaacctagtccgctgaagatggagggggctggggtcacagaggcatagaatacacattttttgccacttt

SEQ ID NO: 393389 - DNA, 1000 bp, Homo Sapiens; identical to SEQ ID NO: 283626

SEQ ID NO: 393390 - DNA, 1000 bp, Homo Sapiens; identical to SEQ ID NO: 283628

SEQ ID NO: 393391 - DNA, 1000 bp, Homo Sapiens; identical to SEQ ID NO: 283630

SEQ ID NO: 393392 - DNA, 1000 bp, Homo Sapiens
ggataaaatcattattacctaaactatcttgtggagttaaaaacagaatgcacattcgaaggaaacgaattgtgggaggaaagcgagcacaactgggagacctcccatggcaggtggcaattaaggatgccagtggaatcacctgtgggggaatttatattggtggctgttggattctgactgctgcacattgtctcagagccagtaaaactcatcgttaccaaatatggacaacagtagtagactggatacaccccgaccttaaacgtatagtaattgaatacgtggatagaattattttccatgaaaactacaatgcaggcacttaccaaaatgacatcgctttgattgaaatgaaaaaagacggaaacaaaaaagattgtgagctgcctcgttccatccctgcctgtgtcccctggtctccttacctattccaacctaatgatacatgcatcgtttctggctggggacgagaaaaagataacgaaagagtcttttcacttcagtggggtgaagttaaactaataagcaactgctctaagttttacggaaatcgtttctatgaaaaagaaatggaatgtgcaggtacatatgatggttccatcgatgcctgtaaaggggactctggaggccccttagtctgtatggatgccaacaatgtgacttatgtctggggtgttgtgagttggggggaaaactgtggaaaaccagagttcccaggtttttacaccaaagtggccaattattttgactggattagctaccatgtaggaaggccttttatttctcagtacaatgtataaaattgtgatctctctcttcattctattctttttctctcaagagttccatttaatggaaataaaacggtataattaataattctctaggggggaaaaatgaagcaaatctcattggatatttttaaaggtctccacagagtttatgccatattggaattttgttgtataattctcaaataaatattttggtgaagcat

SEQ ID NO: 393393 - DNA, 1000 bp, Homo Sapiens; identical to SEQ ID NO: 115098

SEQ ID NO: 393394 - DNA, 1000 bp, Homo Sapiens; identical to SEQ ID NO: 220504

SEQ ID NO: 393395 - DNA, 1000 bp, Homo Sapiens; identical to SEQ ID NO: 115099

SEQ ID NO: 393396 - DNA, 1000 bp, Homo Sapiens; identical to SEQ ID NO: 283633

SEQ ID NO: 393397 - DNA, 1000 bp, Homo Sapiens; identical to SEQ ID NO: 220505

SEQ ID NO: 393398 - DNA, 1000 bp, Homo Sapiens; identical to SEQ ID NO: 115291

SEQ ID NO: 393399 - DNA, 1000 bp, Homo Sapiens; identical to SEQ ID NO: 115100

SEQ ID NO: 393400 - DNA, 1000 bp, Homo Sapiens
ccccattttctggtatgcccccgaatccctctcggacaacatcttctctcgccagtcagacgtctggagcttcggggtcgtcctgtacgagctcttcacctactgcgacaaaagctgcagcccctcggccgagttcctgcggatgatgggatgtgagcgggatgtccccgccctctgccgcctcttggaactgctggaggagggccagaggctgccggcgcctcctgcctgccctgctgaggttcacgagctcatgaagctgtgctgggcccctagcccacaggaccggccatcattcagcgccctgggcccccagctggacatgctgtggagcggaagccgggggtgtgagactcatgccttcactgctcacccagagggcaaacaccactccctgtccttttcatagctcctgcccgcagacctctggattaggtctctgttgactggctgtgtgaccttaggcccggagctgcccctctctgggcctcagaggccttatgagggtcctctacttcaggaacacccccatgacattgcatttgggggggctcccgtggcctgtagaatagcctgtggcctttgcaatttgttaaggttcaagacagatgggcatatgtgtcagtggggctctctgagtcctggcccaaagaagcaaggaaccaaatttaagactctcgcatcttcccaaccccttaagccctggccccctgagtttccttttctgtctctctctttttattttttttatttttatttttatttttgagacagagcctcgctctgttacccagggtggagtgcagtggtgcgatctcggctcagtgcaacctctgcttcccaggttcaagcgattctcctgcctcagcctcccgagtagctgggattacaggtgtgcaccaccacacccggctaattttttttatttttaatagagatgaggtttcaccatgatggccaggctgatctcgaactcctaacctcaagtgatcctcccacc

SEQ ID NO: 393401 - DNA, 1000 bp, Homo Sapiens; identical to SEQ ID NO: 115101

SEQ ID NO: 393402 - DNA, 1000 bp, Homo Sapiens
ggggcccgccagggtcatcgccatcgtctccgtcatggtcatcctcatctccatcgtcatcttttgcctggagacgctccccgagctgaaggatgacaaggacttcacgggcaccgtccaccgcatcgacaacaccacggtcatctacaattccaacatcttcacagaccccttcttcatcgtggaaacgctgtgcatcatctggttctccttcgagctggtggtgcgcttcttcgcctgccccagcaagacggacttcttcaaaaacatcatgaacttcatagacattgtggccatcattccttatttcatcaccctgggcaccgagatagctgagcaggaaggaaaccagaagggcgagcaggccacctccctggccatcctcagggtcatccgcttggtaagggtttttagaatcttcaagctctcccgccactctaagggcctccagatcctgggccagaccctcaaagctagtatgagagagctagggctgctcatctttttcctcttcatcggggtcatcctgttttctagtgcagtgtactttgccgaggcggaagaagctgagtcgcacttctccagtatccccgatgctttctggtgggcggtggtgtccatgaccactgtaggatacggtgacatgtaccctgtgacaattggaggcaagatcgtgggctccttgtgtgccatcgctggtgtgctaacaattgccctgcccgtacctgtcattgtgtccaatttcaactatttctaccaccgagaaactgagggggaagagcaggctcagttgctccacgtcagttcccctaacttagcctctgacagtgacctcagtcgccgcagttcctctactatgagcaagtatgagtacatggagatcgaagaggatatgaataatagcatagcccattatagacaggtcaatatcagaactgccaattgcaccacagctaaccaaaactgcgttaataagagcaagctactgaccgatgtttaa

SEQ ID NO: 393403 - DNA, 1000 bp, Homo Sapiens; identical to SEQ ID NO: 220507

SEQ ID NO: 393404 - DNA, 1000 bp, Homo Sapiens; identical to SEQ ID NO: 283638

SEQ ID NO: 393405 - DNA, 1000 bp, Homo Sapiens
gtcagcgtagaaatggacgctgcccccggagtggacctcaccaggctcctcaatgatatgcgggcgcagtatgaaaccatcgctgagcagaatcggaaggacgctgaagcctggttcattgaaaagagcggggagctccgtaaggagattagcaccaacaccgagcagcttcagtccagcaagagcgaggtcaccgacctgcgtcgcgcctttcagaacctggagatcgagctacagtcccagctcgccatgaagaaatccctggaggactccttggccgaagccgagggcgattactgcgcgcagctgtcccaggtgcagcagctcatcagcaacctggaggcacagctgctccaggtgcgcgcggacgcagagcgccagaacgtggaccaccagcggctgctgaatgtcaaggcccgcctggagctggagattgagacctaccgccgcctgctggacggggaggcccaaggtgatggtttggaggaaagtttatttgtgacagactccaaatcacaagcacagtcaactgattcctctaaagacccaaccaaaacccgaaaaatcaagacagttgtgcaggagatggtgaatggtgaggtggtctcatctcaagttcaggaaattgaagaactaatgtaaaatttcacaagatctgccccatgattggttccttaggaacaagaaatttacaagtagaaattattcctttcagagtaacatgctgtattacttcaatccctatttttgtctgttccattttctttggattccctattcacattgaatcctttttgcccttctgaaacaatattcagtcacaagtcattttggtcatgttggtctttgtaacaaatcaaaattaccttatatccttctggacctggagtagtcttttaacgaactttcttctggtaacccggaatattttttaatcatagagctttactcaagtagtattgttttaatagagttaattgtaataaaagatgaatggtaa

SEQ ID NO: 393406 - DNA, 1000 bp, Homo Sapiens; identical to SEQ ID NO: 115102

SEQ ID NO: 393407 - DNA, 1000 bp, Homo Sapiens
cagctgcagatgatccaggagcagatcagtaacttggaggcccagatcactgacgtccggcaagagatcgagtgccagaatcaggaatacagccttctgctcagcattaagatgcggctggagaaggaaatcgagacctaccacaacctccttgagggaggccaggaagactttgaatcctccggagctggaaaaattggccttggaggtcgaggaggaagtggaggcagttatggaagaggatccaggggaggaagtggaggcagctatggtggaggaggaagtggaggtggctatggtggaggaagtgggtccaggggaggaagtggaggcagctacggtggaggaagtggttctggaggaggtagtggaggtggctatggtggaggaagtggaggtggccatagcggaggaagtggaggtggtcatagtggaggaagtgggggcaactatggaggaggaagtggctctggaggaggaagtgggggtggctatggtggaggaagtgggtccaggggaggaagtggaggcagccatggtggaggaagtggttttggaggtgaaagtggaggcagctacggaggcggtgaagaagcgagtggaagtggtggcggctacggaggaggaagcggaaaatcatcccattcctagtcttcttcctcaaaatctggtgaccaagatgagacaaaaggcttcctttcgcgatactagagcctctgtaaacttctcctgcccagccccagctgagcatccccagatgggcagactcccgatgaagcctgcttattggatcctgacatcaggaatagctggcaacaagcccctgtgcccgtttgggactgaactgacttggcatatgtgcctctggctttccattggcttccaaccctgcttggctttgatgccttcagggttggggagacagacctctttcctctctctggcctggggtgctctcacaccctgcacgatcttgactataataaagcttccctactgc

SEQ ID NO: 393408 - DNA, 1000 bp, Homo Sapiens; identical to SEQ ID NO: 283640

SEQ ID NO: 393409 - DNA, 1000 bp, Homo Sapiens; identical to SEQ ID NO: 220510

SEQ ID NO: 393410 - DNA, 1000 bp, Homo Sapiens; identical to SEQ ID NO: 283642

SEQ ID NO: 393411 - DNA, 1000 bp, Homo Sapiens; identical to SEQ ID NO: 283643

SEQ ID NO: 393412 - DNA, 1000 bp, Homo Sapiens; identical to SEQ ID NO: 283645

SEQ ID NO: 393413 - DNA, 1000 bp, Homo Sapiens; identical to SEQ ID NO: 283646

SEQ ID NO: 393414 - DNA, 1000 bp, Homo Sapiens; identical to SEQ ID NO: 283647

SEQ ID NO: 393415 - DNA, 1000 bp, Homo Sapiens; identical to SEQ ID NO: 283649

SEQ ID NO: 393416 - DNA, 1000 bp, Homo Sapiens; identical to SEQ ID NO: 283650

SEQ ID NO: 393417 - DNA, 1000 bp, Homo Sapiens; identical to SEQ ID NO: 283651

SEQ ID NO: 393418 - DNA, 1000 bp, Homo Sapiens; identical to SEQ ID NO: 115105

SEQ ID NO: 393419 - DNA, 1000 bp, Homo Sapiens; identical to SEQ ID NO: 283653

SEQ ID NO: 393420 - DNA, 1000 bp, Homo Sapiens; identical to SEQ ID NO: 115106

SEQ ID NO: 393421 - DNA, 1000 bp, Homo Sapiens; identical to SEQ ID NO: 283655

SEQ ID NO: 393422 - DNA, 1000 bp, Homo Sapiens; identical to SEQ ID NO: 220512

SEQ ID NO: 393423 - DNA, 1000 bp, Homo Sapiens; identical to SEQ ID NO: 283657

SEQ ID NO: 393424 - DNA, 1000 bp, Homo Sapiens; identical to SEQ ID NO: 115107

SEQ ID NO: 393425 - DNA, 1000 bp, Homo Sapiens; identical to SEQ ID NO: 283660

SEQ ID NO: 393426 - DNA, 1000 bp, Homo Sapiens; identical to SEQ ID NO: 283661

SEQ ID NO: 393427 - DNA, 1000 bp, Homo Sapiens; identical to SEQ ID NO: 283662

SEQ ID NO: 393428 - DNA, 872 bp, Homo Sapiens
ctgctttctgcattcttctctccacatgcctctctgtacttacagccccaatggcccccaaaaagccagagcccaagaaggatgatgccaaggcagcccccaaggcagctccagctcccgcacctccccctgagcctgagcgccctaaggaggtcgagtttgatgcttccaagatcaagattgagttcacacctgagcagattgaagagttcaaggaagccttcatgctgttcgaccgcacacccaagtgtgagatgaagatcacctacgggcagtgtggggatgtcctgcgggcgctgggccagaaccccacacaggcagaagtgctccgtgtcctggggaagccaagacaggaagagctcaataccaagatgatggactttgaaactttcctgcctatgctccagcacatttccaagaacaaggacacaggcacctatgaggacttcgtggaggggctgcgggtcttcgacaaggagggcaatggcactgtcatgggtgctgagcttcgccacgtgctggccacgctgggtgagaggctgacagaagacgaagtggagaagttgatggctgggcaagaggactccaatggctgcatcaactatgaagcatttgtgaagcacatcatgtccagctaaacctcgtgcccagaagccaggaaggctgtgcaggacgtctcatctcccatgtgtgatgctgacaccaagcggcctggagtcgtgggaaggaggggagccttaccaagactcctgcaaaaacccttggacctctccacgtggttgccgtctctggcccctctcaggctgtgcttacctgtgacagcagctctgtccccaccccatgggcctcatgaataaaggcttcttgccggc

SEQ ID NO: 393429 - DNA, 1000 bp, Homo Sapiens; identical to SEQ ID NO: 220513

SEQ ID NO: 393430 - DNA, 1000 bp, Homo Sapiens
cccaggaccttatccggcaggtctcacctgatgactggaagcggtccatcgtcgcctacttcaacaagcacgcagggaagtccaaggaggaggccaagctggccttcctgaagctcatcttcaagtggcccacctttggctcagccttcttcgaggtgaagcaaactacggagccaaacttccctgagatcctcctaattgccatcaacaagtatggggtcagcctcatcgatcccaaaacgaaggatatcctcaccactcatcccttcaccaagatctccaactggagcagcggcaacacctacttccacatcaccattgggaacttggtgcgcgggagcaaactgctctgcgagacgtcactgggctacaagatggatgacctcctgacttcctacattagccagatgctcacagccatgagcaaacagcggggctccaggagcggcaagtgaacagtcacggggaggtgctggttccatgcctgctctcgaggcagcagtgggttcaggcccatcagctacccctgcagctggggaagacttatgccatcccggcagcgaggctgggctggccagccaccactgactataccaactgggcctctgatgttcttccagtgaggcatctctctgggatgcagaacttccctccatccacccctctggcacctgggttggtctaatcctagtttgctgtggccttcccggttgtgagagcctgtgatccttagatgtgtctcctgtttcagaccagccccaccatgcaacttcctttgactttctgtgtaccactgggatagaggaatcaagaggacaatctagctctccatactttgaacaaccaaatgtgcattgaatactctgaaaccgaagggactggatctgcaggtgggatgagggagacagaccacttttctatattgcagtgtgaatgctgggcccctgctcaagtctaccctgatcacctcagggcataaagcatgtttcattctctgaaa

SEQ ID NO: 393431 - DNA, 1000 bp, Homo Sapiens; identical to SEQ ID NO: 115108

SEQ ID NO: 393432 - DNA, 1000 bp, Homo Sapiens; identical to SEQ ID NO: 283665

SEQ ID NO: 393433 - DNA, 1000 bp, Homo Sapiens
tgtagaggcaggcattatgtaggataagagctccggggggattcttcatgcaccagtgtttagggtacgtgcttcctaagtaaatccaaacattgtctccatcctccccgtcattagtgctctttcaatgtgatgtgggaaagcaggaggatggacacaccccactgaaagatgtaggcaggggcaggtctctcaaccaggcatatttttaaaagttgcttctgtactggttctcttcttttgctctgaggtgtgggctccctcatctcgtaaccagagaccagcacatgtcagggaagcacccagtgtcggctccccatccaaatccacaccagcaccttgttacagacaagaagtcagaggaaagggcggggtccctgcagggctgaagcctaagctactgtgaggcgctcacgagtggcagctcctgttactcccttttaaattacctgggaaatcttaacagaaaggtaatgggcccccagaaatacccacagcatagtgacctcagaccctgatactcaccacaaaacttttaagatgctgattgggagccgcttgtggctgctgggtgtgtgtgtgtgtgtgtgcgtgcgtgcgtgtgtgtgtgtctctgctggggaccctggccacccccctgctgctgtcttggtgcctgtcacccacatggtctgccatcctaacacccagctctgctcagaaaacgtcctgcgtggaggagggatgatgcagaattctgaagtcgacttccctctggctcctggcgtgccctcgctcccttcctgagcccagctcgtgttgcgccggaggctgcgcggcccctgatttctgcatggtgtagaactttctccaatagtcacattggcaaagggagaactggggtgggcggggggtggggctggcagggaattagaatttctctctctcttttaatagttttattttgtctgtcctgtttgttcatttggatgttttaatttttaaaaaaaaaaaaaaaaaa

SEQ ID NO: 393434 - DNA, 1000 bp, Homo Sapiens; identical to SEQ ID NO: 115109

SEQ ID NO: 393435 - DNA, 1000 bp, Homo Sapiens; identical to SEQ ID NO: 220514

SEQ ID NO: 393436 - DNA, 1000 bp, Homo Sapiens; identical to SEQ ID NO: 283667

SEQ ID NO: 393437 - DNA, 1000 bp, Homo Sapiens; identical to SEQ ID NO: 283669

SEQ ID NO: 393438 - DNA, 1000 bp, Homo Sapiens; identical to SEQ ID NO: 283670

SEQ ID NO: 393439 - DNA, 1000 bp, Homo Sapiens; identical to SEQ ID NO: 283671

SEQ ID NO: 393440 - DNA, 1000 bp, Homo Sapiens; identical to SEQ ID NO: 283672

SEQ ID NO: 393441 - DNA, 1000 bp, Homo Sapiens
tctacacagagtggaatgggcaacccttctgttttttgcagcgctctttgttctgatggaggcattggcacatctccacttaatagaatatgttggagaacaaactgctttgctaataaagatggtcccagaggagcagcgcctcatagccgccattgtcctggtggtgtgggtctcagccctggcgtcgtccctgattgacaacatcccgttcactgctaccatgattcccgtgctcctgaacctgagccacgaccctgaggttggcctgcccgcaccgccgctcatgtatgccctggccttcggtgcttgcctgggaggcaacgggacactgattggcgcgtcggcaaacgtcgtgtgtgcagggattgcagaacagcatggatatgggttctccttcatggaatttttcaggctgggcttcccaatgatggttgtgtcctgcactgttgggatgtgttatctccttgtggctcatgtggtggtgggatggaattaatagacatccatctattgctcgaagactaaaggaaacttcatccatcacaacccattagtcataaaactaccctgaccccactgtttgaagaagaaaaggtgcttaccctggagatgctacagagacacagtggaatagaccttgacactaacactctaattcaagcgaatgttggaacaccatgacctcctctgtgtgtcctttctccccaaggacaaaatgtagaaagatgtgagataacttactcaagattcccctccagaaaaatacgtatgtttaaaaacccttcctgctatacataggaaaagacacacatccacctaaaattgactgtactgtttaactgtcaattctcctgaggctaaacacagtttgtttttcttgtaatcacttttcatgttaaaataatcagcattcaaattgtatgctttctgaatatagactttctgggaaaaggtttactgctcgtaaggaaacattttatgtattaaaataaactgt

SEQ ID NO: 393442 - DNA, 1000 bp, Homo Sapiens
tgccacaatacctcggcccttctcagttcgctacgacccatacacccaaaggattgaggtcttggacaatacccagcagcttaagattttggctgattccattaacagtgaaattggaatcctttgcagtgccctccagaaaataaagtaaagccatggacagaatgtggtctgtcagctgtgaatctgttgatggagatccaactatttctttcatcagaaaaagtccgaaaagcaaaccttaatttgaaataacagccttaaatcctttacaagatggagaaacaacaaataagtcaaaataatctgaaatgacaggatatgagtacatactcaagagcataatggtaaatcttttggggtcatctttgatttagagatgataatcccatactctcaattgagttaaatcagtaatctgtcgcatttcatcaagattaattaaaatttgggacctgcttcattcaagcttcatatatgctttgcagagaactcataaaggagcatataaggctaaatgtaaaacacaagactgtcattagaattgaattattgggcttaatataaatcgtaacctatgaagtttattttctattttagttaactatgattccaattactactttgttattgtacctaagtaaattttctttaggtcagaagcccattaaaatagttacaagcattgaacttctttagtattatattaatataaaaacatttttgtatgttttattgtaatcataaatactgctgtataaggtaataaaactctgcacctaatccccataacttccagtatcattttccaattaattatcaagtctgttttgggaaacactttgaggacatttatgatgcagcagatgttgactaaaggcttggttggtagatattcaggaaatgttcactgaataaataagtaaatacattattgaaaagcaaatctgtataaatgtgaaatttttatttgtattagtaataaaacattagtagttta

SEQ ID NO: 393443 - DNA, 1000 bp, Homo Sapiens; identical to SEQ ID NO: 283673

SEQ ID NO: 393444 - DNA, 1000 bp, Homo Sapiens; identical to SEQ ID NO: 283674

SEQ ID NO: 393445 - DNA, 1000 bp, Homo Sapiens; identical to SEQ ID NO: 220516

SEQ ID NO: 393446 - DNA, 1000 bp, Homo Sapiens
ttactttcacccggggcctttccgtccgagaaattctcgcagagcttacaggacgaaaaggaggttgtgctaaagggaaaggaggatcgatgcacatgtatgccaagaacttctacgggggcaatggcatcgtgggagcgcaggtgcccctgggcgctgggattgctctagcctgtaagtataatggaaaagatgaggtctgcctgactttatatggcgatggtgctgctaaccagggccagatattcgaagcttacaacatggcagctttgtggaaattaccttgtattttcatctgtgagaataatcgctatggaatgggaacgtctgttgagagagcggcagccagcactgattactacaagagaggcgatttcattcctgggctgagagtggatggaatggatatcctgtgcgtccgagaggcaacaaggtttgctgctgcctattgtagatctgggaaggggcccatcctgatggagctgcagacttaccgttaccacggacacagtatgagtgaccctggagtcagttaccgtacacgagaagaaattcaggaagtaagaagtaagagtgaccctattatgcttctcaaggacaggatggtgaacagcaatcttgccagtgtggaagaactaaaggaaattgatgtggaagtgaggaaggagattgaggatgctgcccagtttgccacggccgatcctgagccacctttggaagagctgggctaccacatctactccagcgacccaccttttgaagttcgtggtgccaatcagtggatcaagtttaagtcagtcagttaaggggaggagaaggagaggttataccttcagggggctaccagacagtgttctcaacttggttaaggaggaagaaaacccagtcaatgaaattcaatgaaattcttggaaacttccattaagtgtgtagattgagcaggtagtaattgcatgcagtttgtacattagtgcattaaaagatgaattattgagtgctt

SEQ ID NO: 393447 - DNA, 1000 bp, Homo Sapiens; identical to SEQ ID NO: 115111

SEQ ID NO: 393448 - DNA, 1000 bp, Homo Sapiens; identical to SEQ ID NO: 220518

SEQ ID NO: 393449 - DNA, 1000 bp, Homo Sapiens; identical to SEQ ID NO: 115112

SEQ ID NO: 393450 - DNA, 1000 bp, Homo Sapiens; identical to SEQ ID NO: 115113

SEQ ID NO: 393451 - DNA, 1000 bp, Homo Sapiens; identical to SEQ ID NO: 220520

SEQ ID NO: 393452 - DNA, 1000 bp, Homo Sapiens; identical to SEQ ID NO: 283683

SEQ ID NO: 393453 - DNA, 1000 bp, Homo Sapiens; identical to SEQ ID NO: 115114

SEQ ID NO: 393454 - DNA, 1000 bp, Homo Sapiens; identical to SEQ ID NO: 220521

SEQ ID NO: 393455 - DNA, 1000 bp, Homo Sapiens; identical to SEQ ID NO: 284398

SEQ ID NO: 393456 - DNA, 1000 bp, Homo Sapiens; identical to SEQ ID NO: 115115

SEQ ID NO: 393457 - DNA, 1000 bp, Homo Sapiens; identical to SEQ ID NO: 115116

SEQ ID NO: 393458 - DNA, 997 bp, Homo Sapiens
gaaggaaaaagagcaacagatccagggagcattcacctgccctgtctccaaacagccttgtgcctcacctacccccaacctcccagagggagcagctatttaaggggagcaggagtgcagaacaaacaagacggcctggggatacaactctggagtcctctgagagagccaccaaggaggagcaggggagcgacggccggggcagaagttgagaccacccagcagaggagctaggccagtccatctgcatttgtcacccaagaactcttaccatgaagaccctcctactgttggcagtgatcatgatctttggcctactgcaggcccatgggaatttggtgaatttccacagaatgatcaagttgacgacaggaaaggaagccgcactcagttatggcttctacggctgccactgtggcgtgggtggcagaggatcccccaaggatgcaacggatcgctgctgtgtcactcatgactgttgctacaaacgtctggagaaacgtggatgtggcaccaaatttctgagctacaagtttagcaactcggggagcagaatcacctgtgcaaaacaggactcctgcagaagtcaactgtgtgagtgtgataaggctgctgccacctgttttgctagaaacaagacgacctacaataaaaagtaccagtactattccaataaacactgcagagggagcacccctcgttgctgagtcccctcttccctggaaaccttccacccagtgctgaatttccctctctcataccctccctccctaccctaaccaagttccttggccatgcagaaagcatccctcacccatcctagaggccaggcaggagcccttctatacccacccagaatgagacatccagcagatttccagccttctactgctctcctccacctcaactccgtgcttaaccaaagaagctgtactccggggggtctcttctgaataaagcaattagcaaaaaaaaaaaaaaaaaaaaaaaaaaaaaa

SEQ ID NO: 393459 - DNA, 1000 bp, Homo Sapiens; identical to SEQ ID NO: 283689

SEQ ID NO: 393460 - DNA, 1000 bp, Homo Sapiens; identical to SEQ ID NO: 283692

SEQ ID NO: 393461 - DNA, 1000 bp, Homo Sapiens; identical to SEQ ID NO: 220524

SEQ ID NO: 393462 - DNA, 1000 bp, Homo Sapiens; identical to SEQ ID NO: 283696

SEQ ID NO: 393463 - DNA, 1000 bp, Homo Sapiens
acaagagtaaatattgtcacaacactgaacctctggctagaggacatattcacagtgaacataactgtaacatatatgaaaggcttctgggacttgaaatcaaatgtttgggaatggtgcccttggaggcaacctcccattttagatgtttaaaggaccctatatgtggcattcctttctttaaactataggtaattaaggcagctgaaaagtaaattgccttctagacactgaaggcaaatctcctttgtccatttacctggaaaccagaatgattttgacatacaggagagctgcagttgtgaaagcaccatcatcatagaggatgatgtaattaaaaaatggtcagtgtgcaaagaaaagaactgcttgcatttctttatttctgtctcataattgtcaaaaaccagaattaggtcaagttcatagtttctgtaattggcttttgaatcaaagaatagggagacaatctaaaaaatatcttaggttggagatgacagaaatatgattgatttgaagtggaaaaagaaattctgttaatgttaattaaagtaaaattattccctgaattgtttgatattgtcacctagcagatatgtattacttttctgcaatgttattattggcttgcactttgtgagtattctatgtaaaaatatatatgtatataaaatatatattgcataggacagacttaggagttttgtttagagcagttaacatctgaagtgtctaatgcattaacttttgtaaggtactgaatacttaatatgtgggaaacccttttgcgtggtccttaggcttacaatgtgcactgaatcgtttcatgtaagaatccaaagtggacaccattaacaggtctttgaaatatgcatgtactttatattttctatatttgtaactttgcatgttcttgttttgttatataaaaaaattgtaaatgtttaatatctgactgaaattaaacgagcgaagatgagcaccaaaaaaaaaaaaaaaa

SEQ ID NO: 393464 - DNA, 1000 bp, Homo Sapiens
gacagcggcccactgcatggatgagtccaagaagctccttgtcaggcttggagagtatgacctgcggcgctgggagaagtgggagctggacctggacatcaaggaggtcttcgtccaccccaactacagcaagagcaccaccgacaatgacatcgcactgctgcacctggcccagcccgccaccctctcgcagaccatagtgcccatctgcctcccggacagcggccttgcagagcgcgagctcaatcaggccggccaggagaccctcgtgacgggctggggctaccacagcagccgagagaaggaggccaagagaaaccgcaccttcgtcctcaacttcatcaagattcccgtggtcccgcacaatgagtgcagcgaggtcatgagcaacatggtgtctgagaacatgctgtgtgcgggcatcctcggggaccggcaggatgcctgcgagggcgacagtggggggcccatggtcgcctccttccacggcacctggttcctggtgggcctggtgagctggggtgagggctgtgggctccttcacaactacggcgtttacaccaaagtcagccgctacctcgactggatccatgggcacatcagagacaaggaagccccccagaagagctgggcaccttagcgaccctccctgcagggctgggcttttgcatggcaatggatgggacattaaagggacatgtaacaagcacaccggcctgctgttctgtccttccatccctcttttgggctcttctggagggaagtaacatttactgagcacctgttgtatgtcacatgccttatgaatagaatcttaactcctagagcaactctgtggggtggggaggagcagatccaagttttgcggggtctaaagctgtgtgtgttgagggggatactctgtttatgaaaaagaataaaaaacacaaccacgaaaaaaaaaaaaaaaaaaaaaaaaaaaaaaaaaaaaaaaacccccccccgccccccccccctgcag

SEQ ID NO: 393465 - DNA, 1000 bp, Homo Sapiens; identical to SEQ ID NO: 220525

SEQ ID NO: 393466 - DNA, 1000 bp, Homo Sapiens; identical to SEQ ID NO: 283698

SEQ ID NO: 393467 - DNA, 1000 bp, Homo Sapiens; identical to SEQ ID NO: 115117

SEQ ID NO: 393468 - DNA, 1000 bp, Homo Sapiens; identical to SEQ ID NO: 283701

SEQ ID NO: 393469 - DNA, 1000 bp, Homo Sapiens; identical to SEQ ID NO: 283702

SEQ ID NO: 393470 - DNA, 1000 bp, Homo Sapiens; identical to SEQ ID NO: 283703

SEQ ID NO: 393471 - DNA, 1000 bp, Homo Sapiens; identical to SEQ ID NO: 283704

SEQ ID NO: 393472 - DNA, 1000 bp, Homo Sapiens; identical to SEQ ID NO: 220527

SEQ ID NO: 393473 - DNA, 1000 bp, Homo Sapiens; identical to SEQ ID NO: 283706

SEQ ID NO: 393474 - DNA, 1000 bp, Homo Sapiens; identical to SEQ ID NO: 220528

SEQ ID NO: 393475 - DNA, 1000 bp, Homo Sapiens
gagattaacatccctgtcacctttcatggactgttcaaaaaatcttgagcatactccagcaagatatgtttttggtagcaaaactgagaaaatcagcttcaggtctgcaatcaaattctgttcaattttagcctgctatatgtcatggttttaacttgcagatgcgcacaattttgcaatgttttacagaaagcactgagttgagcaagcaattcctttatttaaaaaaaaaagtacgtatttagataatcatacttcctctgtgagacaggccataactgaaaaactcttaaatatttagcaatcaaataggaaatgaatgtggacttactaaatggcttttaattcctattataagagcatattttaggtacctatctgctccaattatatttttaacatttaaaaaccaaagtcctctacacttgatttatattatatgtggctttgctgagtcaaggaagtatcatgcaataaggcttaattactaaatgtcaaaccaaactttttctcaaaccagggactatcatctaagattaattacagtaattattttgcgtatacgtaactgctcaaagattatgaatcttatgaatgttaacctttccgtttattacaagcaagtactattatttctgattttataataagaaaatctgtgtttaatcaactgaggcctctcaaccaaataacatctcagagattaagttatatattaaaagcttatgtaacataaaagcaagtacatatagtagtgactatatttaaaaaaacagcataaaatgcttaaaaatgtaatatttactaaaatcagattatgggataatgttgcaggattatactttattgcatcttttttgtttaattgtatttaagcattgtgcaatcacttgggaaaaatattaaattattaacattgaggtattaatacattttaagccttttgtttttaaatttcttttcttccagagattgtttaaaaataaatattgacaaaaat

SEQ ID NO: 393476 - DNA, 1000 bp, Homo Sapiens
gactagactcgcgctaatacagtgctggacaacacattcaccttttctgtgaacaggcagccttctaaaagccccaaacatccttcttgatgctttgggggctcaattattttatatccaacccagcatctttctagtccctatgctgtatgcttgaacttcggaaaatgcttttccccgcccaatcttctctcaaatataaacacatcacacagggtgttgggggtggggggggggggtggggggacttatccctggccttaggacacaggacaaatctattttggatagaaatgcctgaacagagacccttatttggaaaggtgaattaactttggtcacgacatggactgtcagacaaaatggcagtatcctaagagttaaggcacatcaaacacaggagtcgagagagtgcagttcagggaaaaaggagaggaggaaacagtgaggcagggagaaaggctttccaaataagagttcatgttggaaacttttgtcacggctttattgagattaagttcacatacaatttgtatccatttaaagtgtacaatttgatgacttttggtatattcagagttgtgcaaccattatcactagatcaattttagaaagtttatcaccccaaagagaaatcctgcacccatcagccaacactccccaacccatcggccaccccaagccctctgcaaccacgaatcgactgtctctgtagattggccttctggacgttctacataaatgaaatcatatagtatgtggtatttcgtgactggcttctttcacttagcatagtgttttaaagttcatccacgttataacatgtgtatcactatgtcacttgtcactcctttttattgctgaacatcattgttcagtatcatgtcaagagcacattgttatttatccattcatccattgatggatatttgggtttccactctttagctattatgaataatgctgctatgaacatttgtgtataaaaaaaaaaaaaaaa

SEQ ID NO: 393477 - DNA, 1000 bp, Homo Sapiens; identical to SEQ ID NO: 283708

SEQ ID NO: 393478 - DNA, 1000 bp, Homo Sapiens; identical to SEQ ID NO: 220530

SEQ ID NO: 393479 - DNA, 1000 bp, Homo Sapiens; identical to SEQ ID NO: 283710

SEQ ID NO: 393480 - DNA, 1000 bp, Homo Sapiens; identical to SEQ ID NO: 115118

SEQ ID NO: 393481 - DNA, 1000 bp, Homo Sapiens; identical to SEQ ID NO: 220532

SEQ ID NO: 393482 - DNA, 1000 bp, Homo Sapiens; identical to SEQ ID NO: 220533

SEQ ID NO: 393483 - DNA, 1000 bp, Homo Sapiens; identical to SEQ ID NO: 283712

SEQ ID NO: 393484 - DNA, 1000 bp, Homo Sapiens; identical to SEQ ID NO: 283714

SEQ ID NO: 393485 - DNA, 1000 bp, Homo Sapiens; identical to SEQ ID NO: 283715

SEQ ID NO: 393486 - DNA, 1000 bp, Homo Sapiens
tgcccagtcatgacatttctcaaagtttttacagtgtatctcgaagtcttccatcagcagtgattgaagtatctgtacctgcccccactcagcatttcggtgcttccctttcactgaagtgaatacatggtagcagggtctttgtgtgctgtggattttgtggcttcaatctacgatgttaaaacaaattaaaaacacctaagtgactaccacttatttctaaatcctcactatttttttgttgctgttgttcagaagttgttagtgatttgctatcatatattataagatttttaggtgtcttttaatgatactgtctaagaataatgacgtattgtgaaatttgttaatatatataatacttaaaaatatgtgagcatgaaactatgcacctataaatactaaatatgaaattttaccattttgcgatgtgttttattcacttgtgtttgtatataaatggtgagaattaaaataaaacgttatctcattgcaaaaatattttatttttatcccatctcactttaataataaaaatcatgcttataagcaacatgaattaagaactgacacaaaggacaaaaatataaagttattaatagccatttgaagaaggaggaattttagaagaggtagagaaaatggaacattaaccctacactcggaattccctgaagcaacactgccagaagtgtgttttggtatgcactggttccttaagtggctgtgattaattattgaaagtggggtgttgaagaccccaactactattgtagagtggtctatttctcccttcaatcctgtcaatgtttgctttatgtattttggggaactgttgtttgatgtgtatgtgtttataattgttatacatttttaattgagccttttattaacatatattgttatttttgtctcgaaataattttttagttaaaatctattttgtctgatattggtgtgaatgctgtacctttctgacaataaataatattcgaccatg

SEQ ID NO: 393487 - DNA, 1000 bp, Homo Sapiens; identical to SEQ ID NO: 283716

SEQ ID NO: 393488 - DNA, 1000 bp, Homo Sapiens; identical to SEQ ID NO: 283717

SEQ ID NO: 393489 - DNA, 1000 bp, Homo Sapiens; identical to SEQ ID NO: 115119

SEQ ID NO: 393490 - DNA, 1000 bp, Homo Sapiens; identical to SEQ ID NO: 220535

SEQ ID NO: 393491 - DNA, 1000 bp, Homo Sapiens; identical to SEQ ID NO: 115120

SEQ ID NO: 393492 - DNA, 1000 bp, Homo Sapiens
acaaagtttaccagaaagcagttgagacaagaaaataagagctcaggatgagggaaaagaaaaagattgagagaatttgtgcccccaaccatttcctcagactctaagaaagaacacgctctctccaggcaggtctgaagctcaactctcttattgcctcacttcaggtatacctcactttacacaatagaattataactggaaagaagttggggacacatgtatttggtgattacattttaaacacattaggaaaagttgctatttgaactttttattgatttttggggggagtaaagaattattttggatgcaaataaatatcctttaattgatcgacttgccaaatttagatttgtgtgcatcaggctttcttttttttctttttttagagaagttcaatataagcttttcttttctttgtttctttctttctttattttgagatggagtcttgctctgtcgcccatgctggagtgcagtggcgcgatctcggctcactgcaacctccacctcctgggttcaagcgattctcttgcctcaacctcccaagcagttgggactacaggcgtgagccaccatgcccggctaatttttgtatttttagtagagacagggtttcaccatgttagccaggctggtctcaaactcctgacctcaggcaatctgcccgcctgggtctcctaaagtactgggattacaggcgtgagccacctcgcccagcggcatcaggctttcttaaagtgagagcacgcctgtactagagcaagcaggaatcagagaccttccagaaatactactgtgtaagggccagaaatatcttcacttgtcattgttatataatcattattacttttgctgtaatgttaatattgatttattaatatatattatcttttcatacattttctaagaaacatttatattgataagatcttttattttgcaagggcataaattattgtttttctttttttttttttaataaatttcaccaagt

SEQ ID NO: 393493 - DNA, 1000 bp, Homo Sapiens; identical to SEQ ID NO: 220537

SEQ ID NO: 393494 - DNA, 1000 bp, Homo Sapiens; identical to SEQ ID NO: 115338

SEQ ID NO: 393495 - DNA, 1000 bp, Homo Sapiens; identical to SEQ ID NO: 283722

SEQ ID NO: 393496 - DNA, 1000 bp, Homo Sapiens; identical to SEQ ID NO: 220540

SEQ ID NO: 393497 - DNA, 1000 bp, Homo Sapiens; identical to SEQ ID NO: 283723

SEQ ID NO: 393498 - DNA, 1000 bp, Homo Sapiens; identical to SEQ ID NO: 115122

SEQ ID NO: 393499 - DNA, 1000 bp, Homo Sapiens; identical to SEQ ID NO: 115124

SEQ ID NO: 393500 - DNA, 1000 bp, Homo Sapiens; identical to SEQ ID NO: 283724

SEQ ID NO: 393501 - DNA, 1000 bp, Homo Sapiens; identical to SEQ ID NO: 283725

SEQ ID NO: 393502 - DNA, 1000 bp, Homo Sapiens; identical to SEQ ID NO: 283726

SEQ ID NO: 393503 - DNA, 1000 bp, Homo Sapiens
attataagtggagagcagaatgtccagaaataagtgcagatctacaccctagaagtattattggcctcctaaaggctggctaccatggagtcctgagatccagggatcccactggcagcaaagttcttatttacagaatcgcacactgggaccccaaagtttttacagcttatgacgtatttcgagtaagtctaatcacatccgagcttattgtacaggaggtagaaactcagcggaatggaatcaaggctatctttgatctggaaggttggcagttttctcatgcttttcaaatcactccatccgtagccaagaagattgctgctgtacttacggattcatttccattgaaagttcgtggcatccatttgataaatgaaccagtaattttccatgctgtcttttccatgatcaaaccattcctgactgaaaaaattaaggaacggattcacatgcatgggaacaactacaaacaaagcttgcttcagcatttcccagacattcttcctctggaatatggtggtgaagaattctccatggaggacatttgtcaggaatggacaaattttataatgaagtctgaagattatctcagcagcatttctgagagcattcaatgagaagttatgtcatgtgaatggcttcctaactaaaaatacatgagtgatatccaacctggttaaatgaatgaaagaaaaggagcaaatcttttaaactaatgcttgcctgaactttaaaaatgtagaaatcttctgacatgagcaacacaggtgtttggaaagattttttactttttaaatgcttttttctctacttttgaagtaattaaatgtcagtacattttaagagcataaaaatcggcgattttgtacttgaagagaacatgaaagttattgctaaagtagctgctcatgtgcatctttgtatgtttctagaaagttatattttaaacaagttctctgattaaattggtttagaaaaaaatttagaaatattccgc

SEQ ID NO: 393504 - DNA, 615 bp, Homo Sapiens; identical to SEQ ID NO: 283727

SEQ ID NO: 393505 - DNA, 1000 bp, Homo Sapiens; identical to SEQ ID NO: 283728

SEQ ID NO: 393506 - DNA, 1000 bp, Homo Sapiens; identical to SEQ ID NO: 220541

SEQ ID NO: 393507 - DNA, 1000 bp, Homo Sapiens; identical to SEQ ID NO: 283730

SEQ ID NO: 393508 - DNA, 1000 bp, Homo Sapiens; identical to SEQ ID NO: 115416

SEQ ID NO: 393509 - DNA, 1000 bp, Homo Sapiens; identical to SEQ ID NO: 220543

SEQ ID NO: 393510 - DNA, 1000 bp, Homo Sapiens; identical to SEQ ID NO: 115125

SEQ ID NO: 393511 - DNA, 1000 bp, Homo Sapiens; identical to SEQ ID NO: 282204

SEQ ID NO: 393512 - DNA, 1000 bp, Homo Sapiens; identical to SEQ ID NO: 220546

SEQ ID NO: 393513 - DNA, 1000 bp, Homo Sapiens
agagatgaaactatggctttaaactaccctccagagtgtgcagactgatgggacatcaaatttgccaccactagagctgagagtctgaaagacagaatgtcaccagtcctgcccaatgccttgacaacagactgaattttaaatgttcacaacataaggagaatgtatctcctcctatttatgaaaaccatatgatattttgtctcctacctgctgctgctattatgtaacatccagaaggtttgcacccctcctataccatatgtctgcttctgtccaggacatgatactgatgccatgtttagattccaggatcacaagaatcacctcaaattgttaggaagggactgcataaaccaatgagctgtatctgtaattaatattcctatatgtagctttatccttaggaaaatgcttctgttgtaatagtccatggacaatataaactgaaaaatgtcagtctggtttatataaggcagtattattgagctctatttccccaccccactatcctcactcccataagctaagccttatgtgagccccttcagggactcaagggtccagaagtccctcccatctctaccccaaagaattcctgaagccagatccaccctatccctgtacagagtaagttctcaattattggcctgctaatagctgctagggtaggaaagcgtggttccaagaaagatccaccctcaaatgtcagagctatgttccctccagcagtggtattaatactgccggtcacccaggctctggagccagagagacagaccggggttcaagccatggcttcgtcatttgcaagctgagtgactgtaggcagggaaccttaacctctctaagccacagcttcttcatctttaaaataaggataataatcattccttcccctcagagctcttatgtggattaaacgagataatgtatataaagtactttagcctggtacctagcacacaataagcattcaataaatattagttaatattat

SEQ ID NO: 393514 - DNA, 1000 bp, Homo Sapiens; identical to SEQ ID NO: 115127

SEQ ID NO: 393515 - DNA, 1000 bp, Homo Sapiens
tgctttttccaaccaagccagaaacctgtgtcatcttttcaccccaccttcaatcaacaagtcctcaatcaacaagtcctactgactgcacatcttaaatatatctttatcagtccacaagtccttccaattatatttcccaagtatatctagaacttatccacttatatccccactgctactaccttagtttagggctatattctcttgaaaaaaagtgtccttacttcctgccaatccccaagtcatcttccagagtaaaatgcaaatcccatcaggccacttggatgaaaacccttcaaggattactggatagaattcaggctttcccctccagcccccaatcatagctcacaaaccttccttgctatttgttcttaagtaaaaaatcatttttcctcctccctccccaaaccccaaggaactctcactcttgctcaagctgttccgtccccttaccacccctgatacaactgccaggttaatttccagaattcttgcaagactcagttcagaagtcaccttctttcgtgaatgttttgattccctgaggctactttattttggtatggctgaaaaatcctagattttctaaacaaaacctgtttgaatcttggttctgatatggactaggagagagactgggtcaagtaagcttatctccctgaggctgtttcctcgtctgttaagtgtgaatatcaatacctgcctttcataatcaccagggaataaagtggaataatgttgataacagtgcttggcacctggaagtaggtggcagatgttaacgcccttcctcccttgcactgcgccccctgtgcctacctctagcattgtaacgaccacatagtattgaaatggccagtttacttgtctgccttcctttccaagaccgttggtgcctagaggactagaatcgtgtcctatttaactttgtgttcccaggtcctagctcaggagttggcaaataagaattaaatgtctgctacaccgaaacaaa

SEQ ID NO: 393516 - DNA, 1000 bp, Homo Sapiens; identical to SEQ ID NO: 115128

SEQ ID NO: 393517 - DNA, 1000 bp, Homo Sapiens; identical to SEQ ID NO: 115129

SEQ ID NO: 393518 - DNA, 1000 bp, Homo Sapiens; identical to SEQ ID NO: 283740

SEQ ID NO: 393519 - DNA, 1000 bp, Homo Sapiens; identical to SEQ ID NO: 283741

SEQ ID NO: 393520 - DNA, 1000 bp, Homo Sapiens; identical to SEQ ID NO: 220548

SEQ ID NO: 393521 - DNA, 1000 bp, Homo Sapiens; identical to SEQ ID NO: 115130

SEQ ID NO: 393522 - DNA, 1000 bp, Homo Sapiens; identical to SEQ ID NO: 283744

SEQ ID NO: 393523 - DNA, 1000 bp, Homo Sapiens; identical to SEQ ID NO: 220549

SEQ ID NO: 393524 - DNA, 1000 bp, Homo Sapiens; identical to SEQ ID NO: 283746

SEQ ID NO: 393525 - DNA, 1000 bp, Homo Sapiens; identical to SEQ ID NO: 283747

SEQ ID NO: 393526 - DNA, 1000 bp, Homo Sapiens; identical to SEQ ID NO: 115132

SEQ ID NO: 393527 - DNA, 955 bp, Homo Sapiens; identical to SEQ ID NO: 115133

SEQ ID NO: 393528 - DNA, 1000 bp, Homo Sapiens; identical to SEQ ID NO: 283750

SEQ ID NO: 393529 - DNA, 1000 bp, Homo Sapiens; identical to SEQ ID NO: 115134

SEQ ID NO: 393530 - DNA, 1000 bp, Homo Sapiens; identical to SEQ ID NO: 220551

SEQ ID NO: 393531 - DNA, 1000 bp, Homo Sapiens
aggccctcctccactattgcccatgtcctgctcaagttgtcaacatgccacttttggcacaaatggggcccaaagacattctcataataataattccagtgacctccatccccataagcatcattcccatgaacagcatccccacggacaccatccccatgcacaccatcctcatgaacatgatacccatagacagcatccccatggacaccacccccatggacaccatcctcatggacaccacccccatggacaccatccccatggacaccatccccactgccatgatttccaagactatggaccttgtgacccaccaccccataaccaaggtcactgttgccatggccacggcccaccacctgggcacttaagaaggcgaggcccaggtaaaggaccccgtcccttccattgcagacaaattggatctgtgtaccgactccctcctctaagaaaaggtgaggtgctgccacttcctgaggccaattttcccagcttcccattgccgcaccacaaacatcctctaaagccagacaatcagccctttcctcaatcagtctctgaatcatgtccagggaagttcaagagtgggtttccacaagtttccatgttttttacacatacatttccaaaataaaatgtgattcctttgaagaggaaaatgaataatacattgaattagaaacataaataaaatgaccagtaattgtgaaaattacagttcttttcaacctactttcatactgaagatgcagcaaaatgtgaatgggaaaagagatggcctgagaagagagatcaaatggaaaggagaggaaagaactcagtgctgcctattagtagttaattctgtcactcaccactacatcacttgagacaaatctatgccactcagaatctccttctttcctggacttaactctaattctagagtctctgttactgcttgggctatacctgggcatactaataaagtatggtattgaaactaaaaaaaaaaaaa

SEQ ID NO: 393532 - DNA, 1000 bp, Homo Sapiens; identical to SEQ ID NO: 283754

SEQ ID NO: 393533 - DNA, 1000 bp, Homo Sapiens; identical to SEQ ID NO: 220552

SEQ ID NO: 393534 - DNA, 1000 bp, Homo Sapiens; identical to SEQ ID NO: 115136

SEQ ID NO: 393535 - DNA, 1000 bp, Homo Sapiens; identical to SEQ ID NO: 220553

SEQ ID NO: 393536 - DNA, 1000 bp, Homo Sapiens; identical to SEQ ID NO: 283757

SEQ ID NO: 393537 - DNA, 1000 bp, Homo Sapiens; identical to SEQ ID NO: 220554

SEQ ID NO: 393538 - DNA, 1000 bp, Homo Sapiens; identical to SEQ ID NO: 283758

SEQ ID NO: 393539 - DNA, 1000 bp, Homo Sapiens
gcaacaccaagcatgagatcacagagatgaaccggatgatccagaggctgagagccgagattgacaatgtcaagaaacagtgcgccaatctgcagaacgccattgcggatgccgagcagcgtggggagctggccctcaaggatgccaggaacaagctggccgagctggaggaggccctgcagaaggccaagcaggacatggcccggctgctgcgtgagtaccaggagctcatgaacaccaagctggccctggacgtggagatcgccacttaccgcaagctgctggagggcgaggaatgcagactcagtggagaaggagttggaccagtcaacatctctgttgtcacaagcagtgtttcctctggatatggcagtggcagtggctatggcggtggcctcggtggaggtcttggcggcggcctcggtggaggtcttgccggaggtagcagtggaagctactactccagcagcagtgggggtgtcggcctaggtggtgggctcagtgtggggggctctggcttcagtgcaagcagtggccgagggctgggggtgggctttggcagtggcgggggtagcagctccagcgtcaaatttgtctccaccacctcctcctcccggaagagcttcaagagctaagaacctgctgcaagtcactgccttccaagtgcagcaacccagcccatggagattgcctcttctaggcagttgctcaagccatgttttatccttttctggagagtagtctagaccaagccaattgcagaaccacattctttggttcccaggagagccccattcccagcccctggtctcccgtgccgcagttctatattctgcttcaaatcagccttcaggtttcccacagcatggcccctgctgacacgagaacccaaagttttcccaaatctaaatcatcaaaacagaatccccaccccaatcccaaattttgttttggttctaactacctccagaatgtgttcaataaaatgcttttataatat

SEQ ID NO: 393540 - DNA, 1000 bp, Homo Sapiens; identical to SEQ ID NO: 220555

SEQ ID NO: 393541 - DNA, 1000 bp, Homo Sapiens; identical to SEQ ID NO: 283760

SEQ ID NO: 393542 - DNA, 1000 bp, Homo Sapiens; identical to SEQ ID NO: 283761

SEQ ID NO: 393543 - DNA, 1000 bp, Homo Sapiens; identical to SEQ ID NO: 283762

SEQ ID NO: 393544 - DNA, 1000 bp, Homo Sapiens; identical to SEQ ID NO: 115138

SEQ ID NO: 393545 - DNA, 1000 bp, Homo Sapiens
gatggctcagtcgtcatcaatgcccgaaaccagaacaactaccactgccactgccgaattgtcctccgcagctatgatgcctgtgatacactaaggccccgtgatgtgaccttcgaccctgagctcgtggaccctgtggtagctgcaggagctgtagtcaccagctccggcattgtcttcttctccaacccagcacatccagagttccgagtgaacctgaccctgcgatggagcttcagcaatggtacctcatggcggaaagagacagtccagctatggccaggccccagtggctattcatccctggcaaccctggagggcagcatggatggagaggagcaggccccccagctctacgtcctgtatgagaaaggccggaaccactacacagagagcatctccgtggccaaaatcagtgtctatgggacactctgagctgtgccactgccacaggggtattctgccttcaggactctgccttcaggaacacgggtctgtagagggtctgctggagacgcctgaaagacagttccatcttcctttagactccagccttggcaaaatcaccttccctttaccagggaaatcacttcctttaggactgaaagctaggcgtcctctcccacaaaaaagtcctgccctcatctgagaatactgtctttccatatggctaagtgtggccccaccaccctctctgccctcccgggacattgattggtcctgtcttgggcaggtctagtgagctgtagaattgaatcaatgtgaactcagggaactggggaaggctgagcctcctctttggtgttgcggtaagataaccgacagggctggtgaaagtccccagatggcaggatatttggtttcagagtaaggactaggtgcaccaccatgactgactatcaatcaaaatgtttgtaacttaaaatttttaatgaaggataatgaatatttgtagagtctctatggttctgtcaatgcaaaaaaaaaaaaaaaaaaaaaa

SEQ ID NO: 393546 - DNA, 1000 bp, Homo Sapiens; identical to SEQ ID NO: 115139

SEQ ID NO: 393547 - DNA, 1000 bp, Homo Sapiens; identical to SEQ ID NO: 220558

SEQ ID NO: 393548 - DNA, 1000 bp, Homo Sapiens; identical to SEQ ID NO: 283766

SEQ ID NO: 393549 - DNA, 1000 bp, Homo Sapiens
cagtcacctacaatgctggctttctcccactgagtttgctgtttgcaatttttccatgaagtttgaacttcataaggtaattcatggcattgaactggttcatgaaaagaacactagagtctgtcatttgctttggcttgaagtatggttggtaacacaaattttcacctgctcttctaccatttgaatttgtgtagagggtgtttgcagagcaatgcccgtaatgcttagagaatgttctcctaaaagacttgcggaatcactctgtccttggaagtttcatatattgtttgatatgaagtgttagatagaatttccaatattggagcatatcaaaaagtattaaaactaaaaaggaccagagaattcttagattggcccggaaaggccaataaagagttagaatgaaaactcattacttttccattcccaatctagtgctagatgtataaatctttcttttgattcttcctaacaaaatattttctgggttaaaaccccagccaactcattgggttgtagccaaaggttcactctcaagaagctttaatatttaaataaaatcatattgaatgtttccaacctggagtataatattcagatataaaacagttttgtcagtctttcttagtgcctgtgtggatttttgtgaaaatgtcaaagagaaaacttatatactatttcccttgaaattttaaactatattttctttacaggtatttataatataccaatgcttttatcaaacagaattttaaagagcataataaattatattaaagaaccaaaagttttcctgagaataagaaagtttcacccaataaaatatttttgaaaggcatgttcctctgtcaatgaaaaaaagtacatgtatgtgttgtgatattaaaagtgacatttgtctaatagcctaatacaacatgtagctgagtttaacatgtgtggtcttggtattcttaagggaacttccacattatacatttgatgtattgaccagaat

SEQ ID NO: 393550 - DNA, 1000 bp, Homo Sapiens; identical to SEQ ID NO: 283767

SEQ ID NO: 393551 - DNA, 1000 bp, Homo Sapiens; identical to SEQ ID NO: 220559

SEQ ID NO: 393552 - DNA, 1000 bp, Homo Sapiens; identical to SEQ ID NO: 115140

SEQ ID NO: 393553 - DNA, 1000 bp, Homo Sapiens; identical to SEQ ID NO: 220560

SEQ ID NO: 393554 - DNA, 1000 bp, Homo Sapiens; identical to SEQ ID NO: 283772

SEQ ID NO: 393555 - DNA, 1000 bp, Homo Sapiens
tgccctgatatactcatctgccatggtgtggacggttggcatggcgaagctggacccctcctctcagggtgccctccagctcccctacgacccggagatggaagaagactcctatgacagttttggggagccttcataccccgaagtctttgagcctcccttgactggctacccaggggaggagctggaggaagaggaggaaaggggcgtgaagcttggcctcggggacttcatcttctacagtgtgctggtgggcaaggcggctgccacgggcagcggggactggaataccacgctggcctgcttcgtggccatcctcattggcttgtgtctgaccctcctgctgcttgctgtgttcaagaaggcgctgcccgccctccccatctccatcacgttcgggctcatcttttacttctccacggacaacctggtgcggccgttcatggacaccctggcctcccatcagctctacatctgagggacatggtgtgccacaggctgcaagctgcagggaattttcattggatgcagttgtatagttttacactctagtgccatatatttttaagacttttctttccttaaaaaataaagtacgtgtttacttggtgaggaggaggcagaaccagctctttggtgccagctgtttcatcaccagactttggctcccgctttggggagcgcctcgcttcacggacaggaagcacagcaggtttatccagatgaactgagaaggtcagattagggcggggagaagagcatccggcatgagggctgagatgcgcaaagagtgtgctcgggagtggcccctggcacctgggtgctctggctggagaggaaaagccagttccctacgaggagtgttcccaatgctttgtccatgatgtccttgttattttattgcctttagaaactgagtcctgttcttgttacggcagtcacactgctgggaagtggcttaatagtaatatcaataaatagatgagtcctgttagaaaaa

SEQ ID NO: 393556 - DNA, 1000 bp, Homo Sapiens; identical to SEQ ID NO: 115141

SEQ ID NO: 393557 - DNA, 1000 bp, Homo Sapiens; identical to SEQ ID NO: 115142

SEQ ID NO: 393558 - DNA, 1000 bp, Homo Sapiens; identical to SEQ ID NO: 283775

SEQ ID NO: 393559 - DNA, 981 bp, Homo Sapiens; identical to SEQ ID NO: 115143

SEQ ID NO: 393560 - DNA, 1000 bp, Homo Sapiens; identical to SEQ ID NO: 283777

SEQ ID NO: 393561 - DNA, 1000 bp, Homo Sapiens; identical to SEQ ID NO: 283778

SEQ ID NO: 393562 - DNA, 1000 bp, Homo Sapiens
gggaaggctcccagtgcgctggatggccatcgagtcactgaattacagtgtgtacacaaccaacagtgatgtatggtcctatggtgtgttactatgggagattgttagcttaggaggcacaccctactgcgggatgacttgtgcagaactctacgagaagctgccccagggctacagactggagaagcccctgaactgtgatgatgaggtgtatgatctaatgagacaatgctggcgggagaagccttatgagaggccatcatttgcccagatattggtgtccttaaacagaatgttagaggagcgaaagacctacgtgaataccacgctttatgagaagtttacttatgcaggaattgactgttctgctgaagaagcggcctaggacagaacatctgtataccctctgtttccctttcactggcatgggagacccttgacaactgctgagaaaacatgcctctgccaaaggatgtgatatataagtgtacatatgtgctggaattctaacaagtcataggttaatatttaagacactgaaaaatctaagtgatataaatcagattcttctctctcattttatccctcacctgtagcatgccagtcccgtttcatttagtcatgtgaccactctgtcttgtgtttccacagcctgcaagttcagtccaggatgctaacatctaaaaatagacttaaatctcattgcttacaagcctaagaatctttagagaagtatacataagtttaggataaaataatgggattttcttttcttttctctggtaatattgacttgtatattttaagaaataacagaaagcctgggtgacatttgggagacatgtgacatttatatattgaattaatatccctacatgtattgcacattgtaaaaagttttagttttgatgagttgtgagtttaccttgtatactgtaggcacactttgcactgatatatcatgagtgaataaatgtcttgcctactcaaaaaaaaaaaa

SEQ ID NO: 393563 - DNA, 1000 bp, Homo Sapiens
atttggtgctggatgacagcaagaggctggccaagaggaagctgatagaggagaaccgggagaaaagacggcgggaagagctgcagaagtccatcgggcacaagccagagcccacagacgaggaatgggagctcatcaaaactgtcaccgaagcccatgtggcgaccaacgcccaaggcagccactggaagcaaaaacggaaattcctgccagaagacattggacaagcaccaatagtcaatgccccagaaggtggaaaggttgacttggaagccttcagccattttacaaaaatcatcacaccagcaattaccagagtggtggattttgccaaaaagttgcctatgttttgtgagctgccatgtgaagaccagatcatcctcctcaaaggctgctgcatggagatcatgtcccttcgcgctgctgtgcgctatgacccagaaagtgagactttaaccttgaatggggaaatggcagtgacacggggccagctgaaaaatgggggtcttggggtggtgtcagacgccatctttgacctgggcatgtctctgtcttctttcaacctggatgacactgaagtagccctccttcaggccgtcctgctgatgtcttcagatcgcccggggcttgcctgtgttgagagaatagaaaagtaccaagatagtttcctgctggcctttgaacactatatcaattaccgaaaacaccacgtgacacacttttggccaaaactcctgatgaaggtgacagatctgcggatgataggagcctgccatgccagccgcttcctgcacatgaaggtggaatgccccacagaactcttcccccctttgttcttggaagtgttcgaggattagactgactggattcattctcataattcctacagcactactgggtgtcatttcattccattgcctagctcttttttgtttgtttctttgtgttgggagggattatttgggagggaaaagggaagtagtccttggcatagacatgg

SEQ ID NO: 393564 - DNA, 1000 bp, Homo Sapiens; identical to SEQ ID NO: 115144

SEQ ID NO: 393565 - DNA, 1000 bp, Homo Sapiens; identical to SEQ ID NO: 283781

SEQ ID NO: 393566 - DNA, 1000 bp, Homo Sapiens; identical to SEQ ID NO: 283782

SEQ ID NO: 393567 - DNA, 1000 bp, Homo Sapiens; identical to SEQ ID NO: 115145

SEQ ID NO: 393568 - DNA, 1000 bp, Homo Sapiens; identical to SEQ ID NO: 283783

SEQ ID NO: 393569 - DNA, 1000 bp, Homo Sapiens
tcctgtgcccctgcgccacgagacccacggcggggaggacgtggccgtcttctccaagggccccatggcgcacctgctgcacggcgtccacgagcagaactacgtcccccacgtgatggcgtatgcagcctgcatcggggccaacctcggccactgtgctcctgccagctcggcaggcagccttgctgcaggccccctgctgctcgctctggccctctaccccctgagcgtcctgttctgagggcccagggcccgggcacccacaagcccgtgacagatgccaacttcccacacggcagcccccccctcaaggggcagggaggtgggggcctcctcagcctctgcaactgcaagaaaggggacccaggaaaccaaagtctgccgcccacctcgctcccctctggaatcttccccaagggccaaacccacttctggcctccagcctttgctccctccccgctgccctttggccaccagggtagatttctcttgggcaggcagagagtacagactgcagacattctcaaagcctcttatttttctagcgaacgtatttctccagacccagaggccctgaagcctccgtggaacattgtggatctgaccctcccagtctcatctcctgaccctcccactcccatctccttacctctggaaccccccaggccctacaatgctcatgtccctgtccccaggcgagccctccttcaggggagttgaggtctttctcctcaggacaaggccttgctcactcactcactccaagaccaccagggtcccaggaagccggtgcctgggtggccatcctacccagcgtgcccaggccgggaagagccacctggcagggctcacactcctgggctctgaacacacacgccagctcctctctgaagcgactctcctgtttggaacggcaaaaaaaaatttttttttctctttttggtggtggttaaaagggaacacaaaacatttaaataaaactttccaaatatttccgagg

SEQ ID NO: 393570 - DNA, 1000 bp, Homo Sapiens; identical to SEQ ID NO: 220563

SEQ ID NO: 393571 - DNA, 1000 bp, Homo Sapiens; identical to SEQ ID NO: 220564

SEQ ID NO: 393572 - DNA, 1000 bp, Homo Sapiens; identical to SEQ ID NO: 220565

SEQ ID NO: 393573 - DNA, 1000 bp, Homo Sapiens
ggtgagccagaagatcggggacaacctgcgagagcttcagcagcgcctggagccctacgcggaccagctgcgcacccaggtcagcacgcaggccgagcagctgcggcgccagctgaccccctacgcacagcgcatggagagagtgctgcgggagaacgccgacagcctgcaggcctcgctgaggccccacgccgacgagctcaaggccaagatcgaccagaacgtggaggagctcaagggacgccttacgccctacgctgacgaattcaaagtcaagattgaccagaccgtggaggagctgcgccgcagcctggctccctatgctcaggacacgcaggagaagctcaaccaccagcttgagggcctgaccttccagatgaagaagaacgccgaggagctcaaggccaggatctcggccagtgccgaggagctgcggcagaggctggcgcccttggccgaggacgtgcgtggcaacctgaggggcaacaccgaggggctgcagaagtcactggcagagctgggtgggcacctggaccagcaggtggaggagttccgacgccgggtggagccctacggggaaaacttcaacaaagccctggtgcagcagatggaacagctcaggcagaaactgggcccccatgcgggggacgtggaaggccacttgagcttcctggagaaggacctgagggacaaggtcaactccttcttcagcaccttcaaggagaaagagagccaggacaagactctctccctccctgagctggagcaacagcaggaacagcagcaggagcagcagcaggagcaggtgcagatgctggcccctttggagagctgagctgcccctggtgcactggccccaccctcgtggacacctgccctgccctgccacctgtctgtctgtctgtcccaaagaagttctggtatgaacttgaggacacatgtccagtgggaggtgagaccacctctcaatattcaataaagctgctgagaatctagcctc

SEQ ID NO: 393574 - DNA, 1000 bp, Homo Sapiens; identical to SEQ ID NO: 283787

SEQ ID NO: 393575 - DNA, 1000 bp, Homo Sapiens
tctccccaaaaactaaatgtgaaatccctaccatttctagcctctattgcccagattggagtcagaggtcaaaaaaggattccaagtgatggaactccaggggtggagggaaattggcagttcctggcatctcttgtgtaccagctgctgtgctgggtgccttgcatgcacgggcttatctgatcttcctcaaacttcagataggttagggaaggacaaaggcccccagccatgaagggttttgctatttccaaagcttccccttatcgtcccctgtgattatctcccaaccccgtgacaaaggtagagcaaatattgttcttcccattttacagattcagaaaccaaggctaagggactggtctaaagtctcacaggtagtatatggtggagccaacacttgaactcagacctttttacacaaaatcccatgatttttccactgagacaaatcctaggctcctgggaggccctggcagaagccagaacacatggctgggcctttccagcccaacccactgtcttgcagtggacggagagccttggcgagggcagcagggtagagaggacaaagaatgtggggctggtttctgccctttaagagcacccggtcagtcagagaacagagatcacacacaccaaaccagacagaggcagggcagcatggagacaggtagacagacctccaggtccctaagctggggacagagaaggttctgagctgtcccatactcccactttgtgccaaatgactttgcacctgcaaatggtgcttcaatgtcgttttgtatctttaagctgtgatgttgtatatatacaatgcctcccagctagactgtaagccctttggggacaagggctgcttccagttcttggatggcgttctcctatctaccttccttcaactgctctgcatataataagcactcaataaatgctcatttgccaataaaaaaaaaaaaaaaaaaaaaaaaaaaaaaaaaaaaaaaaaaaaaaaaaa

SEQ ID NO: 393576 - DNA, 1000 bp, Homo Sapiens; identical to SEQ ID NO: 115146

SEQ ID NO: 393577 - DNA, 1000 bp, Homo Sapiens; identical to SEQ ID NO: 283790

SEQ ID NO: 393578 - DNA, 1000 bp, Homo Sapiens; identical to SEQ ID NO: 115147

SEQ ID NO: 393579 - DNA, 1000 bp, Homo Sapiens; identical to SEQ ID NO: 220566

SEQ ID NO: 393580 - DNA, 1000 bp, Homo Sapiens; identical to SEQ ID NO: 220567

SEQ ID NO: 393581 - DNA, 1000 bp, Homo Sapiens; identical to SEQ ID NO: 283796

SEQ ID NO: 393582 - DNA, 1000 bp, Homo Sapiens; identical to SEQ ID NO: 115149

SEQ ID NO: 393583 - DNA, 1000 bp, Homo Sapiens; identical to SEQ ID NO: 220571

SEQ ID NO: 393584 - DNA, 1000 bp, Homo Sapiens; identical to SEQ ID NO: 115150

SEQ ID NO: 393585 - DNA, 822 bp, Homo Sapiens
aggatcccaaggcccaactccccgaaccactcagggtcctgtggacagctcacctagctgcaatggctacaggctcccggacgtccctgctcctggcttttggcctgctctgcctgccctggcttcaagagggcagtgccttcccaaccattcccttatccaggctttttgacaacgctatgctccgcgcccatcgtctgcaccagctggcctttgacacctaccaggagtttgaagaagcctatatcccaaaggaacagaagtattcattcctgcagaacccccagacctccctctgtttctcagagtctattccgacaccctccaacagggaggaaacacaacagaaatccaacctagagctgctccgcatctccctgctgctcatccagtcgtggctggagcccgtgcagttcctcaggagtgtcttcgccaacagcctggtgtacggcgcctctgacagcaacgtctatgacctcctaaaggacctagaggaaggcatccaaacgctgatggggaggctggaagatggcagcccccggactgggcagatcttcaagcagacctacagcaagttcgacacaaactcacacaacgatgacgcactactcaagaactacgggctgctctactgcttcaggaaggacatggacaaggtcgagacattcctgcgcatcgtgcagtgccgctctgtggagggcagctgtggcttctagctgcccgggtggcatccctgtgacccctccccagtgcctctcctggccctggaagttgccactccagtgcccaccagccttgtcctaataaaattaagttgcatca

SEQ ID NO: 393586 - DNA, 1000 bp, Homo Sapiens; identical to SEQ ID NO: 283804

SEQ ID NO: 393587 - DNA, 575 bp, Homo Sapiens; identical to SEQ ID NO: 283805

SEQ ID NO: 393588 - DNA, 626 bp, Homo Sapiens; identical to SEQ ID NO: 283806

SEQ ID NO: 393589 - DNA, 774 bp, Homo Sapiens; identical to SEQ ID NO: 283807

SEQ ID NO: 393590 - DNA, 1000 bp, Homo Sapiens
cggcttccgggcccttctctctgccccctggtacctgaaccgtatatcctatggccctgactggaaggatttctacgtagtggaacccctggcatttgaaggtacccctgagcagaaggctctggtgattggtggagaggcttgtatgtggggagaatatgtggacaacacaaacctggtccccaggctctggcccagagcaggggctgttgccgaaaggctgtggagcaacaagttgacatctgacctgacatttgcctatgaacgtttgtcacacttccgctgtgagttgctgaggcgaggtgtccaggcccaacccctcaatgtaggcttctgtgagcaggagtttgaacagacctgagccccaggcaccgaggagggtgctggctgtaggtgaatggtagtggagccaggcttccactgcatcctggccaggggacggagccccttgccttcgtgccccttgcctgcgtgcccctgtgcttggagagaaaggggccggtgctggcgctcgcattcaataaagagtaatgtggcatttttctataataaacatggattacctgtgtttaaaaaaaaaagtgtgaatggcgttagggtaagggcacagccaggctggagtcagtgtctgcccctgaggtcttttaagttgagggctgggaatgaaacctatagcctttgtgctgttctgccttgcctgtgagctatgtcactcccctcccactcctgaccatattccagacacctgccctaatcctcagcctgctcacttcacttctgcattatatctccaaggcgttggtatatggaaaaagatgtaggggcttggaggtgttctggacagtggggagggctccagacccaacctggtcacaaaagagcctctcccccatgcatactcatccacctccctcccctagagctattctcctttgggtttcttgctgctgcaattttatacaaccattatttaaatattattaaacacatattgttctct

SEQ ID NO: 393591 - DNA, 1000 bp, Homo Sapiens; identical to SEQ ID NO: 220573

SEQ ID NO: 393592 - DNA, 1000 bp, Homo Sapiens; identical to SEQ ID NO: 220574

SEQ ID NO: 393593 - DNA, 1000 bp, Homo Sapiens
aatgcccgtctggccgcggatgacttccgcaccaagtatgagacagagttgaacctgcgcatgagtgtggaagccgacatcaatggcctgcgcagggtgctggacgaactgaccctggccagagctgacctggagatgcagattgagagcctgaaggaggagctggcctacctgaagaagaaccacgaggaggagatgaatgccctgagaggccaggtgggtggagatgtcaatgtggagatggacgctgcacctggcgtggacctgagccgcattctgaacgagatgcgtgaccagtatgagaagatggcagagaagaaccgcaaggatgccgaggaatggttcttcaccaagacagaggagctgaaccgcgaggtggccaccaacagcgagctggtgcagagcggcaagagcgagatctcggagctccggcgcaccatgcagaacctggagattgagctgcagtcccagctcagcatgaaagcatccctggagaacagcctggaggagaccaaaggtcgctactgcatgcagctggcccagatccaggagatgattggcagcgtggaggagcagctggcccagctccgctgcgagatggagcagcagaaccaggagtacaagatcctgctggacgtgaagacgcggctggagcaggagatcgccacctaccgccgcctgctggagggcgaggacgcccacctctcctcctcccagttctcctctggatcgcagtcatccagagatgtgacctcctccagccgccaaatccgcaccaaggtcatggatgtgcacgatggcaaggtggtgtccacccacgagcaggtccttcgcaccaagaactgaggctgcccagccccgctcaggcctaggaggccccccgtgtggacacagatcccactggaagatcccctctcctgcccaagcacttcacagctggaccctgcttcaccctcaccccctcctggcaatcaatacagcttcattatctgagttgcat

SEQ ID NO: 393594 - DNA, 1000 bp, Homo Sapiens; identical to SEQ ID NO: 115152

SEQ ID NO: 393595 - DNA, 1000 bp, Homo Sapiens; identical to SEQ ID NO: 115153

SEQ ID NO: 393596 - DNA, 1000 bp, Homo Sapiens
cagaagcaaaggaggcaaggcagctggagtcaagtgaggacagtggcaggcgtgctttcacatggcctgtcccacagatggaggtgaaaggtgcaccttcttgtcctctgttctgtagaaatccttccctgtttgatccttcccctgccaaatgaactatgttactctaatactaacctgtattaattaatatatgagatatatataagttaatttttcatgaaatctaaagcacaaccctagaactaatttttaaaagtgttatttctaccattgaaaaagtaatgtataacatattttatgtgattaaagtgcgtattctcaataagaggtaacctttttttgatgctgcaatgctctgtgataccacagaggtaagcaatgccacttaacctgtatcataaatagtcccaaactgctcttcctataaaattctgcctttgtcaacagctttgctgtctcctaatcactctcaagctctctgctgtgcatgtgactgttgtcagaaggaaaatcaccaagaaacttcacctctcactgcctttgatttgttgcagttaatctaagaaacaaaatgaagatggctagtctaatggtggatgaaacaaaaatgaagtctgagtgctaattcagagaacttgcaattccagacattttcaattctaggtcttctgctatattccaatcagaacagaagcttcagggctcatagttactgagaaaactcacgtttttctacctctaacttcatatagaattccaaatgaaagcaccaccaaactgcacatatttgtgtgaggaagatcaacaagcttcagacttttcccatgaggacttaattcttttatcaaattacccaatttttaaactgctgtgtggatactgtgagtgttcagctttatcgatgacctagccttggaccagatagctgaaaatgttcaggatgtgtactcaagctgatagtaattctgagccctgtctaataaaaaaggaaggatgt

SEQ ID NO: 393597 - DNA, 1000 bp, Homo Sapiens; identical to SEQ ID NO: 283813

SEQ ID NO: 393598 - DNA, 1000 bp, Homo Sapiens; identical to SEQ ID NO: 283814

SEQ ID NO: 393599 - DNA, 1000 bp, Homo Sapiens
catgctgccctacttgtgatgtggatatcaacacttgggtaccattctattcaactgagctcaacaaacccgccatgatctactgctctcatggggatgggcactgggtccatgctcagtgcatggatctggcagaacgcacactcatccatctgtcagcaggaagcaacaagtattactgcaatgagcatgtggagatagcaagagctctacacactccccaaagagtcctacccttaaaaaagcctccaatgaaatccctccgtaaaaaaggttctggaaaaatcttgactcctgccaagaaatcctttcttagaaggttgtttgattagttttgcaaaagcctttcagattcaggtgtatggaatttttgaatctatttttaaaatcataacattgattttaaaaatacatttttgtttatttaaaatgcctatgttttcttttagttacatgaattaagggccagaaaaaagtgtttataatgcaatgataaataaagtcattctagaccctatacattttgaaaatattttacccaaatactcaatttactaatttattcttcactgaggatttctgatctgattttttattcaacaaaccttaaacacccagaagcagtaataatcatcgaggtatgtttatatttattatatgagtcttggtaacaaataacctataaagtgtttatgacaaatttagccaataaagaaattaacacccaaaagaattaaattgattattttgtgcaacataacaattcggcagttggccaaaacttaaaagcaagatctactacatcccacattagtgttctttatataccttcaagcaaccctttggattatgcccatgaacaagttagtttctcatagctttacagatgtagatataaatataaatatatgtatacatatagatagataatgttctccactgacacaaaagaagaaataaataatctacatcaaaaaaaaaaaaaaaaaaaaaaaaaaaa

SEQ ID NO: 393600 - DNA, 1000 bp, Homo Sapiens
cacaatggaacagaactcaccctccgctattcaacagggacagtcagtggctttctcagccaggacatcatcaccgtgggtggaatcacggtgacacagatgtttggagaggtcacggagatgcccgccttacccttcatgctggccgagtttgatggggttgtgggcatgggcttcattgaacaggccattggcagggtcacccctatcttcgacaacatcatctcccaaggggtgctaaaagaggacgtcttctctttctactacaacagagattccgagaattcccaatcgctgggaggacagattgtgctgggaggcagcgacccccagcattacgaagggaatttccactatatcaacctcatcaagactggtgtctggcagattcaaatgaagggggtgtctgtggggtcatccaccttgctctgtgaagacggctgcctggcattggtagacaccggtgcatcctacatctcaggttctaccagctccatagagaagctcatggaggccttgggagccaagaagaggctgtttgattatgtcgtgaagtgtaacgagggccctacactccccgacatctctttccacctgggaggcaaagaatacacgctcaccagcgcggactatgtatttcaggaatcctacagtagtaaaaagctgtgcacactggccatccacgccatggatatcccgccacccactggacccacctgggccctgggggccaccttcatccgaaagttctacacagagtttgatcggcgtaacaaccgcattggcttcgccttggcccgctgaggccctctgccacccaggcaggccctgccttcagccctggcccagagctggaacactctctgagatgcccctctgcctgggcttatgccctcagatggagacattggatgtggagctcctgctggatgcgtgccctgacccctgcaccagcccttccctgctttgaggacaaagagaataaagacttcatgttcac

SEQ ID NO: 393601 - DNA, 1000 bp, Homo Sapiens; identical to SEQ ID NO: 220577

SEQ ID NO: 393602 - DNA, 1000 bp, Homo Sapiens; identical to SEQ ID NO: 283817

SEQ ID NO: 393603 - DNA, 1000 bp, Homo Sapiens
cctttctcctgacgtttcctgactacttgccctgttcagtgatgttgcagccagctccacaagattcagggaagtcctgtggggttgactttgaggtcaaagcattcgccacagacagcaccgatgccgaagaggacaaaatccccaagaagagctccgtgcgattactgatccgcaaagtacagcatgccccacttgagatgggtccccagccccgagctgaggcggcctggcagttcttcatgtctgacaagcccctgcaccttgcggtctctctcaacaaagagatctatttccatggggagcccatccctgtgaccgtgactgtcaccaataacacagagaagaccgtgaagaagattaaagcattcgtggaacaggtggccaatgtggttctctactcgagtgattattacgtcaagcccgtggctatggaggaagcgcaagaaaaagtgccaccaaacagcactttgaccaagacgctgacgctgctgcccttgctggctaacaatcgagaaaggagaggcattgccctggatgggaaaatcaagcacgaggacacaaaccttgcctccagcaccatcattaaggagggcatagaccggaccgtcctgggaatcctggtgtcttaccagatcaaggtgaagctcacagtgtcaggctttctgggagagctcacctccagtgaagtcgccactgaggtcccattccgcctcatgcaccctcagcctgaggacccagctaaggaaagttatcaggatgcaaatttagtttttgaggagtttgctcgccataatctgaaagatgcaggagaagctgaggaggggaagagagacaagaatgacgctgatgagtgaagatgtcggctcaggatgccggaaaatgacctgtagttaccagtgcaacgagcaaagccccacagtttagtcctttggagttatgctgcgtatgaaaggatgagtcttcttccgagaaataaagcttgtttgttctcccctgg

SEQ ID NO: 393604 - DNA, 1000 bp, Homo Sapiens; identical to SEQ ID NO: 115156

SEQ ID NO: 393605 - DNA, 1000 bp, Homo Sapiens; identical to SEQ ID NO: 283819

SEQ ID NO: 393606 - DNA, 1000 bp, Homo Sapiens; identical to SEQ ID NO: 115157

SEQ ID NO: 393607 - DNA, 1000 bp, Homo Sapiens
tgagctggagaagcactccctgtctcgggtcatctgtgacaacactggcctcaccagggtgcccatggatgccttccaagtcggcaaattccccgaagactttgagtcttgtgacagcatcactggcatgaacctggaggcctggagggaaacctttcctcaagacgacaagtgtggcttcccagagagcgtggagaatggggactttgtgcactgtgaggagtctgggaggcgcgtgctggtgtattcctgccggcacgggtatgagctccaaggccgggagcagctcacttgcacccaggaaggatgggatttccagcctcccctctgcaaagatgtgaacgagtgtgcagacggtgcccaccccccctgccacgcctctgcgaggtgcagaaacaccaaaggcggcttccagtgtctctgcgcggacccctacgagttaggagacgatgggagaacctgcgtagactccgggaggctccctcgggtgacttggatctccatgtcgctggctgctctgctgatcggaggcttcgcaggtctcacctcgacggtgatttgcaggtggacacgcactggcactaaatccacactgcccatctcggagacaggcggaggaactcccgagctgagatgcggaaagcaccaggccgtagggacctcaccgcagcgggccgcagctcaggactcggagcaggagagtgctgggatggaaggccgggatactcacaggctgccgagagccctctgagggcaaagtggcaggacactgcagaacagcttcatgttcccaaaatcaccgtacgactcttttccaaacacaggcaaatcggaaatcagcaggacgactgttttcccaacacgggtaaatctagtaccatgtcgtagttactctcaggcatggatgaataaatgttatagctgcatttgtctggccttttcttgtaaacattgcctgatttgttccttctggggctttgccattaaaatgtatttacag

SEQ ID NO: 393608 - DNA, 1000 bp, Homo Sapiens; identical to SEQ ID NO: 283822

SEQ ID NO: 393609 - DNA, 1000 bp, Homo Sapiens; identical to SEQ ID NO: 115158

SEQ ID NO: 393610 - DNA, 1000 bp, Homo Sapiens; identical to SEQ ID NO: 283824

SEQ ID NO: 393611 - DNA, 1000 bp, Homo Sapiens
tttggggtcatgtttaggtcagaatcaccgtgcccttgaacaagcaggtaggggggcttgataacttaactttccacgtggacagaatttttttttttgttttgtttttgttttgccactgtgctctagcctgggtcacaagagcgaaactccgtctcaataataacaacaacaaaaataacccaggagtggctcaagagtccagtgtgggatgaaaatataaacagaggaagacaacatatgtcactggggaggctgggggagctagacaaaattcacacgggaggggcagggatgagacaatattgtgccctgggtctgtgcaaacgttgggaccagaatccactataagtttcattcttcggagacacggaagctctgcactggaggccgggactcaggcgtggaagagaatcttctccttattcaccggggaggctgtgtcttgtgcaaacaagtcatagaaacttgatgggagttggggagggactgaaggatgcatgcaaggttctgggaaggagtgagaagtagtgaaggccaaggggcccccatcacaggccgatggggtaagacttcgagagagcctgatcctggggtcttctgagactccaccaggagccggagagggcagggagccaaatccagctaggaggttacagattgcttttcctgggctgggctcctgagtgttggttcttccagctgtgcacaggggatttcaaacgttctacgtcctaaagccaggaagagtgacaaggcaggtggggacagaaggaagaagccaggagcctccctgagaaggtgtcaccttatctgtcctcctcttccccacacactggcctctgggtcccccttctctgtccacccacagagtgaaaccaattaaaatgttggatctcaaaaaaaaaaaaaaaaaaaaaaaaaaaaaaaaaaaaaaaaaaaaaaaaaaaaaaaaaaaaaaaaaaaaaaaaaaaaaaaaaaaaaaaaaaaaaaaaaaaaa

SEQ ID NO: 393612 - DNA, 1000 bp, Homo Sapiens; identical to SEQ ID NO: 220579

SEQ ID NO: 393613 - DNA, 576 bp, Homo Sapiens; identical to SEQ ID NO: 283825

SEQ ID NO: 393614 - DNA, 584 bp, Homo Sapiens; identical to SEQ ID NO: 283826

SEQ ID NO: 393615 - DNA, 1000 bp, Homo Sapiens; identical to SEQ ID NO: 283827

SEQ ID NO: 393616 - DNA, 1000 bp, Homo Sapiens; identical to SEQ ID NO: 220580

SEQ ID NO: 393617 - DNA, 1000 bp, Homo Sapiens; identical to SEQ ID NO: 115159

SEQ ID NO: 393618 - DNA, 1000 bp, Homo Sapiens; identical to SEQ ID NO: 283828

SEQ ID NO: 393619 - DNA, 1000 bp, Homo Sapiens; identical to SEQ ID NO: 283829

SEQ ID NO: 393620 - DNA, 1000 bp, Homo Sapiens
cataaattagaggtctccaaaatcggatctggggctctgggatagctgacccagccccttgagaaaccttattgtacctctcttatagaatatttattacctctgatacctcaacccccatttctatttatttactgagcttctctgtgaacgatttagaaagaagcccaatattataatttttttcaatatttattattttcacctgtttttaagctgtttccatagggtgacacactatggtatttgagtgttttaagataaattataagttacataagggaggaaaaaaaatgttctttggggagccaacagaagcttccattccaagcctgaccacgctttctagctgttgagctgttttccctgacctccctctaatttatcttgtctctgggcttggggcttcctaactgctacaaatactcttaggaagagaaaccagggagcccctttgatgattaattcaccttccagtgtctcggagggattcccctaacctcattccccaaccacttcattcttgaaagctgtggccagcttgttatttataacaacctaaatttggttctaggccgggcgcggtggctcacgcctgtaatcccagcactttgggaggctgaggcgggtggatcacttgaggtcaggagttcctaaccagcctggtcaacatggtgaaaccccgtctctactaaaaatacaaaaattagccgggcatggtggcgcgcacctgtaatcccagctacttgggaggctgaggcaagagaattgcttgaacccaggagatggaagttgcagtgagctgatatcatgcccctgtactccagcctgggtgacagagcaagactctgtctcaaaaaataaaaataaaaataaatttggttctaatagaactcagttttaactagaatttattcaattcctctgggaatgttacattgtttgtctgtcttcatagcagattttaattttgaataaataaatgtatcttattcacatc

SEQ ID NO: 393621 - DNA, 1000 bp, Homo Sapiens; identical to SEQ ID NO: 283830

SEQ ID NO: 393622 - DNA, 1000 bp, Homo Sapiens
ggtccatatgaactgaaagctctccacctccagggacaggatatggagcaacaagtggtgttctccatgtcctttgtacaaggagaagaaagtaatgacaaaatacctgtggccttgggcctcaaggaaaagaatctgtacctgtcctgcgtgttgaaagatgataagcccactctacagctggagagtgtagatcccaaaaattacccaaagaagaagatggaaaagcgatttgtcttcaacaagatagaaatcaataacaagctggaatttgagtctgcccagttccccaactggtacatcagcacctctcaagcagaaaacatgcccgtcttcctgggagggaccaaaggcggccaggatataactgacttcaccatgcaatttgtgtcttcctaaagagagctgtacccagagagtcctgtgctgaatgtggactcaatccctagggctggcagaaagggaacagaaaggtttttgagtacggctatagcctggactttcctgttgtctacaccaatgcccaactgcctgccttagggtagtgctaagaggatctcctgtccatcagccaggacagtcagctctctcctttcagggccaatccccagcccttttgttgagccaggcctctctcacctctcctactcacttaaagcccgcctgacagaaaccacggccacatttggttctaagaaaccctctgtcattcgctcccacattctgatgagcaaccgcttccctatttatttatttatttgtttgtttgttttattcattggtctaatttattcaaagggggcaagaagtagcagtgtctgtaaaagagcctagtttttaatagctatggaatcaattcaatttggactggtgtgctctctttaaatcaagtcctttaattaagactgaaaatatataagctcagattatttaaatgggaatatttataaatgagcaaatatcatactgttcaatggttctgaaataaacttcactgaag

SEQ ID NO: 393623 - DNA, 1000 bp, Homo Sapiens; identical to SEQ ID NO: 224410

SEQ ID NO: 393624 - DNA, 1000 bp, Homo Sapiens; identical to SEQ ID NO: 283832

SEQ ID NO: 393625 - DNA, 1000 bp, Homo Sapiens
ccttcccatcccagctgaaatactgaggggtctccaggaggagactagatttatgaatacacgaggtatgaggtctaggaacatacttcagctcacacatgagatctaggtgaggattgattacctagtagtcatttcatgggttgttgggaggattctatgaggcaaccacaggcagcatttagcacatactacacattcaataagcatcaaactcttagttactcattcagggatagcactgagcaaagcattgagcaaaggggtcccatataggtgagggaagcctgaaaaactaagatgctgcctgcccagtgcacacaagtgtaggtatcattttctgcatttaaccgtcaataggcaaaggggggaagggacatattcatttggaaataagctgccttgagccttaaaacccacaaaagtacaatttaccagcctccgtatttcagactgaatgggggtggggggggcgccttaggtacttattccagatgccttctccagacaaaccagaagcaacagaaaaaatcgtctctccctccctttgaaatgaatataccccttagtgtttgggtatattcatttcaaagggagagagagaggtttttttctgttctttctcatatgattgtgcacatacttgagactgttttgaatttgggggatggctaaaaccatcatagtacaggtaaggtgagggaatagtaagtggtgagaactactcagggaatgaaggtgtcagaataataagaggtgctactgactttctcagcctctgaatatgaacggtgagcattgtggctgtcagcaggaagcaacgaagggaaatgtctttccttttgctcttaagttgtggagagtgcaacagtagcataggaccctaccctctgggccaagtcaaagacattctgacatcttagtatttgcatattcttatgtatgtgaaagttacaaattgcttgaaagaaaatatgcatctaataaaaaacaccttcta

SEQ ID NO: 393626 - DNA, 1000 bp, Homo Sapiens; identical to SEQ ID NO: 283833

SEQ ID NO: 393627 - DNA, 1000 bp, Homo Sapiens; identical to SEQ ID NO: 283835

SEQ ID NO: 393628 - DNA, 1000 bp, Homo Sapiens
ttcacctacatccattcagtcagtctttgggggtttaaagaaattccaaagagtcatcagaagaggaaaaatgaaggtaatgttttttcagacaggtaaagtctttgaaaatatgtgtaatatgtaaaacattttgacacccccataatatttttccagaattaacagtataaattgcatctcttgttcaagagttccctatcactctctttaatcactactcacagtaacctcaactcctgccacaatgtacaggatgcaactcctgtcttgcattgcactaagtcttgcacttgtcacaaacagtgcacctacttcaagttctacaaagaaaacacagctacaactggagcatttactgctggatttacagatgattttgaatggaattaataattacaagaatcccaaactcaccaggatgctcacatttaagttttacatgcccaagaaggccacagaactgaaacatcttcagtgtctagaagaagaactcaaacctctggaggaagtgctaaatttagctcaaagcaaaaactttcacttaagacccagggacttaatcagcaatatcaacgtaatagttctggaactaaagggatctgaaacaacattcatgtgtgaatatgctgatgagacagcaaccattgtagaatttctgaacagatggattaccttttgtcaaagcatcatctcaacactgacttgataattaagtgcttcccacttaaaacatatcaggccttctatttatttaaatatttaaattttatatttattgttgaatgtatggtttgctacctattgtaactattattcttaatcttaaaactataaatatggatcttttatgattctttttgtaagccctaggggctctaaaatggtttcacttatttatcccaaaatatttattattatgttgaatgttaaatatagtatctatgtagattggttagtaaaactatttaataaatttgataaatataaaaaaaaaaaa

SEQ ID NO: 393629 - DNA, 1000 bp, Homo Sapiens; identical to SEQ ID NO: 115161

SEQ ID NO: 393630 - DNA, 924 bp, Homo Sapiens; identical to SEQ ID NO: 283837

SEQ ID NO: 393631 - DNA, 1000 bp, Homo Sapiens; identical to SEQ ID NO: 283838

SEQ ID NO: 393632 - DNA, 1000 bp, Homo Sapiens; identical to SEQ ID NO: 283839

SEQ ID NO: 393633 - DNA, 1000 bp, Homo Sapiens; identical to SEQ ID NO: 220582

SEQ ID NO: 393634 - DNA, 1000 bp, Homo Sapiens; identical to SEQ ID NO: 220583

SEQ ID NO: 393635 - DNA, 1000 bp, Homo Sapiens; identical to SEQ ID NO: 115162

SEQ ID NO: 393636 - DNA, 1000 bp, Homo Sapiens; identical to SEQ ID NO: 115163

SEQ ID NO: 393637 - DNA, 1000 bp, Homo Sapiens
ttgcctgctgccttccctgccccagtacccccaggagaagattccaaagatgtagccgccccacacagacagccactcacctcttcagaacgaattgacaaacaaattcggtacatcctcgacggcatctcagccctgagaaaggagacatgtaacaagagtaacatgtgtgaaagcagcaaagaggcactggcagaaaacaacctgaaccttccaaagatggctgaaaaagatggatgcttccaatctggattcaatgaggagacttgcctggtgaaaatcatcactggtcttttggagtttgaggtatacctagagtacctccagaacagatttgagagtagtgaggaacaagccagagctgtgcagatgagtacaaaagtcctgatccagttcctgcagaaaaaggcaaagaatctagatgcaataaccacccctgacccaaccacaaatgccagcctgctgacgaagctgcaggcacagaaccagtggctgcaggacatgacaactcatctcattctgcgcagctttaaggagttcctgcagtccagcctgagggctcttcggcaaatgtagcatgggcacctcagattgttgttgttaatgggcattccttcttctggtcagaaacctgtccactgggcacagaacttatgttgttctctatggagaactaaaagtatgagcgttaggacactattttaattatttttaatttattaatatttaaatatgtgaagctgagttaatttatgtaagtcatatttatatttttaagaagtaccacttgaaacattttatgtattagttttgaaataataatggaaagtggctatgcagtttgaatatcctttgtttcagagccagatcatttcttggaaagtgtaggcttacctcaaataaatggctaacttatacatatttttaaagaaatatttatattgtatttatataatgtataaatggtttttataccaataaatggcattttaaaaaattc

SEQ ID NO: 393638 - DNA, 1000 bp, Homo Sapiens; identical to SEQ ID NO: 220584

SEQ ID NO: 393639 - DNA, 1000 bp, Homo Sapiens; identical to SEQ ID NO: 283842

SEQ ID NO: 393640 - DNA, 1000 bp, Homo Sapiens; identical to SEQ ID NO: 283843

SEQ ID NO: 393641 - DNA, 1000 bp, Homo Sapiens; identical to SEQ ID NO: 283844

SEQ ID NO: 393642 - DNA, 844 bp, Homo Sapiens
cagacacagagtaaacttttgctgggctccaagtgaccgcccatagtttattataaaggtgactgcaccctgcagccaccagcactgcctggctccacgtgcctcctggtctcagtatggcgctgtcctgggttcttacagtcctgagcctcctacctctgctggaagcccagatcccattgtgtgccaacctagtaccggtgcccatcaccaacgccaccctggaccggatcactggcaagtggttttatatcgcatcggcctttcgaaacgaggagtacaataagtcggttcaggagatccaagcaaccttcttttactttacccccaacaagacagaggacacgatctttctcagagagtaccagacccgccagaaccagtgcttctataactccagttacctgaatgtccagcgggagaatgggaccgtctccagatacgagggaggccgagaacatgttgctcacctgctgttccttagggacaccaagaccttgatgtttggttcctacctggacgatgagaagaactgggggctgtctttctatgctgacaagccagagacgaccaaggagcaactgggagagttctacgaagctctcgactgcttgtgcattcccaggtcagatgtcatgtacaccgactggaaaaaggataagtgtgagccactggagaagcagcacgagaaggagaggaaacaggaggagggggaatcctagcaggacacagccttggatcaggacagagacttgggggccatcctgcccctccaacccgacatgtgtacctcagctttttccctcacttgcatcaataaagcttctgtgtttggaacagctaa

SEQ ID NO: 393643 - DNA, 1000 bp, Homo Sapiens; identical to SEQ ID NO: 283846

SEQ ID NO: 393644 - DNA, 1000 bp, Homo Sapiens; identical to SEQ ID NO: 283847

SEQ ID NO: 393645 - DNA, 1000 bp, Homo Sapiens; identical to SEQ ID NO: 293132

SEQ ID NO: 393646 - DNA, 1000 bp, Homo Sapiens; identical to SEQ ID NO: 283848

SEQ ID NO: 393647 - DNA, 1000 bp, Homo Sapiens; identical to SEQ ID NO: 115165

SEQ ID NO: 393648 - DNA, 1000 bp, Homo Sapiens; identical to SEQ ID NO: 220586

SEQ ID NO: 393649 - DNA, 1000 bp, Homo Sapiens; identical to SEQ ID NO: 283851

SEQ ID NO: 393650 - DNA, 1000 bp, Homo Sapiens; identical to SEQ ID NO: 115166

SEQ ID NO: 393651 - DNA, 1000 bp, Homo Sapiens; identical to SEQ ID NO: 220587

SEQ ID NO: 393652 - DNA, 1000 bp, Homo Sapiens; identical to SEQ ID NO: 283853

SEQ ID NO: 393653 - DNA, 1000 bp, Homo Sapiens
cgcgcccttccgcagtttctggcagcaacggctccatgactcccagcacaagggagtgcggggaggccgcatgaccttggtgtttgggtgccgccgcccagatgaggaccacatctaccaggaggagatgctggagatggcccagaagggggtgctgcatgcggtgcacacagcctattcccgcctgcctggcaagcccaaggtctatgttcaggacatcctgcggcagcagctggccagcgaggtgctccgtgtgctccacaaggagccaggccacctctatgtttgcggggatgtgcgcatggcccgggacgtggcccacaccctgaagcagctggtggctgccaagctgaaattgaatgaggagcaggtcgaggactatttctttcagctcaagagccagaagcgctatcacgaagatatctttggtgctgtatttccttacgaggcgaagaaggacagggtggcggtgcagcccagcagcctggagatgtcagcgctctgagggcctacaggaggggttaaagctgccggcacagaacttaaggatggagccagctctgcattatctgaggtcacagggcctggggagatggaggaaagtgatatcccccagcctcaagtcttatttcctcaacgttgctccccatcaagccctttacttgacctcctaacaagtagcaccctggattgatcggagcctcctctctcaaactggggcctccctggtcccttggagacaaaatcttaaatgccaggcctggcaagtgggtgaaagatggaacttgctgctgagtgcaccacttcaagtgaccaccaggaggtgctatcgcaccactgtgtatttaactgccttgtgtacagttatttatgcctctgtatttaaaaaactaacacccagtctgttccccatggccacttgggtcttccctgtatgattccttgatggagatatttacatgaattgcattttactttaatcacaaaaaaaaaaaaaaaa

SEQ ID NO: 393654 - DNA, 1000 bp, Homo Sapiens; identical to SEQ ID NO: 283854

SEQ ID NO: 393655 - DNA, 1000 bp, Homo Sapiens; identical to SEQ ID NO: 283855

SEQ ID NO: 393656 - DNA, 1000 bp, Homo Sapiens; identical to SEQ ID NO: 115167

SEQ ID NO: 393657 - DNA, 1000 bp, Homo Sapiens; identical to SEQ ID NO: 220588

SEQ ID NO: 393658 - DNA, 1000 bp, Homo Sapiens; identical to SEQ ID NO: 283858

SEQ ID NO: 393659 - DNA, 1000 bp, Homo Sapiens; identical to SEQ ID NO: 220589

SEQ ID NO: 393660 - DNA, 1000 bp, Homo Sapiens; identical to SEQ ID NO: 283860

SEQ ID NO: 393661 - DNA, 1000 bp, Homo Sapiens; identical to SEQ ID NO: 283861

SEQ ID NO: 393662 - DNA, 1000 bp, Homo Sapiens; identical to SEQ ID NO: 115168

SEQ ID NO: 393663 - DNA, 1000 bp, Homo Sapiens; identical to SEQ ID NO: 283863

SEQ ID NO: 393664 - DNA, 1000 bp, Homo Sapiens; identical to SEQ ID NO: 220590

SEQ ID NO: 393665 - DNA, 1000 bp, Homo Sapiens; identical to SEQ ID NO: 283865

SEQ ID NO: 393666 - DNA, 1000 bp, Homo Sapiens; identical to SEQ ID NO: 115169

SEQ ID NO: 393667 - DNA, 1000 bp, Homo Sapiens
tgaatcttggtgtctacgttaccaggcaggaaggctgagaggagagagactccagctgggttggaaaacagtattttccaaactaccttccagttcctcatttttgaatacaggcatagagttcagactttttttaaatagtaaaaataaaattaaagctgaaaactgcaacttgtaaatgtggtaaagagttagtttgagttgctatcatgtcaaacgtgaaaatgctgtattagtcacagagataattctagctttgagcttaagaattttgagcaggtggtatgtttgggagactgctgagtcaacccaatagttgttgattggcaggagttggaagtgtgtgatctgtgggcacattagcctatgtgcatgcagcatctaagtaatgatgtcgtttgaatcacagtatacgctccatcgctgtcatctcagctggatctccattctctcaggcttgctgccaaaagccttttgtgttttgttttgtatcattatgaagtcatgcgtttaatcacattcgagtgtttcagtgcttcgcagatgtccttgatgctcatattgttccctaatttgccagtgggaactcctaaatcaaattggcttctaatcaaagcttttaaaccctattggtaaagaatggaaggtggagaagctccctgaagtaagcaaagactttcctcttagtcgagccaagttaagaatgttcttatgttgcccagtgtgtttctgatctgatgcaagcaagaaacactgggcttctagaaccaggcaacttgggaactagactcccaagctggactatggctctactttcaggccacatggctaaagaaggtttcagaaagaagtggggacagagcagaactttcaccttcatatatttgtatgatcctaatgaatgcataaaatgttaagttgatggtgatgaaatgtaaatactgtttttaacaactatgatttggaaaataaatcaatgctataactatgttgataaaag

SEQ ID NO: 393668 - DNA, 1000 bp, Homo Sapiens; identical to SEQ ID NO: 283867

SEQ ID NO: 393669 - DNA, 1000 bp, Homo Sapiens; identical to SEQ ID NO: 283868

SEQ ID NO: 393670 - DNA, 1000 bp, Homo Sapiens; identical to SEQ ID NO: 115170

SEQ ID NO: 393671 - DNA, 1000 bp, Homo Sapiens; identical to SEQ ID NO: 283871

SEQ ID NO: 393672 - DNA, 1000 bp, Homo Sapiens
atccagtacctggaagctgtgaggaggctgaaggtggagggccaccggttccccagaaccatccacatgacctttgtgcctgatgaggaggttgggggtcaccaaggcatggagctgttcgtgcagcggcctgagttccacgccctgagggcaggctttgccctggatgagggcatagccaatcccactgatgccttcactgtcttttatagtgagcggagtccctggtgggtgcgggttaccagcactgggaggccaggccatgcctcacgcttcatggaggacacagcagcagagaagctgcacaaggttgtaaactccatcctggcattccgggagaaggaatggcagaggctgcagtcaaacccccacctgaaagaggggtccgtgacctccgtgaacctgactaagctagagggtggcgtggcctataacgtgatacctgccaccatgagcgccagctttgacttccgtgtggcaccggatgtggacttcaaggcttttgaggagcagctgcagagctggtgccaggcagctggcgagggggtcaccctagagtttgctcagaagtggatgcacccccaagtgacacctactgatgactcaaacccttggtgggcagcttttagccgggtctgcaaggatatgaacctcactctggagcctgagatcatgcctgctgccactgacaaccgctatatccgcgcggtgggggtcccagctctaggcttctcacccatgaaccgcacacctgtgctgctgcacgaccacgatgaacggctgcatgaggctgtgttcctccgtggggtggacatatatacacgcctgctgcctgcccttgccagtgtgcctgccctgcccagtgacagctgagccctggaactcctaaacctttgcccctggggcttccatcccaaccagtgccaaggacctcctcttcccccttccaaataataaagtctatggacagggctgtctctgaagtactaacacaaggaca

SEQ ID NO: 393673 - DNA, 1000 bp, Homo Sapiens; identical to SEQ ID NO: 220592

SEQ ID NO: 393674 - DNA, 1000 bp, Homo Sapiens; identical to SEQ ID NO: 283873

SEQ ID NO: 393675 - DNA, 1000 bp, Homo Sapiens; identical to SEQ ID NO: 283874

SEQ ID NO: 393676 - DNA, 1000 bp, Homo Sapiens
acctcttgcctgaattctgagggcaatttttgtatacaattcaaacagtcaaaaacccaactgatgtctgatggtaccagcaggtttacctgcaagggaaaatcaatatatcactttggtaataccagcaccttctgtgaatacacagtgataaaggaaatctcagttgccaagattgatgcagtcgctcctctagagaaagtatgcctaattagctgtggcttttccactgggtttggtgctgcaatcaatactgccaaggtgactccaggttctacctgtgctgtgtttggcctgggaggagtcggcttgtctgttgtcatgggttgtaaagcagcaggagcagccaggatcattggagtggatgtcaacaaggagaaatttaagaaggcacaggaattgggtgcgactgagtgcctcaaccctcaggacttaaagaaacccattcaagaagttttatttgatatgacagatgctggtatagacttctgctttgaggccattggaaatctggacgttctggcagctgccctcgcctcctgcaatgagagctatggggtctgtgtggttgttggggtgttgcctgccagtgttcaactcaaaatcagtggccagttgttcttctcaggacgttctttgaagggttctgtttttggaggctggaagagcagacagcacatccctaaactggttgctgattatatggcagagaagttgaatctagatccactaattactcatactctgaatcttgataaaatcaatgaagcagttgaattaatgaaaactggaaaatggtaaactgcccacataaattttatgtctgtgtgtttgagaccaagagaaagggtgtattggcttgggagtagaagaagggtcgtccctgctgcagaagctgtatactgataattgaagaggctttcaggaatttgtaaagcatctccttcccctctgcattttgttttatttctagctaataaaatacataatcctgaaagta

SEQ ID NO: 393677 - DNA, 1000 bp, Homo Sapiens
agaaatttgacctggaccagttgataactcatgttttaccatttaaaaaaatcagtgaaggatttgagctgctcaattcaggacaaagcattcgaacggtcctgacgttttgagatccaaagtggcaggaggtctgtgttgtcatggtgaactggagtttctcttgtgagagttccctcatctgaaatcatgtatctgtctcacaaatacaagcataagtagaagatttgttgaagacatagaacccttataaagaattattaacctttataaacatttaaagtcttgtgagcacctgggaattagtataataacaatgttaatatttttgatttacattttgtaaggctataattgtatcttttaagaaaacatacacttggatttctatgttgaaatggagatttttaagagttttaaccagctgctgcagatatataactcaaaacagatatagcgtataaagatatagtaaatgcatctcctagagtaatattcacttaacacattgaaactattattttttagatttgaatataaatgtattttttaaacacttgttatgagttaagttggattacattttgaaatcagttcattccatgatgcatattactggattagattaagaaagacagaaaagattaagggacgggcacatttttcaacgattaagaatcatcattacataacttggtgaaactgaaaaagtatatcatatgggtacacaaggctatttgccagcatatattaatattttagaaaatattccttttgtaatactgaatataaacatagagctagaatcatattatcatacttatcataatgttcaatttgatacagtagaattgcaagtccctaagtccctattcactgtgcttagtagtgactccatttaataaaaagtgtttttagtttttaacaactacactgatgtatctatatatatctataacatgttaaaaattcttaagaaaattaaaaattatataaaatg

SEQ ID NO: 393678 - DNA, 1000 bp, Homo Sapiens; identical to SEQ ID NO: 220593

SEQ ID NO: 393679 - DNA, 1000 bp, Homo Sapiens; identical to SEQ ID NO: 115171

SEQ ID NO: 393680 - DNA, 1000 bp, Homo Sapiens; identical to SEQ ID NO: 220595

SEQ ID NO: 393681 - DNA, 1000 bp, Homo Sapiens
agaaatgtcaccttcctttcatgccaatttgtttccgtcatgagaatggactacatggtatacttcagcttcctcacctggattttcatccccctggttgtcatgtgcgccatctatcttgacatcttttacatcattcggaacaaactcagtctgaacttatctaactccaaagagacaggtgcattttatggacgggagttcaagacggctaagtccttgtttctggttcttttcttgtttgctctgtcatggctgcctttatctatcatcaactgcatcatctactttaatggtgaggtaccacagcttgtgctgtacatgggcatcctgctgtcccatgccaactccatgatgaaccctatcgtctatgcctataaaataaagaagttcaaggaaacctaccttttgatcctcaaagcctgtgtggtctgccatccctctgattctttggacacaagcattgagaagaattctgagtagttatccatcagagatgactctgtctcattgaccttcagattccccatcaacaaacacttgagggcctgtatgcctgggccaagggatttttacatccttgattacttccactgaggtgggagcatctccagtgctccccaattatatctcccccactccactactctcttcctccacttcatttttcctttgtcctttctctctaattcagtgttttggaggcctgacttggggacaacgtattattgatattattgtctgttttccttcttcccaatagaagaataagtcatggagcctgaagggtgcctagttgacttactgacaaaaggctctagttgggctgaacatgtgtgtggtggtgactcatttccatgccattgtggaattgagcagagaacctgctctcggaggatgcctagaagatgttgggaacagaagaaataaactgagtttaagggggacttaaactgctgaattcacctgtggatgtttttgagtaaataaaagctaatag

SEQ ID NO: 393682 - DNA, 1000 bp, Homo Sapiens; identical to SEQ ID NO: 220597

SEQ ID NO: 393683 - DNA, 1000 bp, Homo Sapiens
gcgagcgggcgcggaggggggcgcgggcggtgcggacgggcagggggcggggccgggggcggctgagtcgggggcgctgaccgcctccaggtccccggggcccggtggccgcctgtcgcgcgccagctcgcgctccgtcgagttcttcctgtcgcgccggcgccgggcgcgcagcagcgtgtgccgccgcaaggtggcccaggcgcgcgagaagcgcttcacctttgtgctggctgtggtcatgggcgtgttcgtgctctgctggttccccttcttcttcagctacagcctgtacggcatctgccgcgaggcctgccaggtgcccggcccgctcttcaagttcttcttctggatcggctactgcaacagctcgctcaacccggtcatctacacggtcttcaaccaggatttccggcgatcctttaagcacatcctcttccgacggaggagaaggggcttcaggcagtgactcgcacccgtctgggaatcctggacagctccgcgctcggggctgggcagaaggggcggcccggacgggggagctttcccagagacccggggatggattggcctccagggcgcaggggagggtgcggcagggcaggagcttggcagagagatagccgggctccagggagtggggaggagagagggggagacccctttgccttcccccctcagcaaggggctgcttctggggctccctgcctggatccagctctgggagccctgccgaggtgtggctgtgaggtcagggttttagagagcagtggcagaggtagccccctaaatgggcaagcaaggagccccccaaagacactaccactccccatccccgtctgaccaagggctgacttctccaggacctagtcggggggtggctgccagggggcaaggagaaagcaccgacaatctttgattactgaaagtatttaaatgtttgccaaaaacaacagccaaaacaaccaaactattttctaaataaacctttgtaatctaa

SEQ ID NO: 393684 - DNA, 1000 bp, Homo Sapiens
ccaagtgctgcgacttcgtcaccaaccgggcctacgccatcgcctcgtccgtagtctccttctacgtgcccctgtgcatcatggccttcgtgtacctgcgggtgttccgcgaggcccagaagcaggtgaagaagatcgacagctgcgagcgccgtttcctcggcggcccagcgcggccgccctcgccctcgccctcgcccgtccccgcgcccgcgccgccgcccggacccccgcgccccgccgccgccgccgccaccgccccgctggccaacgggcgtgcgggtaagcggcggccctcgcgcctcgtggccctacgcgagcagaaggcgctcaagacgctgggcatcatcatgggcgtcttcacgctctgctggctgcccttcttcctggccaacgtggtgaaggccttccaccgcgagctggtgcccgaccgcctcttcgtcttcttcaactggctgggctacgccaactcggccttcaaccccatcatctactgccgcagccccgacttccgcaaggccttccagggactgctctgctgcgcgcgcagggctgcccgccggcgccacgcgacccacggagaccggccgcgcgcctcgggctgtctggcccggcccggacccccgccatcgcccggggccgcctcggacgacgacgacgacgatgtcgtcggggccacgccgcccgcgcgcctgctggagccctgggccggctgcaacggcggggcggcggcggacagcgactcgagcctggacgagccgtgccgccccggcttcgcctcggaatccaaggtgtagggcccggcgcggggcgcggactccgggcacggcttcccaggggaacgaggagatctgtgtttacttaagaccgatagcaggtgaactcgaagcccacaatcctcgtctgaatcatccgaggcaaagagaaaagccacggaccgttgcacaaaaaggaaagtttgggaagggatgggagagtggcttgctgatgttccttgttg

SEQ ID NO: 393685 - DNA, 1000 bp, Homo Sapiens
gatttcattggtgagacatatttacaacctagaagtaactggtgatatatctcaaattgtaattaataatagattgtgaataatgatttggggattcagatttctctttgaaacatgcttgtgtttcttagtggggttttatatccatttttatcaggatttcctcttgaaccagaaccagtctttcaactcattgcatcatttacaagacaacattgtaagagagatgagcacttctaagttgagtatattataatagattagtactggattattcaggctttaggcatatgcttctttaaaaacgctataaattatattcctcttgcatttcacttgagtggaggtttatagttaatctataactacatattgaatagggctaggaatatagattaaatcatactcctatgctttagcttatttttacagttatagaaagcaagatgtactataacatagaattgcaatctataatatttgtgtgttcactaaactctgaataagcactttttaaaaaactttctactcattttaatgattgtttaaaggtttctattttctctgatacttttttgaaatcagtaaacactgtgtattgttgtaaaatgtaaaggtcacttttcacatccttgactttttagatgtgctgctttgatatataggacattgatttgatttttattattaatgctttggttctgggttgtttcctaaaatatctgggtggcttaaaaaaaactctttaacttgtaataaacccttaactggcataggaaatggtatccagaatggaattttgctacatggggtctgggtgggggcaaagagacccagtcaattacatgtttggtaccaagaaaggaacctgtcagggcagtacaatgtgactttgaaaatatataccgtgggggtagttttaccctatatctataaacactgtttgttccagaatctgtatgattctatggagctattttaaaccaattgcaggtctaga

SEQ ID NO: 393686 - DNA, 1000 bp, Homo Sapiens; identical to SEQ ID NO: 115172

SEQ ID NO: 393687 - DNA, 1000 bp, Homo Sapiens; identical to SEQ ID NO: 220599

SEQ ID NO: 393688 - DNA, 1000 bp, Homo Sapiens; identical to SEQ ID NO: 115174

SEQ ID NO: 393689 - DNA, 1000 bp, Homo Sapiens; identical to SEQ ID NO: 115175

SEQ ID NO: 393690 - DNA, 1000 bp, Homo Sapiens; identical to SEQ ID NO: 115176

SEQ ID NO: 393691 - DNA, 1000 bp, Homo Sapiens; identical to SEQ ID NO: 283886

SEQ ID NO: 393692 - DNA, 1000 bp, Homo Sapiens
cgtgacagattggtcaacgagcccctggctgcctactcctacttccagattggtgccattcagtcctttgctggcttcactgactacttcacggcaatggcccaggagggctggttcccactgctgtgcgtggggctgcgggcgcagtgggaggaccaccacctacaagatctgcaggacagctacggccaggagtggacattcgggcagcgcctgtaccagcagtacacctgctacaccgtgttcttcatcagcattgaggtgtgccagatcgccgatgtcctcatccgcaagacgcgccgtctctctgccttccagcaaggcttcttcaggaataagatcctggtgatcgccatcgtgttccaggtctgcatcggctgcttcctgtgctactgccccggcatgcccaacatcttcaacttcatgcccattcggttccagtggtggctggtccccctgccctacggcatcctcatcttcgtctatgatgagatccggaagcttggagttcgctgttgcccagggagctggtgggaccaggaactctactattagagggacgactgccttcaagcatccctgcaactgccacagcaggtgggggcagggctcgtgggaccctctggacagccaccaagatatctgagcaaccaagagtcccagccccaccagtatctgcttctgtagcccacggcaccccaaacttggagggacctgcccactcccctcccccattcccaaggttcgcacctcctggagcagcagcgcctgggcagtcctctgggctggcctcgggaaagccgccacctgtggtggcggtggggctctgacagggagtacagctgaccgcttctggagggtgtttctgttcttaggactccagtccaggctggacggctgcctgagggcccttcgttaaagacacgcttgtgtcctgggcgatggtaataaaaccagctcatgctgactgtgctgtaaaaaaaaaaaaaaaaaaaaaaaa

SEQ ID NO: 393693 - DNA, 1000 bp, Homo Sapiens; identical to SEQ ID NO: 283887

SEQ ID NO: 393694 - DNA, 1000 bp, Homo Sapiens
tcgggggctgccatctcgggtcagcagcatcaacaccatctcacgggccaagatccgaacagtgaagatgacctttgtcatcgtgctggcctacatcgcttgctgggctcccttcttcagtgtccagatgtggtccgtgtgggacaagaatgcccctgatgaagattccaccaatgtggctttcaccatctctatgcttttgggcaacctcaacagctgctgcaacccctggatctacatgggcttcaacagccacctgttaccgcggcccctgcgtcaccttgcctgctgtgggggtccccagcccaggatgcgccggcggctctccgacggcagcctctcgagccgccacaccacgctgctgacccgctccagctgcccggccaccctcagcctcagcctcagcctaaccctcagtgggaggcccaggcctgaagagtcaccaagggacttggagctggcagatggggaaggcaccgctgagaccatcatcttttaggaaagactcgctggggtctggtactgcccccaggactagtggaggttctctgcccacctcaggcactggaaatgagagctgggagggtaagggttggagttagaggaggccctgtctgaagcagagccaaaaggccagaatgggtcccctaccctggtgtcacagctgcccctagtgtgagggctgcctcataagctcccaatctcagacactggcagtcagggagaatcaaactgcctgtctccctggtcctgccatattcatagggtgtccatgcacacatggtgtcccagatctaggcaggcctaggatggtgctgtctaggggtccacgggtggcaggaattcagaggctggccttgtgccctggctacctgtctccattctaacctgactggcacatctcagcctaaccaggagaggggagaagtgaaaaaccgtgaggaggactctatttggatcctggatttgttgttgttgttgttgttgttgttagagagaa

SEQ ID NO: 393695 - DNA, 1000 bp, Homo Sapiens; identical to SEQ ID NO: 115179

SEQ ID NO: 393696 - DNA, 1000 bp, Homo Sapiens; identical to SEQ ID NO: 220604

SEQ ID NO: 393697 - DNA, 1000 bp, Homo Sapiens; identical to SEQ ID NO: 220605

SEQ ID NO: 393698 - DNA, 1000 bp, Homo Sapiens
cctgccacccaggatcctgatctgccctgcactgagcactcagtggataaacactcctccagcccagacacactcctcctcttgggcaggagcaatccagagttgttatttttcttagaaggagcctcttttccctctattttttaaattgaaatataatagctgcatcagccctgaaaagccaaattcaaccacatggctggagaatcatttgtcatggccccgccttctcttctgatactaatggagcttcatgacccacggtcagcccccaaaccaaagttgtcccaacagaggaggccagtgaggcagagacagagctctcccactctcagaccctcttttgtcttcattttcctctcccacttagcacatgtgtgcttgagggtggctgggaatgtgatatacagcaccctgatcctaacaggtgtgattgttacgtaagacgctgatactgggccttgtattgcttttaaagtttcctctgctcagcatcatttcatgccaaagtgctgctatgggctgctttgtgtgcacaaaattgctttttccacctcggaaatgcagctttccctagggggaggcctacaacaggacgaccattctgagccagtgagtctattgcatggtgttttgagaaagggaattttagtgacaccttatgccatttcaagaggagaaatgcaggctggcagagcaatttccagaaatggaatttgcctgcaaatagtataaacaacactaaatttactgtgccaggaaatcttcctgaactccttgaactcatacacacaggtatttgagtcctgaataaagtgttggaaagcactgcagatgcggtcacctgactgaccacctgggttttctattaccagtgaatttcttttattcaccttcccttgaccaagaaattgggtttcttttccctcagcctgcacttactcttctattaagaccagaaaataaaataattttccgttgagtcacaaaaaaaaaaaaa

SEQ ID NO: 393699 - DNA, 1000 bp, Homo Sapiens; identical to SEQ ID NO: 283891

SEQ ID NO: 393700 - DNA, 1000 bp, Homo Sapiens
ccttgcctgctgccattagtagagggggcccctctgcatctgagccccccatccctgtgccacctgggtgtggagcccatggaacactctggtccgcctcattttaaaccaaaaaactgctccttcaccctcaccctgaggccccaggggagaggacccgtgggatggtgcccaggggttgccttgggacctcggatctcctctggggggcttggctgctgctgttgctgctctgtatttgcctctcgtgattctgtttgttacccatgttcacttcccccaggagaggccttggtaccccctctcccctggggcatccctttgccttggcatccctgtagcccagcaaccctgcccctccccagcatcccagctgggccagagagagccgagtgtgccaacaaggactggggcctgcccggctgcccgcctcagggatgggcacctcatgcctgtctcgccacctcctgtgccaatgtcccaccctccacctgggggtggggtgcagcttccacttactgattagaagacaccactgccctcccttcccccctccctgtctggtgtcctgtgcccccatctgtctgtctatatttgtctgtactcccctaggagaagtattttgccatatataaaaccactgtcctgtcctttgtggctgcctcccaagcctgcttctttgtcctcgccacatagtcgtcagcgtaggcacctgggagctgctgatatgcacggggagttgaaagggtgggtgcctgaagatgttgtgccctgagtcattgactcaaaagaaaagatgatcctttgattttggccctctgatgtattgtgcccaagccaggagctgcttgggcagtcccagctccacactggccctgagccccttcacttacctgtctctccacaagtagagccaaaggcaatgggaagctcaatgttgctcagtgggtgagatccagacccactggtgcaatgtcttaaatacacatgactgtttttc

SEQ ID NO: 393701 - DNA, 1000 bp, Homo Sapiens; identical to SEQ ID NO: 220606

SEQ ID NO: 393702 - DNA, 1000 bp, Homo Sapiens
tggtatttatttgctggaagctaaatttacacttaaagttggagtgtataaacattttaatatatgttaatgttgccagaatgacttttcagacttaccaaatgtattgatagtgccaaaaaaaaaatctcagaaatcttaatgcagaaattatatagtctcctcagattttaatatttttatttctttcctggcacagctgttgtattcaaagtgttttgctttttgtttggtcagtactgttagctcatttgaagttggcaaaaacaaatacaaacaagcaaaaaacctcaaatttttttcagcagtgagagagaatagtaaagagaggcccaagcatagctggttatgtgaaatataaaatggggtgttgttctccctttaatcaatctgagcacaactacatacatccaggaatctgaagtcagatagtaaggatgtggtaccaatcctcccgagtgcaatgctaaacacttccaggtgggaattcatctatttcacttaacacaaacgcagggtctgtatttcctgccaacaagattgagtatctttccattgcttctctcagtctctgtctttgaatatctgaatgttctggcccttcaacaaattctttaaatcatgctaaggaatttcgttttatgtggacacactcaactttgatattcaggagatgtttttacaaaatgactaattgaaaaaagttgaaacaaatgattttaaaagcttgcagtaaaaaataaactcatagattcagcaaatatttgttgactaaaattatagcatttttaatgcagaaaattataaagaatttggagattgagctgccttatttctaatgaacactcctcttcatcttattaagtcttcacagtttttccagtggctataattatggaattggtgacctatgttttatattatcaaggaagccttagattcactctgatctaagaaattattgaaattgaccctttttacacaaatgtctttaaaaaaa

SEQ ID NO: 393703 - DNA, 1000 bp, Homo Sapiens
ccgctcgcgctgccctgaaactctagtcgccagagaggcggcatgggtttccggaagttctcccccttcctggctctcagtatcttggtcctgtaccaggcgggcagcctccaggcggcgccattcaggtctgccctggagagcagcccagacccggccacactcagtaaagaggacgcgcgcctcctgctggctgcactggtgcaggactatgtgcagatgaaggccagtgagctgaagcaggagcaggagacacagggctccagctccgctgcccagaagagagcctgcaacactgccacctgtgtgactcatcggctggcaggcttgctgagcagatcagggggcatggtgaagagcaacttcgtgcccaccaatgtgggttccaaagcctttggcaggcgccgcagggaccttcaagcctgagcagatgaatgactccaggaagaaggttatcatgaaactgaactcaccatttctattaatttctgttggtaagaacttggtgagaatgccccgtggaagatacacatgtttgcatcctaagatactgaaaaaagggcacctttgtcacttgaaaggaatgaaactgaatgcaaaataagctaattccatatttgctgtgcatcatttttatatttaattctatgtccagtaaaagtgatggcatctctcattgacttatctggtagcaaactggttctttcggagccatcctgttgatcatgcagctccaccaaaccttagggggacgtgaaatcactgcctgttgtggtctccgaggacacatggtaatggtgatgctgtgccttgttatctaagaacatgattgtataatttgtttaagaaaatgtcaatattgtgccatttgtgaacttcatcaagattaaaagcatattttgggtacatttgtttcaaaaccttggtgatgcattacaacttgttttcttatgtaataataatgatgatgatgatgataataataaatatttttgagtgc

SEQ ID NO: 393704 - DNA, 1000 bp, Homo Sapiens
ccatttatagcaacttggtgccttttaccaaaaataacaaccagaccgcgaatatgtgccgctttctactgccaaatgatgttatgcagcagtcctggcacacattcctgttactcatcctctttcttattcctggaattgtgatgatggtggcatatggattaatctctttggaactctaccagggaataaaatttgaggctagccagaagaagtctgctaaagaaaggaaacctagcaccaccagcagcggcaaatatgaggacagcgatgggtgttacctgcaaaagaccaggcccccgaggaagctggagctccggcagctgtccaccggcagcagcagcagggccaaccgcatccggagtaacagctccgcagccaacctgatggccaagaaaagggtgatccgcatgctcatcgtcatcgtggtcctcttcttcctgtgctggatgcccatcttcagcgccaacgcctggcgggcctacgacaccgcctccgcagagcgccgcctctcaggaacccccatttccttcatcctcctcctgtcctacacctcctcctgcgtcaaccccatcatctactgcttcatgaacaaacgcttccgcctcggcttcatggccaccttcccctgctgccccaatcctggtcccccaggggcgaggggagaggtgggggaggaggaggaaggcgggaccacaggagcctctctgtccaggttctcgtacagccatatgagtgcctcggtgccaccccagtgagatgtcccctgaccctccaccgcagaaggaaggcagggaggaggcagagaagaaagaacggaagaagagatcaggaagagaaggagcagagctgatggagaaggaaggctccatctccagtgggaactcttcaaggtctgcttttcatccttcatctggattccagagcactgctccagtggggccatgattggtttctaggcagttcaaagcaggatatgttaagtaacactcaccatcag

SEQ ID NO: 393705 - DNA, 1000 bp, Homo Sapiens; identical to SEQ ID NO: 115180

SEQ ID NO: 393706 - DNA, 1000 bp, Homo Sapiens
ccagggccctgctcaggcctcacctggcttcccaggaccctgggtcaccttcctgggcagcccagagagaccctgccaactttccagacttcgctattcccaggcagggagggaaacccggggaactggtttttctgttccctgctgggtgggaatgcgctcttcaccaggaagaaggcccgggaggaggatccgggctttggactccttgtttgcctttaggcaggaagtcaggagccagcagggcgggccaggagaaagaaggcttaacattaagtattccttggcccagcagcggcccagattgcggtgtgagatggtgccccctggggggcacagccagaaactgaactggccgctgggagaaaagccagatgacagggagctggggaatcccctcgcttcataggcagagcccgcccacctgggccctaggcatactctccaggattgtccacaaatgtcctcagagggtccctaggtgggtcaactccaaggcaaatgtccaagcatcagcaagacaatgacactggaagggtccggcttggctagtcacatatcaagtcccgaggcagcaacaggaccaggagccaggtgtcctgactgtcctacaatatcattttcctgggagtgggagtcaagtgtgcctgctatccagccgcaaatccataccccctgccccagagaagcctcagtccctccctcctggctcacagccaccacctggatggatctgctccatgcagatctagccaggcctcccgcatgctgcctgcctccggccctgccccacacaggcctggcccagccagcaggttctctcctgtgagctccccaatccaacccatgcatggcctcccagccacccggatctccaggcccagcctggccccaaatgttctttcctttcatcctcagcaagtgctgagtctgtgaataaagccacataaccagcgggcaaaaaaaaaaaaaaaaaaaaaaaaaaaaaaaaaaaaaaaaa

SEQ ID NO: 393707 - DNA, 1000 bp, Homo Sapiens; identical to SEQ ID NO: 283893

SEQ ID NO: 393708 - DNA, 1000 bp, Homo Sapiens
ctgggctgtgtgccccggtggcttctgatgaaccggcccccaccacccgtggagctctgccaccccctacgcctgaagctcagcccctcttatcactggctggagagcaacgtggatgccgaggagagggaggtggtggtggaggaggaggacagatgggcatgtgcaggtcatgtggccccctctgtgggcaccctctgcagccacggccacctgcactctggggcctcaggtcccaaggctgaggctctgctgcaggagggtgagctgctgctatcaccccacatgcagaaggcactggaaggtgtgcactacattgccgaccacctgcggtctgaggatgctgactcttcggtgaaggaggactggaagtatgttgccatggtcatcgacaggatcttcctctggctgtttatcatcgtctgcttcctggggaccatcggcctctttctgcctccgttcctagctggaatgatctgactgcacctccctcgagctggctcccagggcaaaggggagggttcttggatgtggaagggctttgaacaatgtttagatttggagatgagcccaaagtgccagggagaacagccaggtgaggtgggaggttggagagccaggtgaggtctctctaagtcaggctggggttgaagtttggagtctgtccgagtttgcagggtgctgagctgtatggtccagcaggggagtaataagggctcttccggaaggggaggaagcgggaggcaggcctgcacctgatgtggaggtacaggcagatcttccctaccggggagggatggatggttggatacaggtggctgggctattccatccatctggaagcacatttgagcctccaggcttctccttgacgtcattcctctccttccttgctgcaaaatggctctgcaccagccggcccccaggaggtctggcagagctgagagccatggcctgcaggggctccatatgtccctacgcgtgcagcaggcaaacaaga

SEQ ID NO: 393709 - DNA, 1000 bp, Homo Sapiens; identical to SEQ ID NO: 115181

SEQ ID NO: 393710 - DNA, 1000 bp, Homo Sapiens; identical to SEQ ID NO: 283895

SEQ ID NO: 393711 - DNA, 1000 bp, Homo Sapiens
ttttcgtttcaattgttggatctcttgggctttttgttcctgttatttataaatgggcaaatatattaataccagttcatattggaaatgcaaataagtgaagcctcccaagggactgaagtatacatttagttaacacacatatatctgatggcacctataaaattatgaaaatgtaagttatgtgttaaatttagtgcaagctttaacagactaagttgctaacctcaatttatgttaacagatgatccatttgaacagttggctgtatgactgaagtaataactgatgagatacatttgatcttgtaaaaatagcaaaatattatctgaactggactagtgaaaaatctagtatttgtatcctggcaaataatactaatttataatccacagtaaagttcatcctttgactgtgctggagaattccagttgtatttgaagactgattttaaaacttttctgcatttggtaaaggtatgtaaactttcctgtactcactgagtaacagctaatctttaatataatattatactgctatatttaaaaagctgactacttgatataattacttaatgtgatgcttgatataataattacttaatgtggccgggcacggtggctcacacctgtaatcccagcactttgggaggtcgaggtgggcgtatcacctgaggttgggagttcgagaccagcctgaccaacgtggagaaaccccgtctctactaaaaatatgaaattagccagggtggtggtgcacacctgtaatcccagctacctgggaggctgcggcaggagaatcgcttgaacccaggtggcggaggttgcggtgagctgagatcacgccattgcactccagcctgggcaacaagagcaaaactcagtctcaaataataataataacaacaacttaatgtgctgctgcttttccataaccaacattttaaaaataaatgaaaaacaggaaaaaaaaaaaaaaaaaaaaaaaaaaaaaaaaaaaa

SEQ ID NO: 393712 - DNA, 1000 bp, Homo Sapiens; identical to SEQ ID NO: 283896

SEQ ID NO: 393713 - DNA, 1000 bp, Homo Sapiens
gttttccttttagtgattgaagaaatcatcccatcgtcttccaaagtcattcctctcattggagagtacctgctgttcatcatgatttttgtgaccctgtccatcattgttaccgtgtttgtcattaacgttcaccacagatcttcttccacgtaccaccccatggccccctgggttaagaggctctttctgcagaaacttccaaaattactttgcatgaaagatcatgtggatcgctactcatccccagagaaagaggagagtcaaccagtagtgaaaggcaaagtcctcgaaaaaaagaaacagaaacagcttagtgatggagaaaaagttctagttgcttttttggaaaaagctgctgattccattagatacatttcgagacatgtgaagaaagaacattttatcagccaggtagtacaagactggaaatttgtagctcaagttcttgaccgaatcttcctgtggctctttctgatagtgtcagtaacaggctcggttctgatttttacccctgctttgaagatgtggctacatagttaccattaggaatttaaaagacataagactaaattacaccttagacctgacatctggctatcacacagacagaatccaaatgcatgtgcttgttctacgaaccccgaatgcgttgtctttgtggaaatggaacatctcctcatgggagaaactctggtaaatgtgctcatttgtggttgccatgagagtgagctgcttttaaagaaagtggagcctcctcagacccctgccttggctttcccagacattcagggagggatcataggtccaggcttgagctcacatgtggccagagtgcacaaaaagctgttgctacttggtggaggaacacctcctagaagcagcaggcctcggtggtgggggaggggggattcacctggaattaaggaagtctcggtgtcgagctatctgtgtgggcagagcctggatctcccaccctgcactggcctccttggtgccg

SEQ ID NO: 393714 - DNA, 1000 bp, Homo Sapiens; identical to SEQ ID NO: 283897

SEQ ID NO: 393715 - DNA, 1000 bp, Homo Sapiens
cctcttctacatcatcaacatcctggtgccctgcgtgctcatctccttcatggtcaacctggtcttctacctaccggctgacagtggtgagaagacatcagtggccatctcggtgctcctggctcagtctgtcttcctgctgctcatctccaagcgtctgcctgccacatccatggccatcccccttatcggcaagttcctgctcttcggcatggtgctggtcaccatggttgtggtgatctgtgtcatcgtgctcaacatccacttccgaacacccagcacccatgtgctgtctgagggggtcaagaagctcttcctggagaccctgccggagctcctgcacatgtcccgcccagcagaggatggacccagccctggggccctggtgcggaggagcagctccctgggatacatctccaaggccgaggagtacttcctgctcaagtcccgcagtgacctcatgttcgagaagcagtcagagcggcatgggctggccaggcgcctcaccactgcacgccggcccccagcaagctctgagcaggcccagcaggaactcttcaatgagctgaagccagctgtggatggggcaaacttcattgttaaccacatgagggaccagaacaattacaatgaggagaaagacagctggaaccgagtggcccgcacagtggaccgcctctgcctgtttgtggtgacgcctgtcatggtggtgggcacagcctggatcttcctgcagggcgtttacaaccagccaccaccccagccttttcctggggacccctactcctacaacgtgcaggacaagcgcttcatctagggtgggcctgttggggagccaggagacagcagggtctgagagaggagccacagtccctaatgacacccactcctagccctgaggctcgtgcccctcagactggggaagagtccaaggaagggagggagcagccactcctcaatgctcaatggctcccctgaaatcaagacaggggccacccga

SEQ ID NO: 393716 - DNA, 1000 bp, Homo Sapiens; identical to SEQ ID NO: 283899

SEQ ID NO: 393717 - DNA, 781 bp, Homo Sapiens; identical to SEQ ID NO: 29110

SEQ ID NO: 393718 - DNA, 1000 bp, Homo Sapiens; identical to SEQ ID NO: 283900

SEQ ID NO: 393719 - DNA, 1000 bp, Homo Sapiens; identical to SEQ ID NO: 283901

SEQ ID NO: 393720 - DNA, 1000 bp, Homo Sapiens; identical to SEQ ID NO: 283902

SEQ ID NO: 393721 - DNA, 1000 bp, Homo Sapiens; identical to SEQ ID NO: 283904

SEQ ID NO: 393722 - DNA, 1000 bp, Homo Sapiens; identical to SEQ ID NO: 283905

SEQ ID NO: 393723 - DNA, 1000 bp, Homo Sapiens; identical to SEQ ID NO: 283906

SEQ ID NO: 393724 - DNA, 1000 bp, Homo Sapiens; identical to SEQ ID NO: 283907

SEQ ID NO: 393725 - DNA, 1000 bp, Homo Sapiens; identical to SEQ ID NO: 283908

SEQ ID NO: 393726 - DNA, 1000 bp, Homo Sapiens; identical to SEQ ID NO: 115183

SEQ ID NO: 393727 - DNA, 1000 bp, Homo Sapiens
taagaagttcctaaaatttggtttcttagatccattatttctctcaataatactctttccattccttaccccagtttttgaagcattaaatgtctctctgtttccaaaagataccataaattttttaagtaaatctgtaaacagaatgaagaaaagtcgcctcaacgacaaacaaaagcaccgactagatttccttcagctgatgattgactcccagaattcgaaagaaactgagtcccacaaagctctgtctgatctggagctcgcagcccagtcaataatcttcatttttgctggctatgaaaccaccagcagtgttctttccttcactttatatgaactggccactcaccctgatgtccagcagaaactgcaaaaggagattgatgcagttttgcccaataaggcaccacctacctatgatgccgtggtacagatggagtaccttgacatggtggtgaatgaaacactcagattattcccagttgctattagacttgagaggacttgcaagaaagatgttgaaatcaatggggtattcattcccaaagggtcaatggtggtgattccaacttatgctcttcaccatgacccaaagtactggacagagcctgaggagttccgccctgaaaggttcagtaagaagaaggacagcatagatccttacatatacacaccctttggaactggacccagaaactgcattggcatgaggtttgctctcatgaacatgaaacttgctctaatcagagtccttcagaacttctccttcaaaccttgtaaagaaacacagatccccttgaaattagacacgcaaggacttcttcaaccagaaaaacccattgttctaaaggtggattcaagagatggaaccctaagtggagaatgagttattctaaggatttctactttggtcttcaagaaagctgtgccccagaacaccagagatttcaacttagtcaataaaaccttgaaataaagatgggcttaatctaatgta

SEQ ID NO: 393728 - DNA, 1000 bp, Homo Sapiens
atccacctgcgtctcaggaggctccctaacccttgtgaagacaaggaccagctttgagggcctccacctgccgtcctgtcttcctgacccccgcttctgtccccttcctgtctgcccatatcctgttttctgtctgcccaccttcccttcttcccacctgcctgctgtcccccagtctgcctgcccttctctctctcacctttctccagggctccctacctgcttgtctacctgtctcctacccacctgtatctcttgttgggagaaaagctgagtgttgggagaagctgaggccgagcttgcatgtctgacataatgtaaaagagtcttgaatcatgtccaggatccagggtctaaaaccccttgtggcctttggaacaccaagctctgtgctgaagggtggaaggctaccctgacgcaccataatctaagcccggggcataaaacccctcgtggcttggatagaatccagggctcgtggctctggaatgtgtctggacttgctggctccttgctccttgctctcccaggatcaattgtatcttgagttaaaagaacctgctctccattatctcaagtaacagagcagatgctaaaccgtcacagctgtaaattgtgtgcttaatgcaacatgccctttcgacccacccattctcaccacctgtttctttgtttgatcaccaataaataatctgcacttccagagctcggggccttcacagcctccatccttagctttggcgccctggacccactttctctctcaaactgtcttttctcactgctttgactctgccggactttgtcacccccacgacctggtgttgggtctgaacaccccaacatccctgaatctccacccacctcccaaactcctgcctgccctccagactgtctgcccatacacctgtctccttcttcctgcctggcttgtctgttcctatattagtttcctattactgctgtaataaactatcacaatctcagtgattttaaataa

SEQ ID NO: 393729 - DNA, 1000 bp, Homo Sapiens
ctgtgccccaggtgtaccgccagctcagcaagcctgtcacctttgtggatggccggtctctacctgcaggaagcctgatctctatgcatatctatgccctccataggaacagtgctgtatggcccgaccctgaggtctttgactctctgcgcttttccactgagaatgcatccaaacgccatccctttgcctttatgcccttctctgctgggcccaggaactgcattgggcagcagtttgccatgagtgagatgaaggtggtcacagccatgtgcttgctccgctttgagttctctctggacccctcacggctgcccatcaagatgccccagcttgtcctgcgctccaagaatggctttcacctccacctgaagccactgggccctgggtctgggaagtagctctgatgagaatggggtcccagatggctcaggctgtgacctccctgggcaccaccctccccaggctgggtgtggaggagttggggccccctgccttcaggaggcttgtagtttagaagggaagtaggcattaccatagacgactcctagaggacagtgctatgtaaaaatgtgtgtctataaatgtttatcatgcatgtattctagagctcattcatttattcaacaaacatttggtgagcacctatttcggttcgagaaacttcatttatctcctataattggcaaacttaaaaatgcagcagaaacttacattccaaccttagagactcatagtgagcacaaggaaagttttgccctgagattcatggttatggctgggtaccaccaaatagaagaatggcttaggggagtgccccttcactgagatgtgtttctttgttgaactttgtgtgtgtgtgtttagaatataacagacataagaaaaaattacctaaatgaagactgtacaaaataataaataattctgaagcagactctcttgtaaccatcactgaagtcaagaaatatggaatatggtatcactgatggtcttctgc

SEQ ID NO: 393730 - DNA, 1000 bp, Homo Sapiens; identical to SEQ ID NO: 283909

SEQ ID NO: 393731 - DNA, 1000 bp, Homo Sapiens; identical to SEQ ID NO: 283910

SEQ ID NO: 393732 - DNA, 1000 bp, Homo Sapiens
gttattaaggagacccttcgactgaatcccccagttccaggagggtttcgggttgctctgaagacttttgaattaaatggataccagattcccaagggctggaatgttatctacagtatctgtgatactcatgatgtggcagagatcttcaccaacaaggaagaatttaatcctgaccgattcatgctgcctcacccagaggatgcatccaggttcagcttcattccatttggaggaggccttaggagctgtgtaggcaaagaatttgcaaaaattcttctcaaaatatttacagtggagctggccaggcattgtgactggcagcttctaaatggacctcctacaatgaaaaccagtcccaccgtgtatcctgtggacaatctccctgcaagattcacccatttccatggggaaatctgatgagcttgaatgttcaaacctgagacttattggaagtgtacatatgagtttttaaggagtgttgtgttgactttatatttaatttctaaatgtatattataatatttatgtgttttgactatactaccacaatctttaaatattaaaataatgaatttgtatcatttccaaataaagtaaaatttgaaggtacttttctggtattttaagattcctgttgggtaaaactcaccagtttagtattttcttagtgtatttaaccagattttacaatgcctacctggacttatttgtcatctttgcatctgttttctgtgagaagaaatcttagctgttttttatgttaacagttattagaaaatatatgtctgtgtgtgttattccagacgtatctctgtaaattcttctatagtcacttagattccctatttggaaaattgatccaagttaatttaatttttttttggtttgctgtactttagggaaagatgaacctgaaaaggtaacactgagaactgtcactctaacctctccagcttatctaacatgtcataaacataataaatctgtgttgtccaat

SEQ ID NO: 393733 - DNA, 1000 bp, Homo Sapiens; identical to SEQ ID NO: 220612

SEQ ID NO: 393734 - DNA, 1000 bp, Homo Sapiens
atcttcttaacagtttagtcccacctcttacttcctgcctcagtctgctttctctactgtctggattaattaggcagcctgctataaagttaaagtcacacatttctattttgcaaacactgtgattactctttgctttgtagtttgctttgctttgtagggttctgcttttaagtttttctctttttcagacaaattactgataaaaatgatattgctctatatgtaatatatcctgaaagcattattttttgttgaataggaaataaaattaatgaagacagaggctagaaagcatccattaattaatgagacacacttaactacttatctctaaaccatctatgtgaatatttgtaaaaataatgaatggactcatcttagttctgtatataaatatattttctttctagtttgtttagttaaggtgtgcagtgtttttcctgtgtattaaacctttccattttacgttttagaaaattttatgtattttaaaataaggggaagagtcattttcacctttaaactactatttttctttccaagtcatttttgtttttggtttcttattcaaagatgataatttagtggattaaccagtccagacgcactgatctttgcaaaggagacttaatttcaaatctgtaattaccatacataaactgtctcattatacgtatgcatttttttagtttgtttttgtttggtataaattaatttgttaattaaatatttcttaagtataaaccttatgaactacagtggagctacactcattgaaatgtaatttcagttctaaaaagatgtaataatcattttagaattaaaatttattctacttttaaataaattatgaatattaaaggtgaaaattgtataaattactttgattccattttaagtggagacatatttcagtgatttttagtaacctttaaaaatgtataatgacttttaaaatttgtagaattgaaaagacgctaataaaaatttattattt

SEQ ID NO: 393735 - DNA, 1000 bp, Homo Sapiens; identical to SEQ ID NO: 283913

SEQ ID NO: 393736 - DNA, 1000 bp, Homo Sapiens; identical to SEQ ID NO: 115184

SEQ ID NO: 393737 - DNA, 1000 bp, Homo Sapiens; identical to SEQ ID NO: 115185

SEQ ID NO: 393738 - DNA, 1000 bp, Homo Sapiens; identical to SEQ ID NO: 283918

SEQ ID NO: 393739 - DNA, 1000 bp, Homo Sapiens; identical to SEQ ID NO: 220615

SEQ ID NO: 393740 - DNA, 1000 bp, Homo Sapiens; identical to SEQ ID NO: 283919

SEQ ID NO: 393741 - DNA, 1000 bp, Homo Sapiens; identical to SEQ ID NO: 283922

SEQ ID NO: 393742 - DNA, 1000 bp, Homo Sapiens; identical to SEQ ID NO: 283923

SEQ ID NO: 393743 - DNA, 1000 bp, Homo Sapiens
tgcaaaggaagatgggctacttcatgatacagatatacactccttgcattatgacagtcattctttcccaggtgtctttctggattaataaggagtccgtcccagcaagaactgtttttgggatcaccactgttttaactatgaccactttgagcatcagtgcccggcactctttgccaaaagtgtcatatgccactgccatggattggttcatagctgtttgctttgcattcgtcttctctgctcttatcgagttcgcagctgtcaactactttaccaatcttcagacacagaaggcgaaaaggaaggcacagtttgcagccccacccacagtgacaatatcaaaagctactgaacctttggaagctgagattgttttgcatcctgactccaaatatcatctgaagaaaaggatcacttctctgtctttgccaatagtttcatcttccgaggccaataaagtgctcacgagagcgcccatcttacaatcaacacctgtcacacccccaccactcccgccagcctttggaggcaccagtaaaatagaccagtattctcgaattctcttcccagttgcatttgcaggattcaaccttgtgtactgggtagtttatctttccaaagatacaatggaagtgagtagcagtgttgaatagcttttccaggacaacctgaattctataagttcttgttttctgtttcctatgttttcttaaaaaatagcattgagacttgtgtagatgcttctcagaacatgaaatcaaattggaaatctgtaacgcagcttctgtaagcatgtgtgggcaaaaaagcaataatcctactcctcaaaatagaaagttgaagattgctgaaaaatatgacttttctgtatgttagagaaaaactttatgaggatgaaatgggttcaagatgaatttgtcaacttttgtcttccattgttcagtatttttaattatcactgtaaataacattaccacaaggcaaaaaaaaaagaaaa

SEQ ID NO: 393744 - DNA, 1000 bp, Homo Sapiens
gaatcacgacggtgcttacaatgacaaccatcagcacccacctcagggagaccctgccaaagatcccttatgtcaaagcgattgatatttatctgatgggttgctttgtgtttgtgttcctggctctgctggagtatgcctttgtaaattacatcttctttgggaaaggccctcagaaaaagggagctagcaaacaagaccagagtgccaatgagaagaataaactggagatgaataaagtccaggtcgacgcccacggtaacattctcctcagcaccctggaaatccggaatgagacgagtggctcggaagtgctcacgagcgtgagcgaccccaaggccaccatgtactcctatgacagcgccagcatccagtaccgcaagcccctgagcagccgcgaggcctacgggcgcgccctggaccggcacggggtacccagcaaggggcgcatccgcaggcgtgcctcccagctcaaagtcaagatccccgacttgactgatgtgaattccatagacaagtggtcccgaatgtttttccccatcaccttttctctttttaatgtcgtctattggctttactatgtacactgaggtctgttctaatggttccatttagactactttcctcttctattgttttttaaccttacaggtccccaacagcgatactgctgtttctcgaggtaagagattcagccatccaattggttttaggtcttgcatatcagttttattactgcaccatgtttacttcaaaaagacaaaacaaaaaaaaaattatttttccagtctaccgtggtccaggttatcagctctttaagagctctattaattgccatgtttacaaacaaacacaaagagagaagttagacaggtagatctttagcagtcttttctagtttccctggatttcactgatttattttttagggaaaatgaaaagaggaccttgctgtccgcctgcactgcttcctggtaaactataacaaacttatgctgcc

SEQ ID NO: 393745 - DNA, 1000 bp, Homo Sapiens
tacaaacttatcaccaagaaggttgttttttccacaggttcctatcccaggttatccctcagctttaagcttaagagaaacattggctactttatcctgcaaacatacatgccttccatcctgattaccatcctctcctgggtctccttctggattaattacgatgcttcagctgcaagggtggcattaggaatcacaactgtcctcacaatgaccacaatcaacacccacctccgggaaactctccctaaaatcccctatgtgaaggccattgacatgtacctgatggggtgctttgtcttcgttttcatggcccttctggaatatgccctagtcaactacatcttctttgggagggggccccaacgccaaaagaaagcagctgagaaggctgccagtgccaacaatgagaagatgcgcctggatgtcaacaagatggacccccatgagaacatcttactgagcactctcgagataaaaaatgaaatggccacatctgaggctgtgatgggacttggagaccccagaagcacaatgctagcctatgatgcctccagcatccagtatcggaaagctgggttgcccaggcatagttttggccgaaatgctctggaacgacatgtggcgcaaaagaaaagtcgcctgaggagacgcgcctcccaactgaaaatcaccatccctgacttgactgatgtgaatgccatagatcggtggtcccgcatattcttcccagtggttttttccttcttcaacatcgtctattggctttattatgtgaactaaaacatggcctcccactggaagcaaggactagattcctcctcaaaccagttgtacagcctgatgtaggacttggaaaacacatcaatccaggacaaaagtgacgctaaaataccttagttgctggcctatcctgtggtccatttcataccatttgggttgcttctgctaagtaatgaatacactaaggtccttgtggttttccagttaaaacgcaagt

SEQ ID NO: 393746 - DNA, 1000 bp, Homo Sapiens; identical to SEQ ID NO: 220616

SEQ ID NO: 393747 - DNA, 1000 bp, Homo Sapiens
gcaaccggaaaccaagcaaggacaaagataaaaagaagaaaaaccctgcccctaccattgatatccgcccaagatcagcaaccattcaaatgaataatgctacacaccttcaagagagagatgaagagtacggctatgagtgtctggacggcaaggactgtgccagttttttctgctgttttgaagattgtcgaacaggagcttggagacatgggaggatacatatccgcattgccaaaatggactcctatgctcggatcttcttccccactgccttctgcctgtttaatctggtctattgggtctcctacctctacctgtgaggaggtatgggttttactgatatggttcttattcactgagtctcatggagagatgtctgttctaagtccacttaaataatcctctatgtggttgataatgatctgaatctgtttctatgtccaaacctggtaaattttataatgtcatattgtttgtgcccagccctcctttggttagtgtactttgaacttcgatgtttgctgtgtttcaaacctgcaaggcaaagtaaaattagagcaagaacattcaaaccaaataagatatttttcagctacagcaaataaaacagtgaaagccctgactatttacagtagtggtatccttactagattcataatgcaattagatagaaaaggtccaaaactgtaccctatgttcactccgggtcaagttgtgataaatttgatcccaatagaatacctccctcatttaagaaaaatcataactcactttaaatatgaaagcctagtccagaaatctattacacctttatctcaagataggaagaaaatttcctccacattcatgtacaatgatgtaaatatttcaataacttagaatgcttcaagtttagtgcatgcatctctttagatccaaaataaatggactgaagttatcatcctattgtcttttattttgtgtccttgggctataaaagattcctgaatgtaattat

SEQ ID NO: 393748 - DNA, 1000 bp, Homo Sapiens; identical to SEQ ID NO: 115187

SEQ ID NO: 393749 - DNA, 1000 bp, Homo Sapiens; identical to SEQ ID NO: 115188

SEQ ID NO: 393750 - DNA, 1000 bp, Homo Sapiens; identical to SEQ ID NO: 283924

SEQ ID NO: 393751 - DNA, 1000 bp, Homo Sapiens; identical to SEQ ID NO: 220618

SEQ ID NO: 393752 - DNA, 1000 bp, Homo Sapiens
cgacgacactgaccactgcagcttctccactgttctatgcaaggtctctgtggccgcctcccatttcgccaccatgaccaacttcagctggctgttggcagaagccgtctacctgaactgcctcctggcctccacctcccccagctcaaggagagccttctggtggctggttctcgctggctgggggctgcccgtgctcttcactggcacgtgggtgagctgcaaactggccttcgaggacatcgcgtgctgggacctggacgacacctccccctactggtggatcatcaaagggcccattgtcctctcggtcggggtgaactttgggctttttctcaatattatccgcatcctggtgaggaaactggagccagctcagggcagcctccatacccagtctcagtattggcgtctctccaagtcgacacttttcctgatcccactctttggaattcactacatcatcttcaacttcctgccagacaatgctggcctgggcatccgcctccccctggagctgggactgggttccttccagggcttcattgttgccatcctctactgcttcctcaaccaagaggtgaggactgagatctcacggaagtggcatggccatgaccctgagcttctgccagcctggaggacccgtgctaagtggaccacgccttcccgctcggcggcaaaggtgctgacatctatgtgctaggctgcctcatcacgccactggagtccacacttgaatttgggcagctaccacgggtctgccatgctctggaggagcaagggggccacatccccaccccagctgttacccagcccggggcaggtgcagcccttcctccctgtctctgcatctgactctcttttgaggtccctgtatgtctacctctgacttctgtggtccctctgtgtctgctctcatccattcctcttactggggcctggggctctagcccaaggctcagaggagccaataaacctgtaaatgaaaaaaaaaaaa

SEQ ID NO: 393753 - DNA, 1000 bp, Homo Sapiens; identical to SEQ ID NO: 283925

SEQ ID NO: 393754 - DNA, 1000 bp, Homo Sapiens
actactttgaacagtgttgagtcctctctcccacagatggttcagccagcagtaatgctaggcaagactgaaggataaatagaaaaatgtcattagtaccatggggtagccatgtaatgtcaagcaattttatattagccagagattcctagtaggagctacttttcttaacagatgactcagttctctctatctcaggaatgaaagagttgaagaccaatccacaacaggggaaatgttaaggcaaaatgatgaacttgataagggatgaattatggggtttggataaccaaacaataaaaataaaagtatagactattttagtactaaaaaggtcctgaacatgtgagcttaagtactcattttgtccccagtggctaagaaactaaaggcaagccagcaagtgtctctgagtttcagtgtctgtatgtaaaaactgactctgacttccatcttctgcagggttagtgatacagatgctagctttttcactaaagaggtcttttagtttatactcaaccttgtctggatctaatttgattgtgcattcatgtgccttagaatgaagccaattcaaaaactcctagctggccttattctactgacttcgtgcgtggaaggctgctccagccagcactggtcctatggactgcgccctggaggaaagagagatgccgaaaatttgattgattctttccaagagatagtcaaagaggttggtcaactggcagaaacccaacgcttcgaatgcaccacgcaccagccacgttctcccctccgagacctgaaaggagctctggaaagtctgattgaagaggaaactgggcagaagaagatttaaatccattgggccagaaggaatgaccattactaacatgacttaagtataattctgacattgaaaatttataacccattaaatacctgtaaatggtatgaatttcagaaatccttacaccaagttgcacatattccataataaagtgctgtgttgtgaatg

SEQ ID NO: 393755 - DNA, 1000 bp, Homo Sapiens; identical to SEQ ID NO: 283926

SEQ ID NO: 393756 - DNA, 1000 bp, Homo Sapiens
agaggaggggatgattcgagtgaggaaatccaaaggcaaatatgcctacctcctggagtccaccatgaatgagtacattgagcagcggaaaccctgtgacaccatgaaggtgggaggtaacttggattccaaaggctatggcattgcaacacccaaggggtctgccctgagaaatccagtaaacctggcagtgttaaaactaaacgagcaggggcttttggacaaattgaaaaacaaatggtggtacgacaagggcgagtgcggcagcgggggaggtgattccaaggacaagacaagcgctctgagcctcagcaatgtggcaggcgtgttctacatcctgatcggaggacttggactagccatgctggttgccttaatcgagttctgctacaaatcccgtagtgaatccaagcggatgaagggtttttgtttgatcccacagcaatccatcaacgaagccatacggacatcgaccctcccccgcaacagcggggcaggagccagcagcggcggcagtggagagaatggtcgggtggtcagccatgacttccccaagtccatgcaatcgattccttgcatgagccacagttcagggatgcccttgggagccacgggattgtaactggagcagatggagaccccttggggagcaggctcggctccccagccccatcccaaacccttcagtgccaaaaacaacaacaaaatgaaacgcaaccaccaccaaccactgcgaccacaagaaggatgattcaacaggttttcctgaagaattgaaaaaccattttgctgtcccttttccttttttgatgttctttcacccttttctgtttgctaagtgaggatgaaaaaataacactgtactgcaataaggggagagtaaccctgtctaatgaaacctgtgtctctgagagtagagtcactggaacactaatgaggaaactgcactgttttattttaattcagttgttagtgtgtcttagtgtgtgcaatttttccc

SEQ ID NO: 393757 - DNA, 1000 bp, Homo Sapiens
atatgagtggcacacagaagagccagaggacggaaaggaaggacccagcgaccagcctcccaatgagtttggcatctttaacagcctctggttttccctgggtgcttttatgcagcaaggatgtgacatttcacccagatccctctcaggtcgaattgttggaggtgtttggtggttctttacactcatcattatatcatcttatactgctaacctggctgctttcctgacggttgagcgaatggtctctcccatagaaagtgcagaagacctggccaaacaaacagaaattgcctatggaacactggattcaggatcaacaaaagaattcttcagaagatcaaaaatagcagtgtatgaaaagatgtggacctacatgcgatcagcagagccatcagtattcactaggactacagctgagggagtagctcgtgtccgcaaatccaagggcaaatttgcctttctcctggagtccactatgaatgataacattgagcagcgaaagccatgtgacacgatgaaagtgggaggaaatctggattccaaaggctatggagtagcaacgcccaagggttcctcattaagaactcctgtaaaccttgccgttttgaaactcagtgaggcaggcgtcttagacaagctgaaaaacaaatggtggtacgataaaggtgaatgtggacccaaagactctggaagcaaggacaagacgagtgccttgagcctgagcaatgtagcaggcgtcttctacattctggttggcggcttgggcttggcaatgctggtggctttgatagagttctgttacaagtccagggcagaagcgaagagaatgaagctgaccttttctgaagccataagaaacaaagccagattatccatcactgggagtgtgggagagaatggccgcgtcttgacgcctgactgcccaaaggctgtacacactggaactgcaatcagacaaagttcaggattggctgtcattgcatcggacctaccataa

SEQ ID NO: 393758 - DNA, 1000 bp, Homo Sapiens
cgtttctcccttacctgccagcgtcgagtcaagcacaagcctcagcctcccatgatggtcaagactgacgccgtcatcaacatgcacacattcaatgaccgccggcttcccggcaaggacagcatggcctgcagcacatccttagcccctgtgttcccctaggcacagctggggtggggacctcaggcctgggggctgggcagaggaaagcaaaggagattggaaggaacgtcccctgtccccgcactgggcttggggaccagagctgccacctgcctgttgggccaggagcctcctgcccttacctgccaggaagccagcaggctctcaggccagctgcttgggcttcatcctcctcagatcttctgtgggtttctaaagctgccagccgagatagccaaggccaaaggaagcacatgcctctctcaggccaaactcacctgcccctcaactctcctccagagtcagaagtttctgccgcagccctgcagagggcacagaaaatggaagacagctcttatattgccatttcttccacaagagcccaggcctcctacagcttgaccgtgaggccagagacacaagccttcggcgccttaaggatgttctagcatggctgccaatgggagctcatggtgagggatacccatcccatatgcctgggcagaaggaagacttcatccctctggggctgttcacgtggtcctaatcttctgaacttggcgctgcccctggcagcccctgttctggcagagttgaagacagagctacacaggggaaaagaggagtttggggtatgggagagaagagaatgcacaaacagaggccgccattttggattcttatggacaatgacccagtggttcctaatcctctaggaggtctctaagaatataagtgggggagtggccacagaaaattcttctccactttctagccagaggagagaggaccccctgaatttctcacaaaggatgcccaaagatgcagccggtatttg

SEQ ID NO: 393759 - DNA, 1000 bp, Homo Sapiens
aggctcccctaaagaatagcaaatcagtgtgttcgtgatgactgtgctaccttcattatagttcatttccaagacacatctggagccaaaggcccgagggaccctcaggtggggagagctacaggaatctctttggatgttgatgtgtgtttctctctaccctcggcttcgatggtcttgttcagagctgcataaactaacacatttatgtctccgagatctaagtgtggatcttctgtctgtgacacagtggccattgtagtttatcccgaagacgcctatgtacgtaagtttgcatttcctcccttctggtgatgactcagggttgtatagtatctgttaccccttccctcccagagtaaccataactcgttccgtttccaaacagccatggtggtgtccaattagctgtgtatcgctcttcccagagttgttaatgtggtgacatgcaccaacagccgtatgtgtactgtgatctgtaagaagtacaatgccatctgtctgccgaaggctagcatggttttaggtttatcttccttcacatccagaaattctgttggacactcacttccaccccaaactcctcaaatcaaaagccttcaaaacacgaggcactcttggatctaccctgagtatcctccaaactgtggatacagtttagtgagacaagcaatttctcccttctgagttattctctctgttggtggcaaaccacttcatagcaccaacagagatgtaggaaaaattcctcaaagtatttgtcatttctgagtcgcctgcattatcccattcttattctcctcaaacctgtgcatatatgacatgaaatgatatccattttttttttaagttagaaacagagaggggaatacttatgcatggggagcctgttagcacagtgcctgccacaaaaacaagtgcccccgacaagatagttgctatgttatgacactttctcagatcaggattttctagtttaaaaattaaatatcataaaacg

SEQ ID NO: 393760 - DNA, 1000 bp, Homo Sapiens; identical to SEQ ID NO: 283927

SEQ ID NO: 393761 - DNA, 1000 bp, Homo Sapiens
agctggaggacctgccgctgctcggtccggagcagctggcccggcgggaggccctgctgcacgcggcctgggcccggggctcgcgcccgcgtcacgcttccctgcccagctccgtggccgaggccttcgctcggcccagctcgctgcccgctgggtgcaccggccccgcctgcgcccgccccgacggccactcggcctgcaggcgcttggcgcaggcgcagtcgatgtgcttgccgatctaccgggaggcctgccaggagggcgagcaggcaggggcccccgcctggcagcacagacagcacgtctgcctgcacgcccacgcccacctgccattttgctggggggctgtctgtcctcaccttccaccctgtgccagccacggctcctggctctccggggcctgggggcctctggggcacaggggcaggactctggggctgggcacaggctacagagacagtgggggactggacgagatcagcagggtagcccgtgggacgcaaggcttcccgggaccctgcacctggagacggatctccagtctggagtcagaagtgtgagttatcagccactcaggctccgagccagctggattctctgcctgccactgtcagggttaagcggcaggcaggattgggcttttctggcttctaccatgaaatcctggccatgggaccccagtgacagatgatgtcttccatggtcatcagtgacctcagtagcctcaaatcatggtgagggctgggcttttgctgtcctcttctcacgcagagttctgccaggagggtgtgctgtgggggtcagactcctgaggctctcccttccctggggctagccagttactggtcatggctgctgtgggcatggaggctggaacttgtggttgaggcagggccatcccgatccttgctctacctggctagagtttcttctcatcagagcactgggacattaaacccaccttttcccagaaaaaaaaaaaaaaaaaaaaaaaaaaaaa

SEQ ID NO: 393762 - DNA, 1000 bp, Homo Sapiens
tgctggggccaggcgcgggcggcgcggggggcacggggggcgcaggcggaggagccccggccgctccgcccccgtgctgcgccgcgccgcccccgtgcccttacctcgatctcgagccgtcgccgtcggactcggaggactcggagagcctgggcggcgcgtcgctgggcggcctggatccctggtggttcgccgacttcccttacccgtatgccgagcgcctcgggccgccgcccggccgctactggtcggtcgacaagctcgggggctggcgcgccgggagctgggactacctgcccccgcgcagcggtccggccgcctggcactgtcggcactgcgccagcctggagctgctgccgccgccgcgccatctcagctgctcgcacgatggcctggacggcggctggtgggcgccaccgcctccaccctgggccgccgggcccctgccccgacgccgggcccgctgcgggtgcccgcggtcgcacccgcaccgcccgcgggcctcgcaccgcacgcccgccgctgccgcgccccaccaccacaggcaccggcgcgccgctgggggctgggacctcccgccgcccgcgcccacctcgcgctcgctcgaggacctcagctcgtgccctcgcgccgcccctgcgcgcaggcttaccgggccctcccgccacgctcgcaggtgtccgcacgccgcgcactgggggccgccgctgcccacagcttcccaccggagacaccggggcggggacctgggcacccgcaggggctcggcgcacttctctagcctcgagtccgaggtatgacgcggccccgggggccccaccgcccccttggtcagcgcaggccacggcccgagggggcgcccgcagtggacaggacccgcgtgggttgggaaggaaagcagtggaactggccggaccccgcctggagcagcgtcctgcgccccctggttctggaggaaccgcaagccggagaggatttggtccctcaactatcacccagg

SEQ ID NO: 393763 - DNA, 1000 bp, Homo Sapiens
taactttttatttctgctatttgctgttgtgtaatatccatggacatgtaatccacttactccatctttacaatccctttttaccaccaataaaaggattttttcttgctgttttgatttcttctattatttgtggaatgaattataccccccttaaatatctttgtttatgccttatgttcagtcatattttaatatgcttccttcatattgaagctgctgatttctcagccaaaaatcatcttagaatctttaaatatccattgcatcatttgttcagaatttaacatccattccaatgttggaggcttgtattacttatatttcatcatattctattgccaagtttagtcagttccacaccaagaatgaactgcatttcctttaaaaattattttaaaacacctttattgaaaagatctcatgactgagatgtggactttggttccatgttttcattgtaagaaagcagagagcggaaaatcaatggctccagtgattaatagatgggtttttagtaattgacaaattcatgagggaaagcatatgatctctttattagtgaatcatgcttattttttactcttaacgccactaatatacatccctaatatcacagggcttgtgcattcagatttttaaaaaattaggatagataaggaaacaacttatattcaagtgtaagatgatatcaggttggtctaagacttttggtgaacacgttcattcaactgtgatcactttattactctgaatgcctactattatcctgattatggggtctcctgaataaatagagtattagtctttatgtcatcattgttcaaaattggagatgtacacatacataccctataccaagagggccgaaactcttcaccttgatgtatgttctgatacaagttgttcagcttcttgtaaatgtgttttccttcggcttgttactgccttttgtcaaataatcttgacaatgctgtataataaatattttctatttatt

SEQ ID NO: 393764 - DNA, 1000 bp, Homo Sapiens
gacactgcgctgcaaccaccgcgatgcaagtatgttgggctcgctggcctacaatgtgctcctcatcgcgctctgcacgctttatgccttcaagactcgcaagtgccccgaaaacttcaacgaggccaagttcattggcttcaccatgtacaccacctgcatcatctggctggcattcctgcccatcttctatgtcacctccagtgactaccgggtacagaccaccaccatgtgcgtgtcagtcagcctcagcggctccgtggtgcttggctgcctctttgcgcccaagctgcacatcatcctcttccagccgcagaagaacgtggttagccaccgggcacccaccagccgctttggcagtgctgctgccagggccagctccagccttggccaagggtctggctcccagtttgtccccactgtttgcaatggccgtgaggtggtggactcgacaacgtcatcgctttgaagaccccatactcccgccctgacacagctgctcctgggaacctagtgcagacccacgtccagggccaggaggaagttggctggagcactgcaataatttattacccaccctatgtctgcccccaaagtcacttacccacctccttaccccagctcttcagactcagaagtcaggagccttggccaggagcctctgcagtggccactaactgcccttgtagctgtgtttcctcctggccaggcccagggctcagagaggagcaagccagggttcactctgccctggacccgggtggctgaggacggcaggccccagtcctaaccagcaaaggtgcttccagcccagcccctccccccaactagggccttttttattttttatataagttactctgggatggggagggtggttattgtgggggctgcccctccccctgcacagtagtttgtcctgtggtttattttgtattacctgtaaataaagtggctttattttaaaaaaaaaaaaaaaaaaaaaaaaaaaaaaaaaaaa

SEQ ID NO: 393765 - DNA, 1000 bp, Homo Sapiens
cacttacaccaaccatgcaatctagcgagtccatggagctgagcagcaggaggaggagccgtgaccctgtggaaggtgcgtcgggccagggccacacccaagggcccagctgtcttgcctgcccgtgggcacccacggacgtggcttggtgctgaggatagcagagcccccagccatcactgctggcagcctgggcaaaccgggtgagcaacaggaggacgaggggccggggcggtgccaggctaccacaagaacctgcgtcttggaccattgcccctcccggccccaaaccacaggggctcaggtcgtgtgggccccagtgctagatctctccctcccttcgtctctgtctgtgctgttggcgacccctctgtctgtctccagccctgtctttctgttctcttatctctttgtttcaccttttccctctctggcgtccccggctgcttgtactcttggccttttctgtgtctcctttctggctcttgcctccgcctctctctctcatcctctttgtcctcagctcctcctgctttcttgggtcccaccagtgtcacttttctgccgttttctttcctgttctcctctgcttcattctcgtccagccattgctcccctctccctgccacccttccccagttcaccaaaccttacatgttgcaaaagagaaaaaaggaaaaaaaatcaaaacacaaaaaagccaaaacgaaaacaaatctcgagtgtgttgccaagtgctgcgtcctcctggtggcctctgtgtgtgtccctgtggcccgcagcctgcccgcctgccccgcccatctgccgtgtgtcttgcccgcctgccccgcccgtctgccgtctgtcttgcccgcctgcccgcctgcccctcctgccgaccacacggagttcagtgcctgggtgtttggtgatggttattgacgacaatgtgtagcgcatgattgtttttataccaagaacatttctaataaaaataaacacatggttttgcaaaaaa

SEQ ID NO: 393766 - DNA, 1000 bp, Homo Sapiens
agacctggaggagctggtggctctcaccccgccgtcccccttcagagactcggtggactcggggagcacaacccccaactcgccagtgtccgagtcggccctctgtatcccgtcgtctcccaaatatgacactcttatcataagagattacactcagagctcctcgtcgttgtgaatgtccctggaaagcacgccggcctgcgcgtgcggagcggagccccccgtgttcacacacacacaatggcaagcatagtcgcctggttacggcccagggggaatatgccaagggaccccttaatggaaacacagatcagtagtgctatctcatgacaaccacaagaaaccgacgacaaatcttttgcgagattttcttctagtggcttagaaacatggcttttaagaaacacggtgatatctttgagggtgacaaggcgtctcttcaaacagttccataccaactgctttgctctagggaagcagtgcgtgtgaaacagcgtaacggagggtgaagagcatagttaataagcaactgtaaaaagttttatttgtttactttaattcttttcccctgtaaaaagttttatttgtttactttaattcttttcccagaaaagagtctttgattcaccaaacatgaatgtacattttctaacaaactcaaaatctgggaccaaaacatcaacttttttctttcttttttctttctttttgttttttctttcctgtaaagaccttgaaaagaccttgaaaagcagtaacttgggtccagtatttacggaggcgttgtgaatgtgtcccatgcataacacactactggatagtgagtcgtgcgctaatgtactacgtagggcttctaccagagattttcctctccaattgggttgtgaaatactcttccaaaagcctgcatcggggattccacctacttatttcagattcacctccattaaccaagaaaaccagtggaagatttcttgactatttcaccatgttgccaatc

SEQ ID NO: 393767 - DNA, 1000 bp, Homo Sapiens; identical to SEQ ID NO: 220619

SEQ ID NO: 393768 - DNA, 1000 bp, Homo Sapiens; identical to SEQ ID NO: 220620

SEQ ID NO: 393769 - DNA, 1000 bp, Homo Sapiens; identical to SEQ ID NO: 115189

SEQ ID NO: 393770 - DNA, 1000 bp, Homo Sapiens
gaagcgtatatttgagcccaagtgcttggacgccttcctaaacttgaaggacttcatctcccgctttgagggtttgaagaagatctctgcctacatgaagtccagccaattcctccgaggtcttttgtttggaaagtcagctacatggaacagcaaatagggcccagtgatgccagaagatgggagggaggagccaaccttgctgcctgcgaccctggaggacagcctgactccctggacctgccttcttcctttttccttctttctactctcttctcttccccaaggcctcattggcttcctttcttctaacatcatccctccccgcatcgaggctctttaaagcttcagctccccactgtcctccatcaaagtccccctcctaacgtcttcctttccctgcactaacgccaacctgactgcttttcctgtcagtgcttttctcttctttgagaagccagactgatctctgagctccctagcactgtcctcaaagaccatctgtatgccctgctccctttgctgggtccctaccccagctccgtgtgatgcccagtaaagcctgaaccatgcctgccatgtcttgtcttattccctgaggctcccttgactcaggactgtgctcgaattgtgggtggttttttgtcttctgttgtccacagccagagcttagtggatgggtgtgtgtgtgtgtgtgttgggggtggtgatcaggcaggttcataaatttccttggtcatttctgccctctagccacatccctctgttcctcactgtggggattactacagaaaggtgctctgtgccaagttcctcactcattcgcgctcctgtaggccgtctagaactggcatggttcaaagaggggctaggctgatggggaagggggctgagcagctcccaggcagactgccttctttcaccctgtcctgatagacttccctgatctagatatccttcgtcatgacacttctcaataaaacgtatcccaccgtattgt

SEQ ID NO: 393771 - DNA, 737 bp, Homo Sapiens; identical to SEQ ID NO: 283934

SEQ ID NO: 393772 - DNA, 1000 bp, Homo Sapiens; identical to SEQ ID NO: 283935

SEQ ID NO: 393773 - DNA, 1000 bp, Homo Sapiens
tgctcttttcagacattgttggcttcacagccatatgtgcccagtgtactcccatgcaagtaatcagcatgctgaatgaactgtacaccagatttgaccaccagtgtggatttttggatatttataaggtggaaacaataggtgatgcctactgtgttgcagcagggctccacagaaaaagcctctgccatgctaaacccattgctctgatggccttgaagatgatggaactttcagaagaggtgctgacacctgatggaagaccgattcagatgaggataggaattcactcaggctccgtgctggctggagttgttggggtgcgaatgccacgttattgcctgtttggaaataatgtcacactggcaagcaaattcgagtcgggaagtcaccctcggcgcatcaatgtcagcccaaccacttaccaattattaaaacgagaagaaagtttcacattcattccgcggtctcgtgaagagcttccagacaactttccaaaggaaattcctgggatctgctatttcctggaggtaaggactggtccaaagccaccaaagccttctctttcttcgtcgagaataaaaaaggtttcctacaacatcggcaccatgttcctccgggagacaagcctctgagacctgctacagatcaaagactcctccaaaaagcacaagcccagaacatgggtcaccaatggggggtggaaagagattgtgtctctttcattgctttgttgagaacaagcagcaaaatttctgtattatgtcaggcaataatcctactaaaaggtggaggtgaccgctgtcaataaaaagccggaggatgagggaaataagatgtgtccattcatatgagtggttttggtcatatatatacacatatattttaattacaagtgtgggtcccctttcagaactaaccaataaatagattccatgttttcttgtttatcacacatacaagtatctttccctatatatttgtaccacttttgagagcc

SEQ ID NO: 393774 - DNA, 1000 bp, Homo Sapiens; identical to SEQ ID NO: 283936

SEQ ID NO: 393775 - DNA, 1000 bp, Homo Sapiens; identical to SEQ ID NO: 283937

SEQ ID NO: 393776 - DNA, 1000 bp, Homo Sapiens; identical to SEQ ID NO: 115190

SEQ ID NO: 393777 - DNA, 1000 bp, Homo Sapiens; identical to SEQ ID NO: 220624

SEQ ID NO: 393778 - DNA, 1000 bp, Homo Sapiens; identical to SEQ ID NO: 220625

SEQ ID NO: 393779 - DNA, 1000 bp, Homo Sapiens; identical to SEQ ID NO: 283941

SEQ ID NO: 393780 - DNA, 1000 bp, Homo Sapiens
gggccatcaccaatgctattgaatacgccaggaagaggacggccaagagggccgcgctgatgatccttaccgtctggaccatctccattttcatctccatgccccctctgttctggagaagccaccgccgcctaagccctccccctagtcagtgcaccatccagcacgaccatgttatctacaccatttactccacgctgggtgcgttttatatccccttgactttgatactgattctctattaccggatttaccacgcggccaagagcctttaccagaaaaggggatcaagtcggcacttaagcaacagaagcacagatagccagaattcttttgcaagttgtaaacttacacagactttctgtgtgtctgacttctccacctcagaccctaccacagagtttgaaaagttccatgcctccatcaggatcccccccttcgacaatgatctagatcacccaggagaacgtcagcagatctctagcaccagggaacggaaggcagcacgcatcctggggctgattctgggtgcattcattttatcctggctgccatttttcatcaaagagttgattgtgggtctgagcatctacaccgtgtcctcggaagtggccgactttctgacgtggctcggttatgtgaattctctgatcaaccctctgctctatacgagttttaatgaagactttaagctggcttttaaaaagctcattagatgccgagagcatacttagactgtaaaaagctaaaaggcacgactttttccagagcctcatgagtggatgggggtaaggggtgcaacttattaattcttgaacatacttggttcaggagagtttgtaagtatgtgtggtcttgtttccttgtttgtttgtttgttttgttctgttttgtttgaggattgttatttggcgtgctgttttctacctctggtcttatctgtgatacataatttcaaataaacattatcatacaaaaacaaaaaaaaaaaaaaaaaaaa

SEQ ID NO: 393781 - DNA, 1000 bp, Homo Sapiens
tcaaaaacaagccacctcaacgcctaacatggttgactgtgtctacagttttccaaagggatgaaacaccttgctcgtcaccggaaaaggtggcaatgctggatggttctcgaaaggacaaggctctgcccaactcaggtgatgaaacacttatgcgaagaacatccacaattgggaaaaagtcagtgcagaccatttccaacgaacagagagcctcaaaggtcctagggattgtgtttttcctctttttgcttatgtggtgtcccttctttattacaaatataactttagttttatgtgattcctgtaaccaaactactctccaaatgctcctggagatatttgtgtggataggctatgtttcctcaggagtgaatcctttggtctacaccctcttcaataagacatttcgggatgcatttggccgatatatcacctgcaattaccgggccacaaagtcagtaaaaactctcagaaaacgctccagtaagatctacttccggaatccaatggcagagaactctaagtttttcaagaaacatggaattcgaaatgggattaaccctgccatgtaccagagtccaatgaggctccgaagttcaaccattcagtcttcatcaatcattctactagatacgcttctcctcactgaaaatgaaggtgacaaaactgaagagcgagttagttatgtatagcagaactggcagttgtcatcaaacataatgatgagtaagatgatgaatgagatgtaaatgtgccaagaatatattatataaagaattttatgtcatatatcaaatcatctctttaacctaagatgtaagtattaagaatatctaattttcctaatttggacaagattattccatgaggaaaataattttatatagctacaaatgaaaacaatccagcactctggttaaattttaaggtattcgaatgaaataaagtcaaatcaataaatttcaggccaaaaaaaaaaaaaaaaaaaaaaaaaaaa

SEQ ID NO: 393782 - DNA, 1000 bp, Homo Sapiens; identical to SEQ ID NO: 283942

SEQ ID NO: 393783 - DNA, 1000 bp, Homo Sapiens
agcccgtgcctgcttggctgcgtcacctggttctggagagaatcgcctggctactttgcctgagggagcagtcaacttcccagaggcccccagccacctcccaagccaccaagactgatgactgctcagccatgggaaaccactgcagccacatgggaggaccccaggacttcgagaagagcccgagggacagatgtagccctcccccaccacctcgggaggcctcgctggcggtgtgtgggctgctgcaggagctgtcctccatccggcaattcctggaaaagcgggatgagatccgagaggtggcccgagactggctgcgcgtgggctccgtgctggacaagctgctattccacatttacctgctagcggtgctggcctacagcatcaccctggttatgctctggtccatctggcagtacgcttgagtgggtacagcccagtggaggagggggtacagtcctggttaggtggggacagaggatttctgcttaggcccctcaggacccagggaatgccagggacattttcaagacacagacaaagtcccgtgccctgtttccaatgccaattcatctcagcaatcacaagccaaggtctgaacccttccaccaaaaactgggtgttcaaggcccttacacccttgtcccacccccagcagctcaccatggctttaaaacatgctctcttagatcaggagaaactcgggcactccctaagtccactctagttgtggacttttccccattgaccctcacctgaataagggactttggaattctgcttctctttcacaactttgcttttaggttgaaggcaaaaccaactctctactacacaggcctgataactctgtacgaggcttctctaacccctagtgtcttttttttcttcacctcacttgtggcagcttccctgaacactcatcccccatcagatgatgggagtgggaagaataaaatgcagtgaaaccctaaaaaaaaaaaaaaaaaaaaaaaaa

SEQ ID NO: 393784 - DNA, 1000 bp, Homo Sapiens; identical to SEQ ID NO: 115191

SEQ ID NO: 393785 - DNA, 1000 bp, Homo Sapiens; identical to SEQ ID NO: 115192

SEQ ID NO: 393786 - DNA, 1000 bp, Homo Sapiens; identical to SEQ ID NO: 283945

SEQ ID NO: 393787 - DNA, 1000 bp, Homo Sapiens; identical to SEQ ID NO: 220627

SEQ ID NO: 393788 - DNA, 1000 bp, Homo Sapiens; identical to SEQ ID NO: 283947

SEQ ID NO: 393789 - DNA, 1000 bp, Homo Sapiens
cagccagaaacgatacttcagcgagggggataaagtgaagatcgcgcagggtgtctcgggctccatccaggacaaaggatccattcagaagttcgtgccctacctcatagcaggcatccaacacggctgccaggatatcggggcccgcagcctgtctgtccttcggtccatgatgtactcaggagagctcaagtttgagaagcggaccatgtcggcccagattgagggtggtgtccatggcctgcactcttacgaaaagcggctgtactgaggacagcggtggaggccgaggtggtggaggggatgcaccccagtgtccacttttgggcacagcctccctccataactgagtggtccacagatttgcactacgggttctccagctcctttccaggcagagaggaggggaggtcctgaggggactgctgcccctcactcggcatcccctgcagagtcaggactgctcccggggccaggctgccctgggagcccccctccgagcccagccagccaggctctcaggccctgcgcctgcctcaggtctttcttgctgcagcctgctccagcctggcccccaccccaggggcaggcggcccctcctggcttctcctgtagggcacctccctgcccctagcctcccaggaaatggtgctctcctggccctgcctctggcccttcccgggccgctgcccctcagccatgtggcacttctgagctcctgacctaggccaaggggaggtctctgcccccttccccggccctgggctacccttgggtcctgctcctcaggccgctcccctgtccctggccatgggtaggagactgccctggtcatggccgcctgcctgtcattcctgactcaccaccgtccccaggtgaaccattcctcccttctcctcagctgcagtcgaaggctttaactttgcacacttgggatcacagttgcgtcattgtgtattaaatacttggaataaatcaagcaggtctcaacgcctccact

SEQ ID NO: 393790 - DNA, 1000 bp, Homo Sapiens; identical to SEQ ID NO: 220628

SEQ ID NO: 393791 - DNA, 1000 bp, Homo Sapiens; identical to SEQ ID NO: 115194

SEQ ID NO: 393792 - DNA, 1000 bp, Homo Sapiens; identical to SEQ ID NO: 220630

SEQ ID NO: 393793 - DNA, 1000 bp, Homo Sapiens; identical to SEQ ID NO: 115195

SEQ ID NO: 393794 - DNA, 1000 bp, Homo Sapiens
ttaaatggcaattttttttttttttttttttttttttttttttttgtcaagagccaagacacaggtaatgcacgacattgattgctgcattttaccttcaaaatatttgtccttattgactgggtctccttaattaatgtacacatgtcattagaatgcagacggaggggactcaccatgaatatctggggttgattcccagatgtgtgttgcttctctattgcaagcagattccctgttggatttacttcggatttattcccttttaaagaatttttgcccatatctggaagggcactatatttttgggaggagccatagattcctggttatcctatttttaaacaaaatgtagacaaagtgaactctattttgattattgagaaaggagtagttttctatccctctaagagtatacttgaatcagacattttaaggatgtcactatggcactgttgtcatttccaaattcctagaaaagtttgttttactttgtttttattctgttaatgcattctttcttctctttacttcctttcttaccagtacactcctatctcaactctgtttatttgatgagttctgtcccgtaaatcatatttcccttacaattaataaatgtcacttcatattttataataaaccactcagtaaaagcaaaagcttgtcctgagaagtagagtgagttctttttcactctgtgtctaataatgttaaggtgggaaaaaaaaaagtgtggcatagctacctgcccatccccaaccctcagcaaagtagaatctcttttctggtaattttgggtttccgctctgggctctggcaagttgaacaatcctagccattgacaatcgtgatagttattattttcccatttgctgtctttttgtatctaaagtcttcctattgtactgcacaaaccatggattgtacatatttttatatattatgtcttattttattatttctaaataaaaaaattaaaaattgaaaaaaaaaaaaa

SEQ ID NO: 393795 - DNA, 1000 bp, Homo Sapiens; identical to SEQ ID NO: 283952

SEQ ID NO: 393796 - DNA, 1000 bp, Homo Sapiens; identical to SEQ ID NO: 283953

SEQ ID NO: 393797 - DNA, 1000 bp, Homo Sapiens; identical to SEQ ID NO: 220631

SEQ ID NO: 393798 - DNA, 1000 bp, Homo Sapiens; identical to SEQ ID NO: 115197

SEQ ID NO: 393799 - DNA, 1000 bp, Homo Sapiens; identical to SEQ ID NO: 115198

SEQ ID NO: 393800 - DNA, 1000 bp, Homo Sapiens
cctacatggtggtgtcagggctccctgtgcggaacgggcggctacacgcctgcgaggtagcccgcatggccctggcactgctggatgctgtgcgctccttccgaatccgccaccggccccaggagcagctgcgcttgcgcattggcatccacacaggacctgtgtgtgctggagtggtgggactgaagatgccccgttactgtctctttggggatacagtcaacacagcctcaagaatggagtctaatggggaagccctgaagatccacttgtcttctgagaccaaggctgtcctggaggagtttggtggtttcgagctggagcttcgaggggatgtagaaatgaagggcaaaggcaaggttcggacctactggctccttggggagagggggagtagcacccgaggctgacctgcctcctctcctatccctccacacctcccctaccctgtgccagaagcaacagaggtgccaggcctcagcctcacccacagcagccccatcgccaaaggatggaagtaatttgaatagctcaggtgtgcttaccccagtgaagacaccagataggacctctgagaggggactggcatggggggatctcagagcttacaggctgagccaagcccacggccatgcacagggacactcacacaggcacacgcacctgctctccacctggactcaggccgggctgggctgtggattcctgatcccctcccctccccatgctctcctccctcagccttgctaccctgtgacttactgggaggagaaagagtcacctgaaggggaacatgaaaagagactaggtgaagagagggcaggggagcccacatctggggctggcccacaatacctgctcccccgaccccctccacccagcagtagacacagtgcacaggggagaagaggggtggcgcagaagggttgggggcctgtatgccttgcttctaccatgagcagagacaattaaaatctttattccaaaaaaaaaaaaaaaa

SEQ ID NO: 393801 - DNA, 1000 bp, Homo Sapiens
tagattgggtcatcttgattagattagattagattagattgtcaacagattgggccatccttactttatgataggcatcattttagtgtgttacaatagtaacagtatgcaaaagcagcattcaggagccgaaagatagtctgaagtcattcagaagtggtttgaggtttctgttttttggtggtttttgtttgttttttttttttttcaccttaagggaggatttaatttgctcccaactgattgtcacttaaatgaaaatttaaaaatgaataaaaagacatacttctcagctgcaaatattatggagaattggggcacccacaggaatgaagagagaaagcagctccctaacttcaaaaccattttggtacctgacaacaagagcattttagagtaattaatttaataaagtaaattagtattgctgcaaatagttaaattatatttatttgaattgatggtcaagagattttccattttttttacagactgttcagtgtttgtcaagctttctggcataaatatgtactcaaaaggcatttccgcttacaatttgtagaaacacaaaatgcgttttccatacagcagtgcctatatagtgactgatttttaactttcaatgtccatctttcaaaggaagtaacaccaaggtacaatgttaaaggaatattcactttacctagcagggaaaaatacacaaaaactgcagatacttcatatagcccattttaacttgtataaactgtgtgacttgtggcgtcttataaataatgcactgtaaagattactgaatagttgtgtcatgttaatgtgcctaatttcatgtatcttgtaatcatgattgagcctcagaatcatttggagaaactatattttaaagaacaagacatacttcaatgtattatacagataaagtattacatgtgtttgattttaaaagggcggacattttattaaaatcaatattgtttttgctttttcaaaaaaaaaaaaaaaa

SEQ ID NO: 393802 - DNA, 1000 bp, Homo Sapiens; identical to SEQ ID NO: 283959

SEQ ID NO: 393803 - DNA, 1000 bp, Homo Sapiens; identical to SEQ ID NO: 220633

SEQ ID NO: 393804 - DNA, 1000 bp, Homo Sapiens; identical to SEQ ID NO: 220634

SEQ ID NO: 393805 - DNA, 1000 bp, Homo Sapiens; identical to SEQ ID NO: 283962

SEQ ID NO: 393806 - DNA, 1000 bp, Homo Sapiens; identical to SEQ ID NO: 115202

SEQ ID NO: 393807 - DNA, 1000 bp, Homo Sapiens; identical to SEQ ID NO: 283964

SEQ ID NO: 393808 - DNA, 1000 bp, Homo Sapiens; identical to SEQ ID NO: 220637

SEQ ID NO: 393809 - DNA, 1000 bp, Homo Sapiens; identical to SEQ ID NO: 283967

SEQ ID NO: 393810 - DNA, 1000 bp, Homo Sapiens; identical to SEQ ID NO: 220638

SEQ ID NO: 393811 - DNA, 1000 bp, Homo Sapiens
tttgctgcctggtatgggcactgcccaggcttaaaggtggtcagtccctggaattcagaggatgctaaaggacttattaaatcagccattcgggataacaatccagtggtggtgctagagaatgaattgatgtatggggttccttttgaatttctcccggaagctcagtcaaaagattttctgattcctattggaaaagccaaaatagaaaggcaaggaacacatataactgtggtttcccattcaagacctgtgggccactgcttagaagctgcagcagtgctatctaaagaaggagttgaatgtgaggtgataaatatgcgtaccattagaccaatggacatggaaaccatagaagccagtgtcatgaagacaaatcatcttgtaactgtggaaggaggctggccacagtttggagtaggagctgaaatctgtgccaggatcatggaaggtcctgcgttcaatttcctggatgctcctgctgttcgtgtcactggtgctgatgtccctatgccttatgcaaagattctagaggacaactctatacctcaggtcaaagacatcatatttgcaataaagaaaacattaaatatttagtttggacttgaatatcaagtcgttgaaatttatttgaaatacttgctggcactgcacctggatttgtactgcaagacctgactattcataaaggaaaacgatttctaaagcaacagcaggtatttttgtacagggaagtttaaatgtgtttgtgtatggaaaactctccactctcctcccctagatgccatgcttccttttgtctgttacggttgccatgttctttgaataacaaattatatcacattttatcctctctcaccacaaggacaaagtatggatgtggcagagtcctgatgaaagatgtatccaaacaagataacttatatgtataaaattaaagcatataatacacatttactgttagtttgttttgataaggaataaaggaatttctaacatg

SEQ ID NO: 393812 - DNA, 1000 bp, Homo Sapiens; identical to SEQ ID NO: 220394

SEQ ID NO: 393813 - DNA, 1000 bp, Homo Sapiens; identical to SEQ ID NO: 220639

SEQ ID NO: 393814 - DNA, 1000 bp, Homo Sapiens; identical to SEQ ID NO: 283969

SEQ ID NO: 393815 - DNA, 1000 bp, Homo Sapiens
tcagccgtcctcaaaccccacccccagcccactggatgcctccccccgccggccccctggccccaccacctcccctgccagcacctccctcagcagcccagggcagcgtgatgatctcatcgccagcatcctctcagaggtggcccccaccccgctggatgagctccgaggtcacaaggctctggtcaagctccggagccggcaagagcgagacctgcgggagctgcgcaagaagcatcagcggaaggcagtcaccctcacccgccgcctgctggatggcctggctcaggcacaggctgagggcaggtgccggctgcggccaggtgccctaggtggggccgctgatgtggaggacacgaaggagggggaggacgaggcaaagcggtatcaggagttccagaacagacaggtgcagagcctgctggagctgcgggaggcccaggtggacgcagaggcccagcggaggctggaacacctgagacaggctctgcagcggctcagggaggtcgtccttgatgcaaacacaactcagttcaagaggctgaaagagatgaacgagagggagaagaaggagctgcagaagatcctggacagaaagcgccataacagcatctcggaggccaagatgagggacaagcataagaaggaggcggaactgacggagattaaccgtcggcacatcactgagtcagtcaactccatccgtcggctggaggaggcccagaagcagcggcatgaccgtcttgtggctgggcagcagcaggtcctgcaacagctggcagaagaggagcccaagctgctggcccagctggcccaggagtgtcaggagcagcgggcgaggctcccccaggagatccgccggagcctgctgggcgagatgccggaggggctgggggacgggcctctggtggcctgtgccagcaacggtcacgcacccgggagcagcgggcacctgtcgggcgctgactcggagagccaggaggagaacacgcagctctga

SEQ ID NO: 393816 - DNA, 1000 bp, Homo Sapiens; identical to SEQ ID NO: 283971

SEQ ID NO: 393817 - DNA, 1000 bp, Homo Sapiens; identical to SEQ ID NO: 115204

SEQ ID NO: 393818 - DNA, 1000 bp, Homo Sapiens; identical to SEQ ID NO: 283973

SEQ ID NO: 393819 - DNA, 1000 bp, Homo Sapiens
gaaagggtgaatgcctctcgagaagtggagccagtagaacctgaaaactgccaccttattgaggaacttgaaagtggctctgaagatattgatatacttcctagtgggctggcttttatctccagtggattaaaatatccaggcatgccaaactttgcgccagatgaaccaggaaaaatcttcttgatggatctgaatgaacaaaacccaagggcacaagcactagaaatcagtggtggatttgacaaagaattatttaatccacatgggatcagtattttcatcgacaaagacaatactgtgtatctttatgttgtgaatcatccccacatgaagtccactgtggagatatttaaatttgaggaacaacaacgttctctggtatacctgaaaactataaaacatgaacttctcaaaagtgtgaatgacattgtggttcttggaccagaacagttctatgccaccagagaccactattttaccaactccctcctgtcattttttgagatgatcttggatcttcgctggacttatgttcttttctacagcccaagggaggttaaagtggtggccaaaggattttgtagtgccaatgggatcacagtctcagcagaccagaagtatgtctatgtagctgatgtagcagctaagaacattcacataatggaaaaacatgataactgggatttaactcaactgaaggtgatacagttgggcaccttagtggataacctgactgtcgatcctgccacaggagacattttggcaggatgccatcctaatcctatgaagctactgaactataaccctgaggaccctccaggatcagaagtacttcgcatccagaatgttttgtctgagaagcccagggtgagcaccgtgtatgccaacaatggctctgtgcttcagggcacctctgtggcttctgtgtaccatgggaaaattctcataggcaccgtatttcacaaaactctgtactgtgagctctagactctagata

SEQ ID NO: 393820 - DNA, 1000 bp, Homo Sapiens
gcccggagcccgcgagcaaccccagtcccccccacccgcgcgtggcggcgccggctccctagccaccgcggccccaccctcttccggcctcagctgtccgggctgctttcgcctccgcctgtggatgctgcgcctctccgaacgcaacatgaaggtgctccttgccgccgccctcatcgcggggtccgtcttcttcctgctgctgccgggaccttctgcggccgatgagaagaagaaggggcccaaagtcaccgtcaaggtgtattttgacctacgaattggagatgaagatgtaggccgggtgatctttggtctcttcggaaagactgttccaaaaacagtggataattttgtggccttagctacaggagagaaaggatttggctacaaaaacagcaaattccatcgtgtaatcaaggacttcatgatccagggcggagacttcaccaggggagatggcacaggaggaaagagcatctacggtgagcgcttccccgatgagaacttcaaactgaagcactacgggcctggctgggtgagcatggccaacgcaggcaaagacaccaacggctcccagttcttcatcacgacagtcaagacagcctggctagatggcaagcatgtggtgtttggcaaagttctagagggcatggaggtggtgcggaaggtggagagcaccaagacagacagccgggataaacccctgaaggatgtgatcatcgcagactgcggcaagatcgaggtggagaagccctttgccatcgccaaggagtagggcacagggacatctttctttgagtgaccgtctgtgcaggccctgtagtccgccacagggctctgagctgcactggccccggtgctggcatctggtggagcggacccactcccctcacattccacaggcccatggactcacttttgtaacaaactcctaccaacactgaccaataaaaaaaaatgtgggtttttttttttttaatataaaaaaaaaaaaaaaaaa

SEQ ID NO: 393821 - DNA, 1000 bp, Homo Sapiens
ttggagacaaagatgttggcagaattgtgattggcctctttggaaaagttgtgcccaagacagtggaaaattttgttgctctagcaacaggagagaaaggatatggatataaaggaagcaagtttcatcgtgtcatcaaggatttcatgattcaaggaggtgacatcaccactggagatggcactgggggtgtgagcatctatggtgagacatttccagatgagaacttcaagctgaagcactatggcattgggtgggtcagcatggccaacgctgggcctgacaccaatggctctcagttctttatcaccttgaccaagcccacctggttggacggcaaacatgtggtgtttggaaaagtcattgatgggatgacagtggtgcactccatagagctccaagcaactgatgggcatgaccgtccactcaccaactgctcgatcatcaacagtggcaagatagacgtgaaaacgccttttgtggttgagatcgctgattggtgacacaactggcagaaaacaaggatatgctttggcaggggtgtgtgtgtgtgtgtgtgtgtgtgtgtgttgtgttgtctttcaattatttgcttttttttttttactttctttttgtattctatcccagatcacaggaaagttataaaaatcaaaccgtcaccctttagtttgcttgaactttagtaaaccacctgcttagggactttgaacttaaatatatccccttcctcaagtggtgctattttaaaactaaaaaaaactttgaattggctatttttttaatgcaatattttttttctgaattcattatgatccccatattgggtaatgctgaacatttatctgaaacagatgaggatattattattttgtatccaaacagaaattcagataaagggaaatttgactagtgtaatctgagatatgtcatagggatttctttctgacaaaagggtgctttgctgttctttatattaaatacttttagatcaaaaaaa

SEQ ID NO: 393822 - DNA, 1000 bp, Homo Sapiens; identical to SEQ ID NO: 220641

SEQ ID NO: 393823 - DNA, 1000 bp, Homo Sapiens; identical to SEQ ID NO: 283976

SEQ ID NO: 393824 - DNA, 1000 bp, Homo Sapiens; identical to SEQ ID NO: 220642

SEQ ID NO: 393825 - DNA, 1000 bp, Homo Sapiens; identical to SEQ ID NO: 220643

SEQ ID NO: 393826 - DNA, 1000 bp, Homo Sapiens; identical to SEQ ID NO: 220644

SEQ ID NO: 393827 - DNA, 1000 bp, Homo Sapiens; identical to SEQ ID NO: 220645

SEQ ID NO: 393828 - DNA, 1000 bp, Homo Sapiens
ggacctggagctgctcacaccagggaacctggaacgggagtgtctggaagagaggtgttcctgggaagaggccagggagtattttgaggacaacactctcacggagcgcttttgggagagctacatctacaatggcaaaggagggcgtggacgagtggatgtggccagcctggctgtggggctgacaggtggcatcctgctcattgtcctggccggcctgggagccttttggtatctgcgctggcgacagcaccgaggccagcagccctgtccccaagaggccgggctcattagccctctgagtcctttgaaccctctgggcccaccgacgcccctgcctccacccccacccccacccccaggcctccccacctatgagcaggcgctggcagcctctggggtacacgacgcacctccacccccctacaccagcctcaggaggcctcactgaagagctgctttcgagacccggctctccgaaccgtgcccctgattcataccggattccggaagccgctaggcctcatagacgccgaagctggacttggagtggggaatggtgggagtaggggtcatccggcccgaggctgccctggcacacgcgtttccgccgcgtatggatatacacatgttttcggcaacgtgttcccgtgtcctggcccctcacgggcccccacactctcctgaccgtgagggcactggtcagttccgcccccgtggtaggcagacgcgcggggaaattcggacccaggagcccagccccggctgtgccatcttgtgtatgggcagatatgacctgacagccccctccagtgccacagggtacgcacacgcagagccccgcctgtgcacacgcgtgtcttcgtgcactccccgtgcggtacaggggcacttcgtaacccagggaaagggcggggggcatatttgcaagcgcgctcggtgcgggcaggctcgcattgcacccagggagctggagttgagctgttcccctaaataaaaa

SEQ ID NO: 393829 - DNA, 1000 bp, Homo Sapiens; identical to SEQ ID NO: 283981

SEQ ID NO: 393830 - DNA, 837 bp, Homo Sapiens
gctcctcctgcacacctccctcgctctcccacaccactggcaccaggccccggacacccgctctgctgcaggagaatggctactcatcacacgctgtggatgggactggccctgctgggggtgctgggcgacctgcaggcagcaccggaggcccaggtctccgtgcagcccaacttccagcaggacaagttcctggggcgctggttcagcgcgggcctcgcctccaactcgagctggctccgggagaagaaggcggcgttgtccatgtgcaagtctgtggtggcccctgccacggatggtggcctcaacctgacctccaccttcctcaggaaaaaccagtgtgagacccgaaccatgctgctgcagcccgcggggtccctcggctcctacagctaccggagtccccactggggcagcacctactccgtgtcagtggtggagaccgactacgaccagtacgcgctgctgtacagccagggcagcaagggccctggcgaggacttccgcatggccaccctctacagccgaacccagacccccagggctgagttaaaggagaaattcaccgccttctgcaaggcccagggcttcacagaggataccattgtcttcctgccccaaaccgataagtgcatgacggaacaataggactccccagggctgaagctgggatcccggccagccaggtgacccccacgctctggatgtctctgctctgttccttccccgagcccctgccccggctccccgccaaagcaaccctgcccactcaggcttcatcctgcacaataaactccggaagcaagtcagtaaaaaaaaaaaaaaaaaaaaaaaaaa

SEQ ID NO: 393831 - DNA, 1000 bp, Homo Sapiens
gcggctgcatggtcttcttcggcctgtgcccgctgctgctgggctgtggcatggccgtggagcgctgcgtgggcgtcacgcggccgctgctccacgccgcgcgggtctcggtcgcccgcgcgcgcctggcgctggccgcggtggccgcggtggccttggccgtggcgctgctgccgctggcgcgcgtgggccgctatgagctgcagtacccgggcacgtggtgcttcatcggcctgggtcccccgggcggctggcgccaggcactgcttgctggcctcttcgccagcctcggcctggtcgcgctcctcgccgcgctggtgtgcaacacgctcagcggcctggccctgctacgcgcccgctggcgacgccgctcccgacggcctcccccggcctcaggccccgacagccggcgtcgctggggggcgcacggaccccgctcggcctccgcctcgtccgcctcgtccatcgcttcggcctccaccttctttggcggctctcggagcagcggctcggcacgcagagctcgcgcccacgacgtggagatggtgggccagcttgtcggtatcatggtggtgtcgtgcatctgctggagcccaatgctggtgttggtggcgctggccgtcggcggctggagctctacctccctgcagcggccactgttcctggccgtgcgccttgcctcctggaaccagatcctggacccttgggtgtacatcctactgcgccaggccgtgctgcgccaactgcttcgcctcttgcccccgagggccggagccaagggcggccccgcggggctgggcctaacaccgagcgcctgggaggccagctcgctgcgcagctcccggcacagcggcctcagccacttctaagcacaaccagaggcccaacgactaagccagcccaccctgggctgggcccaggtgcgcggcgcagagcctttgggaataaaaagccattctgcgaaaaaaaaaaaaaaaaaaaaaaaaaaaaaaaaaaaaaa

SEQ ID NO: 393832 - DNA, 1000 bp, Homo Sapiens
cacttcatgtaaagtgtcagaaggagctacaaaacctaccctcagtgagcatggtacttggcctttggaggaacaatcggctgcattgaagatccagctgcctattgatttaagctttcctgttgaatgacaaagtatgtggttttgtaatttgtttgaaaccccaaacagtgactgtactttctattttaatcttgctactaccgttatacacatatagtgtacagccagaccagattaaacttcatatgtaatctctaggaagtcaatatgtggaagcaaccaagcctgctgtcttgtgatcacttagcgaaccctttatttgaacaatgaagttgaaaatcataggcaccttttactgtgatgtttgtgtatgtgggagtactctcatcactacagtattactcttacaagagtggactcagtgggttaacatcagttttgtttactcatcctccaggaactgcaggtcaagttgtcaggttatttattttataatgtccatatgctaatagtgatcaagaagactttaggaatggttctctcaacaagaaataatagaaatgtctcaaggcagttaattctcattaatactcttattatcctatttctgggggaggatgtacgtggccatgtatgaagccaaatattaggcttaaaaactgaaaaatctggttcattcttcagatatactggaacccttttaaagttgatattggggccatgagtaaaatagattttataagatgactgtgttgtaccaaaattcatctgtctatattttatttagggaacatggtttgactcatcttatatgggaaaccatgtagcagtgagtcatatcttaatatatttctaaatgtttggcatgtaaatgtaaactcagcatcaaaatatttcagtgaatttgcactgtttaatcatagttactgtgtaaactcatctgaaatgttacaaaaataaactataaaacaaaaatttgaaaaaaaaaaaaaaaaaa

SEQ ID NO: 393833 - DNA, 1000 bp, Homo Sapiens; identical to SEQ ID NO: 220648

SEQ ID NO: 393834 - DNA, 1000 bp, Homo Sapiens; identical to SEQ ID NO: 220649

SEQ ID NO: 393835 - DNA, 1000 bp, Homo Sapiens; identical to SEQ ID NO: 222569

SEQ ID NO: 393836 - DNA, 1000 bp, Homo Sapiens; identical to SEQ ID NO: 115208

SEQ ID NO: 393837 - DNA, 1000 bp, Homo Sapiens; identical to SEQ ID NO: 115209

SEQ ID NO: 393838 - DNA, 1000 bp, Homo Sapiens
gccctaccagcactggtcatgtctaaaggtcatcgtattgaggaagttcctgaacttcctttggtagttgaagataaagttgaaggctacaagaagaccaaggaagctgttttgctccttaagaaacttaaagcctggaatgatatcaaaaaggtctatgcctctcagcgaatgagagctggcaaaggcaaaatgagaaaccgtcgccgtatccagcgcaggggcccgtgcatcatctataatgaggataatggtatcatcaaggccttcagaaacatccctggaattactctgcttaatgtaagcaagctgaacattttgaagcttgctcctggtgggcatgtgggacgtttctgcatttggactgaaagtgctttccggaagttagatgaattgtacggcacttggcgtaaagccgcttccctcaagagtaactacaatcttcccatgcacaagatgattaatacagatcttagcagaatcttgaaaagcccagagatccaaagagcccttcgagcaccacgcaagaagatccatcgcagagtcctaaagaagaacccactgaaaaacttgagaatcatgttgaagctaaacccatatgcaaagaccatgcgccggaacaccattcttcgccaggccaggaatcacaagctccgggtggataaggcagctgctgcagcagcggcactacaagccaaatcagatgagaaggcggcggttgcaggcaagaagcctgtggtaggtaagaaaggaaagaaggctgctgttggtgttaagaagcagaagaagcctctggtgggaaaaaaggcagcagctaccaagaaaccagcccctgaaaagaagcctgcagagaagaaacctactacagaggagaagaagcctgctgcataaactcttaaatttgattattccataaaggtcaaatcattttggacagcttcttttgaataaagacctgattatacaggcagtgagaaacatgaaaaaaaaaaaaaaaaaa

SEQ ID NO: 393839 - DNA, 1000 bp, Homo Sapiens; identical to SEQ ID NO: 283987

SEQ ID NO: 393840 - DNA, 866 bp, Homo Sapiens
tcctctttttccggctggaaccatggagggtgtagaagagaagaagaaggaggttcctgctgtgccagaaacccttaagaaaaagcgaaggaatttcgcagagctgaagatcaagcgcctgagaaagaagtttgcccaaaagatgcttcgaaaggcaaggaggaagcttatctatgaaaaagcaaagcactatcacaaggaatataggcagatgtacagaactgaaattcgaatggcgaggatggcaagaaaagctggcaacttctatgtacctgcagaacccaaattggcgtttgtcatcagaatcagaggtatcaatggagtgagcccaaaggttcgaaaggtgttgcagcttcttcgccttcgtcaaatcttcaatggaacctttgtgaagctcaacaaggcttcgattaacatgctgaggattgtagagccatatattgcatgggggtaccccaatctgaagtcagtaaatgaactaatctacaagcgtggttatggcaaaatcaataagaagcgaattgctttgacagataacgctttgattgctcgatctcttggtaaatacggcatcatctgcatggaggatttgattcatgagatctatactgttggaaaacgcttcaaagaggcaaataacttcctgtggcccttcaaattgtcttctccacgaggtggaatgaagaaaaagaccacccattttgtagaaggtggagatgctggcaacagggaggaccagatcaacaggcttattagaagaatgaactaaggtgtctaccatgattatttttctaagctggttggttaataaacagtacctgctctcaaattgaaataaaaaaaaaaaaaaaaaaaaaaaaaaaaaa

SEQ ID NO: 393841 - DNA, 890 bp, Homo Sapiens; identical to SEQ ID NO: 115210

SEQ ID NO: 393842 - DNA, 903 bp, Homo Sapiens
agataaggccgctcgctgacgccgtgtttcctctttcggccgcgctggtgaacaggacccgtcgccatgggccgtgtgatccgtggacagaggaagggcgccgggtctgtgttccgcgcgcacgtgaagcaccgtaaaggcgctgcgcgcctgcgcgccgtggatttcgctgagcggcacggctacatcaagggcatcgtcaaggacatcatccacgacccgggccgcggcgcgcccctcgccaaggtggtcttccgggatccgtatcggtttaagaagcggacggagctgttcattgccgccgagggcattcacacgggccagtttgtgtattgcggcaagaaggcccagctcaacattggcaatgtgctccctgtgggcaccatgcctgagggtacaatcgtgtgctgcctggaggagaagcctggagaccgtggcaagctggcccgggcatcagggaactatgccaccgttatctcccacaaccctgagaccaagaagacccgtgtgaagctgccctccggctccaagaaggttatctcctcagccaacagagctgtggttggtgtggtggctggaggtggccgaattgacaaacccatcttgaaggctggccgggcgtaccacaaatataaggcaaagaggaactgctggccacgagtacggggtgtggccatgaatcctgtggagcatccttttggaggtggcaaccaccagcacatcggcaagccctccaccatccgcagagatgcccctgctggccgcaaagtgggtctcattgctgcccgccggactggacgtctccggggaaccaagactgtgcaggagaaagagaactagtgctgagggcctcaataaagtttgtgtttatgccaaaaaaaaaaaaaaaaaaaaaaaaaaaaa

SEQ ID NO: 393843 - DNA, 609 bp, Homo Sapiens; identical to SEQ ID NO: 220650

SEQ ID NO: 393844 - DNA, 632 bp, Homo Sapiens
ctctcggctttcggctcggaggaggccaaggtgcaacttccttcggtcgtcccgaatccgggttcatccgacaccagccgcctccaccatgccgccgaagttcgaccccaacgagatcaaagtcgtatacctgaggtgcaccggaggtgaagtcggtgccacttctgccctggcccccaagatcggccccctgggtctgtctccaaaaaaagttggtgatgacattgccaaggcaacgggtgactggaagggcctgaggattacagtgaaactgaccattcagaacagacaggcccagattgaggtggtgccttctgcctctgccctgatcatcaaagccctcaaggaaccaccaagagacagaaagaaacagaaaaacattaaacacagtgggaatatcacttttgatgagattgtcaacattgctcgacagatgcggcaccgatccttagccagagaactctctggaaccattaaagagatcctggggactgcccagtcagtgggctgtaatgttgatggccgccatcctcatgacatcatcgatgacatcaacagtggtgctgtggaatgcccagccagttaagcacaaaggaaaacatttcaataaaggatcatttgacaactggtga

SEQ ID NO: 393845 - DNA, 1000 bp, Homo Sapiens; identical to SEQ ID NO: 115211

SEQ ID NO: 393846 - DNA, 493 bp, Homo Sapiens; identical to SEQ ID NO: 115212

SEQ ID NO: 393847 - DNA, 648 bp, Homo Sapiens; identical to SEQ ID NO: 115213

SEQ ID NO: 393848 - DNA, 618 bp, Homo Sapiens; identical to SEQ ID NO: 115214

SEQ ID NO: 393849 - DNA, 748 bp, Homo Sapiens; identical to SEQ ID NO: 115215

SEQ ID NO: 393850 - DNA, 1000 bp, Homo Sapiens; identical to SEQ ID NO: 283991

SEQ ID NO: 393851 - DNA, 1000 bp, Homo Sapiens; identical to SEQ ID NO: 115216

SEQ ID NO: 393852 - DNA, 898 bp, Homo Sapiens
tcctctttccctaagcagcctgagggttgactggattggtgaggcccgtgtggctacttctgtggaagcagtgctgtagttactggaagataaaagggaaagcaagcccttggtgggggaaagtatggctgcgatgatggcatttcttaggacacctttggattaataatgaaaacaactactctctgagcagctgttcgaatcatctgatatttatactgaatgagttactgtaagtacgtattgacagaattacactgtactttcctctaggtgatctgtgaaaatggttcgctattcacttgacccggagaaccccacgaaatcatgcaaatcaagaggttccaatcttcgtgttcactttaagaacactcgtgaaactgctcaggccatcaagggtatgcatatacgaaaagccacgaagtatctgaaagatgtcactttacagaaacagtgtgtaccattccgacgttacaatggtggagttggcaggtgtgcgcaggccaagcaatggggctggacacaaggtcggtggcccaaaaagagtgctgaatttttgctgcacatgcttaaaaacgcagagagtaatgctgaacttaagggtttagatgtagattctctggtcattgagcatatccaagtgaacaaagcacctaagatgcgccgccggacctacagagctcatggtcggattaacccatacatgagctctccctgccacattgagatgatccttacggaaaaggaacagattgttcctaaaccagaagaggaggttgcccagaagaaaaagatatcccagaagaaactgaagaaacaaaaacttatggcacgggagtaaattcagcattaaaataaatgtaattaaaaggaaaaaaaaaaaaaaaaaaaaaaaaaa

SEQ ID NO: 393853 - DNA, 556 bp, Homo Sapiens; identical to SEQ ID NO: 283992

SEQ ID NO: 393854 - DNA, 513 bp, Homo Sapiens
tccttctttcctttttgctgtaggcccgggtggttgctgccgaaatgggcaagttcatgaaacctgggaaggtggtgcttgtcctggctggacgctactccggacgcaaagctgtcatcgtgaagaacattgatgatggcacctcagatcgcccctacagccatgctctggtggctggaattgaccgctacccccgcaaagtgacagctgccatgggcaagaagaagatcgccaagagatcaaagataaaatcttttgtgaaagtgtataactacaatcacctaatgcccacaaggtactctgtggatatccccttggacaaaactgtcgtcaataaggatgtcttcagagatcctgctcttaaacgcaaggcccgacgggaggccaaggtcaagtttgaagagagatacaagacaggcaagaacaagtggttcttccagaaactgcggttttagatgctttgttttgatcattaaaaattataaagaaaaaaaaaaaaaaaaaaaaaaaaaa

SEQ ID NO: 393855 - DNA, 524 bp, Homo Sapiens; identical to SEQ ID NO: 220651

SEQ ID NO: 393856 - DNA, 1000 bp, Homo Sapiens; identical to SEQ ID NO: 220652

SEQ ID NO: 393857 - DNA, 442 bp, Homo Sapiens
cttcctttccaacttggacgctgcagaatggctcccgcaaagaagggtggcgagaagaaaaagggccgttctgccatcaacgaagtggtaacccgagaatacaccatcaacattcacaagcgcatccatggagtgggcttcaagaagcgtgcacctcgggcactcaaagagattcggaaatttgccatgaaggagatgggaactccagatgtgcgcattgacaccaggctcaacaaagctgtctgggccaaaggaataaggaatgtgccataccgaatccgtgtgcggctgtccagaaaacgtaatgaggatgaagattcaccaaataagctatatactttggttacctatgtacctgttaccactttcaaaaatctacagacagtcaatgtggatgagaactaatcgctgatcgtcagatcaaataaagttataaaattgc

SEQ ID NO: 393858 - DNA, 1000 bp, Homo Sapiens; identical to SEQ ID NO: 115218

SEQ ID NO: 393859 - DNA, 1000 bp, Homo Sapiens; identical to SEQ ID NO: 115219

SEQ ID NO: 393860 - DNA, 1000 bp, Homo Sapiens; identical to SEQ ID NO: 283997

SEQ ID NO: 393861 - DNA, 368 bp, Homo Sapiens; identical to SEQ ID NO: 283998

SEQ ID NO: 393862 - DNA, 549 bp, Homo Sapiens; identical to SEQ ID NO: 284000

SEQ ID NO: 393863 - DNA, 1000 bp, Homo Sapiens; identical to SEQ ID NO: 284001

SEQ ID NO: 393864 - DNA, 932 bp, Homo Sapiens
caaaaaggagaccagacaggaggcgtctgtagagatatcatgaacttcaacttagctttgttttccagagactggagctaaactgggctttcaacatcatcatgaagtttatcctcctctgggccctcttgaatctgactgttgctttggcctttaatccagattacacagtcagctccactcccccttacttggtctatttgaaatctgactacttgccctgcgctggagtcctgatccacccgctttgggtgatcacagctgcacactgcaatttaccaaagcttcgggtgatattgggggttacaatcccagcagactctaatgaaaagcatctgcaagtgattggctatgagaagatgattcatcatccacacttctcagtcacttctattgatcatgacatcatgctaatcaagctgaaaacagaggctgaactcaatgactatgtgaaattagccaacctgccctaccaaactatctctgaaaataccatgtgctctgtctctacctggagctacaatgtgtgtgatatctacaaagagcccgattcactgcaaactgtgaacatctctgtaatctccaagcctcagtgtcgcgatgcctataaaacctacaacatcacggaaaatatgctgtgtgtgggcattgtgccaggaaggaggcagccctgcaaggaagtttctgctgccccggcaatctgcaatgggatgcttcaaggaatcctgtcttttgcggatggatgtgttttgagagccgatgttggcatctatgccaaaattttttactatataccctggattgaaaatgtaatccaaaataactgagctgtggcagttgtggaccatatgacacagcttgtccccatcgttcacctttagaattaaatataaattaactcctcaaaaaaaaaaaaaaaaaaaaaaaaaaaa

SEQ ID NO: 393865 - DNA, 1000 bp, Homo Sapiens; identical to SEQ ID NO: 284003

SEQ ID NO: 393866 - DNA, 1000 bp, Homo Sapiens; identical to SEQ ID NO: 284004

SEQ ID NO: 393867 - DNA, 1000 bp, Homo Sapiens; identical to SEQ ID NO: 220653

SEQ ID NO: 393868 - DNA, 1000 bp, Homo Sapiens; identical to SEQ ID NO: 284006

SEQ ID NO: 393869 - DNA, 1000 bp, Homo Sapiens; identical to SEQ ID NO: 115220

SEQ ID NO: 393870 - DNA, 1000 bp, Homo Sapiens; identical to SEQ ID NO: 115220

SEQ ID NO: 393871 - DNA, 1000 bp, Homo Sapiens; identical to SEQ ID NO: 115223

SEQ ID NO: 393872 - DNA, 1000 bp, Homo Sapiens; identical to SEQ ID NO: 284009

SEQ ID NO: 393873 - DNA, 1000 bp, Homo Sapiens
acacccttaagcggtggactccagcattttcccagcactgtctgagccccatgagggcggagccactccttgtaaattcagtgcccgacagatgctctggcacagatgctttgtagatctctgttgagagaatgcatagacacctgtgcccaaggatgctgagggctggtctctgcttctttgaacttcactgaaactgaatgctcactgctgtgttgccagcaccacccagcccagggctgtgaacggagtgggtggcagcaaatgtgtgttgaaaggggaatgaagccattcacttcactcagttcctgtcccatttaaccgccccgatccttgatcttccattaccttcacatcccggggtccttctgaactgaccttgacctctgatctcttcacacatctccccttagcatctccacttacctacttttttttttttttttgagatggcatctcactctgtcacccaggctggagtgtagtgacacgatctcgactcactgcaatttccacctctcaggttcaagtggttctcctgcctcagcctctcaagtagctgggattacaggtgcacagcacctcccccgactaatttttatatttttagtagagacgggatttcgccatgttggccaggctggtctcaaactcctgacctcaagtgatctgcccaccttggcttcccaaagtgctgggattgcagacgtgagtcactgcgcccagccattccatgtctcttaagtctcagaatctcccctagctccctccaggtgtctgcagtggttgtcccctcaaagctgtcccacaccctcctccgaggaccctttgtgtatctcctccagctaccgcagagcccacaaacccaggcatctatcaaagtccctcattcatgagggtggtgaggacacagactgcgaccagaacagaaatatgaaaatgtgaatgacagcgtcccccgtgtgtggaatgtggggattaaaagcatttatcaacctct

SEQ ID NO: 393874 - DNA, 1000 bp, Homo Sapiens
cacgtttttgcaaccggttcgttgatacctgggccagggatgaggacactgtgctcaagcatcttagggcctctatgaagaaactaacaagaaagcagggggacctgccacccccagccaaacccgagcaagggtcgtcggcatccaggcctgtgccggcttcacgtggcgggaagaccctctgcaagggggacaggcaggcccctccaggcccaccagcccggttcccgcggcccatttggtcagcttccccgccacgggcacctcgttcttccacaccctgtcctggtggggctgtccgggaagacacctaccctgtgggcactcagggtgtgcccagcccggccctggctcagggaggacctcagggttcctggagattcctgcagtggaactccatgccccgcctcccaacggacctggacgtagaggggccttggttccgccattatgatttcagacagagctgctgggtccgtgccatatcccaggaggaccagctggccccctgctggcaggctgaacaccctgcggagcgggtgagatcggctttcgctgcacccagcactgattccgaccagggcacccccttcagagctagggacgaacagcagtgtgctcccacctcagggccttgcctctgcggcctccacttggaaagttctcagttccctccaggcttctagaagcatctgggccagggctcatggctggataatttccctaggcttaacaacccaagcaagcttcgcgtcctcgttttatttttggttaaacttatgaatatgtattaagaaagagtgcagcttgagagacattcagagatggaacacaccagaccccagatcacaaagccaaccatgcccagcccctcccagcaccccaagccccacgaccatcgttctgaattctgacgacaccgtgagcctgcctttgtactttaaactcatggaaggataactaccttcacgttttgaaataaatgtttcctgttgaaatg

SEQ ID NO: 393875 - DNA, 1000 bp, Homo Sapiens; identical to SEQ ID NO: 115225

SEQ ID NO: 393876 - DNA, 1000 bp, Homo Sapiens
caggaagagcaggaggaggcagcggaagaggatgctgaagcagaggctgagaccgaggagaccagggcagaagaagatgaagaagaagaggaagcaaaggaggctgaagatggcccaatggaggagtccaaaccaaagcccaggtcgttcatgcccaacttggtgcctcccaagatccccgatggagagagagtggactttgatgacatccaccggaagcgcatggagaaggacctgaatgagttgcaggcgctgatcgaggctcactttgagaacaggaagaaagaggaggaggagctcgtttctctcaaagacaggatcgagagacgtcgggcagagcgggccgagcagcagcgcatccggaatgagcgggagaaggagcggcagaaccgcctggctgaagagagggctcgacgagaggaggaggagaacaggaggaaggctgaggatgaggcccggaagaagaaggctttgtccaacatgatgcattttgggggttacatccagaaggcccagacagagcggaaaagtgggaagaggcagactgagcgggaaaagaagaagaagattctggctgagaggaggaaggtgctggccattgaccacctgaatgaagatcagctgagggagaaggccaaggagctgtggcagagcatctataacttggaggcagagaagttcgacctgcaggagaagttcaagcagcagaaatatgagatcaatgttctccgaaacaggatcaacgataaccagaaagtctccaagacccgcgggaaggctaaagtcaccgggcgctggaaatagagcctggcctccttcaccaaagatctgctcctcgctcgcacctgcctccggcctgcactcccccagttcccgggccctcctgggcaccccaggcagctcctgtttggaaatggggagctggcctaggtgggagccaccactcctgcctgcccccacacccactccacaccagtaataaaaagccaccacacactga

SEQ ID NO: 393877 - DNA, 1000 bp, Homo Sapiens; identical to SEQ ID NO: 284014

SEQ ID NO: 393878 - DNA, 1000 bp, Homo Sapiens; identical to SEQ ID NO: 115226

SEQ ID NO: 393879 - DNA, 1000 bp, Homo Sapiens; identical to SEQ ID NO: 284017

SEQ ID NO: 393880 - DNA, 1000 bp, Homo Sapiens; identical to SEQ ID NO: 220657

SEQ ID NO: 393881 - DNA, 1000 bp, Homo Sapiens; identical to SEQ ID NO: 115227

SEQ ID NO: 393882 - DNA, 1000 bp, Homo Sapiens; identical to SEQ ID NO: 284020

SEQ ID NO: 393883 - DNA, 1000 bp, Homo Sapiens
tccatggccaaggagggcgttgtggcagccgcggagaaaaccaagcagggggtcaccgaggcggcggagaagaccaaggagggcgtcctctacgtcggaagcaagacccgagaaggtgtggtacaaggtgtggcttcagtggctgaaaaaaccaaggaacaggcctcacatctgggaggagctgtgttctctggggcagggaacatcgcagcagccacaggactggtgaagagggaggaattccctactgatctgaagccagaggaagtggcccaggaagctgctgaagaaccactgattgagcccctgatggagccagaaggggagagttatgaggacccaccccaggaggaatatcaggagtatgagccagaggcgtaggggcccaggagagcccccaccagcagcacaattctgtccctgtccctgccccgccccccagagccagggctgtccttagactccttctccccaatcacgagatcttccttccgctctgaggcaaccccctcggagcctgtgttagtgtctgtccatctgtctgtcctacccgcccgcgtccaaccccggggcatggacagggccagggttgcggtcgcggctgggagcctcgcccctccagtgttgcctcctcccatccagcgtctgcgcggatgtagcatgttctatgtgtttttaaacgaagatccgagcgacggctcctccccgatccccgacagtggctctccaagcggcccccgggcagccccagagcaccccgcccgactcccattaacctcgagaacctttttttttttaaccaaaaccaggagccaggctgtgccatgtcccccgccccccatcccagccggcccggtccgaacgcgggcgtcgtgtgttgtgattgtggcatggagagtccccatcccccccatgtgagcgtgtcccgggcgggtgggcccggccgcccccgagagtccatgaataaagctaatctgtctgtaaaaaaaaaaaaaaaaaa

SEQ ID NO: 393884 - DNA, 1000 bp, Homo Sapiens; identical to SEQ ID NO: 284021

SEQ ID NO: 393885 - DNA, 1000 bp, Homo Sapiens; identical to SEQ ID NO: 284024

SEQ ID NO: 393886 - DNA, 1000 bp, Homo Sapiens; identical to SEQ ID NO: 115229

SEQ ID NO: 393887 - DNA, 1000 bp, Homo Sapiens; identical to SEQ ID NO: 284027

SEQ ID NO: 393888 - DNA, 1000 bp, Homo Sapiens
gacattcctgaaagattaccagccagcaatagcccagggctcccccaaaagaattggttcagattgtaattatcagttaggcaatgtttttaaaacttagtaatgagaaactgtgaaaagagccaagtgttacattgagcttggggtgggagatggggaacaggcagtgaggaaggagacaggggtggaattcgtcttctgggaggaagctggagagagcacagtgaaattgaaatacccattcccagatagtcaaaaacatgaactttcccccagcctgcaccagtattgttttcaaacattgcccatgagtaggccctttgaagagttagcttcctcctcatctttgactataaaattgtttaatcaatggaatttgtaccagccttttaaaaagttttagtttttcctaagtgattttgctctcttccaatctaaacctgttgcttgtttggttcagagaactacaaactgtcaaagaaagggtggggatgataagaaatgctaatataaaaatgctaagtgaaaaaaagacttggccaggagaaataatttaaaatgcacatttgctttggatgcactgttgttctgttaaggctgtatatatttgtttatttaaggtgactgaaagtgcaaagaggaaatggacagcatgcaattcatcctaatgtacaaaacgttatatgcactcaaatgttataatttctaatatttttaaagtttatattcgagttgtacaaagttaagcattaatcagatatttcattttttcataatgttaccattttcttaaatattattacaaaattttaagtctgtctaatggagagttttttttaaactgtctacctcatataatacaagtatttacaacgctaaagttaccagaggtcaatgaataatcaaaacattttttacagtacacctttcctggatgatatgcaatcgaatgctatattattaaacgcatttttctccttattaaaaaaaaaaaaaaaaa

SEQ ID NO: 393889 - DNA, 1000 bp, Homo Sapiens; identical to SEQ ID NO: 115230

SEQ ID NO: 393890 - DNA, 1000 bp, Homo Sapiens; identical to SEQ ID NO: 284029

SEQ ID NO: 393891 - DNA, 1000 bp, Homo Sapiens; identical to SEQ ID NO: 115231

SEQ ID NO: 393892 - DNA, 1000 bp, Homo Sapiens; identical to SEQ ID NO: 220662

SEQ ID NO: 393893 - DNA, 945 bp, Homo Sapiens
atgttgatgaattactctagtgccactgaattttatctccttggcttccctggctctgaagaactacatcatatcctttttgctatattcttctttttctacttggtgacattaatgggaaacacagtcatcatcatgattgtctgtgtggataaacgtctgcagtcccccatgtatttcttcctcggccacctctctgccctggagatcctggtcacaaccataatcgtccccgtgatgctttggggattgctgctccctgggatgcagacaatatatttgtctgcctgtgttgtccagctcttcttgtaccttgctgtggggacaacagagttcgcattacttggagcaatggctgtggaccgttatgtggctgtctgtaaccctctgaggtacaacatcattatgaacagacacacctgcaactttgtggttcttgtgtcatgggtgtttgggtttctttttcaaatctggccggtctatgtcatgtttcagcttacttactgcaaatcaaatgtggtgaacaattttttttgtgaccgagggcaattgctcaaactatcctgcaataatactcttttcacggagtttatcctcttcttaatggctgtttttgttctctttggttctttgatccctacaattgtctccaacgcctacatcatctccaccattctcaagatcccgtcatcctctggccggaggaaatccttctccacttgtgcctcccacttcacctgtgttgtgattggctacggcagctgcttgtttctctacgtgaaacccaagcaaacgcaggcagctgattacaattgggtagtttccctgatggtttcagtagtaactcctttcctcaatcctttcatcttcaccctccggaatgataaagtcatagaggcccttcgggatggggtgaaacgctgctgtcaactattcaggaattag

SEQ ID NO: 393894 - DNA, 1000 bp, Homo Sapiens; identical to SEQ ID NO: 284036

SEQ ID NO: 393895 - DNA, 1000 bp, Homo Sapiens; identical to SEQ ID NO: 284038

SEQ ID NO: 393896 - DNA, 1000 bp, Homo Sapiens; identical to SEQ ID NO: 220395

SEQ ID NO: 393897 - DNA, 917 bp, Homo Sapiens; identical to SEQ ID NO: 284040

SEQ ID NO: 393898 - DNA, 1000 bp, Homo Sapiens
gcataggggaacagataatgaaataggaaacccactcgtgggttccacagatacctaccgaaggcctactgtgtgctagaattgtagctcaggagttctcagtgtagctgctcactgaagttaccatggcaggtttcaactggcagaatccaggctccgtcccacccagagattctgatgaaattggtttagggtgtggctcgggcctcaggaattcagaaagcttcccaggtgcttccaatgtgcagccagggttagggacctctaccctagacacaaagtattggacagatagacctggtgccagagatggccatgagctgtaagctaggacgtgccccacctgagctctgcactagctagttcaaacaggcgctttaaaggcagtgtgaaaggggacagcctgttctgccaggtctcagaatgtatatttattaagtgccattaaaagggacctgaacaaaattggatgtcttgtaggcataagggaggaaaataaaatatacttggaaccaagtctatgtcatgaagggaaaataaaaatgtattcagtagcacgtgggttatggtttctcatagaccaggggataagattaaaagtcactgaagagtgggaaaatgcatgttgagaagatgagaatggcctgtattttctccaggggaatctgtgtaatgtgccttttccctctccaaatgcctagaaccatggcactgtgtcttatttatttaaccgttgggctgtctcatactaaacttgcaaagatatttgcctatgaactgaacaagacttccaggagttgaagtctggttcacaagggtaccccttgcctcctgtgatggagtgagaactcttaaacccctcaggccccaactcagttgtggagatgagggcaagattacaatatcaaaagaaagatgaatgaattcttggttaatatgacgaaccccagctcaatgagtaactgatgtgaactgctgggaataaaggacttcaaagatg

SEQ ID NO: 393899 - DNA, 1000 bp, Homo Sapiens; identical to SEQ ID NO: 284041

SEQ ID NO: 393900 - DNA, 939 bp, Homo Sapiens; identical to SEQ ID NO: 284042

SEQ ID NO: 393901 - DNA, 1000 bp, Homo Sapiens; identical to SEQ ID NO: 284044

SEQ ID NO: 393902 - DNA, 1000 bp, Homo Sapiens; identical to SEQ ID NO: 284045

SEQ ID NO: 393903 - DNA, 1000 bp, Homo Sapiens; identical to SEQ ID NO: 284046

SEQ ID NO: 393904 - DNA, 1000 bp, Homo Sapiens
gacaaagtggtgggggcaagaccccccagtgcaactgcgttcccagctcatgctctggatcatggagctcatcctctggaagttccaatcgtccgtggtagggagcagcgtcgtgacgtggaagatctcagatgtcgcaggacctcatggcgatcactcttgctctttgcagcacttggagcaaattattggcagtgtttctaattatccaagatacactggctcccggagctgtgacagaggagaaaatcccgtctccctctctaagaggataaaatgcacatggatgctgggagccagtggatttcctcctcgttgtccaagtggcagggatcatagcagggaccaccctggcaaatcgcaggtgcctgcactcgagctagccaaccagcttgctgcttggggattatggagctcagtggttaagagctggggcttcagggccggggagactgaggctccaatctcagccttgtcctcagcacatgcatgactcagcgcaagggtgctgctgtggcagaggcatctcttttgcataatgtgattgtccaaagtatgtatctcagagattcggcctgaaggttaaatgagatgagtgaatgtatgtttggtgcagtttctggaccatagggagtgtttagcaatgatgacgatagcagtgatgataacaatgactagtatattcgtgtattcgcttaaaacaacagaaatgtggccatgtgcggtgggtcacgcctgtaatcccagcactttgggaggccaaggtgggtggatcacctgaggtcaggagtttgagaccagcctggccaacatggcaaaaccccgtctctactaaaaatacaaaaattagctgggcgtggtggcacacgcctgtaattccagctactctggaggctgaggcaggagaatcgcttgaacccgggaggcagagggtgcagtgagctgagatcgcgccactgcactccacctgggcgacagagtgagacttcatctcaaaaac

SEQ ID NO: 393905 - DNA, 1000 bp, Homo Sapiens; identical to SEQ ID NO: 284047

SEQ ID NO: 393906 - DNA, 1000 bp, Homo Sapiens; identical to SEQ ID NO: 284048

SEQ ID NO: 393907 - DNA, 1000 bp, Homo Sapiens
ttgggtaaacccagactacattttgaaagtaaagccaataaaattttctaatgcattgtatttgggatatgagcaaaacagaggagtcaaggatgcttccaatgtttttggcctaaaccatggggaaaatttcatctttataatattaagtttcttagttttaatactgaatatgatgcctccttccaatttccctgtagagccctttgcatctttcattgaatttattcctaagcatttaatagttttgatgccattgtaaatgatatattttttctttttcttttttttaaaaatagggtctcactttgttatgcaggctggagtgcagtggcacgatcttggctcactgcagcctcgaactcctgggttcaagtgatcctcctgcctcagtcccccaagtagctgggactacagacatgcaccaccaggcctggctaatttttttgtattttttgtagagatggggttttgccatgttgcctaggctagtcttgaactcctgagctcaagtgatccaccggccgtggcctcccaaagtgctgggattataggcgtgagccaccacatccagcttgtaaatggtatatttttaaatgtcagtttctaaaatgttttgttagcataaagaaatacaattgactttttaataccaagccatcttgctaatttaataatttagttctagatctgatttagactttatagttgtgcaattgtactatctgtggaaaatgacaatttttctcttcctttataatctttagcttttttttcttttccttggctttttgcaagataatgggatgtccagtgtggtgttatatacaagtggtaattgtaagtgtccctgttctgttctttttgtttgtagttctcaagctcaaagaaaaacaactttgctatttcgtcattgagtatgataacacttaaactttacttactgtaggattattgtacataatctttattgtattaaagatgttcctattttgctaag

SEQ ID NO: 393908 - DNA, 1000 bp, Homo Sapiens
gcaggtgaacaaattgctgcacatcagacacattcttttcaagcctcattttctctccttttcatgctaactttcccactattaaagagcatttttaaaaagaagatgaaaaaaggcagagagaaaagaaggatgaaagtgtgagcgggtatccggaagtccttttcaattgcctgctgctgtgcagggtctgaactaagagcaagaaattggaggatgctggaggggcgaggtttcgtttcagtcctgcctattgggccaagtctggggcggggaaggagaggtgatggaggtgggcctggctgggccctgcggccctggaggctgcccctctgcctgccacccagcccctggcctgtgcctggcacaggaagcccgtcaataatttcttgttgaatgaatgaaagaaaagaaatcagtggatggagaagggctggattcttttgtggggaccttccacgccaccttctctgtggggctctagggctgagaaagaaaggacagatttggcaaaggtcaggcaggggctgggaaagcattaggtggaccaggcatgctacagcaaggccacgcctgcactgttgtcccactggtgacacccatgggtgcagccatggcgggtgggcgcagtttcacatgggattgggggtgagcctgggttgggtgggcgacccccaccccttccctacccctctccccaccagcaggtactactgggtctgcgtgaagataaaagctcaggaacatgccaggaaggtgtgaccatgatgatacctctgagatgaacccaagaagaaacagcagagtattacaaaggggaacaggactcagggtggacttcaagtatcattaaacataatcaaatatttaaaaagttattattgactgggtgcagtggctcacggctttaatcccagcacttagagaggccaaggtaggaagattgctttagcctaggagtttgagaccagcatgggcaacatagtgagaccccatctct

SEQ ID NO: 393909 - DNA, 1000 bp, Homo Sapiens; identical to SEQ ID NO: 284049

SEQ ID NO: 393910 - DNA, 1000 bp, Homo Sapiens
aaccgtcaactctggaaacgcctgtctttctccatggcaactgtctacgccgcaggctggagctgcccattaccggagcccatatggcaatgacccttggccagtctctgggaactaaactcctgggatgtttacacaggtgctgggtaagatgttcttccatatgctcaagaccacgggtcaagatgtactaggctgtcagcattgttgactgtaaatatgaagatgcatgatgggcacctggtacctggattggagttctcactctgttcatgtagcagatgaaaaaaatcaaagcacagagaggctaagtgacttgcccaaggccacacagccaggaagcaatcagctgggatttgaacccacacaacccgactcccgagcccacgatgatcacccgtgtgttccactgcctcacccctgagtgaacctcactgaccatgagagatggggtaggaagagggctcacacctgctggatatcctcacccacctgggcaggtaactcgctgggcctctctctcctgcctcagctcttcccctcgatccacacgggagatcacgtcggatttggacccaggcagccctgcccctggggaaagatacaagagttggctgtgggtgccagaatcacagggaggtctacagggaaggtgcacgcactgagcgcctaatgattggacgtacaaatggccaacgccaagacttatttgttgtgtgcttagcacactgcagagaggctgagccaacttatttgttgagtgcttaggacactgcagagaggctgagctctgacaaagctgtttaaggctccgggtctgtgctgttcgagttaactgcactgtgacagtataagaaacatcgtcttctgtgtttcgaagacttactaaagaaaaaaacagtaaaatctctcaatcatttgttaattgattattatttcagtgtgtcaagatgataagattttagatagcttgaggtgaataaaatgtattattaaaatt

SEQ ID NO: 393911 - DNA, 1000 bp, Homo Sapiens; identical to SEQ ID NO: 284050

SEQ ID NO: 393912 - DNA, 1000 bp, Homo Sapiens; identical to SEQ ID NO: 284051

SEQ ID NO: 393913 - DNA, 1000 bp, Homo Sapiens; identical to SEQ ID NO: 284052

SEQ ID NO: 393914 - DNA, 1000 bp, Homo Sapiens; identical to SEQ ID NO: 220664

SEQ ID NO: 393915 - DNA, 1000 bp, Homo Sapiens
tccagttctgcgaccacgttcatgacttagatcataactgaagtgcgggccagccgaggccgggccgtttaggggtttggctgctaattcaagaaggacacctgggtttggatcccagagttccctccagacccagatgtggcctcaggcaggtgatgagcctggagatgcggtttcattttctgcagggtggtcaaaggagatctcaggcttgtaggagacaaagcacatcgccccgaactgctcaggaggcgcagattacagccaccctccttatccaccccgtctcccatcacagccctcatgagtgctcaagcaaggctcagggcctgatggacgtggctgcctcctcctagaggacaggcatgtctcggctgcctgcaccagccagcggcccttctccccggccaggagatcctccaaggaaggccaagggccaagcagctgctggagcagatgaccacaaactcagtgactgcagagtgcacgcgctcatcaccttacagttgtgtaggctgggatcccactgggctaagaccaaggtgttgggaggctgcgtttcttgctggatgctgtaagggagaagtcgtttcctcgtgtttttttaacttccttggcccacggaccttcctccaccttcaaagccagcagcctcgcgtcttctgaccttccattgtcacatcgtcatctgacccacgtaaggacccgtgtgattagggtgggcgcacccgggtaatcttcccatctcaaagtccttgactgaatcacatctgcaaagtcccctttgctacgtaaggtcacatgttcacaagatccagggattaggacttggacatttttggaagcccattgtcctgccaacagcacaagacctccaggtgatcctgatgtgtaatgcacagtgagagacaaatgctctgatggaccatcaacagcagaacagacataaatggaagaaaatgtacataaaagagagtccacttaaacatgtgatcctctc

SEQ ID NO: 393916 - DNA, 1000 bp, Homo Sapiens
acagcctcggacagctgagccaggcccccctccgagagtgtggggtgttctcacctgactgtggggcctaggcacctgctggctgtcctggggctacagctccatggggccctcaggggctctgggtcacataaaagaccttcagccctgtcctgagtcccctgggaacagcaggagctgggtgggctaccccttccccggatggcccaggtgctggaccccagcctccctctcagacaattcatggtcatggccactgtccctggccctgaagacaaggccctggcagctgcctggagcttccccagtgctctggggtgcagggtgcaaccccacccttcctgtagctgatcaggcccgaggtggtcaaggatcaccccagtttctgcccagggcaccccacactggctggagtccacctctcctgtctgtgcatccttgggtgctgagcttcactggggcacccgccccactcggacccctccagagggtctcagcttccccagatcccagccccactcacccagcaacggtcagtcacttcctgtggtctcagaggccacctgcctgggggccacctgctgggatgtgcggttctcagacattccaagtggcacatccaggtcccagccaggggtgcccagcagtggcctgtgcagtgggccatggggtcggcccttgaagacttctcgtgtgggtcacgtaggctctccggcttccccgctgagccaccctctggagcctggacatcgtctcacctgagtgctgtgcaggaccacatgcccagcctgtcccagcggtggtcgcaccccatctgcagatgcactcccaccgcagtctgggcccaggctgccctcttccagctggccgtgggccgctgggccttcttttccctcctgcaacagaggctgctatgtcccacagactggagagggggctgcagagcgagtaagtccccgccactcagtaaacattggtccaggggtagctgttaaaatgg

SEQ ID NO: 393917 - DNA, 1000 bp, Homo Sapiens; identical to SEQ ID NO: 284054

SEQ ID NO: 393918 - DNA, 1000 bp, Homo Sapiens; identical to SEQ ID NO: 284055

SEQ ID NO: 393919 - DNA, 1000 bp, Homo Sapiens; identical to SEQ ID NO: 284056

SEQ ID NO: 393920 - DNA, 1000 bp, Homo Sapiens; identical to SEQ ID NO: 284057

SEQ ID NO: 393921 - DNA, 1000 bp, Homo Sapiens; identical to SEQ ID NO: 284058

SEQ ID NO: 393922 - DNA, 1000 bp, Homo Sapiens; identical to SEQ ID NO: 284059

SEQ ID NO: 393923 - DNA, 1000 bp, Homo Sapiens; identical to SEQ ID NO: 220665

SEQ ID NO: 393924 - DNA, 1000 bp, Homo Sapiens; identical to SEQ ID NO: 284061

SEQ ID NO: 393925 - DNA, 1000 bp, Homo Sapiens; identical to SEQ ID NO: 284062

SEQ ID NO: 393926 - DNA, 1000 bp, Homo Sapiens; identical to SEQ ID NO: 284063

SEQ ID NO: 393927 - DNA, 1000 bp, Homo Sapiens; identical to SEQ ID NO: 284064

SEQ ID NO: 393928 - DNA, 564 bp, Homo Sapiens
atgaggcaggggctgctggtgctggcgctggtgctggtgctggtgctagtgctggctgcagggtcccaggtgcaggagtggtaccccagggagtcccacgccctcaactggaacaagttttcagggttctggtacattctggccactgccactgatgcccagggattcttgccggccagggacaagaggaagctgggggcgtccgtggtaaaggtgaacaaagtgggccagctccgcgtgctcctcgccttcagacggggtcagggctgtgggcgggcacagccacgccatccgggaaccagcgggcatctctgggcatctctttcagtgaaaggggtgaaggccttccacgtgctgtccactgactacagctacggcttggtctacctccgcctggggcgtgcaacccaaaactacaagaacctgctgctcttccataggcagaatgtttcgagcttccagagtctgaaggaattcatggacgcttgtgacattctggggctctccaaggccgccgtcatcctcccgaaagacgcgtcccgtacacacaccatcctgccatga

SEQ ID NO: 393929 - DNA, 1000 bp, Homo Sapiens; identical to SEQ ID NO: 115233

SEQ ID NO: 393930 - DNA, 1000 bp, Homo Sapiens; identical to SEQ ID NO: 220667

SEQ ID NO: 393931 - DNA, 862 bp, Homo Sapiens
atgatgttgtgtttggagaaaagagagaagagaattgaataagtacatgaccccttggaagctgttttcagttgaggattttggtgagtagccacttgaaatcaagggaaattccatgaatagcaggagctgggaagaaaggaagaggaggaaggatcccaccacttttttcttcccatctaacaccgtgcttatgcaaagcatagtccatatgagatctgccttataaaaacttgctgaataaagcgaatggaagttaaattttggactttcttccataatagcttcaaattatggtgactttgttgcctatagagggccaggaagtacatttctttgagatcctagaatctgagtgtgtgctctacacaggatggatagagcgagcctctggcagttccatttatccagaggcaaaagcacgcctgccactggaggcgctcttgggttccaacaaagaacctatgttgcctaaggaaacagtgctttctcttaaaaggtacaatcttggctcctctgccatgaagcggaatgttcctggacatgtgcttcagagaccttcctatttaaccaggatacaagttacattgttatgcaattcctctgctgaggccctgtaaaaggagtgagttaggacagatgcagcaagatattaggacagatttcgcccattattcaggctgcacaacacagaaggaaacttgatttcaataagacccaattcttaacagtcttttctacccacttttacccataacttttccaaatttggttcaaattgtgcagagaaacaataaaatttttaaaaaggataaactggctagttaaaagtaaatggcatttaattaaaacaaatcttgca

SEQ ID NO: 393932 - DNA, 1000 bp, Homo Sapiens; identical to SEQ ID NO: 115234

SEQ ID NO: 393933 - DNA, 1000 bp, Homo Sapiens; identical to SEQ ID NO: 115236

SEQ ID NO: 393934 - DNA, 1000 bp, Homo Sapiens; identical to SEQ ID NO: 220668

SEQ ID NO: 393935 - DNA, 1000 bp, Homo Sapiens
tccaacaccgcaggtggaaaaccaacaaaaggaagaaaacagaaaggaggaaagggaagatgaaagaccgacttcaagaactaaagcagagaacaaaggaaattgaactctctagagacagtcatgtatcaactacagaaacagaggaacaaggggtgtttctacagcaagctgttatttatgaaagagagcctgtagctgagagacacctacatgaaatccaaaaactacaggaaagtattaacaatttggcagataatgttcaaaaatttgggcagcaacagaaaagtctggtggcttcaatgagaaggtttagtctacttaagagagagtctaccattacaaaggagataaaaattcaggcagaatacatcaacagaagtttgaatgatttagttaaagaagttaaaaagtcagaggttgaaaatggtccatcttcagtggtcacaaggatacttaaatctcagcatgctgcaatgttccgccattttcagcaaatcatgtttatatacaatgacacaatagcagcaaagcaagagaagtgcaagacatttattttacgtcagcttgaagttgctggaaaagagatgtctgaagaagatgtaaatgatatgcttcatcaaggaaaatgggaagtttttaatgaaagcttacttacagaaatcaatatcactaaagcacaactttcagagattgaacagagacacaaggaacttgttaatttggagaaccaaataaaggatttaagggatcttttcattcagatatctcttttagtagaggaacaaggagagagcatcaataatattgaaatgacagtgaatagtacaaaagagtatgttaacaatactaaagagaaatttggactagctgtaaaatacaaaaaaagaaatccttgcagagtactgtgttgttggtgctgtccatgctgtagctcaaaataaagaagctattttaaaaaaaaaaaaaaaaaaaaaaaaaaaaaaaaaaaaaaaaaaaa

SEQ ID NO: 393936 - DNA, 1000 bp, Homo Sapiens; identical to SEQ ID NO: 284071

SEQ ID NO: 393937 - DNA, 1000 bp, Homo Sapiens; identical to SEQ ID NO: 115237

SEQ ID NO: 393938 - DNA, 1000 bp, Homo Sapiens; identical to SEQ ID NO: 115238

SEQ ID NO: 393939 - DNA, 1000 bp, Homo Sapiens; identical to SEQ ID NO: 115239

SEQ ID NO: 393940 - DNA, 1000 bp, Homo Sapiens; identical to SEQ ID NO: 284073

SEQ ID NO: 393941 - DNA, 1000 bp, Homo Sapiens; identical to SEQ ID NO: 284074

SEQ ID NO: 393942 - DNA, 1000 bp, Homo Sapiens; identical to SEQ ID NO: 115240

SEQ ID NO: 393943 - DNA, 1000 bp, Homo Sapiens
caactgggtggagatccgcttggacgcgcgcaagttcgtctgcgagtaccggcgccctgtggccgagcgcgcccaggacatcggcatctggttccacatcctggcgggcctcacgcacctggcggtcatcagcaacgccttcctcctggccttctcgtccgacttcctgccgcgcgcctactaccggtggacccgcgcccacgacctgcgcggcttcctcaacttcacgctggcgcgagccccgtcctccttcgccgccgcgcacaaccgcacgtgcaggtatcgggctttccgggatgacgatggacattattcccagacctactggaatcttcttgccatccgcctggccttcgtcattgtgtttgagcatgtggttttctccgttggccgcctcctggacctcctggtgcctgacatcccagagtctgtggagatcaaagtgaagcgggagtactacctggctaagcaggcactggctgagaatgaggttctttttggaacgaacggaacaaaggatgagcagcccaagggctcagagctcagctcccactggacacccttcacggttcccaaggccagccagctgcagcagtgacgcctggaaggacatctggtggtccttaggggagtggcccctcctgagccctgcgagcagcgtccttttcctcttccctcaggcagcggctgtgtgaaccgctggctgctgttgtgcctcatctctgggcacattgcctgcttccccccagcgccggcttctctcctcagagcgcctgtcactccatccccggcagggagggaccgtcagctcacaaggccctctttgtttcctgctcccagacataagcccaaggggcccctgcacccaagggaccctgtccctcggtggcctccccaggcccctggacacgacagttctcctcaggcaggtgggctttgtggtcctcgccgcccctggccacatcgccctctcctcttacacctggtgaccttcgaatgt

SEQ ID NO: 393944 - DNA, 1000 bp, Homo Sapiens; identical to SEQ ID NO: 115241

SEQ ID NO: 393945 - DNA, 1000 bp, Homo Sapiens
cagactatacatgatccctgttggagctttcatcttttccttgggaaacatgcaaaaccaaagctttgtaactgagtttgtcctcctgggactttcacagaatccaaatgttcaggaaatagtatttgttgtatttttgtttgtctacattgcaactgttgggggcaacatgctaattgtagtaaccattctcagcagccctgctcttctggtgtctcctatgtacttcttcttgggcttcctgtccttcctggatgcgtgcttctcatctgtcatcaccccaaagatgattgtagactccctctatgtgacaaaaaccatctcttttgaaggctgcatgatgcagctctttgctgaacacttctttgctggggtggaggtgattgtcctcacagccatggcctatgatcgttatgtggccatttgcaagcccttgcattactcttctatcatgaacaggaggctctgtggcattctgatgggggtagcctggacagggggcctcttgcattccatgatacaaattctttttactttccagcttcccttttgtggccccaatgtcatcaatcactttatgtgtgacttgtacccgttactggagcttgcctgcactgatactcacatctttggcctcatggtggtcatcaacagtgggtttatctgcatcataaacttctccttgttgcttgtctcctatgctgtcatcttgctctctctgagaacacacagttctgaagggcgctggaaagctctctccacctgtggatctcacattgctgttgtgattttgttctttgtcccatgcatatttgtatatacacgacctccatctgctttttcccttgacaaaatggcggcaatattttatatcatcttaaatcccttgctcaatcctttgatttacactttcaggaataaggaagtaaaacaggccatgaggagaatatggaacagactgatggtggtttctgatgagaaagaaaatattaaactttaa

SEQ ID NO: 393946 - DNA, 975 bp, Homo Sapiens
atgttggagagtaattacaccatgccaactgagttcctatttgttggattcacagattatctacctctcagagtcacactgttcttggtattccttctggtatatacattaactatggtcggaaatatactcttaataattctagttaatattaattcaagccttcaaattcccatgtattattttcttagcaacttatctttcttagacatcagctgttctacagcaatcactcctaaaatgctggcaaacttcttggcatccaggaaaagcatctctccttatgggtgtgcactacaaatgtttttcttcgcttcttttgctgatgctgagtgccttatcctggcagcaatggcttatgaccgctatgcagccatctgcaacccactgctctatactacactgatgtctaggagagtctgtgtctgcttcattgtgttggcatatttcagtggaagtacaacatcactggtccatgtgtgcctcacattcaggctgtcattttgtggctccaatatcgtcaatcattttttctgtgatatcccacctcttctggctttatcatgtacagacactcagatcaaccagcttctgctctttgctttgtgcagcttcatccagaccagcacttttgtggtaatatttatttcttacttctgcatcctcatcactgtgttgagcatcaagtcctcaggtggcagaagcaaaacattctccacttgtgcttcccacctcatagcagtcaccttattctatggagcgctcctgtttatgtacttacagcccaccactagctattccctagacactgataaggtggtggcagtgttttatactgttgtatttcccatgtttaatccaataatttatagtttcagaaacaaggatgtgaaaaatgctctcaaaaagctattagaaagaattggatattcaaatgaatggtatttaaatcgtttaagaatagtcaatatctaa

SEQ ID NO: 393947 - DNA, 1000 bp, Homo Sapiens; identical to SEQ ID NO: 284080

SEQ ID NO: 393948 - DNA, 1000 bp, Homo Sapiens; identical to SEQ ID NO: 115242

SEQ ID NO: 393949 - DNA, 1000 bp, Homo Sapiens; identical to SEQ ID NO: 220396

SEQ ID NO: 393950 - DNA, 1000 bp, Homo Sapiens; identical to SEQ ID NO: 115243

SEQ ID NO: 393951 - DNA, 1000 bp, Homo Sapiens; identical to SEQ ID NO: 115244

SEQ ID NO: 393952 - DNA, 1000 bp, Homo Sapiens; identical to SEQ ID NO: 284083

SEQ ID NO: 393953 - DNA, 689 bp, Homo Sapiens; identical to SEQ ID NO: 284084

SEQ ID NO: 393954 - DNA, 975 bp, Homo Sapiens
atggctgtaggaaggaacaacacaattgtgacaaaattcattctcctgggactttcagaccatcctcaaatgaagattttccttttcatgttatttctggggctctacctcctgacgttggcctggaacttaagcctcattgccctcattaagatggactctcacctgcacatgcccatgtacttcttcctcagtaacctgtccttcctggacatctgctatgtgtcctccaccgcccctaagatgctgtctgacatcatcacagagcagaaaaccatttcctttgttggctgtgccactcagtactttgtcttctgtgggatggggctgactgaatgctttctcctggcagctatggcctatgaccggtatgctgcaatctgcaaccccttgctttacacagtcctcatatcccatacactttgtttaaagatggtggttggcgcctatgtgggtggattccttagttctttcattgaaacatactctgtctatcagcatgatttctgtgggccctatatgatcaaccactttttctgtgacctccctccagtcctggctctgtcctgctctgataccttcaccagcgaggtggtgaccttcatagtcagtgttgtcgttggaatagtgtctgtgctagtggtcctcatctcttatggttacattgttgctgctgttgtgaagatcagctcagctacaggtaggacaaaggccttcagcacttgtgcctctcacctgactgctgtgaccctcttctatggttctggattcttcatgtacatgcgacccagttccagctactccctaaacagggacaaggtggtgtccatattctatgccttggtgatccccgtggtgaatcccatcatctacagttttaggaataaggagattaaaaatgccatgaggaaagccatggaaagggaccccgggatttctcacggtggaccattcatttttatgaccttgggctaa

SEQ ID NO: 393955 - DNA, 930 bp, Homo Sapiens
atggcgaatagaaacaatgtgacagagtttattctattggggcttacagagaatccaaaaatgcagaaaatcatatttgttgtgttttctgtcatctacatcaacgccatgataggaaatgtgctcattgtggtcaccatcactgccagcccatcactgagatcccccatgtactttttcctggcctatctctcctttattgatgcctgctattcctctgtcaatacccctaagctgatcacagattcactctatgaaaacaagactatcttattcaatggatgtatgactcaagtctttggagaacattttttcagaggtgttgaggtcatcctacttactgtaatggcctatgaccactatgtggccatctgcaagcccttgcactataccaccatcatgaagcagcatgtttgtagcctgctagtgggagtgtcatgggtaggaggctttcttcatgcaaccatacagatcctcttcatctgtcaattacctttctgtggtcctaatgtcatagatcactttatgtgtgatctctacactttgatcaatcttgcctgcactaatacccacactctaggactcttcattgctgccaacagtgggttcatatgcctgttaaactgtctcttgctcctggtctcctgcgtggtcatactgtactccttaaagacccacagcttagaggcaaggcatgaagccctctctacctgtgtctcccacatcacagttgtcatcttatcctttataccctgcatatttgtgtacatgagacctccagctactttacccattgataaagcagttgctgtattctacactatgataacttctatgttaaaccccttaatctacaccttgaggaatgctcaaatgaaaaatgccattaggaaattgtgtagtaggaaagctatttcaagtgtcaaataa

SEQ ID NO: 393956 - DNA, 1000 bp, Homo Sapiens; identical to SEQ ID NO: 117853

SEQ ID NO: 393957 - DNA, 1000 bp, Homo Sapiens
ctactctgcactacgagaaattgcttttactaggcagcttcatgagaaaacttctcaactcagctattattatatgggtttctacattcattcatgtcccaagatgaaatataagggtcagtatagaccttctgatttgctgtgccctgagacatatgtttgggtacccattgagcaatgcctgccttcacttgaaaactccaagtactgccgtttcaaccaggacccagaagcagtggatgaggatcgcagtacggaacctgaccgattgcaggtgtttcacaagagagccatcatgccttacggtgtttataagaaacagcagaaagacccaagtgaggaggctgctgttctgcagtacgccagcctggtggggcagaagtgctccgagcggatgctgctgttcagaaactgacctgttcacctctgccgggaagttcctgtgttgtgctgatgatttgtgccaggatacatattcagtacctgtggggaaataactgtcaccacccacaaattagacattttttattttgactatctatggcttttaaaaaatattttgtggcaatgtatctgtgagaatctcatagttaatataaagattttaaaactgcattatgacctagcccccataattgggatttatcattttggaggattctttctagagcaagatatgctcaaattctcctgtttgtattttgtaaaatgaagaagtgaatctaagtaacttaatcacagttgtgcattttttttggttctgttagagaaattaaaacagactgtttcctcaggcccattttaaactgaacttatgctaggaaaccttaagtatggggaaggtagaaagttcatttcatcacttagaaaatatgtcttctcaagaacaaaactgtgctgttacaactcagtgttcaatgtgaaattgctgccaaatgttatgtagtttaatagagaacttgaaaaaataaaacattaaaatggaaaaaaaaaaaaaaaa

SEQ ID NO: 393958 - DNA, 1000 bp, Homo Sapiens; identical to SEQ ID NO: 284087

SEQ ID NO: 393959 - DNA, 1000 bp, Homo Sapiens
gatgcatcagtggaatgttcgttttcctcacctatgtgcttggagtggcctggctgggtgtgtttggtttctcagcggtgcccgtgtttatgttctacaacatatggtcaacttgtgaagtcatcaagtcaccgcagaccaacgggaccacgggtgtggagcagatctgtgtggatatccgacaatacggtatcattccttggaatgctttccccggaaaaatatgtggctctgccctggagaacatctgcaacacaaacgagttctacatgtcctatcacctgttcattgtggcctgtgcaggagctggtgccaccgtcattgccctgctgatctacatgatggctactacatataactatgcggttttgaagtttaagagtcgggaagattgctgcactaaattctaaattgcataaggagttttagagagctatgctctgtagcatgaaatatcactgacactccagactaaagcagagtctaggtttctgcaattttgttacagtaatttgtaaatagctttagtaaactcaccttgcatggtagattaataagatgacttactgtacatgaattacacaataatgagatctggtggctatttccacattttgaaaaggattcagttatttactgacagtggtgagcatcctttttaaaataatgttctcatacttaaacattagagagcagtatctttaaatgaattattaacactttggaatacttacattttctgttatttttgattgcctgataaccagtttcaatgatgaaaatgaaaacaagtgctgaagatgaaatggaagagaaccgttttaatctggattttgttttgtcacacctggaaaatactttgcaaatatgttctaaattgaaaacaatttttttatgatcacatggttcactaccaaatgaccctcaaataagccagatgaaaatttgaagaaaaaggtcacccagttctctggaaaaaaaaaaaaaaaaaaaaaaaaaa

SEQ ID NO: 393960 - DNA, 1000 bp, Homo Sapiens; identical to SEQ ID NO: 220672

SEQ ID NO: 393961 - DNA, 1000 bp, Homo Sapiens; identical to SEQ ID NO: 393959

SEQ ID NO: 393962 - DNA, 1000 bp, Homo Sapiens; identical to SEQ ID NO: 284089

SEQ ID NO: 393963 - DNA, 1000 bp, Homo Sapiens; identical to SEQ ID NO: 284090

SEQ ID NO: 393964 - DNA, 1000 bp, Homo Sapiens; identical to SEQ ID NO: 284091

SEQ ID NO: 393965 - DNA, 1000 bp, Homo Sapiens; identical to SEQ ID NO: 115248

SEQ ID NO: 393966 - DNA, 1000 bp, Homo Sapiens; identical to SEQ ID NO: 115249

SEQ ID NO: 393967 - DNA, 1000 bp, Homo Sapiens; identical to SEQ ID NO: 115250

SEQ ID NO: 393968 - DNA, 1000 bp, Homo Sapiens; identical to SEQ ID NO: 220674

SEQ ID NO: 393969 - DNA, 1000 bp, Homo Sapiens; identical to SEQ ID NO: 291099

SEQ ID NO: 393970 - DNA, 902 bp, Homo Sapiens
gacaggaagagaaggaaaaaagagaaggcgctgtcccgctcttgctacggtggcctggaggagtggcgaaaccggaacagagaatttatcacttctgggactcacagtcgtgatgtctttcaagagggaaggagacgattggagtcaactcaatgtgctcaaagtaagcgtgagcggagaggatctggagccgcttcagtcgctccctgaagaaaagaagagtcggggacctcctagccagttacattccagaggatgaggcgctgatgcttcgggatggacgctttgcttgtgccatctgcccccatcgaccggtactggacaccctggccatgctgactgcccaccgtgcaggcaagaaacatctgtccagcttgcagcttttctatggcaagaagcagccgggaaaggaaagaaagcagaatccaaaacatcagaatgaattgagaagggaagaaaccaaagctgaggctcctctgctaactcagacacgacttatcacccagagtgctctgcacagagctccccactataacagttgctgccgccggaagtacagaccagaagcccctggtccctctgtctccctttcccctatgccaccctcagaggtcaaactccaaagtgggaagatcagtagggaacctgaacctgcggctggcccacaggccgaggagtcagcaactgtctcagcccctgcacccatgagccccacaagaagacgagccctggaccattatctcacccttctctggatggatcccagatggacgaggtcgatgggtaaaagatgaaaatgttgagtttgactctgatgaggaggaaccacctgatctccccttggactgatacccttttcccattcattcacaaataaattacaatgggtgctgagaacttaa

SEQ ID NO: 393971 - DNA, 1000 bp, Homo Sapiens; identical to SEQ ID NO: 284095

SEQ ID NO: 393972 - DNA, 1000 bp, Homo Sapiens
ggttggcgaaggctctgctgccatgaaggtgaagattaagtgctggaacggcgtggccacttggctctgggtggccaacgatgagaactgtggcatctgcaggatggcatttaacggatgctgccctgactgtcctctccatggagaaagcatttctaggtgtttgggctggtgcccgcagcctgtgcctgtcctgggaggcagggcccatccacaggtgcccatcaacacagcttccccaacgcctgggcagcacaccggatccctgatgtctagggaagagtcttctaggtccccagaccccacccctcctgcccttgatcaagagaccagttcactactcagatgcacgtctccttggtgccttgaccattcatgtgacctttttggcatcacagatcaagtgtctgcagatgggcccagggcctgtaggcaaggtgcccggcgacgactgcccgctggtgtggggccagtgctcccactgcttccacatgcattgcatcctcaagtggctgcacgcacagcaggtgcagcagcactgccccatgtgccgccaggaatggaagttcaaggagtgaggcccgacctggctctcgctggaggggcatcctgagactccttcctcatgctggcgccgatggctgctggggacagcgcccctgagctgcaacaaggtggaaacaagggctggagctgcgtttgttttgccatcactatgttgacacttttatccaataagtgaaaactcattaaactactcaaatcttgctggaggcctctgggtgcctgtgttctcggcatatagatgtggtctcggtgtgttttgatatgaaaactctcatgaataaacatctccgtgaaacgccaaggccctcgtcaaaccctgagtcatgactgggaggagaaggagcaggatcagacggtagagcctggggcatgctcttcaggcatgctcttgcctgctggattgccggcggcggccctgggaccctccctcagg

SEQ ID NO: 393973 - DNA, 916 bp, Homo Sapiens
gatcggccagggctgggggcgctgggggcgctacgggcgcggcgggtgcctgggagctgctgggagtccttgtttccgctcccgcccaggactgtgcgctcggctcgcggtggggtccggcgggcgcggcttcggcgggcggcagccgctgcagacgagctgcggagacggagtttcgtcatgttggccaggcccatttgagatctttgaagatatcctcaacgtgaggctctgctgccatgaaggtgaagattaagtgctggaacggcgtggccacttggctctgggtggccaacgatgagaactgtggcatctgcaggatggcatttaacggatgctgccctgactgcaaggtgcccggcgacgactgcccgctggtgtggggccagtgctcccactgcttccacatgcattgcatcctcaagtggctgcacgcacagcaggtgcagcagcactgccccatgtgccgccaggaatggaagttcaaggagtgaggcccgacctggctctcgctggaggggcatcctgagactccttcctcatgctggcgccgatggctgctggggacagcgcccctgagctgcaacaaggtggaaacaagggctggagctgcgtttgttttgccatcactatgttgacacttttatccaataagtgaaaactcattaaactactcaaatcttgctggaggcctctgggtgcctgtgttctcggcatatagatgtggtctcggtgtgttttgatatgaaaactctcatgaataaacatctccgtgaaacgccaaggccctcgtcaaaccctgagtcatgactgggaggagaaggagcaggatcagacggtagagcctggggcatgctcttcaggcatgctcttgcctgctggattgccggcggcggccctgggaccctccctcagg

SEQ ID NO: 393974 - DNA, 1000 bp, Homo Sapiens
gggcggtcgagcccgcggcgccatggctcacgtcggctcccgcaagcgctcgaggagtcgcagccggtcccggggacgggggtcggaaaagagaaagaagaagagcaggaaagacacctcgaggaactgctcggcctccacatcccaagagagaagcaagcagaaggcccggaggagaacaagatccagctcctcctcctcttcttccagttcttctagctcctcttcttcctcctcgtcctcctcctcttcctccagtgatggccggaagaagcgggggaagtacaaggacaagaggaggaagaagaagaagaagaggaagaagctgaagaagaagggcaaggagaaggcggaagcacagcaggtggaggctctgccgggcccctcgctggaccagtggcaccgatcagctggggaggaagaggatggcccagtcctgacggatgagcagaagtcccgaatccaggccatgaagcccatgaccaaggaggagtgggatgcccggcagagcatcatccgcaaggtggtggaccctgagacggggcgcaccaggcttattaagggagatggcgaggtcctagaggaaatcgtaaccaaagaacgacacagagagatcaacaaggtgggtgtggcccctctgcctgccatccgcccccagctctgtttgtgatgtacccctcctcctgtgtgctttcttccccagcaagccacccgaggggactgcctggccttccagatgcgagctgggttgcttccctgagggcccccgctggccaaggcctgtggacgacgctggcggcccagcctgggcaggtttcagggtgccagtgggaagcctgatgggtgctggtggcctttcccccgtggattggtctctggcccagcccagtctcttctcaggggcagggggtggaggttggggtcaccggcctgcttggcacccccatctgaaagagcagcacttctcagctattaaaggccccctggatagactttcaaa

SEQ ID NO: 393975 - DNA, 1000 bp, Homo Sapiens
ggcactttggtgccagcattgaggaaaacaatggacaaaataaaaagcccatcttctgataactgcgtgtgcaccaactactctgttttgaaggctctgggatgcatgtctctccttctctagctgtcaaacagccccatctcccggcattgagccccatcttctggcattgagtcctgcttcctacaggagtaggactggggccttgagagccagtgggctttgagtttaagctccaccaacttcaagccatgtgactttggggcaatcagtcacctctgagcctcctttcttcttctataaaatgagactaacaatctgtctcttgcttacctcaaaggccgttgggaagatcaaacaatattggatgtgattgaactttataaactggagagctacaccattttcttctccaaccattttacccatttcctgtccctgagcaaacaacgcccgaaataccctctgctacccactagccctcactcagtttctgcctcacaaagctgtaacagaatgggttgggctcaggcctaattttctctgtcattccctcagcaacttgcctatacttgtgtggccctataattctggcctttgtttgagagtcagccagcctgctcaggatgaaaatgaggcgcctggcttttagcagccataaagaactctccttctgaatggcaagtctctcagactcttggtctaatggctgttgcaatgacaggctacaaaatttggctcacatccctctcattccatccctcttgggtgggtgccatttggtccagtgatttacctgcattacgttggtcaatttggtctacaacatcctgcgtgtttactgcagtgtgagctgctgcctctatcctgggtgcctgcctcatgtgatgatttgtatacagtggccaaagacatgcttctgcttttctgctgtctttgttacttcttgtgccagagattacgttttccctgagcttccataaagtgtttttaaacagtc

SEQ ID NO: 393976 - DNA, 1000 bp, Homo Sapiens; identical to SEQ ID NO: 284097

SEQ ID NO: 393977 - DNA, 1000 bp, Homo Sapiens; identical to SEQ ID NO: 284098

SEQ ID NO: 393978 - DNA, 1000 bp, Homo Sapiens; identical to SEQ ID NO: 284099

SEQ ID NO: 393979 - DNA, 1000 bp, Homo Sapiens; identical to SEQ ID NO: 284100

SEQ ID NO: 393980 - DNA, 1000 bp, Homo Sapiens; identical to SEQ ID NO: 220675

SEQ ID NO: 393981 - DNA, 1000 bp, Homo Sapiens; identical to SEQ ID NO: 115251

SEQ ID NO: 393982 - DNA, 1000 bp, Homo Sapiens; identical to SEQ ID NO: 287550

SEQ ID NO: 393983 - DNA, 1000 bp, Homo Sapiens; identical to SEQ ID NO: 284104

SEQ ID NO: 393984 - DNA, 955 bp, Homo Sapiens
gttccccggcctctcttggtcagggtgacgcagtagcctgcaaacctcggcgcgtaggccaccgcacttatccgcagcaggaccgcccgcagccggtagggtgggctcttcccagtgcccgcccagctaccggccagcctgcggctgcgcagatctttcgtggttctgtcagggagacccttaggcactccggactaagatggcggcgacggccaggcggggctggggagctgcggctgttgccgccgggctgcgcaggcggttctgtcatatgttgaagaatccatacaccattaagaaacagcctctgcatcagtttgtacaaagaccacttttcccactacctgcagccttttatcacccaggcagttatttaggattgaaggagtaaaaagtgtcttctttggaccagatttcatcactgtcacaaaggaaaatgaagaattagactggaatttactgaaaccagatatttatgcaacaatcatggacttctttgcatctggcttacccctggttactgaggaaacaccttcaggagaagcaggatctgaagaagatgatgaagttgtggcaatgattaaggaattgttagatactagaatacggccaactgtgcaggaagatggaggggatgtaatctacaaaggctttgaagatggcattgtacagctgaaactccagggttcttgtaccagctgccctagttcaatcattactctgaaaaatggaattcagaacatgctgcagttttatattccggaggtagaaggcgtagaacaggttatggatgatgaatcagatgaaaaagaagcaaactcaccttaaaataatctggattttctttgggcataacagtcagacttgttgataatatatatcaagtttttattattaatatgctgaggaacttgaagattaataaaatatgctcttcagagaatgatatataaaa

SEQ ID NO: 393985 - DNA, 1000 bp, Homo Sapiens; identical to SEQ ID NO: 224085

SEQ ID NO: 393986 - DNA, 1000 bp, Homo Sapiens; identical to SEQ ID NO: 220676

SEQ ID NO: 393987 - DNA, 1000 bp, Homo Sapiens; identical to SEQ ID NO: 284108

SEQ ID NO: 393988 - DNA, 1000 bp, Homo Sapiens; identical to SEQ ID NO: 286893

SEQ ID NO: 393989 - DNA, 1000 bp, Homo Sapiens; identical to SEQ ID NO: 220677

SEQ ID NO: 393990 - DNA, 1000 bp, Homo Sapiens; identical to SEQ ID NO: 115252

SEQ ID NO: 393991 - DNA, 1000 bp, Homo Sapiens
cgggaagggcttcgggcacggggccgggctcctggcgcaccagcgggcccagcacggggacgggctcggggcggcggggggcgaggagccggcccacatctgcgtggagtgcggggagggcttcgtgcagggcgccgcgctccggagacacaagaagatccacgcggtgggcgcgccctcggtctgcagcagctgcggacagagctactaccgcgcgggcggggaggaggaggacgacgacgacgaggccgcgggcgggcggtgccccgagtgccgcgctggggagggccggtaggggaggggcccgggggggggcgggcagggcccctcgggcttggcgggagcgacgacgtgcaagaccaagagacccagggagaagcggacggggtgcgatggaccccgcggcatccccggctccccgccctctgtccctgcgccgtccgtgggggggcactggggcgtattagggcccgttcacttctccgcctcgagactctgccccctcagcctggcccgcccttcctaagttatcggcctgcgagccggagagacaatggagagaactgcagaggccgagtggcgaccaggccccaagcggaaggccattttccctgcccttcctcagttgtccggggcgggggtggggggtgctgcgaggaatggagaaaccaggccctttagaggatcccagagagggaagagaaccaggggcccttttctcttttagaattttcttttaatcagcccaccttttgactccccgcccgccccaatccattatttttttctgccttccgggtcccatccttagagctcgagtcgttccttcccctcctggattccgggtagcagaggcagcgccgcaggaggcgggtgcccgtttgtcccaggcctgggcgtggtggaggaaggggtgctggaacaataaacggcactatccaaatgtcaaaaaaaaaaaaaaaaaaaaaaaaaaaaaaaaaaaaaaaaaaaaaaaaaaaaa

SEQ ID NO: 393992 - DNA, 1000 bp, Homo Sapiens; identical to SEQ ID NO: 284110

SEQ ID NO: 393993 - DNA, 1000 bp, Homo Sapiens; identical to SEQ ID NO: 284111

SEQ ID NO: 393994 - DNA, 1000 bp, Homo Sapiens
atgaagtaaacactattattatcctcattttttagttgaggaaactgaggctcatagaggttgaaagatttattcaagatcccaaagctggcagttgatggatctgggatttcaatccagcctaacccatagtttatatgtatatgcacacatacatacatatatgttgtgtataaatgtacacttttttagacatgaaagaattgccttagttgaacagttctcagattgtagtttgcaatcccctggggttccccaagaccctttcagaggtttgagggtcaacagtgttgtcattataatcaaagactgttttccttttccactgtgttggcatttgcactggtgatgctaaagtaatggtggataagctgctggtgccttagtgtgaatcaaggtagtgccaccaaagtgtacttgtagtttctgtattagtcacctgccgtgcactcacagtaaactacattactcaactgagtattacccagttatacccaatccctgatgaagtattaaaatgttattagttttattaactctctacacttgaatgtgtgttttttaaaatattctgtgtgatgacatgggtagtgtgcataaagtacctctgtgtctgaagtatgatagttgtcttgaggaaaagcacttgtgtgattgaattgtgaggtaaactacctgatttttttttgttgttacatgaaagaatgactgacaaatctttaaagtatttacaatatcactccagaaaagaaaacaaatcaaataaatattgactcaaaactctccaagtacatatcaaaatctcaggaagggaaaaaagagtctaaagaacaaaatataacactattttatttcagtcatgttagttcagtttccacagtttgaactgggtatagattaatatctaaaaccaaaaaatgaacatgtgtatagtgatgctgaaaaatgtgcattattttttatttatattttaggaataataaagttagttattaaagaa

SEQ ID NO: 393995 - DNA, 1000 bp, Homo Sapiens; identical to SEQ ID NO: 117489

SEQ ID NO: 393996 - DNA, 1000 bp, Homo Sapiens; identical to SEQ ID NO: 115253

SEQ ID NO: 393997 - DNA, 1000 bp, Homo Sapiens; identical to SEQ ID NO: 115254

SEQ ID NO: 393998 - DNA, 1000 bp, Homo Sapiens
aaagagcagccccagcaaacagtgattgctgaccactcgctgagcgccagccacatggagaccaccatgaaacttctgaagaccagggtgcagtcccgcctggccctccacaaacagtttgcatccctagaacatggcattgtgccagttaccagtgattgccagtacctcttccctgccaaggttgtctctcgcctggtgaaatgggtgacagttgcccatgaggattacatggagctgcacttcaccaaagacattgtggatgcgggactggctggggacaccaatctctactacatggcgctcatcgaaaggggcacagccaaactgcaggccgctgtggtgttgaaccctggctactcctccatcccacctgttttccagctctgtttgaactggaaaggggagaaaaccaacagcaacgatgacaacattcgggccatggagggcgaagtcaatgtgtgctacaaggagctgtgtggcccttggcccagccaccagctgttgaccaaccagctgcagcggctgtgtgtgctgctggatgtttacctggagaccgagagccatgacgacagtgtggaggggcccaaggaatttccccaggagaagatgtgtctgcggctcttcaggggtcctagcaggatgaagccatttaaatacaaccatcctcagggattcttcagccatcgctgatctcccgcgcagaccgttgtttcccccaaggcctcaccctgagcactgggcttctgctttctgctctggcccacatgtgactcttgatattctccaaagacaccagccaattaaaaagcgtcacctgaccagtggcctttgtctgtggttcctggcaaggtggctttgcagtctggaagggcaggtgggagctgtgacacagtgtgaaaaagcatttgtagagagactttttctcagcagccaataaaagcagagtggaaaaagattccaattctgcagagagatgctcaaaaaaaaaaaaaaaaaa

SEQ ID NO: 393999 - DNA, 1000 bp, Homo Sapiens; identical to SEQ ID NO: 284116

SEQ ID NO: 394000 - DNA, 1000 bp, Homo Sapiens; identical to SEQ ID NO: 284117

SEQ ID NO: 394001 - DNA, 1000 bp, Homo Sapiens
gtttcgtgcccgtggtctactacagcctcttgctgtgcctcggtttaccagcaaatatcttgacagtgatcatcctctcccagctggtggcaagaagacagaagtcctcctacaactatctcttggcactcgctgctgccgacatcttggtcctctttttcatagtgtttgtggacttcctgttggaagatttcatcttgaacatgcagatgcctcaggtccccgacaagatcatagaagtgctggaattctcatccatccacacctccatatggattactgtaccgttaaccattgacaggtatatcgctgtctgccacccgctcaagtaccacacggtctcatacccagcccgcacccggaaagtcattgtaagtgtttacatcacctgcttcctgaccagcatcccctattactggtggcccaacatctggactgaagactacatcagcacctctgtgcatcacgtcctcatctggatccactgcttcaccgtctacctggtgccctgctccatcttcttcatcttgaactcaatcattgtgtacaagctcaggaggaagagcaattttcgtctccgtggctactccacggggaagaccaccgccatcttgttcaccattacctccatctttgccacactttgggccccccgcatcatcatgattctttaccacctctatggggcgcccatccagaaccgctggctggtrcacatcatgtccgacattgccaacatgctagcccttctgaacacagccatcaacttcttcctctactgcttcatcagcaagcggttccgcaccatggcagccgccacgctcaaggctttcttcaagtgccagaagcaacctgtacagttctacaccaatcataacttttccataacaagtagcccctggatctcgccggcaaactcacactgcatcaagatgctggtgtaccagtatgacaaaaatggaaaacctataaaagtatccccgtgattccataggtgtgg

SEQ ID NO: 394002 - DNA, 1000 bp, Homo Sapiens; identical to SEQ ID NO: 284118

SEQ ID NO: 394003 - DNA, 832 bp, Homo Sapiens; identical to SEQ ID NO: 284119

SEQ ID NO: 394004 - DNA, 1000 bp, Homo Sapiens; identical to SEQ ID NO: 220679

SEQ ID NO: 394005 - DNA, 927 bp, Homo Sapiens
atgaccatggaaaattattctatggcagctcagtttgtcttagatggtttaacacagcaagcagagctccagctgcccctcttcctcctgttcctgggaatctatgtggtcacagtagtgggcaacctgggcatgattctcctgattgcagtcagccctctacttcacacccccatgtactatttcctcagcagcttgtccttcgtcgatttctgctattcctctgtcattactcccaaaatgctggtgaacttcctaggaaagaagaatacaatcctttactctgagtgcatggtccagctctttttctttgtggtctttgtggtggctgagggttacctcctgactgccatggcatatgatcgctatgttgccatctgtagcccactgctttataatgcgatcatgtcctcatgggtctgctcactgctagtgctggctgccttcttcttgggctttctctctgccttgactcatacaagtgccatgatgaaactgtccttttgcaaatcccacattatcaaccattacttctgtgatgttcttcccctcctcaatctctcctgctccaacacacacctcaatgagcttctactttttatcattgcggggtttaacaccttggtgcccaccctagctgttgctgtctcctatgccttcatcctctacagcatccttcacatccgctcctcagagggccggtccaaagcttttggaacatgcagctctcatctcatggctgtggtgatcttctttgggtccattaccttcatgtatttcaagcccccttcaagtaactccctggaccaggagaaggtgtcctctgtgttctacaccacggtgatccccatgctgaaccctttaatatacagtctgaggaataaggatgtgaagaaagcattaaggaaggtcttagtaggaaaatga

SEQ ID NO: 394006 - DNA, 573 bp, Homo Sapiens; identical to SEQ ID NO: 284122

SEQ ID NO: 394007 - DNA, 1000 bp, Homo Sapiens
acattatgcaacgttatattttgtcttctgtgtggattcttcagaaagtgaacttggcattttagatctaattcaagtatttgtggaaacattagacaaatgttttgaaaatgtctgtgagctggatttgattttccatgtagacaaggttcacaatattcttgcagaaatggtgatggggggaatggtattggagacaaatatgaatgagattgttacacaaattgatgcacaaaataagctggaaaaatctgaggctggcttagcaggagctccagcccgtgctgtatcagctgtaaagaatatgaatcttcctgagatcccaagaaatattaacattggtgacatcagtataaaagtgccaaacctgccctcttttaaataaaaatgtaaaaaggccactcccaggtaaaatccagggggaagagtcatctaagtttaccatgcagttgtttaccaaaaatagaggaggagagtcttaacttttgctcttggatttaagtcaaggtactgtatagaagttgtgtaaaatcagtatgaaagttcaatgttgctgttcttgctcagtgattttaaagaaattgagtagttcctatgtgatttttttttttcttttctaaactgcattcctgtgcccacctacggcatgcctctatgtattggctactacagtgttttaaaaagtgtttcagatatttctctaattatgtacaacctaaaatgttggtgttttgtatggatcacaagtgcagcattccttaattccttctgctatatgtcacacagttgttatttggagaaccaagtatgtattgcatgaaaacattatgacttttttctcttagtttaaataaactccaaggtaactggacttctaaagcacctttctgtttgcctgatatctactttagcaataattttttttacaaccctctgactcaacaaagtaaataaaagtatattttatcactattaaaaaaaaaaaaaaaaaaaaaaaaaa

SEQ ID NO: 394008 - DNA, 951 bp, Homo Sapiens
atgagacttatgaaagaggttcgaggcagaaatcaaacagaagtaacagaatttctcctcttaggactttccgacaatccagatctacaaggagtcctctttgcattgtttctgttgatctatatggcaaacatggtgggcaatttggggatgattgtattgattaagattgatctctgtctccacacccccatgtatttctttctcagtagcctctcttttgtagatgcctcttactcttcttccgtcactcccaagatgctggtgaacctcatggctgagaataaggccatttcttttcatggatgtgctgcccagttctacttctttggctccttcctggggactgagtgcttcctgttggccatgatggcatatgaccgctatgcagccatttggaaccccctgctctacccagttctcgtgtctgggagaatttgctttttgctaatagctacctccttcttagcaggttgtggaaatgcagccatacatacagggatgacttttaggttgtccttttgtggttctaataggatcaaccatttctactgtgacaccccgccactgctcaaactctcttgctctgatacccacttcaatggcattgtgatcatggcattctcaagttttattgtcatcagctgtgttatgattgtcctcatttcctacctgtgtatcttcattgccgtcttgaagatgccttcgttagagggcaggcacaaagccttctccacctgtgcctcttacctcatggctgtcaccatattctttggaacaatcctcttcatgtacttgcgccctacatctagctactcaatggagcaagacaaggttgtctctgtcttttatacagtaataatccctgtgctaaatcccctcatctatagtttaaaaaataaggatgtaaaaaaggccctaaagaagatcttatggaaacacatcttgtag

SEQ ID NO: 394009 - DNA, 1000 bp, Homo Sapiens; identical to SEQ ID NO: 115255

SEQ ID NO: 394010 - DNA, 512 bp, Homo Sapiens; identical to SEQ ID NO: 115256

SEQ ID NO: 394011 - DNA, 1000 bp, Homo Sapiens
tgtcagcgaaagaaaggcatctagttgagataaaacaaaaactcggcatgaacctgatgaatgaattaaaacagaacttcagcaaaagctggcatgacatgcagactaccactgcctacaagaaaacacatgaaaccctgagtcacgcagggcaaaaggcaactgcagctttcagcaacgttggaacggccatcagcaagaagttcggagacatgagttactccattcgccattccataagtatgcctgctatgaggaattctcctactttcaaatcatttgaggagagggttgagacaactgtcacaagcctcaagacgaaagtaggcggtacgaaccctaatggaggcagttttgaggaggtcctcagctccacggcccatgccagtgcccagagcttggcaggaggctcccggcggaccaaggaggaggagctgcagtgctaagtccagccagcgtgcagctgcatccagaaaccggccactacccagcccatctctgcctgtgcttatccagataagaagaccaaaatcccgctgggaaaaacccaggccttgacattgttattcaaatggcccctccagaaagtttaatgatttccatttgtatttgtgttgatgatggaccacttgaccatcacatttcagtattcatagatgactgtcacattttaaaatgttcccacttgagcaggtacacaactggtcataattcctgtctgtgtaattcgatgtatatttttccaaacatgtagctattgtttgctttgatttttgcttggcctcctttatgatgtgcatgtccttgaaggctgaatgaacagtccctttcagttcagcagatcaacaggatggagctcttcatgactgtctccagcaataggatgatttactataaatttcatccaactacttgtgatctctctcacctacatcaattatgtatgttaatttcagcaattaaaagaattgattttaatgacaaaaaaaaaaaaaaaaaa

SEQ ID NO: 394012 - DNA, 1000 bp, Homo Sapiens; identical to SEQ ID NO: 284125

SEQ ID NO: 394013 - DNA, 1000 bp, Homo Sapiens; identical to SEQ ID NO: 115257

SEQ ID NO: 394014 - DNA, 1000 bp, Homo Sapiens; identical to SEQ ID NO: 220681

SEQ ID NO: 394015 - DNA, 1000 bp, Homo Sapiens; identical to SEQ ID NO: 284127

SEQ ID NO: 394016 - DNA, 1000 bp, Homo Sapiens; identical to SEQ ID NO: 284128

SEQ ID NO: 394017 - DNA, 1000 bp, Homo Sapiens; identical to SEQ ID NO: 220682

SEQ ID NO: 394018 - DNA, 1000 bp, Homo Sapiens; identical to SEQ ID NO: 115258

SEQ ID NO: 394019 - DNA, 1000 bp, Homo Sapiens; identical to SEQ ID NO: 220683

SEQ ID NO: 394020 - DNA, 1000 bp, Homo Sapiens; identical to SEQ ID NO: 220684

SEQ ID NO: 394021 - DNA, 1000 bp, Homo Sapiens; identical to SEQ ID NO: 284132

SEQ ID NO: 394022 - DNA, 1000 bp, Homo Sapiens; identical to SEQ ID NO: 284133

SEQ ID NO: 394023 - DNA, 1000 bp, Homo Sapiens; identical to SEQ ID NO: 115259

SEQ ID NO: 394024 - DNA, 1000 bp, Homo Sapiens; identical to SEQ ID NO: 115260

SEQ ID NO: 394025 - DNA, 1000 bp, Homo Sapiens; identical to SEQ ID NO: 115261

SEQ ID NO: 394026 - DNA, 1000 bp, Homo Sapiens
caacgccagcagctccctctgccctatgaacagcttaagcacttttaccgaaaaccttctccccaggcagaggagatgctgaagaagaaacctcgggccaccactgaggtgagcagcaggaaatgccaacaagccctggcagaactggagagtgtcctcagccacctggaggacttctttgcacggacactagtaccgcgagtgctgattctccttgggggcaatgccctaagccccaaggagttctatgaactcgacttgtctctgctggccccctacagcgtggaccagagcctgagcacagcagcttgtttgcgccgtctcttccgagccatattcatggctgatgcctttagcgagcttcaggctcctccactcatgggcaccgtcgtcatggcacagggacaccgcaactgtggagaagattggtttcgacccaagctcaactatcgagtgcccagccggggccataaactgactgtgaccctgtcatgtggcagaccttccatccgaaccacggcttgggaagactacatttggttccaggcaccagtgacatttaaaggcttccgcgagtgaatgagtgcttcttaatcctaaaaacacaatggctgaattatctttctccatgtggcgctgaatcacccatctggtttggagctagagttgcttcctggtgagagaggaagcaactctccttctggttgtctgcctcccctcagatttcctgataggctgatggcatgtggctgtgactgtgactgtaatcattgctgaacaacatctctttgaatcaaaggttgattttcccagagggtgctgggtcaggcatttctattaggagttggaaagcaaaaatgggtccatagacactctatggaggtgtccctttctgctctttgctgtgtcctttcagaatttttaccaggaacataatgtggatgtgacttatgaacttaaatataaaataaatagattcttattatattttcctgaaaaa

SEQ ID NO: 394027 - DNA, 1000 bp, Homo Sapiens; identical to SEQ ID NO: 284139

SEQ ID NO: 394028 - DNA, 1000 bp, Homo Sapiens; identical to SEQ ID NO: 115262

SEQ ID NO: 394029 - DNA, 1000 bp, Homo Sapiens
ccaggggctggggtccaggcatctgtggactcaaggagtccaggtgacggtgttgcgctgcctcttgagcagcctcgtgcctgtctcctttgctacatgtgatgattctgaaatccaggcagcaggctggaataaacgctgctggtatgtctgtattggctactgttctttgaataagtgaatgtttctttattgcataactggcgtgtagcacaaagaaaaagccccttctccaccagatatttgcttcctaagaatagttctcattggaggctgaggtcgaagcagcctcccaccagcgatcccttggggcgggcacctggcagtgagggacagagctagtggggtgggctcagcagaagtgggtgcatttctgcaaaggaagctgtaggtttcttgtcagtttgttgtggggtctgaggcacatgggagtgggaccagcagaaaagatactcaggtcagttaactaatgaggcggggctgtggcagccagcggttttcctctcttctctatctgtagctactttctctgggctgcagccttgaaaaagcagtgtttgattattcataacaatgagtgtcttttagtgtcacagggaacagttattaggtttgaagcaacctccagcttgaggcctcggcatcttgagatggaagagcagccttgtgtttagacctggattgaattgggccctgttgtttcctgggatcttggggctgggggtgcccaacagcctggcatcttcttgtttctctgtgtgtttactcattcattcatttattcagctgataaatattgactgatgccagctctgtgccagacacattggacatgggggatacactagtgggcagaaatagccccgtcccagagccggccatggtggctcatacctgttataccagcactttgggaggctgaagtgggaggatcgcttgagcctgggagttcaagaccagcctgggcaacatggcaagaccctgtctctactaaaaatac

SEQ ID NO: 394030 - DNA, 1000 bp, Homo Sapiens
gtttatttgcagaaacacctttgaccacccataccccaccacaaagctcatgtggatccctgacacaaaaggcgtctatccagacctactggcaacaagcggtgactatctccgtgtgtggagggttggtgaaacagagaccaggctggagtgtttgctaaacaataataagaactctgatttctgtgctcccctgacctcctttgactggaatgaggtggatccttatcttttaggtacctcaagcattgatacgacatgcaccatctgggggctggagacagggcaggtgttagggcgagtgaatctcgtgtctggccacgtgaagacccagctgatcgcccatgacaaagaggtctatgatattgcatttagccgggccggggggtggcagggacatgtttgcctctgtgggtgctgatggctcggtgcggatgtttgacctccgccatctagaacacagcaccatcatttacgaagacccacagcatcacccactgcttcgcctctgctggaacaagcaggaccctaactacctggccaccatggccatggatggaatggaggtggtgattctagatgtccgggttccctgcacacctgtcgccaggttaaacaaccatcgagcatgtgtcaatggcattgcttgggccccacattcatcctgccacatctgcactgcagcggatgaccaccaggctctcatctgggacatccagcaaatgccccgagccattgaggaccctatcctggcctacacagctgaaggagagatcaacaatgtgcagtgggcatcaactcagcccgactggatcgccatctgctacaacaactgcctggagatactcagagtgtagtgttggtggcgctgtgcccacgaggcaggggcttttgtatttcctgcctctgccccacccccaaacctcctgtataagaagtaccgtattttctgcccatcatactttgtaataaaacttgaacatgtatagattgactgaaa

SEQ ID NO: 394031 - DNA, 1000 bp, Homo Sapiens
cacattgcaatctaggcgaacaagaatccgaggtggctgccgagtcctcgtcactgttgggggacgcccaggccttactgagaagtcccttagcagagacatcttgtatagagaccctgaaaatggatggagcaagcttacggaaatgccagccaaaagttttaatcagtgtgtggctgtgatggatggatttctttatgtagccggtggtgaagaccagaatgatgcaagaaatcaagccaagcatgcagtcagcaatttctgcagatacgatccccgcttcaacacctggatacacctggccagcatgaaccagaagcgcacgcacttcagcctgagcgtgttcaacgggctcgtgtacgccgcgggcggccgcaacgcagaaggaagcctggcctcgctggagtgctacgtgccctccaccaatcagtggcagccgaagacgcccctggaggtggcgcgctgctgccacgctagcgcggtcgccgacggccgcgtgctggtgaccggaggctacatagccaacgcctactcgcgctctgtgtgcgcctacgacccggccagcgactcgtggcaggagctgccgaacctcagcacaccccggggctggcactgcgcggtcacgctgagcgacagagtgtacgtgatgggcggcagccagctggggccgcgcggggagcgcgtggacgtgctcaccgtggagtgctacagccccgcgaccggccagtggagctacgcggcgccgctgcaggtgggagtgagcactgcgggcgtctcggcgctgcatggccgcgcctacctggtggggggctggaacgagggcgagaagaagtacaagaagtgcatccagtgcttcagccccgagctcaacgagtggacggaggacgacgagctacccgaggccactgtcggcgtgtcctgctgcaccctctcgatgcccaacaacgtgactcgggaatcccgggccagttcggtatcttctgtgccagtcagtatctga

SEQ ID NO: 394032 - DNA, 556 bp, Homo Sapiens
tgacccacttccgttacttgctgcggaggaccgtgggcagccagggtcggtgaaggatcccaaaatggctgggcgaaaacttgctctaaaaaccattgactgggtagcttttgcagagatcataccccagaaccaaaaggccattgctagttccctgaaatcctggaatgagaccctcacctccaggttggctgctttacctgagaatccaccagctatcgactgggcttactacaaggccaatgtggccaaggctggcttggtggatgactttgagaagaaggtgaaatcttgtgctgagtgggtgtctctctcaaaggccaggattgtagaatatgagaaagagatggagaagatgaagaacttaattccatttgatcagatgaccattgaggacttgaatgaagctttcccagaaaccaaattagacaagaaaaagtatccctattggcctcaccaaccaattgagaatttataaaattgagtccaggaggaagctctggcccttgtattacacattctggacattaaaaataataattatacagttaaaaaa

SEQ ID NO: 394033 - DNA, 1000 bp, Homo Sapiens; identical to SEQ ID NO: 115265

SEQ ID NO: 394034 - DNA, 1000 bp, Homo Sapiens
tctacattgagctgtttggactggaaaatgatttttcccaggaatcttcataaaagggaccctgagcaagaacatttttcatagcagacaggaggactcatccacatcgccagcaatcataattaagcaaaccgccttttgcaccatttaagatttaggaaatcatccaaattacttttaatgtttctgcagtagaaaatgaatctaaattcattttatagggtttgtagtcttttatctgttttggattcactgtgcttttaagaaaaagttggtaaatttgccgttgatttttctttttaacctcaaactaatagaattttataaaatattaattttctctagccattgtcttaggacttgtgacattacatgaacatttcaaagcactgaaaaaagacaaaggatccctaatgtccctgaagaggaaattaaaatacaaagttgtttttcattagcaaacttcttactttcttacagctaaacttggtagcttagtgaagtacagctgcttgtatggaggagctggggaaatatatttgctttgaaacttttttatttttacatctcagtcttgctagcaagcactacttggcttagaatctgtcatatccataaaggaggagctcatgtctctagtcctggcccttcaactcagaaggttcttctatactttccttctctcaggactcttatagcccagactttaaacatgaagctgcataattttcatcacttcttactctgccgcatcctctttgcccatgttattaaagtattatctaatactttgaagtttacctgaagaacctctttgtgtgtacttagtaatacaactttttttcctgtcccaacaccttttaatacagttgaatggataaaaacatggatacaaacacatggatatagttatcactgaagcagtgtgacataaaataatacctatgtatacaacactcctctgtaaatagcaaatgtaaagtaaaagatacacaacaga

SEQ ID NO: 394035 - DNA, 1000 bp, Homo Sapiens; identical to SEQ ID NO: 220688

SEQ ID NO: 394036 - DNA, 1000 bp, Homo Sapiens; identical to SEQ ID NO: 115266

SEQ ID NO: 394037 - DNA, 1000 bp, Homo Sapiens; identical to SEQ ID NO: 220689

SEQ ID NO: 394038 - DNA, 1000 bp, Homo Sapiens; identical to SEQ ID NO: 116323

SEQ ID NO: 394039 - DNA, 1000 bp, Homo Sapiens; identical to SEQ ID NO: 284147

SEQ ID NO: 394040 - DNA, 1000 bp, Homo Sapiens; identical to SEQ ID NO: 220690

SEQ ID NO: 394041 - DNA, 1000 bp, Homo Sapiens; identical to SEQ ID NO: 284149

SEQ ID NO: 394042 - DNA, 1000 bp, Homo Sapiens
gtatttggtcccggaacaaagcttatcattacagataaacaacttgatgcagatgtttcccccaagcccactatttttcttccttcaattgctgaaacaaagctccagaaggctggaacatacctttgtcttcttgagaaatttttccctgatgttattaagatacattggcaagaaaagaagagcaacacgattctgggatcccaggaggggaacaccatgaagactaacgacacatacatgaaatttagctggttaacggtgccagaaaagtcactggacaaagaacacagatgtatcgtcagacatgagaataataaaaacggagttgatcaagaaattatctttcctccaataaagacagatgtcatcacaatggatcccaaagacaattgttcaaaagatgcaaatgatacactactgctgcagctcacaaacacctctgcatattacatgtacctcctcctgctcctcaagagtgtggtctattttgccatcatcacctgctgtctgcttagaagaacggctttctgctgcaatggagagaaatcataacagacggtggcacaaggaggccatcttttcctcatcggttattgtccctagaagcgtcttctgaggatctagttgggctttctttctgggtttgggccatttcagttctcatgtgtgtactattctatcattattgtataacggttttcaaaccagtgggcacacagagaacctcactctgtaataacaatgaggaatagccacggcgatctccagcaccaatctctccatgttttccacagctcctccagccaacccaaatagcgcctgctatagtgtagacatcctgcggcttctagccttgtccctctcttagtgttctttaatcagataactgcctggaagcctttcattttacacgccctgaagcagtcttctttgctagttgaattatgtggtgtgtttttccgtaataagcaaaataaatttaaaaaaatgaaaagtt

SEQ ID NO: 394043 - DNA, 1000 bp, Homo Sapiens; identical to SEQ ID NO: 220691

SEQ ID NO: 394044 - DNA, 1000 bp, Homo Sapiens
tttgacccctctattctgcctcctccggacccctggattgactctatcactgaagaccctctggaggccgtgcaaaggtcagtgtgccaccgggatggccactggttcctgaagcttctccaggcagagcgagaccgcatggaggggtggtgtcaacagatggagcgggaagaacgggaaaacaacctgcccgaagacattctaggaaaaatccgaaccgcagtgggcagtgcccaacttctcatggcccagaaattctaccagttcagagaactgtgtgaagaaaacctgaatcctaatgctcatccaagacccacctcccaggatttggcggggttttgggacatgctgcagttgtccatagaaaatattagtatgaaatttgatgaacttcatcagttaaaggccaataattggaaacagatggatcctcttgacaagaaggagagaagggcccctcctccagtgccaaagaagccggcgaagggccccgcgccgctgatccgggagcgctcgctggagagctcgcagcgccaggaggcccgcaagcgcctgatggccgccaagcgcgccgcgtccgtccgccagaactcggccaccgagagcgccgagagcatcgagatctacatccccgaggcgcagacccggctctgagcgccccgcagcccggccgccgccgccaagcatctgtcccctcctcccccggccgctcctctgccggctgcctctccccctccgagcccgtccgctcccgagctcggtgacttccactgtcgcggtgtagttgtccacctcgcaggagccgccccccgggcccccctcagccccccacttcccgtacccgtttgcccatctccttcttcaccgagcttcgccccctgtcctgatgccgtcgccctgcctcatactgagatccaaccctttattttctgggcaaagccaaacccacctgtgtagaagtgatgcctttaggtcacccgccgtcctcagttctctcgag

SEQ ID NO: 394045 - DNA, 1000 bp, Homo Sapiens; identical to SEQ ID NO: 220692

SEQ ID NO: 394046 - DNA, 1000 bp, Homo Sapiens; identical to SEQ ID NO: 288012

SEQ ID NO: 394047 - DNA, 1000 bp, Homo Sapiens; identical to SEQ ID NO: 284153

SEQ ID NO: 394048 - DNA, 1000 bp, Homo Sapiens
aatttgcttaattataattgcagtgctttttcttatctgtacctttctatttctatcaactgtggttttggcaaacaaagtctcttctctcagacgatcaaaacaagtaggcaagcgtcagcctagaagcaatggcgattttctggcaagcggtctatggcccgctgaatcagacacttggaaaagaacaaaacagctcacaggacccaacctagtgatgcaatctactggagtgctcacagctacaagggaaagaaaagatgaagaaggaactgaaaaacttactaacaaacagataggttagtgaagaaaaatgcaaagtagcaatgagaaggcttatggagtaaaaatgaagtcagttggtatttaatcccaaagtgttgttctgattatctaaaatttgacatggtagaccttgcaatttagaatcaagcaggtgagacagggagaagtatgcctgcttaattatttaaactgtgtacttttgttttgacactgaatattttaaaaagcaaataataaaataactaagcatttgaggaaaattttaaggataaattgaggaaactgattaatagagatagcaagggataattaaataaatattccctatgtagcaacagtggttagatgatctttgtctgaatgtaattaaactttgaatagttttagtgtgtccttaaagccaagtatatgctttaacatcaaatggaagtcaaattcctaatgcatagatagagagagctaaactgtgtaatttaatggtatcttccttgctggatgtggcagaatccacaccagcttatcaaccaacacagctaattttagaatagatcctttatctttccatatggcacacgtaagaaagtgtttttctactattaatattaaattaaaacctttacttttgtataataaattaaaactcagaataaacctgtgaccacgtaaaaaaaaaaaaaaaaaaaaaaaaaaaaaaaaaaaaaaaaaaaaaaaaaaa

SEQ ID NO: 394049 - DNA, 1000 bp, Homo Sapiens; identical to SEQ ID NO: 284154

SEQ ID NO: 394050 - DNA, 480 bp, Homo Sapiens
agaattcggcacgaggcctggtgtaatcatggtacagattattaaagacacgaatgaatttaaaacatttttgacagctgccggacacaaactcgcagtggttcaattttcttcgaaacggtgtggtccctgcaaaaggatgtttcctgttttccatgctatgtctgtgaaataccaaaatgtattttttgctaatgtggatgtgaacaattctccggagctggctgaaacttgtcacatcaaaacaatacccacatttcagatgttcaagaaaagccagaaggtaaccctattctcaagaatcaaaagaataatttgctgttatagaagtggattcatgagcaacctgtgtcttgcagatgatggaaatgagtaggatttaacttttcaatcaggaataaaattccttaaagcctcaacattttcgcagcacttgaatcaataaatgtttcacctttgtgcatttgtgaaaaaaaaaaa

SEQ ID NO: 394051 - DNA, 1000 bp, Homo Sapiens
caaggttaatatgttggtgttcttgacaagtaccaggctttctcagccacaaccagtggattcattcaaaatctaggtacctttatttgcctcccttcctgaacctaatgaagtgccagagtgagtgtacactttcttttctctcatctctcataaatctcttctgtcttcctttaaaaaaaacaaaagtagtagttcagaaacatccgcagaagcaggctttttagtttcttggctctctttgtcatgtccagaggcaggctgttctgtaaaatagactgccagacctcttattgcccattctcctttcttctcagcccctcacccctctttagcaattcctagagggtttaaaggactacagagctgtatggaatgaaaggtgatttctagttcagagtggatagaagaactaaagagattgtgatgggtgctctaggcagggaaaactgaacaaaaaggcagaaatgattcaggggaaaatcgggcctagaatttacactgggttgactagttatgatgggaagagaagtacttttttttagtatgcacgtagaagaatagaagatggttggagtgttaaatatgttccctagagaagggttctttgaagaaacactgcaattttgggtgttctctttcttgtttgcatatggccttacttatgtggaagattaatactgtgttataatattttctctttctgtttactgggaagattcagctgtacagattttcttttactttcaaatagaaatatttggaataatatcagtctttcttttttgtacattatgtggatatggatattcatggcagttttcagcctgttcttgtttctgttaaagccgtatctttaacattttaatttgaataacttggtcttacctgatgctgaagactggaaactattgtgttcatgggtaaataaattacaaaatattaaaaaaaaaaaaaaaaaaaaaaaaaaaaaaaaaaaaaaacaaaaaaaaaaaaaaaa

SEQ ID NO: 394052 - DNA, 1000 bp, Homo Sapiens
tggagcagtgccagtggatccggcagaagtttgagacccctgggatcatgcagttcacaaatgaggagaaacggaccctgctggccaggcttgtgcggtccaccaggtttgaggagttcctacagcggaagtggtcctctgagaagcgctttggtctagaaggctgcgaggtactgatccctgccctcaagaccatcattgacaagtctagtgagaatggcgtggactacgtgatcatgggcatgccacacagagggcggctgaacgtgcttgcaaatgtcatcaggaaggagctggaacagatcttctgtcaattcgattcaaagctggaggcagctgatgagggctccggagatgtgaagtaccacctgggcatgtatcaccgcaggatcaatcgtgtcaccgacaggaacattaccttgtccttggtggccaacccttcccaccttgaggccgctgaccccgtggtgatgggcaagaccaaagccgaacagttttactgtggcgacactgaagggaaaaaggtaaggcccagagagaggcgtgcaaggcagatcgtcaaggccccatgttccagcatggagttccgctcaccaacataacccagagccctgggtgcatctagactttaaaaaaatatttaaagtcggccgggcgcagtgtctcacgcctgtaatcccagcactttgggaggccgaggtgggcagatcacctgagttcgggagttggagaccagcctgaccaacatggagaaactccatctctactaaaaatacaaaattagctgggcgtggtggcgcgcgcctgtaatcccagctactcaggaggctgaggcaggagaatcgcttgaacccgggaggtggaggttgcagtgagccgagattacgccattgcactccagcctgggccaacaagagcgaaactctgtctcaaagaaaaaaataaataaataaaaaatatatgtatatgtaaaaaaaaaaaaaaaaaaaaaaaaaaaaaa

SEQ ID NO: 394053 - DNA, 1000 bp, Homo Sapiens; identical to SEQ ID NO: 220693

SEQ ID NO: 394054 - DNA, 1000 bp, Homo Sapiens
agatgtcaaaggtgatacaagtggaaacctaaaaaaaatcctggtgtctctgctgcaggctaatcgcaatgaaggagatgacgtggacaaagatctagctggtcaggatgccaaagatctgtatgatgcaggggaaggccgctggggcactgatgagcttgcgttcaatgaagtcctggccaagaggagctacaagcagttacgagccacctttcaagcctatcaaattctcattggcaaagacatagaagaagccattgaagaagaaacatcaggcgacttgcagaaggcctatttaactctcgtgagatgtgcccaggattgtgaggactattttgctgaacgtctgtacaagtcgatgaagggtgcggggaccgatgaggagacgttgattcgcatagtcgtgaccagggccgaggtggaccttcaggggatcaaagcaaagttccaagagaagtatcagaagtctctctctgacatggttcgctcagatacctccggggacttccggaaactgctagtagccctcttgcactgagccaagccagggcaataggaacacagggtggaaccgcctttgtcaagagcacattccaaatcaaacttgcaaatgagactcccgcacgaaaacccttaagagtcccggattactttcttggcagcttaagtggcgcagccaggccaagctgtgtaagttaagggcagtaacgttaagatgcgtgggcagggcaccttgaactctggcttagcaagcatctaggctgcctcttcactttcttttagcatggtaactggatgttttctaaacactaatgaaatcagcagttgatgaaaaaactatgcatttgtaatggcacatttagaaggatatgcatcacacaagtaaggtacaggaaagacaaaattaaacaatttattaattttccttctgtgtgttcaatttgaaagcctcattgttaattaaagttgtggattatgcctctaaaaaaaaaaaaaaaaa

SEQ ID NO: 394055 - DNA, 482 bp, Homo Sapiens; identical to SEQ ID NO: 284157

SEQ ID NO: 394056 - DNA, 1000 bp, Homo Sapiens
ggcgcagttcaaccaaggtcattgactttgggtccagctgtttcgagtaccagaagctctacacatatatccagtctcggttctacagagctccagaaatcatcttaggaagccgctacagcacaccaattgacatatggagttttggctgcatccttgcagaacttttaacaggacagcctctcttccctggagaggatgaaggagaccagttggcctgcatgatggagcttctagggatgccaccaccaaaacttctggagcaatccaaacgtgccaagtactttattaattccaagggcataccccgctactgctctgtgactacccaggcagatgggagggttgtgcttgtggggggtcgctcacgtaggggtaaaaagcggggtcccccaggcagcaaagactgggggacagcactgaaagggtgtgatgactacttgtttatagagttcttgaaaaggtgtcttcactgggacccctctgcccgcttgaccccagctcaagcattaagacacccttggattagcaagtctgtccccagacctctcaccaccatagacaaggtgtcagggaaacgggtagttaatcctgcaagtgctttccagggattgggttctaagctgcctccagttgttggaatagccaataagcttaaagctaacttaatgtcagaaaccaatggtagtatacccctatgcagtgtattgccaaaactgattagctagtggacagagatatgcccagagatgcatatgtgtatatttttatgatcttacaaacctgcaaatggaaaaaatgcaagcccattggtggatgtttttgttagagtagactttttttaaacaagacaaaacatttttatatgattataaaagaattcttcaagggctaattacctaaccagcttgtattggccatctggaatatgcattaaatgactttttataggtcaatgcaaaaaaaaaaaaaaaaaaaaaaaaaaaaaaaaaaaaaaaaa

SEQ ID NO: 394057 - DNA, 1000 bp, Homo Sapiens; identical to SEQ ID NO: 115267

SEQ ID NO: 394058 - DNA, 1000 bp, Homo Sapiens; identical to SEQ ID NO: 287813

SEQ ID NO: 394059 - DNA, 1000 bp, Homo Sapiens
cgttttctatgctgcagagctgtgttgcggcttggaagatttacagagggaaagaattgtatacagagacttgaagcctgagaatattctccttgatgatcgtggacacatccggatttcagacctcggtttggccacagagatcccagaaggacagagggttcgaggaagagttggaacagtcggctacatggcacctgaagttgtcaataatgaaaagtatacgtttagtcccgattggtggggacttggctgtctgatctatgaaatgattcagggacattctccattcaaaaaatacaaagagaaagtcaaatgggaggaggtcgatcaaagaatcaagaatgataccgaggagtattctgagaagttttcagaggatgccaaatctatctgcaggatgttactcaccaagaatccaagcaagcggctgggctgcaggggcgagggagcggctggggtgaagcagcaccccgtgttcaaggacatcaacttcaggaggctggaggcaaacatgctggagccccctttctgtcctgatcctcatgccgtttactgtaaggacgtcctggatatcgagcagttctcggtggtgaaagggatctacctggacaccgcagatgaagacttctatgctcggtttgctaccgggtgtgtctccatcccctggcagaatgagatgatcgaatctgggtgtttcaaagacatcaacaaaagtgaaagtgaggaagctttgccattagatctagacaagaacatacataccccggtttccagaccaaacagaggcttcttctatagactcttcagaagagggggctgcctgaccatggtccccagtgagaaggaagtggaacccaagcaatgctgagcaccccggtgcggaccacagagcagaccctggcgccaggaaggagcatgtgttagcgtctcgtcccacctggaattgtaataaatacatctaaataaaacatgccttgggagtgtacagacaaaaaaa

SEQ ID NO: 394060 - DNA, 1000 bp, Homo Sapiens
tttagaaaacagacaaaatttccttttagaataaaaggaagtgttgaaaagaaaatggatgactagccttcggcttccattcttggtatacatgagagaggctggctgctgagatgaatgtgaaccaggttgcagagaatctggctttgagccaccaggaagaactagtggatttgccaaaaaactaccccttgagtgaaaatgaagatgagggggacagtgatggagagagaaagcatcaaaagcttctggaagcaatcatttcccttgatggaaagaataggcggaaattggctgagaggtctgaggctagtctgaaagtgtcagagttcagtgtcagttctgaaggatcaggagaaaagctgggccttgcagatctgcttgagcccgttaaaacttcatcttctttggccactgtaaaaaagcaactgaatagagtcaaatcaaagaaggtggtggagttacctcttaacaaagaaaaaattgaacagatccacagagaagtagcattcagtaaaacctcacaggtcctctccaaatgggaccctatcatcctgaagaaccagcaggcagagcagctggtttttcccctggggaaggagcagccagccattgctcccattgaacatgcgctcagtggctggaaggcaagaactcccctggagcaggaaatttttaacctcctccataagaacaagcagccagtgacagatcctttactgactcccatggaaaaggcctctctccaagccatgagcctggaagaggcaaagatgcaccgagcagagcttcagagggctcgggctctgcagtcctactatgaggccaaggctcgaaaagagaagaaaatcaaaagtaaaaagtatcacaaagtcgtgaagaaaggaaaggccaagaaagccttaaaagagtttgagcagctacagaaggttaatccaactgtggcactggaaaaaaaaaaaaaaaaaaaaaaaaaaaaaaaaaaaaaaaaaaaaaaaaa

SEQ ID NO: 394061 - DNA, 954 bp, Homo Sapiens
atgctaaggaatggcagcatagtgacggaatttatcctcgtgggctttcagcagagctccacttccacacgagcattgctctttgccctcttcttggccctctacagcctcaccatggccatgaatggcctcatcatctttatcacctcctggacagaccccaagctcaacagccccatgtacttcttcctcggccatctgtctctcctggatgtctgcttcatcaccactaccatcccacagatgttgatccacctcgtggtcagggaccacattgtctcctttgtatgttgcatgacccagatgtactttgtcttctgtgttggtgtggccgagtgcatcctcttggctttcatggcctatgaccgttatgttgctatctgctacccacttaactatgtcccgatcataagccagaaggtctgtgtcaggcttgtgggaactgcctggttctttgggctgatcaatggcatctttctcgagtatatttcattccgagagcccttccgcagagacaaccacatagaaagcttcttctgtgaggcccccatagtgattggcctctcttgtggggaccctcagtttagtctgtgggcaatctttgccgatgccatcgtggtaattctcagccccatggtgctcactgtcacttcctatgtgcacatcctggccaccatcctcagcaaagcctcctcctcaggtcgggggaagactttctctacttgtgcctctcacctgactgtggtcatctttctctacacttcagctatgttctcttacatgaacccccacagcacacatgggcctgacaaagacaaacctttctccctcctgtacaccatcattacccccatgtgcaaccccatcatttatagtttccgcaacaaggaaattaaggaggccatggtgagggcacttggaagaaccaggctggcccagccacagtctgtctag

SEQ ID NO: 394062 - DNA, 1000 bp, Homo Sapiens; identical to SEQ ID NO: 220397

SEQ ID NO: 394063 - DNA, 1000 bp, Homo Sapiens
ccacctgctcttcccacctcaccgtggtgtgcatgtattacaccgctgtcttctacgcctacataagcccggtctctggctacagcgcagggaagagcaagttggctggcctgctgtacactgtgctgagtcctaccctcaaccccctcatctatactttgagaaacaaggaggtcaaagcagccctcaggaagcttttccctttcttcagaaattaacttgtgtcttctgaagtttttgtccttggagactgcagttttagtggagtctgatgagcaagtttctggactgggaggtaaatagacttgttttttctaacccagcagaacctgtgcatggatgagctgggagtgctggttccctgagacttggtgatggggggattgcggtaggtgtgacccaccagcctctgagacaccagatctcttggtctgactccaaggtggtgtcagtgctgagttggcagagaaacacagggcctaggaggagaaaagtgttccttgtgttttcaactcatagccacatcaaacattttccttttgtatgtacaacactcagggtgtaaattctaaaatcacacctagaattcagctgtgtgggtctaaaaagttaggcagaattgtggaccccacagcccctgaagggttgtcagactgaagctttgttttaaggtgaccactggcctctaggaaaccttctacccccattatcttacctcaactgtttcctctggagccacttggacttcaaaaatagtttgattttaatgcaaactgttgtttctgcttttgtcttttcttcttactaacacttcagatcctgagtatctgacctacctaattggcctggagcgaggacagctgccatgagtcagctctaataagctaaacggcattgtagtaaggcattgctatccttccattgtttcagataaaactgggtgaacgaatcctctgtgtctaataaagacaggtcttgtgcttgtgctccatgctattac

SEQ ID NO: 394064 - DNA, 1000 bp, Homo Sapiens; identical to SEQ ID NO: 284164

SEQ ID NO: 394065 - DNA, 1000 bp, Homo Sapiens; identical to SEQ ID NO: 284165

SEQ ID NO: 394066 - DNA, 1000 bp, Homo Sapiens; identical to SEQ ID NO: 220696

SEQ ID NO: 394067 - DNA, 1000 bp, Homo Sapiens; identical to SEQ ID NO: 220698

SEQ ID NO: 394068 - DNA, 1000 bp, Homo Sapiens; identical to SEQ ID NO: 220699

SEQ ID NO: 394069 - DNA, 1000 bp, Homo Sapiens
aaataatctgagactatgagtatctcggggaagttcttacagcattcctgggtaggggagctagtccctggacccttggctgaggtcataggtggggactcaaggtacaggaccaagactgaagtgtggctcccacaaccttggactccagctggcagctgaaatggaaaagattggggaaggggatttgtttgttctgttcttgtttttgtttatccaaaagcaacttcagcgggtaaactgtggatacaggtaatccagaggcataagagtcctggtccaaagtagggactatagctggtccagctctccccaaaaattgggtttttagttgcagtagctcctcagtgtttcacaatcctgcacttcgcctcctttttgaggaagaataaggtcaggaatggcagctgagcttactttggcttccttatacactgtagggacaaaaggaaaaacggggtggagcagacaagggctggatccaaaaagtggatggcacctcttccttcctcaagggaaaaggaagagttgtgccagtgggtgttgtcatggcccatgtcacattggcacctgatggcatcagctcaaatgcctttaggaggaaacttgggtgagagtggcccatgaagcccttttcttctttttttggggagtcggtcttggagatggtatgtggctacctcgctgccattgactcctaaagtgagacagatgtgttgagcaaggagtcatggaagtcaaagtgggttctctctccttgtgccctcttaggaacaacccaagactggtcccaagttggctaacagctgctcaagaaacaaaggaatctggggtcttctgacatgcctgttgagcagtaggagctgttctccctccccaagtcctatcactgtattcaggtagaggagtctgcattgtagtgtctcaaagacacaataaacttcctatggtctgcaaaaaaaaaaaaaaaaaaaaaaaaaaaaaaaaaaaaaaaaaaaaa

SEQ ID NO: 394070 - DNA, 1000 bp, Homo Sapiens; identical to SEQ ID NO: 284169

SEQ ID NO: 394071 - DNA, 1000 bp, Homo Sapiens; identical to SEQ ID NO: 115268

SEQ ID NO: 394072 - DNA, 1000 bp, Homo Sapiens
gccacccttccatagagctatatgttttgtttccatctaaagactcatgctttcccaacaaacagaacctcctggctatttacaaaccagattgaatgggcatttgaatactgcttggaactgttggtccctttttctttgcaggctagcccatcaggcaggtgtatgcttttagccaagcccaccaattccaacttattcctctcttctccaacaaccctacttgaggttccagcatgtcttatagccaagtcaatatgctctaggataaggatttctgaaaggtatttagtgagagttggggatggtgtgtcataattactgtatctgtagcatgtccttgctgccttggacaagggacctggccaaataaatctccactgaagactgacagccagaccctgcagtagtttctaactctagaagcctcaatgtagtcaccatctaggattactactcattgctattgagctctacctttatggaccacctctgaagtccttcatctaattgaggatcttaaaaaacaatgaatggcaaaaaacttcctacactatctcatctgaaaaatcctggggcacatacattaaaaccatttgtgcacaaaactcaggaagtcgggattttattttttatgttttactcttggtacacaccagctttgtgtagattcctgatgcttctgaacaaaagtagtgttatgctagaaaggcaaaactccctaaaatgttaaaactgttcagcaatgatcactgctggtaattaccagccctctgttccctgcttcttgtttctgatgtatgtccccaaaatggatatcctggagaaatatcagtaatcacatattccctagcaaccatcaaggcctctcagaacatgaaatcccattgtactttggctttgtttctggagaattatgctaactttgacaatacttaaacctaactaggaccttactactctgattctgtagcaccaataaatagatattttcaccttg

SEQ ID NO: 394073 - DNA, 1000 bp, Homo Sapiens
aaacatcagagaacccacacaggggagagaccctatgagtgcccagagtgtggaaagacttttgggcggaagccacacctcataatgcaccaaagaacccacacaggcgagaagccctacgcgtgcctggaatgtcacaaaagcttcagtcgaagctcaaatttcatcactcaccagaggacccacacaggggtgaagccttacaggtgtaatgactgtggggagagttttagccagagctcggatttgattaagcaccaacgaacccacacgggagaacggcccttcaaatgcccggagtgcgggaagggcttcagagatagttctcattttgtagctcacatgagcactcattcaggagagaggcctttcagttgtcctgactgccacaaaagcttcagtcagagctcacatttggtcacgcaccaaagaacacacacaggtgagagaccttttaagtgcgaaaactgtgggaaaggattcgccgacagctccgccctcattaagcaccaacgaatccacaccggagaaagaccctacaaatgtggagagtgtgggaagagcttcaatcagagctcccactttattacccatcagcgaatccacttaggagacaggccctatcgatgtcctgagtgtggcaagaccttcaatcagcgttcccatttcctcacacaccagagaacgcatacaggagaaaaacctttccactgtagtaaatgtaacaagagcttccgtcagaaagcgcatcttttatgccatcaaaacacccatttgatttaggaagtagtctttggtgttcagctgctcccttgcacattttcattgctactgtcttcaagcaccccaaatagagaaaacctgggcgtcagtggctcaatttgggccctgatctattctccctctttcttgtctatgttataacagagaggataaacttaaagggtccaaataacggtccgaatacaaaaggcattccttcaaaaaaaaaaaaaaaaaa

SEQ ID NO: 394074 - DNA, 1000 bp, Homo Sapiens; identical to SEQ ID NO: 115269

SEQ ID NO: 394075 - DNA, 1000 bp, Homo Sapiens
cagagacatgaagagacacattctgttaatatgcattcagttatcctaattcctttgaaacacagaaaaagagtagggaaaggacctctgagataactgttttctgagttgagaagagctacttgtgaatggacaattaaatctagatgtatttagatctgatacaattcatctgtagccaacctttttttaaatttttttattttttagatggagtcttgctctgtcgcccagactggagtgcagtggcacgatctggctcactgcaacctccgcctcctgggtttaagcaattctcctgcctcagcctcccaagtagctgggattacaggtaaccgccatcacgcctggctaattttagagatggagtttcaccatgttggccaggctggtctcaaactcctgacctcaagtgatccacccacctcggcctcccaaagtgctgggattacaggcgtgagccactgcgccctgccacctatagccaatcttaatgagatttcataggcacagacaaggaaggttatcagtcacatattagaggcaccacacagggagagcagtgtgtggccacatgcttcagcccattttttctgattctcttgcttgcaaattaagagtattctccaaatcacttgactttccttttctcagagttatagttctccagagatgtcaccagatgattcacattaaaggtacatttccagttgacttttttatttcagatattagtaaatgattaccagagaactaattcaaactgtcatggttggaaatactctgatgctcaactccctaatctatagagtgagttaaggtctatactcttttgcaagcattgttctagtggcagtgaccctgttcatgattcagcctgacatttactatgctgccctgaaaaccaactagatgggagcttgtttctctctgcattgtgtagtgagtggtgtcacccaggactttcatgtgagaaaaagcaccttgcttttaatctggg

SEQ ID NO: 394076 - DNA, 1000 bp, Homo Sapiens; identical to SEQ ID NO: 284173

SEQ ID NO: 394077 - DNA, 1000 bp, Homo Sapiens; identical to SEQ ID NO: 284174

SEQ ID NO: 394078 - DNA, 1000 bp, Homo Sapiens; identical to SEQ ID NO: 284175

SEQ ID NO: 394079 - DNA, 1000 bp, Homo Sapiens
aggctgaccaaggaggtgatgagctcctacatccaaagcgagtttgcaagtgtctgcacctccaactcaatcttggacctcttccgaaccccggccacccgcaaggtcacatgctgtctcatggtgatttgcgtggcaggcagcgcagttccggctctggggagcaagggggctcctgcgaacccgagtccaggaatgggcgtcttcctgcggtagcccctgccggcctgggcttgcccttcgtccaccttcctctttccgcgagggagaaacagatcctgagttcaaaattccagagctgaaagtcctctcttggatccttctggaaacagtaagcaaaagcccgtttttgctgagaaagtgactcggcagctatccggagctctctgcctgcaggtggggccattctcctatggagccgacccgacccgctcaaagctgccccgggagccgcaggtttggttcgcgcacgccgggacttgccaaccgcacccggaaaatcggggccatgtccaaatgtttcgcttcgctgccggcagggagccgcgccgggctcgctcctgggatcaactgcacagtcctggctttggggagcgggaggcggtgagcctgcccgccccccggccccttcctcaccagtgtgtctggggtgaggtggggatggggagtcctggggttcgaaaaaggatgggggaggagaaagaggaagtgttaggaactggtgaactttcacaaacttccacaaaccctattgtaaatgccttcaattaactgggatttttttctttactggttgattgatttaagacaaggtcttgctcgggcaacagagcgagacagagtgtctcaagagaaaaaaaaaaaggattaatactctacctcttctgcttttgtttttttaataacttaatcacatctgtaaaaacttttacaacattacatgtaaccagcttccggcatgtgatagctttgcaataaatatttgatgagtgaatgaacc

SEQ ID NO: 394080 - DNA, 1000 bp, Homo Sapiens; identical to SEQ ID NO: 284176

SEQ ID NO: 394081 - DNA, 1000 bp, Homo Sapiens; identical to SEQ ID NO: 284177

SEQ ID NO: 394082 - DNA, 1000 bp, Homo Sapiens
ttttaacaccttagctcagcagtcctcaacaaatgagccactgctagatacatacactgagaatatatatttaaaatgaacctaacaagcaaattagaagaatttctgtatataactattagtatccttaatctccaagtctctggaccatcgggccatcatgagggagagacccatttaactaataattattttttgatctcttctctgtaaagatgggcctagaccagggtttgcaaaataaaatgcctttaagagcctgtcaggtaaatagagggtatggcccacccagagatatttgagtcaagtaatttttcaaatactgtattggccaaacaaaatgtctatgccaagaagtttgtgacctctggctaagactaaagaaagccgtggtgtcacagttcttaaaatttttctaactggacttaaaaccacaatactaacagaatcaatgatgatttctgtttgcgcttctagttagggactcaattttccacttaggtggcatacactttatatatcaggttatttttatgtattaacaaacaccacacagatgttttgtgttttttgactaccctgaaattgtatctttctaaaattgcatttctggtaacgatttgccgagttaatccagaagtttttactccaggaccaagaagaaattatgtttcactttgaaggaaatgcaacaaaaataggaaatgatgtggttttgcattaaactcttatcaatctgtggacaagaaacactatcagaagttcattaagtggcattttgttagtgagtaagctgcataatgatggtggcttctaatttgctgaactccgctagagtctgagaagttaacgtcttttgagggtttagtgtttagaaaagatatttcaggagataacggttttaatcaacagcaggaaattattttgtacgagtagaattggacttggtatgtcaacctgtgtctttaccacatgatcttttacttaaaagtcattttag

SEQ ID NO: 394083 - DNA, 1000 bp, Homo Sapiens; identical to SEQ ID NO: 115270

SEQ ID NO: 394084 - DNA, 1000 bp, Homo Sapiens; identical to SEQ ID NO: 284179

SEQ ID NO: 394085 - DNA, 616 bp, Homo Sapiens; identical to SEQ ID NO: 284180

SEQ ID NO: 394086 - DNA, 1000 bp, Homo Sapiens; identical to SEQ ID NO: 115271

SEQ ID NO: 394087 - DNA, 1000 bp, Homo Sapiens; identical to SEQ ID NO: 284181

SEQ ID NO: 394088 - DNA, 1000 bp, Homo Sapiens; identical to SEQ ID NO: 284182

SEQ ID NO: 394089 - DNA, 1000 bp, Homo Sapiens
tggccacttcagctctgccagtgacgtgtggagcttcggcatcatcatgtgggaggtgatggcctttggggagcggccttactgggacatgtctggccaagacgtgatcaaggctgtggaggatggcttccggctgccaccccccaggaactgtcctaaccttctgcaccgactaatgctcgactgctggcagaaggacccaggtgagcggcccaggttctcccagatccacagcatcctgagcaagatggtgcaggacccagagccccccaagtgtgccctgactacctgtcccaggcctcccaccccactagcggactgtgccttctccaccttcccctcctttggctctgtgggcgcgtggctggaggccctggacctgtgccgctacaaggacagcttcgcggctgctggctatgggagcctggaggccgtggccgagatgactgcccaggacctggtgagcctaggcatctctttggctgaacatcgagaggccctcctcagcgggatcagcgccctgcaggcacgagtgctccagctgcagggccagggggtgcaggataataaaaacttgtctgtgatatggtgcctctttgagtggcagttgcttgatcattgtatagctggtgtggaagggcttctgcccccttcctcgaggacaggggtgtccagaatctgcgtctgagatctctctgcatagagggatttactgtcccacagctctggaggctggaagccaagatcaagatgtgcgcaaggttgtttcctgctgagagctgtgaggggagcttctgctctgggcctctctccccggcttgcctgtggccatcttcccactctctcttcgcatcatcttccctctatgccattgagtgtaagatgtcctaccaagaaagaaacatcacagccaactatgttgtgccatccaactgaaagatgcatcccagtttcagagatgttaacatgtacgtcttcaataaatgagatgccgcgcatc

SEQ ID NO: 394090 - DNA, 1000 bp, Homo Sapiens; identical to SEQ ID NO: 284183

SEQ ID NO: 394091 - DNA, 1000 bp, Homo Sapiens
ccttcactcctcccctcccgccccctctgccctccaactggacctgtctctcggggcccttcttgcctcctctcccgtcagagcagcagctcccaggggcttttaagccagacatcctgctcccaggacctaggagcctaccaggggcctggcattttccagggcttcctctcttggcagggctgggacagggtgcgggtgagaggctttggctcttgtccctcaggcccgaggggctggaagtaaagcctgctcccatgatggaggcaaagggaggcctggatcccagggaggtcttctgcccagagacccgcagactcaaaactggggaggaaagccttacttcccccaatctggagaacctcaaagcagtgtggcccttggatcctccttaactagagaggaaggtgggaagttggggaggagtcctccaaagtccatctctcctcttgcccaccgcctctgggttagtcccttcccctggctggacatgggctgaaattgcaggatttgaaggggtggagttggacccaaggtggggagcattgcagggaaggtgtgaatgtggaaatgggaaaaaccaagacagggtgcccctcctctttcaccatattgctaagcagactaaggggacattcctaatctcaacttttcttcagggagacgagaataaagtttctataatttccatcctgcccacataagggggaaaattaagggtctagcctggggagaggacaggggtggttgtgttccctgagtcttgtctggggcccatctccccattccaggctaaggtctccagtccctttctcacccctccatgcaacttctctcccatccctctgatttctgagaccctagaaacccctgtcccatgcaggcacttcctcctctctccatttccccaggacccaggcaagtggggtggggagacactggccttctctgctctgtaatactccactgtgaccatgaataaaatgcccttgcaaactgt

SEQ ID NO: 394092 - DNA, 1000 bp, Homo Sapiens; identical to SEQ ID NO: 284184

SEQ ID NO: 394093 - DNA, 1000 bp, Homo Sapiens
gtagtggagcgctaccccagggagacgttcctgcccccgctggacaaaaccaagttcctggtcccgcaggagctgaccatgacccagttcctcagcatcatccggagccgcatggtcctgagagccacggaagccttttacttgctggtgaacaacaagagcctggtcagcatgagcgcaaccatggcagagatctacagagactacaaggatgaggatggcttcgtgtacatgacctacgcctcccaggagacatttggctgcctggagtcagcagcccccagggatgggagcagccttgaggacagaccctgcaatcctctctagcccatgtcgggaaggatgtgtgctctgacagacgtgtcagatgctggcagaagggattggttttctcctgtgtatacagtggaggagtctgagaagcagggatgcctggggtgatcagctccaaccagtggcagcagagtggtggctcttcctagtttagtttttgtgctccgtgttcttgtgtccttctaagaaaaatgtgggctgctcttgaaagttatataattatcatttttttttttttgaaacagggtcttgctctattgcctaggctggagcacagtggcatgatcttggctcactgcaacctccgcctcctgggttcaagtgattcttctgcctccaccccccgagtggctggtattacaagcacatgccaccacaccaggctaatttttgtatttttagtagagacggggtttcaccatgttggccaggctggtctcgaactcctgacctcaggtgatccacccacctcggcctcccaaagtgctgggattacaggcgtgagccactgcatccagccatataaccgtattctaaataagaaatggttggcttgtgtgatggttttgtgtaatgagctagagataatattttaagtgtcttctgtggtatatgtgggagggccattaaggagtgggtttcactccctgcatgtgggcaggtgtcc

SEQ ID NO: 394094 - DNA, 744 bp, Homo Sapiens
agcgggttgccgacccccatgtgcagcactgtctggactctagaagatgctctgattcaagaggatgtaaagaaattctctaagccgataagaaaaatagaagaaacccaaatgggcaatgagtgcatgggaactcactcacctcagtggaaaggagggaatggcaagccagcccactgaagcccactggggacataggacaagtccgcaaagcagagacagcccctccaggaagagcgaccaggccttgagaggacatggccttaggaccagatccagggaagacacagtcactaacccctggctcatctggcaggtgtgggaagcagccaggcccgtggcttcaccagctccccccgatctctgccttcagctgtcctgcagcctgggtcaggcacctaggcagctttatggcaggcggagatgcaccacccacatcctctttccaggcagggcttgctgccctggctgtagcgagtgcggcagcaggtggcctccagctatcagcaacttcagagagctgccttgcctgaggtcccgtcccttctggggaagctcccatctgccagggggctacaaaagcacagtggacaccatgatgggcaattctggctgatgggagcaccacctggtggctgaggcattcttgggccacatagcagttgactgccctctccaccatcttttcacaagtgttaatcccaataaacacccatcctcttccatcccaaaaaaaaaaaaaaa

SEQ ID NO: 394095 - DNA, 1000 bp, Homo Sapiens
gaccaaaggctgggagcaactgggagtgtctgggaacactttctggttgtcacagtgatcagcagccaggagcagcctgcaatgtgaagacagtcctgtgggacagtcctaggctacagggaactgtcctgcatcctgcatgtcttataaacatcctactggacgtcgatgtttgactgtgccccaaggaagccacacaaactgtgtagccagacagtctgtctgggaggagaaggaaggaatttatctaccagctcccatctctcatggaccaaattcttccccactgtactccagcctgggtgaaagagcaagatgtcgtctcaaaaaaaaaaaaattgtttactttccagtgtcattttaacttgttactagtgagcatctggcctgggtgttttccattagcatgaaaattcagaaggctacagaaggaaatacctataattgagcagcgagagagccacttcattctgtggccaggcaatatgtcttgcatttctctagtgtaaataaaatgatgattcaaagaatggtccccattaatgagtatctgatttagaataaaacaaaatccatgctgggaagttgatgagcttgattttgctgaattgctttgagcttgcagcttatatttattggttctttcctttcgacaattgtcaccagttgtctgctgttctttcgggagagggcttgaaggttgattttagttccctgtaactggaggtgacatgtgaaagctcaaagctattgaaaagttgcaaaggcttccacacacaactgcagtagggagggcgcaggaagtgggtcaacgcttttggaggactgggtgaagttcaggatcctgaggccctactttttggtcgcccagggtgagagctgaatgtaggctccaacaggaagacggcattgaagcctggttgcttgttactactcagaatgccatctacaaaaggaaattatgtaaaaagcaataaagaaccccttttgttcttgcagg

SEQ ID NO: 394096 - DNA, 1000 bp, Homo Sapiens; identical to SEQ ID NO: 284185

SEQ ID NO: 394097 - DNA, 1000 bp, Homo Sapiens; identical to SEQ ID NO: 284186

SEQ ID NO: 394098 - DNA, 1000 bp, Homo Sapiens; identical to SEQ ID NO: 284187

SEQ ID NO: 394099 - DNA, 1000 bp, Homo Sapiens; identical to SEQ ID NO: 284188

SEQ ID NO: 394100 - DNA, 1000 bp, Homo Sapiens
taaaatttcaggtacaaattatattgagtttttatattttatccctaccagcctaatagaagatttcagtcagaaattacaatgagttaaagaaaatgaagaaagcttgtttgcttcgatccctggatacatctggattcatacccaatacatatttgatgcctcaattaattcctacaacagaactacaaaaaaagaaattcctctaccccttattacagatagaaaacctagaaagaaaaatttaagtagtttcttaagatagcacagctagtttatgatggtgctgggagtcaaccctaagtcttttcaaatctaaaatcatcatatctgttatcctgtagtacccatatcacaaggttgagtaggctgggaaaaatctgctattggccaatctgactctttttaagttactatgaatctgggatgcactcttgcctcttcatgtgagtagagagacaaagcagatctttggtgttcggtctcaaaagtaaactctactaaataatatatttcataaacacaacaaaacaccaaattggactcctcataagcattttatagcctaatttcttcgcatagttctgctttgtagtgattctgaaaggacaaatcccatgaggaataaagatctatctgtagtaattgagaaattttctgaagattagagacttagctgctttgaagaaaactttggcaagccccaggagtcaagaaatcagctgggaatagttcaggggcactcactggcgctccacatgcattggaaggaggctggcaccaaatggttgcccaaagagctgccagtcgagattggcacttgtgcaccaagactaagggggaagcaagttgcaagacagtggtgccagctggaaaaatactgcctgtgaaaagaaggagatgagcttctatggaggtaccaaacaataatttctgaagtgtatacaaggatggctgaagtgtggacatgagactggaaacagaggcagggcaatgatgc

SEQ ID NO: 394101 - DNA, 1000 bp, Homo Sapiens
atcccagttggcctcaggttacagacgggcaccccccaggagtccctgcccacctacacccagaccctgagggaactattgctggagcaacgccccctgatcacggctgacctggaagtccccagccccaccaggtaccaggtgccaagcccgtccgtacgagagtcctccccacacccccactacagcatcggctgcaagcaccagggccgagagggcggtggccgcagggcatggcagactttgtggttccagagcgaaagccccttcacgcagaaagctgacttcgaccaagagcaaaagtggccctcgccagcccactaccagctgctcagccggccggccttccccgccttcagcttcagaggctgccactccgcttccaagacacctgaaggccacacccacctagggctgcctggggctagggggctgggcctcagggtgcagccccagtccctgcttcaggcctctttgcaggcacctggcaagagatgccctggccccaacacctacaatatccttcctgggagccgcctgcagagcccccgctcgccggccttctcgatgagccgctcccctgcgttcacctcctggctcagcacctggctcccagccttctctttcggcagcccgaacccctggcccagccgcctaccacgtggaggactgcaactcacgcttcccttcggcgcctggcgtggtcatccagggtgtacgcagacccaagcgccacgacacaggccccttctgcacgctctagagccagctgggcacaacctgcttggcccggccaccgagtggaaccatggcctcccccggggctttcccaggcctcccctgggacttggggccccagcctggccttctgaccctctgggcaccccgatgcacccttctggctggccaacccttctatgggctgtggacaaggctggcccagcctggatcccccatctgcccatctccccgctacactgagatgctgttggttttcccg

SEQ ID NO: 394102 - DNA, 1000 bp, Homo Sapiens; identical to SEQ ID NO: 220700

SEQ ID NO: 394103 - DNA, 1000 bp, Homo Sapiens; identical to SEQ ID NO: 284189

SEQ ID NO: 394104 - DNA, 1000 bp, Homo Sapiens; identical to SEQ ID NO: 115272

SEQ ID NO: 394105 - DNA, 1000 bp, Homo Sapiens; identical to SEQ ID NO: 284191

SEQ ID NO: 394106 - DNA, 1000 bp, Homo Sapiens; identical to SEQ ID NO: 220398

SEQ ID NO: 394107 - DNA, 1000 bp, Homo Sapiens; identical to SEQ ID NO: 115273

SEQ ID NO: 394108 - DNA, 1000 bp, Homo Sapiens; identical to SEQ ID NO: 115274

SEQ ID NO: 394109 - DNA, 1000 bp, Homo Sapiens; identical to SEQ ID NO: 284193

SEQ ID NO: 394110 - DNA, 1000 bp, Homo Sapiens
gtgcggcgggtgccgtggagtggatgtacccaacaggtgctctcatcgttaacctgcggcccaacaccttctcgcctgcccggcacctgaccgtgtgcatcaggtccttcacggactcctcgggggccaatatttatttggaaaaaactggagaactgagactgctggtaccggacggggacggcaggcccggccgggtgcagtgttttggcctggagcagggcggcctgttcgtggaggccacgccgcagcaggatatcggccggaggaccacaggcttccagtacgagctggttaggaggcacagggcgtcggacctgcacgagctgtctgcgccgtgccgtccctgcagtgacaccgaggtgctcctagccgtctgcaccagcgacttcgccgttcgaggctccatccagcaagttacccacgagcctgagcggcaggactcagccatccacctgcgcgtgagcagactctatcggcagaaaagcagggtcttcgagccggtgcccgagggtgacggccactggcaggggcgcgtcaggacgctgctggagtgtggcgtgcggccggggcatggcgacttcctcttcactggccacatgcacttcggggaggcgcggctcggctgtgccccacgcttcaaggacttccagaggatgtacagggatgcccaggagagggggctgaacccttgtgaggttggcacggactgactccgtgggccgctgcccttcctctcctgatgagtcacaggctgcggtgggcgctgcggtcctggtggggccgtgcggtgagggccgcgcgctgggagccgcatgccctgggcccaggcctgaccctggtaccgaagctgtggacgttctcgccacactcaaccccatgagcttccagccaaggatgccctggccgattggaaatgctgtaaaatgcaaactaagttattatatttttttttggtaaaaaagaaatgtccataggaaacaaaaaaaaaaaaaaaaaa

SEQ ID NO: 394111 - DNA, 1000 bp, Homo Sapiens
ggtgtctcatgctgctctttgactgtttcagcttgaacatgcattttctaaagcaaactgcactagtgtatatatcagggacattaaagtctgggactggggctcaatagctgcggatacagtgttcaaagaagttcttgtttctaaactgattagaacttctagctaatgctcaggtgagatcatagcttaaatacattgaaaaaactaaagtaccacaatagctgtatttttcccaatccccttaacgatcataaaagaggcaagttaagtatttctggcactgaagaaatatcttttttctttgattcatttttgaataaatataaaatgaataactattaaggtagaaaatattctcagaacattctagaggaggtaaaggttagtaggagggcgttggccatctctacattttgtgaggtgagagaaaactaatgtttactttctgctgtgaactgaactgcagctatagaatgtttcaaatgcttaaatatataatacatttttttccatggaagtgagggaatatttcagtttcctgaagtatgacacaaatactcatatactgtcttttagagtcagtatagttggagctgttttcatttagtgctttgataatgatttacttatttttccaaatttcgtttgaattttctttcatatgattgcattgatctatgcagcatttaccagaaaagagtattcctgggatagcagaatgcataacactgagtgttaattcttgtgaaataaataagctagactgccttctctttaattagacatattttaaagtatttattatagttgtcaactagtaactcaatgaaaaagttgatgcccaagggagaaatgagaattagcttaattgctgcctttaatgtgtttttgaggaacttaaaattttctttcatgtcgctgatccatattaccaagttcaaataaaatttttataatcggattcagacccataaccaaactaaaaaaaaaaaaaaaa

SEQ ID NO: 394112 - DNA, 1000 bp, Homo Sapiens; identical to SEQ ID NO: 220703

SEQ ID NO: 394113 - DNA, 1000 bp, Homo Sapiens
cacctgaccttggctgccttgcagcctcccactgccacagtgcttgtgcagcagggcacctgcgaggtgattgcggctcaccgctgctgcaaccggaaccgcatcgaggagcgctcccagacggtgaaatgctcctgtttttctggccaggtggccggcaccacgcgggcaaagccctcctgcgtggacgacctgctcttggctgcccactgtgctcgtagagaccctagagctgcactccgcctcctgctcccacagcctccatcgtcctgcagagatggtggtgtcagatggagccctgcctgccgggggaggagtgtaaggtgctcccggacctgtcgggatggagctgcagcagtggacacaaagtcaaaaccaccaaggtcacacgatagctcttgggggtcacggcctggacaagaaaggcttgactgagccgtgaactgaagaatggtatccagtcatcagccaggaaagatggggattcacttacatgcctcatgtcaaatgcagcatcagtctttccggggcatttcagttaagctgctcagcagatatggatggatctgcaatcacatacctaatgtggagctgggcttttctggagacacgaaggtcaacacacaattcctgcccttaaggaatgtccagttgaattggagagttgatgacagacaatttagataatttaggttaaagtacttgataccagactgcggcttctgggccacatgctatggcatgatgggggtttgggaatgagattcccacagttcttcagataccctgtggccacagggcatagaaacaagaggtcacattcagcacccaccacctccctctttcgcatcagttctgaatccccagcaagctgttaacatgttgcaggaaaacactctccccttatgccagaccagcagtatctcatttggatgggattggattgacttgcggaaggaaagtaaaaataaagccaaataacttcccaaaaaaaaaaaaa

SEQ ID NO: 394114 - DNA, 1000 bp, Homo Sapiens; identical to SEQ ID NO: 284195

SEQ ID NO: 394115 - DNA, 969 bp, Homo Sapiens
atgagccctgagaaccagagcagcgtgtccgagttcctcctcctgggcctccccatccggccagagcagcaggccgtgttcttcgccctgttcctgggcatgtacctgaccacggtgctggggaacctgctcatcatgctgctcatccagctagactctcaccttcacacccccatgtacttcttccttagccacttggccctcactgacatctccttttcatctgtcactgtccctaagatgctgatgaacatgcagactcagcacctagccgtcttttacaagggatgcatttcacagacatattttttcatattttttgctgacttagacagtttccttatcacttcaatggcatatgacaggtatgtggccatctgtcatcctctacattatgccaccatcatgactcagagccagtgtgtcatgctggtggctgggtcctgggtcatcgcttgtgcgtgtgctcttttgcataccctcctcctggcccagctttccttctgtgctgaccacatcatccctcactacttctgtgaccttggtgccctgctcaagttgtcctgctcagacacctccctcaatcagttagcaatctttacagcagcattgacagccattatgcttccattcctgtgcatcctggtttcttatggtcacattggggtcaccatcctccagattccctctaccaagggcatatgcaaagccttgtccacttgtggatcccacctctcagtggtgactatctattatcggacaattattggtctctattttcttcccccatccagcaacaccaatgacaagaacataattgcttcagtgatatacacagcagtcactcccatgttgaacccattcatttacagtctgagaaataaagacattaagggagccctaagaaaactcttgagtaggtcaggcgcagtggctcatgcctgtaatctcaacactttgggaggctga

SEQ ID NO: 394116 - DNA, 1000 bp, Homo Sapiens; identical to SEQ ID NO: 284198

SEQ ID NO: 394117 - DNA, 993 bp, Homo Sapiens; identical to SEQ ID NO: 284200

SEQ ID NO: 394118 - DNA, 939 bp, Homo Sapiens
atggagccgctcaacagaacagaggtgtccgagttctttctgaaaggattttctggctacccagccctggagcatctgctcttccctctgtgctcagccatgtacctggtgaccctcctggggaacacagccatcatggcggtgagcgtgctagatatccacctgcacacgcccgtgtacttcttcctgggcaacctctctaccctggacatctgctacacgcccacctttgtgcctctgatgctggtccacctcctgtcatcccggaagaccatctcctttgctgtctgtgccatccagatgtgtctgagcctgtccacgggctccacggagtgcctgctactggccatcacggcctatgaccgctacctggccatctgccagccactcaggtaccacgtgctcatgagccaccggctctgcgtgctgctgatgggagctgcctgggtcctctgcctcctcaagtcggtgactgagatggtcatctccatgaggctgcccttctgtggccaccacgtggtcagtcacttcacctgcaagatcctggcagtgctgaagctggcatgcggcaacacgtcggtcagcgaagacttcctgctggcgggctccatcctgctgctgcctgtacccctggcattcatctgcctgtcctacttgctcatcctggccaccatcctgagggtgccctcggccgccaggtgctgcaaagccttctccacctgcttggcacacctggctgtagtgctgcttttctacggcaccatcatcttcatgtacttgaagcccaagagtaaggaagcccacatctctgatgaggtcttcacagtcctctatgccatggtcacgaccatgctgaaccccaccatctacagcctgaggaacaaggaggtgaaggaggccgccaggaaggtgtggggcaggagtcgggcctccaggtga

SEQ ID NO: 394119 - DNA, 951 bp, Homo Sapiens
atggagctctggaacttcaccttgggaagtggcttcattttggtggggattctgaatgacagtgggtctcctgaactgctctgtgctacaattacaatcctatacttgttggccctgatcagcaatggcctactgctcctggctatcaccatggaagcccggctccacatgcccatgtacctcctgcttgggcagctctctctcatggacctcctgttcacatctgttgtcactcccaaggcccttgcggactttctgcgcagagaaaacaccatctcctttggaggctgtgcccttcagatgttcctggcactgacaatgggtggtgctgaggacctcctactggccttcatggcctatgacaggtatgtggccatttgtcatcctctgacatacatgaccctcatgagctcaagagcctgctggctcatggtggccacgtcctggatcctggcatccctaagtgccctaatatataccgtgtataccatgcactatcccttctgcagggcccaggagatcaggcatcttctctgtgagatcccacacttgctgaaggtggcctgtgctgatacctccagatatgagctcatggtatatgtgatgggtgtgaccttcctgattccctctcttgctgctatactggcctcctatacacaaattctactcactgtgctccatatgccatcaaatgaggggaggaagaaagcccttgtcacctgctcttcccacctgactgtggttgggatgttctatggagctgccacattcatgtatgtcttgcccagttccttccacagcaccagacaagacaacatcatctctgttttctacacaattgtcactccagccctgaatccactcatctacagcctgaggaataaggaggtcatgcgggccttgaggagggtcctgggaaaatacatgctgccagcacactccacgctctag

SEQ ID NO: 394120 - DNA, 951 bp, Homo Sapiens
atggagctccggaactccaccttgggaagcggcttcatcttggtggggattctgaatgacagtgggtctcctgaactgctctatgctacatttacaatcctatacatgttggcactgaccagcaatggtctgctgctcctggccatcaccatagaagcccggctccacatgcccatgtacctcctgcttgggcagctctctctcatggacctcctgttcacatctgttgtcactcccaaggcccttgcggactttctgcgcagagaaaacactatctcctttggaggctgtgcacttcagatgttcctggcactgacaatgggtagcgctgaggacctcctactggccttcatggcctatgacaggtatgtggccatttgtcatcctctgaaatacatgaccctcatgagcccaagagtctgctggatcatggtggccacatcctggatcctggcatccctgattgctataggacataccatgtacactatgcacctccctttctgtgtgtcctgggaaatcaggcatctgctctgtgagatcccacccttgctgaagttggcctgtgctgatacctccaggtatgagcttataatatacgtgacaggtgtgactttcctcttgctccccatttctgccattgtggcctcctacacactagtcctattcactgtgcttcgtatgccatcaaatgaggggaggaagaaagcccttgtcacctgctcttcccacctgattgtggtcgggatgttctatggagctgccacattcatgtatgtcttgcccagttccttccacagccccaaacaagacaacatcatctctgttttctacacaattgtcactccagccctgaatccactcatctacagcctgaggaataaggaggtcatgcgggccttgaggagggtcctgggaaaatacatactgctggcacattccacgctctag

SEQ ID NO: 394121 - DNA, 993 bp, Homo Sapiens; identical to SEQ ID NO: 284201

SEQ ID NO: 394122 - DNA, 939 bp, Homo Sapiens
atgcggctggccaaccagaccctgggtggtgactttttcctgttgggaatcttcagccagatctcacaccctggccgcctctgcttgcttatcttcagtatatttttgatggctgtgtcttggaatattacattgatacttctgatccacattgactcctctctgcatactcccatgtacttctttataaaccagctctcactcatagacttgacatatatttctgtcactgtccccaaaatgctggtgaaccagctggccaaagacaagaccatctcggtccttgggtgtggcacccagatgtacttctacctgcagttgggaggtgcagagtgctgccttctagccgccatggcctatgaccgctatgtggctatctgccatcctctccgttactctgtgctcatgagccatagggtatgtctcctcctggcatcaggctgctggtttgtgggctcagtggatggcttcatgctcactcccatcgccatgagcttccccttctgcagatcccatgagattcagcacttcttctgtgaggtccctgctgttttgaagctctcttgctcagacacctcactttacaagattttcatgtacttgtgctgtgtcatcatgctcctgatacctgtgacggtcatttcagtgtcttactactatatcatcctcaccatccataagatgaactcagttgagggtcggaaaaaggccttcaccacctgctcctcccacattacagtggtcagcctcttctatggagctgctatttacaactacatgctccccagctcctaccaaactcctgagaaagatatgatgtcatcctttttctacactatccttacacctgtcttgaatcctatcatttacagtttcaggaataaggatgtcacaagggctttgaaaaaaatgctgagcgtgcagaaacctccatattaa

SEQ ID NO: 394123 - DNA, 963 bp, Homo Sapiens
atgggaaaggacaatgccagttacctacaggcattcatcctggtgggctcttctgatcggcctggactggagaaaattctctttgctgttatcttgatcttctgcatcctgaccctggtgggcaacactgccatcatcctcttgctggtcatggatgtcaggctccacacacccatgtacttctttcttgggaatctgtctttcttagatctctgctttacagcaagcattgcccctcagctgctgtggaacctggggggtccagagaagaccatcacctaccacggctgtgtggcccaactctacatctacatgatgctgggctccaccgagtgcgtcctcctggttgtcatgtcccatgaccgctatgtggccgtctgccggtccctgcactacatggcagtcatgcgcccacatctctgcctgcagctggtgactgtggcctggtgctgtggcttcctaaactccttcatcatgtgtcctcagacgatgcagctctcccggtgtggacgtcgcagggtggaccacttcctgtgtgagatgcctgctcttattgccatgtcttgtgaggaaaccatgctggtagaagcgattcacctttgccctgggggtggctctcctcctggtgccgctctccctcatcctcatctcctatggcgtgattgcagccgcggtgctgaggatgaagtcagcagcagggcgaaagaaagccttccacacctgctcttctcacctcacagtggtctctctcttctacggaaccatcatctacgtgtacctgaagccggccaacagctactcccaagatcaggggaagttcctgactctcttctacaccatcgtcattcccagcatcaaccccctcatctacactttgaggaacaaggatgtgaaggggaccatgaagaaacttctggggtgggagaaaggggctggggagcctcaacgaggggaacactctag

SEQ ID NO: 394124 - DNA, 1000 bp, Homo Sapiens
tatgagtgatcttttctttctctctacaggtcatccaagagcgagctgtaggatggaggccatgaaactattaaatcaatctcaagtgtcagaattcattttgctgggactgaccagctcccaggatgtagagtttcttctctttgccctcttctcggttatctatgtggtcacagttttgggtaaccttcttattatagtcacagtgtttaacacccctaacctgaatactcccatgtattttctccttggtaatctctcttttgtagatatgacccttgcttcttttgccacccctaaggtgattctgaacttgttaaaaaagcagaaggtaatttcttttgctgggtgcttcactcagatatttctccttcacttactgggtggggttgaaatggtactgttggtctccatggcttttgacagatatgtggccatttgtaagcccctacactacatgaccatcatgaacaagaaggtatgtgttttgcttgtagtgacctcatggctcttgggtctccttcactcagggtttcagataccatttgctgtgaacttgcccttttgtggtcccaatgtggtagacagcattttttgtgacctccctttggttactaagcttgcctgtatagacatatattttgtacaggtagtcattgttgccaacagtggcataatctccctgagctgtttcattattttgcttatctcctacagtctgatcctcataaccattaagaaccactctcctactgggcaatctaaagcccgttccactttgactgctcacatcacagtggtgattctcttctttggcccatgcatctttatctacatttggcccttcggcaaccactctgtagataagttccttgctgtgttttataccatcatcactcctatcttgaatccaattatctatactctgagaaacaaagaaatgaagatatccatgaaaaaactctggagagcttttgtgaattctagagaagatacttag

SEQ ID NO: 394125 - DNA, 1000 bp, Homo Sapiens; identical to SEQ ID NO: 115276

SEQ ID NO: 394126 - DNA, 936 bp, Homo Sapiens
atgggcaaggaaaactgcaccactgtggctgagttcattctccttggactatcagatgtccctgagttgagagtctgcctcttcctgctgttccttctcatctatggagtcacgttgttagccaatctgggcatgactgcactgattcaggtcagctctcggctccacacccccgtgtactttttcctcagccacttgtcctttgtagatttctgctactcctcaataattgtgccaaagatgttggctaatatctttaacaaggacaaagccatctccttcctagggtgcatggtgcaattctacttgttttgcacatgtggagtcactgaggtcttcctgctggccgtgatggcctatgaccgctttgtggccatctgtaaccccctgctgtacatggtgaccatgtctcagaagctgcgtgtggagctgacctcttgctgctacttctgtgggacggtgtgttctctgattcactcgtccttagctcttaggatcctcttctatagatctaatgtgattaaccacttcttctgtgatctaccccctctcctaagtcttgcttgctctgatgtcactgtgaatgagacactgctgttcctggtggccactttgaatgagagtgttaccatcatgatcatcctcacctcctacctgctaattctcaccactatcctgaagatacactctgcagagagcaggcacaaagctttctccacctgtgcctcccacctcacagccatcactgtctcccatggaacaatcctttacatttattgcaggccgagttcaggcaacagtggagatgttgacaaagtggccaccgtgttctacacagttgtgattcccatgctgaaccccctgatctacagcctgagaaataaggatgtgaacaaagctctcagaaaagtgatgggctccaaaattcactcctag

SEQ ID NO: 394127 - DNA, 924 bp, Homo Sapiens
atgctcaatttcaccgatgtgacagagttcattcttttggggctaacgagccgtcgagaatggcaagttctcttcttcatcatctttcttgtggtctacatcatcaccatggtgggcaatatcggcatgatggtgttaatcaaggtcagtcctcagcttaacaaccccatgtactttttcctcagtcacttgtcatttgttgatgtgtggttttcttccaatgtcacccctaaaatgttggaaaacctgttttcagataaaaaaacaattacttatgctggttgtttagtacagtgtttcttcttcattgctcttgtccatgtggaaatttttattcttgctgcgatggcctttgatagatacatggcaattgggaatcctctgctttatggcagtaaaatgtcaagggttgtctgtattcgactgattactttcccttacatttatggttttctgacgagtctggcagcaacattatggacttacggcttgtacttctgtggaaaaattgagatcaaccatttctactgtgcagatccacctctcatcaaaatggcctgtgccgggacctttgtaaaagaatatacaatgatcatacttgccggcattaacttcacatattccctgactgtaattatcatctcttacttattcatcctcattgccattctgcgaatgcgctcagcagaaggaaggcagaaggccttttccacatgtgggtcccatctgacagctgtcattatattctatggtactctgatcttcatgtatctcagacgtcccacagaggagtctgtggagcaggggaagatggtggctgtgttctataccacagtgatccccatgttgaatcccatgatctacagtctgaggaacaaggatgtgaaaaaggccatgatgaaagtgatcagcagatcatgttaa

SEQ ID NO: 394128 - DNA, 933 bp, Homo Sapiens
atgcctaatttcacggatgtgacagaatttactctcctggggctgacctgtcgtcaggagctacaggttctcttttttgtggtgttcctagcggtttacatgatcactctgttgggaaatattggtatgatcattttgattagcatcagtcctcagcttcagagtcccatgtactttttcctgagtcatctgtcttttgcggacgtgtgcttctcctccaacgttacccccaaaatgctggaaaacttattatcagagacaaaaaccatttcctatgtgggatgcttggtgcagtgctactttttcattgccgttgtccacgtggaggtctatatcctggctgtgatggcctttgacaggtacatggccggctgcaaccctctgctttatggcagtaaaatgtctaggactgtgtgtgttcggctcatctctgtgccttatgtctatggattctctgtcagcctaatatgcacactatggacttatggcttatacttctgtggaaactttgaaatcaatcacttctattgtgcagatccccctctcatccagattgcctgtgggagagtgcacatcaaagaaatcacaatgattgttattgctggaattaacttcacatattccctctcggtggtcctcatctcctacactctcattgtagtagctgtgctacgcatgcgctctgccgatggcaggaggaaggcgttctccacctgtgggtcccacttgacggctgtttctatgttttatgggacccccatcttcatgtatctcaggagacccactgaggaatccgtagagcagggcaaaatggtggctgtgttttacaccacagtaattcctatgttgaatcccatgatctacagtctgagaaataaggatgtaaaagaagcagtcaacaaagcaatcaccaagacatatgtgaggcagtaa

SEQ ID NO: 394129 - DNA, 975 bp, Homo Sapiens
atggctgaagttaatatcatttatgtcactgtattcattctgaaaggaattaccaaccggccagagcttcaggccccgtgctttggggtgtttttagttatctatctggtcacagtgctgggcaatcttgggttgattactttaatcaagattgatactcgactccacacacctatgtactatttcctcagccacctggcctttgttgacctttgttactcctctgctattacaccgaagatgatggtgaattttgttgtggaacgcaacaccattcctttccatgcttgtgcaacccaactgggttgttttctcaccttcatgatcactgagtgtttccttctagcctccatggcctacgattgctatgtcgccatctgtagtcccctgcattattcaacactgatgtcaagaagagtctgcattcaactggtggcagttccatatatatacagcttcctggttgccctcttccacaccgttatcactttccgtctgacttactgtggcccaaacttaattaaccatttctattgtgatgacctccccttcttagctctgtcctgctcagacacacacatgaaggaaattctgatatttgcctttgctggctttgatatgatctcttcctcttccattgtcctcacctcctacatctttattattgccgctatcctaaggatccgctctactcaggggcaacacaaagccatttccacctgtggctcccatatggtgactgtcactattttctatggcacactgatctttatgtacctacagcccaaatcaaatcactccttggacacagacaagatggcttctgtattttacacagtggtgatccccatgttaaaccccctaatctatagtctaaggaacaaagaagtgaaagatgcctcaaagaaagccttggataaaggttgtgaaaacttacagatattaacatttttaaaaataagaaaactttattaa

SEQ ID NO: 394130 - DNA, 954 bp, Homo Sapiens
atgtcccaggtgactaacaccacacaagaaggcatctacttcatcctcacggacatccctggatttgaggcctcccacatctggatctccatccccgtctgctgtctctacaccatctccatcatgggcaataccaccatcctcactgtcattcgcacagagccatctgtccaccagcgcatgtatctgtttctctccatgctggccctgacggacctgggtctcaccctcaccaccctacccacagtcatgcagcttctctggttcaacgttcgtagaatcagctctgaggcctgttttgctcagtttttcttccttcatggattctcctttatggagtcttctgtcctcctggctatgtccgttgactgctatgtggccatctgctgtcccctccattatgcctccatcctcaccaatgaagtcattggtagaactgggttagccatcatttgctgctgtgttctggcggttcttccctcccttttcttactcaagcgactgcctttctgccactcccaccttctctctcgctcctattgcctccaccaggatatgatccgcctggtctgtgctgacatcaggctcaacagctggtatggatttgctcttgccttgctcattattatcgtggatcctctgctcattgtgatctcctatacacttattctgaaaaatatcttgggcacagccacctgggctgagcgactccgtgccctcaataactgcctgtcccacattctagctgtcctggtcctctacattcccatggttggtgtatctatgactcatcgctttgccaagcatgcctctccactggtccatgttatcatggccaatatctacctgctggcacccccggtgatgaaccccatcatttacagtgtaaagaacaagcagatccaatggggaatgttaaatttcctttccctcaaaaatatgcattcaagatga

SEQ ID NO: 394131 - DNA, 855 bp, Homo Sapiens
cctttcctttcagcggagcgcggcggcaagatggcagtgcaaatatccaagaagaggaagtttgtcgctgatggcatcttcaaagctgaactgaatgagtttcttactcgggagctggctgaagatggctactctggagttgaggtgcgagttacaccaaccaggacagaaatcattatcttagccaccagaacacagaatgttcttggtgagaagggccggcggattcgggaactgactgctgtagttcagaagaggtttggctttccagagggcagtgtagagctttatgctgaaaaggtggccactagaggtctgtgtgccattgcccaggcagagtctctgcgttacaaactcctaggagggcttgctgtgcggagggcctgctatggtgtgctgcggttcatcatggagagtggggccaaaggctgcgaggttgtggtgtctgggaaactccgaggacagagggctaaatccatgaagtttgtggatggcctgatgatccacagcggagaccctgttaactactacgttgacactgctgtgcgccacgtgttgctcagacagggtgtgctgggcatcaaggtgaagatcatgctgccctgggacccaactggtaagattggccctaagaagcccctgcctgaccacgtgagcattgtggaacccaaagatgagatactgcccaccacccccatctcagaacagaagggtgggaagccagagccgcctgccatgccccagccagtccccacagcataacagggtctccttggcagctgtattctggagtctggatgttgctctctaaagacctttaataaaattttgtacaaagacaaaaaaaaaaaaaaa

SEQ ID NO: 394132 - DNA, 1000 bp, Homo Sapiens; identical to SEQ ID NO: 117362

SEQ ID NO: 394133 - DNA, 951 bp, Homo Sapiens
atgccgacattcaatggctcagtcttcatgccctctgcgtttatactaattgggattcctggtctggagtcagtgcagtgttggattgggattcctttctctgccatgtatcttattggtgtgattggaaattccctaattttagttataatcaaatatgaaaacagcctccatatacccatgtacatttttttggccatgttggcagccacagacattgcacttaacacctgcattcttcccaaaatgttaggcatcttctggtttcatttgccagagatttcttttgatgcctgtctttttcaaatgtggcttattcactcattccaggcaattgaatcgggtatccttctggcaatggccctggatcgctatgtggccatctgtatccccttgagacatgccaccatcttttcccagcagttcttaactcatattggacttggggtgacactcagggctgccattcttataataccttccttagggctcatcaaatgctgtctgaaacactatcgaactacagtcatctctcactcttactgtgagcacatggccatcgtgaagctggctactgaagatatccgagtcaacaagatatatggcctattcgttgcctttgcaatcctagggtttgacataatatttataaccttgtcctatgtccaaatttttatcactgtctttcagctgccccagaaggaggcacgattcaaggcctttaatacatgcattgcccacatttgtgtcttcctacagttctaccttcttgccttcttctctttcttcacacacaggtttggttcacacataccaccatatattcatatcctcttgtcaaatctttacctgttagtcccaccttttctcaaccctattgtctatggagtgaagaccaagcaaattcgtgaccatattgtgaaagtgtttttcttcaaaaaagtaacttga

SEQ ID NO: 394134 - DNA, 942 bp, Homo Sapiens
atgcctatagctaacgacacccagttccatacttcttcattcctactgctgggtatcccagggctagaagatgtgcacatctggattggattcccttttttctctgtgtatcttattgcactcctgggaaatgctgctatcttctttgtgatccaaactgagcagagtctccatgagcccatgtactactgcctggccatgttggattccattgacctgagcttgtctacggccaccattcccaaaatgctgggcatcttctggttcaatatcaaggaaatatcttttggaggctacctttctcagatgttcttcatccatttcttcactgtcatggagagcatcgtattggtggccatggcctttgaccgctacattgccatttgcaaacctctttggtacaccatgatcctcaccagcaaaatcatcagcctcattgcaggcattgctgtcctgaggagcttgtacatggtcattccactggtgtttctcctcttaaggttgcccttctgtggacatcgtatcatccctcatacttactgtgagcacatgggcattgcccgtctggcctgtgccagcatcaaagtcaacattatgtttggtcttggcagtatttctctcttgttattggatgtgctccttattattctctcccatatcaggatcctctatgctgtcttctgcctgccctcctgggaagctcgactcaaagctctcaacacctgtggctctcacattggtgttatcttagccttttctacaccagcatttttctctttctttacacactgctttggccatgatattccccaatatatccacattttcttggctaatctatatgtggttgttcctcccaccctcaatcctgtaatctatggggtcagaaccaaacatattagggagacagtgctgaggattttcttcaagacagatcactaa

SEQ ID NO: 394135 - DNA, 966 bp, Homo Sapiens
atgctaacactgaataaaacagacctaataccagcttcatttattctgaatggagtcccaggactggaagacacacaactctggatttccttcccattctgctctatgtatgttgtggctatggtagggaattgtggactcctctacctcattcactatgaggatgccctgcacaaacccatgtactacttcttggccatgctttcctttactgaccttgttatgtgctctagtacaatccctaaagccctctgcatcttctggtttcatctcaaggacattggatttgatgaatgccttgtccagatgttcttcatccacaccttcacagggatggagtctggggtgcttatgcttatggccctggatcgctatgtggccatctgctaccccttacgctattcaactatcctcaccaatcctgtaattgcaaaggttgggactgccaccttcctgagaggggtattactcattattccctttactttcctcaccaagcgcctgccctactgcagaggcaatatacttccccatacctactgtgaccacatgtctgtagccaaattgtcctgtggtaatgtcaaggtcaatgccatctatggtctgatggttgccctcctgattgggggctttgacatactgtgtatcaccatctcctataccatgattctccgggcagtggtcagcctctcctcagcagatgctcggcagaaggcctttaatacctgcactgcccacatttgtgccattgttttctcctatactccagctttcttctccttcttttcccaccgctttggggaacacataatccccccttcttgccacatcattgtagccaatatttatctgctcctaccacccactatgaaccctattgtctatggggtgaaaaccaaacagatacgagactgtgtcataaggatcctttcaggttctaaggataccaaatcctacagcatgtga

SEQ ID NO: 394136 - DNA, 853 bp, Homo Sapiens; identical to SEQ ID NO: 284208

SEQ ID NO: 394137 - DNA, 939 bp, Homo Sapiens
atggacacagggaactggagccaggtagcagaattcatcatcttgggcttcccccatctccagggtgtccagatttatctcttcctcttgttgcttctcatttacctcatgactgtgttgggaaacctgctgatattcctggtggtctgcctggactcccggcttcacacacccatgtaccactttgtcagcattctctccttctcagagcttggctatacagctgccaccatccctaagatgctggcaaacttgctcagtgagaaaaagaccatttcattctctgggtgtctcctgcagatctatttctttcactcccttggagcgactgagtgctatctcctgacagctatggcctacgataggtatttagccatctgccggcccctccactacccaaccctcatgaccccaacactttgtgcagagattgccattggctgttggttgggaggcttggctgggccagtagttgaaatttccttgatttcacgcctcccattctgtggccccaatcgcattcagcacgtcttttgtgacttccctcctgtgctgagtttggcttgcactgatacgtctataaatgtcctagtagattttgttataaattcctgcaagatcctagccaccttcctgctgatcctctgctcctatgtgcagatcatctgcacagtgctcagaattccctcagctgccggcaagaggaaggccatctccacgtgtgcctcccacttcactgtggttctcatcttctatgggagcatcctttccatgtatgtgcagctgaagaagagctactcactggactatgaccaggccctggcagtggtctactcagtgctcacacccttcctcaaccccttcatctacagcttgcgcaacaaggagatcaaggaggctgtgaggaggcagctaaagagaattgggatattggcatga

SEQ ID NO: 394138 - DNA, 981 bp, Homo Sapiens
atggggttcttgtctcccatgcatccctgcaggcctcccacccagaggagaatggctgcaggaaatcactctacagtgacagagttcattctcaagggtttaacgaagagagcagacctccagctccccctctttctcctcttcctcgggatctacttggtcaccatcgtggggaacctgggcatgatcactctaatttgtctgaactctcagctgcacacccccatgtactactttctcagcaatctgtcactcatggatctctgctactcctccgtcattacccctaagatgctggtgaactttgtgtcagagaaaaacatcatctcctacgcagggtgcatgtcacagctctacttcttccttgtttttgtcattgctgagtgttacatgctgacagtgatggcctacgaccgctatgttgccatctgccaccctttgctttacaacatcattatgtctcatcacacctgcctgctgctggtggctgtggtctacgccatcggactcattggctccacaatagaaactggcctcatgttaaaactgccctattgtgagcacctcatcagtcactacttctgtgacatcctccctctcatgaagctgtcctgctctagcacctatgatgttgagatgacagtcttcttttcggctggattcaacatcatagtcacgagcttaacagttcttgtttcttacaccttcattctctccagcatcctcggcatcagcaccacagaggggagatccaaagccttcagcacctgcagctcccaccttgcagccgtgggaatgttctatggatcaactgcattcatgtacttaaaaccctccacaatcagttccttgacccaggagaatgtggcctctgtgttctacaccacggtaatccccatgttgaatcccctaatctacagcctgaggaacaaggaagtaaaggctgccgtgcagaaaacgctgaggggtaaactgttttga

SEQ ID NO: 394139 - DNA, 939 bp, Homo Sapiens
atggaacaacacaatctaacaacggtgaatgaattcattcttacgggaatcacagatatcgctgagctgcaggcaccattatttgcattgttcctcatgatctatgtgatctcagtgatgggcaatttgggcatgattgtcctcaccaagttggactccaggttgcaaacccctatgtacttttttctcagacatctggctttcatggatcttggttattcaacaactgtgggacccaaaatgttagtaaattttgttgtggataagaatataatttcttattatttttgtgcaacacagctagctttctttcttgtgttcattggtagtgaactttttattctctcagccatgtcctacgacctctatgtggccatctgtaaccctctgctatacacagtaatcatgtcacgaagggtatgtcaggtgctggtagcaatcccttacctctattgcacattcatttctcttctagtcaccataaagatttttactttatccttctgtggctacaacgtcattagtcatttctactgtgacagtctccctttgttacctttgctttgttcaaatacacatgaaattgaattgataattctgatctttgcagctattgatttgatttcatctcttctgatagttcttttatcttacctgctcatccttgtagccattctcaggatgaattctgctggcagacaaaaggctttttctacctgtggagcccacctgacagtggtcatagtgttctatgggactttgcttttcatgtacgtgcagcccaagtccagtcattcctttgacactgataaagtggcttccatattttacaccctggttatccccatgttgaatcccttgatctatagtttacgaaacaaagatgtaaaatatgccctacgaaggacatggaataacttatgtaatatttttgtttaa

SEQ ID NO: 394140 - DNA, 1000 bp, Homo Sapiens; identical to SEQ ID NO: 220704

SEQ ID NO: 394141 - DNA, 1000 bp, Homo Sapiens; identical to SEQ ID NO: 284213

SEQ ID NO: 394142 - DNA, 1000 bp, Homo Sapiens
caaataattgtctgtgtcaagcccaagaagtaatctgcacagggaagcagttaaccgaatacccccttgacatacccctgaacacccggaggctgttcctgaacgagaacagaatcactagtttgccagcaatgcatctaggactcctcagtgaccttgtttatttggactgtcagaacaaccggattcgagaggtgatggattataccttcatcggggtcttcaaactcatctaccttgacctcagctccaacaacctaacctcgatctccccattcactttctcggtgctcagcaacctggtgcagctgaacattgccaacaaccctcacctgttatcgcttcacaagttcacctttgccaacaccacctctttgaggtacctggacctcagaaataccggcttgcagaccctggacagtgctgccttataccacctcactactctggagaccctgtttctgagtggaaacccctggaagtgcaactgctctttcctggacttcgccatcttcttaatagtgttccatatggacccctcagatgatctaaatgccacatgtgtggagcccacagagctgacagggtggcccatcacccgggtggggaacccactccgatacatgtgcatcacgcacctagaccacaaagactacatcttcctgctgctcatcggcttctgcatcttcgccgcgggaactgtggctgcctggctcacaggtgtgtgtgctgtgctctaccagaacacccgccacaagtcgagtgaagaagatgaggacgaggccgggactagggtggaagtcagcaggcggatttttcaaacccagacgagctcggtccaggagtcccctcagcttatttagttgccagagaccactatcttatgtgcctcccccaggctccctgctttctctcttgccctccccatcccaccaccttggagctgtcatagagattgaaaccttctagtaaaataaataaaatctctgctggccatttc

SEQ ID NO: 394143 - DNA, 1000 bp, Homo Sapiens; identical to SEQ ID NO: 220705

SEQ ID NO: 394144 - DNA, 1000 bp, Homo Sapiens; identical to SEQ ID NO: 293283

SEQ ID NO: 394145 - DNA, 930 bp, Homo Sapiens
atggagaagaaaaagaatgtgactgaattcattttaataggtcttacacagaaccccataatggagaaagtcacgtttgtagtatttttggttctttacatgataacactttcaggcaacctgctcattgtggttaccattaccaccagccaggctctgagctcccccatgtacttcttcctgacccacctttctttgatagacacagtttattcttcttcttcagctcctaagttgattgtggattcctttcaagagaagaaaatcatctcctttaatgggtgtatggctcaagcctatgcagaacacatttttggtgctactgagatcatcctgctgacagtgatggcctgtgactgctatgtggccatctgcaaacctctgaactacacaaccattatgagccacagcctgtgcattctcctggtggcagtggcctgggtgggaggatttcttcatgcaactattcagattctctttacagtatggctgcccttctgtggccccaatgtcataggccacttcatgtgtgacttgtacccattgttaaaacttgtttgcatagacactcatacccttggtctctttgttgctgtgaacagtgggtttatctgcttattaaacttccttatcttggtggtatcctatgtgatcatcttgagatctttaaagaacaatagcttggaggggaggtgtaaagccctctccacctgtatttctcacatcatagtagttgtcttattctttgtgccctgtatatttgtgtatctgcgctcagtgaccactctgcccattgataaagctgttgctgtattttatactatggtggtcccaatgttaaatcccgtggtctacacactcagaaatgctgaggtaaaaagtgcaataaggaagctttggagaaaaaaagtgacttcagataatgattaa

SEQ ID NO: 394146 - DNA, 948 bp, Homo Sapiens
  misc_feature (100)..(102): n is a, c, g, or t
atgagacagaataacaatattacagaatttgtcctcctgggcttttttcaggatcctggtgtgcaaaaagcattatttgtcatgtttttactcacatatnnngtgacagtggtggggaacctgctcattgtggtggatatattctccagcccttctttgtgttccgcaatgtatttcttccttgcctgcctgtcatttatagatgctgcatattccactaccatttctcccaagttaattgtaggcttattctgtgataaaaagactatttccttccaaggttgcatgggccagctatttatagaccatttctttggtggggctgaggtcttccttctggtggtgatggcctgtgatcgctatgtggccatctgtaagccactgcactatttgaccatcatgaatcgacaggtttgcttccttctgttggtggtggccatgattggaggttttgtacattctgcgtttcaaattgttgtgtacagtctccctttctgtggtcccaatgtcattgttcatttcagttgtgacatgcacccattactggaactggcatgcactgacacctactttataggcctcactgttgttgtcaatagtggagcaatctgtatggtcattttcaaccttctgttaatctcctatggagtcatcctaagctcccttaaaacttacagtcaggaaaagaggggtaaagccttgtctacctgcagctccggcagtaccgttgttgtcctcttttttgtaccctgtattttcatatatgttagacctgtttcaaactttcctactgataagttcatgactgtgttttataccattatcacacacatgctgagtcctttaatatatacgttgagaaattcagagatgagaaatgctatagaaaaactcttgggtaaaaagttaactatatttattataggaggagtgtccgtcctcatgtag

SEQ ID NO: 394147 - DNA, 1000 bp, Homo Sapiens; identical to SEQ ID NO: 284216

SEQ ID NO: 394148 - DNA, 936 bp, Homo Sapiens
atgagaagaaactgcacgttggtgactgagttcattctcctgggactgaccagtcgccgggaattacaaattctcctcttcacgctgtttctggccatttacatggtcacggtggcagggaaccttggcatgattgtcctcatccaggccaacgcctggctccacatgcccatgtactttttcctgagccacttatccttcgtggatctgtgcttctcttccaatgtgactccaaagatgctggagattttcctttcagagaagaaaagcatttcctatcctgcctgtcttgtgcagtgttacctttttatcgccttggtccatgttgagatctacatcctggctgtgatggcctttgaccggtacatggccatctgcaaccctctgctttatggcagcagaatgtccaagagtgtgtgctccttcctcatcacggtgccttatgtgtatggagcgctcactggcctgatggagaccatgtggacctacaacctagccttctgtggccccaatgaaattaatcacttctactgtgcggacccaccactgattaagctggcttgttctgacacctacaacaaggagttgtcaatgtttattgtggctggctggaacctttctttttctctcttcatcatatgtatttcctacctttacattttccctgctattttaaagattcgctctacagagggcaggcaaaaagctttttctacctgtggctcccatctgacagctgtcactatattctatgcaacccttttcttcatgtatctcagacccccctcaaaggaatctgttgaacagggtaaaatggtagctgtattttataccacagtaatccctatgctgaaccttataatttatagccttagaaataaaaatgtaaaagaagcattaatcaaagagctgtcaatgaagatatacttttcttaa

SEQ ID NO: 394149 - DNA, 1000 bp, Homo Sapiens; identical to SEQ ID NO: 220706

SEQ ID NO: 394150 - DNA, 1000 bp, Homo Sapiens; identical to SEQ ID NO: 115278

SEQ ID NO: 394151 - DNA, 1000 bp, Homo Sapiens
caccattgtcgcataattgcaacaaaatccccaaagcaaggcgggggatggggtataaatcacgaggggaagaaaagaaacctctagcttttttttgaaaccaaatgaaaaaggacttgattaagaaggccttttcttgcaaaggcatctttctgggttccaaaaacttggggaaaaatcagtcccagaaatgtggaaagtgctaatagaagctgaagctgcagtctagcagcaacagtttctccggagccgcagaccccagaagccataacgaaaaattactccggttaaaacaagcaaatgcgttgccgcgcttgcgacttaccccgagtatagacgtggccatagcaggtctctggctgcgcagcgaggctgggagcggggctgagcctggcggctgctcggaaaaactgcttgggtcccgcgcggctcccgcgtccccgcgctcgtgccgagcggactccaggctcccgccggctaaactcagcctaagtgcgaggagcacccgctttgaagtgccgctggctgcgcctctcgcccaatgagggcgcaggcagagcagaccggagctgccccgcagccaatcagacgctccgaggggcccgagcccgggctcccggcgcgtgccagtcaagtcagctagctagggccgcgggggtgggggggagtagtgggggatacttgcggtgggggacgagggcgggctggggactgaagaaattacagtgcaattaaaaatttacactcacgcaccaagccaggtttaagtaccaatgaaaccgagccacaagcacccccccacacacaaaccaccccgagatgttgcaagttagggctgacagtcctactcgactccccacttgtaggaaaggaggcaggaggggaggagacacccagacacagcccgcaccagcagggcccaagtggagacggaaatgtgagccctcactttgtgtgtccaggcttttgcctacagaacacaacttcagcttgtatctat

SEQ ID NO: 394152 - DNA, 942 bp, Homo Sapiens; identical to SEQ ID NO: 284221

SEQ ID NO: 394153 - DNA, 1000 bp, Homo Sapiens; identical to SEQ ID NO: 284223

SEQ ID NO: 394154 - DNA, 1000 bp, Homo Sapiens; identical to SEQ ID NO: 284224

SEQ ID NO: 394155 - DNA, 1000 bp, Homo Sapiens; identical to SEQ ID NO: 284225

SEQ ID NO: 394156 - DNA, 1000 bp, Homo Sapiens; identical to SEQ ID NO: 220709

SEQ ID NO: 394157 - DNA, 1000 bp, Homo Sapiens; identical to SEQ ID NO: 115281

SEQ ID NO: 394158 - DNA, 1000 bp, Homo Sapiens; identical to SEQ ID NO: 220710

SEQ ID NO: 394159 - DNA, 1000 bp, Homo Sapiens; identical to SEQ ID NO: 284230

SEQ ID NO: 394160 - DNA, 1000 bp, Homo Sapiens; identical to SEQ ID NO: 115283

SEQ ID NO: 394161 - DNA, 1000 bp, Homo Sapiens; identical to SEQ ID NO: 284231

SEQ ID NO: 394162 - DNA, 1000 bp, Homo Sapiens; identical to SEQ ID NO: 115284

SEQ ID NO: 394163 - DNA, 1000 bp, Homo Sapiens; identical to SEQ ID NO: 220712

SEQ ID NO: 394164 - DNA, 1000 bp, Homo Sapiens; identical to SEQ ID NO: 115285

SEQ ID NO: 394165 - DNA, 1000 bp, Homo Sapiens; identical to SEQ ID NO: 115286

SEQ ID NO: 394166 - DNA, 1000 bp, Homo Sapiens; identical to SEQ ID NO: 115287

SEQ ID NO: 394167 - DNA, 1000 bp, Homo Sapiens
taccctgcagggtaagctgttgttccctgaggctgaggctgaggcagagaatcttccagatgataaaccccagcagccgactcgaccccaggagcagagtacaggagacaccatggggagagaccctggtgtgtccttcaaggctgttggtctacaacctgctggagatgtaaatttgccatgacttcctggaggacagcagcatggagaaagatcctagaaaaggcctctgacttccctcacctcccaaccatcattacaggaaagactgtgaactcctgagttcagcttgatttctgactacatcccagcaagctctggcatctgtggattaaaatccctggatctctctcagttgtgtatttgttcatcttcatatgctggcaggaacaactattaatacagatactcagaagccaataacatgacaggagctgggactggtttgaacacagggtgtgcagatggggagggggtactggccttgggcctcctatgatgcagacatggtgaatttaattcaaggaggaggagaatgttttaggcaggtggttatatgtgggaagataattttattcatggatccaaatgtttgttgagtcctttctttgtgctaaggttcttgcggtgaaccagaattataacagtgagctcatctgactgttttaggatgtacagcctagtgttaacattcttggtatctttttgtgccttatctaaaacatttctcgatcactggtttcagatgttcatttattatattcttttcaaagattcagagattggcttttgtcatccactattgtatgttttgtttcattgacctctagtgataccttgatctttcccactttctgttttcggattggagaagatgtaccttttttgtcaactcttacttttatcagatgatcaactcacgtatttggatctttatttgttttctcaaataaatatttaaggttatacatttaaaaaaaaaaaaaaaaaaaaaaaaaaa

SEQ ID NO: 394168 - DNA, 1000 bp, Homo Sapiens; identical to SEQ ID NO: 115288

SEQ ID NO: 394169 - DNA, 942 bp, Homo Sapiens
atggaaagaatcaacagcacactgttgactgcgtttatcctgacaggaattccgtatccactcaggctaaggacactcttttttgtgttcttttttctaatctacatcctgactcagctgggaaacctgcttattttaatcactgtctgggcagacccaaggctccatgcccgccccatgtacatctttcttggtgttctctcagtcattgatatgagcatctcctccatcattgtccctcgcctcatgatgaacttcactttaggtgtcaaacccatcccatttggtggctgtgttgctcaactctatttctatcacttcctgggcagcacccagtgcttcctctacaccctaatggcctatgacaggtacctggcaatatgtcagcccctgcgctaccctgtgctcatgactgctaagctgagcgccttgcttgtggctggagcctggatggcaggatccatccatggggctctccaggccatcctaaccttccgcctgccctactgtgggcccaatcaggtggattacttcttctgtgacatccctgcagtgttgagactggcctgtgctgacacaacagtcaacgagctggtgacgtttgtagacattggggtggtggttgccagttgcttctccctgatcctcctctcctacatacagatcattcaggccatcctgagaatccacacagctgatgggcggcgccgggctttttcaacttgtggagcccatgtaaccgtggtcaccgtgtactatgtgccctgtgccttcatctacctgaggcctgaaaccaacagccccctggatggggcagctgccctagtccccacggccatcactcctttcctcaacccccttatctacactctgcggaaccaagaggtgaagctggccctgaaaagaatgctcagaagcccaagaactccgagtgaggtttga

SEQ ID NO: 394170 - DNA, 942 bp, Homo Sapiens
atgctggctagaaacaactccttagtgactgaatttattcttgctggattaacagatcatccagagttccggcaacccctctttttcctgtttctagtgatctacattgtcaccatggtaggcaaccttggcttgatcactcttttcggtctaaattctcacctccacacaccaatgtactatttcctcttcaatctctccttcattgatctctgttactcctctgttttcactcccaaaatgctaatgaactttgtgtcaaaaaagaatattatctccaatgttgggtgcatgactcggctgtttttctttctctttttcgtcatctctgaatgttacatgttgacttcaatggcatatgatcgctatgtggccatctgtaatccattgctgtataaggtcaccatgtcccatcaggtctgttctatgctcacttttgctgcttacataatgggattggctggagccacggcccacaccgggtgcatgcttagactcaccttctgcagtgctaatatcatcaaccattacttgtgtgacatactccccctcctccagctttcctgcaccagcacctatgtcaacgaggtggttgttctcattgttgtgggtactaatatcacggtacccagttgtaccatcctcatttcttatgttttcattgtcactagcattcttcatatcaaatccactcaaggaagatcaaaagccttcagtacttgtagctctcatgtcattgctctgtctctgttttttgggtcagcggcattcatgtatattaaatattcttctggatctatggagcagggaaaagtttcttctgttttctacactaatgtggtgcccatgctcaatcccctcatctacagtttgaggaacaaggatgtcaaagttgcactgaggaaagctctgattaaaattcagaggagaaatatattctaa

SEQ ID NO: 394171 - DNA, 930 bp, Homo Sapiens; identical to SEQ ID NO: 284238

SEQ ID NO: 394172 - DNA, 1000 bp, Homo Sapiens; identical to SEQ ID NO: 284239

SEQ ID NO: 394173 - DNA, 978 bp, Homo Sapiens
atgttcctttacctttgcttcatttttcagaggacatgcagtgaggagatggaagaggaaaatgcaacattgctgacagagtttgttctcacaggatttttacatcaacctgactgtaaaataccgctcttcctggcattcttggtaatatatctcatcaccatcatggggaatcttggtctaattgttctcatctggaaagaccctcaccttcatatcccaatgtacttattccttgggagtttagcctttgtggatgcttcgttatcatccacagtgactccgaagatgctgatcaacttcttagctaagagtaagatgatatctctctctgaatgcatggtacaatttttttcccttgtaaccactgtaaccacagaatgttttctcttggcaacaatggcatatgatcgctatgtagccatttgcaaagctttactttatccagtcattatgaccaatgaactatgcattcagctattagtcttgtcatttataggtggccttcttcatgctttaatccatgaagctttttcattcagattaaccttctgtaattccaacataatacaacacttttactgtgacattatcccattgttaaagatttcctgtactgattcctctattaactttctaatggtttttattttcgcaggttctgttcaagtttttaccattggaactattcttatatcttatacaattatcctctttacaatcttagaaaagaagtctatcaaagggatacgaaaagctgtctccacctgtggggctcatctcttatctgtatctttatactatggccccctcaccttcaaatatctgggctctgcatctccgcaagcagatgaccaagatatgatggagtctctattttacactgtcatagttcctttattaaatcccatgatctacagcctgagaaacaagcaagtaatagcttcattcacaaaaatgttcaaaagcaatgtttag

SEQ ID NO: 394174 - DNA, 945 bp, Homo Sapiens
atgaagaacaaatcaatggaaatagagttcattctcctaggattgacagatgacccacagttgcaaattgtgattttcctgtttctatttctcaactacaccttgagcctgatggggaacttaatcatcatcatcctcaccctgctggatccccggctcaagacgccaatgtatttctttctccgtaatttctcctttttggaagtaatattcacaacagtgtgtattcctagattcttgataaccattgtgactagagacaaaaccatttcttataataattgtgcaactcaattattttttatccttttaccgggagttactgagttttacctcctggctgccatgtcctatgaccgctacgttgccatctgcaaaccactgcattatccaatcattatgagcagcaaagtctgctaccaacttgtacttagctcttgggtaactggattcttaatcatatttcccccattggtcatgggactcaagctggatttttgtgcttccaaaactattgaccactttatgtgtgaaacttctcctattctgcagatctcctgcacagatacccatgtcctagaattgatgtcttttaccttagctgtggtgacacttgtggtcacactggtattagtgattctctcttacacttgcattattaagaccattctgaaattctcttctgcacagcaaaggaacaaagcattttccacctgtacttcccacatgattgttgtctccatgacatacggtagctgtatctttatgtatattaaaccatctgcaaaagaaagagtgactgtatccaaaggtgtagctttgctctatacctcaattgcccctttactaaatcccttcatttatactctcagaaaccagcaggtgaaagaagtcttctgggatgtattacaaaagaatttgtgtttttctaaaagaccattttaa

SEQ ID NO: 394175 - DNA, 1000 bp, Homo Sapiens; identical to SEQ ID NO: 220714

SEQ ID NO: 394176 - DNA, 939 bp, Homo Sapiens
atgaagaatcatacaaggcagatagaatttattcttctgggactgacggataattctcagttacagattgtaattttcttatttctacttctaaattgtgtgttgagcatgatagggaacttcactatcattgccctcattctgctggattcccagctcaagactccaatgtatttcttcctccgtaatttctcttttctggaaatttcattcacaactgcttgcattcccagattcctaatcaccattgttaccagggaaaagaccatttcctgtaatggttgcatatctcagttgtttttttacatattcttgggggttacagaatttttccttctagctgctctgtcctatgatcgctatgttgccatctgcaaacctttgcgttatatgtccatcatgagtaacaaagtttgctaccagcttgtattcagttcttgggtaactggattcctgatcattttcactccactgattttaggtcttaacttggatttctgtgcttcaaatatcattgatcatttcatttgtgacatttctcttatcctacaactttcttgctcagacacacatttactggaactgattgcctttttattagctgtgatgacacttattgtcacattgtttttagtaatcctttcttactcttacatcatcaagacaattctgaaattcccttcagctcagcaaaagaagaaagccttttccacctgctcttctcacatgattgttgtctccatcacttatggtagttgtatgtttatctacataaagccatcagcgaatgaaagagttgctttaagcaaaggagtaactgtgctcaatacttcagttgccccgttgttaaacccatttatttatactctgaggaatcagcaagttaaacaagccttcaaagctgtatttagaaagatattttctgcttcagacaagtaa

SEQ ID NO: 394177 - DNA, 942 bp, Homo Sapiens
atggaaactgcaaattacaccaaggtgacagaatttgttctcactggcctatcccagactcgggaggtccaactagtcctatttgttatatttctatccttctatttgttcatcctaccaggaaatatccttatcatttgcaccatcaggctagaccctcatctgacttctcctatgtatttcctgttggctaatctggccctccttgatatttggtactcttccattacagcccctaaaatgctcatagacttctttgtggagaggaagataatttcctttggtggatgcattgcacagctcttcttcttacactttgttggggcttcggagatgttcttgctcacagtgatggcctatgaccgctatgctgctatctgccgacccctccactatgctaccatcatgaatcgacgtctctgctgtatcctggtggctctctcctggatggggggcttcattcattctataatacaggtggctctcattgttcgacttcctttctgtgggcccaatgagttagacagttacttctgtgacatcacacaggttgtccggattgcctgtgccaacaccttcccagaggagttagtgatgatctgtagtagtggtctgatctctgtggtgtgtttcattgctctgttaatgtcctatgccttccttctggccttgctcaagaaacattcaggctcaggtgagaataccaacagggccatgtccacctgctattcccacattaccattgtggtgctaatgtttgggccatccatctacatttatgctcgcccatttgactcattttccctagataaagtggtgtctgtgtttcatactgtaatattccctttacttaatcccattatttacacattgagaaacaaggaagtaaaggcagccatgaggaaggtggtcaccaaatatattttgtgtgaagagaagtga

SEQ ID NO: 394178 - DNA, 945 bp, Homo Sapiens; identical to SEQ ID NO: 284243

SEQ ID NO: 394179 - DNA, 1000 bp, Homo Sapiens; identical to SEQ ID NO: 220715

SEQ ID NO: 394180 - DNA, 1000 bp, Homo Sapiens; identical to SEQ ID NO: 220716

SEQ ID NO: 394181 - DNA, 933 bp, Homo Sapiens
atggaagaggaaaatgcaacattgctgacagagtttgttctcacaggatttttatatcaaccacagtggaaaatacccctgttcctggcattcttggtaatatatctcatcaccatcatggggaatcttggtctgattgctgtcatctggaaagaccctcatcttcatatcccaatgtacttactccttgggaatttagcttttgtggatgctttgttatcatcctcagtgactctgaagatgctgatcaacttcttagctaagagtaagatgatatctctctctgaatgcaagatacagttgttttcgtttgcaatcagtgtaaccacggaatgttttctcttggcaacaatggcatatgatcgctatgtagccatatgcaaacccttactttatccagccattatgaccaatggactgtgcatccggctattaatcttgtcatatgtaggtggtcttcttcatgctttaatccatgaaggatttttattcagactaaccttctgtaactccaacataatacaacacttttactgtgacattatcccattgttaaagatttcttatactgattcctctattaactttctaatggtttttatttttgcaggttcaattcaagtttttaccatagggactgttcttatatcttacatatttgtcctctatacaatcttgaaaaagaagtctgtcaaaggtatgagaaaagccttctccacctgtggagctcatctcttatctgtatctttatactatgggcccctcgccttcatgtatatgggctctgcatccccacaggctgatgaccaagatatgatggagtctctattttacactgtcatagttcctttattaaatcccatgatctacagcctgagaaacaagcaagtaatagcttcattcacaaaaatgttcaaaagaaatgatgtttag

SEQ ID NO: 394182 - DNA, 727 bp, Homo Sapiens; identical to SEQ ID NO: 284247

SEQ ID NO: 394183 - DNA, 1000 bp, Homo Sapiens
ctcttttgaacttttccttttgtccttgtattaaagtggttttaaaggggtctaaaaagattttggcaaaacatatttgcagatgtagattagctggtgaagaaaattactgctagagatcaactgattaactggtaaagaacgtttattttataacccttgaagaatagaaggacatagttggattattgtgtgtgcattgtatttttacttctattttttttttgctttccattttccagttagcagagataaaatgagagcgttttaacttcaatgtaccattttactgagtgctaaggaagcatatcaattccaatattttataaccaaagctctatcagaacatatttataaaacttgttggaatttttacggcttttgtgtagtcatgtaggtaaatcatttaaaatataaaacaatctcaatttagatcaagggttatttcttagatcaaatttatgccaattatatgaaaagattttaactccgagacaggagtctttcagtgctgaatttttagactgtaaatgagttcttcttaacttagctgtttccctacttctgtgacttctgtgttagccatcttatttctttaaaatctgagtcctgattggcttaatgattttgcagcagacatgtctccacatattctcaaatgctgtcatgcggaaacgtatgaaacagatgaagaatgactgacccagattttagatgtataatgttgttaaagtacatactactgtaaaaatatgggatgaattttatatattaagaaatgccaaaaacatagtttctgcaccaagttaattatccctgtcctttcacatttatagggggaaaataaatactttatagcctaacagttatttgatgttattcttgcagagggaatggaaaggaatggaaagatttgttggcgtaatttttgaatatttgttatgatcatatgaataagtaaaaaaattcatcctgctgatggcaaaaaaaaaaaaaaaaa

SEQ ID NO: 394184 - DNA, 1000 bp, Homo Sapiens; identical to SEQ ID NO: 115289

SEQ ID NO: 394185 - DNA, 938 bp, Homo Sapiens; identical to SEQ ID NO: 115290

SEQ ID NO: 394186 - DNA, 1000 bp, Homo Sapiens
ccgagtcccgccttggcggctcgggcacccctggcacctctggcaccctaagcagcctcggtggcctcgaccctgacagccccatcaccagtcaccttgggcagccgtcacctaagcagcagccattggaaccgggagaagccgcactccactctgactcccaggacgggcaccagctccatgtttctttttcactgagaaaaaagaaagcaggacaccaatgagttgtgtcttccctctgtccactctcagcaccttcactctgaagatctgttaaaagcacacgagtcgtctcagtccctcagtgggagctgtttcacctggcgtcatctagtcagccatcttcaataataactgttaaatggacatttatatccactgaaaccactaagtgaaataaagatgtgtttaggcaaagaactgagtttatgacttatagatcctcaccaaggaaacttccaaaagatgtacttcacagaagaagaaaatgatcccagaaggaaaatttgagatgtaagacagaagaacaagcaaagattgtttaaacatatggccctattgaatttcttcttccctgatgaaaagccatactctgaagaagaaagtaggcgtgttcgccgcaataaaagaagcaaaagcaatgaaggagcagatggtaagtctactcagttgatcctttatcacttctgaattatttgttagtaaaagtatccttttaagaactaccttcttggtagggcatggtggctcacgcctgtaatcctagcactttgggaggcccacgcgggcagatcacttgaggtgaggaattcaaaaccagcctggccaacatggtgaaaccctgtctctactaaaaatacaaaaaaaattagccgggcctagtcccagctgcttgggagactaaggcaggagaatcgcttgaaactgggaggtagaggttgcagtgagctgagactgtgccactgcactccagcctgggtgacagtgcgagactccatct

SEQ ID NO: 394187 - DNA, 840 bp, Homo Sapiens
attccctcggcgggccgagcctcccctctctcccgcccctcctcctccctttcccacccctcggagtagagctgcacatgcggctgctccctgctccgtcccgcccagccactgtcgcgcaggaacgggtccctgcagcccccagccgatggcaggacagtagccgcctgtcagaggtcgtgaacggctgaggcagacgcagcggctcccgggcctcaagagagtgggtgtctccggaggccatgggctacccggaggtggagcgcagggaactcctgcctgcagcagcgccgcgggagcgagggagccagggctgcgggtgtggcggggcccctgcccgggcgggcgaagggaacagctgcctgctcttcctgggtttctttggcctctcgctggccctccacctgctgacgttgtgctgctacctagagttgcgctcggagttgcggcgggaacgtggagccgagtcccgccttggcggctcgggcacccctggcacctctggcaccctaagcagcctcggtggcctcgaccctgacagccccatcaccagtcaccttgggcagccgtcacctaagcagcagccattggaaccgggagaagccgcactccactctgactcccaggacgggcaccagggacaccaatgagttgtgtcttccctctgtccactctcagcaccttcactctgaagatctgttaaaagcacacgagtcgtctcagtccctcagtgggagctgtttcacctggcgtcatctagtcagccatcttcaataataactgttaaatggacatttatatccactgaaaccactaagtgaaataaagatgtgtttaggc

SEQ ID NO: 394188 - DNA, 1000 bp, Homo Sapiens; identical to SEQ ID NO: 115291

SEQ ID NO: 394189 - DNA, 923 bp, Homo Sapiens
ataaaggacttgtctaggggagagcctatggatctgagaacgctgtctgggcttggtaccaagagctggtatttcacagcagcgaccgcctcacagacgagctgtgggaagcaggagggagactctctcttagggtgccactactatggagacacagctgggctgaacaagatttgcttcaaacgacaacaagagagacagaaagtatctggttcaaccgctgcccgagcaggcaggcaccagaagagctagcagccaatccggccatgctcgaagccagctctgcagctcagccaatcagtgacatcattgctttctttagcttgcccatggtgatgtgaagatgagaagaaatagcaaggcccaaccagttcttcatctggagacagttcaacgttctgcaaaccagatcttcaggaattttactgggataattatccaaataaattgcaagcattctatccaaatggacatccataaaaattcatcagagagcattttactactgagctgcaaagggaaaaacttaaaatggatatgaaaagtgaagaaagtgatcataggagaaaaccatttcaggtgtctgatgatttgtgagcctcaagtgactactctgtggaatcatctgtccttgcctttgaattagctttccctaggccatgagtcaacattagtagtttatacatccaaattgatgacaagagcacctcaaaggcagcagcctcaaggagcagccatggccccagacttgtcgcacggatgcagaaaacttaatggaggaggctgaggtcagaatgggaagagtttttaaaaaataaaaaggggagctaatatgtgaggaactgattgctgtgcattattttccactgaacagaccttcttttaacttctaatctcaagcacatagcagctgttgttttcat

SEQ ID NO: 394190 - DNA, 1000 bp, Homo Sapiens; identical to SEQ ID NO: 220717

SEQ ID NO: 394191 - DNA, 1000 bp, Homo Sapiens; identical to SEQ ID NO: 284251

SEQ ID NO: 394192 - DNA, 1000 bp, Homo Sapiens; identical to SEQ ID NO: 115292

SEQ ID NO: 394193 - DNA, 1000 bp, Homo Sapiens; identical to SEQ ID NO: 393702

SEQ ID NO: 394194 - DNA, 1000 bp, Homo Sapiens; identical to SEQ ID NO: 393702

SEQ ID NO: 394195 - DNA, 1000 bp, Homo Sapiens; identical to SEQ ID NO: 284253

SEQ ID NO: 394196 - DNA, 1000 bp, Homo Sapiens
gctacctcatctgccacagggtcctgcgaggcctgcacaaggacaagcctcgagggggttgcagcccctcgtcctccgccagccgagcttccacctgccgctgccaccacaagctggtggaggctggggaggtggatccagacccaggcaataacaagctgcaggcttcagcacccaacctgacccccatctgaccacagggcaggggtggggcaacatgcgggctgccaatgggacatgcagggcggtgtggcaggtggagaggtcctacaggggctgagtgaccccactctgagttcactaagttatgcaactttcgttttggcagatattttttgacactgggaactgggctgtctagccgggtataggtaacccacaggcccagtgccagccctcaaaggacatagactttgaaacaagcgaattaactatctacgctgcctgcaaggggccacttagggcactgctagcagggcttcaaccaggaagggatcaacccaggaagggatgatcaggagaggcttccctgaggacataatgtgtaagagaggtgagaagtgctcccaagcagacacaacagcagcacagaggtctggaggccacacaaaaagtgatgctcgccctgggctagcctcagcagacctaaggcatctctactccctccagaggagccgcccagattcctgcagtggagaggaggtcttccagcagcagcaggtctggagggctgagaatgaacctgactagaggttctggagatacccagaggtcccccaggtcatcacttggctcagtggaagccctctttccccaaatcctactccctcagcctcaggcagtggtgctcccatcttcctccccacaactgtgctcaggctggtgccagcctttcagaccctgctcccagggacttgggtggatgcgctgatagaacatcctcaagacagtttccttgaaatcaataaatactgtgttttatacaaaaaaaaaaaaaaaa

SEQ ID NO: 394197 - DNA, 1000 bp, Homo Sapiens; identical to SEQ ID NO: 115294

SEQ ID NO: 394198 - DNA, 1000 bp, Homo Sapiens; identical to SEQ ID NO: 220718

SEQ ID NO: 394199 - DNA, 1000 bp, Homo Sapiens; identical to SEQ ID NO: 116006

SEQ ID NO: 394200 - DNA, 1000 bp, Homo Sapiens
gtatgtgaaatttgcaaaatactggtattaaagaacgctgcagcttttttatgtcactcaaaggttaatcggagtatctgaaaggaattgtttttataaaaacattgaagtattagttacttgctataaatagatttttatttttgttttttagcctgttatatttccttctgtaaaataaaatatgtccagaagaggcatgttgtttctagattaggtagtgtcctcattttatattgtgaccacacagctagagcaccagagcccttttgctatactcacagtcttgttttcccagcctcttttactagtctttcaggaggtttgctcttagaactggtgatgtaaagaatggaagtagctgtatgagcagttcaaaggccaagccgtggaatggtagcaatgggatataatacctttctaagggaaacatttgtatcagtatcatttgatctgccatggacatgtgtttaaagtggctttctggcccttctttcaatggcttcttccctaaaacgtggagactctaagttaatgtcgttactatgggccatattactaatgcccactggggtctatgatttctcaaaattttcattcggaatccgaaggatacagtctttaaactttagaattcccaagaaggctttattacacctcagaaattgaaagcaccatgactttgtccattaaaaaattatccatagtttttttagtgcttttaacattccgacatacatcattctgtgattaaatctccagatttctgtaaatgatacctacattctaaagagttaattctaattattccgatatgaccttaaggaaaagtaaaggaataaatttttgtctttgttgaagtatttaatagagtaaggtaaagaagatattaagtccctttcaaaatggaaaattaattctaaactgagaaaaatgttcctactacctattgctgatactgtctttgcataaatgaataaaaataaactttttttcttca

SEQ ID NO: 394201 - DNA, 1000 bp, Homo Sapiens; identical to SEQ ID NO: 115295

SEQ ID NO: 394202 - DNA, 994 bp, Homo Sapiens
gcgcacgcagggtggggggagggagcgcacgacgtgcgcgcaccctctcccctcgtccaccgctgccgcctccttcttctgccgctcctggtgctgcttgtgtgctcgtttggtgcggacctggtacctcttttgtgaagcggcagctgaggagactccggcgctcgccatggccgacgaaaagcccaaggaaggagtcaagactgagaacaacgatcatattaatttgaaggtggcggggcaggatggttctgtggtgcagtttaagattaagaggcatacaccacttagtaaactaatgaaagcctattgtgaacgacagttggaaatggaggatgaagatacaattgatgtgttccaacagcagacgggaggtgtctactgaaaagggaacctgcttctttactccagaactctgttctttaaagaccaagattacattctcaattagaaaactgcaatttggttccaccacatcctgactactaccgtatagttttctctattctttcatttcccccttccccattcctttattgtacataaagtaactggtatatgtgcacaagcatattgcattttttttttttttaactaaacagccaatggtatgttttgattgacatcaagtggagacgggatggggaaaaatactgattctgtgaaaataccccctttctccattagtggcatgctcattcagctcttatctttatattccagtaagttattttgctctcactgttttaacaaaaaaaaaaaacaacaacataaaaatccttgcataccttgttcaattggagaattttaatgtttttcatttatcattgtaaaaccaaggacaattttataacttttttgtacgtagctgttacatgtagggcaatctgtctttaagtagggataaattactctaaaacaaaaaagaatcctagatagttttcccttcaagtcaagcgtcttgttgtttaaataaacttcttgtttaaaatga

SEQ ID NO: 394203 - DNA, 1000 bp, Homo Sapiens
aagaactgtgttacatattagagagaacaaatcaaaagttacctatctccatcgttaccagtagaacattagtatgtattttgaagcaccatttgactctttctatttcagctacttgcttgtcccttgcaaagttattatagtactcttttaaaacttttcttcaagggaagagctattttgacttccttttctttgatctaaacctaacacccagaatatgcttagcagatcatcccaaaacaatcataacttgtttaaattgttcatagcaaaagttacatattataaagagttatgagtgtcttaggcagtgaatagtaactgaatatccttttatagttgtccttcactagcaggaagccttattccctgcccttttacatatcttaacttagaatgttactgtctaaatagtggttaggcaagagtagttcttaaacgtgcagtaattatcttgcactacatttaagggctaaatagctagtagtggtgcttgataattgaagaaatttgtacagctggaggaagtacctgctaaattttcaaaagttacctgaatttaataggtaaatctgtttttaattagagctatatcattttactctgaatgtcttaacatagaagtttacataaaatttacagattggattgatttcagccttcttctggtactttttaaaatcttattaatcattaggaaaagaagttttattattgatgcaagccctaaacactctttcgactccagaggagaagctggcagctctctgtaagaaatatgctgatcttggaaattcacctcttctatagaagagtttgttttgaactatacgatttgaaacaaaattctttttttggagactatggaaacattctcaacagggaaaccctactagactttgtaaagcaaataatggaaaagatacagaactttttgaagaatcatgggaaatttttataattaaataaatgccaaaattctgttttgtgaaacatt

SEQ ID NO: 394204 - DNA, 1000 bp, Homo Sapiens
gtggatgaatgtctgtgttggtgatattatcaagctagaaaataaccagtttgtggcggcggatctcctcctcctttccagcagtgagccccatgggctgtgttacatagagacagcagaacttgatggcgagaccaacatgaaagtacgtcaggcgattccagtcacctcagaattgggagacatcagtaagcttgccaagtttgacggtgaagtgatctgtgaacctcccaacaacaaactggacaaattcagcggaaccctctactggaaggaaaataagttccctctgagcaaccagaacatgctgctgcggggctgtgtgctgcgaaacaccgagtggtgcttcgggctggtcatctttgcaggtcccgacactaagctgatgcaaaacagcggcagaacaaagttcaaaagaacgagtatcgatcgcctaatgaataccctggtgctctggatttttggattcctggtttgcatgggggtgatcctggccattggcaatgccatctgggagcacgaggtggggatgcgtttccaggtctacctgccgtgggatgaggcagtggacagtgccttcttctctggcttcctctccttctggtcctacatcatcatcctcaacaccgttgtgcccatttcactctatgtcaggtatgtgccttctctgacctggggtctctccagggagtcaggcggtcccatagaacttttcttttctatgaagatgaagtccttgagaagtaacgagaagtcctcttcttcctgtactgtaaacatttgatgttatctgtttatctttgtgggcagagcaaactttttaccacagtttcctggtacttgggactgtattagagaaaaaaaaatattgatttattcagcacctatttattacatgcctactgtgtacaaagaagtgtgctaggtgccatcacaaataaaagatgaattaggaaaaaaaaaaaaaaaaaaaaaaaaaaaaaaaaaaaaaaaaaaaaaa

SEQ ID NO: 394205 - DNA, 1000 bp, Homo Sapiens; identical to SEQ ID NO: 284256

SEQ ID NO: 394206 - DNA, 1000 bp, Homo Sapiens; identical to SEQ ID NO: 115296

SEQ ID NO: 394207 - DNA, 1000 bp, Homo Sapiens; identical to SEQ ID NO: 220720

SEQ ID NO: 394208 - DNA, 1000 bp, Homo Sapiens; identical to SEQ ID NO: 115298

SEQ ID NO: 394209 - DNA, 930 bp, Homo Sapiens; identical to SEQ ID NO: 115300

SEQ ID NO: 394210 - DNA, 1000 bp, Homo Sapiens
ggagcccccagagggaggagatgtcctgtattcctataccatcatcacagtggattcctgcaaaggcttgagtgacatccaccacaggatgcctgccatattagatggagaggaggcagtttctaaatggcttgactttggtgaagtctcaactcaggaagctctgaaattaatccacccaacagagaacatcaccttccatgcagtctcttctgtggtgaacaactcgcgaaacaacactcctgagtgtctggctcctgtcgacttggtggtcaaaaaggagctcagggcaagtggcagtagccagaggatgttgcagtggttggccacaaagtcacccaaaaaggaagactcaaaaacacctcaaaaggaagagtcagatgttccccagtggtccagtcagttcctgcagaagagtccactccccaccaagagaggcactgcaggactcctagagcaatggctgaagcgggagaaggaggaggaacctgtggccaagcgtccttacagccagtgacacaggactttcagagaccaaggccagggtctgctgcactgctgttctgataataggttcttaacattgtatgtatatgtgtttgctttgggaggaggtggcactgtgttagttgacagttgtgggctcatgtagtcttttttgccatgagtaggagcccctagtggggctggtggacagctttggaagaggtgtcctgctgctgttaccagccatgtgggccccataggggcactgcgcctgctgccctttcctggcagggctggtggagtcttccctcaaagcatgccttacccagctgggaagtctctgccctgatctggtactccttgtagtaagctgttttctgctcagccactgggctctttcacttttttagttcttaaaaatttatttttaagttctaaaataaaataaaaataagttcttaaaatttatttttttcctgaataaattgtatttggtaaaaaaaaaaaaaaaaaa

SEQ ID NO: 394211 - DNA, 1000 bp, Homo Sapiens
gcagaaatttgacctggggatcatctgtgttgacaacaagaatattcagcacattaatagaatctacagagatagaaatgtcccaaccgatgtgctttcttttccatttcatgagcatctgaaagcaggtgaatttccccagcctgattttccagatgactacaatttgggagacattttcctaggagtggagtatatcttccatcagtgtaaagaaaatgaagattacaatgacgtcctgactgtaagcggggatgctgaaatcatataacctggctcatggaacatgggccttgcaaaggggtcaagatcacaaccctgcatccatgtgtgtccgtgggtaccgtaagggctactgggggaagaacctgtaagcagggtgtgaggagcacccaggctgggtagggactgcatgccccatgccacagttgaaggagggagagaacacgctgtgaaaacacagaagctcccagagaagccttctcagcttttatctctggagtagagcagactatgttgagctaacacagacctgctgaatcagcttctttctgagctgccagaagtacagaagttggagcctccaccaccttccagatctgtttctcctcagtgtaatccacctatgggttcttcctgcccactgcacagacaaaaccaattcactgcaattgtggtattgcagtagagaaagagtttaacacagagctagccaagcagaaaggctggagttattattcaactcaatctcccagagaactcagaggctacagtttctacaggcaatttggcaggcaggggctagggaatgcctgctgctgatcggctgcagacggaccatggggtgtcaacgatttttgtcccctgagtccgcctctgcgtggagccacgggatcagctgagtcatgagtctcaggtccaggtggagtctgtaggttgccagaactcaaaagtctgaaaaacatcccaaaagaccattaaaaaaaaaaaaaaaaaaaaa

SEQ ID NO: 394212 - DNA, 1000 bp, Homo Sapiens; identical to SEQ ID NO: 115301

SEQ ID NO: 394213 - DNA, 1000 bp, Homo Sapiens; identical to SEQ ID NO: 284262

SEQ ID NO: 394214 - DNA, 1000 bp, Homo Sapiens; identical to SEQ ID NO: 220723

SEQ ID NO: 394215 - DNA, 671 bp, Homo Sapiens; identical to SEQ ID NO: 284265

SEQ ID NO: 394216 - DNA, 1000 bp, Homo Sapiens
tctaatgaggacactatagaagacatttcttatgaggacactgtatacgacatcactaatgaggatgctgtacgatacctctgtaaaaaagatgctaccaaggagccattgacactggagaatgatttgattgtggagagcatgtctgatgacgaggattttgcagcttaaagggagctcccggggtgagtgacggaggcgggatcggaccctggcagtttgacggcaacacctgtgttcctctgcactgggccgtggatgacattacacaccttggtgagaatcaggaattgaggctaatcacatctgaaattgagctcgctcactggacaggatagactgggcgcccaggcctcaagggcttatgatttcttctcgggtttgaaacatgcccccagatgagcaagacggggctgccacattgacggagcagctgcgggacacacccaagaaacctcctggagaacacaggggacattcacggctggaggcttcatctatggccgggggcttcatccatgagctggggacttcatccatgggctggggacttcatccatgactggggacctcatccacgtctggagacttcatccgcgactgggggcttcatccatgggctgggggattcatccacgggctgggggcttcatccatcactgggggcttcatccacgggctgggggcttcatccatgactgggggcttcatccacgggctgggggcttcatccatgggctgggggcttcatccatgactgggggcttcatccacgggctgggggcttcatccacgggctgggggcttcatccatgactggggacttcatccacgactggagacttcatccataggctgggggcttcatctacagctggagacttcatccacagcaggggcttcatccttggttggtttgcctgatctgtatctgagccacagatacagattattaaacagataataattttaaaaaaaaaaaaaaaaaaaaaaaaaaaaa

SEQ ID NO: 394217 - DNA, 1000 bp, Homo Sapiens; identical to SEQ ID NO: 115302

SEQ ID NO: 394218 - DNA, 1000 bp, Homo Sapiens; identical to SEQ ID NO: 284266

SEQ ID NO: 394219 - DNA, 1000 bp, Homo Sapiens; identical to SEQ ID NO: 115303

SEQ ID NO: 394220 - DNA, 1000 bp, Homo Sapiens; identical to SEQ ID NO: 284478

SEQ ID NO: 394221 - DNA, 1000 bp, Homo Sapiens; identical to SEQ ID NO: 220725

SEQ ID NO: 394222 - DNA, 1000 bp, Homo Sapiens; identical to SEQ ID NO: 284272

SEQ ID NO: 394223 - DNA, 1000 bp, Homo Sapiens; identical to SEQ ID NO: 284275

SEQ ID NO: 394224 - DNA, 1000 bp, Homo Sapiens; identical to SEQ ID NO: 220726

SEQ ID NO: 394225 - DNA, 1000 bp, Homo Sapiens
caaagtagtttgtagggcaaatgcagaatatatgtctccatctggtaaagtaccttttattcatgtgggaaatcaagtagtatcagaacttggtccaatagtccaatttgttaaagccaagggccattctcttagtgatgggctggaggaagtccaaaaagcagaaatgaaagcttacatggaattagtcaacaatatgctgttgactgcagagctgtatcttcagtggtgtgatgaagctacagtaggggagatcactcatgctaggtatggatctccttacccttggcctctgaatcatattttggcctatcaaaaacagtgggaagtcaaacgtaagatgaaagctattggatggggaaagaagactctggaccaggtcttagaggatgtagaccagtgctgtcaagctctctctcaaagactgggaacacaaccgtatttcttcaataagcagcctactgaacttgacgcactggtatttggccatctatacaccattcttaccacacaattgacaaatgatgaactttctgagaaggtgaaaaactatagcaacctccttgctttctgtaggagaattgaacagcactattttgaagatcgtggtaaaggcaggctgtcatagagttatgtgttagtctcaggagtcttaacttttgaaatatgttttacttgaatgttacattagatattggtgtcagaattttaaaaccaaattactgctttttgaaacctcaaattatataatgtatcttatgtatgtgctttatattgttatttgtgtatacattaaaataattctgaattatttaatctgatatgttgtattctgtatcttgaaatttttgtttccttgaaacatgcatgcatttaaaaataaagcttaaacaactgtatggatgttacatttactttcttttgatttttctgaaagtcattcactgaattttacacatgtggaataaacagtgtcttttctaaggcaaaaaaaaaaaaa

SEQ ID NO: 394226 - DNA, 1000 bp, Homo Sapiens; identical to SEQ ID NO: 284278

SEQ ID NO: 394227 - DNA, 1000 bp, Homo Sapiens; identical to SEQ ID NO: 117214

SEQ ID NO: 394228 - DNA, 1000 bp, Homo Sapiens; identical to SEQ ID NO: 220727

SEQ ID NO: 394229 - DNA, 1000 bp, Homo Sapiens; identical to SEQ ID NO: 115305

SEQ ID NO: 394230 - DNA, 822 bp, Homo Sapiens
ttccctttgcaattgccttgggtcctgccgcacagagcggcctgtctttatcagaggtccctctgccagggggagggccccagagaaaaccagaaagagggtgagagactgaggaagataaagcgtcccagggcctcctacaccagcgcctgagcaggaagggggaggggccatgactacgaggccctgggaggtcactttagggagggctgtcctgaaacctggagcctggagcagaaagtgaaaccctggtgctccagacaaagatcttagtcgggactagccggccaaggatgaagcctcacttcagaaacacagtggagcgaatgtatcgagacacattctcctacaacttttataatagacccatcctttctcgtcggaataccgtctggctgtgctacgaagtgaaaacaaagggtccctcaaggccccgtttggacgcaaagatctttcgaggccaggtgcccaggtctttcatcagagccccatttcaagtgctcagtagcccctttggccagtgcgccccaccacatgggacagcgcaggtccagtggcctccccagctgaccgcaggcagggaacaaggcagaccctagagggccaggccacagcaggggctgaggatgcctggtgaatggatgcctgggagaatggatgccagaattcacgcatgaggctctgaacagggctgggaaaacttccaaacgaagggaagctcatgtcttggtgcactttgtgatgatgcttcaacagcaggactgagatggggacatttacaataaacagaaatgtatgggctcgaaaaaaaaaaaaaaaaaa

SEQ ID NO: 394231 - DNA, 1000 bp, Homo Sapiens
cccgcgatccccggcggtggacgccaggcagggcatgaagacccccaacgcacaggaagccgaagggcaacaaaccagggcagctgcaggacgggccactgggtctgcaaacatgacaaagaaaaaagtctcccaaaagaagcagagaggccgaccttcatcccagccccgcaggaacatcgtgggctgcagaatttctcatggatggaaggaaggagatgagcccatcacgcagtggaaaggaaccgttctggatcaggtgcctataaatccctctctttatctggtgaaatatgatggaattgactgtgtctatggactggaacttcacagagatgaaagggttttgtctcttaaaattctttctgacagggtggcatcatctcacattagtgatgccaaccttgcaaataccataattggcaaagcagtggaacatatgtttgagggagagcatggttctaaggatgaatggagggggatggtcttagctcaagcacctatcatgaaagcctggttttatattacctatgagaaagatcctgtcttgtacatgtaccagcttctagatgattataaggaaggtgacctccgcatcatgccagaatccagtgagtctcctccaacagagagggagccaggaggagttgtagatggcctaataggtaagcatgtggaatataccaaagaagatggctccaaaaggatcggcatggtcattcaccaagtggaagccaaaccctctgtgtatttcatcaagtttgatgatgatttccatatctatgtctacgatttggtgaaaaagtcctaactgttagggtaaaatttggcacatgtgtggaaacaaatgtataatttgtagacatgcaaaaaatgttgcctttcagtgtattgaaagcttatggaatccctgataactaaacatctttgccagcattaactgttgttttgctctaaaaaatacaaacttgtgtgtacatgaaaaaaaaaaaaaaaaaaa

SEQ ID NO: 394232 - DNA, 1000 bp, Homo Sapiens; identical to SEQ ID NO: 284283

SEQ ID NO: 394233 - DNA, 1000 bp, Homo Sapiens
ttggaggcctgcaaaggaagagcaacctgtccagactccccgcaggacaggaaaaagagaaatctcgacatggagaaaccctacaataaaaatgaaggaaacctggaaaacgagggaaagccagaagatgaagtagagcctgatgatgaaggaaagtcagacgaggaagaaaagccagacgcggaggggaagacagaatgcgagggaaagcgaaaggctgagggagagccaggtgatgagggacaactggaagataagggaagccaggaaaagcagggcaagtccgaaggtgagggcaagccacaaggcgagggcaagccagcctcccaggcaaagccagagggccagccgcgggccgccgaaaagcgcccggctggagattatgtgccccggaaagcaaaaagaaaaacagacagggggacggacgattcccccaaggactctcaggaggacttacaggaaaggcatctgagcagtgaggagatgatgagagaatgtggagatgtgtcaagggctcaggaggagctaaggaaaaaacagaaaatgggtggttttcattggatgcaaagagatgtacaggatccattcgccccaaggggacaacggggtgtcaggggagtgaggggtggaggtaggggccaaagaggcttacacgatatcccatacctttaatgcctttggccttccattctgacttctctgatgagattattgtcaaccctgctttccctggtagatatttgccaggcccaatgctttaaccttaagctgatatttttgctttagatgtcaatctcgttaccagcagccttttgacccaactacagcgctctatattttagtagaggattttcacccatgtgcatggaaaagatgttcatgacacattgtaaaaaataaataaataaagaacagtttgcagaaaaaaaaaaaaaaaaaaaaaaaaaaaaaaaaaaaaaaaaaaaaaaaaaaaaaaaaaaaaaaaaaaaaaaaaaaaaaa

SEQ ID NO: 394234 - DNA, 1000 bp, Homo Sapiens; identical to SEQ ID NO: 284285

SEQ ID NO: 394235 - DNA, 1000 bp, Homo Sapiens; identical to SEQ ID NO: 284286

SEQ ID NO: 394236 - DNA, 1000 bp, Homo Sapiens; identical to SEQ ID NO: 116110

SEQ ID NO: 394237 - DNA, 1000 bp, Homo Sapiens; identical to SEQ ID NO: 220728

SEQ ID NO: 394238 - DNA, 1000 bp, Homo Sapiens; identical to SEQ ID NO: 115932

SEQ ID NO: 394239 - DNA, 977 bp, Homo Sapiens; identical to SEQ ID NO: 115306

SEQ ID NO: 394240 - DNA, 1000 bp, Homo Sapiens; identical to SEQ ID NO: 290140

SEQ ID NO: 394241 - DNA, 1000 bp, Homo Sapiens; identical to SEQ ID NO: 115307

SEQ ID NO: 394242 - DNA, 1000 bp, Homo Sapiens; identical to SEQ ID NO: 115308

SEQ ID NO: 394243 - DNA, 1000 bp, Homo Sapiens; identical to SEQ ID NO: 115309

SEQ ID NO: 394244 - DNA, 1000 bp, Homo Sapiens; identical to SEQ ID NO: 284290

SEQ ID NO: 394245 - DNA, 1000 bp, Homo Sapiens; identical to SEQ ID NO: 115310

SEQ ID NO: 394246 - DNA, 1000 bp, Homo Sapiens; identical to SEQ ID NO: 115218

SEQ ID NO: 394247 - DNA, 1000 bp, Homo Sapiens; identical to SEQ ID NO: 284292

SEQ ID NO: 394248 - DNA, 1000 bp, Homo Sapiens; identical to SEQ ID NO: 115311

SEQ ID NO: 394249 - DNA, 1000 bp, Homo Sapiens; identical to SEQ ID NO: 115312

SEQ ID NO: 394250 - DNA, 1000 bp, Homo Sapiens; identical to SEQ ID NO: 220730

SEQ ID NO: 394251 - DNA, 1000 bp, Homo Sapiens
gaattcatagaggggaaaaaccatatgtttgcactgaatgtggtaaggccttcttccacaaatcccattttattacacatgagagaattcatactggagagaaaccctatgaatgcagtatttgtgggaaatccttcactaagaaatcacagctccacgtacatcagcagattcacacaggagagaaaccctataggtgtgctgaatgtggaaaggcttttactgacagatcaaatctctttacacaccagaaaattcacactggagagaaaccttataaatgtagtgactgtgggaaagccttcactaggaagtcaggtctccatatacatcagcaatcccatactggagaaaggcattatgagtgcagtgaatgtgggaaagcctttgcaagaaaatcaacactaattatgcatcagagaattcatacaggagagaaaccctatatttgtaatgaatgtgggaaatccttcatccagaagtcacacttaaatagacacaggagaattcatactggagagaaaccctatgaatgcagtgactgtggcaagtctttcattaagaaatcacaactccatgagcatcatcgaattcacacaggagagaaaccatatatatgtgctgagtgtggaaaggccttcaccatcagatcaaatcttattaaacaccagaaaattcatactaaacagaaaccctataagtgcagtgacttggggaaagccttaaactggaagccacaactcagtatgcctcagaaatctgacaatggggaagtagagtgctccatgccacaattatggtgtggggactcagaaggtgaccaaggccaactttcttctatctagttagaattatgaacatctggatcatatagctgatgtgtagttacacatatggggagacacttttgagagtgtttaagcaatgtatagtggccatctttggttacttgatattggtgttgtcaagctcctgcaaataatagtaaatgtgcaaggag

SEQ ID NO: 394252 - DNA, 1000 bp, Homo Sapiens
tcgtacactgtggagctgacccaggctgaaagtccagaagcctcgggtgtaactgagtctgttgtgggcatcccgacctgcgagtccgtggtgcagctgcagccggggcggagctacattatctatgtgcgagccctcaatatggggggccccagcgtgaggagcgagccagctacagtccacaccataggaagctactttcgcctaaacaaggacacttgccatccctggctgaccatttctgaagacggacttacggctgtacgaagtgaaaggagaacccccgccagggagctgtcacccagcgacactcacttcaccaggtgtgttgctgtcatgggaaatctaattccagtccgagggcaccattactgggaggtggaggtggatgagcatttggactacagagttggtgtggcctttgcagatgtccgtaaacaggaggatctgggagcaaattgcctctcctggtgcatgaggcacacatttgcatcatcaaggcataagtatgaatttctgcacaacagaacaactccagatataagaataacagttccaccaaagaagattggcattctattagactatgaacattcaaagttgtcatttttcaatgtggacctttctcagcatctatatacatttagttgtcagctacacgaatttgtgcatccctgtttttctttggaaaagcctgggtgtctaaaggtacataatggcatttcaatgccaaaacatgtcactttctattagaacattctgatgtccagtttcctgtcttccatgcctacccctctcgcagctgctcacgccttagctggctgaacctggcacttaagcaccatgtgcccagcacaatttatggctcatgctattatctgactggtgtgctagcgctcatttcacccaacctggattctagtcctgtgtgctgctacctgtgtgctgctaggatagtcattaccaggcccagctgtaaaataaaggctcagactaaacg

SEQ ID NO: 394253 - DNA, 1000 bp, Homo Sapiens; identical to SEQ ID NO: 115313

SEQ ID NO: 394254 - DNA, 1000 bp, Homo Sapiens; identical to SEQ ID NO: 284297

SEQ ID NO: 394255 - DNA, 1000 bp, Homo Sapiens
tttgggaggccaaggcaggtggatcacctgaggtcaggagttcgagaccaacctggccaacatgacgaaactccgtctctatttaaaatacaaaaattagctgggcatggtggtgcatgcctgtaatcccagctactcgggaggctgaggcaggagaatcacttgaactcgggaggtggaggttgcagtgagccaagatcgcgccactgcactccagcctggatgacagagcaaaaaactgtctcaaaaaaaaaaaaaatcttacaacctcacaaataacctagttcaaaaatgggcaaagattttgaacagatatttctccaaagaagatatacaaatggcaaatacatacgttgaaagatccttaatattgttagccatagggaaatgcaagtcaaactcaaatcagaatgaaatatcacttcaaacctactaggatggttataataaaaaagacagacaatagcacgtgttggtgagtatgtagagaagttggaaccctcatacactgcttgtgggaatgtaaagtactgtagccactttgcaaaacagtttgacagctcctcaaaatgttaaacatgaaattatcatatgacccagcaattctactcataggtatatacttaaaagaaatgaaaaatccacacaaaaacctctgcatgaatgttcatagtaacattatacttcatagccagaaagtataagctaatacccatcaggctgggtgtggtggctcacgcctgtaatcctagcactttgggaggccgagttgggaggtttgcttgagcccaggagttccagaccagcctgggcaacatggcgaaaccccatctctactaaaaatataaaaattagttgcgtgtggtggcacatccctatagtcccagctacttgggaggctgaggtggaaggactgcttgagcgagggaggtcgaggctgcagtgagccacgatcacaccactgcactccagcctaggtgacagagtgagatcctgtctc

SEQ ID NO: 394256 - DNA, 1000 bp, Homo Sapiens
tgacgacaaaccacagcaagggttgcctgaagtggcagaatccacctggtggtttaaatcgtttttccattctgaacctgtgctttcaaatgtgagaataaaagatctgtctgctactggcatgaacagttgattctgacaatcaagatcctctgcctgctgcagtggtccatacatgaacagctccccttcagcgccccagctattccaggactcttctccattgtaagaagacagaaatgtgtctgagatctcatttatgagacaagatcacagcagccactgatataaaaaaagtttaggcatttttctcaacacaaagactatcgctggaagtggcacttgctacctggtgcatctttgaaaagtgtgcctttagaaacaagacacccttttaaagtaatatgtcttcaaatgttgtgacttacataaagtagctctttcattttttatatcatttttattaaaaaaacttaagttagactctttttctgtctgttgagtgatttatttattatgccttaaaactgacttgtcaatgtttcgcataatggtttaaagggcattgaattcgaaattttagaaaataattgtaaaaattcaatttttttaaaagaatgaaggttggaaatagcatatgtatcattaagtatattagagctaatcaattggtcattgtatagactttaaaatttatgactttaaataatatttaataacatggaaaattatattatggcattaaaaattagcataatacaccatatatggtacaatcgtagttgtattaaaaagttacatatgcataaagatagactggaaggaactgtaccaaaatgctgacagggctatttctggagatgggattatgggcgtttttcattctctttttaatatatttttccatatctcccaatttttctaatatgacaagtattgtgcgtaattagaaaataataaatgttaatacaaaaaaaaaaaaaaaaaaaaaaaaaaaaaa

SEQ ID NO: 394257 - DNA, 1000 bp, Homo Sapiens; identical to SEQ ID NO: 284298

SEQ ID NO: 394258 - DNA, 1000 bp, Homo Sapiens
tgacagtattaagttatattctgatgtaagattaactttattaaagaatgtaaacattaatgtttccttatgggaaaacaaataaagtataaagaagacaattcttttcattgaaatatactgtgtatttacacttgctagacccagcaccacttataaatttagtacactgttcagaattttagttaacacagctgacatggttgtgctctgtttgaaagtctaagaataggtattgttggaatatacagtttgtatttgtctgctgtgaatcataatcttgaaatttctaatcaagtttgtaaaatttttatagtgaaacattttaatgacaatttaaaaatttatcttctctaaagaatggtcaaaacaatatcctttcagaaatagaattgttctttaatatctttccaaaatgactttggttaaatggaccagatgtatattagttaaaatttaggactaagttgttgatattctttgagtttacaagttaatccttattggagatgtgccaatatacagttagaatatcattaatttgcactgtttggggaccccatttaagaatgctgaattttgccaactaagaagtaagcaaatgcaatttaaaaagtaaatttgagcattctgtattaaatatgtgcagttattatcacatgaagaaacgcagtgtgtcgggctgtaatattaccatatttgctgtcatgttctcccatctcagtgctgggaaatcaccatgtggaaaccaagcaaacgtgttgtgcatcagccggcttgagtttgttcaatatcaaagctgaaaactagcgaggtctgctgtactgcttattgaagtattgtgattattttaggcattgattcttacaaaatatatactgtaacagtatactttgtacagatttaaattttatttgaaaaaatgaaataaagtaggcaaaaaaataaagatgtttatttttcatgtgactaaaaaaaaaaaaaaaaaaaaaaaaaaaaa

SEQ ID NO: 394259 - DNA, 1000 bp, Homo Sapiens; identical to SEQ ID NO: 115314

SEQ ID NO: 394260 - DNA, 1000 bp, Homo Sapiens; identical to SEQ ID NO: 220731

SEQ ID NO: 394261 - DNA, 1000 bp, Homo Sapiens; identical to SEQ ID NO: 220732

SEQ ID NO: 394262 - DNA, 1000 bp, Homo Sapiens; identical to SEQ ID NO: 220733

SEQ ID NO: 394263 - DNA, 1000 bp, Homo Sapiens; identical to SEQ ID NO: 115315

SEQ ID NO: 394264 - DNA, 672 bp, Homo Sapiens
atgcgctgtgcacacgcccccgccccgcgcacccgctaccccacccgagcccccagcggcccgcgtcccccatcccggtcccaagcccagacacctccgagatccgtcccgcggctccggccgcgccaccgccaccctcaagacccccgcagcccaggcccggccccgcgccaccgacgccccccgcggcccgacccgcgcgccccgccagcccgggcctcgtaccgtaggtttcggacatggccgtctgcgacatcttgggagcggcgccgcctctcgccgggtcaccgtgcactcgcccgcggtccgccggcgcgtctcggtggggaaggacctggggcgggggaccggaggagggaggggcccgaccggtccccacggcaaccgccggtcctcccagcggctgcggcccagccggactccagctccgcgcaggcgccagggccctccaccctccgtccggccgcgaccgcgaggaggaagaggagatgggctacgcgaggcccggcccaccccgcgttcgcgcgtgcgcacggggaggccggggcggggcgcgtgaggacttcggcgcgcgccggaagcacgtgcgcgggctgggcgctctggcggtgtgcgctgaggtgggcagagcggcaggtgggggcgttgggggctgagtcccgatttccctga

SEQ ID NO: 394265 - DNA, 1000 bp, Homo Sapiens; identical to SEQ ID NO: 284302

SEQ ID NO: 394266 - DNA, 1000 bp, Homo Sapiens; identical to SEQ ID NO: 220534

SEQ ID NO: 394267 - DNA, 1000 bp, Homo Sapiens; identical to SEQ ID NO: 284303

SEQ ID NO: 394268 - DNA, 1000 bp, Homo Sapiens; identical to SEQ ID NO: 115316

SEQ ID NO: 394269 - DNA, 915 bp, Homo Sapiens
atggtttttctttcctccgtagaaactgaccaaaggaaaatgtcagcaggaaaccattcctcagtgactgagttcattctggctgggctctcagaacagccagagctccagctgcgcctcttcctcctgttcttaggaatctatgtggtcacagtggtgggcaacttgagcatgatcacactgattgggctcagttctcacctgcatacccccatgtactatttcctcagtggtctgtccttcattgatatctgccattccactatcattacccccaaaatgctggtgaactttgtgacagagaagaacatcatctcctaccctgaatgcatgactcagctttacttcttcctcatttttgctattgcagagtgtcacatgttggctgtaacggcatatgaccgctatgttgccatctgcagccccttgctgtacaatgtcatcatgtcctatcaccactgcttctggctcacagtgggagtttacattttaggcatccttggatctacaattcacaccggctttatgttgagactctttttgtgcaagactaatgtgattaaccattatttttgtgatctcttccctctcttggggctctcctgctccagcacctacatcaatgaattactggttctggtcttgagtgcatttaacatcctgacgcctgccttaaccatccttgcttcttacatctttatcattgccagcatcctccgcattcgctccactgagggcaggtccaaagccttcagcacttgcagctcccacatcttggctgttgctgttttctttgggtctgcagcattcatgtacctgcagccatcatctgtcagctccatggaccaggggaaagtgtcctctgtgttttatactattgttgtgcccatgctgaacccccaatctatagcctaa

SEQ ID NO: 394270 - DNA, 1000 bp, Homo Sapiens; identical to SEQ ID NO: 284305

SEQ ID NO: 394271 - DNA, 1000 bp, Homo Sapiens; identical to SEQ ID NO: 115317

SEQ ID NO: 394272 - DNA, 1000 bp, Homo Sapiens; identical to SEQ ID NO: 115318

SEQ ID NO: 394273 - DNA, 1000 bp, Homo Sapiens; identical to SEQ ID NO: 220735

SEQ ID NO: 394274 - DNA, 1000 bp, Homo Sapiens
aaaggggatgggcgggattggaagaagctgtggcagctcttttccctgttcacctcccgcctgccagggaaggcaggacccgctctgccaagggccctctgcgtattcccttctctctgaggaattgaaatttttgtctctggtgcacgtaaggcagaatgttccctgacaccagtgtgtggatttttaacatcaccgtgagtctgaaaggaccacaggtttttctgcagctattttctagcatttgccagtccctgtgcctggactgattggaacactttgtttttctccctgtgccatttacccttccacctttccatcctgccttctaccacccttggatgaatggattttgtaattctagctgttgtattttgtgaatttgttaattttgttgtttttctgtgaaacacatacattggatatgggaggtaaaggagtgtcccagttgctcctggtcactccctttatagccattactgtcttgtttcttgtaactcaggttaggttttggtctctcttgctccactgcaaaaaaaaaaaaaaaaaaaaaaaaaaaaaaaaagcctgaagagatgagataggaggaaagacctcacagccagatctgctgggttttgaggagtgattttctttcttccccttgaaggggaaaaagctattttcattggtacatttaaagtcccccaactatggggaggtaccaattctggacaagtgccactacaacaacactaaacctgaacttttcaactccgttggtggtgggaggcagcgggcagaaatttactgttggccactgccaggtctatttcatatttcaaaggaatattgggtgctgcatataggaactgaaggggtcaatgtattaaacctgtgattggttgttttcctgtcattttgagagactaaatgtggggggcagatgtcaaaatacctgtacaattttaaaatgtcacaattaaacatgagctggtttcccaaaaaaaaaaaaaaaaaa

SEQ ID NO: 394275 - DNA, 1000 bp, Homo Sapiens; identical to SEQ ID NO: 221747

SEQ ID NO: 394276 - DNA, 1000 bp, Homo Sapiens
gctggaggccctggagtccatctaccctgactccttcacagcttgattgcacattgatccaaccctcctaacaactagtcttccaaaatataaatggactctcctgataccacattctccttcagtagtgcttcacttgacaaggtcctgctaagtattatcagaaaatccacccagcttcaccattactgtgacgtctgaggctggagaaaatgatgaaactgtccagactaccctcaagtttacatacagtgaaaaatacccagatgaagctcccctttatgaaatattctcccaggaaaatctagaagataatgatgtctcagacattttaaaattactagcattacaggctgaagaaaatcttggtatggtgatgatttttactctagtgacagctgtgcaagaaaaattaaatgaaatagtagatcagataaaaactagaagagaagaagaaaagaaacaaaaagaaaaagaagcagaagaagctgaaaagcaattattccatggtactccagttacaattgagaatttcttaaattggaaagccaagtttgatgcagaactcttggaaattaaaaagaaaaggatgaaagaagaagaacaagcaggaaaaaataaattaagtgggaaacaactatttgaaacagatcataatcttgacacatctgatatccagttcttggaggatgctggaaacaacgtggaggtagatgagtctttgttccaagaaatggatgacttggagctggaggatgatgaagatgatccagactataatcctgctgacccagagagtgactcagctgactaatggactgtccccatctgcagagaggcttgactgccacagcatctgtggctatgctcagagggttatgattttcctttctttttttctaagaaaaaattattttcaggagaatattcttctgatagctttcatcattgaacttaataaactgaccttaaaatttcaaatataaaaaaaaaaaaaaaa

SEQ ID NO: 394277 - DNA, 1000 bp, Homo Sapiens; identical to SEQ ID NO: 115319

SEQ ID NO: 394278 - DNA, 1000 bp, Homo Sapiens; identical to SEQ ID NO: 115320

SEQ ID NO: 394279 - DNA, 1000 bp, Homo Sapiens
tacaaaacctgatctcctcttacacctgatgaccaaggaatggcagttggagcttcccaagcttctcatctctgtccatgggggcctgcagaactttgaactccagccaaaactcaagcaagtctttgggaaagggctcatcaaagcagcaatgacaactggagcgtggatattcactggaggggttaacacaggtgttattcgtcatgttggcgatgccttgaaggatcatgcctctaagtctcgaggaaagatatgcaccataggtattgccccctggggaattgtggaaaaccaggaggacctcattggaagagatgttgtccggccataccagaccatgtccaatcccatgagcaagctcactgttctcaacagcatgcattcccacttcattctggctgacaacgggaccactggaaaatatggagcagaggtgaaacttcgaagacaactggaaaagcatatttcactccagaagataaacacaagatgcctgccgtttttctctcttgactcccgcttgttttattcattttggggtagttgccagttagactcagttggaatcggtcaaggtgttcctgtggtggcactcatagtggaaggaggacccaatgtgatctcgattgttttggagtaccttcgagacacccctcccgtgccagtggttgtctgtgatgggagtggacgggcatcggacatcctggcctttgggcataaatactcagaagaaggcgggtaggtaactttccaggccccatggaagaaccctaaagcctgtttggaaacgagggtatgagtggattatgttttcagtagctcaaccaagacctcaaatcaaaacaagctatgaacaaattgtctaaaaaatgtctgtcatgggagggctgtggtgaagaacagagaaacatattctaaatgtcctgtgaagtgggaaattctatgaaagctacacggataataaaaagggtgaggaaaagaaaaaaaaaaaaaaaaa

SEQ ID NO: 394280 - DNA, 1000 bp, Homo Sapiens
gaagccgaacgtggcggaggccggcgagcagttcggacagctgggccgggagctgcgcgcccaggagtgtctgccctacgcggcctggtgccagctggcggtggcgcgctgccagcaggcgctcttccacgggcccggggaggcgctggccctcaccgaggccgcccgcctcttcctgcggcaggagcgcgacgcgcgccagcgcctggtctgccccgccgcctacggggagccgctgcaggccgccgccagcgccctgggcgccgcggtgcgtctgcacctcgagctgggccagccggccgccgccgccgccctctgcctcgagctggccgccgccctgcgcgacctgggccagccggccgccgccgccggtcacttccagcgcgccgcccagctccagctgccccagctgcccctggccgcgctgcaggcgcttggcgaggccgcctcctgccagctgctggcgcgcgactacaccggcgccctggcggtcttcacgcgcatgcagcgcctggcgcgggagcacggcagccacccggtgcagtcactgccgccgcccccgccgccggcaccccagcccgggcccggggcgacgcccgccctaccggccgcgctgcttcctccgaactccggctcggcggcgccctctcccgccgccctgggcgccttctcggacgtgctggtccgctgcgaggtgtcccgcgtgctgctgctgctcctcctgcaaccaccgcccgccaagctgctgccggagcacgcccagaccctggagaagtactcctgggaggcttttgacagccacgggcaggagagcagcggccagcttcccgaggagctctttctgctgctccagtctttggtcatggctacccacgaaaaggacacggaagccatcaagtcgctgcaggtggagatgtggccactgttgactgctgagcagaaccacctccttcacctcgttctgcaagaaaccatctccccctcaggacagggagtctga

SEQ ID NO: 394281 - DNA, 1000 bp, Homo Sapiens; identical to SEQ ID NO: 115321

SEQ ID NO: 394282 - DNA, 1000 bp, Homo Sapiens
attctcgtcgggatgaaagttattctagaggatacagaaatcgtcgaagttcccgagaaactagggagtatgctccaccatctagaggccatggataccgtgattatggtcattctcgtcgacatgaaagttattctagaggatatagaaatcatccaagttcccgagaaaccagggattatgctccaccacatagagactatgcataccgtgattatggtcattctagttgggatgaacattcctctagaggatatagttatcatgatggctacggtgaggcccttggtagagatcattctgaacatctaagtggaagttcttatagagatgcacttcagagatacgggacctctcatggtgcaccacctgcaagagggcctcggatgtcttatggtggaagcacctgccacgcatatagtaatacacgagatagatatggcagaagttgggagagttactcgagctgtggtgattttcattattgtgatcgtgagcatgtttgcagaaaagaccaaaggaatccgccttctctgggtagggtgctccctgatcctcgtgaagcatgtggtagctcaagttatgtggcatctatagtagatggtggggagagtcgatctgaaaaaggagactcgagcagatattaaagcaagcattgaaaataatagttattgcataccaatccttgtttgcaaatcaaaaattgaaatgttatttctgcattgttacctgcatattactgaaagaaacatgttggttttgtggagagaggtagatactaacttcctccatgaattttttgaggtattcaaaggaaaaggaattgttttcaaagtaatttcatacttgttgatgctatttgaaaagtgtttagatgtaatatctaccttaaaattttcacaataaaatttgacatgtactgcaaaaaaaaaaaaaaaaaaaaaaaaaaaaaaaaaaaaaaaaaaaaaaaaaaaaaaaaaaaaaaaaaaaaaaaaaaaaa

SEQ ID NO: 394283 - DNA, 1000 bp, Homo Sapiens; identical to SEQ ID NO: 220736

SEQ ID NO: 394284 - DNA, 1000 bp, Homo Sapiens; identical to SEQ ID NO: 284317

SEQ ID NO: 394285 - DNA, 1000 bp, Homo Sapiens
aaagcataggaaatattctgatagtgacagtaactcagagtctgacacaaattctgactctgatgatgataaaaagagagttaaagccaagaagaaaaagaagaaaaagaaacacaaaacaaagaaaaagaagaataagaaaaccaaaaaagaatccagtgactcaagctgtaaagactcagaagaggacttgtcagaagctacctggatggagcagccaaatgtggcagatactatggatttaatagggccagaagcacctataatacatacctctcaagatgaaaaacctttgaagtatggccatgctttgcttcccggtgaaggtgcagctatggctgagtatgtaaaagctggaaagcgaatcccacgaagaggtgaaattgggttgacaagtgaagagatcggttcttttgaatgctcaggttatgtcatgagtggtagcaggcatcgcagaatggaggctgtacgactgcgtaaggagaaccagatctacagtgctgatgagaagagagctcttgcatcctttaaccaagaagagagacgaaagagagaaagtaagattttagccagtttccgagagatggtgcacaaaaagacaaaagagaaagatgacaagtaaggacttacttgttgcacagcaggaattttaacaacaaaaattttatgtgaccaaaagtgttaaaaggctttacagtgctactgtacttaccatattagtaagtccctcaggaaaaagcttcttttgagatatctttagcagcttattttttgttattttaactttaaaaagtaatatgtgcacatggttttaaaaatattcaaccattataggaggagagttagtaaaaagtgaatctttcactttagcccctgacacctttcccccaaaaatatatattttggtgtcttatatacagaatatacattctgtgcatatacaagagtatatgttgcagcataaagattaaaagctattaaagttttttttcgctcgtta

SEQ ID NO: 394286 - DNA, 387 bp, Homo Sapiens; identical to SEQ ID NO: 220400

SEQ ID NO: 394287 - DNA, 797 bp, Homo Sapiens
  misc_feature (766)..(766): n is a, c, g, or t
ctggtcgggaccggatacattattaaccccagtgcagtagggtccccaggggcaacctgccccacagcgcccaagatgcctagcagaactgcccgctatgcccgctacagcccacggcagcggcggcggcggatgctggctgatcgcagcgtgcgtttccctaatgatgtcctgttcttggaccacatccggcagggtgacctggagcaggtggggcgcttcatccggactcggaaagtctccctggccaccatccacccctcaggcctggccgccttgcatgaagccgtgctctctggaaacctggaatgcgtgaagctgctggtcaaatacggggctgacattcaccagcgagatgaggcgggctggacacccctgcacattgcctgcagcgatgggtaccctgacatagccaggtaccttatctccctgggagcggacagggatgcaaccaacgacgatggcgacctgccctccgacctcatcgacccggactacaaggagctggtggagctcttcaaagggaccacgatggactgagccagctttgcccgcccgcccccgcgcccagggccgcctccytggaaaaaccgcgcgtygcccatgggccavcacgtgccccaccsktgggccaggggcggccggacccgtycctycacgaccccgccacccctyctaggcctkgctttgtccccaggtgaattttttactgtgacactttttactttttcaataaacgtgactcccaggtgagggggcctgggtntacacacgtgamaaaaaaaaaaaaaaaaaaa

SEQ ID NO: 394288 - DNA, 1000 bp, Homo Sapiens; identical to SEQ ID NO: 284319

SEQ ID NO: 394289 - DNA, 1000 bp, Homo Sapiens; identical to SEQ ID NO: 284321

SEQ ID NO: 394290 - DNA, 1000 bp, Homo Sapiens; identical to SEQ ID NO: 284322

SEQ ID NO: 394291 - DNA, 1000 bp, Homo Sapiens; identical to SEQ ID NO: 220401

SEQ ID NO: 394292 - DNA, 1000 bp, Homo Sapiens
atcccagaattttgggaggccgaggcgggtggatcgcttgagcacaggcgttcgagaccagcctgggcaacatggtgagactctgtacaaaaaacaaaaagattagccaggcatggcagtgcacatctgtggttccagttaccggcaggctgtgcaggagggttgcttgagcccgggaagtcaaggctgcagtgagctgtgatcgtgccactgcactacaacctgggtgatagagcaagtctctgtctttaaaaaaacaaaacaacaacaagaagaaacttcagacagttaactgctttgtaaacaacttcacatctaggccgtgtcttgttcttccttaaaccgctgtacaggtggcactggacttagatgaggccgaccttaacatagctagtgagagacactagtagccctactctggcaacacagacatggaaatcagttgcctaaggaaagatcatattggctaagagagtcccttgaatgctcccttttagtgttacgagtagatgaacaatgccgcaggttggacaggtccttctgtgtccttgcaaaagctgccactccacatacccctggcctcagtaagaacggctcacttttagatttaacatcattacatccttgctgatgaactgagatggtcccaactgaggtccactgaccagaaacaacaccacagaacccaaaagagaacgcaccatggggaatggggctattcaaactgaagagcctgagttactctcatggctttagagaaatgttctaaaacttctaagtacataaatatgtgcagggagattcctccccacagagtttttattcagagggtctggagtgaacctcaggaatttgctttttatgtggatttttaaatgatttttaaagtttacactgtaaaattcactcactggggtatacaagaagtatttattgaatatgtactgtgtgccattcatttttctaaacaataaagatagaatagggaacaacagcaacc

SEQ ID NO: 394293 - DNA, 1000 bp, Homo Sapiens; identical to SEQ ID NO: 284324

SEQ ID NO: 394294 - DNA, 1000 bp, Homo Sapiens
tccttaggattgtactgcttccgttggtttggcatctttttatttttaacccttctaactgtgctttcttcgaataataatgatacttcatgtaattagcgtttctaatatctaaagacagaagaaggaagaaaataaacggaagagagagaatgcttgctaaaaatactcatttttgacttcagtccacactcgactgttttcctgggagatagaagttcagtgtagcttgttttcagactaaccgcaaacacgattacagcctcctccaggctagaagttttaatttgcctgacatgcagcacactgtttgttggtattcccagcctggcattcccgtctgcatagctctagtctccctcccaactcccccacccccactttctttctcataaaagggagctgtgaaaacaaggcaatgggagaggctcaaacgagctggaccacataataaaaacagccctacttattttaatcctgaggctatggactcccctggaccctgattgggtggaagaattgtttagttcatttgtgtggtttttctgtcagtagttattatggttgaatcagtgtttccatgacagtcttgcttctgtgggcacgatggggagcctgttaattctcggatgggtctggacagatcaagtctggagtctggagagatttttcagggcttgacctgggctgatattgcaaacctctgcacactcactcagaaccagagcagccgggagcagcctgagctggggttttcttccacatgatctgggaagaaaaagctctaccaaggagcgaactgtgtgagcatggttgctgggggatgttgaatgttttacgtttttaggaagaacacacttctcaaaactttagccattcctgtttccatacaaacaataaatgtggttgtaacaaatgtagtagatcagattctgaacaaccccttaaaaaacaggtccaagtattgaaccatttggaaataaagattttattttatttg

SEQ ID NO: 394295 - DNA, 1000 bp, Homo Sapiens; identical to SEQ ID NO: 115322

SEQ ID NO: 394296 - DNA, 1000 bp, Homo Sapiens
ccatgagaaatccacagcaaccccagagatgggttcatcaataactcaccagcaaatacttcctgaggccccactgtgtgccgagcatgggcataggtactgggcacacctcgatgaacaagggaggtaaggatgtgactctcctagaactttctgtcgagaagaggagatggagaataaacatggaaacaagcaagatcattctggagaaaatgcaatcagatgatgtgctagatggtaacagagagaggtcgaatgagagagagggccgtgacagcctctctgagaagctgaaatccaagcagaacctgaaagacgaggagaaactcagatacataaagactgggaaaagcattcaagtagagggaacagtgcgtgcaaaggccctgaggtgggtgcagtagataccacaggccccctcactcgagaccactccaagcacctcctgccctcttgtgccacagagctcagaaagctaaagcaatgttccccagaggtcctgtggccaaggtcctgcatgggcctgggtgacccctgcagaagcttctgagcaagactgagcagggaaagaaaggccatgtcagaaaaccatcctccagcgagcatggaggcagagagtctcatcctggcatcccaggtgctgagcagagcagacagcagcagaggggctccctagagcagctgggggccctgcctgtgccgtcgctctttcccctccctgccctctggtctgacatcccattggcatcacacacgatgcctcccggaggtgctcttgtgcacacagcaggtcaaagtgccagagaattagatcctgtcctcttgggaacagccctcagccagcagtgagcccttaggaggatgctccaagctctatcctccccgggtccagaggccctgggatggagcgccattgtggaagcagtgacaacttgatgaagctccctgggctggccccttcctctctgccttgttccccgttccctgcagtcctgcaatc

SEQ ID NO: 394297 - DNA, 1000 bp, Homo Sapiens
cgagccttgggatccgcgacgtgggcggccggcgccccaagtgtggtccgtgccggccagagggctgcccggcgcctgcgccctgcccggcgcccgggatctcggcgctcgacgagtgcggctgctgcgcccgctgcctgggagccgagggcgcgagctgcgggggccgcgccggcgggcgctgtggccccggcctggtatgcgcgagccaggccgctggggcagcgcccgagggcaccgggctctgcgtgtgcgcgcagcgcggcaccgtctgcggctccgacggtcgctcgtaccccagcgtctgcgcgctgcgcctgcgcgctcggcacacgccccgcgcgcaccccggtcacctgcacaaggcgcgcgacggcccttgcgagttcgctcctgtggtcgtcgttcctccccgaagtgttcacaacgtcaccggggcgcaggtgggcctgtcctgtgaagtgagggctgtgcctaccccagtcatcacgtggagaaaggtcacgaagtcccctgagggcacccaagcactggaggagctgcctggggaccatgtcaatatagctgtccaagtgcgagggggcccttctgaccatgaggccacggcctggattttgatcaaccccctgcgaaaggaggatgagggtgtgtaccagtgccatgcagccaacatggtgggagaggctgagtcccacagcacagtgacggttctagatctgagtaaatacaggagcttccacttcccagctcccgatgaccgcatgtgatggagaaatggtcttagaaacattgatcatgggatgatggaaaagtcaaataacggatctttgtgcttcatgaagagttggaaaacctgtgtgtgtagatgaccccttttgtgtgtttttaaaaattagatgcaaactagatctgtatgcagatgtagtttttagcagggcaaacagtgagaaacggatttgcatgtggcttttttatacttttgaaatgaattgttccatga

SEQ ID NO: 394298 - DNA, 1000 bp, Homo Sapiens; identical to SEQ ID NO: 115155

SEQ ID NO: 394299 - DNA, 1000 bp, Homo Sapiens; identical to SEQ ID NO: 115323

SEQ ID NO: 394300 - DNA, 1000 bp, Homo Sapiens; identical to SEQ ID NO: 284327

SEQ ID NO: 394301 - DNA, 1000 bp, Homo Sapiens; identical to SEQ ID NO: 115325

SEQ ID NO: 394302 - DNA, 1000 bp, Homo Sapiens
tgtgcgttctaagattgccgaatatatgaaccatctcattgacattggtgttgcagggttcagaattgatgcttccaagcacatgtggcctggagacataaaggcaattttggacaaactgcataatctaaacagtaactggttcccggaaggtagtaaacctttcatttaccaggaggtaattgatctgggtggtgagccaattaaaagcagtgactactttggtaatggccgggtgacagaattcaagtatggtgcaaaactcggcacagttattcgcaagtggaatggagagaagatgtcttacttaaagaactggggagaaggttggggtttcatgccttctgacagagcgcttgtctttgtggataaccatgacaatcaacgaggacatggcgctggaggagcctctatacttaccttctgggatgctaggctgtacaaaatggcagttggatttatgcttgctcatccttatggatttacacgagtaatgtcaagctaccgttggccaagatattttgaaaatggaaaagatgttaatgattgggttgggccaccaaatgataatggagtaactaaagaagttactattaatccagacactacttgtggcaatgactgggtctgtgaacatcgatggcgccaaataaggaacatggttaatttccgcaatgtagtggatggccagccttttacaaactggtatgataatgggagcaaccaagtggcttttgggagaggaaacagaggattcattgttttcaacaatgatgactggacattttctttaactttgcaaactggtcttcctgctggcacatactgtgatgtcatttctggagataaaattaatggcaactgcacaggcattaaaatctacgtttctgatgatggcaaagctcatttttctattagtaactctgctgaagatccatttattgcaattcatgctgaatctaaattgtaaaatttaaaattaaatgcaaatccgcaaagc

SEQ ID NO: 394303 - DNA, 1000 bp, Homo Sapiens; identical to SEQ ID NO: 220737

SEQ ID NO: 394304 - DNA, 1000 bp, Homo Sapiens; identical to SEQ ID NO: 220738

SEQ ID NO: 394305 - DNA, 1000 bp, Homo Sapiens; identical to SEQ ID NO: 284334

SEQ ID NO: 394306 - DNA, 1000 bp, Homo Sapiens; identical to SEQ ID NO: 115327

SEQ ID NO: 394307 - DNA, 1000 bp, Homo Sapiens
tcccaagcttttgctgaggtgctgcggctgccgaagcagcagctgaggaagctgctgtacccgctgcaggaagtagagcggttcctcgccccctacgggaggcaagaccttcacctgcgtatctttgacccaagcccggaggacatagccagggcggacaacatcttcacggccactgaacggaaccgcatcgactacgtcagctccgccgtccgtatcgaccacgccccggaccttccgcggccagagcttgaagagaacatttttattagtggatagcgttgttggaattcaaaaaacagacaatattgccatagaaatgtgtgaagaatttgcattaccttatgtgattgtattaacaaaaattgacaaatcttccaagggacatcttttaaaacaagtgcttcagatccagaaatttgttaacatgaaaactcaaggatgttttcctcagttgtttcctgtaagtgctgtgaccttttctggaatccacctgttgagatgctttatagccagtgtaacaggaagtcttgactaatggttcccggtttagctgaagattcaaaaaaaaaaaaaaaagctttatgctaactggagttaaatacctagaagaatttcaacattgttttaaatgttgtgcatctgtaacttcaggaggatcacttgagctttaaaacctgtgccttctcgaaacaagaatttgtgcctgaggtgaaaaaagtttgtaagttattgaattatggtgttcattagaacagctactagctgattcccctattttaacaaactgacaagagcacatccataaaatgaaaacctgttacaactatgtacagaagggtttgacgttttattgggcttttgtcttttaaagaatatgtctactatgggtattttttttttaaatgttaaaatgggctaggtaaaagggggctgcttttctgttaagcatcgataggtaagttgatggataaaagttactatgtaagcctaaaaaaaa

SEQ ID NO: 394308 - DNA, 1000 bp, Homo Sapiens; identical to SEQ ID NO: 224062

SEQ ID NO: 394309 - DNA, 1000 bp, Homo Sapiens; identical to SEQ ID NO: 284337

SEQ ID NO: 394310 - DNA, 1000 bp, Homo Sapiens
ccacttacagcaacaccctctacctggcagatgagatcatcatccgtgacctcaacatcaaaatcaactttgcatgctcctaccccctggacatgaaagtcagcctgaagaccgccctacagccaatggtcagtgctctaaacatcagagtgggcgggaccggcatgttcaccgtgcggatggcgctcttccagaccccttcctacacgcagccctaccaaggctcctccgtgacactgtccactgaggcttttctctacgtgggcaccatgttggatgggggcgacctgtcccgatttgcactgctcatgaccaactgctatgccacacccagtagcaatgccacggaccccctgaagtacttcatcatccaggacagatgcccacacactagagactcaactatccaagtggtggagaatggggagtcctcccagggccgattttccgtccagatgttccggtttgctggaaactatgacctagtctacctgcactgtgaagtctatctctgtgacaccatgaatgaaaagtgcaagcctacctgctctgggaccagattccgaagtgggagtgtcatagatcaatcccgtgtcctgaacttgggtcccatcacacggaaaggtgtccaggccacagtctcaagggcttttagcagcttggggctcctgaaagtctggctgcctctgcttctctcggccaccttgaccctgacttttcagtgactgacagcggaaagccctgtgctccatggctgccatctcacctcctgctgggcagggggcatgatgcgggccagtgctccagccacagaaaagaaagttcatgctttgttcagcctgccttcttttctcccttttaatcctggctgtcgagaaacagcctgtgtctttaaatgctgctttttctcaaaatgggacttgtgacggtgtacctgaggcccccatctccttaaagagtgtggcaaaataatgatttttaaatctcaaaaaaaaaaaaa

SEQ ID NO: 394311 - DNA, 1000 bp, Homo Sapiens; identical to SEQ ID NO: 284338

SEQ ID NO: 394312 - DNA, 1000 bp, Homo Sapiens; identical to SEQ ID NO: 284340

SEQ ID NO: 394313 - DNA, 1000 bp, Homo Sapiens; identical to SEQ ID NO: 220740

SEQ ID NO: 394314 - DNA, 673 bp, Homo Sapiens; identical to SEQ ID NO: 284342

SEQ ID NO: 394315 - DNA, 1000 bp, Homo Sapiens
tagaatcttttgcaagaaaaaactacggagtaactttccccatcttccacaagattaagattctaggatctgaaggagaacctgcatttagatttcttgttgattcttcaaagaaggaaccaaggtggaatttttggaagtatcttgtcaaccctgagggtcaagttgtgaagttctggaggccagaggagcccattgaagtcatcaggcctgacatagcagctctggttagacaagtgatcataaaaaagaaagaggatctatgagaatgccattgcgtttctaatagaacagagaaatgtctccatgagggtttggtctcattttaaacattttttttttggagacagtgtctcactctgtcacccaggctggagtgcagtagtgcgttctcagctcattgcaacctctgcctttttaaacatgctattaaatgtggcaatgaaggatttttttttaatgttatcttgctattaagtggtaatgaatgttcccaggatgaggatgttacccaaagcaaaaatcaagagtagccaaagaatcaacatgaaatatattaactacttcctctgaccatactaaagaattcagaatacacagtgaccaatgtgcctcaatatcttattgttcaacttgacattttctaggactgtacttgatgaaaatgccaacacactagaccactctttggattcaagagcactgtgtatgactgaaatttctggaataactgtaaatggttatgttaatggaataaaacacaaatgttgaaaaatgtaaaatatatatacatagattcaaatccttatatatgtatgcttgttttgtgtacaggattttgttttttctttttaagtacaggttcctagtgttttactataactgtcactatgtatgtaactgacatatataaatagtcatttataaatgaccgtattataacatttgaaaaagtcttcatcattttcagtaaaaaaaaaaaaaaaaaaaaaaaaaaaaa

SEQ ID NO: 394316 - DNA, 1000 bp, Homo Sapiens; identical to SEQ ID NO: 115330

SEQ ID NO: 394317 - DNA, 1000 bp, Homo Sapiens
cagttaagatcaaaccaccaagacctcaccaggctcccatctacttttcagcctcaactcagtccacctgctctgccaatcacacctgtttctttttgttgttctttccctaggatatagatcctggcatacctgcattctgattcttcttggaacaagccaaattctttcccctgtcagtacgtttgcatgtgtagtacatgttgcatcccaggcctgtctgccttcttaccctattttattttcatcatagcacttactaccatctgaaatgatctcatttatggtttgtctcctcagtgattaacacagttcctgcacacagtaaatcagtagttctcaacaggaagtgaagaggtcatcctgaggggaacatttagcaatacctagagacatttctggttgtcataaccaggggaatgctcctagtggatagaagtcagggaggctgttaaacccattccacaatgcacaggactggaacaaagaatgatctctcactcagaatgtcagtgttgccaaggtggagacatcctgcagtagatgcttgtggcagagggtactggttgtaccccagtatccattctttcattcacctgtgttaatacatgctccagttttgtatttttttttataaacagctgtcaagcataaagataacattttccatctccttgtatgtaagtggaaataggactgtcatgtggggccagtttcttttttttcttcctctgtcctgctgcttgaaacatatgctgctatcttagatcatgaggtcgaggccatgcaaagtggagcaacaaggagctgtgtccctgacgccataagcaccacacctgtcctgaattgctgtgaatgacaccagctaactacaatgcattgtctcaacatcctagacataataaaaagccataaatatgtttgtcctatgcagcacaaaacctttgtatctttgccttttatgttgggatcttaattaaaaattacatcctctactgtc

SEQ ID NO: 394318 - DNA, 1000 bp, Homo Sapiens; identical to SEQ ID NO: 115331

SEQ ID NO: 394319 - DNA, 1000 bp, Homo Sapiens; identical to SEQ ID NO: 115332

SEQ ID NO: 394320 - DNA, 1000 bp, Homo Sapiens; identical to SEQ ID NO: 220742

SEQ ID NO: 394321 - DNA, 993 bp, Homo Sapiens; identical to SEQ ID NO: 56667

SEQ ID NO: 394322 - DNA, 1000 bp, Homo Sapiens; identical to SEQ ID NO: 115333

SEQ ID NO: 394323 - DNA, 1000 bp, Homo Sapiens; identical to SEQ ID NO: 220743

SEQ ID NO: 394324 - DNA, 1000 bp, Homo Sapiens; identical to SEQ ID NO: 284352

SEQ ID NO: 394325 - DNA, 1000 bp, Homo Sapiens
gctggagatctgcttgaaagctgccctggatgtctggtgtaaaaacgaatcatcgatgccacattctgttattgtgtatcgggatggagtgggagatggtcagcttcaagcattgcttgaccatgaagcgaaaaagatgtcgacctacttaaaaaccatctctcctaacaatttcactctagctttcattgtggtgaagaaacgaataaacactagattttttcttaaacatggaagcaattttcaaaatccacctccaggaacagttattgatgtagagttgactaggaatgaatggtatgacttttttattgtgagtcagtctgtgcaagatgggactgttacccccactcattataacgtcatctatgacacgattggcttgagcccagatacagtacagcgtttaacatattgtctatgccacatgtattataatttgccaggcatcatccgagttccagcgccttgccactatgcccacaagctggcttacctcgtggggcagtccattcaccaggaaccgaatcgttccttgtcaactcgtctcttttacctttgacctgcagaagaagacctgatgtgctaatgaaaccacaacgtgtaagcctgtcttccttttgaagcaggatgtctgaaatattttcctaggtccatagcattaaattctcatcgtttttgattggacacaggagagattcagagtgatatgttctactctcaatactaccacagactgatttttccagagaggagaactgacagggtttggcttgcagtttccctttcaaatatgtgacagagatctcacagctgaacgtgactgaacattttccaccccaagcagggccactctaagaattgaaaagatggggcattcgtcacagagagagtacatctgtgaacaagtaaactctacttggaaaactacgtttactttatttttgaaacttttttttgttaaaggacaggaaaggaagacataaaagtaacaacactg

SEQ ID NO: 394326 - DNA, 1000 bp, Homo Sapiens; identical to SEQ ID NO: 115334

SEQ ID NO: 394327 - DNA, 1000 bp, Homo Sapiens; identical to SEQ ID NO: 115335

SEQ ID NO: 394328 - DNA, 481 bp, Homo Sapiens
ctgaagagaagctagcacttgcaaacattccatctggcaatctgagagaagctactgagagaatcctgagacatccccagccacctaccactgctcctgttccaagcaaagaagatctgctcactccggaaaaagaaaatgagtgagactcaaaattcaacaagccagaaagcaatggatgaggataacaaagccgcaagccaaacaatgccgaatacacaagacaagaactacgaggatgaattgactcaagtagctctagctctggttgaggatgtcatcaattatgctgttaagattgtggaagaggagcgaaaccctttgaaaaacatcaagtggatgactcacggtgaattcactgtggaaaagggtcttaaacaaattgacgaatatttttcggtaagttaggccgaccactccagcatggtacaccggtgtgaagaacaataaagagactctcagcagatcaaaaaaaaaaaaa

SEQ ID NO: 394329 - DNA, 1000 bp, Homo Sapiens
tctgtctttttcaactacagccaagcatcacaaccatataccaggggacttccacttgatgagagtcctgctggtgcacaggaaacaccagctccccaggccttggaagataagcaaggtcaccctcagagagagaggctggtactacaaagggaggcaagcaccacaaagcaatgaatcattatcatctcaacatgcccccaatttctctcccaatcaccctcaatactcacgtgtacacattcagatgcagattaacaatcttttaaattctcttcctaaatttctacaaaaacaaataataaaatattcagcagtgggggacaccactaaagaaacatctgagcaaacaaatacagtcagtaaaactcctaccaaacaatgctacttccaaatgccaaaatgggctttgtcatgagacagtttatctcaatgtacctgtcattaaaaatggaaaaattccttccatatctttagcaggtgccagtttttccaactgattcattgaatttaaaatagagcagtaggaaattataagactctgcaataatatctcataatcataaaatattaattcatatatatagattactctgcttcatgacatttcctagaagtatttcaagttcatcctaaaattttatccttcaaaataattttagacaatgccataacttaattatgattttctagcacttgattaaagtaaatttatgactctgctcatgttcaggtgcagctgaatctatcgccatggattcattctttcaattactcatccaacaaatttttattaaatcccactccttacacaaacttttcatagcttttggctcaaataaacaatcaagaataattatgagagaaaacacaaatctaaagtatgtttgattttataagaagctcttgtaaccaaccatccagtgagtctactaagtgtttacctatatggtttgatgagggtattaaattaaaattgataattaaacaacctgatgat

SEQ ID NO: 394330 - DNA, 1000 bp, Homo Sapiens; identical to SEQ ID NO: 220744

SEQ ID NO: 394331 - DNA, 1000 bp, Homo Sapiens; identical to SEQ ID NO: 115338

SEQ ID NO: 394332 - DNA, 1000 bp, Homo Sapiens; identical to SEQ ID NO: 284359

SEQ ID NO: 394333 - DNA, 1000 bp, Homo Sapiens; identical to SEQ ID NO: 284361

SEQ ID NO: 394334 - DNA, 1000 bp, Homo Sapiens; identical to SEQ ID NO: 115339

SEQ ID NO: 394335 - DNA, 1000 bp, Homo Sapiens; identical to SEQ ID NO: 115340

SEQ ID NO: 394336 - DNA, 1000 bp, Homo Sapiens; identical to SEQ ID NO: 284363

SEQ ID NO: 394337 - DNA, 1000 bp, Homo Sapiens; identical to SEQ ID NO: 294309

SEQ ID NO: 394338 - DNA, 1000 bp, Homo Sapiens; identical to SEQ ID NO: 115341

SEQ ID NO: 394339 - DNA, 1000 bp, Homo Sapiens; identical to SEQ ID NO: 284365

SEQ ID NO: 394340 - DNA, 1000 bp, Homo Sapiens
ggagaaaccctatgaatgtaaggaatgtgggaaatgcttcactgtttcttcacacctagttgaacatgtaagaattcatactggagagaaaccttatcaatgtaaggaatgtggaagagccttcgctgggcgctcaggccttactaaacatgtacgaatacacactggagagaagccctatgaatgtaacgaatgtgggaaagcctacaataggttttatctactaactgaacattttaaaactcacacagaggagaagccctttgaatgtaaggtatgtggaaaatccttcagaagctcttcatgccttaagaatcactttagaattcacactggaataaaaccctataaatgtaaggagtgtgggaaagcattcactgtttcctcaagcttacataatcatgtaaaaatccatactggagagaagccctatgaatgtaaggactgtgggaaagcctttgctacatcttcacaactcattgaacatataagaactcacactggagagaaaccgtatatatgtaaggaatgtgggaaaaccttccgtgcttcttcacatctacagaaacatgttagaattcacactggagagaaaccctatatatgtaacgaatgtgggaaagcctacaatagattttatttacttactaaacatttaaaaacacactgaagaaaaactctgaatgtaaggaatgtggaaatcttttaggaatttctcataccataattaccacatttgaattcacactgaagagaaattttattggtacaaagaatgtgaggaggccttcagttatccccattcacttcgaagacatgaaagaactcatactctatgtgtcccctataaattttaggaatgttagggagccaatggaatcttttttttattattttattttattttattttattttattttattttattttattttattttatttgagacagagttttgctgttgtcatcacacaggctggagtgcaatggcatgatcc

SEQ ID NO: 394341 - DNA, 1000 bp, Homo Sapiens; identical to SEQ ID NO: 284366

SEQ ID NO: 394342 - DNA, 1000 bp, Homo Sapiens; identical to SEQ ID NO: 284367

SEQ ID NO: 394343 - DNA, 1000 bp, Homo Sapiens; identical to SEQ ID NO: 220745

SEQ ID NO: 394344 - DNA, 1000 bp, Homo Sapiens; identical to SEQ ID NO: 284370

SEQ ID NO: 394345 - DNA, 1000 bp, Homo Sapiens
tctttttggctttggtgtgtgagaaagaactgtactgcatggattggacagttaaaatgatgcaaaaagtctgcaaagtctttagcactccagtggaaagaaagaacttcctgcagaatgtggcaaatgcatttgcatgtgttataatggaaatgctgcaatcaattatgtctggagaccgtgatgaagatgacagaagctttttgaatttgttccatcttgtacatgctcaggctaacttccataaggaggtcctgtatttgaccatgaatactcctctgtctacctaaatcctcagaaagccttgcctttagagaacgtcactgaacgaatgattagaggagtgctactttttcactcaaaaaatagcatccatgggactttttatcatctaagtaacctaagaattcaaaagctggatagaattttagaagcaactacgtacatcattattaatataaaaataacaggcagcctcaagaatgtgctgagatttctctggaaaacaagctctgcctctccgggttttagtcaacctaacaccaaaccaaaatagaatgttagctgttcaagaatctgggaccagccaacctgtatgtatgcatttttgaagcaagagaaaattccattttatagttagacccaaattcactaaatagtgtgtatgttcactttgtttaagttgtatagacatagcccagaatgttttgtgaagatttgcaatatggtgttttggaatgtgtagaatacaaatcacagtttttactaccttcttggcatatgcttacaaagaacattatattttgttcatgttttacatgaactaatggataaaaaacaaagtatacatatatgtctatatatatatatagacacacacacacagacatatatttccttctttaaggtaatcatacaaaaggtctatacatacaggaaggtatatattgtctcaatgcaatcaaatcatcttttactggggattcaaataaaatgtagc

SEQ ID NO: 394346 - DNA, 1000 bp, Homo Sapiens
ggttatacagcgtcaggatatgactgctttctttaaattatttgatgacgatttaattcaagatttcttgtggatggactgctgctgtaaaattgcagacaagtatcttttggctatgacctttgtttatttcaagagggctaaatttactataagtgagcataccaggataaatttctttattgctctgtatctggctaatacagttgaagaagatgaagaagaaaccaagtacgaaatttttccatgggctttagggaaaaactggagaaaattgttccctaatttcttaaagttaagggaccagctctgggatagaattgactatagggctattgtaagcaggcgatgttgtgaggaggttatggccattgcaccaacccattatatctggcaaagagaacgttctgttcatcacagtggagctgtcagaaactacaacagagatgaagttcagctgccccggggacctagtgccacaccagtagattgttcactctgtggtaaaaaaagaagatatgttagactgggattgtcttcatcatcatctttatccagtcatacagcaggggtgacagaaaaacattctcaggactcatacaactcactgtcaatggacataataggtgatccttctcaagcttatactggttctgaaggtatgatttagtaatatgccagaattagatttatgcatgttgtttactgagctctagtcagtcctttctggcggggatacataataatttatatactccaacaatatgagttaaattaatcttgaaactttctcccctttcagttactttttgtcttgtgtccatatttgttttgtggtgacccacctaaacagatttttaatgtgacctatgttaagttgaaaactaatgcaccataagcctcagtattttaagagcctgaatcatttttttgaaatgtttattttattcaaaagggtttcaagaagaaaataaatttacttgtaatctcaccttccaaa

SEQ ID NO: 394347 - DNA, 1000 bp, Homo Sapiens
aagaaggattatttgatagaaaacgaggagttacccagtccttgagaaggaggtgcatgtacgtacctatgtgcatacacttattttatatgttagaaatgacgtgttttaatgagaggcctccccgttttattctttgaggagtggggaagggaagaaaagaaagaagctgaaaggtactgacacagagcaacaaaattagcacctgtgtgaattatttagtgtgacttcacctgaggcatcacagagacaaaagaatgtgaagctacttaacaaagtaaggcaacgtttctgcttcagactcctggcacatttactttttgtcattataaccataactaaatatctgcatgtaccaagagtccctaagccaccccctccaaagatggagtgtagaaatgatgacagcacttagtaagttcaaagatgacattcagggatgcattttttgatgatagaactacagtttttatcgccagctgggcaaagagtatattgctgaaatgatatataaatatattgaattgatgtttactgtttatagtcatctgaaatatcatatttactctgattctactcacttgttttttaaaaataagtgtcctactattgtattatatattgatagaaactgttaaagctattttgaaaatatgagttcttagctttaatcatgaagtctgaagtttgctttcagtaattattttaaaagttgttttggttcattgctttataatatttattattgaatgccaaacctgttcttttttttactgtgtccaatattctttcaagcaaatgcaatggctggaatataattcagaattaactgaaacccagccagaagagggaccacctgtaaagcaagtcctttcaagtttcactgcacatcccaaaccatgttacaaaaagagcaactgctatattcacattatgatatttttctatcttaaatttgtcaaaataaagtatgagtctaactattaaaaaaaaaaaaaaa

SEQ ID NO: 394348 - DNA, 1000 bp, Homo Sapiens; identical to SEQ ID NO: 116533

SEQ ID NO: 394349 - DNA, 1000 bp, Homo Sapiens; identical to SEQ ID NO: 115343

SEQ ID NO: 394350 - DNA, 1000 bp, Homo Sapiens; identical to SEQ ID NO: 115344

SEQ ID NO: 394351 - DNA, 1000 bp, Homo Sapiens; identical to SEQ ID NO: 115345

SEQ ID NO: 394352 - DNA, 903 bp, Homo Sapiens
ctcgggagtgcggtcggcagtagagcctggcggtgtcttggcttcggcgctttaaccctgtaggggcgtgcgactgcgtccttctcaagggggcgcccctcgagcggcgggctgagtggcgtccagcggcggggaggcgaaaaccctgggggactcagaagcgggtggcggtgtagggcgtgtaaggaggagatagccaggcccctgcggggggggcgggccctccttagcgtcccagagggcttgtctgctacaggggctcccagcggcctcccgcaccgaagggaccctgggcgtctgaggccctgatccgggcgggccttcaggatgttagcagtccctgtccggttgaaggtaggaagccgaaaacccgagtgggggacgaacagacttacctcctgtcccgcaaaagatccactagatcgtcgtctccaaaacctgagagaccgcgaacgggttccagagccgcagcgttctctcagacctggcgttcaggaagattctagagagcacgggcaggtcccggaggtctcagacccgcaggcctgcggggcgggggcggggtggcgcccaggacgactccccgggctcagcttggctgcctgcctccttctcaaacaatgagtacctactgtgtgtagaagcagcaggacagcctgtcatcactgggaaagaggccagaagagccgtttggccagggtctccaatttaggctttcaacattatctctaaagaaggttatacattatgtcggctccactggctgatgggatcaaagaccctccttgtatatccttaaacctgtactctattaccaggccactgtgcctgtggagcactgtaagttcctaccttttaataaattttataattatcttgtgagcagcaaaaaaaaaaaaaaaa

SEQ ID NO: 394353 - DNA, 1000 bp, Homo Sapiens
ccggtgggggtgctgtagaagcagccctttccatataccttgaaaactatgcaaccagcatggggtctcgggaacagcttgcgattgcagagtttgcaagatcacttcttgttattcccaatacactagcagttaatgctgcccaggactccacagatctggttgcaaaattaagagcttttcataatgaggcccaggttaacccagaacgtaaaaatctaaaatggattggtcttgatttgagcaatggtaaacctcgagacaacaaacaagcaggggtgtttgaaccaaccatagttaaagttaagagtttgaaatttgcaacagaagctgcaatcaccattcttcgaattgatgatcttattaaattacatccagaaagtaaagatgataaacatggaagttatgaagatgctgttcactctggagcccttaatgattgatctgatgttccttttatttataacaatgttaaatgcaattgtcttgtaccttgagttgagtattacacattaaagtaaagtacaagctgtaaacttgggtttttgtgatgtaggaaatggtttccatctgtactttggtcctctgatttcacatattgcaacctagtactttattagtttaaaaagaaattgaggttgttcaaagtttaagcaattcattctctctgaacacacattgctattcccatcccacccccaatgcacagggctgcaacaccacgacttctgcccattctctccagtgtgtgtaacagggtcacaagaattcgacagccagatgctccaagagggtggcccaaggctatagcccctccttcaatattgacctaacgggggagaaaagatttagattgtttattcttctgtggacacagtttaaaatcttaaacttgtctttttcctcttaatgtatcagcatgctaccctttcaaactcaaattttcattttaactgcttaggaataaatttacacctttgtgaaaattcaaaaaaaaaaa

SEQ ID NO: 394354 - DNA, 755 bp, Homo Sapiens; identical to SEQ ID NO: 284374

SEQ ID NO: 394355 - DNA, 1000 bp, Homo Sapiens
agcctgtcgtacatggtggggatgatcgccagcttctacaacaccgaggcagtcatcatggccgtgggcatcaccacagccgtctgcttcaccgtcgtcatcttctccatgcagacccgctacgacttcacctcatgcatgggcgtgctcctggtgagcatggtggtgctcttcatcttcgccattctctgcatcttcatccggaaccgcatcctggagatcgtgtacgcctcactgggcgctctgctcttcacctgcttcctcgcagtggacacccagctgctgctggggaacaagcagctgtccctgagcccagaagagtatgtgtttgctgcgctgaacctgtacacagacatcatcaacatcttcctgtacatcctcaccatcattggccgcgccaaggagtagccgagctccagctcgctgtgcccgctcaggtggcacggctggcctggaccctgcccctggcacggcagtgccagctgtacttcccctctctcttgtccccaggcacagcctagggaaaaggatgcctctctccaaccctcctgtatgtacactgcagatacttccatttggacccgctgtggccacagcatggcccctttagtcctcccgcccccgccaaggggcaccaaggccacgtttccgtgccacctcctgtctactcattgttgcatgagccctgtctgccagcccaccccagggactgggggcagcaccaggtcccggggagagggattgagccaagaggtgagggtgcacgtcttccctcctgtcccagctccccagcctggcgtagagcacccctcccctcccccccacccccctggagtgctgccctctggggacatgcggagtgggggtcttatccctgtgctgagccctgagggcagagaggatggcatgtttcaggggagggggaagccttcctctcaatttgttgtcagtgaaattccaataaatgggatttgctctctgcaaaaaaaaaaaaaaaaaa

SEQ ID NO: 394356 - DNA, 1000 bp, Homo Sapiens; identical to SEQ ID NO: 115346

SEQ ID NO: 394357 - DNA, 1000 bp, Homo Sapiens; identical to SEQ ID NO: 115347

SEQ ID NO: 394358 - DNA, 1000 bp, Homo Sapiens; identical to SEQ ID NO: 284378

SEQ ID NO: 394359 - DNA, 1000 bp, Homo Sapiens; identical to SEQ ID NO: 115348

SEQ ID NO: 394360 - DNA, 1000 bp, Homo Sapiens
gtttttgcagagctcctgacaggccagccactgtggcctggaaaatcagatgtggaccaactttatctgataatcagaacactaggaaaattaatcccaagacatcaatcaatctttaaaagtaacgggtttttccatggcatcagtatacctgagccagaagacatggaaactcttgaggaaaagttctcagatgttcatcctgtggctctgaacttcatgaaggggtgtctgaagatgaatccagatgacagattaacctgttcccaactcctggagagctcctactttgattcttttcaagaggcccaaattaaaagaaaagcacgtaatgaaggaagaaacagaagacgccaacaggtacttccgctcaaaagttaaagtgctataaaaataattccttttttgtttttgtttgtctgcctttcaaagtgagacaaggtggacaccaagacctttcatttgtactggtgtagttgtatttgtctagcttaataaatattggtaattgatgtaataaaaccatagaactatgaaaatatcaagattattgcaaaaatcttattccaaacacacctgaatcaaatcgttacgcaactctttggctgctctgattggatatcccacccacaagatcgtatacccataatataacaacttcatataataaaatgctgattccaacaggactgagttttgccagcattgcaaaggaatccaagtgcctttctgtagcctccagatgtgcaataacggtaacttgactcttccatcttttcacccacagcaggcacctaagtctgcctttcctaggctttttctcaaaaccaagatctgccaggtacaaaggaatgaaacccagacatctgggaaccaaattctacccaatgggccaatattgcagaacagtatggtgactgttatgacaaacattaattctgcagtttatcaggtgactgtccttcacttgctttcagaaaactttgaagttaaatcgtaa

SEQ ID NO: 394361 - DNA, 1000 bp, Homo Sapiens; identical to SEQ ID NO: 284380

SEQ ID NO: 394362 - DNA, 1000 bp, Homo Sapiens; identical to SEQ ID NO: 284381

SEQ ID NO: 394363 - DNA, 1000 bp, Homo Sapiens; identical to SEQ ID NO: 284382

SEQ ID NO: 394364 - DNA, 1000 bp, Homo Sapiens; identical to SEQ ID NO: 115349

SEQ ID NO: 394365 - DNA, 1000 bp, Homo Sapiens; identical to SEQ ID NO: 117676

SEQ ID NO: 394366 - DNA, 557 bp, Homo Sapiens
cctcattctcccctatggaagaccttgtgtagcccttcatcaggcgtgtgttgtggctttgtcacactgttttgtaatgatcgctttgcatgtcttttccagctgactccgccaccatctcctgcctggatgactgcagcagcatccttgctggcctctctgcttcctgcattgcctcctctgaatcttcaggatgccaagtttgtggaggaacggagaaagcagctccagaattacctgcgcagcgtcatgaacaaagtcatccagatggtccccgagttcgctgccagccccaagaaggagaccctcatccagctgatgcccttcttcgtgatgggattacaggtcggaatgtacggattgtttcattttggggtaatgatggatcagccacagccaagccttacccgtgctgacgaatctccatgtgatcgtgtcctttctccatgtgctgcccacagaaagcagcgagactgctgtctcagctggaaagctgagcctgagagatttctggttaaaaaaaaataaaaaataaaaatctcctgcctaaggaaata

SEQ ID NO: 394367 - DNA, 1000 bp, Homo Sapiens
gtccttaaaaggttatggctttcaaatcacagcctatttcctcaagagagggatacgccttcgctgcatcaggagcacacagaatgctgaactctgtgtattccctgacagatttgtggtttgtgtcagtcagcttgcattcagtcgtgatcttttagcaagtcagaatgaagatttgacagaaagagttctccatggagtgtctgattactttgctgagtgtgcagagagttcacttcctcccagtgcaaagctccggagaaatgctctgaaagaaattgtgaaaagaactgaaacaaaaagcagtgtcacgagcaaatcgcagaccagaagagacactgtggaaacatctagtgactcagtgattgcagagatagcaaggaggaggaatgatggtcaggcttcctccagtcccccatcagaatccatgggacaagcaaaggattccataaaggcagctgagagccactgggggcttcctgttcaaaagctggaaaaagttaatcagacccagccagaagacactagtggccagcaaaaacctcatcctggggagcggttaaagacagggcttctaagcaggagccccgtctgtagctgtgagtcagcatcaccatgtccaaaacaaagtccacgagtggccaaaacccaacagaaacgcaggaactgcagctctgcggaagacttcgaccaccacgggagagtttctcttggaagtgatcgattagtcccgagagaaataatagtggaaaaaagcaaagctgtcagggttttgccagcttcagagttgtcagatccagggttacttttgaaacaagatttggcaaaaaccacgtctaaggaagagttgcatgttttggaaagtctctcctccagacatcttatgaaaaataacccagggcaggcacagcaaaccggcttagccacaaacactgaaagattatctacaattcagaacagcccaaccaagaaaagaaagaaatacgaaagaggccattaa

SEQ ID NO: 394368 - DNA, 1000 bp, Homo Sapiens
cacttccatgtgaaccatgaacattaaacatggagaaatgagcagcagcagattagtttgggatgcatcttcaggggatgctgaaacaacaacagcatttggtttcctctacacccctgtcatccgtcccccacaagcccagggagtggtcagcagtggtgctttgtgatgtctaagccaccctaggactgccattggctgggacactgcctgtatgatcaaacaaagctcaagagtgtggctttgccttgccaccaggaaggtatacatagggagggccagagctctgggacatcctcctggcaagcttcaatatagctgtggaagtctgcagtctacaagagcctactatagacattctacaaccaagcagaatcatggaacagccgacttcaagcaccaatggggagaagaggaagagcccctgtgaatccaataacaaaaaaaatgatgagatgcaggaggcaccgaacagggtcttagcccccaaacagagcttgcaaaagacaaaaacaatagaatatctaacaataatagtgtattactacaggaagcatacgaaaataaattcaaatcaactggagaaggaccagtcccgagagaactccatcaatcccgtccaagaggaggaggacgaaggcctagactcagctgaaggatcttcacaggaggacgaagacctggactcatctgaaggatcttcacaggaggacgaagacctggactcatctgaaggatcttcacaggaggacgaagacctggactcatctgaaggatcttcacaggaggacgaagacctggactcatctgaaggatcttcacaggaggacgaagacctggacccacctgaaggatcttcacaggaggacgaagacctagactcatctgaaggatcttcacaggagggtggggaggactagtcaaacatggagaaaccaaattggacaaatcctcactaccaatggcgatgattacaataaaatcaagtttgaggagctga

SEQ ID NO: 394369 - DNA, 1000 bp, Homo Sapiens
cggagctggaagagctgaggcagcagctggaggagagcagctctgcactgacccgagccctgagggctgagtttgagaagggcagggaggagcaggagcgccggcaccagatggagctgaataccctgaagcagcagctggagctggagaggcaggcgtgggaggccggccgcaccaggaaggaggaggcgtggctgctgaaccgggaacaggagctgagggaagaaatccggaaaggccgggacaaggagattgagctggtcattcaccggctggaggccgacatggcgctggccaaggaggagagtgagaaggctgccgagagccgcatcaagcgcttacgggacaagtacgaggccgagctctccgagctggagcagtcggagcggaagcttcaggagcggtgctcggagctgaagggccagcttggggaggccgagggcgagaatctgcgtctgcagggccttgtgcggcagaaggagcgggcgctggaggatgcgcaggcggtgaacgagcagctttctagcgagcgcagcaacctggcccaggtgatccgccaggagttcgaggaccggctggcagcctctgaggaggagacgcggcaggccaaggccgagctggccacgctgcaggcccgccagcagctggagctggaggaggtgcaccggagggtgaagacagccctcgcgaggaaggaggaggccgtgagcagcctccggacacaacatgaggctgcggtgaagcgggccgaccacctggaggagctgctggagcagcacaggaggcccacgccaagtaccaagtgaccagggatgccgggaacactgtcgaagaacggaaggcagaggacagaggctggacgtgggcccagaggcccacagggacgcccacctgccccccacagaggctggtggttgagatgcccacggctaagcacctgtggctgcattttaacagtaaaggaggccgttgttttcagcgcaaaaaaaaaaaaaaaaaa

SEQ ID NO: 394370 - DNA, 1000 bp, Homo Sapiens
ttcacctgctcaacagaccccgagaatatattcagctacacagggataccacagtacaaactcttacgcttcagccttcggttaaagacggacttattgtatatgaagactcacctttggttaaagcagtaaagttgggtcatattctggtagtagatgaggctgacaaagctccaacaaatgtcacgtgtattttaaaaactctagtagaaaatggagaaatgattctagcagatggaagacgcattgttgcaaattctgctaatgtgaatggaagagaaaatgttgtagtgattcatcctgattttaggatgattgttctggcaaatagacctggatttcctttcctaggcaatgatttcttcggtaccttaggtgatatttttagctgccatgcagttgataaccccaaaccccactcggagctcgagatgctcagacagtatggaccaaatgtgcctgagcccatccttcagaagcttgtggctgcctttggagagctgaggagtttggctgaccaagggattattaactatccttattctaccagagaagttgtcaacatagtcaaacatttacagaaatttccgactgaaggtctctccagtgtagttcgaaatgtgtttgactttgattcctacaacaatgacatgagggagatattgattaacactttacacaaatacgggatacctatcggagcaaagcctaccagtgtgcagctggcaaaggagtaaggcaaattcagtactcttctgattcttaaatgctgatagttcttgatttatcattccattctacaaaactgagttgctatggaaattactttccatgagtaagcttttcaaatacatgtatatgttgctgtttgctggctgcttttcagttaaatagcattatttataggcctgtaaattgaaaattttgattattatgtatgtcccatgagtagatgtaataaataaagggaaatatttgtttctttaaaaaaaaaaaaaaa

SEQ ID NO: 394371 - DNA, 1000 bp, Homo Sapiens
aagattgatggcaggagggtccttgtggacgtggagaggggccgaaccgtgaagggctggaggccccggcggctaggaggaggcctcggtggtaccagaagaggaggggctgatgtgaacatccggcattcaggccgcgatgacacctcccgctacgatgagaggcccggcccctccccgcttccgcacagggaccgggaccgggaccgtgagcgggagcgcagagagcggagccgggagcgagacaaggagcgagaacggcgacgctcccgctcccgggaccggcggaggcgctcacggagtcgcgacaaggaggagcggaggcgctccagggagcggagcaaggacaaggaccgggaccggaagcggcgaagcagccggagtcgggagcgggcccggcgggagcgggagcgcaaggaggagctgcgtggcggcggtggcgacatggcggagccctccgaggcgggtgacgcgccccctgatgatgggcctccaggggagctcgggcctgacggccctgacggtccagaggaaaagggccgggatcgtgaccgggagcgacggcggagccaccggagcgagcgcgagcggcgccgggaccgggatcgtgaccgtgaccgtgaccgcgagcacaaacggggggagcggggcagtgagcggggcagggatgaggcccgaggtgggggcggtggccaggacaacgggctggagggtctgggcaacgacagccgagacatgtacatggagtctgagggcggcgacggctacctggctccggagaatgggtatttgatggaggctgcgccggagtgaagaggtcgtcctctccatctgctgtgtttggacgcgttcctgcccagccccttgctgtcatcccctcccccaaccttggccacttgagtttgtcctccaagggtaggtgtctcatttgttctggccccttggatttaaaaataaaattaatttcctgttgatagtgggcaaaaaaaaaaaaaaaaaa

SEQ ID NO: 394372 - DNA, 1000 bp, Homo Sapiens; identical to SEQ ID NO: 115350

SEQ ID NO: 394373 - DNA, 1000 bp, Homo Sapiens; identical to SEQ ID NO: 115351

SEQ ID NO: 394374 - DNA, 1000 bp, Homo Sapiens; identical to SEQ ID NO: 220749

SEQ ID NO: 394375 - DNA, 1000 bp, Homo Sapiens; identical to SEQ ID NO: 220750

SEQ ID NO: 394376 - DNA, 1000 bp, Homo Sapiens; identical to SEQ ID NO: 284390

SEQ ID NO: 394377 - DNA, 1000 bp, Homo Sapiens; identical to SEQ ID NO: 284391

SEQ ID NO: 394378 - DNA, 1000 bp, Homo Sapiens; identical to SEQ ID NO: 284392

SEQ ID NO: 394379 - DNA, 1000 bp, Homo Sapiens; identical to SEQ ID NO: 115352

SEQ ID NO: 394380 - DNA, 1000 bp, Homo Sapiens; identical to SEQ ID NO: 115353

SEQ ID NO: 394381 - DNA, 1000 bp, Homo Sapiens; identical to SEQ ID NO: 115354

SEQ ID NO: 394382 - DNA, 1000 bp, Homo Sapiens; identical to SEQ ID NO: 115354

SEQ ID NO: 394383 - DNA, 1000 bp, Homo Sapiens
aaaaagatggcgccccgcgcccggggggccccttcctgagcgccccggcccctccctccgccgcctccccctcctccccgcggcgcccccgccccgccccgcccccgccgagaccccgaccccggccccacgggcggacactcggccgggcagccgcgggccgagcgcagccgcctccgccaccgatgcgcctggtggccagactccaagtgggaccggcggacacgcagcctcgcgtgtcaggggaagctgatggagaatcgagctctggatccagggactcgggactcctatggtgccaccagccacctccccaacaagggggccctggcgaaggtcaagaacaacttcaaagacttgatgtccaaactgacggagggccagtatgtgctgtgccggtggacagatggcctgtactacctcgggaagatcaagagggtcagcagctctaagcaaagctgcctcgtgactttcgaagataattccaaatactgggtcctatggaaggacatacagcatgccggtgttccaggagaggagcccaagtgcaacatctgcctagggaagacatcagggccgctgaatgagatcctcatctgcgggaagtgtggcctgggttaccaccagcagtgccacatccccatagcgggcagtgctgaccagcccctgctcacaccttggttctgccgacgctgcatcttcgcactggctgtgcgggtgagccttccatcctccccagtccctgcctctcctgcctcctccagtggggcagaccagagactcccatcacagagtctgagctccaagcagaagggccacacctgggctttggagacagatagcgcctctgccactgtccttggccaggatttgtagactccctgagcctcagtttcctcaactgtaaagtggagatgggtttggtgtcgggaataacgggaccaataaatgatgctttactattaaaaaagaaaatccatgtaaataaaaaaaaaaaaaa

SEQ ID NO: 394384 - DNA, 1000 bp, Homo Sapiens; identical to SEQ ID NO: 284398

SEQ ID NO: 394385 - DNA, 1000 bp, Homo Sapiens; identical to SEQ ID NO: 220753

SEQ ID NO: 394386 - DNA, 1000 bp, Homo Sapiens; identical to SEQ ID NO: 115355

SEQ ID NO: 394387 - DNA, 1000 bp, Homo Sapiens; identical to SEQ ID NO: 284399

SEQ ID NO: 394388 - DNA, 1000 bp, Homo Sapiens; identical to SEQ ID NO: 115355

SEQ ID NO: 394389 - DNA, 1000 bp, Homo Sapiens; identical to SEQ ID NO: 220755

SEQ ID NO: 394390 - DNA, 1000 bp, Homo Sapiens
aagtagatctaacccgagtctcacccacagaattcatataaattcatatatgccttctctctggctgcctcttttcctgtttgcactctgagggcttaagtcatatgtgatatttacaaagcaattggcccatttacagagagacatatataatttctccacaaagccttgaccatggttcatgaaaccgtttgggttcatttaaatttgtctgaatcattagtcttgacttgaagtgaacaaaacaccctttgcccaagtgccattggcttgtctgcatttcaaaatcattaaaaccaggtatggaagcctacgtgctcacagttatctaatgaggttatttcaaagtttgcattactaacagccattctgcaaagtgtattgatgtgtatagtgatctgtataaagtcagtagttcttagctgaacctcaactgtgaggaatctatgactccacagatgtccttggtgcacataggcaaacggcacttctcatcttactgaagttaaataagatattccataagaaggtatagtgccctttttgggggagtacctttagtatattcctaaaattgccaccaaagaatgccaaatctgaatttctcttggtttccacctgatttggaactagggtgtgacctctaaatagcattctcatgacacatgggggcgccaaagagaagtaagagagatagctagatagctagatagctagatagtcttgtgtcttgtttgaccaaggtaaccgtaataaaagagtccatccccatcctttactgttgatgtgaccttgggcttcagtttctgcatctgcattggcaaaatagaagtgatagtagtaggtaaaagttagagtgatcctactatatgacggaaactttggctggatgcaagagctttaaattggtagaaaagtcacaagatgagcttgtgactatgaagagagcaaaagctaacttttttttcctagataatcaataaaatatttgaagactgaa

SEQ ID NO: 394391 - DNA, 934 bp, Homo Sapiens; identical to SEQ ID NO: 220756

SEQ ID NO: 394392 - DNA, 664 bp, Homo Sapiens
gcggctagcagggagaggggcggagaggcagcgaacctctcaatgtgcagcaggccgcgagggctatataaagctcgggtctcggacctactggaactggtcaagattgcccgcgagctggcagcggccttccgcccagctctgcggcgtcatggagaacgcgggaggcgcagagggtacagagagtggagctgcggcgtgcgcggccaccgacggccctacgcggcgcgcgggcgcggactccggatacgcaggcttctggagaccctgggtggacgccggaggcaagaaagaagaggagacgccgaaccacgccgcggaggcgatgcccgatggccctggaatgaccgcagcctcaggaaagctttaccaattcaggcacccagtcagactattttggccaaaatcaaaatgttatgattacttatatcaagaagcagaagctcttctgaaaaattttccaattcaagccacaatttcattttatgaagattctgatagcgaagatgaaattgaggatctgacctgtgaaaattaatctgattagctacttttgattatatccaaagcttgtggggtttaaatttagtgtacaaatgtatcataattattttaaactaatttatttgtatataaattattaataaaatgaaatattttgtaa

SEQ ID NO: 394393 - DNA, 1000 bp, Homo Sapiens; identical to SEQ ID NO: 220757

SEQ ID NO: 394394 - DNA, 829 bp, Homo Sapiens; identical to SEQ ID NO: 115356

SEQ ID NO: 394395 - DNA, 1000 bp, Homo Sapiens; identical to SEQ ID NO: 115357

SEQ ID NO: 394396 - DNA, 1000 bp, Homo Sapiens
gttcatctcttgccaaagtttgacccactggttattctaaagacactctccagttatccaatcaagagtatgatgggtgcccccattgtttaccggatgttgctacagcaggatctttccagttacaagttcccccatctacagaactgcgtcactgtaggggagtcccttcttccagaaactctggagaactggagggcccagacaggactggacatccgagaatcctatggccagacagaaacgggattaacttgcatggtttccaagacaatgaaaatcaaaccaggatacatgggaacggctgcttcctgttatgatgtacagatcatagatgataagggcaacgtcctgccccccggcacagaaggagacattggcatcagggtcaaacccatcaggcctataggcatcttctctggctatgtggacaatcccgacaagacagcagccaacattcgaggagacttttggctccttggagaccggggaatcaaagatgaagatgggtatttccagtttatgggacgggcagatgatatcattaactccagcgggtaccggattggaccctcggaggtagagaatgcactgatggagcaccctgctgtggttgagacggccgtgatcagcagcccagaccccgtccgaggagaggtggtgaaggcatttgtggtcctggcctcgcagttcctgtcccatgacccagaacagctcaccaaggagctgcagcagcatgtgaagtcagtgacagccccatacaagtacccaagaaagatagagtttgtcttgaacctgcccaagactgtcacagggaaaattcaacgagccaagcttcgagacaaggagtggaagatgtccggaaaagcccgtgcgcagtgagacatctaagagacattcatttggattcccctcttctttctctttcttttccctttgggcccttggccttcctatgatgatatgagattctttatggaagaacatgaatataagtttt

SEQ ID NO: 394397 - DNA, 1000 bp, Homo Sapiens; identical to SEQ ID NO: 284405

SEQ ID NO: 394398 - DNA, 1000 bp, Homo Sapiens; identical to SEQ ID NO: 220760

SEQ ID NO: 394399 - DNA, 1000 bp, Homo Sapiens
cgcacggatgatgccttcatcttacgcttcttgcgggctaggaagtttcatcactttgaggccttccgcctcctggcgcagtactttgagtaccggcagcagaacctggacatgttcaaaagctttaaggccaccgaccctggcatcaagcaggcactgaaggatggcttccctgggggcctggccaatctggaccactatggcaggaagattctagtcctttttgctgccaattgggatcagagcaggtacacactggtggatattttgcgtgccatcttactttctttagaagccatgattgaagatcctgagcttcaagtgaatgggtttgttttgatcatagactggagtaacttcactttcaagcaagcctctaaactcacaccaagtatgctgcgattagctattgaaggcctgcaggatagtttcccagcgcgatttggaggaattcattttgtcaatcaaccatggtatatccatgccctgtacaccgtgatccggcctttcctgaaggagaaaactcggaaaaggatatttttgcatggtaacaacctgaacagtctacaccaactaattcatcctgagatcctgccctctgagtttggaggaatgctgcctccttatgacatggggacatgggcaagaacactgctagaccatgaatatgacgatgacagcgagtacaatgtagactcctacagcatgcctgtgaaggaagtagagaaggaactctccccaaagtccatgaagagatctcaatcagtagtggatcctacagtactaaaacgcatggataaaaatgaggaagaaaacatgcaaccattgctttctctggactaataacttctctacatccccttcatggattagaaatggaaagtattggttttcagcaacagggacaacactgtagaggaattaccagctggaaaccgacttattcatgttaatgtagcataatatataacaaggcatcaggctttccttggcctgaacc

SEQ ID NO: 394400 - DNA, 1000 bp, Homo Sapiens; identical to SEQ ID NO: 220761

SEQ ID NO: 394401 - DNA, 1000 bp, Homo Sapiens; identical to SEQ ID NO: 284409

SEQ ID NO: 394402 - DNA, 805 bp, Homo Sapiens
tccttgtgcctcttggacttttttgtgtgtttaggtgcccaatggggagcaaactgacttgctgcctgggccccagcgggggcctcaactgtgactgctgcaggccagatgtgggaccctgccatgagtgtgagattcctgagactgtggcagccacagcaccagcatccaccactgcaaagcctgccaaattggatttgaaagctaagaaggcccaactcatgcagtacctcagcctcccgaagacgccgaagatgctgaagatgtccaaaggtttggacgcccgctccaagcgctggttaaaaataatatggagacggcacgggatttggcctctagaaaatataggtcccactgaagatgtgcaggcgtctgcacacggcggtgtggaggagaatatgacatcagatattgaaatacctgaggccaagcacgaccaccgtcccactgaagatgtgcaggtgtctgcacacggcggtgtggaggagaatataacgtcagatattgaaatatctgaggccaagcacgaccaccatttggtcgaagatctcagtgaaagcctatctgtctgtcttgaagacttcatgacatcggatctcagtgaaagcctatctgtctctcttgaagacttcatgacatcaggtctcagtgaaagcctatctgtctctcttgaagacctcatgacaccggagatggcaaaggagagatatgaagattacctctgctgggttaagatggcacggtctcggctcaatgaacccatcagcagccaggttctaggacttctccggctttagtgttccaa

SEQ ID NO: 394403 - DNA, 1000 bp, Homo Sapiens; identical to SEQ ID NO: 220762

SEQ ID NO: 394404 - DNA, 1000 bp, Homo Sapiens
cacttctactagggccaaaaagagaaaagaaaagaaaatttctactaatttcagacctctagagcaattcagtcctgttggaaatttagaacatgaagaaactttgaatgtcttgaccctttttaaagattttttaggcaataacagtaatagggaattcacttattgagaatgaaagtgaaggggatgatcctaatgtcttagaaagctagattactagtaaggcttccagacttctatcagttctattgattctacatcagacttccaagcagccaagcaggaatgtttttcctgttggaagccttagccatatattcttatgtcaaggttgcttctttgcaccttgctaaacctgatacgaatgcaggagttttaaattcttcaaaaactcagatttaacccagaaccagagtaaagtcacctctactatttacacatcataggctcaagattgtacagtgagtgatgctgtcatgaagaaaattcagatgaaaaaggcaagatacatgtgaataaggcaaaagccagaaaatagcccttattcatgatgctgttactgagaataatgaaaatcatatttcagaaaatattaccatgtaaatatgtacatatgtagtctagtaaaagcaggcaaacacatatctttctgataaaaacatctcctttttattctacttacttggggcccaggtcagtataatttagtcaacttgaaaatttcggtagtctctgtttgcatggcagaaattctgcacatgttttatctgattcctgtgataacttaaaaggctcttttatgttaaaagagaggtgaatcttctttgacagactttgtattttccacttctaactgggcctctcttttctcaggatctatcctagccaaatatctcagttacatttaccatacagtttcctttgtgaaagaacagtaggggaggaaataattctctgctgtgtattgtatttttcaaataaaaatttaaaaattcaattg

SEQ ID NO: 394405 - DNA, 1000 bp, Homo Sapiens; identical to SEQ ID NO: 284411

SEQ ID NO: 394406 - DNA, 1000 bp, Homo Sapiens
tgtgattctactcaggcctttccaagagtcctgttttccaaactggcttgtggagatttctggtgctcctttgggacagagagaaatttacatatatcacttttttttttttgagacggagttttgctcttgttgcccaggctggagtgcaacggcacgatctcggctcaccgcaacctccgcctccccagttcaagcgattctcctgcctcagcctcctgagtagctgggattacaggcatgtgtcaccatgcccggctaatttttgtatttttagtggagaccgggtttctccatgttggtcaggctggtcttgaactcccgaccttaggtgatctgcgcgcctcgtgcctgtaatcccagtactttgggaggccgagtcgggtggatcacttgtggtcaggagtttgagaccagcttggccaacatggtgaaaccccatctctactaaaaatacaaaagattcgctgggtgtgttggcacccgcttgtaatctcagctacttgggaggctgaggtggggggtaagtttgaacccaggagggagaggttgtggtgagccaagatggcaccattgcactccagcctgggtgacagagtgagacttcatctcaaaataaataaataaaaatcaaaaaaataaaataaaggggttaactcttctaaaaaggttctttttaattctatgattttctgatctattaatgtgactagcaattttgtgagatgtagtttgtcatgttatcactactttttggttaaaacactgtggaaaaccttgagtggtaactttatcttagtccaggtgattccagttgcagcagtagctaggtgccctgcgataactctctccccttgagggtttccagtgtgggaagttgtcatttaggcgcgccaaaagtggtctggcctctcgtgcttcttgagatcccttccgggctctggtctatcttgtctccttagctgggggcctacagtcatctagagtaaaagggatggtt

SEQ ID NO: 394407 - DNA, 1000 bp, Homo Sapiens; identical to SEQ ID NO: 284412

SEQ ID NO: 394408 - DNA, 1000 bp, Homo Sapiens
ttctgcagtgaggagttggggcgggtgagccaaagcggccccccatggtgtctacctgaggggcagggaaccgcctgcctgtgcactcacgccaccccccagcccacaaagagcccatctgagagaaggacgtggtggagccaggacgggaaagcgtcctgtcggctggccatgctgttgcttgcgtctcgaatcttcggttctcgaggaagtgttgacagtgtgatgctaatgtctgcttttcttggcgttgggtagaagcaggacatctgtgtgtatgtgcgtatttaaattagattatttataataaccagagccagccctcgcgctggccaggatcctcctgccgagctgatgtcgctcctgccctctgccggggtccggaagcgacatctcaggaggtagctctcagcagagtgaggattcctgcctttcgtagagttttgtgtgactttttaaattattcatgtgtcccttaaaagtttcactacgtggagaaaattccagcaccaagtgttgtggcaacagctgagagagtgcaggcaccactgtgttgtggcttgttgaccgggaatgtgtcacccctgccagggaactcttctcctcgcgggggacttgggatggccatcagaccttctagggtctggctggggtcatcctaggtatgggtgaccgtccctgagacataagcgaggtagattcagccatcctcaccctcagacttgaggtccccacccaggccaagccggccccccgtaccccttgcctgggagcaaaccgccaggacgcagcctccacgccgcacctgccacattcagccctgcccaggaaggaacacatgacccttctgtctgtgactgttgctgagtctctgtctcatgtcgtagaattgtggataattgtctagtgaccctctcatcactgtaaccatcgcgcctggcctagatgtcgtgttttggatgctgtgttttcaataaatgcctctggggccctgctttta

SEQ ID NO: 394409 - DNA, 1000 bp, Homo Sapiens; identical to SEQ ID NO: 220402

SEQ ID NO: 394410 - DNA, 1000 bp, Homo Sapiens; identical to SEQ ID NO: 284414

SEQ ID NO: 394411 - DNA, 1000 bp, Homo Sapiens; identical to SEQ ID NO: 284415

SEQ ID NO: 394412 - DNA, 1000 bp, Homo Sapiens; identical to SEQ ID NO: 220763

SEQ ID NO: 394413 - DNA, 1000 bp, Homo Sapiens; identical to SEQ ID NO: 115359

SEQ ID NO: 394414 - DNA, 1000 bp, Homo Sapiens
ttcagtgggagttcagacctcaccaaacacataagaatccacactggggaacgaccttatgagtgcagcaagtgtggaagggccttcagtcggagctcagacctaagcaaacacaaacgaatccatactcgggagaaacactatgggtgtccccagtgtggaaaagacttcagcatcaaggcagaactcaccaaacacagaaggatccacactgaagagaaacgttacaggtgtgaggagtgtgggaaagcctttcgtcataactgtaagcgcagggctcatgaacgagagcatacaggggagaagccctatcaatgcagggattgtgggaaaaccttccaagataagcactgccttaccatccatcagagaatccacactggagagaaaccttacaaatgtttagagtgtgggaaagctttcagtgggaagtcaaacttgaccaatcatcgaagaattcacactggagagaagcctcacaaatgtgaggtatgtggaatggccttccatcatagttcagtcctgaggcagcacaaaagaatccacactggtgagaagccatacacctgcagtgagtgtggcacgtccttccgtcagggctcagctctgattggacataagcgagttcatactggggagaaaccttatgaatgtgaggaatgtggaaaagcttttagagtgagctcaaatcttactggacataagaaaagaaaacatcaagtatggagtacccatgaacttgatgggagtaggaaatccctctctccagtgactgtttctcagacctcagtagtcagtattttgaccagtgcctgagtataacgattctggtgttactttctgtttttcctacctcttaggctggtccttctgtctcttatattagttattcctgatttcctgacccttaattgtgagattccccaaagacattgtcctttaccttcttattcactattttttcagtgagcacatttacttccaagagtttatcaatcac

SEQ ID NO: 394415 - DNA, 1000 bp, Homo Sapiens; identical to SEQ ID NO: 220764

SEQ ID NO: 394416 - DNA, 1000 bp, Homo Sapiens; identical to SEQ ID NO: 220766

SEQ ID NO: 394417 - DNA, 1000 bp, Homo Sapiens; identical to SEQ ID NO: 115360

SEQ ID NO: 394418 - DNA, 1000 bp, Homo Sapiens; identical to SEQ ID NO: 220769

SEQ ID NO: 394419 - DNA, 1000 bp, Homo Sapiens; identical to SEQ ID NO: 284426

SEQ ID NO: 394420 - DNA, 1000 bp, Homo Sapiens; identical to SEQ ID NO: 284427

SEQ ID NO: 394421 - DNA, 1000 bp, Homo Sapiens
tcctgacagtgtttgaaaagggccgcctgccccctccccactgtgcttttgatgcctttggagtcaaaggcaggtggggtcacctgatgagctaagatccagccccagaatcctggaggagcaggaggtagcaggagaggaccaggtccccaagtcccttcacagggtccccacccccactggctttggtgctgtccacacagtgcccaccagaaggcagagggaactccagggcagggatgtgcctgaaagagtcaacagtcccctgatcccctacctctgcctgccctccagccccatcaccagcttcttgctcagggagacttccgccctcctcactgaggcaacatgaagcccgaggcccagatgggggctgaacaggtagggcacatcagttaatgccagtgaggtcagcttctgccctccagcaatacatgtgcaggggttgctgctttcccagtgccaggagaacccccgctccgagtcagcctgtgtgggtcatgaggctggggcccaggagacacggtcccaggcactgcacaggcctgcagtattaccaggcggaggggctgcttttctgcccttcctcacccccacgccccaccccactcccccagagtactccccactgtgaaaagagctggaaactaaactggttagaatgaacctggctccctgagcatccctggatccttcaaataggccctgagatgtgaggtctgctgcttcactggggcccgatgactttggctgggggagggggcctagggcctcttctcattgaaagctctgctttatacagacccaagcatacacaccaggccgtcactttgggttctggcataagttcagaacaattcaagtccatgtgtcccatggctggtcagagccctgggtcaaaaccactcagcccaggggaggggatgaggcattgtcaccctagacccctcttcctctctcccccaccatagtgtgcaataaagtgtctgttcttaccaaa

SEQ ID NO: 394422 - DNA, 1000 bp, Homo Sapiens
tgtttccatgctggacatgtgtctaccaggacgtgctcttggctgccactggcagggcctggaatgaggacacttgttgtgcaccttgctttggagccccagacaggcaaaaaaatatccatgtggcttcacccaggtcatctctttgcttgtatgaacctcaggccacccttagaaagggtctcatagccccggtgtctcactctctgacctttgccaagtcgtcttcagcagcagctggaactctttgaagtggctgccacagatgttggcaaagcccggcctgggatgcctccaccctgcaccaggcacggggctgcctctgctgcatattcacctggaaatcatccacatgccaagcaccgcagaggcaaggggagtctgccattggactgcgttcaacacggctgcagggatacagacaagcacattccctggcagaggcacgggcccggctggctggagctgcagcagctgtgtgtggtcacagagcttccaaatgagggagatggatggcctcgcttcacagtgtgcccagagcatgtccacggtgcctgggaagaccagggactcaccatgcccggctctggtttccctcacagtgaagcctccttgctggtaggatccatggccaagcatgggggcaggggctgggggagctctgtcagtgacttctcgcaggcagcaaggcctctgggagctggccaggaaaacagaaactccatcctggagcagaagatggaacccagcacatctcgagagcccactgcacagaggtggacactgagggaccgctggctcacacgcatgttgaaatatgtgctcagctgatgtcttcccaagtgagccctcctgcaggacaggaccacacagtgtcctcaaaaagcgccccagactcagaaaaatccaagaccttggctctactatctttgggccattgaaccagaggtagcaagtcgcatttctccttaaatgataataaaacccccccttgatttaa

SEQ ID NO: 394423 - DNA, 1000 bp, Homo Sapiens
gtataaaatcatattgaatcagacagccaggtattttgcaaaatttgcaccagataatgaacagaatattttatgggggttgcctctgcagtatggctggcaatataggacaggcagattagctgatccaacccgaaggacaaactgtggctatgaatctggagatcatatgtgcatctctgtggacagttggtgggctgatttgaattattttctgtcttcattaccctttcttgctgcggttgattctggtgtaatggggatatcatcagaccaagtcaggcttttgcccccacccaagaatgagaggaagttttgttatgatgtttctagctgtcgttcatccttccctgagacaatgaacaagtggaacaccttttaccagtatttgcagtcaccttttagtaagtttgatgatctgttgaagtacttatgggctgcacacacttcaaccttggcagataatatcaaaagttttgaagacagatatgattattattctaaagcagaagcgcattttgagagaagttgggtactggctgtggatcatttagctgcagtcctctttcctacaaccttgattagatcatataagttccagaagggcatgccaccacgaattcttcttaatactgatgtagcccctttcatcagtgactttactgcttttcagaatgtagtcctggttcttctaaatatgcttgacaatgtggataaatctataggttatctttgtacagaaaaatctaatgtatatagagatcattcggaatctagctctagaagttatggaaataactcctgaaacatttaacttcaaacttcaggaaatgattaatgaattaaaaatgaaaaactcgaacttgacaatcagtaatttcaaaaaattaatgtcatcatgaccatgtagtttattctttctgatatttttgatttatgcttatttgttaagatcttgtacatgtattaaaaacttaaattaaatgcattcaagttaaaa

SEQ ID NO: 394424 - DNA, 1000 bp, Homo Sapiens
ccagcatgtgggctgatctctgcaaaaacaaccaggtgcgtgctagtgcaattgcccaagatgctgatcagaattacgactatgccagtaacagtgtggttcttcatttggagccgggagatgaagtctatatcaaattagatggcgggaaagcccatggaggaaacaacaacaaatacagcacgttttctggatttattatttatgctgactgataatgcagaaactaagcttattattctgagtttgaacactggattcgtatggctaacgtcagtgaatcaaggatcccaggggatgccaatggcagggcacctcagttgtgtatatgtggggaaatcaaatgctacctgactcacatctgtatcactcagaaacattatgtaaaaaatatcaaagcaagataagcagatgtgtgatccactaccgccaaagcaaatactccttatcgttagtgtccatgtgaatgaagtcctatatagatcacaaatttttatagacaaatctaagacattgaattatttcttctatatatatgatactttggtgtactgtgatcttgctgcttttatccatatgtcagctttggttcttgtgagtttacctgcttattatgatacttggagtccattcatagtgtggggaagaatgatttttgccctgcaggagaaggtctaattgaaataatgctgcttgtccccaaagaaattgtttgccttgtactcttgttaaccttagagctagacctgggaatgattcaacttcaagccttaacctggaattttctggatttgagggaattcccaagcctatgatctttttcacattttctttttcttatatgaattttcttttctctcttttctggtgatagtctttaaaaatagagattgacagtgtatcataggattaccctctaagtgtgaaaatgtgtaattatgtacggtatttagaaaaagcccttatgtgtccattttgtcaactgaatacatttagattc

SEQ ID NO: 394425 - DNA, 1000 bp, Homo Sapiens; identical to SEQ ID NO: 115361

SEQ ID NO: 394426 - DNA, 1000 bp, Homo Sapiens
cagaaggccagcaggaaagggtcgcggaggactggcacatccacaaccgtaggactcttggatccaagtttttaggctgagactgggcggtccggggttctccttcggcgctcacaccccgcaaactcgtgggcagtgcagtgctggaggccgggggcagtggcggacccgcagggtaaccttgtctcgcgcacctcccgagcccccagcagcccactctcgtccgaatgctttgtttatttggtgacaccagggaacgtggagaagaagatcgaagttcagtttttcttttttctttattttaaatatttttcttaactaaatggtatgtttatgtgaacccatcatctcttggaattaagtgtcctcagcgaactccagattcctaggggaaacctacgtgcccagagcaggaaacgcacaagtcaattcaggttccggtgccatccgcagtaaattcccttccttttgctccaaattcctcctctgcgtccaggagagggacccccgggactcccgcacacccaggaccgggagcggcagagcagagggcgggtgcgagggcgcgagggaagggaggcggcctgcggacctggggcgcgcagtttcccggctccgtgggaacctccaaccccggggcgcgcggcctaggctccgccctgccaggcttggggccgagcggcccacctagtgggtcctgacctggggaagccgagtccgcgcgcgggtcgggccgcgacgagggaagctcgcctgggcaagtgccgcgcggggtcagacccaccccaggggttgcaaaccgcaagcgaaagtcgagaggggctggagctttccctctgatccgttttacactgtgaaaaccgcaggcctgtcgcctaggcggccacttttaaattgggaagcaaatagacgaaaaaccaaaacaaacgtacgagctgacttttcccagctaagtttcccctcaataaaaagcccgctttctgggaaagacagaaactga

SEQ ID NO: 394427 - DNA, 1000 bp, Homo Sapiens; identical to SEQ ID NO: 115362

SEQ ID NO: 394428 - DNA, 1000 bp, Homo Sapiens
aagtgacgagaaagattctgttttgaatatagccagaggaaaaaagcatggagaaaaaactaggagagtgtcttctcataaacaaccagccttgaaggctacaagtgacaaggaaaattctgttccgaatatggccacagaaacaaaggatgaacaaatatctgggacagtgtcttctcagaaacaaccagccttgaaggctacaagtgacaagaaagattctgtttcgaatatacccacagaaataaaggatggacaacaatctggaacagtgtcttctcagaaacaaccggcctggaaggctacaagtgtcaagaaagattctgtttcgaatatagccacagagataaaggatggacaaatacgtgggacagtgtcttctcagagacaaccagccttgaaggctacaggtgatgagaaagattctgtttcgaatatagccagagaaataaaggatggagaaaaatctgggacagtgtctcctcagaaacaatcggcccagaaggttatatttaaaaagaaagtttctcttttgaatattgccacaagaataacgggcagttggaaatctggaacagagtatcctgagaatctgcctaccttgaaggctacaattgaaaataaaaattctgttctgaatacagccaccaaaatgaaagatgtacaaacatccacaccagaacaagacttagaaatggcatcagagggagagcaaaagaggcttgaagaatatgaaaataaccagccacagattgtgttcacctattgaaaattaaaaagacattttgtttatgtaaaagattaacagaacttaaagataatcactgtgagcaacttagagtaaaaattcgaaaactgaaaaataaggctagtgtactacaaaagagactatctgaaaaagaagaaataaaatcgcagttaaagcatgaaacacttgaattggaaaaagaactctgtagtttgagatttgccatacagcaagaaaaaaaaaaaaaaaaaa

SEQ ID NO: 394429 - DNA, 1000 bp, Homo Sapiens; identical to SEQ ID NO: 220770

SEQ ID NO: 394430 - DNA, 1000 bp, Homo Sapiens; identical to SEQ ID NO: 284433

SEQ ID NO: 394431 - DNA, 1000 bp, Homo Sapiens; identical to SEQ ID NO: 284434

SEQ ID NO: 394432 - DNA, 1000 bp, Homo Sapiens; identical to SEQ ID NO: 115363

SEQ ID NO: 394433 - DNA, 1000 bp, Homo Sapiens; identical to SEQ ID NO: 115364

SEQ ID NO: 394434 - DNA, 1000 bp, Homo Sapiens; identical to SEQ ID NO: 220773

SEQ ID NO: 394435 - DNA, 1000 bp, Homo Sapiens
gacttcaaaaataaaaaatctgaagaggcttctcctgttttatatattatgtgaagaatttagatcttatattggtttgcacaagttccctggagaaaaaaattgctctgtgtatatctcttggaaaataagacaatagtatttctcctttgcaatagcagttataacagatgtgaaaatatacttgactctaatatgattatacaaaagagcatggatgcatttcaaatgttagatattgctactataatcaaatgatttcatattgatctttttatcatgatcctccctatcaagcactaaaaagttgaaccattatactttatatctgtaatgatactgattatgaaatgtcccctcaaactcattgcagcagataacttttttgagtcattgacttcattttatatttaaaaaattatggaatatcatctgtcattatattctaattaaaattgtgcataatgctttggaaaaatgggtcttttataggaaaaaaactgggataactgatttctatggctttcaaagctaaaatatataatatactaaaccaactctaatattgcttcttgtgttttactgtcagattaaattacagcttttatggatgattaaattttagtacattttcatttggtttgtgtgtttttgttattgtttatagattaaagcgtttattttataatgaccacattgttttaaatgcgacagtagctcctttctgcctagtatctgcagaacactggctttaaactatactaagtaactggtgatttctctaggaacagacctcgcactttctgttctaaatatatttattcctactatacagtaaaatacatcagacaacatagaatagttttgtatattctctcttgatcttaaagattgtatcttattgaatatcccactgtatattatttttatatgtaaaaagataagtttaatactgtatcagggtttaacttttactatttcagatcttccacagcttgta

SEQ ID NO: 394436 - DNA, 1000 bp, Homo Sapiens; identical to SEQ ID NO: 115365

SEQ ID NO: 394437 - DNA, 851 bp, Homo Sapiens; identical to SEQ ID NO: 284437

SEQ ID NO: 394438 - DNA, 1000 bp, Homo Sapiens; identical to SEQ ID NO: 117259

SEQ ID NO: 394439 - DNA, 1000 bp, Homo Sapiens
cagcatccaggtggacaggaattctcagtcctacatccaggccattagtgacctgaacagcctggttttttgctgtatgaggaatgcctttcatgagaatgacaccatctacagcctgacctctgctggccgctggacacaccgcgcctgccagctggcccatcagcacacagaccaagtgatccaactgaggaaggctcaactacagaaggagggggagctggagaagatcaagaggaagaggcacttggattttctggacatcctcctcttggccaaaatggagaatgggagcatcttgtcagacaaggacctccgtgctgaggtggacacgttcatgtttgagggccacgacaccacagccagtgggatctcctggatcctctatgctctggccacacaccccaagcatcaggagaggtgccgggaggagatccatggcctcctgggtgatggagcctccatcacctggaaccacctggaccagatgccctacaccaccatgtgcattaaggaggcactgaggctctacccaccggtgccaggcattggaagagagctcagcactcccgtcaccttccctgatgggcgctccttgcccaaaggtatcatggtcctcctctccatttatggccttcaccacaacccaaaagtgtggcccaacctagaggtgtttgacccttcccgttttgcaccgggttctgctcaacacagccacgctttcctgcccttctcaggaggatcaaggaactgcatcgggaaacaatttgccatgaaccagctgaaggtggccagggccctgaccctgctccgctttgagctgctgcctgatcccaccaggatccccatccccatggcacgacttgtgttgaaatccaaaaatggaatccacctgcgtctcaggaggctccctaacccttgtgaagacaaggaccagctttgagggcctccacctgccatcctgtcttcctgacccccactcctatctcctgcctgtctg

SEQ ID NO: 394440 - DNA, 1000 bp, Homo Sapiens; identical to SEQ ID NO: 220774

SEQ ID NO: 394441 - DNA, 1000 bp, Homo Sapiens; identical to SEQ ID NO: 284439

SEQ ID NO: 394442 - DNA, 846 bp, Homo Sapiens
catctgtatagcgggacaggatgtcacagatgtagagattcaacaggatgagagtgcctgagctgtgacgggtgcccagaacatgatctcaggaacacatatctccttttccagccggaagtacctgagagagaccccagaaggtggataagactgcagagagcagggagcatgaagcaccttgcccaaggtctcaccaggcaagagaagggcggagaagggcggcttcttcatggattgtaaatccccaaagcgtgcaaacatctgcccccatctccctggaggtggcctgttctccacgccaccctcacaggctgcctggcggactctcctcacagcactgtgcttcccggggcccacttgtacaggccccatgcgagaaggacctcgggcagtgtataatcctccaagggcccacaggaacagcagtgacaactgtgttatgaagcacctactatgtgctggggacaagaatggaacaagaagacatgctttgccctcacccctggagggcagcttccagccagggaggcaaatacctcctccccagactccttccacagatccccaaactctgcctctctccttcagatccctgctcagatgtcaccagctctgtgcagcctccctgccaccaagtctaaaattgccatagtcccctcagttcctcacccctctccctgctttctttgtctgtctcatccatgaggatgtgccctctgggaagggcaggcaggagctggctattctgttccttgccctgtccccagcaccgaggacagtgccaggcatggaggaaataattgctgaataaagaaataaaatcgacattctatgagacataaa

SEQ ID NO: 394443 - DNA, 785 bp, Homo Sapiens; identical to SEQ ID NO: 115367

SEQ ID NO: 394444 - DNA, 1000 bp, Homo Sapiens; identical to SEQ ID NO: 284441

SEQ ID NO: 394445 - DNA, 1000 bp, Homo Sapiens; identical to SEQ ID NO: 284442

SEQ ID NO: 394446 - DNA, 1000 bp, Homo Sapiens
aggccatatacatggatgatgatgtaattgtgcaaggtgatattcttgccctttacaatacagcactgaagccaggacatgcagctgcattttcagaagattgtgattcagcctctactaaagttgtcatccgtggagcaggaaaccagtacaattacattggctatcttgactataaaaaggaaagaattcgtaagctttccatgaaagccagcacttgctcatttaatcctggagtttttgttgcaaacctgacggaatggaaacgacagaatataactaaccaactggaaaaatggatgaaactcaatgtagaagagggactgtatagcagaaccctggctggtagcatcacaacacctcctctgcttatcgtattttatcaacagcactctaccatcgatcctatgtggaatgtccgccaccttggttccagtgctggaaaacgatattcacctcagtttgtaaaggctgccaagttactccattggaatggacatttgaagccatggggaaggactgcttcatatactgatgtttgggaaaaatggtatattccagacccaacaggcaaattcaacctaatccgaagatataccgagatctcaaacataaagtgaaacagaatttgaactgtaagcaagcatttctcaggaagtcctggaagatagcatgcgtgggaagtaacagttgctaggcttcaatgcctatcggtagcaagccatggaaaaagatgtgtcagctaggtaaagatgacaaactgccctgtctggcagtcagcttcccagacagactatagactataaatatgtctccatctgccttaccaagtgttttcttactacaatgctgaatgactggaaagaagaactgatatggctagttcagctagctggtacagataattcaaaactgctgttggttttaattttgtaacctgtggcctgatctgtaaataaaacttacatttttcaataaaaaaaaaaaaaaaaaaaaaaaa

SEQ ID NO: 394447 - DNA, 1000 bp, Homo Sapiens; identical to SEQ ID NO: 220776

SEQ ID NO: 394448 - DNA, 1000 bp, Homo Sapiens; identical to SEQ ID NO: 284444

SEQ ID NO: 394449 - DNA, 1000 bp, Homo Sapiens; identical to SEQ ID NO: 220777

SEQ ID NO: 394450 - DNA, 745 bp, Homo Sapiens; identical to SEQ ID NO: 115369

SEQ ID NO: 394451 - DNA, 1000 bp, Homo Sapiens; identical to SEQ ID NO: 284449

SEQ ID NO: 394452 - DNA, 1000 bp, Homo Sapiens; identical to SEQ ID NO: 284451

SEQ ID NO: 394453 - DNA, 1000 bp, Homo Sapiens
aaacaacaaaaaagaaagcagtggagtgcatttgtagatttggtacattaatgtgccaggccctccatcccacttctctgaaagcctctctcctgtgtgtgagagggaaggcatggggcaagaaggggaaggtcttccttaaatagctggtggtaacattgtcctcagctcaccaagagaactctctgaacaatgtgactcctattagaaatgagaacaagtacctattgtttaggcttaaacaactctaagtgtttcttttagagataattaatttaattaaaatggtccctgaagccaaactgagcttcatattgagcactatacacattccttccaaattccagtacaaagctattcagaagtagtaaactatcagtcatgtagctcacatttacttccactggaatggaggccctagcacaggggctgggataggaggctcttcctgagctggagggagtagcattagttctgatgcagttagagaaaagatgatttttcatctgtggatttagttccaaaaatgatgtgggcatttttccttcatggtagtttcaagaagagaaatttggtttactgactgcatccaaatcaaccatctacaggataccctcagcatgtcggtgctcaataaatgaatgaatcagtggataaatggccaggcgcagtggctcacccctgtaatcccagcactttgggaggccaagtgacctcaaggcggatcacttgaggtcaggagttctagaccagcctggccagcactttaggaggctgaggcaggggtggatcacttgaggtcaagagtttgagacaagcctggccaacatagtgaaaatccgtctctactaaaaatacaaaaattagccaggcatgatggtgcactgctgtaatcccagctactcaggagactgaggcagaggttgcagtgagctgaggtcgtgccactgcacacagcctgggcaacagagtgagactctgtctcaaaaaaaaaaaaaaa

SEQ ID NO: 394454 - DNA, 811 bp, Homo Sapiens
gttaggctgctggagctgtgggtgccatcttgccacgttggaggaagagcccacctgagaatgacatcaactcagagggaagtcagcagggccaagaggccgggagagatgattcctgatgacatcatccggttcctgggtgcagccatggtagagttggcctcgaacgttgtccctggcatggaggtgaccagaggccaccctcacatgtcagcagacacctccagccgtgtcattcgtgttcctggttagcaaagtttgtaggggtagtattctcagttggcattcctagctgagatgtgtagccgggaggtcaccacgctgcagggccttggaaccacttctgcctccgaggagtcccttactgatgatcataggctcctcaaggtcatcagccagggcagctttgcagaagtcaaggcagctggcccagcacattctcactgggaccaagatggctgtggaggtcaccccaacagggcagcagggctcctgcagcccccagggtctgtactgcagggaccatatgatgaaggcccttaatcacccgaagatcatcagacccacgtggctggcaccgagaacaggctgttcctagtcatggattaagccagctcgggagagctatccgacttcaccctcgaattcttcttgaagggggaagaggcctgaggcaagttccagcaaataggatattccatgcagtgaggcttccagaaggaaattatccacagggatctgaagtcagagaacttccctgaggaggctcagcacgacatggaaacaacagacgctggctttgataccagaa

SEQ ID NO: 394455 - DNA, 1000 bp, Homo Sapiens; identical to SEQ ID NO: 220778

SEQ ID NO: 394456 - DNA, 1000 bp, Homo Sapiens; identical to SEQ ID NO: 287540

SEQ ID NO: 394457 - DNA, 1000 bp, Homo Sapiens
acagaagtcaagactgcaagctcccctgaagagaatccaactcaacctgcacacttgacaagtggagaaacagaagcccagagagagcactgggtttgttcaggaccacccagaaggtgtcacacggggtttccccactctttctgatatattgccttacagacctacctcaaacacactgtttccaccctcttcttgaatgtattcagtagcctttactgaatgtgtgtcttgagagtagaaaaatggaggatacaagaaaaggagcaggaagaaatttgcaaaaatccaagagcacctttgctcccccttatcctccttcctcttcccctttctagttcccctacctctctatctttctattctcaccaataatctctttgttgcatgaatttacccaggagagtcctatatttccattggtggctccacagtggtggctgtcagacccgaaggggtggggagccaagggtggactttaagcatggtgacagatggtattttgggcagaaagctcttagacaatggactatccaaagcactatttaaattctgcctcttcctactctctaacccaaatatgcacaaactctctatggccttgagaagcagttggagagacatgacttgttaaaacctcaaggaatcaagacatgttactctgtatttaagggtaagccccacagcgggcagcacaaacagcctgggagccactgtgcctgtgcttctctgtccttctccctttgcttgccatgaatccgcataccttggaatacactgtgaccccagttaagtgtcccttcgccaggaagctgccgcaacgtccagacctgggtcaagttcccactcctgctcccatagccttgacctgcttctgtcacagcactgatcacactgagatggaagactccagggggcaaggaccaagggccatatcccaagtgactttgtacccagaaaataacagctgttcaataaatgtgtattgagttaattagtt

SEQ ID NO: 394458 - DNA, 1000 bp, Homo Sapiens; identical to SEQ ID NO: 284452

SEQ ID NO: 394459 - DNA, 1000 bp, Homo Sapiens; identical to SEQ ID NO: 115371

SEQ ID NO: 394460 - DNA, 1000 bp, Homo Sapiens; identical to SEQ ID NO: 115372

SEQ ID NO: 394461 - DNA, 1000 bp, Homo Sapiens; identical to SEQ ID NO: 284454

SEQ ID NO: 394462 - DNA, 1000 bp, Homo Sapiens; identical to SEQ ID NO: 283547

SEQ ID NO: 394463 - DNA, 1000 bp, Homo Sapiens; identical to SEQ ID NO: 115373

SEQ ID NO: 394464 - DNA, 1000 bp, Homo Sapiens; identical to SEQ ID NO: 284456

SEQ ID NO: 394465 - DNA, 1000 bp, Homo Sapiens; identical to SEQ ID NO: 223635

SEQ ID NO: 394466 - DNA, 1000 bp, Homo Sapiens; identical to SEQ ID NO: 223635

SEQ ID NO: 394467 - DNA, 1000 bp, Homo Sapiens; identical to SEQ ID NO: 115374

SEQ ID NO: 394468 - DNA, 1000 bp, Homo Sapiens
accaagaattatagcgtttataagtacaacttggaacgatggaatgcatctgttactagagactgtatataaaaagcagccaaagctcaggggaaatttttcaaaaattgaattttaaaatttcttatgattttaaataccttgacattgattttgcttcccatctttgaagtaattggttagttttctttgttcagccatttcaagttggtggttgggatatctgctctctgggatggcatcagttgggcagtcatctttttggaagagaagtgtgcttttgagtggaagattcaaagccagtctttgttaaactgcagggtgtactctcaaagaccaaaactattggccacttttgtatgttgccagcatattttgaacttgtacctttttttatactagcaacactacaaaggagaagttactcatttcaaaatggatgaattgttattatgtgtgaagagactctgagtttatgatctgtgccataaaatttcagtgtaataagacttcttcaatacatcttccaataaggggtgcttctttgtgacagtatttttatttctgacattcattttatttgggtacatagtgtggttgttgataccttgcaatagtattgcttctgaaagtaataaaaaattttaggagaatttgagaagtttacagaattacttattcattgttttcttagtaagtcagtttaatgtttatttttctcattatttcatcactgcaataaagaataagggtgtttgagctcacctccatgcaaagacttcagttttaaaacattatttgcctaaaattagcattgtgatgctttctgaaagaaatattttataaatcctgtttaacagcagaatttctgaatgtgtagagactactacaaaattggaaaaagattggcaattctttgtaaagaatttgtgaattgtgtataaatttattctaacatttaataaaaatgtattttaacctaaaaaaaaaaaaaaaaaaa

SEQ ID NO: 394469 - DNA, 1000 bp, Homo Sapiens; identical to SEQ ID NO: 220782

SEQ ID NO: 394470 - DNA, 1000 bp, Homo Sapiens; identical to SEQ ID NO: 115375

SEQ ID NO: 394471 - DNA, 1000 bp, Homo Sapiens; identical to SEQ ID NO: 115376

SEQ ID NO: 394472 - DNA, 1000 bp, Homo Sapiens; identical to SEQ ID NO: 284464

SEQ ID NO: 394473 - DNA, 1000 bp, Homo Sapiens
ctgaggtgggcgccgtgaccaaacagagcatctcctccaaactggaaggcaagatcatgccagtcaaatatgaagaaaattctcttatctgggtggctgtagatcagcctgtgaaggacaacagcttcttgagttctaaggtgttagaactctgcggtgaccttcctattttctggcttaaaccaacctatccaaaagaaatccagagggaaagaagagaagtggtaagaaaaattgttccaactaccacaaaaagaccacacagtggaccacggagcaacccaggcgctggaagactgaataatgaaaccagacccagtgttcaagaggactcacaagccttcaatcctgataatccttatcatcaggaaggggaaagcatgacattcgaccctagactggatcacgaaggaatctgttgtatagaatgtaggcggagctacacccactgccagaagatctgtgaacccctggggggctattacccatggccttataattatcaaggctgccgttcggcctgcagagtcatcatgccatgtagctggtgggtggcccgtatcttgggcatggtgtgaaatcacttcatatatcatgtgctgtaaaataagaactagctgaagagacaaccaaagaagcattaaggcaggttgatgctgatgggaccataaaatatttttacactcaacctgagcggttattcttgacactcttaacagaattttttcaattgttttccagaactttagtatatgcaaatgtactgaaagggtagttcaagtctaaaatgccataacccctttattatttgttattttttatttgcattgctttgccataagtcttcccttgcttgtatcttccaaagctattttgaaataaacatgaaaatttacagtttgccaaaaaaaaaaaaaaaaaaaaaaaaaaaaaaaaaaaaaaaaaaaaaaaaaaaaaaaaaaaaaaaaaaaaaaaaaaaaaaaaaaaaaaaaaaaaaaaa

SEQ ID NO: 394474 - DNA, 1000 bp, Homo Sapiens; identical to SEQ ID NO: 220784

SEQ ID NO: 394475 - DNA, 1000 bp, Homo Sapiens; identical to SEQ ID NO: 284467

SEQ ID NO: 394476 - DNA, 1000 bp, Homo Sapiens
cacaaaagggacaggcttggctgatcccacatccgccgcagtgttgtgccccgaatttcagggccaccaggctaagggggagtggatctgttggtccaagggtagagtggccccactcttgggttctttcaggggagggggcagccttgcggaggccccagccctgggccccgttttcagccttgtggcccattccctaaattcccctgacccagggcctggggaatcatctggtgctacacttttcgagctgccctgctttcatggggcctccacacctctcccctgcctggcgttgcccatgtgttgcccctgctggacttgccagagaaagggcactgtctggggtccatgacctagaccctgtgctcctcaggggttgtggagagtgggctgcctctatggtgggaaaagatctctgagaaggatggaggtggccgtggaagggatggggtgaggttggagcattgtgtggacagggatggcgtggctcctgtagcatctgaggcctggagccagggcaagagggagctgaagaagggagttggggtggggcagggtgttggggtggggggctggcagtgctggagatggataggagaaagaactggggggggggtctaggctggcagaagcatggaggggtggaagacttgggggaggggaacctgcaatccagagcatagcgaacaagaatgaactccttaggagacgtctcttgttgtgttgtgggctctgtgaaggatgaagttccacacacctcaggtgaaatgtttgaaggagccattttttgttctagatgtgcacctggaacgtggcttctagatacaggtcttcaacacagcagataagatgtctggaaagatctctgggctcaagtgcaggtgaggttttagcacagttatcagaggaactgatccagaagcaggcttagttctagattgagttctagagtgctaggctgataaaatgtcccagggaaaaaaaaaaaaaaaaaaaa

SEQ ID NO: 394477 - DNA, 1000 bp, Homo Sapiens; identical to SEQ ID NO: 220785

SEQ ID NO: 394478 - DNA, 705 bp, Homo Sapiens
ctctttccagccagcgccgagcgatgggcatctctcgggacaactggcacaagcgccgcaaaaccgggggcaagagaaagccctaccacaagaagcggaagtatgagttggggcgcccagctgccaacaccaagattggcccccgccgcatccacacagtccgtgtgcggggaggtaacaagaaataccgtgccctgaggttggacgtggggaatttctcctggggctcagagtgttgtactcgtaaaacaaggatcatcgatgttgtctacaatgcatctaataacgagctggttcgtaccaagaccctggtgaagaattgcatcgtgctcatcgacagcacaccgtaccgacagtggtacgagtcccactatgcgctgcccctgggccgcaagaagggagccaagctgactcctgaggaagaagagattttaaacaaaaaacgatctaaaaaaattcagaagaaatatgatgaaaggaaaaagaatgccaaaatcagcagtctcctggaggagcagttccagcagggcaagcttcttgcgtgcatcgcttcaaggccgggacagtgtggccgagcagatggctatgtgctagagggcaaagagttggagttctatcttaggaaaatcaaggcccgcaaaggcaaataaatccttgttttgtcttcacccatgtaataaaggtgtttattgttttgttcccaca

SEQ ID NO: 394479 - DNA, 1000 bp, Homo Sapiens; identical to SEQ ID NO: 284469

SEQ ID NO: 394480 - DNA, 1000 bp, Homo Sapiens
gcaggcagggtcccctcccaagagaccaggtgggtgcgaaaatgtccagggctttgatcaccatgcaaagtggtgctatcttctaggttctttccagcttgtttaccccctcttcgcccccacctcctcatcatcctccctctcccagagacagtaaaacccacccaagaagttgactgtgtccagttggcagtgactgtccacccactgggccagatcctaagtcctggatggaggcccagggcctcagctcacaccatggcaacaggcaccagctccgagtctcacctccccatccccaccagccttctcatgtcagcctcccccagttcccttataattccctccactcacccacctactcaggggatatggctagctataggaacctccctgaggccctcagactcatgttagcctcacttccccacaacccccagtttccagcctgcttctctctgtgaaatcatggtttctcccttcatataactgtcctctcctgcttcctcttaccatggagcctaggactgtctcccccacactcccaacaaccgtagtcaccctgccttcctttttccaacctctttttcttccagtcttcttaccttggctcactggcatttcaaggtatcttctctcacccattccccagaggttcctgcttcccttctcttccagaagctcctcccaaatcccccagactccagagtctgcccctgaccaggcagcgaatgaggcaggcccggctctaatcgaacataaatttctaaaaccacatctgagtatgtaagatgtaaccattgggggaaactgggtgaagggcacacgagccccctctgtaccattttttgtaacttcctgtcaacccataatcaattcaaaataaaaagttaataacacaaaaaaaaaaaaaaaaaaaaaaaaaaaaaaaaaaaaaaaaaaaaaaaaaaaaaaaaaaaaaaaaaaaaaaaaaaaaaaaaaaaaaaaaaaaaaacaaaaa

SEQ ID NO: 394481 - DNA, 1000 bp, Homo Sapiens; identical to SEQ ID NO: 220786

SEQ ID NO: 394482 - DNA, 1000 bp, Homo Sapiens; identical to SEQ ID NO: 284471

SEQ ID NO: 394483 - DNA, 1000 bp, Homo Sapiens
gcgcctgggcaagaccatcgaccggctcatcgccgacacgagcaccatcatcaccgaggcgcgcatctacgtggccaacggggacctgttcggactcatggacgaggaggacgacggcagccgcatccgggagcacgagctgctctaccgcatcaacgctcagatgaaggccttccgcaaggagctgcagaccttcatcgaccgcctcgaggtgcccaagtctgcggacgaccgcggcgccgaggagcccatttccgtgagtcagatgttccagcctatcattttacttattctcattcttgtattattttcatcactttcttacacaacaatatttaaacttgtcttcctttttacactgttttttgtactgtaaatctttcatcatttaccattcattgtagtattttcagtttgtttattttgttcacccttcaagacaagaagtaaaagaagtataatttctgtagtaaccaatgctataaaaacactgaagactgcttatttctttaaaaagatacaactcatcttaccaagaccaaattcaataagaagcccaaacactaaaatatttcaggctttattttaaaggcaagtgagactgcttcaaataaaacaacttcaagcttccaagaaacagttaagaggaggcagagaagagcagaaacacttctttgctgacacttacactgttgccatggacctacataagcagtgggagaacacagagactaactggcataaggaaaagatggaattactggaccagtttgacaatgaaagaaaggaatgggaaagtcaatggaagattatgcagaagaaaatagaagagctttgccgggaagtaaagctttggaggaaaatcaatatcaatgaaagtgctaagatcattgatctttaccatgagaagaccattccagagaaagtgatagaatcttccccaaattaccccgatttaggacaaagtgaatttataaggacgaatcacaaagatggtctg

SEQ ID NO: 394484 - DNA, 1000 bp, Homo Sapiens; identical to SEQ ID NO: 284475

SEQ ID NO: 394485 - DNA, 1000 bp, Homo Sapiens; identical to SEQ ID NO: 284476

SEQ ID NO: 394486 - DNA, 1000 bp, Homo Sapiens; identical to SEQ ID NO: 115377

SEQ ID NO: 394487 - DNA, 1000 bp, Homo Sapiens; identical to SEQ ID NO: 284327

SEQ ID NO: 394488 - DNA, 1000 bp, Homo Sapiens
gctaacgtctaacgctaacggcggtcgtgccccgccgctgctgtcacccccggccgctgctgccctccccgccgaggttctactgctctccttcttaagaagggtgggaggcactcggtctctccccacacctctcgcctgaggccaggcgccaggtgtcgcctgaagccagacagccggtttgggagcgagcctgaggtcaaccaatcaatggctcagacagataagccaacatgcatcccgccggagctgccgaaaatgctgaaggagtttgccaaagccgccattcgggcgcagccgcaggacctcatccagtggggggccgattattttgaggccctgtcccgtggagagacgcctccggtgagagagcggtctgagcgagtcgctttgtgtaactgggcagagctaacacctgagctgttaaagatcctgcattctcaggttgctggcagactgatcatccgtgcagaggagctggcccagatgtggaaagtggtgaatctcccaacagatctgtttaatagtgtgatgaatgtgggtcgcttcacggaggagatcgagtggctgaagtttttagcccttgcttgcagcgctctgggagttactattaccaaaactctcaagatagtgtgtgaggtcttatcatgtgaccacaatggtgggttgccccgaatcccattcagcaccttccagtttctctacacgtatattgccgaagtggatggggagatctgtgcatcacatgtcagcaggatgctaaactacattgaacaggaagtaattggtcctgatggtttaatcacggtgaatgactttacccaaaaccccagggtttggctggagtaacagcacaattttggcaattttaaaggaagatacagaggtgattgtacttcagaatgataaacccatataccacctaaaatcaattttcttgtacaactggtacacactaataaacaaacatgtgagatcagaaaaaaaaaaaaaaaaaaaa

SEQ ID NO: 394489 - DNA, 1000 bp, Homo Sapiens; identical to SEQ ID NO: 284478

SEQ ID NO: 394490 - DNA, 1000 bp, Homo Sapiens; identical to SEQ ID NO: 284480

SEQ ID NO: 394491 - DNA, 1000 bp, Homo Sapiens; identical to SEQ ID NO: 284481

SEQ ID NO: 394492 - DNA, 1000 bp, Homo Sapiens
tcaatggaatttgttacggccctggctgacctccgagcagaggctagctgtcccatctgtctggactacttgaaagacccagtgaccatcagctgtgggcataacttctgtctctcctgcatcattatgtcctggaaggatctacatgatagtttcccctgccccttttgccacttttgctgtccagaaaggaaatttataagcaatccccagctgggtagtttgactgaaattgctaagcaactccagataagaagcaagaagaggaagaggcaggaagagaagcatgtgtgtaagaagcataatcaggttttgactttcttctgtcagaaagacctagagcttttatgtccaaggtgcagtttgtccactgatcaccagcatcactgtgtttggcccataaagaaggctgcctcctatcataggaaaaaactggaggaatacaatgcaccgtggaaggagagagtggaactaattgaaaaagtcataactatgcaaaccaggaaatcactggaactgaagaaaaagatggagtctccttctgtcaccaggctggagtgcagttgcacgatctcggctcacttcaacctccgcctcccgggatcaagcgattcttctgcctctggctcctgagtagctgggactacagagatggttgcccaggctggtctggaactcctgacctcaagcgatcttcctgccttgacctcccaaagtgctgggattatagccatgctgccaaccatgtgtagggtatgtatatgttcctataccataataaaattttaattacatttgtaaggtatgtaattatatgtatttctgtataatatgtacatataaatatgctaattaatacaagaacatattgaattataatcaatatatataattttagatgtatattggaatgtttatctttctaataatacaaaactgatggttaaaaaataaaatgcacaaactccccaaaaaaaaaaaaaaaaaaaaaaaaaaaaaa

SEQ ID NO: 394493 - DNA, 1000 bp, Homo Sapiens; identical to SEQ ID NO: 284483

SEQ ID NO: 394494 - DNA, 561 bp, Homo Sapiens
cctccctctcacctgctcctctacctgctccaccctcaatccaccagaaccatgggctgctgtggctgctctggaggctgtggctccggctgtgggggctgtggctctggctgtgggggctgtgggtccagctgctgtgtgcccatctgctgctgcaagcccgtgtgctgctgtgtgccagcctgttcctgcaccagctgtggctcttgtgggggctccaaggggtgctgtggctcttgtgggggctccaaagggggctgtggctcttgtgggggctccaagggaggctgtggctcttgtggctgctcccagtgcagttgctgcaagccctgctactgttcctcaggctgtgggtcatcctgctgccagtccagctgctgcaagccctgctgttcccaggccagctgctgtgtccccatttgctgccagtgcaaaatctgaggctctgactttggacctcaggtgagtccagcatatccacaccacccaagaagtgaccagtgctgcatttcagttctggctgtcccacagctccaggagttgtgtcccctgaattttgca

SEQ ID NO: 394495 - DNA, 941 bp, Homo Sapiens
gagccggccgggtgctgggctcctggctatccctgtgatggtagctcagcgagatctggggacctggcgctgagcggcttgccagccgggatcttcctcttcatctaggcctgggcgctggcgtgagaactcggactgggtcctggacgagcgccccccgaaactccttggaaccttgaacaagtaaaatgcaggaagtttgctaataaagacatcaccaaaggttaaagagaaaatcatctagaggaaatgctggcagtatggcatgtgttctttaacaaatctctacagcagattctctcgttttagggactatccagattatgattggcatctttcacattttcatgtggtactttctattggttttgtatatgggacaaattaaaggagcctttggaacgtatgaacctgtaacttacaaaacaggatgtactttatggggaattttttttatcattgcaggagtcttcctaataagagtaacaaagtatccgactcgatctggaattataagtactttaatcataaacatcatctgcataattactacaattactgcagtaactctaacaataatagagttgtctcattttaattctgtgtcatacaggaattatggacaagtaaaacttgggagggaagtatcacgtattttactgttcttctacggtttggaattttctattgcacttacacactcaatatacagctgttccaatttgtttcgaagacaaaatgatcttacatctgttactgaggaagctgagagcactccttaaaaaccctagaaatatgagaattttgctgttgctgatgcctggtgtgggtcctaatgatatctctgtataacaaagcagttacgaagcctacagattttgtgcaaaataaaatacaaacaaggtgaatttttctcctcattcaaaaaaaaaaaaaaaaaa

SEQ ID NO: 394496 - DNA, 1000 bp, Homo Sapiens; identical to SEQ ID NO: 284484

SEQ ID NO: 394497 - DNA, 1000 bp, Homo Sapiens
ctaggaaataaaagatagaggtgagagatgatttactttgagaaaagacattgtgtcacctatgaaattttattaggcacagagtcatattttaaggtagatagttctgtattgctgaaatagtaattttaatgtctttatgttgccacatgttaagaccataatgtagttataaatggaaatgtttacacctgaagtgagtattttcaaattaaaatttaattaagtgattttcttcgacacttaattctagattccccagatgaattgaagtgtattgctgtgtcttgtaataccttgctttaactagctttttatgtattttagttggtatagctttgttattattcatattaacaaatctgaaaatatgtcaaattacgtgtttttatgaccatgtaatgttttaaaggcacctacttgttataaaatcataatttaggataaatgtggtaaaacttagcaaaactatatttggtttagttttcccactggtatttatagtttactttgaatatttatattaataattagctcataatttttattgcaaggctcaatgactgtcattggaatataattttgttcagtacaaagatacttgtagctgtctgtgatttacgagttaggcactacatctccattttcagactgaggggtggcaggcttcacatacagtgggaatggagtaattacaggagggagttgtaggagctttgaagtcagagagggaggtagaggcctttttacctagggcctcaaaggccattggaattttacttttattctgagataggaatctgttggaaggatttgaacaggtgattgaatatgttaggaactttgaggctgagttgagcttctgagatgattgaatgttggaatgaatctgttgtgtaagtaagagaataccaatttggcaggaagagaacatattctgcatccctcactgaattcagtaataaataaaaatgtgtacatgtgattaaaagaaggtgaa

SEQ ID NO: 394498 - DNA, 1000 bp, Homo Sapiens
aacagtggtacgatttctagcccgtggctttaaaatgcacttaaagtcctgtccttgccttttattttctgaacttgatgtttttgcattctttgagttcagtttaaagacaactacgagcatctgtaaccaatctgacaataatgtgttcatcaggtgcctatggattaaatcacatactggcatatttaagctgaatgtcaatctggaaaataaattgactgtattaacagaaataccactctttgtgtagatatttgtcatatatttaagaaaaagctaaaaagaatggaaatcgcatgactataacttaagtctttcttcaaagtgcatgcagtcttttgcgatacctcattcagccaagtattggtattcttcctcattcggtataaggcagctttcaatttgcttagaaggcaacattggaaggttagagttcatcagaaacagaattctaaaatgtaagttcaattcaataaatttgaatttctgtaggaagaatcaaatcaccgatttaaagagtgcaatatataataatcatttttaaagtattggattaaatctgataggttttccagaaatgaacaaaaatcagctctaaaaccaaagctgatttttagaaaatttgaaaatgtaaatcagccctatccatactatagtttctctaaaactttatctgaaagagtcattttaaaataactattaaacaatgtaactgctatcttaatgttctgaaataagttaaaacattttaaaatatgaatactgtaaaggaaataaatggtgggaaggaaaagtagagaaagaaatgccaattccagtccaaagctttatttgccaagttttcttagaatgaattttaccaatttatgaattcttgtaagcggaatgtaaaacggaaatactgaaagacttttgcctaaagtggcattattgactgctggtgtgatgctactgtaatgtaataaattattaagttgttgcaaaaaaaaaaaaaaaa

SEQ ID NO: 394499 - DNA, 1000 bp, Homo Sapiens; identical to SEQ ID NO: 220787

SEQ ID NO: 394500 - DNA, 751 bp, Homo Sapiens
accctgagcggtctctgaggacctggtgagcagattgttgcaccattagaagctaggttgatccacagacagatggctgaaagtggaaaagaaaaaataaaatggacaaccaccattattattagctcatctcttaagagttatgaagttgcaactgccctagaaaatcgaagccacaaagttcgatattcagattcagtggaaaatggatcaattatattttctctttctggagttgcatttttattaatggatactaaggaatgtcttctgtcaactgaagaaatatttctagccaaaattgagaaatttattaacattcaccaaaatagttttttggttttgtctgctgccctccatgggcctgaagaatggaaactgatgttcaggattcagcagagattcctgggttgtaacttacgaatacttccagtacacaacacagtaaatgctattaatcttatgtgcactatagcaaagactacctccaaaccatacatagatagcatttgctacagaatgataacagctaaagcttacatcattgagcaaagtcctgtttggaaaacacttcagaagataaaactgaatagtgattcagttaacccaaattagagtaccaacttaatgtttttctcgaagaatgtgaaaataattagacctgttaaattataatattcaaatatctatttaaagacatttatattaatttgaaataataacatatacaattaaaagtgattttatttta

SEQ ID NO: 394501 - DNA, 1000 bp, Homo Sapiens; identical to SEQ ID NO: 115378

SEQ ID NO: 394502 - DNA, 1000 bp, Homo Sapiens; identical to SEQ ID NO: 220789

SEQ ID NO: 394503 - DNA, 1000 bp, Homo Sapiens
cggtgccctgatggttctacctgctgtgagctgcccagtgggaagtatggctgctgcccaatgcccaacgccacctgctgctccgatcacctgcactgctgcccccaagacactgtgtgtgacctgatccagagtaagtgcctctccaaggagaacgctaccacggacctcctcactaagctgcctgcgcacacagtgggggatgtgaaatgtgacatggaggtgagctgcccagatggctatacctgctgccgtctacagtcgggggcctggggctgctgcccttttacccaggctgtgtgctgtgaggaccacatacactgctgtcccgcggggtttacgtgtgacacgcagaagggtacctgtgaacaggggccccaccaggtgccctggatggagaaggccccagctcacctcagcctgccagacccacaagccttgaagagagatgtcccctgtgataatgtcagcagctgtccctcctccgatacctgctgccgagacaaccgacagggctgggcctgctgtccctaccgccagggcgtctgttgtgctgatcggcgccactgctgtcctgctggcttccgctgcgcagccaggggtaccaagtgtttgcgcagggaggccccgcgctgggacgcccctttgagggacccagccttgagacagctgctgtgagggacagtactgaagactctgcagccctcgggaccccactcggagggtgccctctgctcaggcctccctagcacctccccctaaccaaattctccctggaccccattctgagctccccatcaccatgggaggtggggcctcaatctaaggccttccctgtcagaagggggttgtggcaaaagccacattacaagctgccatcccctccccgtttcagtggaccctgtggccaggtgcttttccctatccacaggggtgtttgtgtgtgtgcgcgtgtgcgtttcaataaagtttgtacactttcaaaaaaaaaaaaaaaaaa

SEQ ID NO: 394504 - DNA, 1000 bp, Homo Sapiens; identical to SEQ ID NO: 220790

SEQ ID NO: 394505 - DNA, 1000 bp, Homo Sapiens
agaccaagctcaacgcctccaagaccagcaggccaaggccaagccctgccccagatcctcataggcagagaagcccttctgacatttcccccaggaggcagggggtggtctgagtctcctcacagcagagagacccaccggagccccctcaactttgcagatgcccacctggaaaatgggctgagctgcaccagaccctcacacaccacagcactgcaagctgatggaatgttccagttatgatggacacttcgtgatctgcaatgactgttgattcagcacattagcatctgacacagccaacctgaatacttcctgccccaggcggtcagggttatggcacgatgcaggtggcactcaggggctaacttcaggctgatgagtgtgtggggtatggggcagcagaggcagccagccagcaaagaggggccactgagcaccagggccctggtggaggctgctgtgggacggtcaggccaccaccgcaaagaggcagccggagcttctgcacaggatgtccctggccccaggtcctgcagcaccttagtccatactaccagccccacccaccttccttcctcttccctcttctaggacacaggctgtggaccccttcaggtgcactataatggggctggaggggcccccacatctctcagccccactaatgcagaatcccactacccgtgagctagaaggtgctcagaggccaggggtctctactgcccatgccgggcggccttccagtcattgcacagcaaagccatgtgcagggcgtccccctcaaccctgccctgaacatgccccagggcactgaggggcgaagccagtgcttgggctctgctgctgggagtctctggtctgtgtctgtgtgtgcctgtaagtgtgaaataaacctctctgatggcagcaagcctctcacttgttgtaggactgcaagacactggaccgaaagcctccaacacaaaccctagctgccaacctgctcatttcttaggtt

SEQ ID NO: 394506 - DNA, 1000 bp, Homo Sapiens; identical to SEQ ID NO: 284489

SEQ ID NO: 394507 - DNA, 1000 bp, Homo Sapiens; identical to SEQ ID NO: 220791

SEQ ID NO: 394508 - DNA, 1000 bp, Homo Sapiens; identical to SEQ ID NO: 284490

SEQ ID NO: 394509 - DNA, 1000 bp, Homo Sapiens; identical to SEQ ID NO: 284491

SEQ ID NO: 394510 - DNA, 919 bp, Homo Sapiens
ccccagccagctgtcccgagtctggactttccctctgcccctccccactctcaggctggtggggtggggaaagcagcccattcctgggctcagagactcccaccccagctcagagggagcaggggcccagccagggacggaccctcattcctcccagggaccccagacctctgtctctctcgggccttggctccttgaacttttggccgccatgtgcttcccgaaggtcctctctgatgacatgaagaagctgaaggcccgaatgcaccaggccatagaaagattttatgataaaatgcaaaatgcagaatcaggacgtggacaggtgatgtcgagcctggcagagctggaggacgacttcaaagagggctacctggagacagtggcggcttattatgaggagcagcacccagagctcactcctctacttgaaaaagaaagagatggattacggtgccgaggcaacagatcccctgtcccggatgttgaggatcccgcaaccgaggagcctggggagagcttttgtgacaagtcctacggagccccacggggggacaaggaggagctgacaccccagaagtgctctgaaccccaatcctcaaaatgaagatactgacaccacctttgccctccccgtcaccgcgcacccaccctgacccctccctcagctgtcctgtgccccgccctctcccgcacactcagtccccctgcctggcgttcctgccgcagctctgacctggtgctgtcgccctggcatcttaataaaacctgcttatacttccctggcaggggagataccatgatcgcggaggtgggtttcccagggcaaggctgatctgttgccgtattagtccgttttcacacagctataaagaatgcctgagactgggtgatgtataaagaaaagaagtttaactga

SEQ ID NO: 394511 - DNA, 1000 bp, Homo Sapiens; identical to SEQ ID NO: 220792

SEQ ID NO: 394512 - DNA, 1000 bp, Homo Sapiens; identical to SEQ ID NO: 115379

SEQ ID NO: 394513 - DNA, 1000 bp, Homo Sapiens; identical to SEQ ID NO: 220794

SEQ ID NO: 394514 - DNA, 1000 bp, Homo Sapiens; identical to SEQ ID NO: 115380

SEQ ID NO: 394515 - DNA, 1000 bp, Homo Sapiens; identical to SEQ ID NO: 284495

SEQ ID NO: 394516 - DNA, 1000 bp, Homo Sapiens; identical to SEQ ID NO: 284496

SEQ ID NO: 394517 - DNA, 1000 bp, Homo Sapiens
agtgatttgcaggtctatggggaagtgtcccgcctcagagatgtggaggagaagccaggcagagcgctgttcattccatttctttctttttttaatctaaaggagggaaagagctttattaactcaaacaaagggatgccatacaacttcccaacgatactgtgcagtgatggtattagcttccacctgttcttccattctgggggcagggtgtgaggactggctgctctgggagacgctctgagctgagagagaagaaatagctatgctaatagctgccccttactgagtgctcactctgtgtccggggctacaccgagtgcttgcagcgggttctcaggcgcacttagaacagcactgtgagaaaggcacttttgctgccccttgtgtacagatgaggacaaagagggacagagaggtttagaaccttgacctatatcacacagccagtgagcagacgaccggaatttgaatcctgcaatctctctgcagagcctgcgcatttaataccacacacagttctggcctgcagtgaatttggttgttcttcctgcctggggtggtcagtttccaagcctttccagatggacttctgcagcccaaagctgcgtgctccccgtgcaggcccttgtcagagcagagaaagatggctgaagttgttgtccatctagatttttatcttcaaaacattgctgaaatcaatctctcttctaccgtctccgatttcctttgtccttatgggtggtctacaactttactatcattttagtggatgcaagaggagtggagataaacacgtgttcagcctgctgtgaatctctgcagtggctatgttgtttcttaaacagatgtaatgaggcatctattccctgtgtgccatgtgccccttgagtaggggacatctgttttgtgttgtctgtgtctccagcattagaatggaacctggcacacaatagaggctcaattagtatttgttgaataaatgaacattaagaaacag

SEQ ID NO: 394518 - DNA, 1000 bp, Homo Sapiens
atgtttctctcttacaatgcagaagcagaacacagctcctgctcttgaaatactggatggatgtttcagagggtattgtgaggcttggagctccagccagtgacattccagccacatccttctctcctggctccacttcacagaggctggctgtgtctctggactacacctcagagctaatctgctttctggaagggtcgtgtttacttctgctggtgctgtgcatgtaggagacagctgtggccagccctgtttccctggggaggtggcagaggcggtaccatgagcaagggatgcagatgctcaagggggaccagtcaggggacacggggagggtttggcctctccagccaggggctcgccacctccatggtataaacatccatgtgaacaaaaaagttctaacaagtaccagcacactgagaatattttaaaccacaactatcgtggaaaatctgggagggtggttcctaggtccagggtggaaaagtagctgaaaacctggtagggtttgaagaacaatcagaggcggccttccacttctgagaacagttcctgtgagtcacctgatgttgttctagattaattctatcaaagacagtgttggtcaacccagctgcaggcacttgatttcctctaaaagctctggataacagaagcagagctgtgaagaaagtcaagttgaataaaatgcttccacttaaaagaatagggcttttccttgaaatggtccactggatcgaccatttcctctcatttattattattatcatctccattcccatgcatgctatttagacaaggaaggctggaagcaagtgacaggtgcggcagtgcgcagcaaggcctctgcacctggcccgtcagtagggccggcacgcagcctgactactgagtttcttctgcctcattcctctccagaggccctcaacttacaatagagacccaggagctgggagatgactgaatctgttaacatgacacagaaggactaacccat

SEQ ID NO: 394519 - DNA, 1000 bp, Homo Sapiens
gaggggtttaagcaggtgtcctggtgagaccggggttataatcagagactctcagggttagagcttggccctgccactgagtggccttgggagtctcatttgacctctctgaaccttggattcctcacttgtgaaatggggacaggttgagttcctgcatggaaagtgtcttgcttgatgtctcgccaaaagaccaaaactgccgtcactcactgccggagaggccctgcacgtggatattagagtttgctgggttttgtttgtcctgagcgaatgtccgtccatgtacaggctgatggattttgtaggtgcaaggtccctaacgcaatcaatctctctcctcaaaagaccatgagcatgcctggactcagagagcaccgtgtgtggggggctggcgtgggcacgtgtccgcagctgggactggcttctagggttctgggctcaggcaggagggcggggtcccaggaggtcatctctctctccttaccctggagcctttggaatttggtttccaaatgtcctgaattcctgttcattaatatgtggctcagtacagtgcttgtcccggcagcaggagcttggttggtgttagtctgctggggaatgggataaagcagagaaatgtcaagctttcccttaaaaacaaaaaacaaaagcaaaccctcacatctcccaccaataacacaccattgttatccctgtacttaagacatgttgttgccgggcatggtagctcacacttgtaatcccgacactttgggaggctgaggcgggtgggtcacctgaggttgggagtttgagaccagcctgaccaacatggagaaacctcgtctctactaaaaatacaaaattagccgggcatggtggtgcatgcctgtaatcccagctgctggggaggctgaggcaggagaatggctggaacccgggaggtggaggttgtggtgagctgagatcgcaccattgccctccagcctgggcaacaagagcaaaactctgtaag

SEQ ID NO: 394520 - DNA, 930 bp, Homo Sapiens; identical to SEQ ID NO: 284498

SEQ ID NO: 394521 - DNA, 1000 bp, Homo Sapiens; identical to SEQ ID NO: 284499

SEQ ID NO: 394522 - DNA, 1000 bp, Homo Sapiens; identical to SEQ ID NO: 115381

SEQ ID NO: 394523 - DNA, 1000 bp, Homo Sapiens; identical to SEQ ID NO: 284502

SEQ ID NO: 394524 - DNA, 1000 bp, Homo Sapiens; identical to SEQ ID NO: 284503

SEQ ID NO: 394525 - DNA, 1000 bp, Homo Sapiens; identical to SEQ ID NO: 220795

SEQ ID NO: 394526 - DNA, 1000 bp, Homo Sapiens; identical to SEQ ID NO: 284507

SEQ ID NO: 394527 - DNA, 1000 bp, Homo Sapiens; identical to SEQ ID NO: 284508

SEQ ID NO: 394528 - DNA, 1000 bp, Homo Sapiens; identical to SEQ ID NO: 284509

SEQ ID NO: 394529 - DNA, 1000 bp, Homo Sapiens; identical to SEQ ID NO: 284511

SEQ ID NO: 394530 - DNA, 1000 bp, Homo Sapiens; identical to SEQ ID NO: 220798

SEQ ID NO: 394531 - DNA, 1000 bp, Homo Sapiens; identical to SEQ ID NO: 284513

SEQ ID NO: 394532 - DNA, 1000 bp, Homo Sapiens; identical to SEQ ID NO: 220799

SEQ ID NO: 394533 - DNA, 579 bp, Homo Sapiens; identical to SEQ ID NO: 115382

SEQ ID NO: 394534 - DNA, 905 bp, Homo Sapiens
aaaacaaaaacatgatggcctctcccagcaaagctccagggttggaaagagtcccctggcagggaattggcaccccgtcgtgcccatcctctctctctgactgcctgctggaaatgcccccatctccctttgagtcctcctcccgggcaacccctgtgacctgtaacctctgtcctgaaatcatcacaatggccagagtggcctcagctcagggcctctgtgacatcaccaagggcctggcaccaggtgcccagtctcccagttgcgagggcaagcaaacccgtcatgagcaactcccttccccatctctgctcaccatgtggacgctgaaatcgtccctggtcctgcttctgtgcctcacctgcagctatgcctttatgttctcttctctgagacagaaaactagcgaaccccaggggaaggtgcaatacggagagcactttcggattcggcagaatctaccagagcacacccaaggctggcttgggagcaaatggctctggcttctttttgttgttgtgccgtttgtgatactgcagtgtcaaagagacagtgagaagaataaggagcagagtcctcctggccttcgaggcggccaacttcactctccattaaagaaaaaaagaaatgcttcccccaacaaagactgtgcattcaataccttaatggaactcgaggtggagcttatgaaatttgtgtccaaagtgcggaatcttaaacgtgccatggcaacaggtagtggcagtaacctcaggcttcgaaagtcagagatgcctgcagatccataccatgtcacgatctgtgaaatatggggagaagaaagctctagctgaatggatttgtgtgtcaggagagaaaaaagttgagtgttgacaaactgtatgcaaactaataaaactattctg

SEQ ID NO: 394535 - DNA, 1000 bp, Homo Sapiens
tcaagcagctggctgaggctctgcggaccaaccgctccatccagtccctcttcctgcatgggagccccctgacagatgcggggctggccttgctgaacccagccctggccctccaccctgccctcgtggctctggacctgggggactgcatgctgggtgatgaagccatcaacctcatctgtggcctcctgcccccagatggggccaaatctggcttgaaggagctaacgctgagtgccaaccctggcatcacccctaagggctggagccgccttgccattgccgtggcccacagctcccaggtccgcgtcctcaatctggattacaaccccctgggtgaccatgtggcaggaatgctggctgtagctgtggcctctagtcgtaccctagaggtcctagacttggagggcacagggctcaccaaccagtcagctcagaccctgctggacatggtagaaaattaccccacagctttgcggagcctggtgttggctgagaacagcattagcccagagctgcagcaacagatctgtgacctcctctctgagggagaggaggaggaggaagtggcaggaggggctggcgacacccaggaatgggagagagggcgggagcctgctgcccaccagagaggcagcagctcctggatgtgccccagcgatcccagctctcagatggtgctaatgacgtcaggactaggggacagtctgttggctgagaccgagatgtgactctccactgggcctctgcacaccatttcacttatctatgtcccgagcaccttgccccagatatcagggtcaggccctgggacttgggagggaactggggtcaggggctgcatgggggctctggcagctcctggcagtgtggtgggaaggaagctctggaagctgtgactgagcaacagccttggggggcacttgaacccacggcaatgcctttgaacttggcagctctggctgcaacccgctggctcggaaaagattttatgaactcc

SEQ ID NO: 394536 - DNA, 651 bp, Homo Sapiens
atgaagctgaatctggtgcagatctttttcatgttgctgatgctgctgctgggcctggggatgggcctggggttgggacttcatatggctacagcagtcttggaggagagtgatcaaccgctcaatgaattttggtccagtgactcacaggacaaagctgaggccactgaggagggagacggcacccaaaccacagaaacgctggtgcttagcaacaaagaagtggtgcaacctggctggccagaagatcccatcctcggtgaagatgaggttgggggtaacaagatgctcagagcctcagctctctttcagagcaacaaagactatcttaggcttgaccagacagatagagaatgcaatgatatgatggcacacaagatgaaggagcccagtcagagttgcatagcccagtatgcattcatccatgaggatctaaacacagtcaaagctgtctgtaacagtcctgtcattgcctgtgagctcaaggggggaaaatgtcacaaaagctcccgaccttttgatttgacattgtgcgagctgtcccaaccagaccaggtcactcctaactgcaattacctaacttctgttataaaaaagcacattattataacctgtaatgacatgaagcgccagttaccaactggacaatga

SEQ ID NO: 394537 - DNA, 1000 bp, Homo Sapiens; identical to SEQ ID NO: 220801

SEQ ID NO: 394538 - DNA, 1000 bp, Homo Sapiens
ccaccccgccttcccttttaacacaccgttatagaatggttcatgtatgtggtgtttcttaacctgctttttcagcaactaaaaccaaacaaaaatcaacccattgaacttctttccatgttatcaacaggcttatgaaacgtcatcttcagtgcctgcagagtgctccagtgtatccgtggaccttaacatttctgtaatcattcccgcattgttggacattcaggtggtgcctagttctttccctgtgtttaagaccaacattgcgtgctctgtgctttgatgagtgaatccttccttgtcaagccaaatctttgctagcatcccggtggtctccttaactgcggacttgcaagatccacatatagacattttaaagacttttcctgtgtgttgccaaaaggcccccttcataagcattgtaccgatttgcactcgtgccggccagcgcagctagtaaagagtatgcccgtttcccctgcatagtctcctggtcactgtaattgatcgtgtgtgtgcgtgcgtgtgtgtgtgtgtgtgtgtgtgtgtgtgtcttggccagcttggcgggctacaaagggtgtttcgctgtcctcggtagttttgctggaaacaaacactgcttatgaccccattcccctgtgccctcttcctgtccttttccctgttgtcagaaaagtaattcagcgtcattgcaagaaaaaaaaatcacaaagcagacaagttaccagaagaaaattaaagtcaccagtaatcatttctgatgattacacacacattccagaaacattttcatgcacacctctctgatattttctagaactacctgaaacatttttgtctgtaggtctagtttttttcttatgcatatatcatatatgtatattatgatgtacagactgtttttatatctgcttttcacacatacatgtgtgtgtatatttatacacacacatattcttgaacttcatttcatgtcattaaagatacttttaaaata

SEQ ID NO: 394539 - DNA, 1000 bp, Homo Sapiens; identical to SEQ ID NO: 115383

SEQ ID NO: 394540 - DNA, 1000 bp, Homo Sapiens; identical to SEQ ID NO: 220803

SEQ ID NO: 394541 - DNA, 1000 bp, Homo Sapiens; identical to SEQ ID NO: 115384

SEQ ID NO: 394542 - DNA, 1000 bp, Homo Sapiens; identical to SEQ ID NO: 284520

SEQ ID NO: 394543 - DNA, 1000 bp, Homo Sapiens; identical to SEQ ID NO: 284522

SEQ ID NO: 394544 - DNA, 1000 bp, Homo Sapiens; identical to SEQ ID NO: 284523

SEQ ID NO: 394545 - DNA, 1000 bp, Homo Sapiens
aacgtgaactattacttgcagaagaatacccaatggcagcccctaaagtacgtttcatgaccaaaatttatcatccaaatgtagacaagttggaaagaataagtttagatattttgaaagataagtggtccccagccctgcagatccgcacagttctgctatcgatccaggccttgttaaatgctcccaatccagatgatccattagcaaatgatgtagtggagcagtggaagaccaacgaagcccaagccattgaaacagctagagcatggactaggctatatgccatgaatagtatttaaattgatccaatcattaagtgtgcatcacttctcctgttctgccaagacttcttcctttttgcttgcatttaatggacatagtcttagaaacattacagaataaaaaaacccagacatcttcagttatttggtgattaaatgtacattagcaaatctatgtcttgtcctgattcactgtcataaagcatgagcagaggctagacgtatcatccggattgttgtgaaacgtttaaaagcagtggtccctccctgcttttattcatttcccccatcctggtttaagtataaagcactgtgaatgaaggtagttgtcaggttagctgcaagggtgtgggtgtttttctttattttatttttttgaggggggtaagtagttttattttaattttatgggctcctttccccgcctttttggtgatctaattggattggttaaaagcagctaaccagttctttagaaatatgctctctatccaagtctaactttatttagacactgtagatggacaagcttgattgtttgaaccaaaatgggaacatttaacaagcatcactgccctcactaataacattgtgactttgctgtcaagtgtagagtccccccttcaaaataagcttgtgaccattttgtatggcttgtctggaaacttctgtaaatcttatgttttactaaaatattttttgttattgtaaaaaaa

SEQ ID NO: 394546 - DNA, 1000 bp, Homo Sapiens; identical to SEQ ID NO: 284524

SEQ ID NO: 394547 - DNA, 1000 bp, Homo Sapiens; identical to SEQ ID NO: 284525

SEQ ID NO: 394548 - DNA, 753 bp, Homo Sapiens
ctctttctcagtgaccgggtggtttgcttaggcgcagacggggaagcggagccaacatgccagtggcccggagctgggtttgtcgcaaaacttatgtgaccccgcggagacccttcgagaaatctcgtctcgaccaagagctgaagctgatcggcgagtatgggctccggaacaaacgtgaggtctggagggtcaaatttaccctggccaagatccgcaaggccgcccgggaactgctgacgcttgatgagaaggacccacggcgtctgttcgaaggcaacgccctgctgcggcggctggtccgcattggggtgctggatgagggcaagatgaagctggattacatcctgggcctgaagatagaggatttcttagagagacgcctgcagacccaggtcttcaagctgggcttggccaagtccatccaccacgctcgcgtgctgatccgccagcgccatatcagggtccgcaagcaggtggtgaacatcccgtccttcattgtccgcctggattcccagaagcacatcgacttctctctgcgctctccctacgggggtggccgcccgggccgcgtgaagaggaagaatgccaagaagggccagggtggggctggggctggagacgacgaggaggaggattaagtccacctgtccctcctgggctgctggattgtctcgttttcctgccaaataaacaggatcagcgctttacaaaaaaaaaaaaaaaaaaaaaaaaaaaaaaaaaaaaaaaaaa

SEQ ID NO: 394549 - DNA, 1000 bp, Homo Sapiens; identical to SEQ ID NO: 284526

SEQ ID NO: 394550 - DNA, 1000 bp, Homo Sapiens; identical to SEQ ID NO: 284527

SEQ ID NO: 394551 - DNA, 1000 bp, Homo Sapiens; identical to SEQ ID NO: 284528

SEQ ID NO: 394552 - DNA, 1000 bp, Homo Sapiens; identical to SEQ ID NO: 115777

SEQ ID NO: 394553 - DNA, 981 bp, Homo Sapiens
atgtgtcccttgaccttgcaggtcactggcctaatgaatgtctctgagccaaattccagctttgcttttgtaaatgaatttatactccaaggtttcacttgtgagtggacaattcagatcttcctcttctcactctttactacaacatatgcactgactataacagggaatggagccattgcttttgtcctgtggtgtgactggcgacttcacactcccatgtacatgttcctgggaaatttctcctttttagagatatggtatgtctcttctacagttcccaagatgttggtcaacttcctttcagagaaaaaaaacatctcctttgctggatgttttctccagttttatttcttcttctctttgggtacatcagaatgcttgcttttgactgtgatggcctttgatcagtaccttgctatctgccgtcccttgctctatcctaatatcatgactgggcatctctgtgccaaactggtcatactgtgctgggtttgtggatttctgtggttcctgatccccattgttctcatctctcagatgcccttctgtggcccaaacattattgaccatgttgtgtgtgacccagggccacgatttgcattggattgtgtttctgccccaagaatccaactgttttgctacactctaagctcattagttatttttggtaacttcctctttattattggatcctatactcttgtcctgaaagctgtgttgggtatgccttcaagcactgggagacataaggccttctctacctgtgggtctcatttggctgtggtatcactgtgctatagctctcttatggtcatgtatgtgagcccaggactcggacattctacagggatgcagaaaattgaaactttgttctatgctatggtgaccccactcttcaatccccttatctatagcctccagaataaggagataaaggcagccctgaggaaagttctgggaagttccaacataatctaa

SEQ ID NO: 394554 - DNA, 1000 bp, Homo Sapiens; identical to SEQ ID NO: 220805

SEQ ID NO: 394555 - DNA, 1000 bp, Homo Sapiens
cctgtgaggaaagaactgacttcctctggtgggccaacaaagtttgaaatccatatagtggctcagttcgataatcataattctcaggtctggcgagtgagttggaatataacaggaacggtgctagcatcttcaggagatgatgggtgtgtaagattgtggaaagctaattatatggacaattggaagtgtactggtattttgaaaggtaatgggagcccagtcaatgggagttctcagcagggaacctcaaatccttccctaggttcaactattccaagtcttcagaattcattaaatggatcttctgctggcaggtatttctttacccctctggattccccacgggctggatcgagatggtccagttatgcccagctccttcctcctcctcctcctcctctggtagagcactcttgcgatgctgacactgccaacctccagtatcctcaccctcgcagacgatatctctctcggcctcttaatcccttacctgagaatgaagggatttaaaacactgatttaacattgaaaggccttattcaagtgcttgtaaatgctttcatttctggctgctttttgtttttcattttctttcagaagatttttctaacttagggtctgtcttgcatgtattacaaccagaatacagtgtttggaacctaaatctgtttgtgcgtctgcatcaaaggaacatttgcttcactgggtgataacctttgatgaaatgagatatgtccaagtaacgttaactgtgaagttacacacagtagctgacttcaaagtgcctgttctgtaaattttattttaaactgttaccatagtcttaagttgtttatgctttatcagactggctaatgtgaaagcataatattatgaagtttattctgccttatgagaccttaaaaaatggatttcattttacaggctaatgttgtaactgactagtatgtaaaataaatcattcctgtgtataaagcagcaaaacctaaaaaaaaaa

SEQ ID NO: 394556 - DNA, 1000 bp, Homo Sapiens; identical to SEQ ID NO: 115385

SEQ ID NO: 394557 - DNA, 847 bp, Homo Sapiens; identical to SEQ ID NO: 25072

SEQ ID NO: 394558 - DNA, 1000 bp, Homo Sapiens; identical to SEQ ID NO: 284534

SEQ ID NO: 394559 - DNA, 1000 bp, Homo Sapiens; identical to SEQ ID NO: 284535

SEQ ID NO: 394560 - DNA, 1000 bp, Homo Sapiens; identical to SEQ ID NO: 284536

SEQ ID NO: 394561 - DNA, 1000 bp, Homo Sapiens
  misc_feature (871)..(871): n is a, c, g, or t
ttggaaaactgagctacaaaagaaggaagacagacttccacctattaaaggaccatttgcagaattcagaaaaattcttcagtttcttttggcttattccatgtcctttaaaaacttgagtatgcttttctgtttgacttggccctacatccttctgggatttctgttttgtgcttttgtagtagttaatggtggaattgttattggcgatcggagtagtcatgaagcctgtcttcattttcctcaactattctactttttttcatttactctctttttttcttttcctcatctcctgtctcctagcaaaattaagacttttctttccttagtttggaaacatggaattctgtttttggtggttaccttagtctctgtgtttttagtttggaaattcacttatgctcataaatacttgctagcagacaatagacattatactttctatgtgtggaaaagagtttttcaaagatatgcaattctgaaatatttgttagttccagcctatatatttgctggttggagtatagctgactcattgaaatcaaagccaattttttggaatttaatgtttttcatatgcttgttcattgttatagttcctcagaaactgctggaatttcgttacttcattttaccttatgtcatttataggcttaacataactctgcctcccacatccagacttgtttgtgaactgagttgctatgcaattgttaatttcataactttttacatctttctgaacaagacttttcagtggccaaatagtcaggacattcaaaggtttatgtggtaatatcagtgatattttgaactgtaaaaatggacttaataatagaccatttctacaaagaacaactgaataggnggaaaacatggaatttcttttaggtgcagtggtggtcttcaaattacattagtttttttaatatatattttaaacatatgtaagaaattaagtggcaaagaactgggaaagcttaagacctgcttcaaa

SEQ ID NO: 394562 - DNA, 1000 bp, Homo Sapiens; identical to SEQ ID NO: 284537

SEQ ID NO: 394563 - DNA, 1000 bp, Homo Sapiens; identical to SEQ ID NO: 220806

SEQ ID NO: 394564 - DNA, 1000 bp, Homo Sapiens; identical to SEQ ID NO: 284538

SEQ ID NO: 394565 - DNA, 1000 bp, Homo Sapiens
acagaagattatgtgtaggaggaaaattgagtagctaatttaatttcatttaatattttacttagagtgtatacatgtttatagactgcaagtctatgggatttaatagatattacagcaaattacactgcgaaaacattgatagttctacactgtaattaaatgttatatatattattaaaattattaggttggtgcaaaagtaattgaggtttttgccattgaaagtggtggtgcatgcctgtaatcccagctactcgggaggctgaatcagaattgcttgaacccggagggcagaggttgcagtgagctgagatctcgccactatgctccagcctgggcaacagattgagactctgtctcaaaaaaaaaaaaaagtcaagtacagttagttaaaggaatgtgcatttaaaaattaatctatgattaggctattaatatatagtctaataattttattgcattataattataaagtagttttataattttataaaattttattgatgctgtaatttttataaaattttatttattttataattttacaaaaaattctaatacctgtaatacactttttagtgccttttctttctaaaagttaatgtttgaaattacaatgtgtaaatgttatctcgtcttgtttttcttattagggccccatttcactgaatgacaattgcaatgaggcataggaaagaaaagggaaatgaaattgcttgctgaagtcctactatgttctgggcactatgctgtttgcctaataaataattgccttgtgctgtgtaccttggagcagggccttacatagtgaatatatcaatagttgttcacaaaaagagcaatataccacttagaagctacagaacttaaaaatggctacttatactccatagaagatatagtaaataatagaagaaaaaaatgaaatggctaaagacattttgttttacaatggggctgtttttacatgttaattaaaattctatgtttaaacaaa

SEQ ID NO: 394566 - DNA, 1000 bp, Homo Sapiens; identical to SEQ ID NO: 284541

SEQ ID NO: 394567 - DNA, 1000 bp, Homo Sapiens; identical to SEQ ID NO: 284542

SEQ ID NO: 394568 - DNA, 1000 bp, Homo Sapiens
agtaactgcctaactgttttccaaagcagctgcaccatttttcattcccatccatgctattgtttttcagttaaatagctccactcctccccctccccaccctccacagaactgccagtaaaactggactatggagtattgggtggggtcacctacaaggtcatctgcagcaagtgagatcatcgcccctcctgcctggagaggtgggactggggaccctgtgacaggaggagctgcccttcctggagcctggtttttctttttcctctgtgctccatgagaagtcagtttagtgggctacagccagcaaaggaaccaaaaccaacaggagctctgggggtgccttgcatggcgaggctccgtggctgcacgcgtgtatgcaggtggctgtgggtgtctgtgtgtcctgggccactgtgtgcgatggtcccactgggaggtgtggcccccaaagagtggaacccacaggtggacacacccatgcaccctcgttcttgcccaaggtcacacatcgagacagcagggcccagatggatggccccaagctcggtggctcccgtgctgcccacacctggggacaggcccactgtggggggtaaggggtggaggtgttctaattcgggctgagccgtgtgactggcaggggccccagctgttgggcctgggcaggactgtttttagaaaagccccaactccctgcccctacccgggcccgtggctatttatagtccgggcctggagaagtcagtgagtcactagcgttcgcctctgcagggtcagtccaagcccccttagtgaggtggtctagcatgtcccccagtcccccaagcctctatctgacatctgctagcccagagccccaggggtccccaggaagggctcagagctggtggcccccccaggccttggcagcacctccttgtctgatgggactttgtggttcctggtggacatttaacattgtcggtttctctcatctggaaacaaacctccatgacgc

SEQ ID NO: 394569 - DNA, 1000 bp, Homo Sapiens
tgctgtgtgccgggcgacgctcagggcaaccgtgcgggcatccgtgtcagagtgctgtgtgccgggcgacgctcagggcggccgtgcgggcatccatgtcagagtgctgtgtgccgggcgacgctcagggcggccgtgcaggcatccatgtcagagtgctgtgtgccgggcgacagtcagggcagccgtgcgggcatccgtgtcagagtgctgtgtgccgggcgatgctcagggcggctgtgcgggcatctgtgtcagagtgctgtgtgccgggcgacgctcagggcggccgtctgggcatccgtgtcagagtgctgtgtgccgggcgactctcagggcggccgtgtgggcatccgtgtcagcgttctgtgtgccgggcgactctcagggcagccgtgcgggcatccgtgtcagagtgctgtgtgccgggcgacagtcagggcagccgtgcgggcatccgtgtcagagtgctgtgtgccgggcgactctcagggcggccgtgtgggcatccgtgtcagagtgctgtgtgccgggcaacgctcagggcggccgtgtgggcatccgtgtcagagtgctgtgtgccgggcgacgctcagggcggctgtgtgagcatccgtgtcaggtgggctgctggatgctggggggtcactgactcacccctagggctgagggcgggtgggttactggcctccacatgggtgtgacaacctggcagtgagggatggtcatgcagacatgtgttgggcatggagcatccgtggtggtggaagccctcccatgccgggccgcggggcagggctctgggagaggacgcaggatccctccctgcatgtctgtctgcagatcagcttcacctgcccccaccctggcagttcaatctactgtcattagacccacctgccctcaccctggcctgcacccttcaatctactgttattagacccacggggcttcttggtgattaaacgtgtgtgttgctctctgcacatccaagaactgc

SEQ ID NO: 394570 - DNA, 1000 bp, Homo Sapiens; identical to SEQ ID NO: 284544

SEQ ID NO: 394571 - DNA, 1000 bp, Homo Sapiens
agtactcgctgggctgcgggctgacctgtggcctgagcttcctgcaggagggcgcccctcaccgcacgctgaacctgctgctgagcctcgggctggccacgctgctgggcctgggtgcccggcgcctccaccgccacgtctgccgcctctacgagctgcacagcagccagcgctactgtggggtgtgcctgggcctgctggcccatgcacatggcctcccccagctgctgggccgtgccctggccatagcctttgccgtgggtgacctggcagctgtggccctcatcaaccaggacttcctgaccacctcggaggccatgcggttctggacaccgctcaccatctgctacacgctgctggtcatctacatgcaggaggagcagcggcagcaccccggcctgcagagccaggtgcagacggtgctggtgcgcatgggcggcctcttcgtgctgctgctgactgtgggtcgctggctggacctgctgggcatccttgtctccctactgggcgagctctggtgtctcgtgggcgtccgcaccctgcttgacctctgccagatacaggattttccatcccagaggcctccagtgtcaacaccaagccagcccctgccctcggcaccccagtcccagagttcggccccctcttgacctgcctcagggaggatctggagtctgtctcaagcccactagcctgatctccgaggccttgaccccagggcgatgcctggaggcagagtggcagagctggcctcctgcccagagctcagcacaggccctgggagccccgagaagggaaggcaggatttggggatgggagcctctggagaggggacacctggggacccctggttgaaccctctttttcttggggtgggcaatgatgcagcctctcagacctgccttcctgggcaggggtgggggtgcatcctcaggagggctccccctttactggtctcccttcccttctccatgaacaataaagacgatgtctttctcaa

SEQ ID NO: 394572 - DNA, 1000 bp, Homo Sapiens
cgcctccccgcagcgctgacctccacgcccggacccctggccaccccgacaagcttcgccgaggtgccgaccgaccgactgatcgcggacgccggctggaaggactacggatccgcaggaagaggcagttgggggccaggggcccagtagaggaggctgagctccttccaactcctcagaacctccactctatggatctggacctctggattcggctttctccctgggcactgccttcaggaagacgttgagaattgaccttacacaatcccagcgccctcctcacaggagcctttcactttacagtggcaaggggctggttctggagaactggctgatgctctgaatttcttcatataccccacatttgactttggcttacactgtacaattggagatgttgctacaggtccctgagatgcaatcagattaagcgtagcaagcattgccaatgggaaagtcaaaataatttattttttttccctttccccctaccccatccccagccaagaatttcttttcaagatatcgtcatcattcttaaacaacattcttaacccccagctggggtccccattttaatagatgtcattgcttcaagtctaacggcgccgggaggcctgtttgagggaaaacattagtttgaaaaatccccgttcccttcatccactgcccttgttctccacgtgggagtgtgcttgtggcccctcagaaagatagtctgctggctcctaggggttggggtgggggacacacctttttctcaggaagaggtgatggcaatgtaaaacatctaagcaaagttttaaatgaaaaaaaggaaacacatttaaacatcctgataatggagggaaggggggcacatttacacatagcccagaacttgtagaattctgcatagtgaatgtatattgaattagtctcctgccttatacattcaggaggaataaatttccataatgtaaggcaaaaaaaaaaaaaaaaaaaaaaaaaaaaaaaa

SEQ ID NO: 394573 - DNA, 1000 bp, Homo Sapiens; identical to SEQ ID NO: 220807

SEQ ID NO: 394574 - DNA, 694 bp, Homo Sapiens
gacatcaccaagggcctggcaccaggtgcccagtcttccagttgcgagggcaagcaaacccgtcatgagcaactcccttccccatctctgctcaccatgtggacgctgaaatcgtccctggtcctgcttctgtgcctcacctgcagctatgcctttatgttctcttctctgagacagaaaactagcgaaccccaggggaaggtgccgtgtggagagcactttcggattcggcagaacctaccagagcacacccaaggctggcttgggagcaaatggctctggcttttgtttgctgttgtgccgtttgtgatactgcagtgtcaaagagacagtgagaagaataaggagcagagtcctcctggccttcgaggcttcccatttcgcactccactaaagaaaaatcaaaatgcttctctttacaaagactgtgtattcaataccttaaacgaacttgaagtggagcttttgaaatttgtgtccgaagtgcagaatcttaaaggtgccatggcaacaggcagtggcagtaacctcaagcttcgaaggtcagagatgcctgcagatccataccatgtcacaatctgtaaaatatggggagaagaaagctctagctgaatggatttgtgtgtcaggagagaaaaaagttgagtgttgacaaactgtatgcaaactaataaaactattctgaagaaaagaa

SEQ ID NO: 394575 - DNA, 1000 bp, Homo Sapiens; identical to SEQ ID NO: 115389

SEQ ID NO: 394576 - DNA, 1000 bp, Homo Sapiens; identical to SEQ ID NO: 284547

SEQ ID NO: 394577 - DNA, 1000 bp, Homo Sapiens; identical to SEQ ID NO: 284548

SEQ ID NO: 394578 - DNA, 1000 bp, Homo Sapiens; identical to SEQ ID NO: 220809

SEQ ID NO: 394579 - DNA, 1000 bp, Homo Sapiens; identical to SEQ ID NO: 220810

SEQ ID NO: 394580 - DNA, 1000 bp, Homo Sapiens
ccaatttgccagcagcagagaccaacactgagccctcaatatggcaccattcctcggggtgatcagccagctacctggtggcaggttggttatatgggacttcttccatcatggaaagggcagaggtctgtcctcactggaacagacacttactctggctgtgggtttgcctaacctgtatgcaatgcttctgccaagactaccatctgtggactcacggaatggcttatccaccatcatggtattccacacagcattgcccctgaccaaggcactcactttacggctaaaaaaagtgcagcagtgcacccatgcttatggaattcactggtcttatcatgttccccatcatcctgaagcagctggattgatagaacggtggaatggccttttgaagtcacaatcacaatgtcaactaggtgacaaagctttgccgggctggggcaaagttctccagaaggcagtgcatactatgaatcagtgtccaatatatggtactctttctcccatagccaggattcacgggtctaggaatcaaggtgcagaaggagaagtggcacctctcaccatcacccctagtgatccactagcaaagtttttgcttcctgttcctgcaacattatgttctgctggcctagaggtcttagttccagagggaggaatgcggctaccaagaaacacaacaatgattccattaaactggaagttaagattgctacctggacactttgggctcctcctacctttaagtcaacaggctaagaagagagttacagtattgtctgaggtgattgacccagactttcaagatgaaatcagtctactatgccataaaggatgtaaggaagagtatgcattaaatacaggagatccactagggcatctcttagtattaccatgccctgtgattaagatcaatgagaaactacaatagcccaatccagctagtactataaacagtccagatccctcaggaacgaaggtttgggtcactccactt

SEQ ID NO: 394581 - DNA, 1000 bp, Homo Sapiens; identical to SEQ ID NO: 284550

SEQ ID NO: 394582 - DNA, 1000 bp, Homo Sapiens; identical to SEQ ID NO: 284551

SEQ ID NO: 394583 - DNA, 1000 bp, Homo Sapiens
atatctccagagcagatgatgggctgtatcagtgcacagtggccaacaacgtgggctacagtgtttgtgtggtggaggtgaaggtctcagactcccggcgtataggcgtgatcatcggcatcgtcctgggctctctgctcgcgctgggctgcctggccgtaggcatctgggggctcgtctgctgctgctgcgggggctccggggctggcggcgcccgcggtgccttcggctacggcaacggcggcggggtcggcggaggggcctgcggcgacttggctagtgagatcagagaggacgccgtggcgcccgggtgcaaggccagcgggcgcggcagccgcgtcacccacctcctggggtacccgacgcagaacgtcagccgctccctgcgccgcaagtacgcgcctcccccctgcggcggccccgaggacgtggccctggcgccctgcaccgccgccgccgcctgcgaagcgggcccctccccggtctacgtcaaggtcaagagcgcggagccggctgactgcgccgaggggccggtgcagtgcaagaacggcctcttggtgtgagcgcgcgcgccgggccgggctgcgccccagccaggaggagggcgcggggctctctgtctgcagctggggacacgtcggggctggggacgacctcgctcgccccaggctgccaggcggctgggggtgaaggcatttccctaaggaaatgcgtagggaggcagagcctcctccccaaaagtgggaaggggcgggcgagggcggaggaaggcgatcctgagccttctccgcacccccgggaccgaaggcttgggggagagggagggaggaggaggctgagtgtcctagagcggctgaggccggaggcctggtgtccccagcctaagcagagggccccgggggccgggtgggtgggggtctgtctggacgaattgttctgtgtgtgaggtctgagctctgaggcagcagtgttagcacaataaagaaacattgagacgtga

SEQ ID NO: 394584 - DNA, 1000 bp, Homo Sapiens; identical to SEQ ID NO: 284554

SEQ ID NO: 394585 - DNA, 1000 bp, Homo Sapiens; identical to SEQ ID NO: 284555

SEQ ID NO: 394586 - DNA, 1000 bp, Homo Sapiens
ctggaaaaagcaccataagttcttactccaagccatggactccagccagaactgacagcccagaccccatactttaggtcatctctggcttgaaggtggggcttcactgtgcacccacccttttctatgcagaagtctgtcttcctcctgctgctatcatattgtccatagtgcccacgctgctcatgctgaggagtgcctgcaggcccgacaagctgccgtcaaccctgcctcagcctccctcccatgctgatcagtgcataaagtccaagggggccaagggccagggtttggcatgtcagcgtcaccccaaacatgcgcacccacaggcaggtcagaagagcacccgggcttgccctcaactttgctctgaaatcagagtgggcaccaggcacagggagaagctaggcagtgggagtaggcacttctgagcccgcgaggctgagggggctcagaggtccccaggagcacagggtgcccacgtccgcagctgtggctgggtagctgcagcagtgcctcggagggcagggctcccaccctgccaattcagaagggggcagggctccccctgttcccagccctagctgcacctccccaacttcagcccatgtcttcacagcagccactcccaacgggctgccactgccaacaagatgacctattttgccaatattcatcaactggaacatatttcacaccacagtgttgataaaggaatatgccaataagatggatgctttcatttatgatgaaaataattattacagagaagagtctgtataatggcagctataacaactggatctacttgacaaggtggatgtaacatttcaaactattgaaaaggatgctttgaattaatataaaataaagaatggggctggaaataacccatctaccattttactgaatgaaaaaatcattactattctgtatatactgtgaagctagtaaattgagacataaaatattttttgtgaattaaaaaataagtcaaatc

SEQ ID NO: 394587 - DNA, 1000 bp, Homo Sapiens; identical to SEQ ID NO: 220812

SEQ ID NO: 394588 - DNA, 1000 bp, Homo Sapiens; identical to SEQ ID NO: 284557

SEQ ID NO: 394589 - DNA, 1000 bp, Homo Sapiens
cagggagcccgagataggggtgggctgcagcgcacggtgtcaatgcaaccctagaaagccacttgcagggcttagagtcccggttccggtgaatgtggcaaggctggagtggggctcggggctcgggggctctagctgcctgctggccggctggacgcagtgaccttcccccgggacccctctccagagctgtctgaggatccgcggggggcttacgtgtctgctttccaggacagctccctccctctctccctgacacaggcctgagtgactcggcaccgcagccaggtgcaggggggcggcgccgagtgcacctggagaggcgtgggaggtagcagccgcagcttgcctggcgctcgcgccgcgtctgagcgcgcaccctgggcctgaatctcagcagttccgctgcgacgcggctgctcgcgcgtgcgcctgcgcagagggagccgcacaccctcccctgtcccccgcccaaccgtctccatggcaacggtgcagccttgagctggggtctgcgtcgctgtggcctgagacgcttttcttaaaggtcccgatgacaaggacttggggcctggaagcaccactttcattaaccagcaaaaaacaaggccgaaaccacagagggccagaaatcactcaaggatacccgacctcattcaggggatagaggcctccttccagagggtaccggcatcactgggggttacaattcccccttccaggggccaggtggaattcaggattatataggcctaaatcaaagggcactggccttgcagcgtaggaccaggacttactcgggatactggcctcattcacagtatatgggtctcagtatcaaataggggggcccaggcaccacctgtgagcaagacaccattcagggtatatgggcctcacttgcagggtacaggccccactcgatgggaccggccctcactcccatacacgttcctgtattctgaactatgcatgcacaataaatcctgtggttttgcac

SEQ ID NO: 394590 - DNA, 1000 bp, Homo Sapiens
ggaaaatttgaaagaatgttttctgcaggaaaaccaacgagcatacccacatccagtgccttacctgtcaaatgttactcaaagccttttaaatatatatatgaactaaataatgtaacgccactggataatttgttaaacttatcaaatgaaattttaaatgcctcataaaatattatgtatgcagcaatatttgagtaacaagaagcaaatatccaagttccaaaattataaaagaaattcttatccaaatagtaatgttctaattgatcatataagaaagcaaagcatagacattagaattataagtcagcagtggtctgttcaagaacaatcaacatttttagaaaatagtaggacaaaattaggaaataattatcaccaagaggatctagttcatgactttctattatctcaattagattgctcaatcatcagccttcctatactaaactctgattcaggaccaagaaaggcatagtctgactctggaaatgcgctgttggaagccaaataacatcaatactcttgttctataattgaatatcaaataagacaaattaccattaatttaatgactgtggagttaattgtataccagcatttcagcaaatcatcatcaatagtattacattagcaatttatgcaattaaaagggctttgtaaaactttgaatagattttattgtcattagtagctgttggaacttcattattatataatgtttttgcaaactttaacttttttctaaattgttaaataaaagaataactatccttaatctaaataattttggtagcaaatcctataaggtattaaacattttaaggtatattattacattgctattttactgtttctcattaacccaaacagtttaaaggcagaattccacttagaaacaagttgcattttgaaagtttatttgtaatccatttgtttggaattcagaaatgtatttcacataaaaataatcttggaagtaataaattccaaaatt

SEQ ID NO: 394591 - DNA, 1000 bp, Homo Sapiens; identical to SEQ ID NO: 284558

SEQ ID NO: 394592 - DNA, 1000 bp, Homo Sapiens; identical to SEQ ID NO: 220813

SEQ ID NO: 394593 - DNA, 1000 bp, Homo Sapiens
cttcttttgagttaaaaaaaaaaaaaccttctggtagagttaaacataaattggcttgccctgagagttcgggttttatgtcacgagaggtagttaaatgtgggctgggggcctggtgtggtggctaatgcctgtaatcccaacacattggtagactgaggtgggtggattgcttgagcccagattgagaccagcctggccaacatggtgaaaccccatctccacaaaagttaaaaaaattagccaggcatggtggcatgtgcctgtggtcccagctactcacgagctaagtgggaagatcactggggcccgggaggcagagattgcagtgagctgagagggcaccactgcactccagcctgggtcacagagcaagaccctatctcaaaaaaaaaaaaaaaatgtggggtagacaaatatggggcagggttgctgtaaagggtgttcacgttttattttggaagctgaataatgtagactttaaattgtttttgcaacatagagatctacagctctggactaatggatcagattttgctagttgcaaagatttttgaattttaattgcagtttgctgctgtttcacccacaacaaaagtagaggaagaactcatagcttatatgcagtgatcatgaactctggggctttgtagatgagactaggaaaacttgtgcaggacctgaagttgaactgccttggctcttgttcccatgtgctgggggatggggcaaggacatctcaccaggtatcagtgggtggtctacactatttgagtaaagtcctatccttatagtgttgctttcctgcctggtgacttgactgagtttaggcttagcgacctgcttataaaatggcaagagtacgtacttgcataagcggttaattgacgtaatgcaggtaaatggaacagtaccaaacgcttaataacaaatgcttaataaatgaagatggtggctggcaagtgggggcgaatgtcaataaacaacatataaaaatatg

SEQ ID NO: 394594 - DNA, 1000 bp, Homo Sapiens; identical to SEQ ID NO: 284560

SEQ ID NO: 394595 - DNA, 1000 bp, Homo Sapiens; identical to SEQ ID NO: 284561

SEQ ID NO: 394596 - DNA, 1000 bp, Homo Sapiens; identical to SEQ ID NO: 284562

SEQ ID NO: 394597 - DNA, 1000 bp, Homo Sapiens; identical to SEQ ID NO: 115390

SEQ ID NO: 394598 - DNA, 1000 bp, Homo Sapiens
acctctttggactcagctcccgcccagctcccggtggccctggttggcccacaacttcctgaagccaagctccccagccccagctcaggcctcacggtggcctctccaggctcagctcctgccctctgacagcgtctccaggccccgaacggcctccagtcggtggattcctctatgcccagcttgggcctcccggcagcctctgctggcccaaatcgtcctgaagtcgccctctccaggcccagctccggcctcccggcagcctctccaggcgcaacgcgtcgtcaacgagggcccctccggggtcagctcctgcctctcatcagcctctagaggccagtctggcggcctctgcaggcccagactgcccttgagtcaggctctccagggccagctccagcctcctggcagactctgcaggcccaagtcgtcctcaagtcggcctggaagtgggcctggaagagctgcattttggcctccccgggcccagctccgtcctctcggcggcctctccaggtgcaaaacttcctcgagtcagcctctccaggtccagctcctcctgcctcccagtggcctctttcagcccagcccagctcgtggctgtaggcagccttcccaggccctgcttttgacttttggcggcctcttcaggcccagaacttgatctccagtcagcttttgcaggcccggcatcctgcctcccgaaggcctgcacgggcccggcctcggaatcacagcagactctccacgcccagctagctctcgcctcactgtggcctccccagtccaaagctcctgcctttcggccgcttcggcaggcccagctcccgcctgccagtggcctctttaggcccagctcattcctcacattggcctttccaggccccgtttttcccttccggcagcctcttggcctctaattttttttatcttttgtgtataaatcccaaaatatggaattttggaacatttccaccattatataaatattttggtaggt

SEQ ID NO: 394599 - DNA, 1000 bp, Homo Sapiens; identical to SEQ ID NO: 284564

SEQ ID NO: 394600 - DNA, 1000 bp, Homo Sapiens; identical to SEQ ID NO: 284565

SEQ ID NO: 394601 - DNA, 1000 bp, Homo Sapiens
ttagtctcagtcctgcctgaactttccactaggcttggaacccttccaagaaccatatttctctccttcccaccaattttcccttgatgaggctttagcagtttgctcccaccacccccagcccatttcacaactctgatcttagtccaaagcaggggacacgcccccccaccaccactttttctctctcccacctcagcctcctgtgcagttccttgcctgcccgtgcatttcctagagtctactgcctccccgctggctgggagggtgtctgggggggatctttcaggggccctggcacccagggcctgtgctggcctaggagtgctgaccagaaggctgctctgttcccccccacccccgttgctttctggccccctctttggagccagccgcccacagggctttggtgcctcagaagcagtgggctgccgggtcacagccgcaggctgcaaaagaccctcggagggagcatggagtgaggggttctctctcaggtgtgtatgtattggggggtgggggtgggtggagggtgtcagggaagttggggtgggatcccagccttcccttcaagaggcagggagctctgggaggtggagtccccaccgctttctctactaggctcctcctgttccccaggcttggggagctttgcacaaggagactgcccccagcctagtggcacctacctcatgggctctggggcaggtaggggaagggccagtccagctctggtaatgttggggggaggcataccaaagaatccaggggcagggagtggggagggtgacttccgagctggcctctccccttcctctacccagactggggctgggatcctctcctcccgctgtaaccatttctacctcattttgctgcgtgttgtacatggacgtatttatctcctgtctgacgatgctctgcagttgtggtctgtctacctcagaagagactgtattttaaaagaaagtattacacagtattaaagcgatgacatgtg

SEQ ID NO: 394602 - DNA, 1000 bp, Homo Sapiens; identical to SEQ ID NO: 284566

SEQ ID NO: 394603 - DNA, 1000 bp, Homo Sapiens; identical to SEQ ID NO: 220816

SEQ ID NO: 394604 - DNA, 1000 bp, Homo Sapiens; identical to SEQ ID NO: 284567

SEQ ID NO: 394605 - DNA, 1000 bp, Homo Sapiens; identical to SEQ ID NO: 220817

SEQ ID NO: 394606 - DNA, 1000 bp, Homo Sapiens
tgatttcgttattggcagggaagagccagactccctgcgctcccaagacggggcgattgggagggggttctggagctcatgcctggggtcggcccggcgggggtgaccccgcgccctcgccggtgcaaggagaacagctggttcccgccggggcagggaagcgtggacggtgtgggctcaggcgcctggcaggcacacggggcctctaaagcttggtcactgtcacagatcgtgtggttgtttcttccgtccccgccacgccttcctcctgggatggggattcattccctagcaggtgtcggagaactggcgcccttgcagggtaggcgccccggagcctgaggcgggaactttaaaatcagacgcttgggggccgggctgggaaaaactggcggaaaatattataactgaactctcaatgccagctgttgtagaagctcctgggacaagcggtggaagtcccctcaggaggcttccgcgatgtcctaggtggctgctccgcccgccacggtcatttccattgactcacacgcgccgcctggaggaggaggctgcgctggacacgccggtggcgcctttgcctgggggagcgcagcctggagctctggcggtagcgctgggagcggggcctcggaggctgggcctggggacccaaggttgggcggggcgcaggaggtgggctcagggttctccagagaatccccatgagctgacccgcagggcggccgtgccagtaggcaccgggcccccgcggtgacctgcggccccgaagctggagcagccactgcaaatgctgcgctgaccccaaatgctgtgtcctttaaatgttttaattaagaataattaataggtccgggtgtggaggctcaagccttaatccccagcacctggcgaggccgaggagggaggatcccttgagcccagaggttcgagactagcctgggcaacacagtcagactccatccttccaaaacaaacaaacaaaaaaaaaaaaaaaaaa

SEQ ID NO: 394607 - DNA, 1000 bp, Homo Sapiens; identical to SEQ ID NO: 284569

SEQ ID NO: 394608 - DNA, 1000 bp, Homo Sapiens; identical to SEQ ID NO: 220819

SEQ ID NO: 394609 - DNA, 1000 bp, Homo Sapiens; identical to SEQ ID NO: 284571

SEQ ID NO: 394610 - DNA, 1000 bp, Homo Sapiens; identical to SEQ ID NO: 284572

SEQ ID NO: 394611 - DNA, 1000 bp, Homo Sapiens
gggaatggccttgtgagagactccaggagcaaagagcgaccctcacaaggcccaagtcctcccagagctcagggaagctgtggcttctgacggaagaagggagagaaagctccctcctgtgtgtccctggtggtctagtggctaggattcggcgctttcaccgctgcggcccgggttcgattcccggtcagggaatcgttttacactggccgccctcccgcaggaatcttccttcactacgctgtcagccggcctgctccaagagccagaagcagaacagtctcctcagcggggtcaaagacgggcgaaggagggcaagtgcttgtggaccacctctcacgacacaccgttcctatttatctccgtgtccgtcatccgcgggagcagctttagagagcgactgagcatctcggtccggtgtacacagcccggcagagatgccagcccccgtggagctgcacccaataagcccaccttctttcccgtcgccaccccggagacgcccatcgggctgagctgcgaataactaagagagaggccaagccaagtcgtggcgtttgtggcagccccggacacgggcaccagccagtcagcggagcctcctcacctccgttgccagcgaaggcgctcgttaggccttgggaagaggggagagaccgtggtcacgaagggggttctcccagagtgaagcttcttcatcgcactctagagttgctgattcctgtgatttcctccatgtgggaaacggtgtttgtgctagaagaggctgcgctctttacctgacataagggggttcaagactgacatcgcctcacgcctacccgaaaacgtttacatggcttgtctctttttttttctgtcctaaagtcgcctcatcttcacatcccctcattttttcttccacactcgagagtgtctctctctctcattaaaagctccaccaaatatttgaaatatctcaaccagaaagactgcaataaatacattatttcattcgtgg

SEQ ID NO: 394612 - DNA, 1000 bp, Homo Sapiens
attcactgagaagccatcattctgctcaggtgagtcctgacttcaggcgagggatcctaaaggtgacaccgcgatccttcacctggaaagccaaggagacatgacatcagtgtgtttcacatcctaagcttaaacaaatgtatattgtttttaccgcctctttctcaagggggaacactgcccctgaaactgcactccttgaaaccgagcaaaggtgccatcgctaatgattagcaagacgctccggatggtttgcatcgaactccacctgctatgtgaaaaccccatgcttttctcactttcccattcaagctgcttagcagttgggtcctctcctctgagtgtggttatgtgtcagtttgacttctgtgtgccctgcgatttcgttgttttcttctgccctgccacagcaaatgaccagtggaggcaacccgcggacggaggaaaagggcaggtccctgcatccatctcagcgccctgcagccggcggcctgtcctttcaggcgggagttcccagcggcgttcctaggtgttttgaatgtgtgccccggggctgggggaagcctcgtgcagttctgctgctgtgggaggcagggggaactggaggggacgggagcagtgtgaggctttcatgtgcagaggggacatgaggacatctggatggcatccctgtgagcagggctcccgctgcaggcctttgaaaaccccgctgccctggctccccagtgccttggaactttctccctggagaatgcagaaaagccagtgcccttgatttcttagacatctacagcttcgacacgtgcagggttatccaggagcagtgaggtttggggtgagggcctgagcactttctgaaaagtgcttgtttctaagaacctggaactatgagtgaggagtgacatgagttctgccctcaagtcctctgataaccagctgtgcagtcttgaacaagtgacttcatctcttcatctttaaaataaaccttttgggccaaatg

SEQ ID NO: 394613 - DNA, 1000 bp, Homo Sapiens; identical to SEQ ID NO: 284576

SEQ ID NO: 394614 - DNA, 1000 bp, Homo Sapiens
gaaaagaggaccactgtcctccagacccttgaaatgcagatccactgacagcttgcattgtgcacctggaaatgcaggcactcaaggccagcccatgaaagcagctgcaggggctgcaccctgcagggccacaggagtggagctgcccaactccttgaaagaccaccctttccttgtatcatcatgccttggatgtgagacatggagtcaagggagatcatttcagagctttaatatttaatgactgccccactgggttttggacttgcatggggcctatggccccttttattggtctatttctcccatttgtaatgggagaacttacctaattcttgtacttttattgtatcttggaagtaacttacttgcttttgattttatgtgctcataggtggaaagggacttgccttgtctcaggcgagactttggacttatacttttgggttaacgctggaatgagtttagactttgggggactgttggaaagcatgattgtattctgaaatgtgagaaaggcatgagatttgggaggaaccagagatggaaatgatatggtttggctctgtgtccccacctaaatgtcatctctaattgtaatcctcatgtgttgagggaaggtcctggtgggtggtgattagatcataggggcggtttcccctatgctgttctcatgataatgagtgagttctcaagatctgatggtttaaaagtgtttggcagatccccaccaccaccaccacctcttctgctgccttgtaaagaaggtacttgcttgccttttaccttccaccatgattgtaagtttcctgaggcctccccagccttttttctttataaattacccagtctcaagtagctctttatagcagtgtgaaaatggacaaatacaaaattcattaaaatacctccaaatttaatatggaattatgtttacatttaagttatcaatatcaaaagctctatcagttgtcaataaatataactgggaatgtcctag

SEQ ID NO: 394615 - DNA, 1000 bp, Homo Sapiens; identical to SEQ ID NO: 220821

SEQ ID NO: 394616 - DNA, 1000 bp, Homo Sapiens; identical to SEQ ID NO: 284579

SEQ ID NO: 394617 - DNA, 1000 bp, Homo Sapiens
aatggatggatgcccgcgcgctgggaccaccaggtccgcagagatgtcgccggcgctaggggcgctcctcccgcgtggggacaggcgccctcgcctaggcgcagtgtggggggaccccaaaagacccttaagaggccaaaggcctgctctccccgttctccccaacacacaccaggggtcttttctgccccggagaagttgggacgcaaaacgtagggaactgcgctcagtctccgcaccacgaagagtcgagatggggaccgagaccagcacggacggtagcaacagagaggggagcgcccaagtggcgcaacgttgtggctgaagccaagcctgtcgcctccccctgagtaccgctggcggcccaggaccgtgcgctctcccttcctgagcacccagggatgcactgcgcagggaaggagggcacggcgggagggtgcttgcaggggactgctgcgcggattccccatccgcacccggctcgcggggaatccgtgggcttgcactcgccagaaagagctgctgcaggagcagccggatggtgaggcccgttcccgaccctgggtgggaggaacttaaagggctgagttctgaggcgccaggcacagggcgcagcttcataaatgcacccaaaagcttccatggacagacggcacagatgtcgctgaagtgaacctaaggaagtttgctaccccaagacccgggcttcgcgccaggtgacaacagacgtctgggagtgtggtgacacctgcgcagagtccctggtggttcaacctgtccgagaaggttgcaagaagatgccactgtcttacctttctcccctagtgctcatgccccagaaaaggccactgggtcactagatcccaaccccttgtgccatgagagggaagcctgcacaacggcgttggcactcccccataaatcgtctcctgggtccttcccattacgcacacacataatgtcatttctccagggaaaaataaataacaactttcttgac

SEQ ID NO: 394618 - DNA, 1000 bp, Homo Sapiens
gcgtgagccactgtgcccggcctgaatccattttaacatttagttttccagattaactcgaagtaccccacgactacacgctaatgaaactagaggaggcacagcctcagctccgtgcaggagggacgcacaagagcagaatctccgtgggacatctttctggagcatcagtattactgcaggatttggaagaaacgaatttaaataatttccaacgtaagacactggaaatttaagagaaggctggaaagtcattggcctttaataactgtcagtcatctgtgcctaagtcagactttctccaagaaaaaaaaaaaaaaaactctaaggagaacctatttttcattcttctaagtagttaaaattagaaatcacagcaagtcaatagaaagctctgccctgctagtcttctaaatcacaatatggccttggtatggatttatttgtattttttggaggggtgtgttgacatgttgggtataaaaattggggggttttgacaaattttggaagttttcagctattagttggtgatttacttggtacctcatttaattttcctgtcccctcttcaacttggactcaatcactccacaggtctctaagactcttcattttctttaagatttttcactcttttattcagaatggacaatttctattgctctgtgttctgtttctaatctttgaataagctcaaaagtattttttaaatttccttatcttcttattgtttcgtaatttccatgtctttgctgaggttccacagctcttcattcatgattagaatattttcctttacccccatgaacagatttataatggctgcctttaaacatcctgaattacaacatcttaaatatcttaggatcacttctactgcctgctttttaaattgtgtatggatctcattttcgtgtttcttcacacgtctcatgaattttaatgttgtgtactaaaactgtaaagaatcattatagagactctcgattatgttgtg

SEQ ID NO: 394619 - DNA, 1000 bp, Homo Sapiens
ggtggcgacggcagaggagtaagtgacgcgggcgcgggggtccgggggtgccgggagcgcgggggtgctggggacgcggggtaggggcggcgggaggctccgtggcctgccccgggttaaagctgggagggcggccttcattctgaacacatttaggcagcacgggcagccctcctcgccgtgggctgcatcagagcccccctgcccagtcttggggttgctcccggatgctgtctgggaggcttgctcatggtgacatcctcatctccccgtgcacgttactgcattcagagcttgggtcacctggacactgaactctgagtgaattttctctgagatcccgggagaaggaggacagttctctggaaggttttccagggccgatcacggaaaggatgagaagggagaggttctggtcggggacacaattacggtggcagtgtaacatcaggaaactttattgcgtgaagtccctctcactccctctacctccttcttttacgtggactctgccaaagaccaggataccagaatgcactgcagtgaccaaacgtagtgggaccttgggaacgcgagtctggagccaggcggctggggtttgcatcctggttctgcccctccttagctggctgacatggcacaagccacttaccctctctgagccttactgtcttcagtggcaaatggatctgtcaacaggccccattgcctggggttgttactgctgagattaagggatgctcgtccatagaaagacttagcgttgtgcctggcacatagtgtatggtggataaatgggacttaggactaaaactcatgccttggtgtgtttttgcagtgatgttttgttctggggtgcatcacaagagacaaggttcttggccgggcatggtggctcaagccaataatcccagcactttgagaggccgaagggggaggatcgcttgagcccaggagtttgagaccagcctgggcaacatggtgaagcctcatatctacc

SEQ ID NO: 394620 - DNA, 1000 bp, Homo Sapiens
gccaagcgcacctgaaaacctgcgagacagggcctgtgcacgagtccagtactcctacttcgccaagtctcagggacccatcccccagcaacggtggcggcgcagagaagagcacggcgccggcgcaggtgcagagagacaggaggctgatggggggaagttgaggcacctggggcagagaaaaaaatgcatcgccaagcggtttctgggtcatctactgacgaaaatgtcttcccatcagcccttgcgctggtccccagggaccctggcatccgtcgttggcgcccagggtgcgcgtcgggccactaggggtaccccaactcggacagaaggcccatgagttgaatttgaagtttgtgggaatagaggtgaggcaccaggggcagaaaaaaaacaggagacctcgcctcagacaagcggggcctgggtcccccatggatgaaagtgccttcccattatgctgtaccctgggcagagtggacagtgacgaccctggttcgagcccagggtgagcttcgggaccgcttgcggttaccagaaagcgaacaaatggtccatgagcggaaggtgaggcacctgaggcagagaaagtaaagaaacgcgccgccgagaagcagtgcctgggtccctcacggaggaaattgtcttctccttagcccgttcgcttggcactgaggtccctggcgtccctggtttgatcccagggtacgcctcgggccactagtgttaccccaaggtgggcagaaagcccataaggggaaggcgaggcacctggggcagagaaaaaaaaacttcgctgcagagaagcgcggcctgattccccacggacgaaagtgtcttcccatcagtccctgcactgggacccggggaccctggtgtccctggttcgagctcagggtgtgcctcagccgctacgtgcaccccaaggggagctttgggagcacaaagcccatgagggaaggtgagttttgagggaggagtggtgaggcacctgtcacag

SEQ ID NO: 394621 - DNA, 1000 bp, Homo Sapiens; identical to SEQ ID NO: 115391

SEQ ID NO: 394622 - DNA, 1000 bp, Homo Sapiens
agagaattcctgcaagccctcgccttcgccgtgtgggaattttcctggatgctgacttagaagaaatccagttttttgatgttgacaataatgtcctcatctatacacatgatggtttcttctctttggagcttttgtgtccattcttctgtcttgagctcttgggagaaggggagagtggcaacgtcctgaccatctgcccatgagaaagtcagcccttcctagaagctttctgagaggtgaaagagaattttggcctgagaaaggtcagcatgattgaggaagagataatgtgctatagtgcaaagacttggtaaatttttaaagtagattttgtagactttgtagcaaaacaattttcggatttttggggtaaattttgtggaatttgtagctaggtaactggggtctttagggatgttattaagtactgtaagcttcagttttctagtctgtagatgcggataattgtatctcagtcaaacagctgtggtaattagagacaatactatgcctttgtcttatagtaaataacaaatagagaaatcttagattgtaagtaagctagatattaggttttgtggatagacaatatctttttcattatttcaagctgttttgtgtaattcctgataatgtctgaggaggaagaaaaattcaacagccagtgtgagttattttgttgatacagcatgaaatttcagagacaaactgatattggggaagaactaagtttttcatttttattttctttgaaacacagccacataagttttcttgaaagacaaagaactttgaccaaaatgcattgttaatggtgattcatattcttatgggaagtgtcatttacccatctcaataattggactattgtgatttataagaattcttatcaaccatgttaactaacacatattcatcaaaaattgttttcaaggttgcttttggattttttatttgtagaatttattttcttgcaaataaatttataaagcattgg

SEQ ID NO: 394623 - DNA, 1000 bp, Homo Sapiens
cagcttcctgcggcgtcgcaagcgcttcaaggtgctgcgcgccgaccatactcacttgcacgcgggaagcaccaagagcgcgccgggcgccggtccgggagggcaccttcacccccatcaccaccaccacccccaccaccaccatcatcaccacgctgccgcacaccaccaccatcaccaccacccaccccagccgccgccgccgccgcccccgccgccgccgcacatggtacactatttccatcagcaaccgcctactgctccgcagccgcctccgcacctcccgtcacagcccccgcagcaaccgccccagcagtcgcagcctcagcagccgtctcaccccggcaagatgcaggaggcggcggccgtggcggcggcggcggcggcggccgcggcagccgcggtgggcagcgtgggacgcctgtctcagttcccaccctacgggctgggctcggccgccgccgctgccgccgcggccgcggcgtccacgtcaggcttcaagcacccctttgccattgagaacattattggccgggactacaagggcgtgctgcaggctggagggctgcccttggcgtccgtcatgcaccacctgggctaccccgtgcccggccagcttggcaacgtcgtcagctccgtgtggccgcacgttggcgtcatggattcggtggccgccgccgcggccgccgcagccgcagccggagtccctgtaggcccggagtatggggccttcggggtcccggtcaagtccctgtgccactcggcaagccagagcctgcctgccatgccggtgcccatcaagcccacgcctgcgctgccgcccgtgtccgcgctgcagccggggctcactgtccccgcggcttcgcagcagcctccggcgccatccaccgtgtgctccgcggccgcggcctcgcccgttgcctctctgctggagcccacagcccctacctcggccgaaagcaagggcggctccttgcactcggtgctagtgcactcctag

SEQ ID NO: 394624 - DNA, 1000 bp, Homo Sapiens; identical to SEQ ID NO: 284581

SEQ ID NO: 394625 - DNA, 1000 bp, Homo Sapiens; identical to SEQ ID NO: 284582

SEQ ID NO: 394626 - DNA, 1000 bp, Homo Sapiens; identical to SEQ ID NO: 284583

SEQ ID NO: 394627 - DNA, 1000 bp, Homo Sapiens; identical to SEQ ID NO: 115392

SEQ ID NO: 394628 - DNA, 1000 bp, Homo Sapiens; identical to SEQ ID NO: 220823

SEQ ID NO: 394629 - DNA, 1000 bp, Homo Sapiens
tgtggaaaggcttcatcttaacggtggtggagctccgtgtcccgaccgacttgaccctgcttcctgggcacctatacatgatgtctgaagtcttggccaaagaggaggcgcgccgtgcactggagacaccctcgtgcttcctgaaggtgagccggctggaggcacaactgctcctggagcgctaccccgagtgcgggaacctgctgctgcggcccagcggggacggcgccgacggcgtgtcggtcaccacgcggcagatgcacaacgggacgcacgtggtccggcattacaaggtgaagcgggagggccccaagtacgtgatcgatgtggaacagccgttctcttgcacctccctggacgccgtggtcaactatttcgtgtcgcataccaaaaaggcgctggtgccattcctgttagacgaggactacgagaaggtgctaggctacgtggaagccgataaggagaatggcgagaatgtgtgggtggcgccctccgctccgggcccaggtcctgcaccctgcacaggtggccccaagccgctgtcacctgcgtctagccaggacaagctgcccccactgcccccactaccgaaccaggaagagaactacgtgacccccattggagatggcccagctgttgactatgagaaccaagatgtggcttcctctagttggccagtcatcctgaagccaaagaagttgccaaagcctcctgccaagcttccaaagccacccgttggacccaagccagagcccaaagtctttaatggtggcttgggcaggaagctgccagtcagttcagcccagcctctcttccccacagccgggctggcagacatgacggcagagctacagaagaagctggagaagaggcgggcactggagcactgattcggacacaccagggaccagcgggctagtcccagggcatggcccagcggccagattctttttcccaggattaaaactctgaccccaggaaaaaaaaaaaaaaaaaaaaa

SEQ ID NO: 394630 - DNA, 1000 bp, Homo Sapiens; identical to SEQ ID NO: 220825

SEQ ID NO: 394631 - DNA, 1000 bp, Homo Sapiens; identical to SEQ ID NO: 115393

SEQ ID NO: 394632 - DNA, 1000 bp, Homo Sapiens; identical to SEQ ID NO: 115394

SEQ ID NO: 394633 - DNA, 636 bp, Homo Sapiens; identical to SEQ ID NO: 284589

SEQ ID NO: 394634 - DNA, 1000 bp, Homo Sapiens; identical to SEQ ID NO: 220827

SEQ ID NO: 394635 - DNA, 1000 bp, Homo Sapiens; identical to SEQ ID NO: 220828

SEQ ID NO: 394636 - DNA, 1000 bp, Homo Sapiens; identical to SEQ ID NO: 115395

SEQ ID NO: 394637 - DNA, 986 bp, Homo Sapiens; identical to SEQ ID NO: 220830

SEQ ID NO: 394638 - DNA, 904 bp, Homo Sapiens
ctgaagctggccttgctctctctcgccatggcctctcactcaggcccctcgacgtctgtgctctttctgttctgctgcctgggaggctggctggcctcccacacgttgcccgtccgtttactacgaccaagtgatgatgtacagaaaatagtcgaggaattacagtccctctcgaagatgcttttgaaagatgtggaggaagagaagggcgtgctcgtgtcccagaattacacgctgccgtgtctcagccctgacgcccagccgccaaacaacatccacagcccagccatccgggcatatctcaagacaatcagacagctagacaacaaatctgttattgatgagatcatagagcacctcgacaaactcatatttcaagatgcaccagaaacaaacatttctgtgccaacagacacccatgaatgtaaacgcttcatcctgactatttctcaacagttttcagagtgcatggacctcgcactaaaatcattgacctctggagcccaacaggccaccacttaaggccatctcttcctttcggattggcaggaacttaaggagccttaaaaagatgaccgacagctaagtgtgggaactctgccgtgattccttaagtacatttttccaatgaataatctcagggacccctcatatgggctagtcccgggagggctgagatgtgaatttgtgaattaccttgaaaaacattaggttattgttattagtcttggtatttatggaatgcttttcttctgcaggcttaagtcttacttattataccctcgtgagggtgggaggtggcagctatgttaatttattgatatttattgtactaagagttgtcaatgctccctgggggagccctcggaatctatttaataaattatattgaatttttctcata

SEQ ID NO: 394639 - DNA, 1000 bp, Homo Sapiens; identical to SEQ ID NO: 284592

SEQ ID NO: 394640 - DNA, 1000 bp, Homo Sapiens
agcagataatttcagatgattccttataggagagtgaccagcagccatgtggtgggaggcggggagagaggatactctctcactggggccactgcggtgggcctctcagagaagatgacatttgagctggaatcggagatgagactccaaggacagatgggtctaggagggaaagtcaaacccagaggccggaaaaggcttagaggtgtccagggagcaggaaggggctggtgtggttggggcccactgagcaaaggggagggggagttgaggtcagaggggtgatatataataccttgaaggccaccggggaggactttggtctttcccttgagagctgtgagcagaaaaatgttgagttcccacttagctttttacagtttcttcgtcactctattaagtctcctctatctggtcagtgggacttctgctatgtccctaatataggagacagatcatggcccccgaagatatgcgtctctagacccccacgtcctcgcccccaggatctgtgaatacagtgccttacacagctaaaaggactttgcaactttgcaggtgtgattcagttaatgattttgagttggggagcgtctcctgggtgatccaggtgggcacaatgtccttaaaaggtcctaataagtgaaacagggatacaaaaggtcaaagtcaaaggagatgggaaagtggaagcaggctttacaatgatcaggccaagggccgggcgcgttggctcacacctgtaatcccagcactttgggaggccgaggcaggcagatcacctgaggtcaggagttcgagaccagcctgactaacatggagaaaccccgtttctactaagaacacaaaattagcctggcgtggtggcacatgtctgtaatcccagctactcgggaggctgaggcaggagaatcgcttgaacccgggaggcagaggttgtggtgagccaagatcgcgccattgcactccagcctgggcaacaaaagcaaaactcagtctc

SEQ ID NO: 394641 - DNA, 1000 bp, Homo Sapiens; identical to SEQ ID NO: 220831

SEQ ID NO: 394642 - DNA, 1000 bp, Homo Sapiens; identical to SEQ ID NO: 115396

SEQ ID NO: 394643 - DNA, 1000 bp, Homo Sapiens
caggagacgagcaccccagcatgaatcgtctgacagatgcgctctacatggtccggttcaagggcaccaaagcccagttcagctgcttcaaccccaagtgcctcctgcctgccagccggcactactggacctacccgggctctctgacgactcccccactcagtgagagtgtcacctggattgtgctccgggagcccatctgcatctctgaaaggcagatggggaagttccggagcctgctttttacctcggaggacgatgagaggatccacatggtgaacaacttccggccaccacagccactgaagggccgcgtggtaaaggcctccttccgggcctgagctgcccatctgcctagccggccactagggcaccatcttctcaagggcttccatgtcagcagacaccaaaccatctgaggcttcctccctggggggtgctggggaccctccttcagccagtttgctccttggtcaccctggaggcttctggatgggacccttgagtctggggcacccttcagctgccctggggacaggaaggacaggagctaagcagggtccaagcctggggctgcctctgctctccaagacccaaagaccctgggaacctcctctggtcttccccactggcagtggcagcagccccaccccgagcgcacactgtgatggaggagactgagctccctggggcgggcagctgacactaccagagagactcaagcaataattagaggtgggcagagctgccctctcggcattacctcttctgcaggctctgccatgcacgcacctcactgccaggccattaaaatcagcacccagcatgctggaggtgacgtggccttctccctccagccacctgctgccacgggcaggccctggctatagcttatacagtatctccccttgtccccacccagtcaccaaagccacctacatgacagtccatccctgttgaattaataaattaatgtatccatgcaacaaaaaaaaaaaaa

SEQ ID NO: 394644 - DNA, 1000 bp, Homo Sapiens; identical to SEQ ID NO: 284595

SEQ ID NO: 394645 - DNA, 1000 bp, Homo Sapiens; identical to SEQ ID NO: 284597

SEQ ID NO: 394646 - DNA, 1000 bp, Homo Sapiens; identical to SEQ ID NO: 284598

SEQ ID NO: 394647 - DNA, 1000 bp, Homo Sapiens
tgaggtggtgtcagatggagatgaggaacttgttgggaactggaacaaaggaatacaccccgactttggtggacacaggcatttgcatgacaaagttgatttcataaataattcggaaaccattgccaagtctgagactaaaggatttatggaggctcttcaggctggtgcagacatctccatgattgtcaatttgattgaaaatgtgggttcaaatgaggaggatgacagtggtaaggataagaaaaagaaaaccgagaagatcaaagagaaatacattaatcaggaagaactaaacaagatcaagaccatttggacaagaaaccatgattacatcacccaggagtatggagaattctgtaacagccacactaatgactgggaagaccacttggcagtcaagcacttctctatagaaggtcagttggaattcagggcgttgttgttcatcccttatcgggctccttttgacctctttgagaacaataagaataaagacaccatcaaactctacgtccttcatgtgttcatcgtgcacagctgtgatgagttgataccagaggatctcaactttatctgtgaagacaaagagagttacaagaaattctatgaggcattctctaaaaatctaatgtttggaatccccgaggactcccctaactgctcccagtctggagatgggatgacatctctgttagaatatgtctcttgcatgaaggagacacggaaatccacctactacatccctggtgagagcaacgaacaggtggccagctctgctttcgtggaccattatggagcagattgtgaaagcccaggcactttgggacaactctatgatgggttatgtgatggccaaagagaacctggagatcaacgtgactacactattgtggagacgctgtggcagaaggctgaggcggacaagaacgacaaggctgtcaaggaccgggtggtgctgctgttgaaaaccaagctgttcttctggcttcttccttga

SEQ ID NO: 394648 - DNA, 1000 bp, Homo Sapiens; identical to SEQ ID NO: 115398

SEQ ID NO: 394649 - DNA, 1000 bp, Homo Sapiens
aaaatcaaggtgtttgttctggatgaggctgatgtcatgatagccactcagggccaccaagatcagagcatccgcatccagaggatgctgcccaggaactgccagatgctgcttttctccgccacctttgaagactctgtgtggaagtttgcccagaaagtggtcccagacccaaacgttatcaaactgaagcgtgaggaagagaccctggacaccatcaagcagtactatgtcctgtgcagcagcagagacgagaagttccaggccttgtgtaacctctacggggccatcaccattgctcaagccatgatcttctgccatactcgcaaaacagctagttggctggcagcagagctctcaaaagaaggccaccaggtggctctgctgagtggggagatgatggtggaacagagggctgcagtgattgagcgcttccgagagggcaaagagaaggttttggtgaccaccaacgtgtgtgcccgcggcattgatgttgaacaagtgtctgtcgtcatcaactttgatcttcccgtggacaaggacgggaatcctgacaatgagacctacctgcaccggatcgggcgcacgggccgctttggcaagaggggcctggcagtgaacatggtggacagcaagcacagcatgaacatcctgaacagaatccaggagcattttaataagaagatagaaagattggacacagatgatttggacgagattgagaaaatagccaactgagaagctccaccagccactgatgccagccctggcactgcccctgcacaggagacaagtgcgttcagggcacaggccccgacatcaccccaaggacaacggcacaagtagagagaaactacctacctcacttcaaattatgtttggacttgacaaaaatgtatgcaaatgatgggggatggtagaaaaaaattatttacacaaccttggaagattaggcatgaatacacagagatttaccttttggaaaaaaaaaaaaaaaaaa

SEQ ID NO: 394650 - DNA, 657 bp, Homo Sapiens
actcctggtacctaagcaccgatctgccttggagaacctgattctgagactccagcaggatgtcttatcaacagcagcagtgcaagcagccctgccagccacctcctgtgtgccccgcgccaaagtgcccagagccatgtccacccccgaagtgccctgagccctgcccaccatcaaagtgtccacagtcctgcccacctcagcagtgccagcagaaatgtcctcctgtgacaccttccccaccctgccagccaaagtgtccacccaagagcaagtaacagcttcaggattcatcaggagcatgaaaggataaggataattggctcacctcgttccacagctccacctgcatcttctcatcaaagccatccagggatacacagggagcttctttcctcttagcctgtgatcggcctgtgatgatctctgatagcaaaaggttttctttttgaggctgccatactgccactgtcgaggtggagactgagcaaaggaagtcctgggctgtgccagctcccagagcttcagaagaaagagcagctctctccctgggaaccattagagaattctgttgatgttttctgtgtctgtctgtcccctgggcatgagcttccaccacctgtgcagttgtcactttcctttcactccctgaataaa

SEQ ID NO: 394651 - DNA, 1000 bp, Homo Sapiens; identical to SEQ ID NO: 115399

SEQ ID NO: 394652 - DNA, 1000 bp, Homo Sapiens; identical to SEQ ID NO: 118362

SEQ ID NO: 394653 - DNA, 1000 bp, Homo Sapiens; identical to SEQ ID NO: 284601

SEQ ID NO: 394654 - DNA, 1000 bp, Homo Sapiens; identical to SEQ ID NO: 220833

SEQ ID NO: 394655 - DNA, 1000 bp, Homo Sapiens
gatgcgcggaggagctagcctgaaggattctgggaatcatgtccatcccttttcctgtcagtgtttttgaaacccacagttttagttggtgctgatggagggagggggaagtcgaaggatgctctttcccttttctgtttaggaagaagtggtactagtgtggtgtgtttgcttggaaattccttgccccacagttgtgttcatgctgaatccacctcggagcatggtgttttcattcccccttcctagtgaaccacaggttttagcattgtcttgttctgtcccttccacttctaactccactggctccatgattctctgagtggtggttcctttgcaccctgtagatgttctaggatagttgatgcatgttactaaattacgtatgcaagtctgtgagtgcgtctgaggggacatcgccaaggactgactgagacacgatgccgagacctcaagccctgaggggcagtcccaaaacccttacagtgaagatgtttactcattgcccccacctctggtccacactagaaagaagctcgccccacctccacctgtgagatccgtgaattctcggaatggcaggggaagccttgcactaggttgcagagaagcatcctccacatcctgtgtcagaaaccctggtctccgtggcacttgtaactcaccgtgctgtcttctggtctgtgtgtgttcttcaagccagctctaggcttcaggccgagccaggttcacactcagaaagaggtctccccatccccattcggggctgacgatggggggctgatggctgcccctgcgtggcctgagtcctggtccctctgaggcagttgacggggcagtcagatttttaaagttttgtacaaagttttcctttgtaatcactcccatttttacttaacaaccaacttgttgtggctcttatttctgaattcaaagcttgtgaaaaaataaagaaaatgaactgcccactgacctgactagggcactttcaaaaaaaaaa

SEQ ID NO: 394656 - DNA, 975 bp, Homo Sapiens
atggaggtcttagggttctcgaatagtaagatggatgtcagagccaaacgtcaacttgaaatctggatggaaatggctccctccaagcccgaacctcaggggaaggctcagcagtcacagcccaccagtgtcctctcagctgccaacgctgctcagagagggaagtgctgctgctgccgggaggggcacagccctgaagattacggaagacagtgggcagagaatgtggaaaatcacccagaggttgctgctcacacttcatgtcttcagagcatcacccctcattttatagctggagagatggggtgcacagccaaggaaagccaggaacaggttccggcttccatcactcagatactcaggaatccctggttctcgaggctggacagtccaagatcaaggtgcctgcatctggcgtctagtgtggaccctattcctggtttgcagttcttcattgttattgtctcagatcaccaaaaagtggacagggaggaggagtggaagcaaggaaaaataaggaaagaaatacactggatcccattgtttacaatgtggtcttggctccagtgtgttgaggaccgatctatagcaggaattcccaaacttgaacatggtgactcgcaccagactgagtcactcctggatgttctggtgggagggttttggggagtcccccacacagccccacctcgcctccaagaggctggaggccccacaggtgggtgcggtgttggtggccagccccttggtggccgtggccagtgggtgggcgaggagactggtccagttggtggacctcatgcctggtgggtgccgcccacggcaccgggtacttccttggtccttttggtgctgttggcacagcctttccagagcagcgaatggatgccagtctcctcccacacccctccaggaacgcagaccaacacagctgctctattaaatgtgtgcacttcttattctgagtatgtctga

SEQ ID NO: 394657 - DNA, 1000 bp, Homo Sapiens
tgaagaacctgcacaaggtgtcgccatccctgaagggcttcctggaccgcctgctggtgcgagaccctgcccagcgggccacggcagccgagctgctgaagcacccattcctggccaaggcagggccgcctgccagcatcgtgcccctcatgcgccagaaccgcaccagatgaggcccagcgcccttcccctcaaccaaagagccccccgggtcacccccgccccactgaggccagtagggggccaggcctcccactcctcccagcccgggagatgctccgcgtggcaccaccctccttgctgggggtagatgagaccctactactgaactccagttttgatctcgtgacttttagaaaaacacagggactcgtgggagcaagcgaggctcccaggacccccaccctctgggacaggccctcccccatgttcttctgtctccaggaagggcagcggccctcccatcactggaagtctgcagtgggggtcgctgggggtggagagaacactaagaggtgaacatgtatgagtgtgtgcacgcgtgtgagtgtgcatgtgtgtgtgtgcaaaggtccagccaccccgtcctccagcctgcaaggggtgtctggcgccttgcctgacacccagccccctctccccctgagccattgtgggggtcgatcatgaatgtccgaagagtggccttttcccgtagccctgcgccccctttctgtggctggatggggagacaggtcagggccccccaccctctccagcccctgcagcaaatgactactgcacctggacagcctcctcttttctagaagtctatttatattgtcattttataacactctagcccctgcccttattgggggacagatggtccctgtcctgcggggtggccctggcagaaccactgcctgaagaaccaggttcctgcccggtcagcgcagccccagcccgcccacccctgcctcgagttagttttacaattaaaacattgtcttgttttgtg

SEQ ID NO: 394658 - DNA, 1000 bp, Homo Sapiens; identical to SEQ ID NO: 284604

SEQ ID NO: 394659 - DNA, 1000 bp, Homo Sapiens
gtaaagagaaaccaaagtgtgtggaaatttcatgcaaatccccagatgttataaatggatctcctatatctcagaagattatttataaggagaatgaacgatttcaatataaatgtaacatgggttatgaatacagtgaaagaggagatgctgtatgcactgaatctggatggcgtccgttgccttcatgtgaagaaaaatcatgtgataatccttatattccaaatggtgactactcacctttaaggattaaacacagaactggagatgaaatcacgtaccagtgtagaaatggtttttatcctgcaacccggggaaatacagcaaaatgcacaagtactggctggatacctgctccgagatgtaccttgaaaccttgtgattatccagacattaaacatggaggtctatatcatgagaatatgcgtagaccatactttccagtagctgtaggaaaatattactcctattactgtgatgaacattttgagactccgtcaggaagttactgggatcacattcattgcacacaagatggatggtcgccagcagtaccatgcctcagaaaatgttattttccttatttggaaaatggatataatcaaaatcatggaagaaagtttgtacagggtaaatctatagacgttgcctgccatcctggctacgctcttccaaaagcgcagaccacagttacatgtatggagaatggctggtctcctactcccagatgcatccgtgtcagctttaccctctgaacttctgatcgaaggtcatccctctccagcttgagtggatcaaagatgacaagggccaatggaaccaagtttgagtcttgccaggtcaatacttgggtcctgagtatggtgactagtatctgttttgttatgtgtgtattattccagccagaatgggaaatgctaattcagctcctccaggcagcccaatggggctggtggctttgagattattaaactctttctctgctgcaaaaaaaaaaaaa

SEQ ID NO: 394660 - DNA, 1000 bp, Homo Sapiens; identical to SEQ ID NO: 284607

SEQ ID NO: 394661 - DNA, 1000 bp, Homo Sapiens; identical to SEQ ID NO: 220836

SEQ ID NO: 394662 - DNA, 1000 bp, Homo Sapiens; identical to SEQ ID NO: 220836

SEQ ID NO: 394663 - DNA, 616 bp, Homo Sapiens; identical to SEQ ID NO: 115402

SEQ ID NO: 394664 - DNA, 1000 bp, Homo Sapiens; identical to SEQ ID NO: 284609

SEQ ID NO: 394665 - DNA, 1000 bp, Homo Sapiens; identical to SEQ ID NO: 220838

SEQ ID NO: 394666 - DNA, 1000 bp, Homo Sapiens; identical to SEQ ID NO: 220839

SEQ ID NO: 394667 - DNA, 1000 bp, Homo Sapiens; identical to SEQ ID NO: 220839

SEQ ID NO: 394668 - DNA, 1000 bp, Homo Sapiens; identical to SEQ ID NO: 220840

SEQ ID NO: 394669 - DNA, 1000 bp, Homo Sapiens; identical to SEQ ID NO: 284613

SEQ ID NO: 394670 - DNA, 974 bp, Homo Sapiens; identical to SEQ ID NO: 220841

SEQ ID NO: 394671 - DNA, 1000 bp, Homo Sapiens
tggacgtcaattacgagagattcgccacagttgacaggcgcagatacaggatgctcttgcttgctacagagaaatatatagtgaaaagaagaaacaagctgtacggtcaaaacttggtatcttcctgaagaacaacactatgcttgctaaaccatcaactagtgttgatgtcccaatgccttctaccacctattctcgatgttcatcagaagagagagaaattgaggaccctgttgcatccccatcatccagcaattaattctatttcagtgcttcaaacatttttcaggaccactgtgctttcagctgtgtaaattaatgatgccctccaaatccttggttatggaatatttggctcatcccagtacactcggcttggctgttggagttgcttgtggcatgtgcctgggctggagccttcgagtatgctttgggatgctccccaaaagcaagacgagcaagacacacacagatactgaaagtgaagcaagcatcttgggagacagcggggagtacaagatgattcttgtggttcgaaatgacttaaagatgggaaaagggaaagtggctgcccagtgctctcatgctgctgtttcagcctacaagcagattcaaagaagaaatcctgaaatgctcaaacaatgggaatactgtggccagcccaaggtggtggtcaaagctcctgatgaagaaaccctgattgcattattggcccatgcaaaaatgctgggactgactgtaagtttaattcaagatgctggacgtactcagattgcaccaggctctcaaactgtcctagggattgggccaggaccagcagacctaattgacaaagtcactggtcacctaaaactttactaggtggactttgatatgacaacaacccctccatcacaagtgtttgaagcctgtcagattctaacaacaaaagctgaatttcttcacccaacttaaatgttcttgagatgaaaataaaacctattcccatgttctaaaaaaa

SEQ ID NO: 394672 - DNA, 1000 bp, Homo Sapiens; identical to SEQ ID NO: 284614

SEQ ID NO: 394673 - DNA, 1000 bp, Homo Sapiens
caaacagcccagcagcccagcagcccagccatgcggcgcctcacagtcgatgactttgaaatcgggcgtcccctgggcaaggggaaatttgggaatgtgtacctggctcggctcaaggaaagccatttcattgtggccctgaaggttctcttcaagtcgcagatagagaaggaaggactggagcaccagctgcgccgggaaattgagatccaggctcatctacaacaccccaatatcctgcgcctgtataactatttccatgatgcacgccgggtgtacctgattctggaatatgctccaaggggtgagctctacaaggagctgcagaaaagcgagaaattagatgaacagcgcacagccacgataatagaggagttggcagatgccctgacctactgccatgacaagaaagtgattcacagagatattaagccagagaacctgctgctggggttcaggggtgaggtgaagattgcagattttggctggtctgtgcacaccccctccctgaggaggaagacaatgtgtgggacactggactacttgccgccagaaatgattgaggggagaacatatgatgaaaaggtggatttgtggtgcattggagtgctctgctatgagctgctggtgggatatccaccctttgagagcgcctcccacagtgagacttacagacgcatcctcaaggtagatgtgaggtttccactatcaatgcctctgggggcccgggacttgatttccaggcttctcagataccagcccttggagagactgcccctggcccagatcctgaagcacccctgggttcaggcccactcccgaagggtgctgcctccctgtgctcagatggcttcctgagccctgtctgcctctgttccctttgtgtgtgttcagggagctctcctggctctgccacctcatttgtctttatttttttctcttttaagatgtaagatgctaattaataaaagctgaatcatttcataccaaaaaaaaaaaa

SEQ ID NO: 394674 - DNA, 1000 bp, Homo Sapiens; identical to SEQ ID NO: 115405

SEQ ID NO: 394675 - DNA, 1000 bp, Homo Sapiens; identical to SEQ ID NO: 115406

SEQ ID NO: 394676 - DNA, 1000 bp, Homo Sapiens; identical to SEQ ID NO: 292808

SEQ ID NO: 394677 - DNA, 1000 bp, Homo Sapiens; identical to SEQ ID NO: 284618

SEQ ID NO: 394678 - DNA, 532 bp, Homo Sapiens; identical to SEQ ID NO: 284619

SEQ ID NO: 394679 - DNA, 1000 bp, Homo Sapiens; identical to SEQ ID NO: 284620

SEQ ID NO: 394680 - DNA, 1000 bp, Homo Sapiens; identical to SEQ ID NO: 115407

SEQ ID NO: 394681 - DNA, 1000 bp, Homo Sapiens; identical to SEQ ID NO: 284623

SEQ ID NO: 394682 - DNA, 1000 bp, Homo Sapiens
acaaggaaatctcttgctgatataagatttgatgaaattaaacttgtccagataaaagaagaagctgtttgttttgattctgagctagatgaacatattaagtggttccagcaagaatacgtgaaaacagaaaaggactggagagaaattgacaagagaatgagccaaactttggaaataagaagaaagatgattggcagccgaacacctctgaaggacattcttaaactgtttcctttcttgaagtgcccttatcagatgttcagagaattccaacttcttacaagaacagatatttataagaaaacaaggcacattttggaatcctattcagaaaatatactgacttctttttcagtggtggacaatccaatcaatattgtattgcaagaaaaaatgaaacattacacagatgaagacatgttgaaatacatgaagatgacagccacatgtttactcctcccagatgtttttggggatgatcccagcctttttgtcatcatgaatgaacaggtgcaagtgtccacacctgtgttggaagttaaaaaccctttcaacatggaggtctgcgaattttctttatatttagaaagggagaggctcacaaaggtggacgactgtgttacagccttggctgcgctagtagctggctttcatgtatttaggattgagtgtccaagaagactgtcccaaactttcaacttcctagaaacgctgattttcgatatgcacagtccttattttccttctttgaaagaaaaggaaaacgaagtaggatttcagcacccactcacttaatagcatgccaaatattgtactggaatttacctctgggaaaactgaagcttcataagaaattgttttgatttagggttgtggtagaggtaggtatgagaaaatcatcttgtatttatagatgctaatgaatttcaatgctttctatctttacacttagatattaagttctttgtgaaattctgtaataaaattctacttcatt

SEQ ID NO: 394683 - DNA, 1000 bp, Homo Sapiens; identical to SEQ ID NO: 284624

SEQ ID NO: 394684 - DNA, 1000 bp, Homo Sapiens; identical to SEQ ID NO: 220842

SEQ ID NO: 394685 - DNA, 1000 bp, Homo Sapiens; identical to SEQ ID NO: 115408

SEQ ID NO: 394686 - DNA, 1000 bp, Homo Sapiens; identical to SEQ ID NO: 115409

SEQ ID NO: 394687 - DNA, 1000 bp, Homo Sapiens; identical to SEQ ID NO: 115410

SEQ ID NO: 394688 - DNA, 1000 bp, Homo Sapiens; identical to SEQ ID NO: 115411

SEQ ID NO: 394689 - DNA, 1000 bp, Homo Sapiens; identical to SEQ ID NO: 220845

SEQ ID NO: 394690 - DNA, 1000 bp, Homo Sapiens; identical to SEQ ID NO: 116508

SEQ ID NO: 394691 - DNA, 1000 bp, Homo Sapiens; identical to SEQ ID NO: 115412

SEQ ID NO: 394692 - DNA, 1000 bp, Homo Sapiens; identical to SEQ ID NO: 115413

SEQ ID NO: 394693 - DNA, 1000 bp, Homo Sapiens; identical to SEQ ID NO: 284631

SEQ ID NO: 394694 - DNA, 1000 bp, Homo Sapiens; identical to SEQ ID NO: 220846

SEQ ID NO: 394695 - DNA, 1000 bp, Homo Sapiens; identical to SEQ ID NO: 220846

SEQ ID NO: 394696 - DNA, 1000 bp, Homo Sapiens
ttacagagacaattatgacaactgaaatgagacatgcacataatatagatacacaaggaataatttctgatccaggatcgtccttccaaatggctgtatttataaaggtttttggagctgcaccgaagcatcttattttatagtatatcaaccttttgtttttaaattgacctgccaaggtagctgaagaccttttagacagttccatctttttttttaaattttttctgcctatttaaagacaaattatgggacgtttgtagaacctgagtatttttctttttaccagttttttagtttgagctcttaggtttattggagctagcaataattggttctggcaagtttggccagactgacttcaaaaaattaatgtgtatccagggacattttaaaaacctgtacacagtgtttattgtggttaggaagcaatttcccaatgtacctataagaaatgtgcatcaagccagcctgaccaacatggtgaaaccccatctgtactaaacataaaaaaattagcctggcatggtggtgtacgcctgtaatcccagtgacttgggaggctgaggcaggagaatcgcttgaacccgggaggcggaggttgcagtgagctaagatcgcgccactgtactccagcctgggcaacagcgagactccatctcaaaaaaaaaggaaatgtgtatcaagaacatgattatccagcggtattttctaattcagatcatcaaactgattatatagaagagttggctttaaaatgtttgcaaatgtctttttttttttaatactggaagaaaaaatattctgttgtgtctcatacagtgcttaggatgtctttcacagagcttattaaaaagatgaaacctgagaacaaactgctttattcttactcagcccattttgcaaattaaaagtgggggcagaggtgggcggatcacctgaggtcaggagttcgagaccagcctggccaacagggcaaaaccccatctctactaaaaat

SEQ ID NO: 394697 - DNA, 1000 bp, Homo Sapiens; identical to SEQ ID NO: 118772

SEQ ID NO: 394698 - DNA, 1000 bp, Homo Sapiens; identical to SEQ ID NO: 284632

SEQ ID NO: 394699 - DNA, 1000 bp, Homo Sapiens
tctttctcaatacctgccctgtctcaaatctcacttgacaaatggtctacgatcttgcagttatccaaaagagcctatgaaaaatggacagctgcttttgacaataatgcccctcccaacttcccattcatagaatcataaagcgatatgtttcagaactgagagagaaaagtttaccttttattccaaatgcctcgtactcggtttaagtccagactcaggtcataaatcaaagacagttttgcacgttgctcttcacctaaatctagcagtttccctgaggccctatgagggcatggacagaaaatgaaggatgcaaccacccaggacagctccctggtttgggctggcctggccacgtgtggtcacatgtcctgggatctgtgtttactgtgtccttgctctccttccttgcagaagctgctaagctctgctcctcctaactgcaggtctcaaaccctattgggtcattttgccacactatttctccaaaggcccatagtcattacattttttaccatttcaccaagataacagggggggtctggaattcccctgctaggaagggccccttttcctatatcaccgtgatggtacagatgaactgagatgaaacttttagacttcagcacgtcacacatcctggttgtataaccaggaggtctgcagagctgcaacccctgaagaacatctgtcttaaaagacctcaaatcagaacattctcattggcctcttcagtgatccccatggagctaagagtccgtaacctaaaggccttaccatagccatcttccctccacacctgattgctcaactgccccagaaggggagaatctatctgaaatagaaaagaagcattaaggaccaggtgcggtggctcacacctataatcccagcactttgggaggccaaggcaggtggatcacttaagatcaggagttcaagaccagcctggccaacgtggtgaaaccccatctctactaaaaaaaaaaaaaaaaaa

SEQ ID NO: 394700 - DNA, 1000 bp, Homo Sapiens; identical to SEQ ID NO: 220848

SEQ ID NO: 394701 - DNA, 1000 bp, Homo Sapiens
tgagaagctccagagcctgcacgagggccggacgccgcctcccaccaagacaccaccgccgcggcccccgctgcccacacagcagtttggcgtcagtctgcaatacctcaaagacaaaaatcaaggcgaactcatcccccctgtgctgaggttcacagtgacgtacctgagagagaaaggcctgcgcaccgagggcctgttccggagatccgccagcgtgcagaccgtccgcgagatccagaggctctacaaccaagggaagcccgtgaactttgacgactacggggacattcacatccctgccgtgatcctgaagaccttcctgcgagagctgccccagccgcttctgaccttccaggcctacgagcagattctcgggatcacctgtgtggagagcagcctgcgtgtcactggctgccgccagatcttacggagcctcccagagcacaactacgtcgtcctccgctacctcatgggcttcctgcatgcggtgtcccgggagagcatcttcaacaaaatgaacagctctaacctggcctgtgtcttcgggctgaatttgatctggccatcccagggggtctcctccctgagtgcccttgtgcccctgaacatgttcactgaactgctgatcgagtactatgaaaagatcttcagcaccccggaggcacctggggagcacggcctggcaccatgggaacaggggagcagggcagcccctttgcaggaggctgtgccacggacacaagccacgggcctcaccaagcctaccctacctccgagtcccctgatggcagccagaagacgtctctagtgttgcgaacactctgtatatttcgagctacctcccacacctgtctgtgcacttgtatgttttgtaaacttggcatctgtaaaaataaccagccattagatgaattcagaaccttctaatgaaaactccatgcctctggtccttggactcttgtccatggttcctgagctgtggaccgggatagaataa

SEQ ID NO: 394702 - DNA, 1000 bp, Homo Sapiens; identical to SEQ ID NO: 115416

SEQ ID NO: 394703 - DNA, 1000 bp, Homo Sapiens; identical to SEQ ID NO: 115417

SEQ ID NO: 394704 - DNA, 882 bp, Homo Sapiens; identical to SEQ ID NO: 115419

SEQ ID NO: 394705 - DNA, 1000 bp, Homo Sapiens; identical to SEQ ID NO: 220849

SEQ ID NO: 394706 - DNA, 1000 bp, Homo Sapiens; identical to SEQ ID NO: 220850

SEQ ID NO: 394707 - DNA, 1000 bp, Homo Sapiens; identical to SEQ ID NO: 115420

SEQ ID NO: 394708 - DNA, 1000 bp, Homo Sapiens; identical to SEQ ID NO: 220851

SEQ ID NO: 394709 - DNA, 1000 bp, Homo Sapiens
tgaatcctgccaatatttaccaattcgcagtgggtggacatgatcggtttttaaggatttatgaccagaggagaattgatgagaaagaaaacaatggagtactcaagaaattcactcttcatcatctggttaattgtgattttccaacaaacatcacctgcattgtgtacagccacgatggcacagagctcctggccagctatgcacacacacatacacacagagccttagaaaaggaaaacaagaagtagtgtgtagatgaattcctaaccagataattcatctcctcagagcaaataacttgggattatccacattttctgaatcaatatgttaataatattgattaatttgagcacactgaagctggtaagaactaaattaaatttaatcacatgacattgtttactctatgcattaaatgttcttgaagttttatggttgggaactcccacaggattacattccaggaagtcctcctggcgcaagcatctcctataagataccagataggaatataaaaatctctcatatttgaaaacatttattttaattaacttttaagaataagttgcaataaaaattgtttatacttacacataaccatttgatacagttggtagaaaaatcctatttaacatccatgcattgcttaaaatttagctgttttatgagtttgttttgaaaattgttgcaataaaaattgtttatacttacaagtgatgtagttggtagaaaaatcctatttgacatccatgcattgcttaaaatttagctgttttatgagtttgttttaaaaattgttgcagtaaaaattgtttatacttacaagtgatgtagttggtagaaaaatcctatttgacatccatggattgcttaaagttctctcagctgtcctcgagtttaaattgttttaaaaattgtcttaagctttacttaatataaatttaagttactagatgttaaattactgttcaataaaaatattcatttttatttt

SEQ ID NO: 394710 - DNA, 1000 bp, Homo Sapiens; identical to SEQ ID NO: 284642

SEQ ID NO: 394711 - DNA, 1000 bp, Homo Sapiens
tgcaaggcgcggatccggcgcgagaacatcgtggtgtacgatgtgtgcgccaccatcgaccagtgccccacgcgcatcgaggagacctcgcccatcgtcctgcgctacaagaccccctacttcaaagcctccgcccgcgtggtcatgccccccatcccccgccacgagacctgggtggtgggctggattcaggcgtgcaatcagatggagttcttcaacacctacagcgacctgggcatgtcaagctgggaactgcctgacttgagggaagggagagtaaaagccatcagtgactcagatggggtgagctacccttggtacgggaacaccacagaaactgtgaccctggttggccccaccaacaagatctccaggttctccgtcagcatgaatgacaacttctaccccagtgtgacatgggcagtgcctgtgagtgacagcaatgtgccactgctcacaagaatcaagagagaccaaagtttcacgacctggctggtggccatgaacaccaccacaaaggagaagatcattctgcagaccatcaagtggaggatgagggtggacattgaagtggaccctcttcagctcttggggcagcgggcccggctggtgggcaggactcagcaggagcagccccggatcctgagccggatggaacccatcccccctaatgcactagtgaaacccaatgccaatgatgcccaggtcctcatgtggaggcccaagcgggggccacctctggttgtgatccctcctaagtagaagcagactggcctgactgtgtgtggatcacacgcctctgagacatgcagtgagggtgccaggggtggcaggagccaaacagagtttctgagccaaagcagacctctcggtttgccagcctttgcagccacttttgaagagtagggctgctccttgggtggtagaaccataatccttaggaaaaatcccttcctcttaggaataaagaaatcactgatttgaaaaaaaaaaaaaaaaa

SEQ ID NO: 394712 - DNA, 1000 bp, Homo Sapiens
actcaacaatgggttacatggcagcaaagaaacacctggagataaaccctgaccattccattattgagaccttaaggcaaaaggcagaggctgataagaacgacaagtctgtgaaggatctggtcatcttgctttatgaaactgcgctcctgtcttctggcttcagtctggaagatccccagacacatgctaacaggatctacaggatgatcaaacttggtctgggtattgatgaagatgaccctactgctgatgataccagtgctgctgtaactgaagaaatgccaccccttgaaggagatgacgacacatcacgcatggaagaagtagactaatctctggctgagggatgacttacctgttcagtactctacaattcctctgataatatattttcaaggatgtttttctttatttttgttaatattaaaaagtctgtatggcatgacaactactttaaggggaagataagatttctgtctactaagtgatgctgtgataccttaggcactaaagcagagctagtaatgctttttgagtttcatgttggtttattttcacagattggggtaacgtgcactgtaagacgtatgtaacatgatgttaactttgtgtggtctaaagtgtttagctgtcaagccggatgcctaagtagaccaaatcttgttattgaagtgttctgagctgtatcttgatgtttagaaaagtattcgttacatcttgtaggatctactttttgaacttttcattccctgtagttgacaattctgcatgtactagtcctctagaaataggttaaactgaagcaacttgatggaaggatctctccacagggcttgttttccaaagaaaagtattgtttggaggagcaaagttaaaagcctacctaagcatatcgtaaagctgttcaaaaataactcagacccagtcttgtggatggaaatgtagtgctcgagtcacattctgcttaaagttgtaacaaatacagatgagttaaaag

SEQ ID NO: 394713 - DNA, 1000 bp, Homo Sapiens; identical to SEQ ID NO: 220852

SEQ ID NO: 394714 - DNA, 1000 bp, Homo Sapiens; identical to SEQ ID NO: 115422

SEQ ID NO: 394715 - DNA, 1000 bp, Homo Sapiens; identical to SEQ ID NO: 284648

SEQ ID NO: 394716 - DNA, 1000 bp, Homo Sapiens; identical to SEQ ID NO: 115423

SEQ ID NO: 394717 - DNA, 1000 bp, Homo Sapiens; identical to SEQ ID NO: 220853

SEQ ID NO: 394718 - DNA, 1000 bp, Homo Sapiens; identical to SEQ ID NO: 284651

SEQ ID NO: 394719 - DNA, 1000 bp, Homo Sapiens; identical to SEQ ID NO: 115424

SEQ ID NO: 394720 - DNA, 1000 bp, Homo Sapiens; identical to SEQ ID NO: 288634

SEQ ID NO: 394721 - DNA, 1000 bp, Homo Sapiens; identical to SEQ ID NO: 284654

SEQ ID NO: 394722 - DNA, 1000 bp, Homo Sapiens; identical to SEQ ID NO: 115426

SEQ ID NO: 394723 - DNA, 1000 bp, Homo Sapiens; identical to SEQ ID NO: 284656

SEQ ID NO: 394724 - DNA, 1000 bp, Homo Sapiens; identical to SEQ ID NO: 115428

SEQ ID NO: 394725 - DNA, 1000 bp, Homo Sapiens; identical to SEQ ID NO: 115429

SEQ ID NO: 394726 - DNA, 1000 bp, Homo Sapiens
gtgctgctgctcgacctgcccagggacctgggcggaatggggtgttcgtctccaccctgcgagtgccatcaggaggaggacttcagagtcacctgcaaggatattcaacgcatccccagcttaccgcccagtacgcagactctgaagcttattgagactcacctgagaactattccaagtcatgcattttctaatctgcccaatatttccagaatctacgtatctatagatgtgactctgcagcagctggaatcacactccttctacaatttgagtaaagtgactcacatagaaattcggaataccaggaacttaacttacatagaccctgatgccctcaaagagctccccctcctaaagttccttggcattttcaacactggacttaaaatgttccctgacctgaccaaagtttattccactgatatattctttatacttgaaattacagacaacccttacatgacgtcaatccctgtgaatgcttttcagggactatgcaatgaaaccttgacactgaagctgtacaacaatggctttacttcagtccaaggatatgctttcaatgggacaaagctggatgctgtttacctaaacaagaataaatacctgacagttattgacaaagatgcatttggaggagtatacagtggaccaagcttgctgctacctcttggaagaaagtccttgtcctttgagactcagaaggccccacgctccagtatgccatcatgatgcctgctaaggcagccaccttggtgtacatgctcacagaggctctgttcatggagcagctgctgtttgaaaaattttgaaatgcaagatccacaactagatggaaggcactctagtctttgcagaaaaaaatgtacctgaatgtacattgcacaatgcctggcacaaagaaggaagaatataaatgatagttcgactcgtctgtggaagaacttacaatcatggggaaagatggaataaaaacattttttaaacagcatgaaaa

SEQ ID NO: 394727 - DNA, 1000 bp, Homo Sapiens; identical to SEQ ID NO: 284659

SEQ ID NO: 394728 - DNA, 1000 bp, Homo Sapiens
gatggtgtgtattgtctcccaataggacactggattgaggccactgggcacaccaatgaaatgaagcacacaacagacttctattttaatattgcaggccaccaagccatgcattattcaagaattctaccaaatatctggctgggtagctgccctcgtcaggtggaacatgtaaccatcaaactgaagcatgaattggggattacagctgtaatgaatttccagactgaatgggatattgtacagaattcctcaggctgtaaccgctacccagagcccatgactccagacactatgattaaactatatagggaagaaggcttggcctacatctggatgccaacaccagatatgagcaccgaaggccgagtacagatgctgccccaggcggtgtgcctgctgcatgcgctgctggagaagggacacatcgtgtacgtgcactgcaacgctggggtgggccgctccaccgcggctgtctgcggctggctccagtatgtgatgggctggaatctgaggaaggtgcagtatttcctcatggccaagaggccggctgtctacattgacgaagaggcagctagccaggacacatttccactataattttacaaagttaaatttataagctagcattaagtaaagtgaagtccagctcccttgctaaaaataactagaggtaataattggtattcaggtaactcatttacagtcataatgtgttgtgaaaatttaatcttaaaaattaaatttttaaactatgtgggtctgtgaatttctttaatgtctaagaaatccagcttcataatttccatgatacaaagatcttttttcaggtggatttttacctttgttccttttgctctgatagacaaaatcagtttaggactattaaagaatgttttggaataaactgtctttttcctcaatgaatgggatgtctaatgtatttcaaaatcacccaaaacttttggcaaataaaagcatttaaaaagacaaaaaaaaa

SEQ ID NO: 394729 - DNA, 1000 bp, Homo Sapiens
tcatataaaagtgagggtggcggggtcatggaccagcgcctcagtgcattagtcattcgcttttccttacagacaaatcagataactcttccccagtgattgtcaaatgtatgaatgtatctctgtaaatgtggttttgacatgtcactgttactgaaggagagtatggaatccccacaggatattatatcttgcaaggaaagtctattttttaaagaatagtatgtttttagctttacttttctttcttttccttttcactcaaatgctcacttgctgggcaaaagggtgagtagcaagaaaagtaatgatatgtagcttttctcaaatggttcttttatactgtggatgatacaggactctgttacctaagatgtgataagctgggctgcaggcggttcagcatccagcaactaggagctgcttttctacgtacaaagctgccttcaggaaggctccttaccctgtagcagatgattttcatctggctgcctaccgcatgctgtactataatgatttagttgtgatatggatttctctctgcatcgaaaactgtcttttgatgatcagacaatgtttatatttagttatttattctatccatgtaaggcatttttgagttttcttgtcactgtttgcatgtatttaatcagaatgtaatataatttatgttgtcaggtttttttttgtttgtttgtttggggttttttttgtagaaatttaggtagttagagcttttaagtctaatgtcatattaacttaagttaaatttccagaacgtagatatctgtcttctgtaaaaggaaaataacgatgttaagggacagtgaattttttttgaatactttgtttctcattgatttttattgtaagtgtaaaccaagagatgcatttctctggagaagtgtttatctcctggattaataaaatcatgctaaaatatgcgagtaatatgtattgcttttgtaataagaacataaaataaaattatttttaatta

SEQ ID NO: 394730 - DNA, 1000 bp, Homo Sapiens; identical to SEQ ID NO: 115430

SEQ ID NO: 394731 - DNA, 1000 bp, Homo Sapiens
accacagattaatgatcactctccaaaatatacctgttcctgtcccagtgggtacaatgtagaggaaaatggccgagactgtcaaaggatcaatgtgaccacagcagtatcagaggtcagtgttcccccaaaagggacttctgccgcatgggccattcttcctctcttgctcttagtgatggcagcagtaggtggctacttgatgtggcggaattggcaacacaagaacatgaaaagcatgaactttgacaatcctgtgtacttgaaaaccactgaagaggacctctccatagacattggtagacacagtgcttctgttggacacacgtacccagcaatatcagttgtaagcacagatgatgatctagcttgacttctgtgacaaatgttgacctttgaggtctaaacaaataatacccccgtcggaatggtaaccgagccagcagctgaagtctctttttcttcctctcggctggaagaacatcaagatacctttgcgtggatcaagcttgtgtacttgaccgtttttatattacttttgtaaatattcttgtccacattctacttcagctttggatgtggttaccgagtatctgtaacccttgaatttctagacagtattgccacctctggccaaatatgcactttccctagaaagccatattccagcagtgaaacttgtgctatagtgtataccacctgtacatacattgtataggccatctgtaaatatcccagagaacaatcactattcttaagcactttgaaaatatttctatgtaaattattgtaaactttttcaatggttgggacaatggcaataggacaaaacgggttactaagatgaaattgccaaaaaaatttataaactaattttgtacgtatgaatgatatctttgacctcaatggaggtttgcaaagactgagtgttcaaactactgtacattttttttcaagtgctaaaaaattaaaccaagcagcttaaccatgaaaaaaaaaa

SEQ ID NO: 394732 - DNA, 1000 bp, Homo Sapiens; identical to SEQ ID NO: 220858

SEQ ID NO: 394733 - DNA, 1000 bp, Homo Sapiens; identical to SEQ ID NO: 284663

SEQ ID NO: 394734 - DNA, 1000 bp, Homo Sapiens; identical to SEQ ID NO: 284666

SEQ ID NO: 394735 - DNA, 1000 bp, Homo Sapiens; identical to SEQ ID NO: 220859

SEQ ID NO: 394736 - DNA, 1000 bp, Homo Sapiens; identical to SEQ ID NO: 115432

SEQ ID NO: 394737 - DNA, 1000 bp, Homo Sapiens; identical to SEQ ID NO: 284668

SEQ ID NO: 394738 - DNA, 1000 bp, Homo Sapiens; identical to SEQ ID NO: 115415

SEQ ID NO: 394739 - DNA, 1000 bp, Homo Sapiens; identical to SEQ ID NO: 284670

SEQ ID NO: 394740 - DNA, 1000 bp, Homo Sapiens
tgcagttcattctgtcaacttgctgttgaaaagcataggtgctactctgactgatgtggatgaccttatattcaaacttgcttattatgaaattcgatatcagttctacaagagagatcagcttatatggagtgttgttaggcattacagtgaacagttcttgaaacagatgtatgtccttgtattggggttagatgtacttggaaacccatttggattaattagaggtctgtctgaaggagttgaagctttattctatgaacccttccagggtgctgttcaaggccctgaagaatttgcagaggggttagtgattggagtgagaagcctctttggacacacagtaggtggtgcagcaggagttgtatctcgaatcaccggttctgttgggaaaggtttggcagcaattacaatggacaaggaatatcagcaaaaaagaagagaagagttgagtcgacagcccagagattttggagacagcctggccagaggaggaaagggctttctgcgaggagttgttggtggagtgactggaataataacaaaacctgtggaaggtgccaaaaaggaaggagctgctggattctttaaaggaattggaaaagggcttgtgggtgctgtggcccgtccaactggtggaatcgtagatatggccagtagtaccttccaaggcattcagagggcagcagaatcaactgaggaagtatctagcctccgtccccctcgcctgatccatgaagatggcatcattcgtccttatgacagacaggaatctgagggctctgacttacttgagcaagaactggaaatacaggaataaatgtttcctaaactactacttgatttcatccttaaaaatcaaaacaaactgtggtgttaattgactgtgtgtgaattccattgtcaattttaatgaaattttctttaaaactctcacctccatctgaacttttcatagtagtgggattgactacaaataaaaacttgtggtattcctggt

SEQ ID NO: 394741 - DNA, 1000 bp, Homo Sapiens; identical to SEQ ID NO: 118030

SEQ ID NO: 394742 - DNA, 1000 bp, Homo Sapiens
agtgggctgtgatcttctacccagccaaacaggcaggactcgtgaaattgtgatgccttctaggaactacaccccatacacaagagtcctggagttaaccatgaagaaaactctgacttaggcactcagaggcatacactttttacagatggacaaaagctctggaaccctgtggcttcaaatcctttgggaagggtgactgttgtttcccctacacacagtgtaagccggaatgggaatcgctgaggctctgatccacttctaagacaggaaggaaagtgaaggcagagtgagcaggtaagagagggatatacaaggtcacatttcagacacccactcggcataccctgccgtactgcatcatcatttgttttctttgtagacactgaaatcctatcaggaggattccttcacaatgtattttatttgctagactttggttgggagggaaaaggacattaatttgaagtttcatgttattcatgccaggattgtttgatagagcatgaaggttttgtttacccataaaagtattagaggcagcgtttctctgatacagagaggcctgtccacaagaagcatgggcacccagccaaacttgaacctggaagggagggttcccggcctgcaggtgctctttcctcttggtcccaagcatctgtgcagggtcgtgggagccacactgagagacttgtgtgggccagacaagcttcattctgatgcgctagtcccttggtttaatttgtgccttatgctttcattggaccagctgaaatcactgtatttattcaactagtgatttttttttctttctcactttaacttaaagagaattttatatgtcttggaaatttaataatttagtgttctcagtatcaattggtgtttttgttaaacgaatgaatcatctgttcatgcatgctctactttgatattataacctatgtcacatgtgtttaataaataccatatattttgttctactaaaaaaaaaaaaaaa

SEQ ID NO: 394743 - DNA, 1000 bp, Homo Sapiens; identical to SEQ ID NO: 220862

SEQ ID NO: 394744 - DNA, 1000 bp, Homo Sapiens; identical to SEQ ID NO: 220863

SEQ ID NO: 394745 - DNA, 530 bp, Homo Sapiens
gcaacgtccgacagaacgaggggacgtaacggaggcaggttggagccgctgccgtcgccatgacccgcggtaaccagcgtgagctcgcccgccagaagaatatgaaaaagcagagcgactcggttaagggaaagcgccgagatgacgggctttctgctgccgcccgcaagcagagggactcggagatcatgcagcagaagcagaaaaaggcaaacgagaagaaggaggaacccaagtagctttgtggcttcgtgtccaaccctcttgcccttcgcctgtgtgcctggagccagtcccaccacgctcgcgtttcctcctgtagtgctcacaggtcccagcaccgatggcattccctttgccctgagtctgcagcgggtcccttttgtgcttccttcccctcaggtagcctctctccccctgggccactcccgggggtgagggggttaccccttcccagtgttttttattcctgtggggctcaccccaaagtattaaaagtagctttgtaattcaaaaaaaaaaaaaaaaaa

SEQ ID NO: 394746 - DNA, 1000 bp, Homo Sapiens; identical to SEQ ID NO: 284673

SEQ ID NO: 394747 - DNA, 1000 bp, Homo Sapiens; identical to SEQ ID NO: 220864

SEQ ID NO: 394748 - DNA, 1000 bp, Homo Sapiens; identical to SEQ ID NO: 284674

SEQ ID NO: 394749 - DNA, 1000 bp, Homo Sapiens; identical to SEQ ID NO: 284675

SEQ ID NO: 394750 - DNA, 1000 bp, Homo Sapiens; identical to SEQ ID NO: 284676

SEQ ID NO: 394751 - DNA, 1000 bp, Homo Sapiens; identical to SEQ ID NO: 115438

SEQ ID NO: 394752 - DNA, 1000 bp, Homo Sapiens
aacacccactgcctagaggccatcttaaaggaagcaggggctggatgcctttcatcccaactattctctgtggtatcaaaaagaaaaaaaaaaaaaaagaaggagtcggggccgggcgtggtggctcacgcctgtaatcccagcactttgggagaccaagtcaggcaatcatctgaagtcaggagttcaagaccagcctggccaacatggtgaaagcatgtctctattaaaaatacaaaaattagccgggcgtggtggcgggcgcctgtaatcccaggtatttggggggactgagacaggagaatcccttcaacccgggaggtggaggttgcagtaagtcaagatggcaccactgtgctccagcctgggggacagagcgagactccatctcaaaaaaaaaaaggaatcggacgaagaaccacaggatgttgaagacaactgtctgaagtatttgtgagggacagcgatgtggccctctgtgttaagaataacgtgtcctgctttggcagagagaagaaaatagccactgcccgctttcaaggcaagatcgaccttttctgttttgttttgtttttctttctttttcctggccatgaggacaaaaattactgagtggcccttaaagagggaagtttgttttcagctgttctcttttgcccgtaggtgggagggtggggattgctgcgtcctagctagaggaatggctttgcttgaatgtgtagtgcacacgcacgggtgtttctgtgtgctagttgcttcttgctgctgcttcctgcttgtctgggactcacatacataacgtgatatatatatatatatatataaatgtataaatatatattttatttttttttaaatccctggagcttctggttcctatcagttcctgttgttaatcgtagaaccgttgtcccttcccccattcccgtatccatcatgttctttttcttttaaatatcaatataaaggtaaaagaaaaaaaaaaaaaaaaaaaaaaaaa

SEQ ID NO: 394753 - DNA, 511 bp, Homo Sapiens; identical to SEQ ID NO: 115439

SEQ ID NO: 394754 - DNA, 872 bp, Homo Sapiens; identical to SEQ ID NO: 284680

SEQ ID NO: 394755 - DNA, 539 bp, Homo Sapiens; identical to SEQ ID NO: 284681

SEQ ID NO: 394756 - DNA, 1000 bp, Homo Sapiens
ctttgttagaaagtcccacctagttcagcaccagaaaatccacactgatgcattttcaaaaaggtctgacctcattcaacacaagaggattgacattaggccaaggccttatacatgcagtgaatgtgggaaggccttccttacacaggctcatctggttggtcaccagaaaatccatactggagaacggccttatgaatgcactcaatgtgcgaaggcctttgttagaaagtcccacctagttcagcatgagaaaatccacactgatgcattttcaaaaaggtctgacctcattcaacacaagaggattgacctcaggccaaggccttatgtgtgtagtgaatgtgggaaggccttccttacacaggctcatctagatggtcaccagaaaatccagactggagaacggcgttatgaatgcaatgaatgtgggaaattctttttggacagctacaaacttgttattcatcagagaattcacactggagaaaagccttataaatgcagcaaatgtgggaaattctttagatatcgctgtacactgagtagacatcagaaagttcacactggagaaagaccttatgagtgtagtgaatgtgggaaattttttagagatagctacaaactcattattcatcagagagttcatactggagaaaagccttatgaatgcagcaactgtgggaagtttcttagataccgctctacattcattaaacatcataaagtttgcactggggagaagcctcatgagtgcagtaaatgtagggaattgtttaggactaaatcgagccttattatacatcagcagtctcacactggagaaagtccttttaagttaagggaatgtgggaaagacttcaacaaatgtaatactggtcagcgccaaaaaactcacactggagaaaggtcttatgagtgtggtgaatccagcaaagtgtttaaatacaactccagcctcattaaacatcagataattcatactggaaaaaggccttag

SEQ ID NO: 394757 - DNA, 1000 bp, Homo Sapiens; identical to SEQ ID NO: 284682

SEQ ID NO: 394758 - DNA, 1000 bp, Homo Sapiens
taattgaactgaatagcttctgcacagcaaaagaaactatcaactgagtaaacagacaacttacagaatgggagataatttttgcaaactatatgtgtgacaaggctctaatatccagcagctatagggaacttaaacaaatttacaagagaaaagcagcccctaaaaatgtgggcaaaggacatgaacagatacttttcaaaatagacatacatgtggccaaaaatcatatgaaagggagctcaatatcactgatcattggagaaatgtaaattaaaactgcaatgagacatcatctcacaccagtcagaatggctattattaaagagttaagaaataataggtgctggcaagttgttgagaaagaggaatgcttattcatcattggtgggagtgtaaattagtttagtcattgtggaagacagtgtggcaattcctcagagacctaaagacagaaataccatttgacccggcagtcttattactgggtatatacctaagggaatacaatcattctattatagagacacatgccacatgtatgttccttgcagcactgtacacagtggcaaggttatggagtcgacctagatgtccatcaatgacggactggatagggaaaatgtggtacatatacaccatggaatactatgcagccattaagaacaagattatgtcctgtgccaagatatggatggagctgggggacattaatcttagaaaactgacgcagaaaaggaaaaccaaatactgcatgttctcataagtgggagctaaatcatgagaacacatggacacatagaggggagtaacacacactaggtccttttggagggtggaagttaggagcagggagagggtcgggaaaaataactaatgggtactggcttaatacctcagtgattaaataatctgtacaacaaaaccccgtgacacgagttaacctatgtaacaaacctgcatttgtacccctaaacttaaaataaaagttaaaaaaggt

SEQ ID NO: 394759 - DNA, 1000 bp, Homo Sapiens; identical to SEQ ID NO: 284684

SEQ ID NO: 394760 - DNA, 1000 bp, Homo Sapiens; identical to SEQ ID NO: 220865

SEQ ID NO: 394761 - DNA, 1000 bp, Homo Sapiens; identical to SEQ ID NO: 115442

SEQ ID NO: 394762 - DNA, 1000 bp, Homo Sapiens
atgagctgtgtccaacgttttaaccaaagcgtatcgtaccaacgatctgtgaaaatgcactggaagcttctggtcccggtttcctttgtggtctatgtgggtcttgtcctcattgtaactccgtatagatggtataggtattttaatcctggaagctgttgccttattaatgattatcttaaaatttcctccattggggcagcgtgggccaaattaaaacaaacaaaaccgcaactcctccacagaaacacaaacacagttattccatgaagtttagtatttggttgacatagtgctcttcaaattcatcccattaccctaaaagtaataactttgatgcttgctttaactttagtcccatctctgccactttgatgctatttgggttatgatggggcaagatggcagaggtattgggtttttttgtttttttccattcctctctacttctgtttcctagctttttctttctggagtttaagtacagtgatggttggcttgagtacctttttaaatctagcccagtataaacattagcctgcttaatatttagacatttataggtagaattctgagcactcaactcatgtttggcattttaaagtaaaaacaagtgtgacttcgaggaccaaagaaattgtcagctatacatttatctttatgaactcatttatattcctttttaatgactcgttgttctaacatttcctagaagtgttcttataaaggtctaatgtatccacaggctgttgtcttattagtaaatgcaaagtaatgactttgtctgttttactctagtctttagtacttcaaaattaccttttcatatccatgatcttgagtccatttgggggatttttaagaatttgatgtatttcaatacactgttcaaaattaaattgtttaattttatgtatgagtatgtatgttcctgaagttggtcctatttaaattattaaactattgtaactttgttcttgtgaaaaaaaaaaaaaaaaaa

SEQ ID NO: 394763 - DNA, 767 bp, Homo Sapiens; identical to SEQ ID NO: 115443

SEQ ID NO: 394764 - DNA, 1000 bp, Homo Sapiens; identical to SEQ ID NO: 284679

SEQ ID NO: 394765 - DNA, 680 bp, Homo Sapiens
aaaaactcctggtacttgagcactgatctgctttggagaacctgattctgagactccagcaggatgtcttatcaacagcagcagtgcaagcagccctgccagccacctcctgtgtgccccacgccaaagtgcccagagccatgtccacccccgaagtgccctgagccctgcccaccaccaaagtgtccacagccctccccacctcagcagtgccagcaaaaatgtcctcctgtgacaccttccccaccctgccagccaaagtgtccacccaagagcaagtaacagcttcagaattcatcaggagcatgaaaggataaggataattggctcaccttgttccacagcttcacctgcatcttctcatcaaagcctaccatggatacacagttagcttctttcctcttagccagtgatctgcccatgatgatccctgatagcaaaaggtttcctttctgaggctgccatattgccactgtccaggtggatactgagaaaggaagtcctcagcagtgtcagttcccagagctttggaagaaggaccagcagctctgtccctgggaaccatcaaaaaatgctgttgatgttttctgtgtctgtctgtcacctgggcatgggcttctaacacctgtgcaattgtcacttttctttcacttccctgaataaatatctttgcatacgta

SEQ ID NO: 394766 - DNA, 1000 bp, Homo Sapiens
accccctccaccgccccctccagtgcttctgccttctgaagaggaggctcctgctccaatgggggcctcactcattgcagacttagagcagctgcacctgtccccgcccccgcccccaccacaggccccagcggagggaccttcagtccagcccggtcccctcaggcccatggaggaagagctgccacctcccccggcagaacctgttgagaaaggggcatccacagacatctgtgccttctgccacaagaccgtgtccccccgagagctggctgtggaggccatgaagaggcagtaccatgcccagtgcttcacgtgccgcacctgccgccgccagctggctgggcagagcttctaccagaaggatgggcgacccctctgcgaaccctgctaccaggacacactggagaggtgcggcaagtgtggcgaggtggtccgggaccacatcatcagggccctgggccaggccttccacccctcctgcttcacgtgtgtgacctgcgcccggtgcattggggatgagagctttgccctgggcagccagaacgaggtgtactgcctggacgacttctacaggtacgagaagggtttgtgcactgggtggggtgcagggacagggcgagacccaagcagggtgaaggagctgagcttgagtcctgggtgctgggccagagtttcctgtctactggtttattataaagaatattacagggctgggctgggcgcggtggctcacgcctgtaatcccagcactttgggaggccgaggcgggtggatcacgaggtcaggagatcgagatcatcctggctaacatggtgaaaccccgtctctactaaaaatacaaaaaaaattagccaggcatggtggcgggcgcctgtagtcccagctactcgggaggctgaggcaggagaatggcgtgaacctgggaggcagagcttgcagtgagccgagatcacgccactgcactccagcctgggcaacagagtgtgagactccgtct

SEQ ID NO: 394767 - DNA, 1000 bp, Homo Sapiens; identical to SEQ ID NO: 284689

SEQ ID NO: 394768 - DNA, 1000 bp, Homo Sapiens; identical to SEQ ID NO: 284690

SEQ ID NO: 394769 - DNA, 1000 bp, Homo Sapiens; identical to SEQ ID NO: 220866

SEQ ID NO: 394770 - DNA, 1000 bp, Homo Sapiens; identical to SEQ ID NO: 284692

SEQ ID NO: 394771 - DNA, 1000 bp, Homo Sapiens; identical to SEQ ID NO: 115444

SEQ ID NO: 394772 - DNA, 1000 bp, Homo Sapiens
aactcaggtgcccttataaagagacccactgcttgccttgagtccagaaagcactgcttctgcagtgaaaaacacacacttactatgtcagttttggccataaaatgccagccaaatccactgctggcctgaactgcccctggacactggactttctgcacagtgactggcagcagagcaagtgcagccagggtttgtggccaaagggaagaaagcatagtaaattcaacctctgttcctcatgggagtctgaccgataatctcaggcggaccttaggatcttgggcctggaggcaagagaaaaaagctggaggaagaggagtcgcagagaaacccagtcctctgactggtttctggtgaggtctctattcatcagtgggagctgattttatctgatttcctcaagagtgcattccagaaggggacctgctattcttcgaggggacctgctattcttcgaggggacctgctattcttcgaggcagtggaccctgtttgctgatggtcaacactctggccctgctgccccatgtccctgtggagaagtgtgaaggacgggtgccttaaacccacacttccagggacccttcagcacaggtcctgcctgttcccatggtgcttctcaccctgaaccctcagagctacagccagggatagagcagatgagcagtgagctggtttccaccctctggggcaggaggggcttgggcttccctttgaccctcttccttcctttcccagatcttcaatatttgttgtgatgtaacagccataagagctgtaagaggaactgtgggctttgggagctttcttgggttgaaagaggggtggggggaggggatgcatgcaggggtatgaaggcagcccaaggtctcccagaggctcgggaggaaacccttttggaatacatgtgttattgttgcattactgtgttgtgaagataagaagctgctctgtatgctaaagctttctctcctcaataaaaatataaagggtgtgt

SEQ ID NO: 394773 - DNA, 1000 bp, Homo Sapiens
aagtctgacctaggtttgcggggagaagtggaactccatttttgacaggtgatgccattttttgttttggacatcgtccctctgtagttctttccattcccagtcttgcactctgaaagatacactgaaggaaagtccacacagtggtcaaagtctttcacaagacaccacgtgaaggtctgcacagcacagtcacattgagaaaaagatctcatgcaccagaccccctgtttctgctttctaaaagatcatcttttgcacctgcaaaaaggctgcagtaaactgggccattccatactttgattcatgtattcaaatgctacttatgagctctctgtgtattgagccccaccaggatgctggggacacacggggcacagtgcagccagaggcttggccatcatagagctcacattctagtggaatcagacaggggggttacaggaaatattcaagtaaacaatataaaatgagatcacttgatgatacatggatacatgttacatacatgatgagacagagtaagagaatggggaaagggtttttagatgggggaatggcaggcttttccgaggctgaaagagatccaacccacttctatttcttcaggctcccagtgatatgaaaaagtgccaaacaggactataaaattgtggtctactgtaaatggtttgcagtaaaagttctcaaccagcttccactcaaccaactcaccagttagacaatgggccctctcctgtgtttaaaacagtccggtgcccacctgggtccacatgcagctggcaggtgtttgctagtgtgcccacccatgtctgttccccccacgtgagttatgtgcttacaacgagtcgtttctttgcattttccaactttcttacatttatatttaattaaagatgatctaaactgagaaatgaatgtgaaaagaaacaaagctcttttttgtttggtttttaactaaattaaatgtttttaacaagtaaaaaaaaaaaaaaaaaaa

SEQ ID NO: 394774 - DNA, 1000 bp, Homo Sapiens; identical to SEQ ID NO: 284694

SEQ ID NO: 394775 - DNA, 1000 bp, Homo Sapiens; identical to SEQ ID NO: 284695

SEQ ID NO: 394776 - DNA, 1000 bp, Homo Sapiens; identical to SEQ ID NO: 284696

SEQ ID NO: 394777 - DNA, 588 bp, Homo Sapiens; identical to SEQ ID NO: 284697

SEQ ID NO: 394778 - DNA, 1000 bp, Homo Sapiens; identical to SEQ ID NO: 284698

SEQ ID NO: 394779 - DNA, 537 bp, Homo Sapiens
tcccagtgggctaatccacaccagtggacttgaaacacgctttgggttgctgtatggtagtatgctaaaggacagcaagaatcacttgacaattggtttgtgaccataatggcatctataaacagaaccattgaaataatgaaaaaacatggagtaagcaaacaacatctcctggaggagataaacaaaaagcgtgaatccaactgcttggtggaacgaagcaatcaagtcagcttactgagagttcaaaagaggcacttcccggatgcctatcagtcctttactgataccacaaccaaagagcctgttcccaacagtggcaggagctcctggatcaagctgagtctccttgctcacatggagagaaagcactttccaccaaaaaataatgccatatttggataaagtgcatctccagagacacacggaaatacattctctttgattcttcttcagtgtgtctaaattatttacaaattattaattataaacaaagctaaacaaaaaaaaaaaaaaaaaaaaaaaaaaaaaaaaaaa

SEQ ID NO: 394780 - DNA, 1000 bp, Homo Sapiens
tcagcttctactcgaatttttgggaaacaaacaaacaaaatggaaagttcaagaaagtttaaaactatgaaagatgtttatactgaaaaaaggctagaaaacattttaattctttcttccaagttttccaaacctaaaagtactcctggctcagttatcgctcaaaaacttgagaaaatgcaccctaagcatcaacctttaccagagagtccaggctatacttatcagcacatctcgagagacttaagtgcaacagtgccaagccctccacctatgactgtatctatgaaaccagaaggacagtggcctgaacattttaaatcaactgctacattgacactaagagttactgaatttccaggttttgtttccttgccaacaccagttttaccaagaaaacctcacaggcagtctgtgatagaaactcttgtaacagaaaatggaaatatagaaagtgtcccaaagcaaatcccaccaagaccacctgaaggtctcaccaaaactgaaaaaatagaatcagagatacacgttgtacgtggtgaaggttttaagactgttgcagcaacacgatatgaaacaataacagccatgaccaacctggccatagtaaactgtcaagtatatgggagaaatgcacttaatctgaaggtatgctagatctttttaatgacagtgccctcctgtattatcaattatttttgctttaaatttcccaatatagattagtttccatggtattgaggggaatggcttttttatcctaaattgtccagacttaacacctttggctttccagttgatatatcttaatttatcatttaatgatcttcattactttcccacagaaatattatgtcttaaaaatttacaaatactgaaattgagaaataatcctatcaaagaaattccttctgaaattcaacaacttgagttccttagaattttcaccattgcttttaatttaattactgttcttccaattgggtaaggttgatggtct

SEQ ID NO: 394781 - DNA, 1000 bp, Homo Sapiens; identical to SEQ ID NO: 284699

SEQ ID NO: 394782 - DNA, 1000 bp, Homo Sapiens; identical to SEQ ID NO: 220868

SEQ ID NO: 394783 - DNA, 1000 bp, Homo Sapiens; identical to SEQ ID NO: 284700

SEQ ID NO: 394784 - DNA, 1000 bp, Homo Sapiens; identical to SEQ ID NO: 284702

SEQ ID NO: 394785 - DNA, 1000 bp, Homo Sapiens
gaagacgacaatggacctgaacataagagatgcgaaggagaggactgctctatactgggcctgtgccaatggccatgcagaagtagtaacacttctggtagatagaaagtgtcagcttgacgtccttgatggtgaaaacaggaccattctgatgaaggctctgcaatgccagagggaggcttgtgcaaatattctcatagattctggtgctgatccaaatattgtagatgtgtatggcaacacagctgtccattatgctgttaacagtgagaatttgtcagtggtggcaaaattgctgtcctgtggtgcagacatcgaagtgaagaacaaggctggccacacaccacttttactggccataaggaaaagaagtgaggaaattgtggaatttttactgacaaaaaatgcaaatgcaaatgcagttgataagtttaaatgcacagccctcatgcttgccatatgtcatggatcatcagagatagttggcaagcttcttcagcaaaatgttgacatctgtgctgaagctacatgtggaatgattgcagaacgttatgctgttgcttgtggatttaatctctaagtgtttacatttaaaggctagcgttcatcaacaacttttggaatataaacaaaagatatctaaaaattctcaaaatagtaatccagaaggaacatctgaaggaacacctgatgaggctgcacccttggcggaaagaacacctgacacggctgaaagcttggtggaaagaacacctgatgaataggatacagtgaattcctcttcaaagattttagcctgtaaacatcctttaaaattcaagagggggaagattaagtacaatgagttctgagttcctcatcaaagaacaaatatgtcagtatgttcagcttctctgttctttgttctccgttttaaagtttaacttcctcgttcgttatgcctccttgcccctagtttcattaaacaacccccttctagcctctaaaaaaaaaaaaaaaa

SEQ ID NO: 394786 - DNA, 859 bp, Homo Sapiens; identical to SEQ ID NO: 284704

SEQ ID NO: 394787 - DNA, 1000 bp, Homo Sapiens; identical to SEQ ID NO: 115445

SEQ ID NO: 394788 - DNA, 1000 bp, Homo Sapiens
tcggacatgtccaaggctaactgagaggccttccagacgcttcatttttgttgtttgggtttgcggcagggcacaaagaggatggcgggtgaaaaagttgagaagccagatactaaagagaagaaacccgaagccaagaaggttgatgctggtggcaaggtgaaaaagggtaacctcaaagctaaaaagcccaagaaggggaagccccattgcagccgcaaccctgtccttgtcagaggaattggcaggtattcccgatctgccatgtattccagaaaggccatgtacaagaggaagtactcagccgctaaatccaaggttgaaaagaaaaagaaggagaaggttctcgcaactgttacaaaaccagttggtggtgacaagaacggcggtacccgggtggttaaacttcgcaaaatgcctagatattatcctactgaagatgtgcctcgaaagctgttgagccacggcaaaaaacccttcagtcagcacgtgagaaaactgcgagccagcattacccccgggaccattctgatcatcctcactggacgccacaggggcaagagggtggttttcctgaagcagctggctagtggcttattacttgtgactggacctctggtcctcaatcgagttcctctacgaagaacacaccagaaatttgtcattgccacttcaaccaaaatcgatatcagcaatgtaaaaatcccaaaacatcttactgatgcttacttcaagaagaagaagctgcggaagcccagacaccaggaaggtgagatcttcgacacagaaaaagagaaatatgagattacggagcagcgcaagattgatcagaaagctgtggactcacaaattttaccaaaaatcaaagctattcctcagctccagggctacctgcgatctgtgtttgctctgacgaatggaatttatcctcacaaattggtgttctaaatgtcttaagaacctaattaaatagctgactacaaaaaaaaaaaaaaaaaaa

SEQ ID NO: 394789 - DNA, 1000 bp, Homo Sapiens; identical to SEQ ID NO: 115446

SEQ ID NO: 394790 - DNA, 1000 bp, Homo Sapiens; identical to SEQ ID NO: 284708

SEQ ID NO: 394791 - DNA, 1000 bp, Homo Sapiens; identical to SEQ ID NO: 220871

SEQ ID NO: 394792 - DNA, 1000 bp, Homo Sapiens; identical to SEQ ID NO: 284710

SEQ ID NO: 394793 - DNA, 1000 bp, Homo Sapiens; identical to SEQ ID NO: 115447

SEQ ID NO: 394794 - DNA, 1000 bp, Homo Sapiens; identical to SEQ ID NO: 115448

SEQ ID NO: 394795 - DNA, 1000 bp, Homo Sapiens; identical to SEQ ID NO: 115449

SEQ ID NO: 394796 - DNA, 1000 bp, Homo Sapiens; identical to SEQ ID NO: 220873

SEQ ID NO: 394797 - DNA, 1000 bp, Homo Sapiens; identical to SEQ ID NO: 115450

SEQ ID NO: 394798 - DNA, 1000 bp, Homo Sapiens; identical to SEQ ID NO: 115451

SEQ ID NO: 394799 - DNA, 1000 bp, Homo Sapiens; identical to SEQ ID NO: 284717

SEQ ID NO: 394800 - DNA, 1000 bp, Homo Sapiens; identical to SEQ ID NO: 115452

SEQ ID NO: 394801 - DNA, 1000 bp, Homo Sapiens; identical to SEQ ID NO: 220874

SEQ ID NO: 394802 - DNA, 1000 bp, Homo Sapiens; identical to SEQ ID NO: 284721

SEQ ID NO: 394803 - DNA, 1000 bp, Homo Sapiens; identical to SEQ ID NO: 220875

SEQ ID NO: 394804 - DNA, 1000 bp, Homo Sapiens; identical to SEQ ID NO: 220876

SEQ ID NO: 394805 - DNA, 1000 bp, Homo Sapiens; identical to SEQ ID NO: 284724

SEQ ID NO: 394806 - DNA, 842 bp, Homo Sapiens; identical to SEQ ID NO: 284725

SEQ ID NO: 394807 - DNA, 1000 bp, Homo Sapiens; identical to SEQ ID NO: 220877

SEQ ID NO: 394808 - DNA, 1000 bp, Homo Sapiens; identical to SEQ ID NO: 115453

SEQ ID NO: 394809 - DNA, 1000 bp, Homo Sapiens
ggagctgctgctgctgcagctggaggagcggagcacacaggggcccctccagatgctgcaggacatgaaggaacccctgagcaggaagaacaacgtgagtgtgcagtgcccagaggttgcccccccaaccagacccaggactgtgtgcagagttcccggacagattgaagtgctaagaggctttctagaggatgtggtgcctgatgccacctccgcgtacccctacctcctcctgtatgagagccgccagaggcgctacctcggctcttcgccggagggcagtgggttctgcagcaaggaccgatttgtggcttacccctgtgctgtgggccagacggccttctcctctgggaggcactactgggaggtgggcatgaacatcaccggggacgcgttgtgggccctgggtgtgtgcagggacaacgtgagccggaaagacagggtccccaagtgccccgaaaacggcttctgggtggtgcagctgtccaaggggaccaagtacttatccaccttctctgccctaaccccggtcatgctgatggagcctcccagccacatgggcatcttcctggacttcgaagccggggaagtgtccttctacagtgtaagcgatgggtcccacctgcacacctactcccaggccaccttcccaggccccctgcagcctttcttctgcctgggggctccgaagtctggtcagatggtcatctccacagtgaccatgtgggtgaaaggatagacacagaccgggggactcgggcactgctcctggctctgcagaaggtgtgggccttctgcttactgcaggccacctgccagggttctctggcatcacgctggcagccattagacacacaggggggtttctcaaattctaaatataattgtgattagaactgtcaaacattaagagggtatactgacagatgcttcctagaggaaacttttgaaagcccctgcgttctgagtggaccgatttctaaatccatacctacacacc

SEQ ID NO: 394810 - DNA, 1000 bp, Homo Sapiens; identical to SEQ ID NO: 115454

SEQ ID NO: 394811 - DNA, 1000 bp, Homo Sapiens; identical to SEQ ID NO: 284729

SEQ ID NO: 394812 - DNA, 758 bp, Homo Sapiens; identical to SEQ ID NO: 284731

SEQ ID NO: 394813 - DNA, 1000 bp, Homo Sapiens; identical to SEQ ID NO: 284732

SEQ ID NO: 394814 - DNA, 787 bp, Homo Sapiens; identical to SEQ ID NO: 115455

SEQ ID NO: 394815 - DNA, 1000 bp, Homo Sapiens; identical to SEQ ID NO: 115456

SEQ ID NO: 394816 - DNA, 1000 bp, Homo Sapiens; identical to SEQ ID NO: 116642

SEQ ID NO: 394817 - DNA, 1000 bp, Homo Sapiens; identical to SEQ ID NO: 220880

SEQ ID NO: 394818 - DNA, 1000 bp, Homo Sapiens; identical to SEQ ID NO: 115458

SEQ ID NO: 394819 - DNA, 1000 bp, Homo Sapiens; identical to SEQ ID NO: 284739

SEQ ID NO: 394820 - DNA, 1000 bp, Homo Sapiens; identical to SEQ ID NO: 284740

SEQ ID NO: 394821 - DNA, 1000 bp, Homo Sapiens; identical to SEQ ID NO: 115460

SEQ ID NO: 394822 - DNA, 1000 bp, Homo Sapiens; identical to SEQ ID NO: 115461

SEQ ID NO: 394823 - DNA, 971 bp, Homo Sapiens
gtccgggtgacgtctcccgagggcgtcggcagggtcggcggcgtcggcagcagtgtcgacggcagcggcggcggcgggtgggaaatggcggagtatctggcctccatcttcggcaccgagaaagacaaagtcaactgttcattttatttcaaaattggagcatgtcgtcatggagacaggtgctctcggttgcacaataaaccgacgtttagccagaccatcttgattcaaaacatctatcgtaatccccaaaacagtgcacagacggctgacggctcacactgtgccgtgagcgatgtggagatgcaggaacactatgatgagttttttgaggaggtttttacagaaatggaggagaagtatggggaagtagaggagatgaacgtctgtgacaacctgggagaccacctggtggggaacgtgtacgtcaagtttcgccgtgaggaagatgcggaaaaggctgtgattgacttgaataaccgttggtttaatggacagccgatccacgccgagctgtcacccgtgacggacttcagagaagcctgctgccgtcagtatgagatgggagaatgcacacgaggcggcttctgcaacttcatgcatttgaagcccatttccagagagctgcggcgggagctgtatggccgccgtcgcaagaagcatagatcaagatcccgatcccgggagcgtcgttctcggtctagagaccgtggtcgtggcggtggcggtggcggtggtggaggtggcggcggacgggagcgtgacaggaggcggtcgagagatcgtgaaagatctgggcgattctgagccatgccatttttaccttatgtctgctagaaagtgttgtagttgattgaccaaaccagttcataaggggaattttttttaaaaaacaacaaaaaaaaaaacatacaaagatgggtttctgaataaaatttgtagtgataacagtaaaaaaaaaaaaaaaaaaa

SEQ ID NO: 394824 - DNA, 686 bp, Homo Sapiens
agatgaacaaattggggcacaacgaacttaaggaatgccttaagactgccactgattctctacagacagtgcagcctagtatctcccagacttgtacttcctatggccctgcacttggggccccactgcctggtagaaatgaagtggccttgctaacaagtttacctccaaactatgagatttcagaaggaaaaccaagagccatctctgcatatgtgagagcgggcaaaggaaatgtgacaaggagaagaaagaagacacacttgggcaatgatgatgggaagaaggaagcacaggagaaaatgtaagaaatgtacagcccatgaggaagatccaaagagaactttggccttaactaagcttcctacattctcctggagtcggtggtttatgaatgtggtgccatctggggaactgacaacccctgatgtgttcactctgctcgtcttccaggtgagagaagaagaaggcgagaaagaaagagaagttccagaatttcacaggctgagggagatggtagtaacttctgtttatgttggtttctgtttattggtttgctttttattttgaactcgtttgacttcaggttccagatttgtttttttctttgtaaacgagactttgacattgttagcaggcccatctgtttgcttttcttaaataaaatgtaaattggtttttgtttt

SEQ ID NO: 394825 - DNA, 1000 bp, Homo Sapiens; identical to SEQ ID NO: 115462

SEQ ID NO: 394826 - DNA, 1000 bp, Homo Sapiens; identical to SEQ ID NO: 284746

SEQ ID NO: 394827 - DNA, 1000 bp, Homo Sapiens; identical to SEQ ID NO: 115463

SEQ ID NO: 394828 - DNA, 1000 bp, Homo Sapiens; identical to SEQ ID NO: 220884

SEQ ID NO: 394829 - DNA, 1000 bp, Homo Sapiens; identical to SEQ ID NO: 220884

SEQ ID NO: 394830 - DNA, 566 bp, Homo Sapiens; identical to SEQ ID NO: 284748

SEQ ID NO: 394831 - DNA, 1000 bp, Homo Sapiens; identical to SEQ ID NO: 284749

SEQ ID NO: 394832 - DNA, 1000 bp, Homo Sapiens; identical to SEQ ID NO: 284750

SEQ ID NO: 394833 - DNA, 1000 bp, Homo Sapiens; identical to SEQ ID NO: 220886

SEQ ID NO: 394834 - DNA, 751 bp, Homo Sapiens
atgggccccggggacttccgccgctgcagagagagaatttcccaggggctccagggactcccaggtagagcggagctttggttcccacctcgtcccgcgtgcgacttcttcggggacggcaggagcacggacatccaggaggaggccctcgccgccagcccgctgctggaggacctcagacgacggctgacgcgcgccttccagtgggcggtgcagcgcgcgatctcgaggcgcgtgcaggaggcggcggcggcggcggcggcgcgggaggagcagagctggacgggcgttgaggccaccctggccaggctgcgggcggagctggtggaaatgcatttccaaaaccaccagctggctagaactttactggacctaaacatgaaagtgcagcaattgaaaaaggagtatgaactggaaattacatcagactcccaaagcccaaaagatgatgctgcgaatccggaataaagaaatgcacacgcaagggctgggcgcggtggctcacgcctgtaatcccagcactttgggaggccgaggcgggcggatcaagacgtcaggagattgagaccatcctggctaacactgtgaaaccctgcctctactaaaaatacaaaaaattagccagacgtggtggcaggcacctgtagtccctgctactcaggagtctgaggcaggagaatggcgtgaacccaggagacagagcttgcagtgagccgaaatcctgccactgcactccagccctgggtgacag

SEQ ID NO: 394835 - DNA, 1000 bp, Homo Sapiens
agtgagctaaggcctggccaccgaattaggggctgccctgtgtggcaccatcccaccctccccagcagtgcccctgtgctggtgggactccatcccagctcctgagggccccaggaggatgtccctccccaccccttagggcgtgggccccaggttctgggaggaaaggggttaggaggaaatgggccgaagggcttcccagagggattggcagcttgtgtggttgggggccgctgagggcagcacggagcctggggacctgggttcctggctcagggagagctgtggcttctcatgggcctcgcaggcgtgtactgttaccgtgtcaaccggcgcctgttcccggtgcctgtggatcccggtaccccctgccgcctgtgcaggacaccgcgagaccagcagggccctgggaccctggcgcagccagcgcacgtcagggtgagcatcccgctgtcgatcctggagcccccgcaccggtaccacatccaccggcgaaagagctttgacgcctctgacacactggccctgccccggcactgcctgctgggctgggacatttttcctccgaagtctgagaaaagctcagcccccaggaacctggacctctggtcctctgtctccgctgaggcccagcaccagaagctgtccggcaccagcagcccttttcacccggcctcaccaatgcagatgctgcccccgaccccgacctggtcagtgccccaggtccctcggccccacgtcccacggcagaagccctgaggactgactcctgggggagaacagcattcccgccgcctccagcctctcccctctggcaggcgcacccaggagatggaatcccctgcccgcccagctcaggcccagctgtcctaggttgggcaggtgggtggacccaagcttgtctgctgcctgagttccagagagggaggaccctggggtggagggtgagggattctgtggaagtttgtaaataaagctcagtgctctgcagctcaagtcc

SEQ ID NO: 394836 - DNA, 1000 bp, Homo Sapiens
ataaatctcttctttgctgcagtcatctactttttttttaattaaaaaaaatttttttttgaagcagtcttgctctgttacccaggctggagtgcagtggtgtgatctcggctcactgcaacctctgcctcccaggttccagcaattctcctgcctcagcctccctagtagctgggatgacaggcgcctgccatcatgcctgactaatttttgtatttttagtagagacggcgtttcaccatgttggccaggctggtctcaaactcctgacctcaggtgatccgcctacctcagcctcccaaagtgctgggattacaggcgtgatccaccacacctggcccttgcaatcttctactttaaggtttgcagagataaaccaataaatccacaccgtacatctgcaatatgaattcaagaaaggaaatagtaccttcaatacttaaaaatagtcttccacaaaaaatactttatttctgatctatacaaattttcagaaggttattttctttatcattgctaaactgatgacttactatgggatggggtccagtcccatgaccttggggtacaattgtaaacctagagttttatcaactttggtgaacagttttggcataatagtcaatttctacttctggaagtcatctcattccactgttggtattatataattcaaggagaatatgataaaacactgccctcttgtggtgcattgaaagaagagatgagaaatgatgaaaaggttgcctgaaaaatgggagacagcctcttacttgccaagaaaatgaagggattggaccgagctggaaaacctcctttaccagatgctgactggcactggtggtttttgctctcgacagtatccacaatagctgacggctgggtgtttcagtttgaaaatattttgttgccttcatcttcactgcaattttgtgtaaatttctcaaagatctgaattaaataaataaaattcatttctacagacccacaaaaaaaaaaa

SEQ ID NO: 394837 - DNA, 541 bp, Homo Sapiens; identical to SEQ ID NO: 284753

SEQ ID NO: 394838 - DNA, 470 bp, Homo Sapiens
ggcagacacccacgcctgactttcaggagaaaagagaacatgactaacggatattcttagtagatggtttattagaaaagagaacatcttccagcatgtgtcctggggtgatgggtgtgggaagcactcagtccatagtcctggtccctggcttccccaagcccagcaccatgaatgtacagtggaaagcagagggtgcagcgtctcagaaagatgcttccactcacaaggattggagctcacaagtgagctcgataacctgcaaaccagagaaacctgagacactgccccttggccattttatcaacggagactttattgtgattatcccggcagggggccgagctctcctctctgcaacaggaaatgctctttagtgaaaatgcagcatttctccaagggtaacaaagctgaacgcctgcttagcttatgaaccctcagttggcctaggtggtgcaaagaccctgctg

SEQ ID NO: 394839 - DNA, 362 bp, Homo Sapiens; identical to SEQ ID NO: 284754

SEQ ID NO: 394840 - DNA, 1000 bp, Homo Sapiens
tacccggagacttcccagagagactcgacccaccaaaaagcgcaccgcggccgcgcagcccttccttcagctctggaacccagcgccccacacctcaaatgggagaactggtgacctctagtggcccatgaccagcctgcagggcctggggctggcggggattctctgacccaaactctcctgggctctaatgctgttcccctgcccaccctaccttctgccttcacactgctgaggggtccatagccgacaaggaagagctcatttctcatttgtcatgaccatctttaataaaaaataaattagttctgggtgggaaccatttcaggaggcagggagtggggctaggggctgggcggggtggtgggggagcggatgctcacatttctctttttcaccctctgcccagctgggccttgctctggagaggcagtctctttcctcctgccttcctgagtaaggcaggattggcagtggctgaccccagccctagctaattagggaggcaggggcagagatactaggcaaatgagaaggggtcagagacacagggcggcttagaagatgtgaggtctgaacatgagaaatgaggcttagggcacaaaactggagttggtggggagaccacactctaagtagctcagattagcaaggaactgcagacttgctttcctttccacctaggaaagtctcaaggaaacaggtcttgtccttctcagtctgtgtaacctctttttgaaaagtgatacacgtttgagcacacacatatccatgcagtcccaaaagcacacctgaggcatatgtgcacacacccatcacaccaccacatgggcctgaccacagccctgaaagtcactttgtgtcagtcaccttgccaccctctgtcacctggaggacatccctgctgagactgggacaggctggagagccagggggttcagagtgggccgatcaatgggtgaccgatggtggcacagaaaaccgtgaaggtgccccggac

SEQ ID NO: 394841 - DNA, 1000 bp, Homo Sapiens; identical to SEQ ID NO: 115464

SEQ ID NO: 394842 - DNA, 1000 bp, Homo Sapiens; identical to SEQ ID NO: 115465

SEQ ID NO: 394843 - DNA, 1000 bp, Homo Sapiens; identical to SEQ ID NO: 220888

SEQ ID NO: 394844 - DNA, 1000 bp, Homo Sapiens
tggctgccaaatggctatgtgaccctgagggataacaagcagaaagaacaagctggagagttaggccagcacaacagactgtccacctatgataatgtccatcaacagttctccatgatgaaccttgatgacaagcagagcattgacagtgctacctggtccacttcctcctgtgaaatctccctccctgagaactccaactcctgtcgctcttctaccaccacctgcccagagcaagacttttttggggggaactttgaggaccctgttttggatgggcccccgcaggacgacctttcccaccccagggactatgaaagcaaaagtgaccacaggagtgtgggaggtcgaagtagtcgtgccaccagtagcagtgacaacagtgagacatttgtgggcaacagcagcagcaaccacagtgcactgcacagtttagtttccagcctgaaacaggaaatgaccaaacagaagatagagtatgagtccaggataaagagcttagaacagcgaaacttgactttggaaacagaaatgatgagcctccatgatgaactggatcaggagaggaaaaagttcacaatgatagaaataaaaatgcgaaatgccgagcgagcaaaagaagatgccgagaaaagaaatgacatgctacagaaagaagtggagcagtttttttccacgtttggagaactgacagtggaacccaggagaaccgagagaggaaacacaatatggattcagtgagcctgctttcgcctgctgtctctgatggctctggcaaggactccagggattctggtgggatatgacttagaaccaggtggctggtcacctggatgtacagaagtctaactggtgaaggaatatcatttacagacattaaacatccatatctgcaatgtgtaccaaagttatatcatgccccataatgctactgtcaagtgttacaactggatatgtgtatatagagtagtttttcaaaagtaaactaaaaatgagaagc

SEQ ID NO: 394845 - DNA, 1000 bp, Homo Sapiens; identical to SEQ ID NO: 220889

SEQ ID NO: 394846 - DNA, 1000 bp, Homo Sapiens; identical to SEQ ID NO: 284761

SEQ ID NO: 394847 - DNA, 1000 bp, Homo Sapiens; identical to SEQ ID NO: 284762

SEQ ID NO: 394848 - DNA, 593 bp, Homo Sapiens; identical to SEQ ID NO: 220890

SEQ ID NO: 394849 - DNA, 1000 bp, Homo Sapiens; identical to SEQ ID NO: 284764

SEQ ID NO: 394850 - DNA, 1000 bp, Homo Sapiens; identical to SEQ ID NO: 115466

SEQ ID NO: 394851 - DNA, 1000 bp, Homo Sapiens; identical to SEQ ID NO: 115467

SEQ ID NO: 394852 - DNA, 1000 bp, Homo Sapiens; identical to SEQ ID NO: 284766

SEQ ID NO: 394853 - DNA, 1000 bp, Homo Sapiens; identical to SEQ ID NO: 115468

SEQ ID NO: 394854 - DNA, 1000 bp, Homo Sapiens; identical to SEQ ID NO: 284768

SEQ ID NO: 394855 - DNA, 1000 bp, Homo Sapiens; identical to SEQ ID NO: 284769

SEQ ID NO: 394856 - DNA, 1000 bp, Homo Sapiens
cagtcacccagccctttggaatttctggcccccagaactccaccctggctggatcctgaaacagtggaggctgctgggagccaggccagccccgcccccttggacctgtcagccctcggagctctggcctgtgggcgttggcctgagggtccttggtgccgcgggaacccttcctgcacggccctgtagcgccctctgggccccggttcatggatcttttgtcctcgtggggcctgctggtgactggagccctgccccttcgacttctctgttccttgtggagttcttggatttttgaacctccaggattccacggtgctgtcccaagccagcccttaggagatactgaacaaggctggctgagaagtgcctactcaagaacttcaagatgggatgtcgacttaagaccagccttctccatcttcagcctcctgcagaaccacggtgtcatcgtggaccacgcctgttcattccttccctgacctcagtacacatccgtcaggagcggagtaggactctggagagcaccgtatcactggagggcaccgtgtcttcgcaggctcacctgtggatggagagccgtggggtgagctgacacctttcaatgccccctggttgttcttccccttgttcagcccattgcacccggtacctgcccccatccccaaatcaccgatgggtcctttcccccagcgagaagcatatctctcgaccacctcccatccgaccccccaaatcgtgatagttgactaaaggacatttttttttcctcctgtgtttttcaacctccaacgttcaagtcaaggaaccgctgataagaagggggtttgagtacccggatgggaatggcaatggcctagcttttattttaggggcaaagagaagaagggcccccgtcagattttaagttgttcagtttttggcacagggtcgggaccctgagtattgagctctggtgaataaaaaggttttctagtcgtctttgaaaaaaaaaaaaaaa

SEQ ID NO: 394857 - DNA, 1000 bp, Homo Sapiens; identical to SEQ ID NO: 220892

SEQ ID NO: 394858 - DNA, 1000 bp, Homo Sapiens; identical to SEQ ID NO: 284770

SEQ ID NO: 394859 - DNA, 1000 bp, Homo Sapiens; identical to SEQ ID NO: 220893

SEQ ID NO: 394860 - DNA, 725 bp, Homo Sapiens
ccgaagtttagaaaccagcttattgccaaagggaaaaaggatagcccaaaggacaagaaaacacttctcactatgaattggtttggaagtaacttcttcaggtgtcctgaggatctttccttactcaacatatactcacctctgttgtcacacatgtcatctgaagatgaacattttatttccaacttgagaggccatgtaccagccagcgctgtggtgaagcagcctgttcggggagccagtggcaggacgacaatcacagcaattgtccagactggcgggggctggagcaccggtctcttcagtgtctgcagagataggagaatttgtttctgtggtctattctgtcctatgtgtcttgagtgtgacatcgccaggcattatggagagtgtctttgttggccgttgttacctgggtccacctttgcactgagaattggcaccagggagagacataaaatacagggcacactgtgtgaagactggctggcggtgcactgctgttgggctttttccatctgccaggtggcccgggaactcaagatgaggacctcccaagtctatgaaatctgtgcagtcccaatgactaaggacaccctggtttgacagcaagataactcctcctccttactccccaacaccctcctctcaaacctctcagtggaacaattgctttttcctaagtttttactgaaatggtatgaaaataaatgatttccccccta

SEQ ID NO: 394861 - DNA, 1000 bp, Homo Sapiens
atggtgacctcagggcccttcaggacttggtgtctggagcaaagaaggcagggattgtccttgatgtaaacgtgaggtccagttgtggatataccccgctgcaccttgcagccattcacggccaccagggggtcatcaaattgctagtgcaaaggttggcttctcgggtaaatgtcagggacagcagtgggaagaagccatggcagtatctaaccagtaatacctctggggaaatatggcagctgttgggagctcctcggggcaagcccattttccctgtctatcccttagttggaagttcttcccctaccagaaaggccaagagcaaggaaatatctagaagtgtcacccgaaaaacttccttcgctgcactactcaaaagtcagcacaacaagtggaaactggccaaccagtatgagaaattccacagtccaagggaaagagaagagtatagtgactgaggtgggtctctctgtccaacatgcaggcagcactccctcatcctgctcagtgagagaattcagggggaatagaaaagctgctgagagttggtaaagaggatggtcgagtgagatggtgttgacctccctggatcttatgtcactacatcctggacctcaagagggtcatccaagctttttgaaagctgaactccttgactggagaaacctagacaagaggcggggccaggtgcttgatatctaggaggcattcttcctcttcccttgccaccatggagctgggcacagtaagccatattgtttcctgaagcaggagtcccaggccttggctagagagggaacagatgtctaacaaaaagagaagcaattcgaggaattgatgaagcacaattaaaatcctctctggctagtagctctctggcttctgttcatttgaagaataaatcttggctgacagtgggaagcaccaggtttgaaatcagatggctttatttttctttttttggcatttaaatcagtgaaataaaattattactgga

SEQ ID NO: 394862 - DNA, 1000 bp, Homo Sapiens
ccagcagctctgttccccacctcagcgcttcctgcccatgtggggaaacaggtctgagaaggaaggggcttgcccagggtcacacaggaagccttcaggctctgcttctgcctgatggctctgctcagcacattcacggtggagaggagaatttgggggtcacttgaggggggaaatgtagggaattgtgggtggggagcaagggaagatccgtgcactcgtccacacccaccaccacactcgctgacacccacccccacacgctgacacccacccccacacttgcccacacccatcaccgcactcgcccacacccaccaccacactgccccacacccaccaccacactcccccacacccaccaccacactcgcccacacccaccaccagtgacttgagcatctgtgcttcgctgtgacgcccctcgccctaggcaggaacgacgctgggaggagtctccaggtcagacccagcttggaagcaagtctgtcctcactgcctatccttctgccatcataacacccccttcctgctctgctccccggaatcctcagaaacgggatttgtatttgccgtgactggttggcctgaacacgtagggctccgtgactgggacaggaatgggcaggagaagcaagagtcggagctccaaggggcccaggggtggcctggggaaggaagatggtcagcaggctgggggagaggctctaggtgatgaaatattacattcccgaccccaagagagcacccaccctcagacctgccctccacctggcagctggggagccctggcctgaacccccccctcccagcaggcccaccctctctctgacttccctgctctcacctccccgagaacagctagagccccctcctccgcctggccaggccaccagcttctcttctgcaaacgtttgtgcctctgaaatgctccgttgttattgtttcaagaccctaacttttttttaaaactttcttaataaagggaaaagaaacttgt

SEQ ID NO: 394863 - DNA, 1000 bp, Homo Sapiens
cagtgaagctatagtccatgcagctcagaaactgaaggagtaccttggatttgaatatcctccaagtaaactctgcccagctgcaaatactctgaatgagatcttcttaatccatttcatcactttctgccaagaaaagggagttgatgagtggctgaccaccaccaagatgaccaagcaccaagccttcctgtttggtgcagactggatttggaccttttggggatccaacaagcaaataaagcttcagctcgcagtacagactctgcagatgtcttcacctcctcctgtggaatctaagccttgtgacctttccaatccagaatcaagggtagaggagtcttcctggaagaaaagtagatttgataagctggaagaattctgtaacttaataggagaggattgcctgggtctgtttatcatctttggtatgccaggaaagcctaaagacatcaggggagttgtcctggacagtgtcaaaagtcagatggtgaggagccatctgccaggagggaaggctgtggctcagtttgtcctggaaactgaagattgtgtgttcatcaaagagctgctcagaaattgtctgagtaagaaagacgggctgagagaggtgggcaaggtttatatcagcattctctgacttggatatgtattatgtgagtggcctgtaagaggaaaagaaaaaaagattctaataagcaagctcacctatttgcatcattccagcatgggattttttttcatttgttttcccattgattgaaaatgattactgggatcaaagtacattcatgtcgcaattacagagagagagagaaaaaaagaaaaccctggctctgcctatgatttaaaaacagttcaggaaaagttataatttagtttaatatttcattcacttattcaataataaaaatggaagagagataataaagtcacatttaaagtttgatttgcaaaaaaaaagtgtctgtttgaaataataagtctagcactcaaaagt

SEQ ID NO: 394864 - DNA, 1000 bp, Homo Sapiens; identical to SEQ ID NO: 220894

SEQ ID NO: 394865 - DNA, 1000 bp, Homo Sapiens; identical to SEQ ID NO: 220895

SEQ ID NO: 394866 - DNA, 745 bp, Homo Sapiens
ctgctggcagacagaaaggtgtggttggcatggggcaatgcttgaggtatcagatgcactgggaggacctggaagagtaccaggccctgaccttcctgaccagaaatgaaattctgtgcatccatgacaccttcctgaagctctgccctcctgggaagtactacaaggaggcaacgctcaccatggaccaggtcagctccctgccagctctgcgggtcaaccctttcagagaccgtatctgcagagtgttctcccacaaaggcatgttctcctttgaggatgtgctgggcatggcatctgtgttcagcgagcaggcctgcccaagcctgaagattgagtatgcctttcgcatctatgattttaatgagaatggcttcattgatgaggaggatctgcagaggatcatcctgcgactgctgaacagtgatgacatgtctgaggacctcctgatggacctcacgaaccacgtcctgagtgagtcggatctggacaatgacaacatgctgtccttctcagagtttgaacatgcaatggccaagtctccagatttcatgaactcctttcggattcacttctggggatgctgatgtagcggcaaacacctgacatggcagcctcgagggagaccacaggaatcgaaccccctccagcactggagggagctggtttgaagtatgactttgtactgggcccacactcacctctagaatattgtttattagataaaagaaaaagcttttcctta

SEQ ID NO: 394867 - DNA, 1000 bp, Homo Sapiens; identical to SEQ ID NO: 115469

SEQ ID NO: 394868 - DNA, 1000 bp, Homo Sapiens
cagggctgggtagaaagtggaaagggtggccgagtgccccctgctgtggccatgcaagctagcggcagcagggagccaggcagattattccaccacagaaggggtcagtatcatggagaacacgcaggaagggtccggaatgaacaacggtgctttccgtgagcatgcatggcaggaggctgtctgagactagaggttgtccctcgccaggctaggctggcaagcagcaggaagtgcccacccaccatattgcaggcagcagacgaaggggtacagggcacccgggatcctgccatcagctgtggagatgcccatgatgcctccttgtccctctggaggacctccacgtttgcttggggccaacgtgtgccaggacagggcgaggctcctgccataggtccccacacacgatgtcataaaagcccccagctgccaccagacccaggcagccgggacagtgagctggtgacaccattgtgttgcccagtaaccttaggctactggaattccaagtcagcttcccccactccagggaagatggggaggggttgccaaggtgctgggggctgggggtcaattaggtcaaaggtgaagcagtgctgagccgacataggagcaggcgggtcaaagatgtgtttttggctaccataccaactaccagacttagctcaaattacatgtgaattagactttgtacaaaaggaattaaatccacaatggaacagttttgtggcatctggtcagttttgcctcctagagaccaggtcttccacaaacttgagtctgccttggagcacgcattgctggtggcaggaggggcaaacccagctgtacagcttctcagacaagggctgctcacgcccaccatctcccttctacccaagaatggtatccttgctgggccaaatccacttcctttgcccaagggggaagggaggacagtttttctttgttctgctttttgttttaataaaaattattaagccaatgaacccaactc

SEQ ID NO: 394869 - DNA, 1000 bp, Homo Sapiens; identical to SEQ ID NO: 220896

SEQ ID NO: 394870 - DNA, 1000 bp, Homo Sapiens
ctggttaggaaccacagactgtgacagagaaggtggcgaccagcccagaagaggcccaccctctcggtccggaacaagacgcctcggccacggctccccctcggcctattacacgcgtgcgcagccaggcctcgccagggtgcggtgcagagcagagcaggcaggggtgggggccgggcctgcaagagcccgaaaggtcgccaccccctagcctgtggggtgcatctgcgaaccagggtgaagtcacaggtcccggggtgtggaggctccatcctttctcctttctgccagccgatgtgtcctcatctcaggcccgtgcctgggaccccgtgtctgcccaggtgggcagccttgagcccaggggactcagtgccctccatgccctggctggcagaaaccctcaacagcagtctgggcactgtggggctctccccgcctctcctgccttgtttgcccctcagcgtgccaggcagactgggggcaggacagccggaagctgagaccaaggctcctcacagaagggcccaggaagtccccgcccttgggacagcctcctccgtagcccctgcacggcaccagttccccgagggacgcagcaggccgcctcccgcagcggccgtgggtctgcacagcccagcccagcccaaggcccccaggagctgggactctgctacacccagtgaaatgctgtgtcccttctcccccgtgccccttgatgccccctccccacagtgctcaggagacccgtggggcacggaacaggagggtctggaccctgtggcccagccaaaggctaccagacagccacaaccagcccagccaccatccagtgcctggggcctggccactggctcttcacagtggaccccagcacctcggggtggcagagggacggcccccacggcccagcagacatgcgagcttccagagtgcaatctatgtgatgtcttccaacgttaataaatcacacagcctcccaggagggagacgctggggtgca

SEQ ID NO: 394871 - DNA, 1000 bp, Homo Sapiens; identical to SEQ ID NO: 284775

SEQ ID NO: 394872 - DNA, 1000 bp, Homo Sapiens; identical to SEQ ID NO: 284776

SEQ ID NO: 394873 - DNA, 1000 bp, Homo Sapiens; identical to SEQ ID NO: 220897

SEQ ID NO: 394874 - DNA, 1000 bp, Homo Sapiens
ctgagtacaacatcttcccccgcacctggtgcctccccgcagactatggggacttccagtcctacggtcgtcagcgaaaagcccgcacatatatctgcaagccagacagtggctgtcagggacgtggcatcttcattacccgaaatccccgggagatcaagccaggagagcatatgatctgccagcaatacatctccaagcccctcctcattgatggcttcaagtttgatatgcgagtctacgtcctgatcacatcctgtgaccctctccggatcttcacatatgaggagggcctagcccgttttgccaccacgccctatatggagcccagccataacaacctggacaatgtctgcatgcacctgaccaactatgctatcaacaaacacaatgagaattttgtccgggatggcgctgtgggcagtaagaggaagctgtcgacactcaacatctggctgcaagagcacagctacaaccctggagagctgtggggggacatcgaggacatcatcatcaaaaccatcatctcagcccattctgttctacgccacaactaccgaacctgttttccccagtatctgaatggaggtacatgtgcctgttttgaaatccttggttttgacatcttgctggaccacaagttgaagccctggctgctagaggtaaaccactctccaagctttaccacggactcatgccttgatcaagaagtaaaggatgcacttctctgtgatgctatgacccttgtcaacctccggggctgtgacaaaaggaaggtgatggaggaggataagcggcgagtcaaggaacggcttttccagtgctaccgacagccacgagaatctaggtgtgctaggtgtctggcatgtgtttagttcttcattattcctgagagtaaaagtcctcctttagatgaagaatgtggcctggggctgatttgctatcaaaaacaactttttgcatagataatatgttcatatttgcattaaaaaaatcacag

SEQ ID NO: 394875 - DNA, 1000 bp, Homo Sapiens
tgctcacagtatttggggccagagcctacgtgaatatatgtgtgtggacagatcagctgccatgttggttttggcagaaaaactactgaaaggtggttcagaatctggggagccttatattccaggtgtctttttcagacagtttctacctgtatcacccaaggtgcagtttgatgtagtagtgtcagctttttccttaagtgaactgcccagcaaggctgaccgcactgaggtagttcaaaccttatggcgtaagacaggtcatttcctggtactggtggagaatggaacaaaagctgggcacagccttctcatggatgccagggatctggtccttaagggaaaagagaagtcacctttggaccctcgacctggttttgtctttgccccgtgtccccatgaactcccttgtccccagttgaccaacctggcctgtagcttctcacaggcgtaccatcccatccccttcagctggaacaagaaaccaaaggaagaaaagttctctatggtgatccttgctcgggggtctccagaggaggctcatcgctggccccgtatcactcagcctgtccttaaacggcctcgccatgtgcattgtcacttgtgctgtccagatgggcacatgcagcatgctgtgctcacagcccgccggcacggcaggtatggggggtgtgaccaaaatcagtgggatgtggcaggaagctgcagcccacgccagcatctgtttccacagggatttgtatcgttgtgcccgtgtcagctcctggggagatcttttacctgtgcttactccgtctgcgtttcctccatctacggctcaggatccctctgagagttgatgaggatgtgtaacaagtattttcttctatcgtgcctgccagggctgaagctgcctggtatccaggaggggaatgctggtatccccatatgtctgtgtttgtttgagatttttaataataaataataaatttttgaagaatggaaaaaaaaaaaaaaaaaa

SEQ ID NO: 394876 - DNA, 1000 bp, Homo Sapiens; identical to SEQ ID NO: 115472

SEQ ID NO: 394877 - DNA, 1000 bp, Homo Sapiens; identical to SEQ ID NO: 284780

SEQ ID NO: 394878 - DNA, 1000 bp, Homo Sapiens; identical to SEQ ID NO: 284781

SEQ ID NO: 394879 - DNA, 735 bp, Homo Sapiens; identical to SEQ ID NO: 284782

SEQ ID NO: 394880 - DNA, 1000 bp, Homo Sapiens; identical to SEQ ID NO: 115474

SEQ ID NO: 394881 - DNA, 1000 bp, Homo Sapiens; identical to SEQ ID NO: 115475

SEQ ID NO: 394882 - DNA, 1000 bp, Homo Sapiens; identical to SEQ ID NO: 115476

SEQ ID NO: 394883 - DNA, 1000 bp, Homo Sapiens; identical to SEQ ID NO: 115477

SEQ ID NO: 394884 - DNA, 1000 bp, Homo Sapiens
ggctttataaatatcaggccagacttcgtatgcctaaagagcaactggaacttttaaagaaggaaagccagaatctggaaaacaattttcgtcaaattctatttttgatcgaacaaatagatgtcctgaaggcattgctaagagatatgaaggatggtatggacaataatcacaactggaacacccatggagaccctgtggaggacccggaccacacagaggaagtgtcaaacttggtcaattatgtacttaaaaagttgagagaagaccaagtcgagatggctgattatgccctgaagtcggccggagcctccatcattgaagctgggacctcagaaagttataaaaataataaagcaaaattgtactggcatgggataggtttcctaaatcatgaaatgcctccagatattattcttcagccggatgtctaccctggaaagtgctgggcttttccaggttcccagggtcataccctaatcaagcttgctacaaagatcataccaactgctgttaccatggagcacatctcagagaaggtgtctccgtcaggaaacatctccagtgcacccaaggaattttctgtctatggcatcacaaaaaaatgtgaaggagaagaaattttcctaggtcagtttatatataacaaaacaggaaccaccgttcaaacatttgaactccagcatgcagtttctgaatatttattatgtgtgaaacttaatatctttagcaactggggacacccgaagtatacttgtttatatcgattcagggtccatggcacaccaggcaagcacatctagaagagttggtacagaaggccatgccacatgtccagaatattcaagaatgcttattctcttagatgataccgcacccataggaattgagaattgggagtgggaagaaaacctcaaagtggttcatacttgcctgtaaaaagtaaatgcattttactaataaaaaaatatggaagtaaattaaaaaaaaaaaaaaaaaa

SEQ ID NO: 394885 - DNA, 1000 bp, Homo Sapiens
gaaccttggaaaaggtgctgtgcctgaggaacaataccatttttaagcaagccttttctctcttaaggtttagaacttcaggagagaagcccatctattctgtagagagagacggtcttgcttgtggcccaggcttgagtacagtggcatgatcatagctccctgcagcctcgaactcctgggttcaagcaatcctcctgcctcagcctctggagtagctgggattacaggtggaattctactaagtatcagtcggccctacaagacaaagcccacccacggcattggaaagtacaagcacttaattaaagcagaagagcccaagaagaagaagggaaaagtggaagtgagagccattaatttggggacagattatgaatatggggttttaaatattcatctgactgcatatgatatgaccctggcagagagttatgcccagtatgttcacaacctctgcaactctctctccattaaagtcgaggaaagttatgcaatgccaaccaaaaccatagaagtgttgcagttgcaggaccaaggcagcaaaatgctcctggactcagtgcttaccacccatgagcgagtggttcagatcagcggtttgagtgctacgtttgcagaaattttcttggaaataatccaaagcagtcttcctgaaggagtcagactgtcagtgaaggagcacactgaagaagacttcaagggacgattcaaagctcgaccagaactggaagaactgttggccaagttgaagtagctactgtagaccctttcatgccagcagtggtcatattgagtgccaaagagaagagcttactgggtagttagagttcatcaggagacccaacccttagatttcataagtacccattcccatagccagtaatgtcctcactcctctgtggcttggctgtacttgccatttcttaccacttacctatgaggtaatgcttgttatcttccatctaataaaaatctgctgcagatgtgtatatgtaaa

SEQ ID NO: 394886 - DNA, 1000 bp, Homo Sapiens
ttttgttgttatcaggagagagaattttcttaatgtaataagttaggtactttggcaagtgaaatgggttctaggccaattgcaagtccttaggattccctggcagctagaaaccttggcactcccaaaagacagcttcagttaaaatgacagatgaacatgagtcttcaagtcaaaactactgttgtaccacgtccattgaatgtttggtgattcaagtctctgttattcaagaactgattctgtttttcctcctgtcaaaaccttggttgattttgactgtagtagcacatctggcaggaatatgacagaaaaaaattaagttaaaaatataatttctattcccctattttttctgtaaaaggctttatggggaagaagggaagaaggttgacatgagtagagatgatacttgcctctggatgacccagttgggttctcctttgactgccattcaccacagttgacctcattaggctccgaagtatgagaagagcttcattgccaagttagtgaaagaagcagatgatttacttttgctcgagtgggtctgtagacctcgggaggttagccatttctcttagagtttggtgtatgtattaagatacagcatgtatgtaggtatatataatacatatatgtgtgtatacatatatatatatttctggtttgtttaatatcttttaaaaaattttaatggaattttttgaacatgtacaaaagagaaagaatcctacgatgaactcccatgtatccatcatccagcctcaatagtgatcaacccatagcatattgtggttcatgttgacactcatccacctctttccttccccatctctccccattattttgagacgaatgagatcctgggatttcgtgaaaatattatgaatatcttatttgtgagaacaagatttcccaaagcatgatccccagaaacctagtcctgcaaaactactgcaaaaataaagtgttctaatctccaaaaaaaaaaaaaaaa

SEQ ID NO: 394887 - DNA, 1000 bp, Homo Sapiens; identical to SEQ ID NO: 220899

SEQ ID NO: 394888 - DNA, 1000 bp, Homo Sapiens
tttctttcctcacacccctggctgttatttgtgtggtgaaaattatccggcgaacagacaagactgaaattaaggaagccttcttagcggtgtccttggctcttgctttgaatggagtctgcacaaacactattaaattaatagtgggaagacctcgccccgatttcttttaccgctgctttccagatggagtgatgaactcggaaatgcattgcacaggtgaccccgatctggtgtccgagggccgcaaaagcttccccagcatccattcctcctttgccttttcgggccttggcttcacgacgttctacttggcgggcaagctgcactgcttcaccgagagtgggcggggaaagagctggcggctctgtgctgccatcctgcccttgtactgcgccatgatgattgccctgtcccgcatgtgcgactacaagcatcactggcaagattcctttgtgggtggagtcatcggcctcatttttgcatacatttgctacagacagcactatcctcctctggccaacacagcttgccataaaccctacgttagtctgcgagtcccagcctcactgaagaaagaggagaggcccacagctgacagcgcacccagcttgcctctggaggggatcaccgaaggcccggtatgaccagtgtcctgggaggatggacactaagccctgggcacatctgccaccctgacatcataacacaatagaaatggttttctgtagtgtatttttcatcagttgtttctcaaagtcatcgtacttctgcttctgtttcactgatggtgttcctgctactttaaatgtctacttccaacatccttgaatttgcaagtgaaggacaacaatctctgagagacgtgtggaagaggctgtgaaggtggggtttggggagcttggccgattcgtctatctgaaatgtttgctgtaacagccaccttcctatgttttcatggttgtaaaacataataaaacctcccacgtggaagacttgg

SEQ ID NO: 394889 - DNA, 1000 bp, Homo Sapiens; identical to SEQ ID NO: 220900

SEQ ID NO: 394890 - DNA, 1000 bp, Homo Sapiens; identical to SEQ ID NO: 284789

SEQ ID NO: 394891 - DNA, 1000 bp, Homo Sapiens; identical to SEQ ID NO: 220902

SEQ ID NO: 394892 - DNA, 1000 bp, Homo Sapiens; identical to SEQ ID NO: 115479

SEQ ID NO: 394893 - DNA, 1000 bp, Homo Sapiens; identical to SEQ ID NO: 220903

SEQ ID NO: 394894 - DNA, 1000 bp, Homo Sapiens
caataccatcatacacttcacactggagagaaaccttacacatgtaatgaatgtggcaaggtttttagtcgaagagaaaaccttgcacgtcatcatagacttcatgctggagagaaaccttacaaatgtgaagaatgtgacaaagttttcagtcgcagatcacaccttgaaagacataggagaattcatactggggaaaaaccatacaaatgtaaggtttgtgacaaggctttccggagtgattcatgccttgcaaaccatacgagagttcatactggagagaaaccttacaagtgtaataaatgtgcgaaggtttttaatcaaaaaggaatccttgcacaacatcagagagttcatactggagagaaaccttacaagtgtaatgaatgtggcaaggtttttaatcaaaaagcaagccttgcaaaacatcagagagttcatactgcagagaaaccttacaagtgtaatgagtgtggcaaagcctttactggacagtcaacacttattcaccatcaagcaatccatgggtgtagggaaactttacaaatgtaatgattgtcacaaagtcttcagtaatgctacaaccattgcaaatcattacagaatccatattgaagagagatctacaagtgtaataaatgtggcaaatttttcagacgtcattcataacttgtagttcatcagtgaactcatactggagagaaaccttacaaatatcatgactgtgacaaggtcttcagtcaagcttcatcctatgcaaaacatagaattcatacaggagagaaacctcacaagtgtgatgattgtggcaaagcctttacttcatgttcacacctcattagacatcagagaattcatactggacagatgccttacaaatgtaagggtggcaaggtcttcactctgtggtcattccatgcagaacatcagaaaattcatttttgagataattgttccaaataaaatgaatataaaaaatcataaaactttaaaaaaaaaa

SEQ ID NO: 394895 - DNA, 852 bp, Homo Sapiens; identical to SEQ ID NO: 115480

SEQ ID NO: 394896 - DNA, 1000 bp, Homo Sapiens; identical to SEQ ID NO: 115481

SEQ ID NO: 394897 - DNA, 1000 bp, Homo Sapiens; identical to SEQ ID NO: 115482

SEQ ID NO: 394898 - DNA, 1000 bp, Homo Sapiens; identical to SEQ ID NO: 284795

SEQ ID NO: 394899 - DNA, 1000 bp, Homo Sapiens; identical to SEQ ID NO: 115483

SEQ ID NO: 394900 - DNA, 1000 bp, Homo Sapiens; identical to SEQ ID NO: 220904

SEQ ID NO: 394901 - DNA, 1000 bp, Homo Sapiens; identical to SEQ ID NO: 220906

SEQ ID NO: 394902 - DNA, 1000 bp, Homo Sapiens; identical to SEQ ID NO: 284798

SEQ ID NO: 394903 - DNA, 1000 bp, Homo Sapiens
tgagtgcgttcattcattacagttcgtttttgctcaggcccgggggagttaggaaaggtagaccacagcagctttcgttccttccctttcccaaggaagccaaatggtccctgacaaaagatgactaaagatctgaaggactctagcagggttcatacatgaacctgctttccccagggtgctggcatattgctgcagatggaagtcaggtgggggtctgtcttctgcaaggagctcctactcgctctgaagagggagactgaggagctggcctgggaccatcttaggactcttctggtgctgggggcagggtgcatgggggttgcttatcgtctatttcagggggtggggaggggcatgtgcaggaagaggctgtttcggggtgggaaagggttgcttttcctttggggttaaggctgtgcagcacgttttacagcagtcctggaacagggctgtttttatattcttgtgaatgaaactgctcttgctaaatgattttctttttttggagggggggtgcactttcattttcaattgactttattaaatgaaaatccaaatcttccactcctccccctccattgtcccctcccccaccacacaccttccttcttgtccttgtgttgaagagggtatcttggggaatgagtttattatcttctccacgacctcacctatacatcccacacaccatcctccaggtctgggaaatatccatttttctggccagtcttagcatgttttcttaatgtcacattcccacgccaggcccaagagagattctatgacatatattatagagagaattctatatcaatatatataaatattagagattatgtacacaagggcatgggctcaaatgcccactgccagtcccccacccaggcttcagcatctctcttggcctggggaagtgggagggatgtgatgctggagaaggctacaggctgtgttcaatgacactaaacagaatgtggtggcaaaaaaaaaaaaaaaa

SEQ ID NO: 394904 - DNA, 1000 bp, Homo Sapiens; identical to SEQ ID NO: 115485

SEQ ID NO: 394905 - DNA, 1000 bp, Homo Sapiens
gaagcaccatcacaagcgttcccactcaccctcaggctctgagtcagaagaagaggagctgcccccaccatctctccggccccccaagcggaggaggcggaacccctcagagtcaggctctgagccctcttcctcacttgattcagttgaaagtgggggtgctgcccttggaggacggggctccccttcctcccatcttcttggagcagatcatggccttcggaaagccaagaaaccaaaaaagaaaactaagaagagaagacacaagtcgaatagtcctgagagtgagacagaccctgaggagaaagctggcaaggagagcgatgagaaagaacaagaacaggacaaggacagggagctccaacaggcagagctccctaaccgttccccaggctttggaatcaagaaggagaagacaggctgggacacgtcagaaagtgagctgagtgagggtgagctggagaggcggcggcggacactcctacagcagctggatgatcaccagtgacccaatgagctgttctctgcctcgggtctgtgtgaggccatggctcctgggccaccctcaccgtctgcctcagacttcttccttagtctggtctgtgtccactttttctaaagtaaccccacccccagcacaccattgttggcacctctcaaggttgctcttggtgttcaagggtcccctactccctggactagtgcagtccttgccctcagccccagaccagagatgggtggtatatgccatgtggggtgggtgatgccagtagataaaagtgtgagagaaggggtctccagggaagagtcacaggctgttggacacagcctgggtggcagagggcagggtcatcaccctctagcatcagtgcctgctcctgcctgccctggccctgaggctccaccacttcttcctccacccaggacctaatgtacgtgtgttttgttttttgttttttaaataacaatatttataacatggaaaaaaaaaaaaaaaaaa

SEQ ID NO: 394906 - DNA, 1000 bp, Homo Sapiens; identical to SEQ ID NO: 220907

SEQ ID NO: 394907 - DNA, 1000 bp, Homo Sapiens; identical to SEQ ID NO: 284799

SEQ ID NO: 394908 - DNA, 1000 bp, Homo Sapiens; identical to SEQ ID NO: 115486

SEQ ID NO: 394909 - DNA, 1000 bp, Homo Sapiens; identical to SEQ ID NO: 284801

SEQ ID NO: 394910 - DNA, 1000 bp, Homo Sapiens; identical to SEQ ID NO: 284802

SEQ ID NO: 394911 - DNA, 1000 bp, Homo Sapiens; identical to SEQ ID NO: 115488

SEQ ID NO: 394912 - DNA, 1000 bp, Homo Sapiens; identical to SEQ ID NO: 284803

SEQ ID NO: 394913 - DNA, 1000 bp, Homo Sapiens
ttcatgctgaaagccccttcatctcctctggtaccaccgtgcctcagacctcagtggatccccaagttctcacttatttgtgcctccaaattggaaaagcctgcagaatgagagatgtggttggttacttttcgatagatctggtgacttttatagatccaagcaccttggaacaacaggtgtgggcaaccggccttaacctcgcatatagtgaccagctggccctgactcaactcaccttatacctgacaaacggccatctggattgcagtttgagcaccctggaagtgccccgctttgttccaaaggaaaggaagaaaaccaaatgcatgagtgcgctgtcaatgccgatgctggcaaccagtcgctatgcagtgatgaccacccagctaagacacagcaatctctcactggttttccactatgtttttctccagatctgtagggcccatggcattggctatgatcttgaggaaaggcaaggaactgtttttatattatatgagcacctgaagagacacaagttgggaatgttaacaatcggcgaggatctccagggggtcctcatgacctttgctcgccatctcttcatcatccatcaagaaatatcagcacctaatatgcaaggcgagaccaattttaagaccaccattgctgatattgaaactattctaagagtaacaaaggaaaacaaaatgagatttgaagaggagcaacagtccaaagatgataaaaacctctctaaacccaagaaatgatcctggaatacagtacataacaatttggatcccagtctggaataaaaagggcaatttttttttctgttagaaataaaagccaggggaaattggtttgctttgtgtgctaggaggtgaatcagaacagattataatgaaatgctctttttaaaacattgtttattaagtgatcttattttatttattaaaccaaaacttatttgtgttttcaaaaaaaaaaaaaaaagaaaaaaaaaaaaaaa

SEQ ID NO: 394914 - DNA, 1000 bp, Homo Sapiens; identical to SEQ ID NO: 284804

SEQ ID NO: 394915 - DNA, 1000 bp, Homo Sapiens
aatactctgggtgtgtacattctcacgaccggcctgatccctgtgctggagaaagaacacgacccccgagtgataaccgtctcctcaggaggaatgttggttcagaaactgaacaccaatgatctccagtccgaaagaacaccatttgatggaactatggtctatgcacaaaacaagaggcagcaagtggttctgacggagcggtgggcccaagggcacccggccatccatttttcttccatgcatcctggctgggccgacaccccagacaggaatgagcaggagctgaggaaggtagtgggagaggcccagactgcctcaccactccccaggtttttggaaataatgatgcatgaaggtaaatgccagccacaaggacacagctcgaatgatctggaagcgtgttggagcagcggtggaggggagcagaattctcttccggattggcctcaccaactccatgacctcaggcagctcacctgggctctctgcagctctttcctcctctacaaacaagggaactgaaagcagcagcagccacagcacacaccccagggtgcacccgcggcgccaagaactggtctcagcgctgtctgcggattaacgcatttgtcctcaagcctctgtggagtggccactactgtctattatcacacccatttacagatgagggaactgaggcccagagaggctaagacctcccagccgggcctggccatggggttttgggaatcaggctctcacacactgctggcatggcctttctgaaaatcactatttatcagaagccttggaattcatcctaagaaataaagatagggaaaacaaggttgcttatcacagtgctggtggtaggagatgaagttaataaattatagaacacctgtgcaaaatctgttcagggctgaagactctgctgccaatcatgcctatggaaaaaccctgtgtgcactatatcattaaatgaagataccaagttcaaaaaaaaaaaaaaaaaaaa

SEQ ID NO: 394916 - DNA, 1000 bp, Homo Sapiens; identical to SEQ ID NO: 115490

SEQ ID NO: 394917 - DNA, 1000 bp, Homo Sapiens; identical to SEQ ID NO: 284807

SEQ ID NO: 394918 - DNA, 1000 bp, Homo Sapiens; identical to SEQ ID NO: 284808

SEQ ID NO: 394919 - DNA, 956 bp, Homo Sapiens; identical to SEQ ID NO: 57694

SEQ ID NO: 394920 - DNA, 1000 bp, Homo Sapiens
gcacacaagctgttgtcagtggccggagaagtagaccccgtgaaagagaccgggaacgagagcgagaccgccctagagataacagacgagacagagagcgagatagaggacgtgatagagaaagagaaagagagcgattatgtgatcgagacagagaccgaggggagagaggtcgatatagaagataatgggcttttggaagcactgattgtttaaagatacaaaaaatcttgtattttttttttgtgtgtgtttacaagtagtaaatttattttcagctgtctgcctatgaagttcattgtgtagaaggatttattatgaccccctttgttccaagcatgcagtatcataagaactggaaaaactcaaatccgccaaaaatccacagctgacagttgaattgacacttttattggggcagaatggaacagtccaagaatgtagatactgattctttctccataaatgttcttatagtgtgttcatcctagagttatttttttgtttgtttttttcctttttggatcttgattgataactgccatgatattttgctttgatgtgtttctacatgtagttgcacacggttcagtaaaaataatgctgctatcgagtatgcaaatattgaagtatgatggtttgactgtatggcagtgttgtagcagcctcttgtttttttccccattgcctctttttttaaaaaacttataaagtcactttttatttttcctcagtcttcaatgacgagagcaatattaagaagacattgctatctaatttttaatctttttaaatgaaaaattcctatgttcagtagcgtggttgatgctattgtttagccttcccctccaaattgtatacattggcttggaatgttcacaacttgcgtgcgtggcagcggaagacgattcccatattctacattgctactgttttgtataaaataaattggtaaagattgaaaaaaaaaaaaaaaaaaaaaaaaaaaaaaaaaaaaaaa

SEQ ID NO: 394921 - DNA, 1000 bp, Homo Sapiens; identical to SEQ ID NO: 284810

SEQ ID NO: 394922 - DNA, 1000 bp, Homo Sapiens; identical to SEQ ID NO: 284812

SEQ ID NO: 394923 - DNA, 1000 bp, Homo Sapiens
tgctgcctcttgacctgcttctgaaagtgccaccccatatgctcagggcccacattaaggaaatagaggctgagttagtgacagggtggcagtcccatagccttcctgctgtgattcttcgaaatctcaaagatcatgcatcagcaggaattgctgtgtcccagaggaaagtgcgtcagatcagtgatcctattcagcagatattaattcagctgcacaaaataatctatatcacacagcttcctccagctttgcaccacaatttgaaaagaagggttatagagagattcaagaaatccctcttcagccagcagagtaacccttgtaatttgaaatctgaaattaaaaagttatctcagggatctccagaaccgattgagcccaactttttcacagcagattaccatttattacatcgttcatccggtggaaacagcctgtccccaaatgaccctacaggtttaccaaccagcattgaattggaggaaggaataacatatgaacagatgcagactgtgattgaagaagtccttgaggaaagtggctattacaattttacatctaacaggtatcattcctatccatgggggaccaagaatcacccaaccaaaagatgaaaatgctgcattttgagtggacttgattttctcagtgaagttcaagttctggacttcagccgctattgcaagatgcccaaggattgggtgctgctagagggtgtggaaaagaccaagatgccatggggcctgcaggacttctttctgggggtcctgtgctggagtatatgacagctgcggtacttgagggcttcattgccagaacacattatatacaggatgtcagagctaccagtgtgctgctgggagaaaatgctgcaaaattcatcttttggagggtggggggaaaacccaaaaacaacaacaaaaaaactctcttacagaattttccttaacattaaaaaaaacttgtcatatttttcaaaggcaaaaaaaaaaaaaaa

SEQ ID NO: 394924 - DNA, 1000 bp, Homo Sapiens
gttagaggaagatgcaatcacacccaatgataagacccttttccctgatgttgattggttaatcggtaaccattctgatgaactcacaccatggatacctgtcattgcagccaggtcttcctacaattgccgcttctttgtcctcccctgctgcttctttgacttcattggaagatactcccggaggcagagtaagaagactcagtaccgggaataccttgacttcattaaagaagtgggcttcacctgtgggtttcacgtggacgaagactgcctcaggattccttcaaccaaaagagtctgtctcgttggaaaatccagaacatacccttcctccagagaagcttccgtggatgaaaagaggactcagtacattaagagcaggcggggctgccctgtaagcccacctggctgggagctttccccttctccacgctgggttgctgctggcagtgctggtcactgtgacggtcagcaagctctggacgccagggtcgggtgtgtaaccagggcctgggccgctgagcatggagcagggccccaggctgaaggaccctggctacctggatttcatcccagagaaaaggctgagcgtgtgaggaactgtgccgccctgccacgagattttattgaccaagtggttttgcaagtagcgaatttactgttaggtggaaagcaattaaacacaagaagttctcgaaatgggagtttgaagacctggaatgggggaggtaagctgtccaccatcttagggaggggctagcacgctcccaggcttgagggcaggaattcacgtcttcagaaccgacatgaaatggtgtggccctgtgactacacactttgaaaaagccattgatggtgggtgcataggctctcttcaagcaaattctttaaaattttccaaatagctcttataaacataaaggactttgttatttccaggggaaaaaaaaaaaaaaaaaaaaaaaaaaaaaaaaaaaaaaaaaaaaaaaaaaaaaaa

SEQ ID NO: 394925 - DNA, 1000 bp, Homo Sapiens; identical to SEQ ID NO: 220909

SEQ ID NO: 394926 - DNA, 1000 bp, Homo Sapiens; identical to SEQ ID NO: 284814

SEQ ID NO: 394927 - DNA, 1000 bp, Homo Sapiens; identical to SEQ ID NO: 220910

SEQ ID NO: 394928 - DNA, 1000 bp, Homo Sapiens
cagaatgagaatttctaccagttctcagtgaaaaataatacagatcagtttccacagttgcagtgcaattcagcccacattttgcaaaacaaaaccaatgataactgcgttctgcaggctgcaaggtgtgatgcagggatacaaacagagagtgaatctgtaatggaggaaaaattagatgttgccatacagtgtgatctaatttcaaaatgtacatgtagaagtgatgtttctctttgcaaccttgaaaggtgcagtggaaatattaaggcagataccactggagggcaggaaatccataagaacaactaatattctaaaatctctacctaggatgtagaatttcacttgcccttagaaaacaacagtaaatgttgaaaatttcattaacatgataagaaatgagaaaaagtagctaagcataagctgacagtgttcagggtgtatattcacggttcatgttaaaacattttaatattattaatgtatgtatttaatttgtatatagccatttccttaatagctttggtatatggtagagtttttagaaaataatatatttgtaaatgtactagcgtttttatgtgattattcagtatattacaatgatgcgctgttatttatgggttaaaatatgcttaattgcttccttccttgtagcatttattttaatattctttgcagttgcattttctggcaaaaatgttccctttcaagatatttaagatagaaaataatacctaatatattttatgtcctcattataataattttgttagctacttctctttaatattacagtcctatttaaaaattctagcattaatttgtagataacacatatcttctatttgcataacatagtttttttgttggtgctattaattcaaaggaaaatgttctgtaggattaaaagatgttttaatgtttttataaaataattgtttgaaattaaaaaatgatttatgttactaaaaaaaaaagaaaaaaaaaaaaaaaa

SEQ ID NO: 394929 - DNA, 1000 bp, Homo Sapiens; identical to SEQ ID NO: 284816

SEQ ID NO: 394930 - DNA, 1000 bp, Homo Sapiens; identical to SEQ ID NO: 115492

SEQ ID NO: 394931 - DNA, 1000 bp, Homo Sapiens; identical to SEQ ID NO: 220912

SEQ ID NO: 394932 - DNA, 1000 bp, Homo Sapiens; identical to SEQ ID NO: 220913

SEQ ID NO: 394933 - DNA, 1000 bp, Homo Sapiens; identical to SEQ ID NO: 116189

SEQ ID NO: 394934 - DNA, 1000 bp, Homo Sapiens; identical to SEQ ID NO: 284820

SEQ ID NO: 394935 - DNA, 1000 bp, Homo Sapiens; identical to SEQ ID NO: 284821

SEQ ID NO: 394936 - DNA, 1000 bp, Homo Sapiens; identical to SEQ ID NO: 284824

SEQ ID NO: 394937 - DNA, 1000 bp, Homo Sapiens
ggattaaatctgcctgcagggagacgtaaagctgccaacgttaccctgctcacatcactagtagagggagaagctgtccacctagccagggactttgggtacgtgtgcgaaaccgaatttcctgccaaagcagtagctgaatttctcaaccgacaacattccgatcccaatgagcaagtgacaagaaaaaacatgctcctggctacaaaacagatatgcaaagagttcaccgacctgctggctcaggaccgatctcccctggggaactcacggcccaaccccatcctggagcccggcatccagagctgcttgacccacttcaacctcatctcccacggcttcggcagccccgcggtgtgtgccgcggtcacggccctgcagaactatctcaccgaggccctcaaggccatggacaaaatgtacctcagcaacaaccccaatagccacacggacaacaacgccaaaagcagtgacaaagaggagaagcacagaaagtgaggctctcctcccgccccgcccctcccacgcctcaccagccccccgcgcgcccaccctccggcgggtgacagctccgggatcagcaacccttcctgctgctgctactgctgctgctgctgccgccgccgccgccgccgctgcccttgggtccccccgagtctccgggactgccctctcgactgtcagtggggcagcctctccgactctgcacccgcctcgacctccccacccgctcccacacccctgtgccctcatgtggagcctaagagaacagaacaggccgtgaagccagcagagaaaagttctgccaagtttgtgaacccttttttttttaaacaaaacaacaaatcaacaacagcaacaacaacaacaaaaattaaaaacttttttctaaaaaaaaagtgaaaataaaaaaaattatatgcgcttcatgggactgagtcaccaccttcccttacatacttcagttcagattgtagccatacttaaaaaaaaaaaaaaa

SEQ ID NO: 394938 - DNA, 1000 bp, Homo Sapiens; identical to SEQ ID NO: 284827

SEQ ID NO: 394939 - DNA, 1000 bp, Homo Sapiens; identical to SEQ ID NO: 220915

SEQ ID NO: 394940 - DNA, 1000 bp, Homo Sapiens; identical to SEQ ID NO: 220916

SEQ ID NO: 394941 - DNA, 1000 bp, Homo Sapiens
ttcagggctttccccatatcttctctcccccacctttatcgaggggtgctgctttttctccctcctcctcaagttcctttttgcaccgtcaccacccaacaccttccatgacacttccttgctttggccagaagccatcaggtaaggttggaaagagcctctgacctcccttgtttagttttggaaccatactcactcactctccaccagcctgggaaatgaatattgggtcctcagccctgccaccctctgctgtcatcagctgatgcattgtttttagctcaggttttgataaggtgaaaagaatagtcaccagggttactcagacctgccagctctcggagtccttggtggttgaacttggagaaagaccgcatgaagatacttgtaagcacacatgatccctctgaattgttttactttcctgtaactgcttttgcttttaaaaattgaagaagttttaaacagggctttcatttggtcatccttgcaatccattggggtctagtttggaatctgacaactggaacaaaaagaaccttgaatccggtgcatgccttggttttggtgctgctgctgcttcccaagatcctcagcagggattaagaaggaacccggtgtgcacagcagatccccgaaattggtgggcttgacctcctggcaaattgctgcgtctttccacttgctgttcaggaccactaaatgctgaaatgtggatgcataccgaaataaaagcaattcattgtgtactaaaggttttttttttttttttaatttagtatttgtgtaaaaccaccttttgaagcagcaactatcaagtctgaaaagcaattgatgtttccattaatctttttctggggggaaaaccttagttctaaggatttaacatcctgtaagtgaagtttaacataacagtattccataagcagcctttttattgtcagaccattgcctgattttaatataataaaaaaaaagtgtgcgttaatatttaaaaaaa

SEQ ID NO: 394942 - DNA, 1000 bp, Homo Sapiens; identical to SEQ ID NO: 115494

SEQ ID NO: 394943 - DNA, 1000 bp, Homo Sapiens; identical to SEQ ID NO: 284833

SEQ ID NO: 394944 - DNA, 1000 bp, Homo Sapiens; identical to SEQ ID NO: 115495

SEQ ID NO: 394945 - DNA, 934 bp, Homo Sapiens; identical to SEQ ID NO: 284836

SEQ ID NO: 394946 - DNA, 1000 bp, Homo Sapiens; identical to SEQ ID NO: 220918

SEQ ID NO: 394947 - DNA, 1000 bp, Homo Sapiens; identical to SEQ ID NO: 115497

SEQ ID NO: 394948 - DNA, 1000 bp, Homo Sapiens; identical to SEQ ID NO: 115498

SEQ ID NO: 394949 - DNA, 1000 bp, Homo Sapiens; identical to SEQ ID NO: 115499

SEQ ID NO: 394950 - DNA, 1000 bp, Homo Sapiens; identical to SEQ ID NO: 284840

SEQ ID NO: 394951 - DNA, 1000 bp, Homo Sapiens; identical to SEQ ID NO: 115501

SEQ ID NO: 394952 - DNA, 1000 bp, Homo Sapiens; identical to SEQ ID NO: 116340

SEQ ID NO: 394953 - DNA, 1000 bp, Homo Sapiens; identical to SEQ ID NO: 284842

SEQ ID NO: 394954 - DNA, 1000 bp, Homo Sapiens; identical to SEQ ID NO: 284843

SEQ ID NO: 394955 - DNA, 1000 bp, Homo Sapiens; identical to SEQ ID NO: 115502

SEQ ID NO: 394956 - DNA, 1000 bp, Homo Sapiens
ccaaagccttcttcggcagagctacgacccttcctctatggcccattctatcctatgctgcttccctttataaggacactcccactgttgtgctataatcatctcttggtatctccggactctgccactctgagccctccttacagcctagaaaaaatgacagatctcgtagctgtttgggatgttgctttaagtgacggagtccacaagatcgaatttgaacatgggactacatcaggcaaacgagtagtatatgtagatggaaaggaagagataagaaaagagtggatgttcaaattagtgggcaaagaaacattctatgttggagctgcaaagacaaaagcgaccataaatatagacgctatcagtggttttgcttatgaatatactctggaaattaatgggaaaagtctcaagaagtatatggaggacagatcaaaaaccaccaatacttgggtattacacatggatggtgagaactttagaattgttttggaaaaagatgctatggacgtatggtgcaatggtaaaaaattggagacagcgggtgagtttgtagatgatgggactgaaactcacttcagtatcgggaaccatgactgttacataaaggctgtcagtagtgggaagcggaaagaagggattattcatactctcattgtggataatagagaaatcccagagattgcaagttaatgaattttcatcttaagaagtaaagatcaggactttttaattactgtggtaattaaatgtgttcagtatgtacttatcagtacatttagtctgcaatgttttaattttttaaaaagttacatgaaactaacattccaagggtcaggaaaaaaaccaattatgtatagtcataaaaattacaatttatgatgcaaataatgtaaaatgttttaaagacaaatggcaaataagatatggaccaaagtcactaatgttttacaacagtaacctttactataataaatacttttaaaaaaaaaaaaaa

SEQ ID NO: 394957 - DNA, 1000 bp, Homo Sapiens; identical to SEQ ID NO: 220923

SEQ ID NO: 394958 - DNA, 1000 bp, Homo Sapiens; identical to SEQ ID NO: 115503

SEQ ID NO: 394959 - DNA, 1000 bp, Homo Sapiens; identical to SEQ ID NO: 220924

SEQ ID NO: 394960 - DNA, 1000 bp, Homo Sapiens; identical to SEQ ID NO: 115504

SEQ ID NO: 394961 - DNA, 1000 bp, Homo Sapiens; identical to SEQ ID NO: 284847

SEQ ID NO: 394962 - DNA, 1000 bp, Homo Sapiens; identical to SEQ ID NO: 284848

SEQ ID NO: 394963 - DNA, 1000 bp, Homo Sapiens; identical to SEQ ID NO: 115505

SEQ ID NO: 394964 - DNA, 1000 bp, Homo Sapiens; identical to SEQ ID NO: 115506

SEQ ID NO: 394965 - DNA, 1000 bp, Homo Sapiens; identical to SEQ ID NO: 115506

SEQ ID NO: 394966 - DNA, 1000 bp, Homo Sapiens; identical to SEQ ID NO: 284852

SEQ ID NO: 394967 - DNA, 1000 bp, Homo Sapiens; identical to SEQ ID NO: 284853

SEQ ID NO: 394968 - DNA, 1000 bp, Homo Sapiens
ggagaactgtactgctgcctctttcccacctgcctcatctcaatccttgagcggcaagtttgaagttcttctggaaccatgcaaatctgtcctcctcatgcaattccaaggagcttgctggctctgcagccacccttgggccccttccagcctgccatgaatcagatatctttcccagaatctgggcgtttctgaagttttggggagagctgttgggactcatccagtgctccagaaggtggacttgcttctggtgggttttaaaggagcctccaggagatatgcttagccaaccatgatggattttaccccagctggactcggcagctccaagtggaatccacgtgcagcttctagtctgggaaagtcacccaacctagcagttgtcatgtgggtaacctcaggcacctctaagcctgtcctggaagaaggaccagcagcccctccagaactctgcccaggacagcaggtgcctgctggctctgggtttggaagttggggtgggtagggggtggtaagtactatatatggctctggaaaaccagctgctacttccaaatctattgtccataatggtttctttctgaggttgcttcttggcctcagaggaccccaggggatgtttggaaatagcctctctacccttctggagcatggtttacaaaagccagctgacttctggaattgtctatggaggacagtttgggtgtaggttactgatgtctcaactgaatagcttgtgttttataagctgctgttggctattatgctgggggagtcttttttttttatattgtatttttgtatgccttttgcaaagtggtgttaactgtttttgtacaaggaaaaaaactcttggggcaatttcctgttgcaagggtctgatttattttgaaaggcaagttcacctgaaattttgtatttagttgtgattactgattgcctgattttaaaatgttgccttctgggacatcttctaataaaagatttctcaaacatg

SEQ ID NO: 394969 - DNA, 1000 bp, Homo Sapiens
tgcattcacagcaagagcatttcgtgggaatcctgctgctgtttgcctcctagaaaatgaattggatgaagacatgcatcagaaaattgcaagggagatgaacctctctgaaactgcttttatccgaaaactgcacccgacagacaactttgcacaaagttcctgctttggactgagatggtttacaccagcgagtgaggtcccactctgtggccatgccaccctggcttctgcagctgtgctgtttcacaaaataaaaaacatgaatagcacgctcacgtttgtcactctgagtggagaactaagggccagacgagcagaggatggcatcgtcctggacttgcctctttatccagcccacccccaggacttccatgaagtagaggacttgataaagactgccataggcaacacactggtccaggacatctgttattctccagatacccaaaagctcctcgtccgcctcagtgacgtttacaacaggtcgtttctggagaacctgaaagtgaacacggagaatctgctgcaagttgaaaacacagggaaggtgaaagggcttattcttacccttaaaggagagcctggtgggcagacccaagcatttgacttttactcaagatattttgcaccgtgggttggtgtggctgaagacccagtgacagggtctgcacacgctgttctcagcagctactggtcccagcatctggggaagaaagaaatgcatggtaggacagctctttaccaatttcttttttatttgcctaattcgaagctagtgttccttctcatatgtactatccccttgaaaatgtaatacaatgtcatgtatcacccatgtgaaaatgaaaggttttaaaattccttcacccttaaagatcctccaccccaaacagccttcacctctgcctcccccaacatacagagactgtacagacacagatacagtaactgcccaataagtgtttgttgaataaaatagctgtataactttgaaaaa

SEQ ID NO: 394970 - DNA, 1000 bp, Homo Sapiens
agtataataaggatggagctacgctctttgcgaccgtaggctacatgacagtctataattactatgtgtacccagacaaaacccggccacgtgtaagtcagatgctgattttgactccatttcaaggtcaaggccatggtgctcaacttcttgaaacagttcatagatactacactgaatttcctacagttcttgatattacagcggaagatccatccaaaagctatgtgaaattacgagactttgtgcttgtgaagctttgtcaagatttgccctgtttttcccgggaaaaattaatgcaaggattcaatgaagatatggcgatagaggcacaacagaagttcaaaataaataagcaacacgctagaagggtttatgaaattcttcgactactggtaactgacatgagtgatgccgaacaatacagaagctacagactggatattaaaagaagactaattagcccatataagaaaaagcagagagatcttgctaagatgagaaaatgtctcagaccagaagaactgacaaaccagatgaaccaaatagaaataagcatgcaacatgaacagctggaagagagttttcaggaactagtggaagattaccggcgtgttattgaacgacttgctcaagagtaaagattatactgctctgtacaggaagcttgcaaattttctgtacaatgtgctgtgaaaaatctgatgactttaattttaaaatcttgtgacattttgcttatactaaaagttatctatctttagttgaatattttcttttggagagattgtatattttaaaatactgtttagagtttatgagcatatattgcatttaaagaaagataaagcttctgaaatactactgcaattgcttcccttcttaaacagtataataaatgcttagttgtgatatgttaatgtgtgatgatatgattcttaaatacttacaataaacctcattcttaaatacttaaaaaaaaaaaaaaaaaaaaaaaaaa

SEQ ID NO: 394971 - DNA, 1000 bp, Homo Sapiens; identical to SEQ ID NO: 115507

SEQ ID NO: 394972 - DNA, 1000 bp, Homo Sapiens; identical to SEQ ID NO: 115507

SEQ ID NO: 394973 - DNA, 1000 bp, Homo Sapiens
tgctaaaagatgacagacttggacaacatgtcccaacattacatcccacttccgaagaactgaccattgctggcatgacgtttacaacttttgatctgggtggacatgttcaagctcgaagagtgtggaaaaactaccttcctgctatcaatggcattgtatttctggtggattgtgcagaccacgaaaggctgttagagtcaaaagaagaacttgattcactaatgacagatgaaaccattgctaatgtgcctatactgattcttgggaataagatcgacagacctgaagccatcagtgaagagaggttgcgagagatgtttggtttatatggtcagacaacaggaaaggggagtatatctctgaaagaactgaatgcccgacccttagaagttttcatgtgtagtgtgctcaaaagacaaggttacggagaaggcttccgctggatggcacagtacattgattaacacaaactcacattggttccaggtctcaacgttcaggcttactcagagatttgattgctcaacatgcataacttgaattcaatagacttttgctggttataaaacagatgttttttagattattaatattaaatcaacttaatttgaatgagaattgaaaactgattcaagtaagtttgagtatcacaatgttagctttctaattccataaaagtacttggtttttacagtttataatctgacatcaccccagcgccatttgtaaagagcaactttccagcagtacatttgaagcactttttaacaacatgaaactataaaccatatttaaaagctcatcatgttaaattttttatgtacttttctggaactagtttttaaattttagattatatgtccacctatcttaagtgtacagttaataattagcttattcaatgattgcatgatgccttacagttttcaataactttttttcttatgcaaacgtcatgcaataaaacaaactctaatgtttggcaaaaaaaaaaaaa

SEQ ID NO: 394974 - DNA, 1000 bp, Homo Sapiens
caagatgaagacttcagccagtgtcagcgacatcattgtggtggccaagcggatcagccccagggtggatgatgttgtgaagtcgatgtaccctccgttggaccccaaactcctggacgcacggacgactgccctgctcctgtctgtcagtcacctggtgctggtgacaaggaatgcctgccatctgacgggaggcctggactggattgaccagtctctgtcggctgctgaggagcatttggaagtccttcgagaagcagccctagcttctgagccagataaaggcctcccaggccctgaaggcttcctgcaggagcagtctgcaatttagtgcctacaggccagcagctagccatgaaggcccctgccgccatccctggatggctcagcttagccttctactttttcctatagagttagttgttctccacggctggagagttcagctgtgtgtgcatagtaaagcaggagatccccgtcagtttatgcctcttttgcagttgcaaactgtggctggtgagtggcagtctaatactacagttaggggagatgccattcactctctgcaagaggagtattgaaaactggtggactgtcagctttatttagctcacctagtgttttcaagaaaattgagccaccgtctaagaaatcaagaggtttcacattaaaattagaatttctggcctctctcgatcggtcagaatgtgtggcaattctgatctgcattttcagaagaggacaatcaattgaaactaagtaggggtttcttcttttggcaagacttgtactctctcacctggcctgtttcatttatttgtattatctgcctggtccctgaggcgtctgggtctctcctctcccttgcaggtttgggtttgaagctgaggaactacaaagttgatgatttcttttttatctttatgcctgcaattttacctagctaccactaggtggatagtaaatttatacttatgtttccctcaaaaaaaaaaaaaaa

SEQ ID NO: 394975 - DNA, 777 bp, Homo Sapiens
gcagccattttaattcatatttgagtgggcggtggcgattggtgttggcggtctggctcagctgggcagggggtaactttactgatttgggggtggtttttagtttaatttttcttttctagcttcccatcgacggtcagtgcgcacgttgtaatcagctgaggccatgtcaggagacggagccacggagcaggcagctgagtatgtcccagagaaggtgaagaaagcggaaaagaaattagaagagaatccatatgaccttgatgcttggagcattctcattcgagaggcacaggtttagtgatataggattacatttccttctctatgggtccaatcacactacttggttctgcagtgaataatattttcataatcctaacattgtaaatgctgtttattggttttcaattttagaatcaacctatagacaaagcacggaagacttatgaacgccttgttgcccagttccccagttctggcagattctggaaactgtacattgaagcagaggttactattttattttattttttcttatatcagtattgcagcattcactgtagtgatagaaaacaagttaggaacatagccaattaggacaaggaggatttaaatgtgtcttacctttattttgtaaaataggtataaaggagtaattaaaatgaatttttgaaatttgggtcttttacaagctgatgattgttgcattttggagttgcaacaacattaaaacagtttcaatggtaaaaaaaaaaaaaaaaaaaaaaaaaaaaa

SEQ ID NO: 394976 - DNA, 1000 bp, Homo Sapiens; identical to SEQ ID NO: 284856

SEQ ID NO: 394977 - DNA, 1000 bp, Homo Sapiens; identical to SEQ ID NO: 284857

SEQ ID NO: 394978 - DNA, 1000 bp, Homo Sapiens; identical to SEQ ID NO: 115509

SEQ ID NO: 394979 - DNA, 979 bp, Homo Sapiens
ggagcgcgccagagactggcgggcagctccgcccgcggccgggatgcactaggcaaagccagctgggctcctgagtccggtgggtacttggagaacttattacgtctagctggaggattgtaaatgcaccaatcagcatgctgtgtctagctcaagattttctccatccccttattttgggccagtggctgtcattacatatgagaactcaagctccatgaggagatgtttcattgtcaagagcagtcatgatggcctgcactccacacaatgcaacagagtgaaggagcaggttctggttctttggtgtagtcctgaagcttcctaagaaagttcacatcaggtgatggataggagcaaccctgtaaaaccagccttagactatttttcaaacaggctggtgaattaccagatctccgtcaagtgcagtaaccagttcaagttggaagtgtgtcttttgaatgcagaaaacaaagtcgtggacaaccaggctgggacccagggccagctgaaggtgctgggtgccaacctctggtggccgtacctgatgcacgaacaccccgcctacctgtactcgtgggaggatggtgattgctcacaccaaagccttggacccctcccagcctgtgacctttgtgaccaactccacctacgcagcagacaagggggctctgtatgtggatgtgatccgtgtgaacagctactactcttggtatcgcaactacgggcacctggagttgattcagctgcagctgcccgcccagtttgagaattggtgtaagacatcacaatcccattattcagagcgcgtatggagtggaaacgcttatagggtttcaccaggatccacctctgatgttcagtgaagagtaccagaaaagtctgctagagcagtaccatctgggtctggatcaaaaacgcagaaaatacgtggttggagagctcatctggaattttgccgatttcatgactaaccagt

SEQ ID NO: 394980 - DNA, 1000 bp, Homo Sapiens
tctggaggagggtgtcacaagtgaagagtttgataaattccttgaagaaagagccaaagctgctgaaatggttcccgacctcccctcgccccccatggaggctcctgccccagcctcaaacccttctggccggaagaagccagagcggtcagaggatgccctcttcgccctgtgagcagctctgtggtttgcctccccagatggcgggtccccgctcgcaccccgtggacaccgggcactggccactcctacatccccagctccacacggcctgcacacctgtgtttccatggaaatgccaccgtgtctgctcccaggcctcccactagtcaggaccagcttcagccacttcttttctctgagtggtgggacaactgcagccagagactctctcccctcccaccatgggcccctctgcccatgtttcctcccaggaagagcgggcagagtggcccagccccaggcagtgcttcctgagcagaccacccggactgtctttcctccacccgcccatggagaaagagcacgcccggccccgccctgtgctcacctctgcctggctcagcgaccttctcaggcattctgccctcctgggcccctctctccctgaaggggctttgtggcatctctggaagagcagggtgtgctgcactcatgggcctggtctcactccttggacttgtcaccttgtgacatttggcttatcagcatttgagaaggctctgctgggtctccatggtgggggtctctcaccttcttgaccctctctccatcattcagctgccagcccaggcttcacacccaagctggctcagcagccgagcctggcaccgagggtccctgcaggctccctgggcagggagagggccaaggacaattgggagggcagcaggcagcccgcagatggtggccatgtggcacgctgctgagacgacactaccaataaaccaaactgccacgcacacactgcaggctcacacccgcaaaaaaaaaaaaaaaa

SEQ ID NO: 394981 - DNA, 1000 bp, Homo Sapiens; identical to SEQ ID NO: 220930

SEQ ID NO: 394982 - DNA, 1000 bp, Homo Sapiens
tatggcctgagcagcatgcaaggatggagagtggaaatggaagatgcacacacagctgttgtaggtattcctcacggcttggaagactggtcattttttgcagtttatgatggtcatgctggatcccgagtggcaaattactgctcaacacatttattagaacacatcactactaacgaagactttagggcagctggaaaatcaggatctgctcttgagctttcagtggaaaatgttaagaatggtatcagaactggatttttgaaaattgatgaatacatgcgtaacttttcagacctcagaaacgggatggacaggagtggttcaactgcagtgggagttatgatttcacctaagcatatctactttatcaactgtggtgattcacgtgctgttctgtataggaatggacaagtctgcttttctacccaggatcacaaaccttgcaatccaagggaaaaggagcgaatccaaaatgcaggaggcagcgtgatgatacaacgtgttaatggttcattagcagtatctcgtgctctgggggactatgattacaagtgtgttgatggcaagggcccaacagaacaacttgtttctccagagcctgaggtttatgaaattttaagagcagaagaggatgaatttatcatcttggcttgtgatgggatctgggatgttatgagtaatgaggagctctgtgaatatgttaaatctaggcttgaggtatctgatgacctggaaaatgtgtgcaattgggtagtggacacttgtttacacaagggaagtcgagataacatgagtattgtactagtttgcttttcaaatgctcccaaggtctcagatgaagcggtgaaaaaagattcagagttggataagcacttggaatcacgggttgaaggtaagacaaatgctttttaaaaatatagacaggccaggcacggtagctcatgcctgtaatcctagcacttttgtcgcctgggcgacacaccaaggctctgtctca

SEQ ID NO: 394983 - DNA, 1000 bp, Homo Sapiens; identical to SEQ ID NO: 115510

SEQ ID NO: 394984 - DNA, 1000 bp, Homo Sapiens; identical to SEQ ID NO: 284864

SEQ ID NO: 394985 - DNA, 1000 bp, Homo Sapiens; identical to SEQ ID NO: 115511

SEQ ID NO: 394986 - DNA, 1000 bp, Homo Sapiens
agatgcatatgtgttgcattaggtgaaaagaaaaactgccagggagttataagaggaaaaactctcagagctcacactgagctgggagaagtttgaatgccaaccagttaaagtggaaagatcttgaacatgtggggcattgagtagagactcagaaaggttgtactttcataagagatccaaactggagctagactaaaggctaatgtataccaattttaagaaagcttaaaaataagccttgagagactcaagatgatctctaagtaacctcattttatctgccaaataaaaatagaacattccttaaaggaagaaaacaaaatcgaggcaggaaattgcctgaggctggagaaaaaatgacaggaaggagaaaggagtgatgaaaaattcctcagagggctgggcttggtggctcatgcctgtaatcctggcactttgggaggccgaagtggatggattatctgaggtcaggcattcgaagccagcctggccaacatggtgaaaccccgactctactaaaaatacaaaaattagtcgggtatgatgggcaggtgcctgtaattccagctacttgggaggctgaggcaggaaaatagcttgaacccaggaggcagaggttgcagtgagctgagattgcatcactgtgctccagcctaggcaacagagtgagactttgtctcaaaaaaaaagaaaaacaaagaaaaattcctcagagctcatacaaggctgggtagaatatgtgtttcaacaatagtggatcttttaatatagtacatggatcattgagtagagtcttcagcaagatattggcaaagtagggttagggttaggttagggagatgggaatagactgaagactactctggacttgccctaacagagtttaagagcaacatttgaaaggatcaaactgatttcaagtaacttgagtgcatccaaggggagaaaacccatcaaaataaaaataaaaactacaataaaatccaaaaaaaaaaaa

SEQ ID NO: 394987 - DNA, 1000 bp, Homo Sapiens; identical to SEQ ID NO: 284866

SEQ ID NO: 394988 - DNA, 1000 bp, Homo Sapiens; identical to SEQ ID NO: 115512

SEQ ID NO: 394989 - DNA, 1000 bp, Homo Sapiens
tcacaggcagggccacactcttactcgttttgatctcatgaggttacatctgccagtggcgttcagggccagttagataaagttcatcttgtttggattggagagactttttttttttttttttttgagacagggtcttgctctgtaacctaggctcaagtgcagtgcagtggtgcagtcatggctcaccgcagccttggtctcctgggctcaagtgatctttctacttcagcctcctcaatagctgggactacaggcacacaccaccacccccaggtaattaaaaaatttttttttgtagagacagggtctcactatgttgcccagtctgggagaccacattctttaacatgaatattttgtaaatagtccaagaagatctagaggaaagctgaattccttcatctgatttttgccactgggctgcctcccattgtctggctaagtcttcatgggaggcctttaagaaaagctgtgacaaatacctttgtttcccactgcctaggttacataagtagttggcttttccagcctagactcttatattgttgcttgtaagagggcccttctttgcagatttcttttttttttcatctatgctttcaaataggcagatgctagcctgagatcatctctttattgaggtagtttgcccaaaaacagcaaggaacagccaatacctgccaactttctaggtttttccaaccaattctcttacagaaaatctataaatatcttagaggtatgtttcttagtttcccaacatataatgggaaaattcatcatttatattattacttttaactgaagtatgttgttatcagagaacttggtctgtgtcatattaatcctttgccatttgagaagcatacagttttaaagtttatatctccaaaaggatattttgtaaaaatttaacccctttgactcttagtcttctcatttgtgaaaggtaaataataaagaatttctgttcctagtaagaaaaaaaaaaaaaaaa

SEQ ID NO: 394990 - DNA, 1000 bp, Homo Sapiens
agtcatcaagcgtgcatggcagaagtggagaatcagaatggcctgccttgctgctaaagagctggatggtgtggaagaaaaacacttctctcaagctccctgttccctgagcacctcgccgctgcagaccaggctcctggaggcaataatccgcctctggcccctgggactggtcctggccaatacggctatgggtgtaggcagctttcagaggaaattagtggtctgggcttgcctccagctccccaggggcagccccagtagctacactgtccagacagcacaagaccaggctggtgtcacgtccatccgagcgctgcctcagggatcgataaagtttcactgcagaaagtctccactgcggtatgctgacatctgccctgaaccttcaccctacagcattacaggctttaatcagattctgctggaaagacacaggctgatccacgtgacctcttctgccttcactgggctggggtgatccttggtgcctttgtttccacaaggccttttcctgccccctgccttgccaaagacatttaatcagcacacagctgccagactattcccacagtgctccaaatgcacatgaacaacagtgacggctccagccttcgacccagagccccgtgcccagtgcgtcagtgggcctggggttccaggctacatcaagcactgatggtgtcagggctggtagttaccaaatcagggttaagaaacatcagggccacatttcactaccttcacagatcaaactcagcagcagtcatgactgtctgtcactacactggggatcccaattccacataagcacttttggaagaaaacagccaaagttggcctaaaattggcgctggaatttgggctgggaaaaatcttgtggttatttcctttaaaaaggaacaaaactttagtatttaattagttgatttatttaatgtaatttcaaacaattaaattatgaataatgcaatgtaaaaaaaaaaaaaaaaaaaaaaaa

SEQ ID NO: 394991 - DNA, 1000 bp, Homo Sapiens; identical to SEQ ID NO: 220933

SEQ ID NO: 394992 - DNA, 1000 bp, Homo Sapiens; identical to SEQ ID NO: 284868

SEQ ID NO: 394993 - DNA, 1000 bp, Homo Sapiens; identical to SEQ ID NO: 284870

SEQ ID NO: 394994 - DNA, 1000 bp, Homo Sapiens
cagccggggggtggggggcgggacgggggtggcctggcccccccgccaggcagctgtagccccagcctcagccccagctccaacagaagcagcccggccacccactccccgtgaccgcccacgccacatggacacagccctcgccctccgccccggcttttctctgcctttctaccgaccatgtgaccccgcaccagccctgcccccacctgccctcccgggcagtactggggaccttccctgggggacggggagggaggaggcagcgactccttggacagaggcctgggccctcagtggactgcctgctcccacagcctgggctgacgtcagaggccgaggccaggaactgagtgaggcccctggtcctgggtctcaggatgggtcctgggggcctcgtgttcatcaagacacccctctgcccagctcaccacatcttcatcaccagcaaacgccaggacttggctcccccatcctcagaactcacaagccattgctccccagctggggaacctcaacctcccccctgcctcggttggtgacagagggggtgggacaggggcggggggttccccctgtacataccctgccataccaaccccaggtattaattctcgctggttttgtttttattttaatttttttgttttgatttttttaataagaattttcattttaagcacatttatactgaaggaatttgtgctgtgtattggggggagctggatccagagctggagggggtgggtccgggggagggagtggctcggaaggggcccccactctcctttcatgtccctgtgccccctccttaccccgcaggacgggcctacaggggggtctcccctcacccctgcacccccagctgggggagctggctctgccccgacctccttcaccaggggttggggccccttcccctggagcccgtgggtgcacctgttactgttgggctttccactgagatctactggataaagaataaagttctatttattct

SEQ ID NO: 394995 - DNA, 1000 bp, Homo Sapiens; identical to SEQ ID NO: 220934

SEQ ID NO: 394996 - DNA, 625 bp, Homo Sapiens
catccaaagctggactgggggaggtaggtcgggcttcctgtcccttcctcaggttttcatggtctgcagcttctcagaatcacaaaaagaaccaagaaggcctttgtgctcctgttccactagaccaagtagagtcttccccacccacaacttcatttcctttctccatccctccatctccaacctgggtccctggtggcccactgcccccaccccagagatgagtcgccagtgccatgccctgcaggaggatatgcaaacccacagcaagcagctggaggaagaagtcaaaggccttcgggggcagctagaggcatgccaaagggaggctgcagctgcccgggaagaggctgaacaagctctcggagagcgggaccaggccctggctcagcttcgggcccacatggcagacatggaggcgaagtatgaggaaatcttacacgacagtctggacaggctcttggccaagctgagagccatcaagcagcagtgggatggggcagcactgagacttcacgccaggcacaaggagcagcaacgccagtttggactcaccccccctggatctttgaggccaccagcccctagtctctagtgttctctgaggccccagcaataaagtgtc

SEQ ID NO: 394997 - DNA, 1000 bp, Homo Sapiens; identical to SEQ ID NO: 284872

SEQ ID NO: 394998 - DNA, 1000 bp, Homo Sapiens
cttgagaggcccagtaaggcagagtgaaaaccagaacgcttggcacctatcagttagcacaggatccttccctggaacatcagcatcccttataagtgtgtctaacggccaactcgtagacagagctattgttaatacactgttctgagtatccctctgtgaacaccttcatctggttgatacaggaaaattaaggaagacaaagttttgggaaagtgattgaaatcgtggaataatcaaagcaaatcaatggcagcttgtgtttaaaattaaaaaccaactgtcaagcatggcatttacctaaagtaatttccaaaagtaatcaacagagtgaacaacacccagtgggccaggaccatgtcaacgttggctcattttcagaaacaacatggtgtcagggctccatgttcatggacaccatgaggggagtctcctagcaatgaccctcttctctcctgcaggaagtccaaggtcctttgcatggcagtcttatccccaaatggcatttgctttcgacccatggtatttccatattccatgaagaaaactttaaaaatataggcaaatcaccctgcaagtatccagagagtttccagggggtttctcacacacacacacacacacacacacacacacatgtttagtggggatcttttaggtcaatacatatagatctacatcattattagttgttgcttggtgggccactgcatgaatggttaataattgtttaatttttcctagttagacaataaagatttttaaagaatatatctttgcatacttgcttatttatttgattaggataaattcctgaaattggaattgttaaaccaagaaatacgcatatttttaaggcttttgttatgttttgtcaaatgatcctcagaaagaatgtttattaattcacatttccactagcactacacgatagaactattgggtattttttatgctgttacctttgctggttttataaataaaatattctcttgttctt

SEQ ID NO: 394999 - DNA, 1000 bp, Homo Sapiens
tgtgtactgtgttcacatcgagttggccccaccgctgagtgggttattgatgatctcaagagtccagtagaaatgaagggtagaaacttagccacatcctggtttgtgttttgcctaacagaggggtttcactttcctctttggtaagatgaatatgcttgataatagaatagcattaaggttggcttttttctccctcaaatgattaaactgtagtttcatatgtaaatgccagtaaattagaatcattctagtagggaagataaagtaaataagtaaaaatatagtatgttagtaggaaatcgtgctagagagagagagctcaagcaggacaggaggggcctagagattgcttgggatttgatgaagagacaggactgttttagagaggctgctcacggcagtgcctctgagcaggtagcactggagccgatcctctgctgcgatgaggtggcaagccaagaacatcatgagggagggaagggcagtcccagaagagagagcacagtgcaggtgccaggtggggaccacgggacactggaactgccttggtgtgtttatttccaaatagtgtctggcattacactgagatgaggagacttttttgtttttcattttttgtttttttttcccggggtaggggtgcatattggatttcttcaggagattcagcctcttgaaaaatatgaaatatagacaagtatatatacataaagatatatttgagtattttaaactttatatagccaagtatcttaaactctgcacacttgaatttttaatcctcgtgtatatccattatgattatttctattagttccagtttgaggttggtgatgatattgtcatagaagctttgtcaggcttcacattgtagcagctggtcttgaaggtggggcatatccttgttcaatgtgactactttagttgcctgtccaatatgaagtagaaaagcagatttctggattacagtatttgtcaacatagaatttgccgattt

SEQ ID NO: 395000 - DNA, 1000 bp, Homo Sapiens
tgcaggatcctacaaagcccagataaaccaaaggaattttgaagtcaccactgaggaggaattcaccctgttcgtctatgcaccatttattgaaaagttgtccgtccacgtcatcgagggtgaccaccgcacactcctggagggcagcggcctggagtccatcatcagcaccctggctgagccacgtgtgagcgtgcgggagggctaggccctcgcccccacctgccactggagaccgctccgccatccccacctcaccgccgcgcagcagagctggaagggtcctgccgatgggaccctgccaggcccagtgccactgccccccgaggctgctagacgtgggcgttaggcgtgtcccacccacccgccgcctcccatggcacgtcgggaacaccggagccgccaacttggagactcctggtctgtgaagagccgctgacgcccgcaggaaccgggctgggccttgtgtgccagtggggtttgtgcttggtctttctccgcttggatttgcttatttattgcattgctggtagagactcccaagcctgtccaccctgcaaagactcctcgggcagcatgcgggtcccgcacactgcacccatttcctggatgtcccctgcaggcgcgggaggccatccgggcctgctggctgcggccccctctcagccaggcctggctcagcccactgcgtgggaggtcaccggccactccccgaggagctgggatccccgggatgcaggcccacagtgcggggctgcacccatgatgcggagctggcctccaaccctgcgggccgcgccaggcaccaactcagtgtttgtcagtgtttgtttttccaagaaatggttcaaattgctgctcagatttttaaatttactgtagctgccagtgtacacgtgtggaccccattttatttttacaccaatttggtgaaaatgctgctttcctcagcctccccacaattaaactgcacatggtctctaaaaaaaaaaaaaaaaaa

SEQ ID NO: 395001 - DNA, 1000 bp, Homo Sapiens; identical to SEQ ID NO: 284874

SEQ ID NO: 395002 - DNA, 1000 bp, Homo Sapiens; identical to SEQ ID NO: 115513

SEQ ID NO: 395003 - DNA, 1000 bp, Homo Sapiens; identical to SEQ ID NO: 115515

SEQ ID NO: 395004 - DNA, 1000 bp, Homo Sapiens
gatgaaacagagcacacgggtcaggaatcttatgtctggaagatgtaccaagaaaggtgttgggatttcttcccagccggtgactgctttcgtaaacaatatgaagatcagcttggataaatctgaatcaaagaagcgcgacaattctggacagtcaacttcccatgaaataaagtcccctttttacagttctgcaacatatctgaaatgtgacattttctaaatgcctcccttaaaaaaaaaactgctgaaaatctgtgctattttgaaattgatttggctttttgtgcctaatggacatacactgtgggagagaacctgtcaaaatgtcgaagaaggaaggcgaagaatcaagtaatctctaggcaaatgccttcaagttttccagttctgaggtaactagttcagtttgttgggatggaagcatgaaggaaagggctagagaagtatgaaatctcgaatgtgtaatacctgaaaatttaaacacttgaatgtcatcatggtatccaacttgtgactcatagggtctgaactcactccaaaagataataactgcagtctaatttttcccatggtacttgctagtgactgtatccagaaaagctttaagcagttaaagaaacagaaaaaaaccgacactttgtcgacactgaaatatcgattaagtgccttaaaacctctttagacatagctatgcaagttttttatgtttgtgttccagaaggacagttccattcattagttgtgatcttccgtcttactttatgaaactgcacttgaaggttattcatacaagtttttttagtaacagctgtcagtcaactgctgttattagaagaaaagtactgtactgaaaattcagaaaaaaaatctcaaccttatgccaaaatggagtaatgctttatggtcccttgtaagtagtggagctgctctgtttaggtgaatctcctcaaatacaatgaagtgcccactgcaataaagtaatacgtaccaataaaaa

SEQ ID NO: 395005 - DNA, 1000 bp, Homo Sapiens
gtcacctacaaccactcgggcgactacgagtgccacgtctaccgcctgctcttcttcgaaaactacgagcacaacaccagcgtcgtcaagaagatccacattgaggtagtggacaaagccaacagagacatggcatccatcgtgtctgagatcatgatgtatgtgctcattgtggtgttgaccatatggctcgtggcagagatgatttactgctacaagaagatcgctgccgccacggagactgctgcacaggagaatgcctcggaatacctggccatcacctctgaaagcaaagagaactgcacgggcgtccaggtggccgaatagccctggccctgggccccgcctcaaggaagagccagccgtaatggggactctccaggcaccgcctgcccccagcgtgggggtggccactcctgggccccagaaagcctcagagtcctgccgacggagccactggggtgggagggggcagggggcttggctcgcacccccactttcgcctcctccagctcctgccccgccggccgcgcaccgccatgcatgatgggtaaagcaatactgccgctgcccccaccctgcttctgctgcctgtttggggaggggggcggtgaggtgggggcagcggccccgcacccctcctccttgctgatttgcacacattggccgcttcagacacgcacttctggggccagcccctccccgcctcctccctgcctggcggcaggggtcgcgatgatgggctggagcagtttggggcagggggttctgggacccactccgactccccctccccggcatcatttcccctcccgcttcctccggctggacctggggtcccccctccctgtaatgcactcctgccccggcccaacctcgccctctctcaccagccttgaactgtggccacctagaaaggggcccattcagcctcgtctctttacagaagtagttttgttcatgaaataaagactcttggacttgaaaaaaaaaaaaaaaa

SEQ ID NO: 395006 - DNA, 1000 bp, Homo Sapiens; identical to SEQ ID NO: 284877

SEQ ID NO: 395007 - DNA, 1000 bp, Homo Sapiens; identical to SEQ ID NO: 115516

SEQ ID NO: 395008 - DNA, 1000 bp, Homo Sapiens; identical to SEQ ID NO: 284879

SEQ ID NO: 395009 - DNA, 1000 bp, Homo Sapiens; identical to SEQ ID NO: 284880

SEQ ID NO: 395010 - DNA, 1000 bp, Homo Sapiens; identical to SEQ ID NO: 115517

SEQ ID NO: 395011 - DNA, 1000 bp, Homo Sapiens; identical to SEQ ID NO: 284882

SEQ ID NO: 395012 - DNA, 1000 bp, Homo Sapiens
cgtgtactaccccaggacgcatgcagggcccccacaggagcgtgtcctatccccggaccggacgcatgcagggcccccacaggagcgtgtactaccccaggacgcatgcagggcccccacaggagcgtgtactaccccaggatgcatgcagggcccccacaggagcgtgtactaccccaggacgcatgcagggcccccatgcaggcagcctgcagaccacactctgcctggccttgagccgtgacctccaggaagggaccccactggaattttatttctctcaggtgcgtgccacatcaataacaacagtttttatgtttgcgaatggctttttaaaatcatatttacctgtgaatcaaaacaaattcaagaatgcagtatccgcgagcctgcttgctgatattgcagtttttgtttacaagaataattagcaatactgagtgaaggatgttggccaaaagctgctttccatggcacactgccctctgccactgacaggaaagtggatgccatagtttgaattcatgcctcaagtcggtgggcctgcctacgtgctgcccgagggcaggggccgtgcagggccagtcatggctgtcccctgcaagtggacgtgggctccagggactggagtgtaatgctcggtgggagccgtcagcctgtgaactgccaggcagctgcagttagcacagaggatggcttccccattgccttctggggagggacacagaggacggcttccccatcgccttctggccgctgcagtcagcacagagagcggcttccccattgccttctggggagggacacagaggacagtttccccatcgccttctggttgttgaagacagcacagagagcggcttccccatcgccttctggggaggggctccgtgtagcaacccaggtgttgtccgtgtctgttgaccaatctctattcagcatcgtgtgggtccctaagcacaataaaagacatccacaatggaaaaaaaaaaaggaattc

SEQ ID NO: 395013 - DNA, 1000 bp, Homo Sapiens; identical to SEQ ID NO: 284883

SEQ ID NO: 395014 - DNA, 1000 bp, Homo Sapiens; identical to SEQ ID NO: 284884

SEQ ID NO: 395015 - DNA, 1000 bp, Homo Sapiens; identical to SEQ ID NO: 220937

SEQ ID NO: 395016 - DNA, 1000 bp, Homo Sapiens
tatcctcctctccatgcacagtggaaagtcctgaactcctggctttccaggagacatatataggggaacatcaccctatatataatttgagtgtatatatatttatatatatgatgtggacatatgtatacttatcttgctccattgtcatgagtccatgagtctaagtatagccactgatggtgacaggtgtgagtctggctggaacactttcagtttcaggagtgcaagcagcactcaaacctggagctgaggaatctaattcagacagagactttaatcactgctgaagatgcccctgctccctctgggttccagcagaggtgattcttacatatgatccagttaacatcatcactttttttgaggacattgaaagtgaaataatttgtgtctgtgtttaatattaccaactacattggaagcctgagcagggcgaggaccaataattttaattatttatatttcctgtattgctttagtatgctggcttgtacatagtaggcactaaatacatgtttgttggttgattgtttaagccagagtgtattacaacaatctggagatactaaatctggggttctcaggttcactcattgacatgatatacaatggttaaaatcactattgaaaaatacgttttgtgtatatttgcttcaacaactttgtgctttcctgaaagcagtaaccaagagttaagatatccctaatgttttgcttaaactaatgaacaaatatgctttgggtcataaatcagaaagtttagatctgtcccttaataaaaatatatattactactcctttggaaaatagatttttaatggttaagaactgtgaaatttacaaatcaaaatcttaatcattatccttctaagaggatacaaatttagtgctcttaacttgttaccattgtaatattaactaaataaacagatgtattatgctgttaaaaaaaaaaaaaaaaaaaaaaaaaaaaaaaaaaaaaaaaaaaaaaaaaaaa

SEQ ID NO: 395017 - DNA, 1000 bp, Homo Sapiens; identical to SEQ ID NO: 220404

SEQ ID NO: 395018 - DNA, 1000 bp, Homo Sapiens
cggcctggcgagccggcttcatcatctacacggccgcactgggcttcttcgggccgctgctggtcatctgcctctgctacctgctcatcgtggtgaaggtgcgctcagctgggcgccgggtgtgggcaccctcgtgccagcggcggcggcgctccgaacgcagggtcacgcgcatggtggtggccgtggtggcgctcttcgtgctctgctggatgcccttctacgtgctcaacatcgtcaacgtggtgtgcccactgcccgaggagcctgccttctttgggctctacttcctggtggtggcgctgccctatgccaacagctgtgccaaccccatcctttatggcttcctctcctaccgcttcaagcagggcttccgcagggtcctgctgcggccctcccgccgtgtgcgcagccaggagcccactgtggggcccccggagaagactgaggaggaggatgaggaggaggaggatggggaggagagcagggaggggggcaaggggaaggagatgaacggccgggtcagccagatcacgcagcctggcaccagcgggcaggagcggccgcccagcagagtggccagcaaggagcagcagctcctaccccaagaggcttccactggggagaagtccagcacgatgcgcatcagctacctgtagggcctggggaaagccaggatggcccgaggaagaggcagaagccgtgggtgtgcctagggcctacttcccaaggtgccacaggcccatgatgggatgttgaggggcctggactttgatgctattgctgccaggtcttgctgtgtgaccttgggtaggttgcttctactctctgggccttgttttctcctctgtgactcagggataggagtcatcagcctggatgagctatgtcagatgagaggtttggagggcactgttgctgggctgacctggctgagcaggcaaaaggtgggtgcagactggcctccccccagggatggagtgtcttggggcatcaacta

SEQ ID NO: 395019 - DNA, 1000 bp, Homo Sapiens
ggtgtgcctggtggggctggtgggcaacgccctggtcatcttcgtgatccttcgctacgccaagatgaagacggctaccaccatctacctgctcaacctggccgtagccgacgagctcttcatgctgagcgtgcccttcgtggcctcgtcggccgccctgcgccactggcccttcggctccgtgctgtgccgcgcggtgctcagcgtcgacggcctcaacatgttcaccagcgtcttctgtctcaccgtgctcagcgtggaccgctacgtggccgtggtgcaccctctgcgcgcggcgacctaccggcggcccagcgtggccaagctcatcaacctgggcgtgtggctggcatccctgttggtcactctccccatcgccatcttcgcagacaccagaccggctcgcggcggccaggccgtggcctgcaacctgcagtggccacacccggcctggtcggcagtcttcgtggtctacactttcctgctgggcttcctgctgcccgtgctggccattggcctgtgctacctgctcatcgtgggcaagatgcgcgccgtggccctgcgcgctggctggcagcagcgcaggcgctcggagaagaaaatcaccaggctggtgctgatggtcgtggtcgtctttgtgctctgctggatgcctttctacgtggtgcagctgctgaacctcgtcgtgaccagccttgatgccaccgtcaaccacgtgtcccttatcctcagctatgccaacagctgcgccaaccctattctctatggcttcctctccgacaacttccgccgatccttccagcgggttctctgcctgcgctgctgcctcctggaaggtgctggaggtgctgaggaggagcccctggactactatgccactgctctcaagagcaaaggtggggcagggtgcatgtgccccccactaaaatgccagcaggaagccctgcaaccagaacccggccgcaagcgcatccccctcaccaggaccaccaccttctga

SEQ ID NO: 395020 - DNA, 1000 bp, Homo Sapiens
agcatccgaacaagatttatgagaaagtgtaccacatctgtgtgactgtgctgatctacttcctccccctgctggtgattggctatgcatacaccgtagtgggaatcacactatgggccagtgagatccccggggactcctctgaccgctaccacgagcaagtctctgccaagcgcaaggtggtcaaaatgatgattgtcgtggtgtgcaccttcgccatctgctggctgcccttccacatcttcttcctcctgccctacatcaacccagatctctacctgaagaagtttatccagcaggtctacctggccatcatgtggctggccatgagctccaccatgtacaaccccatcatctactgctgcctcaatgacaggttccgtctgggcttcaagcatgccttccggtgctgccccttcatcagcgccggcgactatgaggggctggaaatgaaatccacccggtatctccagacccagggcagtgtgtacaaagtcagccgcctggagaccaccatctccacagtggtgggggcccacgaggaggagccagaggacggccccaaggccacaccctcgtccctggacctgacctccaactgctcttcacgaagtgactccaagaccatgacagagagcttcagcttctcctccaatgtgctctcctaggccacagggcctttggcaggtgcagcccccactgcctttgacctgcctcccttcatgcatggaaattcccttcatctggaaccatcagaaacaccctcacactgggacttgcaaaaagggtcagtatgggttagggaaaacattccatccttgagtcaaaaaatctcaattcttccctatctttgccaccctcatgctgtgtgactcaaaccaaatcactgaactttgctgagcctgtaaaataaaaggtcggaccagcttttcctcaagagcccaatgcattccatttctggaagtgactttggctgcatgcgagtgctcatttcaggatg

SEQ ID NO: 395021 - DNA, 1000 bp, Homo Sapiens; identical to SEQ ID NO: 284886

SEQ ID NO: 395022 - DNA, 1000 bp, Homo Sapiens; identical to SEQ ID NO: 115518

SEQ ID NO: 395023 - DNA, 1000 bp, Homo Sapiens; identical to SEQ ID NO: 115519

SEQ ID NO: 395024 - DNA, 1000 bp, Homo Sapiens; identical to SEQ ID NO: 115520

SEQ ID NO: 395025 - DNA, 1000 bp, Homo Sapiens; identical to SEQ ID NO: 220939

SEQ ID NO: 395026 - DNA, 1000 bp, Homo Sapiens; identical to SEQ ID NO: 284890

SEQ ID NO: 395027 - DNA, 1000 bp, Homo Sapiens; identical to SEQ ID NO: 284891

SEQ ID NO: 395028 - DNA, 1000 bp, Homo Sapiens; identical to SEQ ID NO: 284892

SEQ ID NO: 395029 - DNA, 1000 bp, Homo Sapiens; identical to SEQ ID NO: 115521

SEQ ID NO: 395030 - DNA, 1000 bp, Homo Sapiens
tgactttcatggagagggtaaaaaatatgctctatgtgctttattttgacttttggttccaaatatttaatatgaagaagtgggatcagttttacagtgaagttttaggaagacccactacattatctgagacaatgaggaaagctgacatatggcttatgcgaaactcctggaattttaaatttcctcatccattcttaccaaatgttgattttgttggaggactccactgcaaacctgccaaacccctacctaaggaaatggaggagtttgtacagagctctggagaaaatggtgttgtggtgttttctctggggtcaatggtcagtaacatgacagaagaaagggccaacgtaattgcaacagcccttgccaagatcccacaaaaggttctttggagatttgatgggaataaaccagatgccttaggtctcaatactcgactgtacaagtggataccccagaatgaccttctaggtcatccaaaaaccagagcttttataactcatggtggagccaatggcatctatgaggcaatctaccatgggatccctatggtgggcattccattgttttttgatcaacctgataatattgctcacatgaaggccaagggagcagctgttagagtggacttcaacacaatgtcgagtacagacctgctgaatgcactgaagacagtaattaatgatccttcatataaagagaatattatgaaattatcaagaattcaacatgatcaaccagtgaagcccctggatcgagcagtcttctggattgaatttgtcatgcgccacaaaggagccaaacatcttcgagttgcagcccacaacctcacctggttccagtaccactctttggatgtgattgggttcctgctggcttgtgtggcaaccgtgctatttatcatcacaaagtgttgtctgttttgtttctggaagtttgctagaaaaggaaagaagggaaaaagggattagttatatctgagatttgaagctgg

SEQ ID NO: 395031 - DNA, 1000 bp, Homo Sapiens; identical to SEQ ID NO: 284894

SEQ ID NO: 395032 - DNA, 1000 bp, Homo Sapiens
agatggctgggggcgggccgctgcacaagttcctggtcggcaagagggaggagatccctgtgagcaatgtggccgagctgctgcaccaggtgtccatggggatgaagtacctggaggagaagaactttgtgcaccgtgacctggcggcccgcaacgtcctgctggttaaccggcactacgccaagatcagcgactttggcctctccaaagcactgggtgccgacgacagctactacactgcccgctcagcagggaagtggccgctcaagtggtacgcacccgaatgcatcaacttccgcaagttctccagccgcagcgatgtctggagctatggggtcaccatgtgggaggccttgtcctacggccagaagccctacaagaagatgaaagggccggaggtcatggccttcatcgagcagggcaagcggatggagtgcccaccagagtgtccacccgaactgtacgcactcatgagtgactgctggatctacaagtgggaggatcgccccgacttcctgaccgtggagcagcgcatgcgagcctgttactacagcctggccagcaaggtggaagggcccccaggcagcacacagaaggctgaggctgcctgtgcctgagctcccgctgcccaggggagccctccacgccggctcttccccaccctcagccccaccccaggtcctgcagtctggctgagccctgcttggttgtctccacacacagctgggctgtggtagggggtgtctcaggccacaccggccttgcattgcctgcctggccccctgtcctctctggctggggagcagggaggtccgggagggtgcggctgtgcagcctgtcctgggctggtggctcccggagggccctgagctgagggcattgcttacacggatgccttcccctgggccctgacattggagcctgggcatcctcaggtggtcaggcgtagatcaccagaataaacccagcttccctcttgaaaaaaaaaaaaaaaaaaaaa

SEQ ID NO: 395033 - DNA, 1000 bp, Homo Sapiens; identical to SEQ ID NO: 220943

SEQ ID NO: 395034 - DNA, 1000 bp, Homo Sapiens
tgaggtctacgacccctttcgctttgacccagagaacatcaaggagaggtcacctctggcttttattcccttctcggcagggcccaggaactgcatcgggcagacgttcgcgatggcggagatgaaggtggtcctggcgctcacgctgctgcgcttccgcgtcctgcctgaccacaccgagccccgcaggaagccggagctggtcctgcgcgcagagggcggactttggctgcgggtggagcccctgagctgagttctgcagagacccactctgaccccactaaaatgacccctgattcatcaaaagtgaagcctagaattaccctaagaccctgttccacagtcctgtattccatcctagatatctactcaaaataattgagacaagtgttcaaacagaaagacgcttgtgcgtgaatgttcatggcggccctattcacagtagccaaacgatgaaaacaaccccaagctatatattaccagatgaaaggataaacaaaatgtggtccatccatacaatggagtattacacagccataaaaaggaatgaagcagtgatccctactacactgtggatgaaccttgaatgcatgatactgaatgaaagacgtcagatgcaaaaggtcacatagtgtactgtccttttatacgaaatttccagaacaggccaatctgaagagatgcatagcggattggtggctttcagcagctgtggggaggtgggactgaggagcgactgctaatcagtatggggtttcctcccgggatggtgaaaatgttccggacctagatactgacgaaggtagcacgacactgtgagtgcactaaatgctattgaattggacactttgaaatggtgaatttcgtggtatgtgaattctacctcaatcaaaaaaatttgctattttatctcacatacattttttttctgtccaggttgttcatataataatatgctgtgagcatctttccatgacattaaatcatcttaggaaacatt

SEQ ID NO: 395035 - DNA, 1000 bp, Homo Sapiens; identical to SEQ ID NO: 118389

SEQ ID NO: 395036 - DNA, 1000 bp, Homo Sapiens; identical to SEQ ID NO: 115522

SEQ ID NO: 395037 - DNA, 1000 bp, Homo Sapiens; identical to SEQ ID NO: 115523

SEQ ID NO: 395038 - DNA, 1000 bp, Homo Sapiens; identical to SEQ ID NO: 220945

SEQ ID NO: 395039 - DNA, 1000 bp, Homo Sapiens
gggaccatcaggatttgggacctgaagcagggaagccctatccatgtactgaaagggactgagggtcaccagggcccactcacctgtgttgctgccaaccaggatggcagcttgatcctaactggctctgtggactgccaggccaagctggtcagtgccaccaccggcaaggtggtgggtgtttttagacctgagactgtggcctcccagcccagcctgggagaaggggaggagagtgagtccaactcggtggagtccttgggcttctgcagtgtgatgcccctggcagctgttggctacctggatgggaccttggccatctatgacctggctacgcagactcttaggcatcagtgtcagcaccagtcgggcatcgtgcagctgctgtgggaggcaggcactgccgtggtatatacctgcagcctggatggcatcgtgcgcctctgggacgcccggaccggccgcctgcttactgactaccggggccacacggctgagatcctggactttgccctcagcaaagatgcctccctggtggtgaccacgtcaggagaccacaaagcgaaagtattttgtgtccaaaggcctgaccgttaatggctgcagcccctgcctgtgtgtctggtgttgaggggacgaagggacccctgcccctgtctgccagcagaggcagtagggcacagagggaagaggagggtggggccctggatgactttccagcctcttcaactgacttgctcccctctccttttcttctctttagagacccagcccagggccctcccacccttgcccagacctggtgggcccttcagagggaggggtggacctgtttctctttcactttcatttgctggtgtgagccatggggtgtgtatttgtatgtggggagtaggtgtttgaggttcccgttctttcccttcccaagtctctgggggtggaaaggaggaagagatactagttaaagattttaaaaatgtaaataaaatatacttcccag

SEQ ID NO: 395040 - DNA, 1000 bp, Homo Sapiens; identical to SEQ ID NO: 220946

SEQ ID NO: 395041 - DNA, 1000 bp, Homo Sapiens; identical to SEQ ID NO: 284898

SEQ ID NO: 395042 - DNA, 1000 bp, Homo Sapiens; identical to SEQ ID NO: 284899

SEQ ID NO: 395043 - DNA, 1000 bp, Homo Sapiens
gtggagaaaatcatcattcatgaaaaatacaactctgcgacagagggaaatgacattgccctcgtggagatcacccctcccatttcgtgtgggcgcttcattgggccgggctgcctgccccacttgaaggcaggcctccccagaggctcccagagctgctgggtggccggctggggatatatagaagagaaagcccccaggccatcatctatactgatggaggcacgtgtggatctcatcgacctggacttgtgtaactcgacccagtggtacaatgggcgcgttcagccaaccaatgtgtgcgcggggtatcctgtaggcaagatcgacacctgccagggagacagcggcgggcctctcatgtgcaaagacagcaaggaaagcgcctatgtggtcgtgggaatcacaagctggggggtaggctgtgcccgtgccaagcgccccggaatctacacggccacctggccttatctgaactggatcgcctccaagattggttctaacgctttgcgtatgattcaatcggccacccctccaccgcccaccactcgaccgcccccgattcgaccccccttctcccaccctatctctgctcaccttccttggtatttccaaccgccccctcgaccacttccaccccgaccaccggcagcccagccccgacccccaccttcacccccgcccccacccccacctccagcctcacctttacccccacccccacccccacccccacctacaccctcatctaccacaaaacttccccaaggactttcttttgccaagcgcctacagcagctcatagaggtcttgaaggggaagacctattccgacggaaagaaccattatgacatggagaccacagagctcccagaactgacctcgacctcctgatctgacctggttctcaacagacccagtgagcccttcactcctgagaaaaaggaaagatgaaataaataaataaacatatatatatagatataaaaaaaaaaaaaaa

SEQ ID NO: 395044 - DNA, 1000 bp, Homo Sapiens
gatggcaaggacctggaggacctgcagatcctcatcaaggtcaaagggaagtgtaccactgaccacatctcagctgctggcccctggctcaagttccgtgggcacttggataacatctccaacaacctgctcattggtgccatcaacattgaaaacggcaaggccaactccgtgcgcaatgccgtcactcaggagtttggccccgtccctgacactgcccgctactacaagaaacatggcatcaggtgggtggtgatcggagacgagaactacggcgagggctcgagccgggagcatgcagctctggagcctcgccaccttgggggccgggccatcatcaccaagagctttgccaggatccacgagaccaacctgaagaaacagggcctgctgcctctgaccttcgctgacccggctgactacaacaagattcaccctgtggacaagctgaccattcagggcctgaaggacttcacccctggcaagcccctgaagtgcatcatcaagcaccccaacgggacccaggagaccatcctcctgaaccacaccttcaacgagacgcagattgagtggttccgcgctggcagtgccctcaacagaatgaaggaactgcaacagtgagggcagtgcctccccgccccgccgctggcgtcaagttcagctccacgtgtgccatcagtggatccgatccgtccagccatggcttcctattccaagatggtgtgaccagacatgcttcctgctccccgcttagcccacggagtgactgtggttgtggtgggggggttcttaaaataactttttagcccccgtcttcctattttgagtttggttcagatcttaagcagctccatgcaactgtatttatttttgatgacaagactcccatctaaagtttttctcctgcctgatcatttcattggtggctgaaggattctagagaaccttttgttcttgcaaggaaaacaagaatccaaaaccagtgactgttctgtgaaaa

SEQ ID NO: 395045 - DNA, 1000 bp, Homo Sapiens; identical to SEQ ID NO: 284901

SEQ ID NO: 395046 - DNA, 1000 bp, Homo Sapiens; identical to SEQ ID NO: 284902

SEQ ID NO: 395047 - DNA, 1000 bp, Homo Sapiens
atgccaagggcatcagccaggagcagatgaatgagttccgggcctccttcaaccactttgaccgggatcactccggcacactgggtcccgaggagttcaaagcctgcctcatcagcttgggttatgatattggcaacgacccccagggagaagcagaatttgcccgcatcatgagcattgtggaccccaaccgcctgggggtagtgacattccaggccttcattgacttcatgtcccgcgagacagccgacacagatacagcagaccaagtcatggcttccttcaagatcctggctggggacaagaactacattaccatggacgagctgcgccgcgagctgccacccgaccaggctgagtactgcatcgcgcggatggccccctacaccggccccgactccgtgccaggtgctctggactacatgtccttctccacggcgctgtacggcgagagtgacctctaatccaccccgcccggccgccctcgtcttgtgcgccgtgccctgccttgcacctccgccgtcgcccatctcctgcctgggttcggtttcagctcccagcctccacccgggtgagctggggcccacgtggcatcgatcctccctgcccgcgaagtgacagtttacaaaattattttctgcaaaaaagaaaaaaaagttacgttaaaaaccaaaaaactacatattttattatagaaaaagtattttttctccaccagacaaatggaaaaaaagaggaaagattaactatttgcaccgaaatgtcttgttttgttgcgacataggaaaataaccaagcacaaagttatattccatcctttttactgatttttttttcttctatctgttccatctgctgtattcatttctccaatctcatgtccattttggtgtgggagtcggggtagggggtactcttgtcaaaaggcacattggtgcgtgtgtgtttgctagctcacttgtccatgaaaatattttatgatattaaagaaaatcttttg

SEQ ID NO: 395048 - DNA, 1000 bp, Homo Sapiens
agtgaaaaatgtgaaaatacaaaatacccaagatttaagaccggggggaaaaaaccacaaattggtaaataaaggtttgctatttgtaaaaaatttcatttatctctaatatgcttatgtgattggccctaggggagtatatttgggattctaatgttttattttcatgcttatccaaagattactattgtatcttcaaatgaacttaatattgtgagatggaactgccggggattaaaaagactacccaaaagatttttggcacttacaatttttaaaatagtttatgtcatctcttcattatttagggctggatggtcaactcagtcagtgattttttgatgcttctcttatcctccagaatagagacctaaggacacgtggaagtcagtttaattgccagagagaaggatgcaatcactaggtgaaatgaggtttttaggattatttattgattccaggttcccatgctttttgttagagcttattagtacaggttctcaagagatgaccacataaaagtgctctgtttataaataagcaggtttctgtagtactgactggttcatcacaaggcaagtcagaaaccagtatccttctagctctccagtcaggacttccttatgcctctagttttatgaccggttaaggagaagccagagttagagtaggagaggactaattctcagcagcagtggaggtgagttctttcttttgcggaagctttacatatgttttgtgtagtaggaataactagatattttagctagtgtgcggtgtgtgttcacccctgggattggacagtgtatcctaacaagtcccatgtctggttctgtgtctaaaggcctgctccatgacacaggatgctacatgcactcctgctagcacatcttgatctgttgaatgttcattctttctttttgctcatactgctgtaggctataattcccccctgtttttccatcttgttgacagcttgtagagaataaagcaggaattc

SEQ ID NO: 395049 - DNA, 1000 bp, Homo Sapiens
tcaacaccaagtgggatatggtccgaaagctggtgcccagccgtgaccagacactgcaggaggagctggcacggcagcaggtaaacgagaggctccggcgacagtttgcggcccaggccaatgccattggaccctggatccaggcgaaggtggaggaagtggggcggctggcagcagggctagctggctctctggaggagcagatggctgggctacggcagcaggagcagaacattatcaactacaagactaacattgaccggctggagggtgaccaccagctgctgcaggagagcctggtgttcgacaataagcacaccgtctacagcatggagcacatccgcgtgggctgggagcagctgctcacctccattgcccgcaccatcaatgaagtggagaaccaggtactgacccgagacgccaagggactgagccaggagcagctcaacgagttccgagcatccttcaaccactttgacaggaagcggaatgggatgatggagcctgatgacttccgagcttgcctcatctccatgggctatgacctgggggaagtggagtttgctcgcatcatgaccatggtggaccccaacgcagctggggtggtgaccttccaggccttcatagacttcatgacccgagagacagccgagactgacacgactgagcaagttgtagcttccttcaagatcttggcaggagacaagaactacatcacccccgaggagctgcggcgcgagctccctgccaagcaggccgagtactgcatccgccgtatggtgccctacaagggatccggggccccggctggagccctggactacgtggccttctccagtgccctctatggggagagcgacctttgaccccaaccactgaggttctctatgcaagatggagagaggatgcaccctgtggctgatcccatccgtccctcggagcaagggcctaagagaaaagccagccaagtgcttctgaataaagatccctctctgggtca

SEQ ID NO: 395050 - DNA, 1000 bp, Homo Sapiens; identical to SEQ ID NO: 284904

SEQ ID NO: 395051 - DNA, 1000 bp, Homo Sapiens; identical to SEQ ID NO: 284905

SEQ ID NO: 395052 - DNA, 1000 bp, Homo Sapiens; identical to SEQ ID NO: 284906

SEQ ID NO: 395053 - DNA, 1000 bp, Homo Sapiens; identical to SEQ ID NO: 284907

SEQ ID NO: 395054 - DNA, 1000 bp, Homo Sapiens; identical to SEQ ID NO: 115524

SEQ ID NO: 395055 - DNA, 1000 bp, Homo Sapiens; identical to SEQ ID NO: 115525

SEQ ID NO: 395056 - DNA, 1000 bp, Homo Sapiens; identical to SEQ ID NO: 284911

SEQ ID NO: 395057 - DNA, 1000 bp, Homo Sapiens; identical to SEQ ID NO: 115526

SEQ ID NO: 395058 - DNA, 1000 bp, Homo Sapiens; identical to SEQ ID NO: 115527

SEQ ID NO: 395059 - DNA, 1000 bp, Homo Sapiens
ttgaccatgctaaactaatcatgttccaatgaatacatcacctttcttcatttcttgatgctcttcccaatccttgtctacctgataataaattcttacttgtccttcaagacccaactcagatagatagagcttcctgagtgaaacctgctttgattgttcaggcacttggccaccttctcctcactcctcccacagccttctgtcttggccttgtcatcacatcaatcctgttgtgtggtgctgtgtgtcttctgggtcagtcctaggcacatgctgcccagcacatgtccacctgggaaatgagatgccatcgtcacattcatttggtcaccctcagtccagccagtgggcttgctctcatttggcctgttctcaggggtgggaaggaagagcgtcccttccttctccttttgagaaaaccacagaactatgactctcatgatttttcctttgtgaaatccctggttttcagctggaagcggtgggtaaatgaggtctgatgatagcagtcctgccaccttctagttcatcccataggaatgtttttccaagtccttccagtctttttagaacgtggtggaggagggttgtgtgtgccccagggggtcgggggtaggggatgcagggaggatcttagcatttgttgttttctagtgcagggctttagccacaattgtaaacaacaggaaaaggctctttagagatcctattagatttgctttgccgattgtcactcttcatcacaggcacatttcaaaaagaggttagactttcagacttcttttttctcaaacctcaaaacttccaccccaaacttcgctctcagctggtgactttgcttctttatgtgtgtgtatgtgtgtcagagaaagagagagagagagagagaagggaggatgagaacgaatggggggaagagataaactttatgcataacattagggtaaatcaataaagatggtctgacacatcgtaaaaaaaaaaaaaaaaaaaaaaa

SEQ ID NO: 395060 - DNA, 1000 bp, Homo Sapiens; identical to SEQ ID NO: 115528

SEQ ID NO: 395061 - DNA, 1000 bp, Homo Sapiens; identical to SEQ ID NO: 284915

SEQ ID NO: 395062 - DNA, 1000 bp, Homo Sapiens; identical to SEQ ID NO: 115529

SEQ ID NO: 395063 - DNA, 1000 bp, Homo Sapiens; identical to SEQ ID NO: 220948

SEQ ID NO: 395064 - DNA, 1000 bp, Homo Sapiens; identical to SEQ ID NO: 220949

SEQ ID NO: 395065 - DNA, 1000 bp, Homo Sapiens
tcattgctgaggccttctgcctggccttgctgaggaacctgcccatgtgccaccccctctacaagctcctcatcccccatacccgatacaccgtccagatcaacagcattggccgggccgttctcctcaatgagggggggctctctgccaagggcatgtccctgggcgtggaaggctttgctggggtgatggtacgggctctgtcggagctcacctatgacagcctctacctccccaatgactttgtggagcgtggggtccaggacctgcctggatattactaccgcgatgacagcttggcggtgtggaatgcactggagaagtatgtgacggagatcatcacctattattacccgagtgacgcagccgtggagggtgatccggaattgcagtcttgggtgcaggaaatatttaaagagtgcctcctggggcgggagagctcaggcttccctaggtgcttgcgaaccgtgcctgagctgatccgatatgtcactatagtcatctacacctgctctgccaagcacgctgctgtcaacacaggccagatggagttcaccgcctggatgcccaacttcccagcgtccatgcggaatccaccgattcagactaaggggctgaccactctggagaccttcatggacacgttgccggatgtgaagaccacgtgcatcacgctgctggtgctctggaccctcagccgagagcctgacgacaggcggcccctgggacacttcccggacattcacttcgtggaggaggccccgcggaggagcatagaggcgttccgccagcgcctgaaccagatctcacacgacatccgccagcgcaacaagtgccttcccatcccctactactacctggacccggtgctgattgagaacagcatttctatttaggagcgcgcttcccgtctctcctctccccattctgtgccctactattttcaacaaaacaaaacaaacaagcaaaaaacacaaaaacctcagagaccaaaacacca

SEQ ID NO: 395066 - DNA, 1000 bp, Homo Sapiens; identical to SEQ ID NO: 220950

SEQ ID NO: 395067 - DNA, 1000 bp, Homo Sapiens; identical to SEQ ID NO: 220951

SEQ ID NO: 395068 - DNA, 1000 bp, Homo Sapiens; identical to SEQ ID NO: 115530

SEQ ID NO: 395069 - DNA, 1000 bp, Homo Sapiens; identical to SEQ ID NO: 115531

SEQ ID NO: 395070 - DNA, 1000 bp, Homo Sapiens; identical to SEQ ID NO: 117815

SEQ ID NO: 395071 - DNA, 1000 bp, Homo Sapiens; identical to SEQ ID NO: 115533

SEQ ID NO: 395072 - DNA, 1000 bp, Homo Sapiens; identical to SEQ ID NO: 115534

SEQ ID NO: 395073 - DNA, 1000 bp, Homo Sapiens
ggaggggtaacctggccaacgtgatccgttacttccccacccaagctctcaacttcgccttcaaggacaagtacaagcagctcttcttagggggtgtggatcggcataagcagttctggcgctactttgctggtaacctggcgtccggtggggccgctggggccacctccctttgctttgtctacccgctggactttgctaggaccaggttggctgctgatgtgggcaagggcgccgcccagcgtgagttccatggtctgggcgactgtatcatcaagatcttcaagtctgatggcctgagggggctctaccagggtttcaacgtctctgtccaaggcatcattatctatagagctgcctacttcggagtctatgatactgccaaggggatgctgcctgaccccaagaacgtgcacatttttgtgagctggatgattgcccagagtgtgacggcagtcgcagggctggtgtcctacccctttgacactgttcgtcgtagaatgatgatgcagtccggccggaaaggggccgatattatgtacacggggacagttgactgctggaggaagattgcaaaagacgaaggagccaaggccttcttcaaaggtgcctggtccaatgtgctgagaggcatgggcggtgcttttgtattggtgttgtatgatgagatcaaaaaatatgtctaatgtaattaaaacacaagttcacagatttacagtgaacttgatctacaagttcacagatccattgtgtggtttaatagactattcctaggggaagtaaaaagatctgggataaaaccagactgaaaggaatacctcagaagagatgcttcattgagtgttcattaaaccacacatgtattttgtatttattttacatttaaattcccacagcaaatagaaaataatttatcatacttgtacaattaactgaagaattgataataactgaatgtgaaacatcaataaagaccacttaatgcaaaaaaaaaaaaaaa

SEQ ID NO: 395074 - DNA, 1000 bp, Homo Sapiens; identical to SEQ ID NO: 115535

SEQ ID NO: 395075 - DNA, 1000 bp, Homo Sapiens; identical to SEQ ID NO: 220954

SEQ ID NO: 395076 - DNA, 1000 bp, Homo Sapiens; identical to SEQ ID NO: 220955

SEQ ID NO: 395077 - DNA, 1000 bp, Homo Sapiens; identical to SEQ ID NO: 284929

SEQ ID NO: 395078 - DNA, 1000 bp, Homo Sapiens; identical to SEQ ID NO: 284930

SEQ ID NO: 395079 - DNA, 1000 bp, Homo Sapiens; identical to SEQ ID NO: 284931

SEQ ID NO: 395080 - DNA, 1000 bp, Homo Sapiens; identical to SEQ ID NO: 115537

SEQ ID NO: 395081 - DNA, 1000 bp, Homo Sapiens; identical to SEQ ID NO: 220957

SEQ ID NO: 395082 - DNA, 1000 bp, Homo Sapiens; identical to SEQ ID NO: 115538

SEQ ID NO: 395083 - DNA, 1000 bp, Homo Sapiens; identical to SEQ ID NO: 220958

SEQ ID NO: 395084 - DNA, 1000 bp, Homo Sapiens
cgtgattgccacgctggggaatatcagtggtggacacttcaaccctgcggtgtccctggcagccatgctgatcggaggcctcaacctggtgatgctcctcccgtactgggtctcacagctgctcggggggatgctcggggctgccttggccaaggcggtgagtcctgaggagaggttctggaatgcatctggggcggcctttgtgacagtccaggagcaggggcaggtggcaggggcgttggtggcagagatcatcctgacgacgctgctggccctggctgtatgcatgggtgccatcaatgagaagacaaagggccctctggccccgttctccatcggctttgccgtcaccgtggatatcctggctgggggccctgtgtctggaggctgcatgaatcccgcccgtgcttttggacctgcggtggtggccaaccactggaacttccactggatctactggctgggcccactcctggctggcctgcttgttggactgctcattaggtgcttcattggagatgggaagacccgcctcatcctgaaggctcggtgaagcagagctcgtgggattcctgctgctccaggtgtcctcagctcacctgtcccagactgaggacaggggagttcctgcatttcctgccagggcagaggcccagaggagcgaccccctgcttccactgcttgggcctgctttctcagatagactgactgctgaggaggctctaggttcttggaattcctttgtgctcatcagagaccccagcctggggaacacgctgcccgcactgcccagagagcagtgcaaacaccacaacacgagcgtgtttcttgagaggaatgtccccgagttggacaaggaggctgtttctgcacatcagctcatttcccgcaccccatttcttgcttgattgctttgttgggggcctggccacttccttgcttctcaagctgacaattctcactttgcaataaatagtccagtgtttccttccaaaaaaaa

SEQ ID NO: 395085 - DNA, 1000 bp, Homo Sapiens; identical to SEQ ID NO: 284934

SEQ ID NO: 395086 - DNA, 1000 bp, Homo Sapiens; identical to SEQ ID NO: 115539

SEQ ID NO: 395087 - DNA, 1000 bp, Homo Sapiens; identical to SEQ ID NO: 222146

SEQ ID NO: 395088 - DNA, 1000 bp, Homo Sapiens
ggtgcgctggtgcggggcccctatctggtggtgtccctcttcaccgacgatgacaggacgcaccacctgtcctgggagtggggtctctgcatctgccaggactggaaggactgaacccccagtccgtgtctcccctacctccctcagttgttgcacagggacccccaagcatccccagcaccccccgtgagtgaccagaccctcccctgctgcccctgctgcccctgctgcccctgctctgtcccgggaccccctggcctggcgctgtcccctgagctgtcccattaaacatggccctgtctctctcggtgccctgggtgtcgtctctttctgcctcccctcccctgggggccgggggcggccgcatgggccttgtctttgctgggactgggcctgtgtgccacgtggcagctgctgcttggcttctggcccccttatctgcccccgccccacgcgccctggcagcaccatgagccgccagcttctgcctgtactgctgctgctgctgctcagggcttcgtgcccatggggtcaggaacagggagcgaggagcccctcggaggagcctccagaggaggaaatccccaaggaggatgggatcttggtgctgagccgccacaccctgggcctggccctgcgggagcaccctgccctgctggtggaattctgtgagtgctggggccagtggggctggggaccggcgggggaccggcagagcccacctgggggccccaccctttgccggcaaatgcagggcatgtgcccaagaggggcctccccgcaggcacttgcccccactgtgcccaggagctctctaggaggggcctgggggtctggttggggcaggcaggagcagtgtggtagtactgggggtacccacaggacttgagaacacctgtgcctccctgctcggccagcggccacggtgccagagtcaccaccttgccggccactcctccagctgccaggggcatcccacagactctgcagaggctcgggc

SEQ ID NO: 395089 - DNA, 1000 bp, Homo Sapiens; identical to SEQ ID NO: 115541

SEQ ID NO: 395090 - DNA, 1000 bp, Homo Sapiens; identical to SEQ ID NO: 220901

SEQ ID NO: 395091 - DNA, 1000 bp, Homo Sapiens; identical to SEQ ID NO: 220961

SEQ ID NO: 395092 - DNA, 1000 bp, Homo Sapiens; identical to SEQ ID NO: 284940

SEQ ID NO: 395093 - DNA, 1000 bp, Homo Sapiens; identical to SEQ ID NO: 115542

SEQ ID NO: 395094 - DNA, 1000 bp, Homo Sapiens; identical to SEQ ID NO: 284942

SEQ ID NO: 395095 - DNA, 1000 bp, Homo Sapiens; identical to SEQ ID NO: 115543

SEQ ID NO: 395096 - DNA, 1000 bp, Homo Sapiens
ctgagtctgccctgagggggcgcctttttctaatttgaacagaggcaccctatggcctaggggccctgatcgcccacctgcctggaagcccctgggctctatttattatcatgacaatgttggaattaaattttgattcgaatatgtctgcctgggggtggggttttccctgagcggcaactcctggagaccacatagcctgaatcctcagaatttcaggcctgctgggagctttctgcactaggccacactagttcatggtatccatgctaccaatctatgtgtatctacatatcttttatttttggaaattgcatttgtaaccaaggggtgcgaaaccctggcagtcccaggcagcaccaggccaggggttgatttgaaacgtgaaggattgggttttcaggccctctgctccacccctcctgtgtgtcagagctagggtgggggtgcccgattcgggtgctgaatgtaaggaggggagcctccaagtgtggtgcaagccgggggtctccacatcttccttctctgaagtccaggtacctgcacaagcaggaagcgcctgggagtcccggaaggaggagagcgcacacccaggcagccctctgcggaaactttccttggtttctttttatttgtgtaaaggaggttaagacgtgtcgcacttttcagttgtttgtattcaaatgacgattatttttctactcaatgtgaatatccctggccagcctttccacggcgcccaccgcagtgccgctgcctggccctcagtgtctaccttctgccctctgcgactccagtgctctggcccgggactcccctatccgcccctcacttacccttaaacaggtgatcccacctgtcttgtcaacctcgccgcttttcgcctccttaatggcactgtgcactcaactagagtattaactgtaaaaagatttgtgaagtttggaagctctattcgctgtattttttctttaatttataaacttttagtttaacatgc

SEQ ID NO: 395097 - DNA, 1000 bp, Homo Sapiens; identical to SEQ ID NO: 284944

SEQ ID NO: 395098 - DNA, 1000 bp, Homo Sapiens
gggccacttttgactagggattcaggctgcttgggataaagatgcaaggaccaggactccctcctcacctctggactggctagagtcctcactcccagtccaaatgtcctccagaagcctctggctagaggccagccccacccaggagggagggggctatagctacaggaagcaccccatgccaaagctagggtggcccttgcagttcagcaccaccctagtcccttcccctccctggctcccatgaccatactgagggaccaactgggcccaagacagatgccccagagctgtttatggcctcagctgcctcacttcctacaagagcagcctgtggcatctttgccttgggctgctcctcatggtgggttcaggggactcagccctgaggtgaaagggagctatcaggaacagctatgggagccccagggtcttccctacctcaggcaggaagggcaggaaggagagcctgctgcatggggtggggtagggctgactagaagggccagtcctgcctggccaggcagatctgtgccccatgcctgtccagcctgggcagccaggctgccaaggccagagtggcctggccaggagctcttcaggcctccctctctcttctgctccacccttggcctgtctcatccccaggggtcccagccaccccgggctctctgctgtacatatttgagactagtttttattccttgtgaagatgatatactatttttgttaagcgtgtctgtatttatgtgtgaggagctgctggcttgcagtgcgcgtgcacgtggagagctggtgcccggagattggacggcctgatgctccctcccctgccctggtccagggaagctggccgagggtcctggctcctgaggggcatctgcccctcccccaacccccaccccacacttgttccagctctttgaaatagtctgtgtgaaggtgaaagtgcagttcagtaataaactgtgtttactcagtgaaaaaaaaaaaaaaaaaa

SEQ ID NO: 395099 - DNA, 1000 bp, Homo Sapiens; identical to SEQ ID NO: 220963

SEQ ID NO: 395100 - DNA, 1000 bp, Homo Sapiens; identical to SEQ ID NO: 115544

SEQ ID NO: 395101 - DNA, 1000 bp, Homo Sapiens
ttccaccgtataaacatttatgaggttatgaagcccccagcagaagtggtgcctgggcacctcatcacacgactactggacacgagactggtccaccacaatgtgacacggtgggaaacttttgatgtgagccctgcggtccttcgctggacccgggagaagcagccaaactatgggctagccattgaggtgactcacctccatcagactcggacccaccagggccagcatgtcaggattagccgatcgttacctcaagggagtgggaattgggcccagctccggcccctcctggtcacctttggccatgatggccggggccatgccttgacccgacgccggagggccaagcgtagccctaagcatcactcacagcgggccaggaagaagaataagaactgccggcgccactcgctctatgtggacttcagcgatgtgggctggaatgactggattgtggccccaccaggctaccaggccttctactgccatggggactgcccctttccactggctgaccacctcaactcaaccaaccatgccattgtgcagaccctggtcaattctgtcaattccagtatccccaaagcctgttgtgtgcccactgaactgagtgccatctccatgctgtacctggatgagtatgataaggtggtactgaaaaattatcaggagatggtagtagagggatgtgggtgccgctgagatcaggcagtccttgaggatagacagatatacacaccacacacacacaccacatacaccacacacacacgttcccatccactcacccacacactacacagactgcttccttatagctggacttttatttaaaaaaaaaaaaaaaaaaatggaaaaaatccctaaacattcaccttgaccttatttatgactttacgtgcaaatgttttgaccatattgatcatatattttgacaaaatatatttataactacgtattaaaagaaaaaaataaaatgagtcattattttaaaggt

SEQ ID NO: 395102 - DNA, 1000 bp, Homo Sapiens; identical to SEQ ID NO: 115546

SEQ ID NO: 395103 - DNA, 1000 bp, Homo Sapiens; identical to SEQ ID NO: 284951

SEQ ID NO: 395104 - DNA, 1000 bp, Homo Sapiens
tgtaaaaagtcatctttccctcacagaaagaaacgaaagaaagcaaagcaaagtcagtgaaagacaatctttatagtttcaggagtaaatctaaatgtggcttttgtcaagcacttagatggatataaatgcagcaacttgttttaaaaaaatgcacaatttacttcccaaaaaagttgttacttgccttttcaagttgttgacaaacacacatttgatattctcttatatgttatagtaatgtaacgtataaactcaagcctttttattctttgtgattaaatcctgttttaaaatgtcacaaaacaggaaccagcattctaattagatttactatatcaagatatggttcaaataggactactagagttcattgaacactaaaactatgaaacaattactttttatattaaaaagaccatggatttaacttatgaaaatccaaatgcaggatagtaatttttgtttacttttttaaccaaactgaatttttgaaagactattgcaggtgtttaaaaagaaagaaaagttgttttatctaatactgtaagtagttgtcatattctggaaaatttaatagttttagagttaagatatctcctctctttggttagggaagaagaaagcccttcaccattgtggaatgatgccctggctttaaggtttagctccacatcatgcttctcttgagaattctatttggtagttacaattacagaaactgattagtttgtcagtttgcagatagatttagcacagtactcatcactcggatagattgagatgttctttcacatcagatgatctgtaacactgtaagatactgatctttacaactgtttaatcagttttatttttgtacagtattagtgacctaagttattttgctgtcccgtttttgtaaatcaaatgaaattataaaagaggattctgacagtaggtattttgtacatatgtatatatgttgtccaaataaaaataataaatgataaagactgaa

SEQ ID NO: 395105 - DNA, 895 bp, Homo Sapiens; identical to SEQ ID NO: 284952

SEQ ID NO: 395106 - DNA, 1000 bp, Homo Sapiens; identical to SEQ ID NO: 284953

SEQ ID NO: 395107 - DNA, 1000 bp, Homo Sapiens; identical to SEQ ID NO: 284954

SEQ ID NO: 395108 - DNA, 1000 bp, Homo Sapiens; identical to SEQ ID NO: 284955

SEQ ID NO: 395109 - DNA, 1000 bp, Homo Sapiens
gccgccttctgcccggccctgcgccccctggaactcctgggcttccagctcccgccgctcccagaactgcgcctgcgcaacaatggccacagtgtgcaactgaccctgcctcctgggctagagatggctctgggtcccgggcgggagtaccgggctctgcagctgcatctgcactggggggctgcaggtcgtccgggctcggagcacactgtggaaggccaccgtttccctgccgagatccacgtggttcacctcagcaccgcctttgccagagttgacgaggccttggggcgcccgggaggcctggccgtgttggccgcctttctggaggagggcccggaagaaaacagtgcctatgagcagttgctgtctcgcttggaagaaatcgctgaggaaggctcagagactcaggtcccaggactggacatatctgcactcctgccctctgacttcagccgctacttccaatatgaggggtctctgactacaccgccctgtgcccagggtgtcatctggactgtgtttaaccagacagtgatgctgagtgctaagcagctccacaccctctctgacaccctgtggggacctggtgactctcggctacagctgaacttccgagcgacgcagcctttgaatgggcgagtgattgaggcctccttccctgctggagtggacagcagtcctcgggctgctgagccagtccagctgaattcctgcctggctgctggtgacatcctagccctggtttttggcctcctttttgctgtcaccagcgtcgcgttccttgtgcagatgagaaggcagcacagaaggggaaccaaagggggtgtgagctaccgcccagcagaggtagccgagactggagcctagaggctggatcttggagaatgtgagaagccagccagaggcatctgagggggagccggtaactgtcctgtcctgctcattatgccacttccttttaactgccaagaaattttttaaaataaatatttataat

SEQ ID NO: 395110 - DNA, 1000 bp, Homo Sapiens
agggaaacttcgtgccagggcctcctttctggggcctggtgaatgcagcgtggagtctgtgtgctgtggggaagcggcagagccccgtggatgtggagctgaagagggttctttatgacccctttctgcccccattaaggctcagcactggaggagagaagctccggggaaccttgtacaacaccggccgacatgtctccttcctgcctgcaccccgacctgtggtcaatgtgtctggaggtcccctcctttacagccaccgactcagtgaactgcggctgctgtttggagctcgcgacggagccggctcggaacatcagatcaaccaccagggcttctctgctgaggtgcagctcattcacttcaaccaggaactctacgggaatttcagcgctgcctcccgcggccccaatggcctggccattctcagcctctttgtcaacgttgccagtacctctaacccattcctcagtcgcctccttaaccgcgacaccatcactcgcatctcctacaagaatgatgcctactttcttcaagacctgagcctggagctcctgttccctgaatccttcggcttcatcacctatcagggctctctcagcaccccgccctgctccgagactgtcacctggatcctcattgaccgggccctcaatatcacctcccttcagatgcactccctgagactcctgagccagaatcctccatctcagatcttccagagcctcagcggtaacagccggcccctgcagcccttggcccacagggcactgaggggcaacagggacccccggcaccccgagaggcgctgccgaggccccaactaccgcctgcatgtggatggtgtcccccatggtcgctgagactccccttcgaggattgcacccgcccgtcctaagcctccccacaaggcgaggggagttacccctaaaacaaagctattaaagggacagaatacttcctgtttaaaaaaaaaaaaaaaaaaaaaaaaaaaaaaaaa

SEQ ID NO: 395111 - DNA, 1000 bp, Homo Sapiens; identical to SEQ ID NO: 115547

SEQ ID NO: 395112 - DNA, 1000 bp, Homo Sapiens; identical to SEQ ID NO: 284957

SEQ ID NO: 395113 - DNA, 1000 bp, Homo Sapiens
tccccgacatcctgagctcagtgaggaggggctcgggagccccagaagccgaggggcccctgccctgcccatctccggctccctttagccccctgccagccccatcccccaggatctctgacatcctgaactctgtgagaaggggttcaggaaccccagaagccgagggccccctctcagcggggcccccgccctgcctgtctccggctctcctaggccccctgtcctccccgtcccccaggatctctgacatcctgaactctgtgaggaggggctcagggaccccagaagccgagggcccctcgccagtggggcccccgccctgcccatctccgactatccctggccccctgcccaccccatcccggaagcaggagatcattaagaccacggagcagctcatcgaggccgtcaacaacggtgactttgaggcctacgcgaaaatctgtgacccagggctgacctcgtttgagcctgaagcactgggcaacctggttgaagggatggacttccacagattctacttcgagaacctgctggccaagaacagcaagccgatccacacgaccatcctgaacccacacgtgcacgtcattggagaggatgccgcctgcatcgcttacatccggctcacgcagtacattgacgggcagggccggccccgcaccagccagtctgaggagacccgcgtgtggcaccgccgcgacggcaagtggcagaacgtgcacttccactgctcgggcgcgcctgtggccccgctgcagtgaagagctgcgccctggtttcgccggacagagttggtgtttggagcccgactgccctcgggcacacggcctgcctgtcgcatgtttgtgtctgcctcgttccctcccctggtgcctgtgtctgcagaaaaacaagaccagatgtgatttgttaaaaaaaaacaaaaaaaaaaaaaaaaaaaacaagatgacgacgacaaccacaaaaaaaattgacatcagatgaaatgaaaaaa

SEQ ID NO: 395114 - DNA, 1000 bp, Homo Sapiens; identical to SEQ ID NO: 115549

SEQ ID NO: 395115 - DNA, 1000 bp, Homo Sapiens; identical to SEQ ID NO: 284960

SEQ ID NO: 395116 - DNA, 1000 bp, Homo Sapiens; identical to SEQ ID NO: 118347

SEQ ID NO: 395117 - DNA, 1000 bp, Homo Sapiens; identical to SEQ ID NO: 220966

SEQ ID NO: 395118 - DNA, 1000 bp, Homo Sapiens
ggggcttcctgttcgcctgcatctccttctgccacatctgggcggtggtgccatgcattaagagctacctgatcgagatccagtgcatcagccacatctactcactctgcatccgcaccttctgcaacccactcttcgcggccctgggccaggtctgcagcagcatcaaggtggtgctgcggaaggaggtctaaagccagggactgctccataccccatgatggagcacacggtgtagggaagccagaaagaaaagacggcccagccacagaagcacaatggcccttcgctctcccccagccccaccatgatgcccccatgcctgggcgtgggggaagatcatttgccaagaggcagctactgcaagtctttgcgttcacttgtactgtaacaacataaaccagcacgcggttcccacccggggccaacctctccacgcgcactcaggaaagtgaccagtgaccactggcgttaggaaggtggctccagtaaagggttttggctgcatttggggaatgctgcattttgttcgtgcctgtaagattggtttgtgtcctgaccagctccaaaaatatacttcactgccctgaaaaacagacacagggagagttggttgtctcttcacttggccaaatgtaagtgaagaacagagtctttttcttcttcggattctattgtttgctggaaccgtacacgttccttggaagatcatgtttaagtgactcctgttgcctgagcacaaaaatgggcaccaatggaggaaaatgacccttgggctggcaggggcagtgacccttccagggtaccactgagggaagggcctgggttcaagcctcccggaacctcccctttggctaaccgagcccctgaaatgcccagtactgccatttgacatgagggtaccttcgccctcaggagatgtgacgaaggaacaaggtctaatttgtgcgtgtgtggactcactatggaaataaaatgcagtagaaagagcatgtaaaaa

SEQ ID NO: 395119 - DNA, 1000 bp, Homo Sapiens; identical to SEQ ID NO: 220967

SEQ ID NO: 395120 - DNA, 1000 bp, Homo Sapiens; identical to SEQ ID NO: 115550

SEQ ID NO: 395121 - DNA, 1000 bp, Homo Sapiens
taaatgacttacatgaagtgctactgccgcagtatccccagcaaatctttatacagattgcagagctgttggatctctgtgtcctggatgttgactgccttgaatttccttatggtatacttgctgcttcggccttgtatcatttctcgtcatctgaattgatgcaaaaggtttcagggtatcagtggtgcgacatagagaactgtgtcaagtggatggttccatttgccatggttataagggagacggggagctcaaaactgaagcacttcaggggcgtcgctgatgaagatgcacacaacatacagacccacagagacagcttggatttgctggacaaagcccgagcaaagaaagccatgttgtctgaacaaaatagggcttctcctctccccagtgggctcctcaccccgccacagagcggtaagaagcagagcagcgggccggaaatggcgtgaccaccccatccttctccaccaaagacagttgcgcgcctgctccacgttctcttctgtctgttgcagcggaggcgtgcgtttgcttttacagatatctgaatggaagagtgtttcttccacaacagaagtatttctgtggatggcatcaaacagggcaaagtgttttttattgaatgcttataggttttttttaaataagtgggtcaagtacaccagccacctccagacaccagtgcgtgctcccgatgctgctatggaaggtgctacttgacctaagggactcccacaacaacaaaagcttgaagctgtggagggccacggtggcgtggctctcctcgcaggtgttctgggctccgttgtaccaagtggagcaggtggttgcgggcaagcgttgtgcagagcccatagccagctgggcagggggctgccctctccacattatcagttgacagtgtacaatgcctttgatgaactgttttgtaagtgctgctatatctatccattttttaataaagataatactgtttttgagacaaaaaaaa

SEQ ID NO: 395122 - DNA, 1000 bp, Homo Sapiens
tctgcaaatactatgagaaaaggttattggaattctgttcggtgtttaagccagcaatgccaagatctgttgtgggtacggcttgtatgtatttcaaacgtttttatcttaataactcagtaatggaatatcaccccaggataataatgctcacttgtgcatttttggcctgcaaagtagatgaattcaatgtatctagtcctcagtttgttggaaacctccgggagagtcctcttggacaggagaaggcacttgaacagatactggaatatgaactacttcttatacagcaacttaatttccaccttattgtccacaatccttacagaccatttgagggcttcctcatcgacttaaagacccgctatcccatattggagaatccagagattttgaggaaaacagctgatgactttcttaatagaattgcattgacggatgcttaccttttatacacaccttcccaaattgccctgactgccattttatctagtgcctccagggctggaattactatggaaagttatttatcagagagtctgatgctgaaagagaacagaacttgcctgtcacagttactagatataatgaaaagcatgagaaacttagtaaagaagtatgaaccacccagatctgaagaagttgctgttctgaaacagaagttggagcgatgtcattctgctgagcttgcacttaacgtaatcacgaagaagaggaaaggctatgaagatgatgattacgtctcaaagaaatccaaacatgaggaggaagaatggactgatgacgacctggtagaatctctctaaccatttgaagttgatttctcaatgctaactaatcaagagaagtaggaagcatatcaaacgtttaactttatttaaaaagtataatgtgaaaacataaaatatattaaaacttttctattgttttctttccctttcacagtaactttatgtaaaataaaccatcttcaaaagagctagaataaaaaaaaaaaaaa

SEQ ID NO: 395123 - DNA, 1000 bp, Homo Sapiens; identical to SEQ ID NO: 220969

SEQ ID NO: 395124 - DNA, 1000 bp, Homo Sapiens; identical to SEQ ID NO: 284968

SEQ ID NO: 395125 - DNA, 1000 bp, Homo Sapiens; identical to SEQ ID NO: 284971

SEQ ID NO: 395126 - DNA, 1000 bp, Homo Sapiens
acagtcagtgctgttctttgtgccagccaggacagaaactggtgagtgactgcacagagttcactgaaacggaatgccttccttgcggtgaaagcgaattcctagacacctggaacagagagacacactgccaccagcacaaatactgcgaccccaacctagggcttcgggtccagcagaagggcacctcagaaacagacaccatctgcacctgtgaagaaggctggcactgtacgagtgaggcctgtgagagctgtgtcctgcaccgctcatgctcgcccggctttggggtcaagcagattgctacaggggtttctgataccatctgcgagccctgcccagtcggcttcttctccaatgtgtcatctgctttcgaaaaatgtcacccttggacaagctgtgagaccaaagacctggttgtgcaacaggcaggcacaaacaagactgatgttgtctgtggtccccaggatcggctgagagccctggtggtgatccccatcatcttcgggatcctgtttgccatcctcttggtgctggtctttatcaaaaaggtggccaagaagccaaccaataaggccccccaccccaagcaggaaccccaggagatcaattttcccgacgatcttcctggctccaacactgctgctccagtgcaggagactttacatggatgccaaccggtcacccaggaggatggcaaagagagtcgcatctcagtgcaggagagacagtgaggctgcacccacccaggagtgtggccacgtgggcaaacaggcagttggccagagagcctggtgctgctgctgctgtggcgtgagggtgaggggctggcactgactgggcatagctccccgcttctgcctgcacccctgcagtttgagacaggagacctggcactggatgcagaaacagttcaccttgaagaacctctcacttcaccctggagcccatccagtctcccaacttgtattaaagacagaggcagaaaaaaaaaaaaaaa

SEQ ID NO: 395127 - DNA, 1000 bp, Homo Sapiens; identical to SEQ ID NO: 115552

SEQ ID NO: 395128 - DNA, 916 bp, Homo Sapiens
ccagagaggggcaggctggtcccctgacaggttgaagcaagtagacgcccaggagccccgggagggggctgcagtttccttccttccttctcggcagcgctccgcgcccccatcgcccctcctgcgctagcggaggtgatcgccgcggcgatgccggaggagggttcgggctgctcggtgcggcgcaggccctatgggtgcgtcctgcgggctgctttggtcccattggtcgcgggcttggtgatctgcctcgtggtgtgcatccagcgcttcgcacaggctcagcagcagctgccgctcgagtcacttgggtgggacgtagctgagctgcagctgaatcacacaggacctcagcaggaccccaggctatactggcaggggggcccagcactgggccgctccttcctgcatggaccagagctggacaaggggcagctacgtatccatcgtgatggcatctacatggtacacatccaggtgacgctggccatctgctcctccacgacggcctccaggcaccaccccaccaccctggccgtgggaatctgctctcccgcctcccgtagcatcagcctgctgcgtctcagcttccaccaaggttgtaccattgcctcccagcgcctgacgcccctggcccgaggggacacactctgcaccaacctcactgggacacttttgccttcccgaaacactgatgagaccttctttggagtgcagtgggtgcgcccctgaccactgctgctgattagggttttttaaattttattttattttatttaagttcaagagaaaaagtgtacacacaggggccacccggggttggggtgggagtgtggtggggggtagtggtggcaggacaagagaaggcattgagctttttctttcattttcctattaaaaaatacaaaaatcaaaa

SEQ ID NO: 395129 - DNA, 1000 bp, Homo Sapiens; identical to SEQ ID NO: 115553

SEQ ID NO: 395130 - DNA, 1000 bp, Homo Sapiens; identical to SEQ ID NO: 220970

SEQ ID NO: 395131 - DNA, 1000 bp, Homo Sapiens; identical to SEQ ID NO: 115555

SEQ ID NO: 395132 - DNA, 1000 bp, Homo Sapiens; identical to SEQ ID NO: 220971

SEQ ID NO: 395133 - DNA, 1000 bp, Homo Sapiens; identical to SEQ ID NO: 284977

SEQ ID NO: 395134 - DNA, 1000 bp, Homo Sapiens; identical to SEQ ID NO: 220972

SEQ ID NO: 395135 - DNA, 1000 bp, Homo Sapiens; identical to SEQ ID NO: 284980

SEQ ID NO: 395136 - DNA, 1000 bp, Homo Sapiens; identical to SEQ ID NO: 220975

SEQ ID NO: 395137 - DNA, 1000 bp, Homo Sapiens; identical to SEQ ID NO: 284981

SEQ ID NO: 395138 - DNA, 1000 bp, Homo Sapiens; identical to SEQ ID NO: 284982

SEQ ID NO: 395139 - DNA, 1000 bp, Homo Sapiens; identical to SEQ ID NO: 284984

SEQ ID NO: 395140 - DNA, 1000 bp, Homo Sapiens; identical to SEQ ID NO: 284985

SEQ ID NO: 395141 - DNA, 1000 bp, Homo Sapiens; identical to SEQ ID NO: 115556

SEQ ID NO: 395142 - DNA, 1000 bp, Homo Sapiens; identical to SEQ ID NO: 115557

SEQ ID NO: 395143 - DNA, 1000 bp, Homo Sapiens; identical to SEQ ID NO: 220978

SEQ ID NO: 395144 - DNA, 1000 bp, Homo Sapiens; identical to SEQ ID NO: 220979

SEQ ID NO: 395145 - DNA, 1000 bp, Homo Sapiens
tggcttcttctgagactggtgttggagccccaatctcaggaccgggaattccaggccggttcaccaaggaggcagggacccttgcctactatgagatctgtgacttcctccgcggagccacagtccatagaaccctcggccagcaggtcccctatgccaccaagggcaaccagtgggtaggatacgacgaccaggaaagcgtcaaaagcaaggtgcagtacctgaaggataggcagctggcaggcgccatggtatgggccctggacctggatgacttccagggctccttctgcggccaggatctgcgcttccctctcaccaatgccatcaaggatgcactcgctgcaacgtagccctctgttctgcacacagcacgggggccaaggatgccccgtccccctctggctccagctggccgggagcctgatcacctgccctgctgagtcccaggctgagcctcagtctccctcccttggggcctatgcagaggtccacaacacacagatttgagctcagccctggtgggcagagaggtagggatggggctgtggggatagtgaggcatcgcaatgtaagactcgggattagtacacacttgttgatgattaatggaaatgtttacagatccccaagcctggcaagggaatttcttcaactccctgccccctagccctccttatcaaaggacaccattttggcaagctctatcaccaaggagccaaacatcctacaagacacagtgaccatactaattataccccctgcaaagccagcttgaaaccttcacttaggaacgtaatcgtgtcccctatcctacttccccttcctaattccacagctgctcaataaagtacaagagtttaacagtgtgttggcgctttgctttggtctatctttgagcgcccactagacccactggactcacctcccccatctcttctgggttccttcctctgagccttgggacccctgagcttgcagagatgaaggccgccatgtt

SEQ ID NO: 395146 - DNA, 1000 bp, Homo Sapiens; identical to SEQ ID NO: 284988

SEQ ID NO: 395147 - DNA, 1000 bp, Homo Sapiens; identical to SEQ ID NO: 284989

SEQ ID NO: 395148 - DNA, 1000 bp, Homo Sapiens; identical to SEQ ID NO: 284990

SEQ ID NO: 395149 - DNA, 1000 bp, Homo Sapiens; identical to SEQ ID NO: 284991

SEQ ID NO: 395150 - DNA, 1000 bp, Homo Sapiens; identical to SEQ ID NO: 220980

SEQ ID NO: 395151 - DNA, 1000 bp, Homo Sapiens; identical to SEQ ID NO: 115559

SEQ ID NO: 395152 - DNA, 1000 bp, Homo Sapiens
tggctgaagaacaaccgcaggtcgaattgttcgtgaaggctggcagtgatggggccaagattgggaactgcccattctcccagagactgttcatggtactgtggctcaagggagtcaccttcaatgttaccaccgttgacaccaaaaggcggaccgagacagtgcagaagctgtgcccaggggggcagctcccattcctgctgtatggcactgaagtgcacacagacaccaacaagattgaggaatttctggaggcagtgctgtgccctcccaggtaccccaagctggcagctctgaaccctgagtccaacacagctgggctggacatatttgccaaattttctgcctacatcaagaattcaaacccagcactcaatgacaatctggagaagggactcctgaaagccctgaaggttttagacaattacttaacatcccccctcccagaagaagtggatgaaaccagtgctgaagatgaaggtgtctctcagaggaagtttttggatggcaacgagctcaccctggctgactgcaacctgttgccaaagttacacatagtacaggtggtgtgtaagaagtaccggggattcaccatccccgaggccttccggggagtgcatcggtacttgagcaatgcctacgcccgggaagaattcgcttccacctgtccagatgatgaggagatcgagctcgcctatgagcaagtggcaaaggccctcaaataagcccctcctgggactccctcaaccccctccattttctccacaaaggccctggtggtttccacattgctacccaatggacacactccaaaatggccagtgggcagggaatcctggagcacttgttccgggatggtgtggtggaagaggggatgagggaaagaaatggggggcctgggtcagatttttattgtggggtgggatgagtaggacaacatatttcagtaataaaatacagaataaaaatcaagtgtttttacgcaaaaaaaaaaaaaaaa

SEQ ID NO: 395153 - DNA, 1000 bp, Homo Sapiens; identical to SEQ ID NO: 220981

SEQ ID NO: 395154 - DNA, 1000 bp, Homo Sapiens; identical to SEQ ID NO: 284995

SEQ ID NO: 395155 - DNA, 1000 bp, Homo Sapiens; identical to SEQ ID NO: 286221

SEQ ID NO: 395156 - DNA, 1000 bp, Homo Sapiens; identical to SEQ ID NO: 115560

SEQ ID NO: 395157 - DNA, 1000 bp, Homo Sapiens; identical to SEQ ID NO: 115561

SEQ ID NO: 395158 - DNA, 1000 bp, Homo Sapiens; identical to SEQ ID NO: 284999

SEQ ID NO: 395159 - DNA, 1000 bp, Homo Sapiens; identical to SEQ ID NO: 285000

SEQ ID NO: 395160 - DNA, 1000 bp, Homo Sapiens; identical to SEQ ID NO: 285001

SEQ ID NO: 395161 - DNA, 1000 bp, Homo Sapiens; identical to SEQ ID NO: 115562

SEQ ID NO: 395162 - DNA, 1000 bp, Homo Sapiens; identical to SEQ ID NO: 115564

SEQ ID NO: 395163 - DNA, 1000 bp, Homo Sapiens; identical to SEQ ID NO: 285004

SEQ ID NO: 395164 - DNA, 1000 bp, Homo Sapiens; identical to SEQ ID NO: 115567

SEQ ID NO: 395165 - DNA, 1000 bp, Homo Sapiens; identical to SEQ ID NO: 115570

SEQ ID NO: 395166 - DNA, 1000 bp, Homo Sapiens; identical to SEQ ID NO: 115571

SEQ ID NO: 395167 - DNA, 1000 bp, Homo Sapiens
aaaatgtttggaatggttttggaaaaaattattattcctgaaattcagaaggtatctggaaatgtagagaaaaagatctgtgcggttggcataaccaaattactaacagaatgtcccccaatgatggacactgagtataccaaactgtggactccattattacagtctttgattggtctttttgagttacccgaagatgataccattcctgatgaggaacattttattgacatagaagatacaccaggatatcagactgccttctcacagttggcatttgctgggaaaaaagagcatgatcctgtaggtcaaatggtgaataaccccaaaattcacctggcacagtcacttcacaagttgtctaccgcctgtccaggaagggttccatcaatggtgagcaccagcctgaatgcagaagcgctccagtatctccaagggtaccttcaggcagccagtgtgacactgctttaaactgcatttttctaatgggctaaacccagatggtttcctaggaaatcacaggcttctgagcacagctgcattaaaacaaaggaagttctccttttgaacttgtcacgaattccatcttgtaaaggatattaaatgttgctttaacctgaaccttgagcaaattagttggtttgtgtgatcatacagttatgtgggtggcttctagtttgcaacttcaagggacaagtattaatagttcagtgtatggcgttggtttgtgttgagcgtttgcacggtttggataatcttaaattttgacggacactgtggagactttctgttactaaatccttttgttttgaagctgttgctatttgtatttctcttgtcctttatattttttgtctgtttatttacgcttttattggaaatgtgaataagtaaagaattacttgtgttacttgccaagcagtgcacatttcatagtttcaaatctgtaatcagcaataaaaatcctaaaatatgtacctaaaaaaaaaaaaaaaaaaaa

SEQ ID NO: 395168 - DNA, 1000 bp, Homo Sapiens; identical to SEQ ID NO: 220985

SEQ ID NO: 395169 - DNA, 1000 bp, Homo Sapiens
ctccgtgtcccggcatccaccgcggcacctgacccttggcgcttgcgtgttgccctcttccccaccctccctaatttccactccccccaccccacttcgcctgccgcggtcgggtccgcggcctgcgctgtagcggtcgccgccgttccctggaagtagcaacttccctaccccaccccagtcctggtccccgtccagccgctgacgtgaagatgagcagctcagaggaggtgtcctggatttcctggttctgtgggctccgtggcaatgaattcttctgtgaagtggatgaagactacatccaggacaaatttaatcttactggactcaatgagcaggtccctcactaccgacaagctctagacatgatcttggacctggagcctgatgaagaactggaagacaaccccaaccagagtgacctgattgagcaggcagccgagatgctttatggattgatccacgcccgctacatccttaccaaccgtggcatcgcccagatgttggaaaagtaccagcaaggagactttggttactgtcctcgtgtgtactgtgagaaccagccaatgcttcccattggcctttcagacatcccaggtgaagccatggtgaagctctactgccccaagtgcatggatgtgtacacacccaagtcatcaagacaccatcacacggatggcgcctacttcggcactggtttccctcacatgctcttcatggtgcatcccgagtaccggcccaagagacctgccaaccagtttgtgcccaggctctacggtttcaagatccatccgatggcctaccagctgcagctccaagccgccagcaacttcaagagcccagtcaagacgattcgctgattccctcccccacctgtcctgcagtctttgacttttcctttcttttttgccaccctttcaggaaccctgtatggtttttagtttaaattaaaggagtcgttattgtggtgggaatatgaaataaagtagaagaaaaggcc

SEQ ID NO: 395170 - DNA, 901 bp, Homo Sapiens; identical to SEQ ID NO: 115572

SEQ ID NO: 395171 - DNA, 1000 bp, Homo Sapiens; identical to SEQ ID NO: 115573

SEQ ID NO: 395172 - DNA, 1000 bp, Homo Sapiens; identical to SEQ ID NO: 285012

SEQ ID NO: 395173 - DNA, 1000 bp, Homo Sapiens; identical to SEQ ID NO: 115574

SEQ ID NO: 395174 - DNA, 1000 bp, Homo Sapiens; identical to SEQ ID NO: 220986

SEQ ID NO: 395175 - DNA, 1000 bp, Homo Sapiens
cctttgtctctgtacctttaccaacattaggatctcacctctttcttcctcccttaattcataagcaccactcctatcaaagtcccatctcttaaccctgggtatcaaacaaactgtgagttttccagaatctgtttcccagttttcccctcagctttcctggtctcccatccgaactgcttctttgtgcacctcttgttctttctcttggctcccagtcttgattcctgtgatcactcttgcatcactaattgcacaagtgatttcaggtgcaattctgattagcctgcgtccacacagtgatcgatgatcctatgtgcctagaaaggacactgtgtgctgctcatgacctgcaacaggaaaaaagccatttcttgttagcagtgtaagaaccttagagcaaaggagttgaccttctgattgaatataagcacaaccatattaaatgaatcaatacaagaaaattatttctgatactatgtatgtacatatttcttctctaaaatgtatcattcttttctaatgtatatgatctaacaaaaatgaaacatgaaatgcagtagcaaccactaaaaaaaaaaattcaaggacatctaactttttctctcacttttgccctttgtttatccttccctgtgattagataaacaaaataaaaaacaaaatgctgtatttctcttcttacgccagtcagaaccaatccgaaaagaatgtgtgttgactcaggtttggagttatttcaggaagacagatattgaccttttaattgataaatattcttattatcctggaatgccagaaaagaactatgtcctgcttgtctagtttgtattcgctgactttctatgtgatatagatgcatttgtaatactctttttcaagtgctaaaggatttctaaaatttcaaactgattaatatgtttctgctgttctggattttgatgacatttacaataaaacaacctacatttgactttggtttaaaaagaaaaaaaaaaaa

SEQ ID NO: 395176 - DNA, 1000 bp, Homo Sapiens; identical to SEQ ID NO: 115576

SEQ ID NO: 395177 - DNA, 1000 bp, Homo Sapiens; identical to SEQ ID NO: 285017

SEQ ID NO: 395178 - DNA, 699 bp, Homo Sapiens; identical to SEQ ID NO: 115577

SEQ ID NO: 395179 - DNA, 1000 bp, Homo Sapiens
tggatggagaaccctggatgcagccatgttgcacgattaaaattactcacaagaaccaagcgcccatgatgatggggcctccccagaagagcagcttcttctcgttgagaaggaagagccgttcaaaagactaaacagtgtgccaaacaccagctaaaccaagagagaaagcaagaaactataatgcacactcacacacaatttatgtgcacactcacacatgcacacacacacacacatacacactcttctctaaccagtggaagcaaagccacccttcgggaagaaaacgtcaccttgccatacattctgtttcaacagtgggtacacccctaacagagccagtgccaacaaaacattttgaatggacttagggcccatgaggttgtggctggcttaggcagcaacctccacattcccacaggccttgagcagaattttctgagactgaagggaaatccccctttctttctaccagccctgcaagtttcctcatggacgctcgcgaggagcaggctgcaggtttcctgcctatggtgagatcagatgtggccaagggaaggagctctggttccagagaatttgcacaaagttccctctgtacagagacaaaacggcctccggctctcagagcataatccttggcagggctcagcaggcgcacgttggtttcttggtcgtcctttgagtgacaacttctccgtgaacctgctgaagaggcagaaaggctgtggaaagctgtatttccattcttgggtttctgcgccgtcggtgggcacttgttattttccaggaaccttctcctggtgtctacatgtttgcttagaggcggctccaagagccccagagctgcctgcatagcacaccttagatgtggtatttattttcttagttctgtgaacacctgggagggagagcggagaaactgggatttatttttcaaattggtgtcataatattgtgtaaaaagggaaggaaaaaaaaaaccacccccagcttc

SEQ ID NO: 395180 - DNA, 1000 bp, Homo Sapiens; identical to SEQ ID NO: 285018

SEQ ID NO: 395181 - DNA, 1000 bp, Homo Sapiens; identical to SEQ ID NO: 285019

SEQ ID NO: 395182 - DNA, 1000 bp, Homo Sapiens
gaggaggaggccacagattctgaagaggaggaggatctggaacagatgcaggagggtcaggaggatgatgaagaggaggacgaagaggaagaagcagcagcaggtaaagatggagacaagagccccatgtcctcactacagatctccaatgaaaagaacctggaacctggcaaacagatcagcagatcttcaggggagcagcaaaacaaaggacgcatagtgtcaccatcgttactgtcagaagaacccctggccccctccagcatagatgctgaaagcaatggagaacagcctgaggagctgaccctggaggaagaaagccctgtgtctcagctctttgagctagagattgaagctttgcccctggataccccttcctctgtggagacggacatttcctcttccaggaagcaatcagaggagcccttcaccactgtcttagagaatggagcaggcatggtctcttctacttccttcaatggaggcgtctctcctcacaactggggagattctggtcccccctgcaaaaaatctcggaaggagaagaagcaaacaggatcagggccattaggaaacagctatgtggaaaggcaaaggtcagtgcatgagaagaatgggaaaaagatatgtaccctgcccagcccaccttcccccttggcttccttggccccagttgctgattcctccacgagggtggactctcccagccatggcctggtgaccagctccctctgcatcccttctccagcccggctgtcccaaaccccccattcacagcctcctcggcctggtacttgcaagacaagtgtggccacacaatgcgatccagaagagatcatcgtgctctcagactctgattagctgcctccccttctccctgcctccagaatgttctgggataacatttggaggaaggtgggaagcagatgactgaggaagggatggactaagctaatccccttttggtggtgtttctttaaaaaaaaaaaaaaaaaaaaaa

SEQ ID NO: 395183 - DNA, 1000 bp, Homo Sapiens
gaattgtttttataaaaacattgaaatattagttacttgctataaatagatttagtctgttatatttccttttgtaaagtaaaatatgtccagaagagtcaaagtagttagttttggttatttctaaaccacaaaagttgtttaataagtatatcttaagaatgtgctagagttaaaagttagcattgtttctagattagctggtgtcttcattttacattgtgacaaacagctagagcatcagagcccttttgctataccacagtctttcgtttccagcctttgtcactagtctttgaggaggtttgctcctagaactggtgatataaagaatgaaagtagctgtatgagcagagcagttcaagggccaaaccctggaacggtagcaatgggatataatacctttctaagggaaaaagttgtatcagtaccatttgatctgccatggacatgagtttaaagcggctttctggcccttctttcagtgacttcttccctaaaatgtagaaattctaacttaatgtagttactgtgagccatattactagtgccccctagggtctataattccttaaaattttcattctgaatctgaaggagagagtcttttaactttagaattcccaagagggctttattacacctcagaaattgaaagcactatgaatttgtccatttaaaaatgatctgtagtttttttggtgctataacattctgacacatatcattctgtgattaaatctccagcttactataaatgatatctatattctaaagagctacttctaattattccaatatgaccttaaggaaaagtaagggaataaatttttgtctttgttggagtgaagcatttaaaagagtaagggtaaaaaagataaagtcctgaacctttcaaaatggaaaattaattctaaacttagaaatatgcttctgcctattgctgatactgtctttgcatacatgaataaaaataaactttttttcttcaaaaaaaaaa

SEQ ID NO: 395184 - DNA, 1000 bp, Homo Sapiens; identical to SEQ ID NO: 220988

SEQ ID NO: 395185 - DNA, 1000 bp, Homo Sapiens; identical to SEQ ID NO: 115578

SEQ ID NO: 395186 - DNA, 1000 bp, Homo Sapiens; identical to SEQ ID NO: 115579

SEQ ID NO: 395187 - DNA, 1000 bp, Homo Sapiens; identical to SEQ ID NO: 285024

SEQ ID NO: 395188 - DNA, 1000 bp, Homo Sapiens; identical to SEQ ID NO: 285025

SEQ ID NO: 395189 - DNA, 1000 bp, Homo Sapiens
ccgcctgctgcctggaatcttctaagggcacgccctagggagaagccctgtggggctgtcaagagcgtgttctgccaggtccatgggggctggcatcccagctccaactcgaggagcctcagtttcctcatctgtaaactggagagagcccagcacttggcaggtgtccagtacctaatcacgctctgttccttgcttttgccttcaagggaattccgagtgtccagcactgccgtattgccagcacagacggattttctctaatcagtgtccctgggcaggaggatgacccagtcacctttactagtcctttggagacaatttacctgtattaggagcccaggccacgctacactctgcccacactggtgagcaggaggtcttcccacgccctgtcattaggctgcatttactcttgctaaataaaagtgggagtggggcgtgcgcgttatccatgtattgcctttcagctctagatccccctcccctgcctgctctgcagtcgtgggtggggcccgtgcgccgtttctccttggtagcgtgcacggtgttgaactgggacactggggagaaaggggctttcatgtcgtttccttcctgctcctgctgcacagctgccaggagtgctctgcctggagtctgcagacctcagagaggtcccagcactggctgtggctttcaggtgtaggcaggtgggctctgcttcccgattccctgtgagcgcccaccctctcgaaagaattttctgtcttgccctgtgactgtgcagactctggctcgagcaacccggggaacttcaccctcaggggcctctccacaccttctccagcgaggaggtctcagtcccagcctcgggagggcacctccttttctgtgctttcttccctgaggcattcttcctcatccctagggtgttgtgtagaactctttttaaactctatgctccgagtagagttcatctttatattaaacttcccctgttcaaaaaaaaaaaaaaaaa

SEQ ID NO: 395190 - DNA, 1000 bp, Homo Sapiens
aaaggagggtggaaagaaaggaacgtgcccgattgaagacagtgaagtttaatgccaaacctggagtgattgattcgaaagggtcattcaatgacaagcgtaaaaagagcttcatcttttcacgaaaattcccattctacaagaacaaggagcagagtgagcaggaaaccagtgatcctgaacgtggacaagaagacctcattctttcctatgagcctgttacaaggcaggaaataaactacacccggccggtgattatcctggggcccatgaaggatcggatcaatgacgacttgatatctgaattccctgataaatttggctcctgtgtgcctcatactacgaggccaaagcgagactacgaggtggatggcagagactatcactttgtcatttccagagaacaaatggagaaagatatccaagagcacaagtttatagaagccggccagtacaatgacaatttatatggaaccagtgtgcagtctgtgagatttgtagcagaaagaggcaaacactgtatacttgatgtatcaggaaatgctatcaagcggttacaagttgcccagctctatcccattgccatcttcataaaacccaggtctctggaatctcttatggagatgaataagcgtctaacagaggaacaagccaagaaaacctatgatcgagcaattaagctagaacaagaatttggagaatattttacagctattgtccaaggagatactttagaagatatatataaccaatgcaagcttgttattgaagagcaatctgggcctttcatctggattccctcaaaggaaaagttataaattagctactgcgcctctgacaacgacagaagagcatttagaagaacaaaatatatataacatactacttggaggcttttatgtttttgttgcatttatgtttttgcagtcaatgtgaattcttacgaatgtacaacacaaactgtatgaagccatgaaggaaacagaggggccaaagggtg

SEQ ID NO: 395191 - DNA, 1000 bp, Homo Sapiens; identical to SEQ ID NO: 115580

SEQ ID NO: 395192 - DNA, 1000 bp, Homo Sapiens; identical to SEQ ID NO: 220991

SEQ ID NO: 395193 - DNA, 1000 bp, Homo Sapiens; identical to SEQ ID NO: 285029

SEQ ID NO: 395194 - DNA, 1000 bp, Homo Sapiens; identical to SEQ ID NO: 115581

SEQ ID NO: 395195 - DNA, 1000 bp, Homo Sapiens
gcgtgtccgagcacgagtacagctttgtgagcagccagcccctgggccgggaccagtacaaggagatgtacctgttcgtgtacaggaaagacgcggtgtcggtcgtggacacctacctgtacccagaccccgaggacgtcttcagccgcgagcccttcgtggtcaagttctcggcccccggcaccggtgagcgggccccgcccctcccctcccgccgagctctgacgcccccaccccttcccgcagcagcacagaacctggtgctgatcccgctgcacgcggcgccgcatcaagccgtggcggagatcgacgcgctctacgacgtgtacctggacgtgatcgacaagtggggcaccgacgacatgctgttcctgggcgacttcaacgccgactgcagctatgtgcgggcgcaggactgggccgccatccgtctgaggagcagtgaggtcttcaagtggctcatccctgacagcgccgacaccacggtgggcaactcagactgcgcctacgaccgcattgtggcctgtggcgcccgcctgcgccggagcctgaagccccagtcggccaccgtgcacgacttccaggaggaattcggcctggaccagactcaggctcttgccatcagcgaccactttccagtggaggtgaccctcaagttccaccgatgactcgaggcctggctggggcatgccacctgcagaccctggctctgaggaatggcccaacagtggccccttcagggtggcagccacccttcagtgaggccccaaggcagagtcggctgggcgtggaccaggggccatggacacgtgatgtgctgctctgtacctccgttccccatctgtgggacgggctgcatccagcgacctcatggggtgttgtgagccccatgaggggtgcagggggcactgcccggcagatgtctgctcaataaatgagctgctcccggtcgggccccacaaaaaaaaaaaaaaaaaaaaaaaaaaaaaaaaaaaaaaaa

SEQ ID NO: 395196 - DNA, 1000 bp, Homo Sapiens; identical to SEQ ID NO: 220992

SEQ ID NO: 395197 - DNA, 1000 bp, Homo Sapiens; identical to SEQ ID NO: 285032

SEQ ID NO: 395198 - DNA, 1000 bp, Homo Sapiens
actggcatccattgtcatgcagctgttggagcagtagacttctcacatctttttgtcacttcatcgtttgactggacagtaaagctttggacaactaagaataacaagcctttgtattcatttgaagataatgcagactatgtttatgatgttatgtggtcacctacccacccagccctgtttgcctgtgtggatggcatggggagattggatttatggaatctcaataatgacacagaggtaccaactgccagcatttctgtggagggtaatcctgctcttaatcgtgtgagatggacccattctggcagagagattgctgtgggtgattctgaaggacagattgttatatacgatgtgggagagcagattgctgttccccgcaatgatgaatgggcacggtttggccgaacacttgcagaaattaatgcaaaccgagctgatgcagaggaggaagcagctacccgaatacctgcttagttcctgaaaaggggagtgtaactagtggatttgggaaaggttcttaagtagatcctgagactatttgcatgcttctgtctaaatgataattaaaaggaaatttcatggattaaaccatgggtttaatgcagcaaggaaacttacaatgtccctttatatataacatgcatcttgttttggatttgtgtcattttttaatatagctgattgacttcacagaaagcagcttttttgaattctaatacataggtgtatatttggtattagttattttgagttcttttcaacttataacactgtatacagttatttctaaagcacagatgaaataagttctgcatatttttaaataatcacagttccctgttatacagataatgttctcactacccataatatgtaggaacattgtttctccttagccgtagtatgcatacacctatccatgttcattctgacatcctttgttgtctttataattcatgtggtagttacctataaataaaaacaaatatgcgtt

SEQ ID NO: 395199 - DNA, 1000 bp, Homo Sapiens
ctccggggcgcacagtaccagcccatcctcagggaccacatctgtaaggacatgagtgcattggtggctgcccgcatgcggcacatccccttggccccagggtcagactggcgcgatctgcccaacatcgaggtgcggctctcagacggcaccatggccaggaagctgcggtatacccaccatgacaggaagaacggccgcagcagctctggggccctccgtggggtctgctcctgcgtggaagccggcaaagcctgcgaccccgcagccaggcagttcaacaccctcatcccctggtgcctgccccacaccgggaaccggcacaaccactgggctggcctctatggaaggctcgagtgggacggcttcttcagcacaaccgtcaccaaccccgagcccatgggcaagcagggccgcgtgctccacccagagcagcaccgtgtggtgagcgtgcgggagtgtgcccgctcccagggcttccctgacacctaccggctcttcggcaacatcctggacaagcaccggcaggtgggcaatgccgtgccaccgcccctggccaaagccattggcttggagatcaagctttgtatgttggccaaagcccgagagagtgcctcagctaaaataaaggaggaggaagctgctaaggactagttctgccctcccgtcacccctgtttctggcaccaggaatccccaacatgcactgatgttgtgtttttaacatgtcaatctgtccgttcacatgtgtggtacatggtgtttgtggccttggctgacatgaagctgttgtgtgaggttcgcttatcaactaatgatttagtgatcaaattgtgcagtactttgtgcattctggattttaaaagttttttattatgcattatatcaaatctaccactgtatgagtggaaattaagactttatgtagtttttatatgttgtaatatttcttcaaataaatctctcctataaaccaaaaaaaaaaaaaaaaaaaaaaaaaa

SEQ ID NO: 395200 - DNA, 1000 bp, Homo Sapiens; identical to SEQ ID NO: 220993

SEQ ID NO: 395201 - DNA, 1000 bp, Homo Sapiens; identical to SEQ ID NO: 220994

SEQ ID NO: 395202 - DNA, 1000 bp, Homo Sapiens; identical to SEQ ID NO: 285036

SEQ ID NO: 395203 - DNA, 1000 bp, Homo Sapiens; identical to SEQ ID NO: 115582

SEQ ID NO: 395204 - DNA, 1000 bp, Homo Sapiens; identical to SEQ ID NO: 115583

SEQ ID NO: 395205 - DNA, 1000 bp, Homo Sapiens; identical to SEQ ID NO: 285040

SEQ ID NO: 395206 - DNA, 1000 bp, Homo Sapiens
tctccgtgggcgtgcactcggcccccagcagcctgccctacctgcacagccccatcaccacctctcccagctgttagagccgccctgggggccccagaaccagagctggctcccagcaagggtaggacgggccgcatgcgggcagaaagttgggactgagcagctgggagcaggcgaccgagctccttccccatcatttctccttggccaacgacgaggccagccagaatggcaataaggactccgaatacataataaaagcaaacagaacactccaacttagagcaataacggctgccgcagcagccagggaagaccttggtttggtttatgtgtcagtttcacttttccgatagaaatttcttacctcatttttttaagcagtaaggcttgaagtgatgaaacccacagatcctagcaaatgtgcccaaccagctttactaaagggggaggaagggagggcaaagggatgagaagacaagtttcccagaagtgcctggttctgtgtacttgtccctttgttgtcgttgttgtagttaaaggaatttcattttttaaaagaaatcttcgaaggtgtggttttcatttctcagtcaccaacagatgaataattatgcttaataataaagtatttattaagactttcttcagagtatgaaagtacaaaaagtctagttacagtggatttagaatatatttatgttgatgtcaaacagctgagcaccgtagcatgcagatgtcaaggcagttaggaagtaaatggtgtcttgtagatatgtgcaaggtagcatgatgagcaacttgagtttgttgccactgagaagcaggcgggttgggtgggaggaggaagaaagggaagaattaggtttgaattgctttttaaaaaaaaaagaaaagaaaaagacagcatctcactatgttgccaaggctcatcttgagaagcaggcgggttgggtgggaggaggaagaaagggaagaattaggtttgaattgctttttt

SEQ ID NO: 395207 - DNA, 1000 bp, Homo Sapiens; identical to SEQ ID NO: 285041

SEQ ID NO: 395208 - DNA, 1000 bp, Homo Sapiens; identical to SEQ ID NO: 118467

SEQ ID NO: 395209 - DNA, 1000 bp, Homo Sapiens; identical to SEQ ID NO: 115585

SEQ ID NO: 395210 - DNA, 1000 bp, Homo Sapiens; identical to SEQ ID NO: 115586

SEQ ID NO: 395211 - DNA, 1000 bp, Homo Sapiens; identical to SEQ ID NO: 220996

SEQ ID NO: 395212 - DNA, 1000 bp, Homo Sapiens; identical to SEQ ID NO: 115587

SEQ ID NO: 395213 - DNA, 1000 bp, Homo Sapiens; identical to SEQ ID NO: 285047

SEQ ID NO: 395214 - DNA, 1000 bp, Homo Sapiens; identical to SEQ ID NO: 115588

SEQ ID NO: 395215 - DNA, 1000 bp, Homo Sapiens; identical to SEQ ID NO: 285049

SEQ ID NO: 395216 - DNA, 1000 bp, Homo Sapiens; identical to SEQ ID NO: 115589

SEQ ID NO: 395217 - DNA, 1000 bp, Homo Sapiens; identical to SEQ ID NO: 115590

SEQ ID NO: 395218 - DNA, 1000 bp, Homo Sapiens; identical to SEQ ID NO: 115591

SEQ ID NO: 395219 - DNA, 1000 bp, Homo Sapiens; identical to SEQ ID NO: 285052

SEQ ID NO: 395220 - DNA, 1000 bp, Homo Sapiens; identical to SEQ ID NO: 285053

SEQ ID NO: 395221 - DNA, 1000 bp, Homo Sapiens; identical to SEQ ID NO: 115592

SEQ ID NO: 395222 - DNA, 1000 bp, Homo Sapiens; identical to SEQ ID NO: 115593

SEQ ID NO: 395223 - DNA, 1000 bp, Homo Sapiens; identical to SEQ ID NO: 115595

SEQ ID NO: 395224 - DNA, 1000 bp, Homo Sapiens
tcacggccgagcagctgcagagactcaaggcggagttccaggcaaaccgctacatcacggagcagcggcggcagaccctggcccaggaactcagcctcaacgagtcccagatcaagatctggttccagaacaagcgcgccaagatcaagaaagccacaggcatcaagaacggcctggcgctgcacctcatggcccagggactgtacaaccactccaccaccacggtccaggacaaagacgagagcgagtagccgccacaggccggggccgcgcccgcgccccctcccggcaccgccgccgtcgtctcccggcccctcgctgggggagaaagcatctgctccaaggagggagggagcgcagggaaaagagcgagagagacagaaagagagcctcagaatggacaatgacgttgaaacgcagcatttttgaaaagggagaaagactcggacaggtgctatcgaaaaataagatccattctctattcccagtataagggacgaaactgcgaactccttaaagctctatctagccaaaccgcttacgaccttgtatatatttaatttcaggtaaggaaaacacatacgtgtagcgatctctatttgctggacatttttattaatctcctttattattattgttataattattataattattataattattttatggccctcccccaccgcctcgctgcccccgcccagtttcgttttcgttgcctttttcatttgaatgtcattgcttctccggtgcctcccgacccgcatcgccggccctggtttctctgggacttttctttgtgtgcgagagtgtgtttcctttcgtgtctgcccacctcttctcccccacctcccgggtcccttctgtcggtctgtctgttctgcccccctttcgttttccggagacttgttgagaaatacgaccccacagactgcgagactgaaccgccgctacaagccaaagattttattatgttcagaaacctgtagtctgaaataaa

SEQ ID NO: 395225 - DNA, 1000 bp, Homo Sapiens
tgggctggcagaaggctctgtagagggagatggcatcatctatcttcctttcctttttcttttcttccctatttttttctttttttcctttatttttttcttttcttggagtggctgcttctgctatagagaacattcttccaagataaatatgtgtgttacacatatgtctgtatgcatgtgaacacacacacacacacacacacacacacaccaggcgcgcccgagtccacagttctgaaacatgtggctaccttgtctttcaaaagaactcagaatcctccaggatctagaagaaggaagaaagtgtgtaaataatcatttcttatcatcactttttgtcttttcttgttttttaaaatatacattttatttttgaaggtgtggtacagtgtaaattaaatatattcaatatatttcccaccaagtacctatatatgtatataaacaaacacattatctatatataacgccacactgtcttctgtttagtgtatggggaaagaccaatccaactgtccatctgtggctgggacagccagggggtgtgcccacggctgacccaggggtgtgcacacggctgagctgggagtcccgctggtctccctgaggactgagggtgaacttcgctctttgccttaaacctctttatttcattgcagtaatagttttacgttgtacataatagtgtaaacctttttaaaaaggaaagtataaaaacaaaagttgtaatttaaaagtctgaataaccatctgctgcttaggaaactcaatgaaatgacatgcctttttagcaggaagcaaagttggtttctgttttttgttttctttgttgttttagtttataaaacatgtgcattttacagttcagtatcaaatatttataatcttatgagaaatgaatgaatgtttctatttacaactgtgcttatcaaaattgtgaacacccccacccccgcatttttgtgtgttgaaattcttgaaggttacattaaataaa

SEQ ID NO: 395226 - DNA, 1000 bp, Homo Sapiens; identical to SEQ ID NO: 285055

SEQ ID NO: 395227 - DNA, 1000 bp, Homo Sapiens; identical to SEQ ID NO: 285056

SEQ ID NO: 395228 - DNA, 1000 bp, Homo Sapiens; identical to SEQ ID NO: 115597

SEQ ID NO: 395229 - DNA, 1000 bp, Homo Sapiens; identical to SEQ ID NO: 221001

SEQ ID NO: 395230 - DNA, 1000 bp, Homo Sapiens; identical to SEQ ID NO: 285059

SEQ ID NO: 395231 - DNA, 1000 bp, Homo Sapiens
caagagctgccaggcctgccgacttcggaagtgttacgaagtgggaatggtgaagtgtggctcccggagagagagatgtgggtaccgccttgtgcggagacagagaagtgccgacgagcagctgcactgtgccggcaaggccaagagaagtggcggccacgcgccccgagtgcgggagctgctgctggacgccctgagccccgagcagctagtgctcaccctcctggaggctgagccgccccatgtgctgatcagccgccccagtgcgcccttcaccgaggcctccatgatgatgtccctgaccaagttggccgacaaggagttggtacacatgatcagctgggccaagaagattcccggctttgtggagctcagcctgttcgaccaagtgcggctcttggagagctgttggatggaggtgttaatgatggggctgatgtggcgctcaattgaccaccccggcaagctcatctttgctccagatcttgttctggacagggatgaggggaaatgcgtagaaggaattctggaaatctttgacatgctcctggcaactacttcaaggtttcgagagttaaaactccaacacaaagaatatctctgtgtcaaggccatgatcctgctcaattccagtatgtaccctctggtcacagcgacccaggatgctgacagcagccggaagctggctcacttgctgaacgccgtgaccgatgctttggtttgggtgattgccaagagcggcatctcctcccagcagcaatccatgcgcctggctaacctcctgatgctcctgtcccacgtcaggcatgcgagtaacaagggcatggaacatctgctcaacatgaagtgcaaaaatgtggtcccagtgtatgacctgctgctggagatgctgaatgcccacgtgcttcgcgggtgcaagtcctccatcacggggtccgagtgcagcccggcagaggacagtaaaagcaaagagggctcccagaacccacagtctcagtga

SEQ ID NO: 395232 - DNA, 1000 bp, Homo Sapiens
gcgggccgtgctggagaccaaacagagccttgaggctgcggggcacacgctggttcccttcttgccaagcaacataccccatgctctggagaccctgtcaacaggtgggctcttcagtgatggtggccacaccttcctacagaacttcaaaggtgatttcgtggacccctgcctgggggacctggtctcaattctgaagcttccccaatggcttaaaggactgctggccttcctggtgaagcctctgctgccaaggctgtcagctttcctcagcaacatgaagtctcgttcggctggaaaactctgggaactgcagcacgagatcgaggtgtaccgcaaaaccgtgattgcccagtggagggcgctggacctggatgtggtgctgacccccatgctggcccctgctctggacttgaatgccccaggcagggccacaggggccgtcagctacactatgctgtacaactgcctggacttccctgcaggggtggtgcctgtcaccacggtgactgctgaggacgaggcccagatggaacattacaggggctactttggggatatctgggacaagatgctgcagaagggcatgaagaagagtgtggggctgccggtggccgtgcagtgtgtggctctgccctggcaagaagagttgtgtctgcggttcatgcgggaggtggagcgactgatgacccctgaaaagcagtcatcctgatggctctggctccagaggacctgagactcacactctctgcagcccagcctagtcagggcacagctgccctgctgccacagcaaggaaatgtcctgcatggggcagaggcttccgtgtcctctcccccaaccccctgcaagaagcgccgactccctgagtctggacctccatccctgctctggtcccctctcttcgtcctgatccctccacccccatgtggcagcccatgggtatgacataggccaaggcccaactaacagtcaagaaacaaaaaaaaaaaaaaaaaaa

SEQ ID NO: 395233 - DNA, 619 bp, Homo Sapiens; identical to SEQ ID NO: 115598

SEQ ID NO: 395234 - DNA, 662 bp, Homo Sapiens
accgccgacgcagacccctctctgcacgccagcccgcccgcacccaccatggccacagttcagcagctggaaggaagatggcgcctggtggacagcaaaggctttgatgaatacatgaaggagctaggagtgggaatagctttgcgaaaaatgggcgcaatggccaagccagattgtatcatcacttgtgatggtaaaaacctcaccataaaaactgagagcactttgaaaacaacacagttttcttgtaccctgggagagaagtttgaagaaaccacagctgatggcagaaaaactcagactgtctgcaactttacagatggtgcattggttcagcatcaggagtgggatgggaaggaaagcacaataacaagaaaattgaaagatgggaaattagtggtggagtgtgtcatgaacaatgtcacctgtactcggatctatgaaaaagtagaataaaaattccatcatcactttggacaggagttaattaagagaatgaccaagctcagttcaatgagcaaatctccatactgtttctttcttttttttttcattactgtgttcaattatctttatcataaacattttacatgcagctatttcaaagtgtgttggattaattaggatcatccctttggttaataaataaatgtgtttgtgct

SEQ ID NO: 395235 - DNA, 1000 bp, Homo Sapiens; identical to SEQ ID NO: 285061

SEQ ID NO: 395236 - DNA, 1000 bp, Homo Sapiens; identical to SEQ ID NO: 221003

SEQ ID NO: 395237 - DNA, 1000 bp, Homo Sapiens; identical to SEQ ID NO: 285063

SEQ ID NO: 395238 - DNA, 1000 bp, Homo Sapiens; identical to SEQ ID NO: 115600

SEQ ID NO: 395239 - DNA, 1000 bp, Homo Sapiens; identical to SEQ ID NO: 115601

SEQ ID NO: 395240 - DNA, 1000 bp, Homo Sapiens; identical to SEQ ID NO: 285066

SEQ ID NO: 395241 - DNA, 1000 bp, Homo Sapiens
gcgcatccaggacatcaagaccgagaacggtacgtgcccctcgccgccccagcccctgtccccggccgccgccctgggcagcggcagcgccgccgcggtgcccaagatcgagagccccgacagcagcagcagcagcctgtccagcgggagcagccccccgggcagcctgccgtcggcgcggccgctcagcctggacggtgcggattccgcgccgccgccgcccgcgccctccgccccgccgccgcaccatagccagggcttcagcgtggacaacatcatgacgtcgctgcgggggtcgccgcagagcgcggccgcggagctcagctccggccttctggcctcggcggccgcgtcctcgcgcgcggggatcgcacccccgctggcgctcggcgcctactcgcccggccagagctccctctacagctccccctgcagccagacctccagcgcgggcagctcgggcggcggcggcggcggcgcgggggccgcggggggcgcgggcggcgccgggacctaccactgcaacctgcaagccatgagcctgtacgcggccggcgagcgcgggggccacttgcagggcgcgcccgggggcgcgggcggctcggccgtggacaaccccctgcccgactactctctgcctccggtcaccagcagcagctcgtcgtccctgagtcacggcggcggcggcggcggcggcgggggaggccaggaggccggccaccaccctgcggcccaccaaggccgcctcacctcgtggtacctgaaccaggcgggcggagacctgggccacttggcaagcgcggcggcggcggcggcggccgcaggctacccgggccagcagcagaacttccactcggtgcgggagatgttcgagtcacagaggatcggcttgaacaactctccagtgaacgggaatagtagctgtcaaatggccttcccttccagccagtctctgtaccgcacgtccggagctttcgtctacgactgtagcaagttttga

SEQ ID NO: 395242 - DNA, 1000 bp, Homo Sapiens
tcatctcagagctgggtgccaggctgaaggatcactgaggaaggggaagtgggcaaagcagaccctcaaactgacacaagacctacagagaaaaccctttgccaaatctgctctcagcaagtggacagtgataccgtttacagcttaacacctttgtgaatcccacgccattttcctaacccagcagagactgttaatggccccttaccctgggtgaagcacttacccttggaacagaactctaaaaagtatgcaaaatcttccttgtacagggtggtgagccgcctgccagtggaggacagcacccctcagcaccacccaccctcattcagagcacaccgtgagcccccgtcggccattctgtggtgttttaatattgcgatggtttatgggacgttttaagtgttgttcttgtgtttgttttcctttgactttctgagtttttcacatgcattaacttgcggtatttttctgttaaaatgttaaccgtccttcccctagcaaatttaaaaacagaaagaaaatgttgtaccagttaccattccgggttcgagcatcacaagcttttgagcgcatggaactccataaactaacaaattacataaactaaagggggattttctttcttcttttgtttggtagaaaattatccttttctaaaaactgaacaatggcacaattgtttgctatgtgcacccgtccaggacagaaccgtgcataggcaaaaggagtggagcacagcgtccggcccagtgtgtttccggttctgagtcagggtgatctgtggacgggaccccagcaccaagtctacgggtgccagatcagtagggcctgtgatttcctgtcagtgtcctcagctaatgtgaacagtgttggtctgctggttagaaactagaatattgatattttcaggaaagaaatcagctcagctctccactcattgccaaatgtcactaaagggtttagttttaaggagaaagaaaaggaaaaaaaaaaaaaa

SEQ ID NO: 395243 - DNA, 1000 bp, Homo Sapiens; identical to SEQ ID NO: 115602

SEQ ID NO: 395244 - DNA, 1000 bp, Homo Sapiens; identical to SEQ ID NO: 115603

SEQ ID NO: 395245 - DNA, 1000 bp, Homo Sapiens; identical to SEQ ID NO: 221004

SEQ ID NO: 395246 - DNA, 1000 bp, Homo Sapiens; identical to SEQ ID NO: 221005

SEQ ID NO: 395247 - DNA, 1000 bp, Homo Sapiens; identical to SEQ ID NO: 115604

SEQ ID NO: 395248 - DNA, 1000 bp, Homo Sapiens; identical to SEQ ID NO: 221006

SEQ ID NO: 395249 - DNA, 1000 bp, Homo Sapiens; identical to SEQ ID NO: 285072

SEQ ID NO: 395250 - DNA, 1000 bp, Homo Sapiens
gggctgctacaccatggtgtcggtggcctacatcgcgggcttcgtgctccaggagcgcgtggtgtgcaacgagcgcttctccgaggacggttaccgcacggtggtgcagggcaccaagaaggagggctgcaccatcctcttcatgatgctctacttcttcagcatggccagctccatctggtgggtcatcctgtcgctcacctggttcctggcagccggcatgaagtggggccacgaggccatcgaggccaactctcagtacttccacctggccgcctgggccgtgccggccgtcaagaccatcaccatcctggccatgggccagatcgacggcgacctgctgagcggcgtgtgcttcgtaggcctcaacagcctggacccgctgcggggcttcgtgctagcgccgctcttcgtgtacctgttcatcggcacgtccttcctcctggccggcttcgtgtcgctcttccgcatccgcaccatcatgaagcacgacggcaccaagaccgaaaagctggagcggctcatggtgcgcatcggcgtcttctccgtgctctacacagtgcccgccaccatcgtcatcgcttgctacttctacgagcaggccttccgcgagcactgggagcgctcgtgggtgagccagcactgcaagagcctggccatcccgtgcccggcgcactacacgccgcgcatgtcgcccgacttcacggtctacatgatcaaatacctcatgacgctcatcgtgggcatcacgtcgggcttctggatctggtcgggcaagacgctgcactcgtggaggaagttctacactcgcctcaccaacagccgacacggtgagaccaccgtgtgagggacgcccccaggccggaaccgcgcggcgctttcctccgcccggggtggggcccctacagactccgtattttatttttttaaataaaaaacgatcgaaaccatttcacttttaggttgctttttaaaagagaactctctgcccaacaccccc

SEQ ID NO: 395251 - DNA, 1000 bp, Homo Sapiens; identical to SEQ ID NO: 115605

SEQ ID NO: 395252 - DNA, 1000 bp, Homo Sapiens
aggccctccctgttcgtgtacccagaggagtcgctggtgattgggagctcaaccctgttcagtgctctgctcatcaagtgtctggagaaggaggttgcagcattgtgcagatacacaccccgcaggaacatccctccttattttgtggctttggtgccacaggaagaagagttggatgaccagaaaattcaggtgactcctccaggcttccagctggtctttttaccctttgctgatgataaaaggaagatgccctttactgaaaaaatcatggcaactccagagcaggtgggcaagatgaaggctatcgttgagaagcttcgcttcacatacagaagtgacagctttgagaaccccgtgctgcagcagcacttcaggaacctggaggccttggccttggatttgatggagccggaacaagcagtggacctgacattgcccaaggttgaagcaatgaataaaagactgggctccttggtggatgagtttaaggagcttgtttacccaccagattacaatcctgaagggaaagttaccaagagaaaacacgataatgaaggttctggaagcaaaaggcccaaggtggagtattcagaagaggagctgaagacccacatcagcaagggtacgctgggcaagttcactgtgcccatgctgaaagaggcctgccgggcttacgggctgaagagtgggctgaagaagcaggagctgctggaagccctcaccaagcacttccaggactgaccagaggccgcgcgtccagctgcccttccgcagtgtggccaggctgcctggccttgtcctcagccagttaaaatgtgtttctcctgagctaggaagagtctacccgacataagtcgagggactttatgtttttgaggctttctgttgccatggtgatggtgtagccctcccactttgctgttccttactttactgcctgaataaagagccctaagtttgtactatatactgttaaaaaaaaaaaaaaaaaaaaaaa

SEQ ID NO: 395253 - DNA, 1000 bp, Homo Sapiens
agacaatgctgtacagttttattcctcttcagacatgaaagggaacatatatattccatatatatgttcaactcttcatagattgtgaactggcccatcaatatggtcaggaatatttgcagtctacattttaaagccaatttatttagaaaaaaaatttgagctttaattctttaattttaagagaagtaatattgtgaactatgtattttaaaatatgatcatggacacacaatgatgaattttttggccatttacatagacatatctattaagtggaaagaaggctttctgaagtctgtttgcacaggtggcatttgcttccaattgtagctagcgcacagagctttggaagcctgtcattatgagatacagtcggtttacctcaggagtcaattcagtgttgtactggtgacctgggatgcagtagtaggcactgttgattcaaatttatcctgtgaaactggctttatagagttaacaaaacagagtcagagaccactgtcttaacagtggaagatgcaaataagtttttgagaataaaactggattttgaaattttacattagtacttgacaaaagttttcattttgccttgaatggaacctactaaaaagagagatgaaaaaaaatcagcgaggttgatgtagataataatttctatgggaccaaagactagacagaattcagtaagtcacatgaagtaatggtcatgcctgtacataaagcatatttcatgtttgatttagatgacattcaaaaaaaatcatgggactgaatatacctggggtatcctatcttgtacaaatgcatgctttttcattaaatttgtaatgatgtttaatgaacatttccaccaaacattatttcctctaaaaatgttaatttggggttaaaaccatcaccatttgaatttcaaatgtagttttcatgacaattttatattgatgtgtgtttacaatgagaaaatggcatgaaaatattaaattgtcttgtatcg

SEQ ID NO: 395254 - DNA, 1000 bp, Homo Sapiens; identical to SEQ ID NO: 115606

SEQ ID NO: 395255 - DNA, 1000 bp, Homo Sapiens; identical to SEQ ID NO: 285074

SEQ ID NO: 395256 - DNA, 1000 bp, Homo Sapiens
gctgtatatagcttgtgagaaacctcttttctttaaaatttacataatcacaagaaaggaaagaattacagttggactgattgtgacagtgccttgtcgtcctctttgaaacaccccgtgttgtccagtataccttataacacttagccacttctccccaccctccagaaggggtccacgttgaattctgaatcatcttgaaaataagattccaaccacaaaaaaaatttagccatttctttactaaaaaaaaccaaaaaacaaatctgttttataatcacagatttttagacaaatttcttgtatcaggaagaaatacaaattttgtcatgtttctcaagcagtttttctgagtagtttctgaggaggaacaaattacaagtgtacccaataactgaaaatgttttaactcactctcatttgtaagcagtccacatagtagacaatgggttttccaagctgggcaaggtacatttaatcagtaaatcagtttcacatcatgtattgtgatgtttcaatgtgagacacaaaaacaatggcttgaaacttgtgtatcatatgtgattttgaaatgaacaccttgaatagcactaatttttatttgtggtatttttctataacaaaacaagtagctctaggaaaagaggttttattttgtaaacgatcatttgtgacctcagacactctctggctaatattttaataagctcacagcagataattctgagatcatgggtgaggggtggtgcatgttgagatttaaattggcataaagctgcatactttttgtctagctgtttgatttcattttttaatatagtatgccaattttgtgactgttaccatgtgaaagtcctgttgaaatgaacaattgtctgccccacaatcaagaatgtatgtgtaaagtgtgaataaatctcatatcaaatgtcaaacttttacatgtgaatgattttctcaaagaacatagaaaaggcaataaaatcctcttaatttccac

SEQ ID NO: 395257 - DNA, 1000 bp, Homo Sapiens
ctcacctctacgctcatggccacgctccccggcggcttctccgcgtcgccccagcaccaggaggcggcagcggcccgcaagttcgcgccgcagccgctgcccggcggcggtaacttcgacaaggcggaggcgctgcaggctgacgcggaggacggcaaaggcttcctggccaaagagggctcgctgctcgccttctccgcggccgagacggtgcaggcttcgctcgtcggggctgtccgagggcaagggaaagacgagtcaaaggtggaagacgacccgaagggcaaggaggagagcttctcgctggagagcgatgtggactacagctcggatgacaatctgactggccaggcagctcacaaggaggaagacccgggccacgcgctggaggagaccccgccgagcagcggcgccgcgggcagcaccacgtctacgggcaagaaccggcggcggcggactgccttcaccagcgagcagctgctggagctagagaaggagttccactgcaaaaagtacctctccttgaccgagcgctcgcagatcgcccacgccctcaaactcagcgaggtgcaggtgaaaatctggttccagaaccgacgggccaagtggaaacgggtgaaggcaggcaatgccaattccaagacaggggagccctcccggaaccctaagatcgtcgtccccatccctgtccacgtcagcaggttcgctatcagaagtcagcatcagcagctagaacaggcccggccctgagggtccagaagggccagggcctggcacccacctggagaagcccccgcacccgagggaacccatggtggactccactgtgtttgaagcaacaaagtcacagcccagctgtggccatcccaagcaaattgagaatatattcactaaatgggcttaaaagactgcttttgaaggggcttacagccacaccagaagacacgctaaatatttattatactatcctactttgtacataaatatctctatagactgg

SEQ ID NO: 395258 - DNA, 1000 bp, Homo Sapiens; identical to SEQ ID NO: 285075

SEQ ID NO: 395259 - DNA, 1000 bp, Homo Sapiens; identical to SEQ ID NO: 285077

SEQ ID NO: 395260 - DNA, 1000 bp, Homo Sapiens; identical to SEQ ID NO: 224102

SEQ ID NO: 395261 - DNA, 1000 bp, Homo Sapiens
gttcccccggtcatgtggcgcctgtttcgacgccgggacccccaggagaccaggtctggctcgcggcggacgtccccaggggtcaccctgcaaccgtgccacgtggaggagctgggggtcgccggaaacatcgtgcgccacatcccggaccgcggtgcgcccacccgggcctcggagcctgtctcggccgcggggcattgccctgagtggacagtcgtcttcgacctgtcggctgtggaacccgctgagcgcccgagccgggcccgcctggagctgcgtttcgcggcggcggcggcggcagccccggagggcggctgggagctgagcgtggcgcaagcgggccagggcgcgggcgcggaccccgggccggtgctgctccgccagttggtgcccgccctggggccgccagtgcgcgcggagctgctgggcgccgcttgggctcgcaacgcctcatggccgcgcagcctccgcctggcgctggcgctacgcccccgggcccctgccgcctgcgcgcgcctggccgaggcctcgctgctgctggtgaccctcgacccgcgcctgtgccaccccctggcccggccgcggcgcgacgccgaacccgtgttgggcggcggccccgggggcgcttgtcgcgcgcggcggctgtacgtgagcttccgcgaggtgggctggcaccgctgggtcatcgcgccgcgcggcttcctggccaactactgccagggtcagtgcgcgctgcccgtcgcgctgtcggggtccggggggccgccggcgctcaaccacgctgtgctgcgcgcgctcatgcacgcggccgccccgggagccgccgacctgccctgctgcgtgcccgcgcgcctgtcgcccatctccgtgctcttctttgacaacagcgacaacgtggtgctgcggcagtatgaggacatggtggtggacgagtgcggctgccgctaacccggggcgggcagggacgcgggcccaacaataaatgccgcgtggtctgctc

SEQ ID NO: 395262 - DNA, 1000 bp, Homo Sapiens; identical to SEQ ID NO: 115608

SEQ ID NO: 395263 - DNA, 1000 bp, Homo Sapiens; identical to SEQ ID NO: 285079

SEQ ID NO: 395264 - DNA, 1000 bp, Homo Sapiens; identical to SEQ ID NO: 285081

SEQ ID NO: 395265 - DNA, 1000 bp, Homo Sapiens; identical to SEQ ID NO: 115610

SEQ ID NO: 395266 - DNA, 1000 bp, Homo Sapiens; identical to SEQ ID NO: 285084

SEQ ID NO: 395267 - DNA, 1000 bp, Homo Sapiens
ccactgccaatacaacttcccacaggtgggccgcacggctctgcgggtgctgcagctggtggctggctttctgctgcccctgctggtcatggcctactgctatgcccacatcctggccgtgctgctggtttccaggggccagcggcgcctgcgggccatgcggctggtggtggtggtcgtggtggcctttgccctctgctggaccccctatcacctggtggtgctggtggacatcctcatggacctgggcgctttggcccgcaactgtggccgagaaagcagggtagacgtggccaagtcggtcacctcaggcctgggctacatgcactgctgcctcaacccgctgctctatgcctttgtaggggtcaagttccgggagcggatgtggatgctgctcttgcgcctgggctgccccaaccagagagggctccagaggcagccatcgtcttcccgccgggattcatcctggtctgagacctcagaggcctcctactcgggcttgtgaggccggaatccgggctcccctttcgcccacagtctgacttccccgcattccaggctcctccctccctctgccggctctggctctccccaatatcctcgctcccgggactcactggcagccccagcaccaccaggtctcccgggaagccaccctcccagctctgaggactgcaccattgctgctccttagctgccaagccccatcctgccgcccgaggtggctgcctggagccccactgcccttctcatttggaaactaaaacttcatcttccccaagtgcggggagtacaaggcatggcgtagagggtgctgccccatgaagccacagcccaggcctccagctcagcagtgactgtggccatggtccccaagacctctatatttgctcttttatttttatgtctaaaatcctgcttaaaacttttcaataaacaagatcgtcaggaccaaaaaaaaaaaaaaaaaaaaaaaaaaaaaaaaaaaaaaaaaaaaaaa

SEQ ID NO: 395268 - DNA, 1000 bp, Homo Sapiens
ttgttccaggaagatgaactcttccggatgcctgtctgaggaggtggggtccctccgcccactgactgtggttatcctgtctgcgtccattgtcgtcggagtgctgggcaatgggctggtgctgtggatgactgtcttccgtatggcacgcacggtctccaccgtctgcttcttccacctggcccttgccgatttcatgctctcactgtctctgcccattgccatgtactatattgtctccaggcagtggctcctcggagagtgggcctgcaaactctacatcacctttgtgttcctcagctactttgccagtaactgcctccttgtcttcatctctgtggaccgttgcatctctgtcctctaccccgtctgggccctgaaccaccgcactgtgcagcgggcgagctggctggcctttggggtgtggctcctggccgccgccttgtgctctgcgcacctgaaattccggacaaccagaaaatggaatggctgtacgcactgctacttggcgttcaactctgacaatgagactgcccagatttggattgaaggggtcgtggagggacacattatagggaccattggccacttcctgctgggcttcctggggcccttagcaatcataggcacctgcgcccacctcatccgggccaagctcttgcgggagggctgggtccatgccaaccggcccaagaggctgctgctggtgctggtgagcgctttctttatcttctggtccccgtttaacgtggtgctgttggtccatctgtggcgacgggtgatgctcaaggaaatctaccacccccggatgctgctcatcctccaggctagctttgccttgggctgtgtcaacagcagcctcaaccccttcctctacgtcttcgttggcagagatttccaagaaaagtttttccagtctttgacttctgccctggcgagggcgtttggagaggaggagtttctgtcatcctgtccccgtggcaacgccccccgggaatga

SEQ ID NO: 395269 - DNA, 1000 bp, Homo Sapiens
agaaatcccttatggcacagtcctagactctgcggtatatgagcatgtccgcatgaaaggactgaatccttttgagagggacagcatgtattcccaaatgtggcggatgatcaaccgaagcaatggatcggagaacaatgttctggagtcccaggcaggcattcaaaaggtaaaatatggaaattatgctttcgtatgggatgcagctgtattggaatatgtggctatctatgacccagattgttccttttacaccattggaaatactgttgctgatcggggatatggaattgcattacaacatggcagtccttaccgagatgttttttcacaaaggatcctggagcttcagcagaatggtgacatggacatcctgaagcacaaatggtggcctaagaatggccagtgtgacctgtactcgtcagtggacacaaagcagaaaggaggcgccctggacataaagagctttgcaggggtcttttgtatcctggctgctggaattgtcctctcctgcttcatagccatgctggagacgtggtggaacaagaggaaaggctcccgggttccatcaaaagaggatgacaaggaaattgacctggagcacctccatagacgtgtaaatagcttgtgcacagatgacgacagcccccataaacagttttccacctcgtcaattgatttgacccctctggacattgacactttgccaacacgacaagcactggagcaaatcagtgatttcaggaacactcatattaccacaacaacctttatcccagagcagatccagactcttagccgcacactgtcagctaaagctgcttctggtttcacttttggcaacgtgcctgagcaccgaactggcccttttaggcacagggcacctaatgggggctttttcaggagtcctataaaaacaatgtcatctattccttatcaaccaactcctaccctggggctcaatctgggtaatgatccagaccgaggcacctccatatga

SEQ ID NO: 395270 - DNA, 1000 bp, Homo Sapiens; identical to SEQ ID NO: 115614

SEQ ID NO: 395271 - DNA, 1000 bp, Homo Sapiens; identical to SEQ ID NO: 115615

SEQ ID NO: 395272 - DNA, 1000 bp, Homo Sapiens; identical to SEQ ID NO: 285089

SEQ ID NO: 395273 - DNA, 1000 bp, Homo Sapiens; identical to SEQ ID NO: 115617

SEQ ID NO: 395274 - DNA, 1000 bp, Homo Sapiens; identical to SEQ ID NO: 115618

SEQ ID NO: 395275 - DNA, 1000 bp, Homo Sapiens
gctaccaagtacacctccaggtcccgctgctactcagagacgccctcgtccttcctgcggtggctgagccagcagacacgctggtccaagtcgtacttccgtgagtggctgtacaacgcgctctggtggcaccggcaccatgcgtggatgacctacgaggcggtggtctccggcctgttccccttcttcgtggcggccactgtgctgcgtctgttctacgcgggccgcccttgggcgctgctgtgggtgctgctgtgcgtgcagggcgtggcactggccaaggcggccttcgcggcctggctgcggggctgcctgcgcatggtgcttctctcgctctacgcgcccctctacatgtgtggcctcctgcctgccaagttcctggcgctagtcaccatgaaccagagtggctggggcacctcgggccggcggaagctggccgctaactacgtccctctgctgcccctggcgctctgggcgctgctgctgcttgggggcctggtccgcagcgtagcacacgaggccagggccgactggagcggcccttcccgcgcagccgaggcctaccacttggccgcgggggccggcgcctacgtgggctactgggtggccatgttgacgctgtactgggtgggcgtgcggaggctttgccggcggcggaccgggggctaccgcgtccaggtgtgagtccagccacgcggatgccgcctcaagggtcttcaggggaggccagaggagagctgctgggccccgagccacgaacttgctgggtggttctctgggcctcagtttccctcctctgccaaacgagggggtcagcccaagattcttcagtctggactatattgggactgggacttctgggtctccagggagggtatttattggtcaggatgtgggatttgaggagtggaggggaaagggtcctgctttctcctcgttcttatttaatctccatttctactgtgtgatcaggatgtaataaagaattttatttattttc

SEQ ID NO: 395276 - DNA, 1000 bp, Homo Sapiens
agtgtggtgcagactcattatctggtgatagactgggttgtttcaatctaacagtcaaaggtcatgctaaatgtgtagaagttgtaaaaacttttaacttaccattactgatgcttggaggaggtggctacacaatccgtaatgttgctcgatgttggacatatgagactgcagttgcccttgattgtgagattcccaatgagttgccatataatgattactttgagtattttggaccagacttcaaactgcatattagtccttcaaacatgacaaaccagaacactccagaatatatggaaaagataaaacagcgtttgtttgaaaatttgcgcatgttacctcatgcacctggtgtccagatgcaagctattccagaagatgctgttcatgaagacagtggagatgaagatggagaagatccagacaagagaatttctattcgagcatcagacaagcggatagcttgtgatgaagaattctcagattctgaggatgaaggagaaggaggtcgaagaaatgtggctgatcataagaaaggagcaaagaaagctagaattgaagaagataagaaagaaacagaggacaaaaaaacagacgttaaggaagaagataaatccaaggacaacagtggtgaaaaaacagataccaaaggaaccaaatcagaacagctcagcaacccctgaatttgacagtctcaccaatttcagaaaatcattaaaaagaaaatattgaaaggaaaatgttttctttttgaagacttctggcttcattttatactactttggcatggactgtatttattttcaaatgggactttttcgtttttgtttttctgggcaagttttattgtgagattttctaattatgaagcaaaatttcttttctccaccatgctttatgtgatagtatttaaaattgatgtgagttattatgtcaaaaaaactgatctattaaagaagtaattggcctttctgagctgaaaaaaaaaaaaaaaaag

SEQ ID NO: 395277 - DNA, 1000 bp, Homo Sapiens; identical to SEQ ID NO: 285094

SEQ ID NO: 395278 - DNA, 1000 bp, Homo Sapiens
ctgctgaggggctggcagcagatgttcaaggtggaactgaagcgcctacagaggcactacaatcactcagggtctcacacttaccagagaatgattggctgtgagctgctggaggatggaagcaccacaggatttctgcagtatgcatatgacgggcaggatttcctgatcttcaataaagacaccctctcctggctggctgtagataatgtggctcacaccatcaagcaggcatgggaggccaatcagcatgagttgctgtatcaaaagaattggctggaagaagaatgtattgcctggctaaagagattcctggagtatgggaaagacaccctacaaagaacagagcccccactggtcagagtaaatcgcaaagaaacttttccaggggttacagctctcttctgcaaagctcatggcttttaccccccagaaatttacatgacatggatgaaaaacggggaagaaattgtccaagaaattgattatggagacattcttcccagtggggatggaacctatcaggcgtgggcatcaattgagcttgatcctcagagcagcaacctttactcctgtcatgtggagcactgcggtgtccacatggttcttcaggtcccccaggaatcagaaactatccctcttgtgatgaaagctgtctctgggtccattgtccttgtcattgtgctggctggagttggtgttctagtctggagaagaaggccccgagagcaaaatggagccatctaccttccaacaccagatcgatgattgcagatccctcttttccagttctccttcctctaggagccatgttatcctctgtcccccatagagtcaagcctagtgcttgaaggtcctgacgacacccacaacatacatgagagtaatgggattgagcatttatggcagcaacagaggagccacaaaatgttctttgttctttggctccaaaaagactgtcagctttcagtctcttttgatggactgttttatcagagtt

SEQ ID NO: 395279 - DNA, 1000 bp, Homo Sapiens
tgaccttcttcctggccctgggactttcctgtggagcctccctctccttcctcttcaaggcgctgctctgaagtggcccctccaggctctttggcagcctcttctcgacgtctccttccggagctgagatccagcccagggcgaatggcgagcttggctcaggcctctgcggggtggaggcccctgggcctgaggctgccagcagcgggcaggagctgctcttcatccacttggagtgctgcggggaagaaatcaccaccggtcattctaaccctcacccaggaatgggggtgactcgcacaagacctcatggaaagggtgatgactagggaaaagagggtgcagggcacggctgctccccaccaccaggtctgcatttgttcatcatcatcaggagcagaggtgaccagagggttcagagtgggaggcggggccagcccaggccaggagcgcctcatcttcccaggcctcagccacccagggtaaaaggtgccagggaagttgtgggcacctgagaggaggaacagatgtggaggacctgagggtgctcaaagggccaggctcagcctcaagcagtgttttcattgccaacacttactgtacccactccgcagagcccagctgggcctgggccccagggccacagctagcctgcatgtgtgtactgcactttacagtttgcaaagctcttccatacccactctctcaccgaagcctaattgaggctcttggaaggagtcaggcaaggattgtgcttcccccattatacaggtgacaaaactgagtcctggggaaagtgactggtccgtggtagagccgggacccaatcccctctctctcctccctgttggtgctgttcttcctgcccaacacctgtttctcttttcctcaaggggtttggggcaggagcctgggcacttactccccgtttttgctgtttctccttctgaccctgctcttgggtctaataaccccatttatttgtaaaaaaaaaaaaaaa

SEQ ID NO: 395280 - DNA, 1000 bp, Homo Sapiens
gcacgtccttctcccgctcacaggtgctggagttggagcggcgcttcctgcgccagaagtacctggcctctgcggagagggcggcgctggccaaggccttgcgcatgaccgacgcacaggtcaaaacgtggttccagaaccgacgcaccaagtggcggcgccagacggcggaggagcgcgaggccgagcggcaccgcgcgggccggctgctcctgcatctgcagcaggacgcgttgccacggccgctgcggccgccgctgcccccggaccctctctgcctgcacaactcgtcgctcttcgcgctgcagaacctgcagccctgggccgaggacaacaaagtggcttcagtgtccgggctcgcctcggtggtgtgagcgacgcccgtccgatcggcgtggagcgccgggcccggagcggtggagcgcgcggctgcctgcgtccatggtctagtggcagccgggcgcgtgaggagcggcaggccttgaggctgtcgtcgagggctcctccaccaccggccggctcccaagccagcgttgcgcagatgcacggccagctcagaggcggcctttcccgccatttttcacttcactgccgttacgccctcgctggaacctgaggcgccgagagggcgggacctgcaggacagtagccaatgaggtgcggggagggggccgggctggccaatgggagctgctttcctgagggactcgaaattctccggcgggtggtcgggagctggggctctgaggggctctagcggcgttgcgcgcggtgccggctgggtctgtaccaaaggtgtgaaggaaagaagacaccgaccacggcgaagcaatagagggggtgctggagcgcgagaggctggctgattgtgaccgaaaccagagggttgtccaccccgggcatctcatccctcaactgtaaaataatcgctaaggattccttcctgactttgaaaaaaaaaaaaaaaaaaaaaaaaaaaaaaaaaaaaaaaaaaaaaaaa

SEQ ID NO: 395281 - DNA, 1000 bp, Homo Sapiens
ataatggtgcaacaagaaaactggctctgcaaaagaatgtgatttgtgacaaatgtgaaggtagaggaggtaagaaaggagcagtagagtgctgtcccaattgccgaggtactggaatgcaaataagaattcatcagataggacctggaatggttcagcaaattcagtctgtgtgcatggagtgccagggccatggggagcggatcagtcctaaagatagatgtaaaagctgcaacggaaggaagatagttcgagagaagaaaattttagaagttcatattgacaaaggcatgaaagatggccagaagataacattccatggtgaaggagaccaagaaccaggactggagccaggcgatattatcattgtgttagatcagaaggaccatgctgtttttactcgacgaggagaagaccttttcatgtgtatggacatacagctcgttgaagcactgtgtggcttccagaagccaatatctactcttgacaaccgaaccatcgtcatcacctctcatccaggtcagattgtcaagcatggagatatcaagtgtgtactaaatgaaggcatgccaatttatcgtagaccatatgaaaagggtcgcctaatcatcgaatttaaggtaaactttcctgagaatggctttctctctcctgataaactgtctttgctggaaaaactcctacccgagaggaaggaagtggaagagactgatgagatggaccaagtagaactggtggactttgatccaaatcaggaaagacggcgccactacaatggagaagcatatgaggatgatgaacatcatcccagaggtggtgttcagtgtcagacctcttaatgggccagtgaataacactcactgctggcatttaatgtgcagtagtgaatgagtgaaggactgtaatcataatatgctcactacttgctcttgtttttgttttaataaactatagtagtgttttaaaaagttaaatgaagaataaacgcaaatataaaagc

SEQ ID NO: 395282 - DNA, 865 bp, Homo Sapiens
ctcaaacaccgcctgctaaaaatacccgactggaggagcataaaagcgcagccgagcccagcgccccgcacttttctgagcagacgtccagagcagagtcagccagcatgaccgagcgccgcgtccccttctcgctcctgcggggccccagctgggaccccttccgcgactggtacccgcatagccgcctcttcgaccaggccttcgggctgccccggctgccggaggagtggtcgcagtggttaggcggcagcagctggccaggctacgtgcgccccctgccccccgccgccatcgagagccccgcagtggccgcgcccgcctacagccgcgcgctcagccggcaactcagcagcggggtctcggagatccggcacactgcggaccgctggcgcgtgtccctggatgtcaaccacttcgccccggacgagctgacggtcaagaccaaggatggcgtggtggagatcaccggcaagcacgaggagcggcaggacgagcatggctacatctcccggtgcttcacgcggaaatacacgctgccccccggtgtggaccccacccaagtttcctcctccctgtcccctgagggcacactgaccgtggaggcccccatgcccaagctagccacgcagtccaacgagatcaccatcccagtcaccttcgagtcgcgggcccagcttgggggcccagaagctgcaaaatccgatgagactgccgccaagtaaagccttagcctggatgcccacccctgctgccgccactggctgtgcctcccccgccacctgtgtgttcttttgatacatttatcttctgtttttctcaaataaagttcaaagcaaccacctgtaaaaaaaaaaaaaaaaaa

SEQ ID NO: 395283 - DNA, 1000 bp, Homo Sapiens; identical to SEQ ID NO: 285098

SEQ ID NO: 395284 - DNA, 1000 bp, Homo Sapiens
tccagcctccgcaccccgctgcggcaaggcaagacgctcagagggccgggttgggtgtcttaccagctgctcgacgtgagggcctggagctccctcgcgcactgcctcgtgacctgcgcaggaaaaacacgctgggccacctccaggatcaccgcctacaaaccgccccacagcgtgattttggagcctccggtcttaaagggcaggaaatacactttgcgctgccacgtgacgcaggtgttcccggtgggctacttggtggtgaccctgaggcatggaagccgggtcatctattccgaaagcctggagcgcttcaccggcctggatctggccaacgtgaccttgacctacgagtttgctgctggaccccgcgacttctggcagcccgtgatctgccacgcgcgcctcaatctcgacggcctggtggtccgcaacagctcggcacccattacactgatgctcgcttggagccccgcgcccacagctttggcctccggttccatcgctgcccttgtagggatcctcctcactgtgggcgctgcgtacctatgcaagtgcctagctatgaagtcccaggcgtaaagggggatgttctatgccggctgagcgagaaaaagaggaatatgaaacaatctggggaaatggccatacatggtggctgacgcctgtaatcccagcactttgggaggccgaggcaggagaatcgcttgagcccaggagttcgagaccagcctggacaacatagtgagaccccgtctatgcaaaaaatacacaaattagcctggtgtggtggcccgcacctgtggtcccagctacccgggaggctgagttgggaggatcctttgagccctgaaagtcgaggttgcagtgagccttgatcgtgccactgcactccagcctgggggacagagcacgaccctgtctccaaaaataaaataaaaataaaaataaatattggcgggggaaccctctggaatcaataaaggcttccttaaccagc

SEQ ID NO: 395285 - DNA, 888 bp, Homo Sapiens
gcatggcggccaccaggtgcctgcgctggggcctgagccgagccggagtctggctgctcccaccgcccgcacggtgcccacgccgggcgctgcacaagcagaaagacggcactgagttcaagagcatctacagcctggacaagctctaccccgaatctcagggctcggacaccgcctggagggtcccgaatggtgcaaagcaagccgacagtgacatccctctagatcgcttgacaatatcttattgtcggagtagtggtcctggggggcagaatgtgaacaaagtgaattccaaggcagaagtcaggttccatttggcaactgccgagtggatcgcggagcccgtgcggcagaagatagccatcacgcataaaaacaagatcaacaggttaggagagttgatccttacctctgagagcagccgctatcagttccggaatctggcagattgcctgcagaaaattcgagacatgatcactgaggccagccagacaccgaaggagccaacaaaagaagatgttaaacttcatagaatcaggatagaaaacatgaatcgggaaaggctgagacaaaagagaattcattctgctgtaaagacaagcaggagggtcgacatggactgaaatcaccctctgcagctgggagggctcttctgggcgtccgggcagctgcagctgagaggactttcacaccataaggagatttctgtttttctttttggctgttaatgcttgtctataacattggagccatcacaagaatgttcatttggaatgaaggctgcaggcactggttgcagacgtctttataggcagtcaccatgttgtcaaaccttaataatgcacctcatgtattagtcacaataaaaatcagaactcaaaaaaaaaa

SEQ ID NO: 395286 - DNA, 1000 bp, Homo Sapiens; identical to SEQ ID NO: 115622

SEQ ID NO: 395287 - DNA, 1000 bp, Homo Sapiens
tagtggaaataaagagatgattgaagcactaaagcaatatgctatggactattcgaataaagctcttgagaagggactgaatcctctgaatgcatactccgatctcgctgagttcctggagacggaatgttatcagacaccattcaataaggaagtccctgatgctgaaaagcaacaatcccatcagcgctactgcaaccttcagaaatataatgggaagtctgaagacactgctgtgcaacatggtttagagggtttgtccataagcaaaaaatcaactgacaaggaagagatcaaagaccaaccacagaatgtatccgaaaatctgcttccacaaaatgcaccaaattattggtatcttcaaggattaattcataagcagaatggagatctgctgcaagcagccaaatgttatgagaaggaactgggccgcctgctaagggatgccccttcaggcataggcagtattttcctgtcagcatctgagcttgaggatggtagtgaggaaatgggccagggcgcagtcagctccagtcccagagagctcctctctaactcagagcaactgaactgagacagaggaggaaaacagagcatcagaagcctgcagtggtggttgtgacgggtaggaggataggaagacagggggccccaacctgggattgctgagcagggaagctttgcatgttgctctaaggtacatttttaaagagttgttttttggccgggcgcagtggctcatgcctgtaatcccagcactttgggaggccgaggtgggcggatcacgaggtctggagtttgagaccatcctggctaacacagtgaaatcccgtctctactaaaaatacaaaaaattagccaggcgtggtggctggcacctgtagtcccagctacttgggaggctgaggcaggagaatggcgtgaacctggaaggaagaggttgcagtgagccaagattgcgccccctgcactccagcctgggcttcagagcaagactcgg

SEQ ID NO: 395288 - DNA, 1000 bp, Homo Sapiens
cgggattttccaacagaaaccattaaatttggtcctgaacgcatgtatattgattgctgggtaaaaaaacacacctatgacacctttaaggaggttcttggatcagggatgcagtaccacttgcagtcaaatgaattccttcgaaatgtatttgaacttggacccccagtgatgcttgatgctgcaacgcttaaaacgatgaagatttctcgtttcgaaaggcatttatataactctgcagccttcaaagctcgaaccaaagctagaagcaaatgtcgagataagagagcagatgttggagaattcttctagattttcagaacttgaagactattttctaatttctatttttttttctatttcaatgtatttaaactctagacacagtttttatcctggattaacttagataacttttgtagcagtggttatattgcttataatttaatgtacaatactattgaaactggtgagttctgattattaaatattctctgtaaatcagtaaacatgtataaagtatttgtaatgtttggtcataatttatttatgaagacagcaaaagactgatttcatgatggggaaaacaattagccaaagtttaatttcttacactgtggttgtcaagaatactgatttactataatgatatatacatgcaagatatttaacttaatatcttagacaagagttctgggtacaattttgggatctagttcccctggaaaagctgctgtatttttaatttttaatggaatgtagcttttaaaatcctgtcactggcatcaacaaaaggaattataccatgagaccttatagctgtacttaaaagccattcagttcagctattgggagttcatgatgaattagcatatgccagaaaggttgctaaccttaacatctgagagcagtaacactgattttatctgctgtatgagactttgtgcattttactttgaaataaagatttttttccacactgaaaaaaaaaaaaaaaaaa

SEQ ID NO: 395289 - DNA, 1000 bp, Homo Sapiens
aaaaccatgaacaactctgctgaaaatcacactgccaattcctccatggcttatcctagtctcgttgctatggcatctcaaagacaggctaaaatacagagatacaagcagaagaaggagttggagcataggttgtctgcaatgaaatctgctgtggaaagtggtcaagcagatgatgagcgtgttcgtgaatattatcttcttcaccttcagaggtggattgatatcagcttagaagagattgagagcattgaccaggaaataaagatcctgagagaaagagactcttcaagagaggcatcaacttctaactcatctcgccaggagaggcctccagtgaaacccttcattctcactcggaacatggctcaagccaaagtatttggagctggttatccaagtctgccaactatgacggtgagtgactggtatgagcaacatcggaaatatggagcattaccggatcagggaatagccaaggcagcaccagaggaattcagaaaagcagctcagcaacaggaagaacaagaagaaaaggaggaagaggatgatgaacaaacactccacagagcccgggagtgggatgactggaaggacacccatcctaggggctatgggaaccgacagaacatgggctgatcttcccacaacaccacaggactgcagggtgcacaactcccctgccaaggaaaaccatgcagtcctcccctccctggtctcctgcttcagctctgtacaacgagggcaaagatgctaaatcttgctttgcattcagtaaagtgtcaagtgattaagtgtgtatttgtaccctagatgatatgaaccagcagtcttgttttggcatcatcctcatcatgttgtattccagcttcttaagtggaaggaaaagagtgctgagaaatggctctgtataatctatggctatccgaattctctgaaaaaataataaaagtcccctctattatatgagcctgtacagaaaaaaaaaaaaaaaaaaaaa

SEQ ID NO: 395290 - DNA, 1000 bp, Homo Sapiens; identical to SEQ ID NO: 115623

SEQ ID NO: 395291 - DNA, 1000 bp, Homo Sapiens; identical to SEQ ID NO: 285103

SEQ ID NO: 395292 - DNA, 1000 bp, Homo Sapiens; identical to SEQ ID NO: 285104

SEQ ID NO: 395293 - DNA, 1000 bp, Homo Sapiens; identical to SEQ ID NO: 285105

SEQ ID NO: 395294 - DNA, 1000 bp, Homo Sapiens; identical to SEQ ID NO: 285106

SEQ ID NO: 395295 - DNA, 1000 bp, Homo Sapiens; identical to SEQ ID NO: 221013

SEQ ID NO: 395296 - DNA, 1000 bp, Homo Sapiens; identical to SEQ ID NO: 285108

SEQ ID NO: 395297 - DNA, 1000 bp, Homo Sapiens; identical to SEQ ID NO: 285109

SEQ ID NO: 395298 - DNA, 1000 bp, Homo Sapiens; identical to SEQ ID NO: 285110

SEQ ID NO: 395299 - DNA, 1000 bp, Homo Sapiens; identical to SEQ ID NO: 221014

SEQ ID NO: 395300 - DNA, 1000 bp, Homo Sapiens; identical to SEQ ID NO: 285112

SEQ ID NO: 395301 - DNA, 1000 bp, Homo Sapiens; identical to SEQ ID NO: 221015

SEQ ID NO: 395302 - DNA, 1000 bp, Homo Sapiens; identical to SEQ ID NO: 221016

SEQ ID NO: 395303 - DNA, 1000 bp, Homo Sapiens
ggacagccaagctttcttttaaaaagtgataaaagtcttattttaatatgctttaagctgaaagaaaaaaaaataagaaacaggcagtgttttaaaaaccaacacagatttgcacaactgtttaagagtattgtttgaaatattttaattttcaatgttttgttgttgttgttttcttggtaatgcttcttttttgcagatgtggtcccaatttatagcaatcttctcaacagaagtaggcatggaaaagacttcttttcatactctcactataaagaaagctgcattgagaagaaaatggctgtcatttaaaggatggtttaactagtgagattcctattgtggttatacaaggtctcattgtttgtttgtttcttttaaattatttcagctttaaaaatacagaaatggaatctgtcaagagcaggtatttcatacggttaaaaaaatgaacatgcagactccttttcaatatgggtttatatatataagtattttttgtgtattatgactacgttaggagtttaatattgtcaaggacagtacaactgcaaagggatgctgtatagcagcacatcagaagtcggaaggaactgacacattctctcagagctcaaggtcttaaagagcttgagttaaatctaggtacagttacaggcatgtatagacttaaatggatgcaatggaagctaactaaaataaggcttagttgtcctttctatttaaataccccaagttgtcttcttacttcctctcccctctcccattttgcactgtgtgtcgatgcaatcttcgctagcacaaaatattgtcgctaatagtcatttctgttttcccattgtaaatgctgttgagctttattctattttatgttactttgttaatgaaatttaggaaagcagttgtttctttaaatttattgtgatattctatatctagcggcctttatatgcaaataaaattgcaagatttttaaaaaaaaaaaaaaaaaaaaaaaaaa

SEQ ID NO: 395304 - DNA, 1000 bp, Homo Sapiens; identical to SEQ ID NO: 285116

SEQ ID NO: 395305 - DNA, 1000 bp, Homo Sapiens; identical to SEQ ID NO: 285117

SEQ ID NO: 395306 - DNA, 1000 bp, Homo Sapiens; identical to SEQ ID NO: 115625

SEQ ID NO: 395307 - DNA, 1000 bp, Homo Sapiens
gtgttaattcagtcagtgactatggggacacaacagttgagctttcaggaaagaaagaaaaatggctgttagagccgcttcagttctacaattgtgtcctgtattgtaccactggggaaggaatggacttgaaacaaggacctttgtatacagaaggcacgatatcagttggaacaaatcttcattttggtatccaaacttttattcattttggtgtattatttgtaaatgggcatttgtatgttataatgaaaaaaagaacaatgtagactggatggatgtttgatctgtgttggtcatgaagttgttttttttttttttaaaaagaaaaccatgatcaacaagctttgccacgaatttaagagttttatcaagatatatcgaatacttctacccatctgttcatagtttatggactgatgttccaagtttgtatcattcctttgcatataattaaacctggaacaacatgcactagatttatgtcagaaatatctgttggttttccaaaggttgttaacagatgaagtttatgtgcaaaaaagggtaagatataaattcaaggaagaaaaaaagttgatagctaaaaggtagagtgtgtcttcgatataatccaatttgttttatgtcaaaatgtaagtatttgtcttccctagaaatcctcagaatgatttctataataaagttaatttcatttatatttgacaagaatatagatgttttatacacattttcatgcaatcatacgtttcttttttggccagcaaaagttaattgttcttagatatagttgtattactgttcacggtccaatcattttgtgcatctagagttcattcctaatcaattaaaagtgcttgcaagagttttaaacttaagtgttttgaagttgttcacaactacatatcaaaattaaccattgttgattgtaaaaaaccatgccaaagcctttgtatttcctttattatacagttttctttttaaccttaaaaaaaaaaaa

SEQ ID NO: 395308 - DNA, 1000 bp, Homo Sapiens; identical to SEQ ID NO: 221017

SEQ ID NO: 395309 - DNA, 1000 bp, Homo Sapiens
gccctggcttcccagcagaaggcagcaagagcccagagcaagggctgtttccaagctgagattgtgcctgtgaccaccacggtccatgatgacaagggcaccaagaggagcatcactgtgacccaggatgagggtatccgccccagcaccaccatggagggcctggccaaactgaagcctgccttcaagaaagatggttctaccacagctggaaactctagccaggtgagtgatggggcagctgccatcctgctggcccggaggtccaaggcagaagagttgggccttcccatccttggggtcctgaggtcttatgcagtggttggggtcccacctgacatcatgggcattggacctgcctatgccatcccagtagctttgcaaaaagcagggctgacagtgagtgacgtggacatcttcgagatcaatgaggcctttgcaagccaggctgcctactgtgtggagaagctacgactcccccctgagaaggtgaaccccctggggggtgcagtggccttagggcacccactgggctgcactggggcacgacaggtcatcacgctgctcaatgagctgaagcgccgtgggaagagggcatacggagtggtgtccatgtgcatcgggactggaatgggagccgctgccgtctttgaataccctgggaactgagtgaggtcccaggctggaggcgctacgcagacagtcctgctgctctagcagcaaggcagtaacaccacaaaagcaaaaccacatgggaaaactcagcactggtggtggtggcagtggacagatcaaggcacttcaactcatttggaaaatgtgaacactgatgacatggtataggagtgggtggggtgttgagccacccatcagaccctctttagctgtgcaagataaaagcagcctgggtcacccaggccacaaggccatggttaattcttaaggcaaggcaaatccatggatgagaagtgcaatgggcatagtaaaagtgcatgaattt

SEQ ID NO: 395310 - DNA, 1000 bp, Homo Sapiens; identical to SEQ ID NO: 285121

SEQ ID NO: 395311 - DNA, 1000 bp, Homo Sapiens; identical to SEQ ID NO: 115626

SEQ ID NO: 395312 - DNA, 1000 bp, Homo Sapiens; identical to SEQ ID NO: 285123

SEQ ID NO: 395313 - DNA, 1000 bp, Homo Sapiens; identical to SEQ ID NO: 115627

SEQ ID NO: 395314 - DNA, 1000 bp, Homo Sapiens; identical to SEQ ID NO: 221018

SEQ ID NO: 395315 - DNA, 1000 bp, Homo Sapiens; identical to SEQ ID NO: 221019

SEQ ID NO: 395316 - DNA, 1000 bp, Homo Sapiens; identical to SEQ ID NO: 285126

SEQ ID NO: 395317 - DNA, 1000 bp, Homo Sapiens; identical to SEQ ID NO: 115629

SEQ ID NO: 395318 - DNA, 1000 bp, Homo Sapiens; identical to SEQ ID NO: 115630

SEQ ID NO: 395319 - DNA, 1000 bp, Homo Sapiens; identical to SEQ ID NO: 285130

SEQ ID NO: 395320 - DNA, 1000 bp, Homo Sapiens; identical to SEQ ID NO: 115631

SEQ ID NO: 395321 - DNA, 1000 bp, Homo Sapiens; identical to SEQ ID NO: 115633

SEQ ID NO: 395322 - DNA, 1000 bp, Homo Sapiens; identical to SEQ ID NO: 285133

SEQ ID NO: 395323 - DNA, 1000 bp, Homo Sapiens; identical to SEQ ID NO: 285134

SEQ ID NO: 395324 - DNA, 1000 bp, Homo Sapiens; identical to SEQ ID NO: 221023

SEQ ID NO: 395325 - DNA, 1000 bp, Homo Sapiens
tatgaccttctgatgaccatggctgggatgtcaggggggcctatgggtctagcgatcagtgctgcacttaaacctgcattaaggtctggggttcagcagttgatccagtattaccaagatcagaaagacgcaaacatctctcagccggagaccaccaaggagggtttgagggccatctcagatgtgagtgacttggaagaaacaactactctggcttctttcatatcagaagtagtaagttcagctccctactgggggtgggccataatcaagagctatgacttagatcctggggctgggagtcttgagatataaaagaatgtggtaaccacagaattaataactgtactaccctgacaagctatatacatgtcttcaaaattttaatctgatttatccaggaggaaggctgtacagtaaaacgtaagaacgtaaatgtttgggtgttgaagtcacagggtttggtttcgaatctaggctccacttgttagagcctcggtgatcactgaatagtaacttctttcttgaactaagatcagttttgaagtttctaaaggagatagaatgattttaacctcaatgagttgccctgtaaatttaaaatgatacaatgaatctaaaatgcttatcacagtactttcaataaatagctattagccaggtgcggtggctcacgcctgtaatcccagcactgtgagaggctgaggcgggatgatcacctgaggtcaggagttcaagatcagcctgggcaacatggcgaaaccccgtctctacaataaatacaaaaaattatcctggcggagttatgcacgcttgtagtcccaactacctgggaggctgaggcgggagaatcacctgagcctgggaggtcgaggctgcagcgagccgagatcgcgccgctgcattccagcctgggtgacagagcgagaccatgtctcaaaaaataaaaataaaaaaaaattgttttcacaaaaaaaaaaaaaaaaaaaaaaaaaaaaaa

SEQ ID NO: 395326 - DNA, 1000 bp, Homo Sapiens; identical to SEQ ID NO: 115635

SEQ ID NO: 395327 - DNA, 473 bp, Homo Sapiens; identical to SEQ ID NO: 285138

SEQ ID NO: 395328 - DNA, 464 bp, Homo Sapiens; identical to SEQ ID NO: 221025

SEQ ID NO: 395329 - DNA, 613 bp, Homo Sapiens; identical to SEQ ID NO: 285140

SEQ ID NO: 395330 - DNA, 1000 bp, Homo Sapiens; identical to SEQ ID NO: 115636

SEQ ID NO: 395331 - DNA, 1000 bp, Homo Sapiens; identical to SEQ ID NO: 221026

SEQ ID NO: 395332 - DNA, 1000 bp, Homo Sapiens; identical to SEQ ID NO: 221027

SEQ ID NO: 395333 - DNA, 1000 bp, Homo Sapiens
ccaagaacatcatccaccgagatctcaagtctaacaacatcttcctacatgaggggctcacggtgaagatcggtgactttggcttggccacagtgaagactcgatggagcggggcccagcccttggagcagccctcaggatctgtgctgtggatggcagctgaggtgatccgtatgcaggacccgaacccctacagcttccagtcagacgtctatgcctacggggttgtgctctacgagcttatgactggctcactgccttacagccacattggctgccgtgaccagattatctttatggtgggccgtggctatctgtccccggacctcagcaaaatctccagcaactgccccaaggccatgcggcgcctgctgtctgactgcctcaagttccagcgggaggagcggcccctcttcccccagatcctggccacaattgagctgctgcaacggtcactccccaagattgagcggagtgcctcggaaccctccttgcaccgcacccaggccgatgagttgcctgcctgcctactcagcgcagcccgccttgtgccttaggccccgcccaagccaccagggagccaatctcagccctccacgccaaggagccttgcccaccagccaatcaatgttcgtctctgccctgatgctgcctcaggatcccccattccccaccctgggagatgagggggtccccatgtgcttttccagttcttctggaattgggggacccccgccaaagactgagccccctgtctcctccatcatttggtttcctctttggctttggggatacttctaaattttgggagctcctccatctccaatggctgggatttgtggcagggattccactcagaacctctctggaatttgtgcctgatgtgccttccactggattttggggttcccagcaccccatgtggattttgggggtcccttttgtgtctcccccgccattcaaggactcctctctttcttcaccaagaagcacagaattc

SEQ ID NO: 395334 - DNA, 1000 bp, Homo Sapiens; identical to SEQ ID NO: 285142

SEQ ID NO: 395335 - DNA, 1000 bp, Homo Sapiens; identical to SEQ ID NO: 221028

SEQ ID NO: 395336 - DNA, 1000 bp, Homo Sapiens; identical to SEQ ID NO: 285143

SEQ ID NO: 395337 - DNA, 1000 bp, Homo Sapiens; identical to SEQ ID NO: 221029

SEQ ID NO: 395338 - DNA, 978 bp, Homo Sapiens
ccgcgtcggtgcccgcgcccctccccgggccccgccatgggcctcaccgtgtccgcgctcttttcgcggatcttcgggaagaagcagatgcggattctcatggttggcttggatgcggctggcaagaccacaatcctgtacaaactgaagttgggggagattgtcaccaccatcccaaccataggcttcaatgtagaaacagtggaatataagaacatctgtttcacagtctgggacgtgggaggccaggacaagattcggcctctgtggcggcactacttccagaacactcagggcctcatctttgtggtggacagtaatgaccgggagcgggtccaagaatctgctgatgaactccagaagatgctgcaggaggacgagctgcgggatgcagtgctgctggtatttgccaacaagcaggacatgcccaacgccatgcccgtgagcgagctgactgacaagctggggctacagcacttacgcagccgcacgtggtatgtccaggccacctgtgccacccaaggcacaggtctgtacgatggtctggactggctgtcccacgagctgtcaaagcgctaaccagccaggggcaggcccctgatgcccggaagctcctgcgtgcatccccgggatgaccagactcccggactcctcaggcagtgccctttcctcccacttttcctcccccatagccacaggcctctgctcctgctcctgcctgcatgttctctctgttgttggagcctggagccttgctctctgggcacagaggggtccactctcctgcctgctgggacctatggaaggggcttcctggccaaggccccctcttccagaggaggagcagggatctgggtttccttttttttttctgttttgggtgtactctaggggccaggttgggagggggaaggtgagggcttcgggtggtgctataatgtggcactggatcttgagtaataaatttgctgtggtttg

SEQ ID NO: 395339 - DNA, 1000 bp, Homo Sapiens; identical to SEQ ID NO: 285145

SEQ ID NO: 395340 - DNA, 1000 bp, Homo Sapiens; identical to SEQ ID NO: 285146

SEQ ID NO: 395341 - DNA, 1000 bp, Homo Sapiens; identical to SEQ ID NO: 221030

SEQ ID NO: 395342 - DNA, 902 bp, Homo Sapiens; identical to SEQ ID NO: 115638

SEQ ID NO: 395343 - DNA, 1000 bp, Homo Sapiens; identical to SEQ ID NO: 115639

SEQ ID NO: 395344 - DNA, 1000 bp, Homo Sapiens; identical to SEQ ID NO: 285150

SEQ ID NO: 395345 - DNA, 1000 bp, Homo Sapiens; identical to SEQ ID NO: 285151

SEQ ID NO: 395346 - DNA, 1000 bp, Homo Sapiens; identical to SEQ ID NO: 115642

SEQ ID NO: 395347 - DNA, 1000 bp, Homo Sapiens
gggactacaggcatgtgccaccatgcccggctaatttctttctttctttttttttttttttgcattttttagtagagatgggggtttctccttgttggtcaggctggtctcgaactcccgacctcaggtgatccacctgcctcggcctcccaaagtgttgggattacaggcgtgagccaccgcgcccggccttcagtttcttcctaggccgttctgtcacccaaatagctgctacccagaggggcggggttgacctaggctgaatatccactttgtttttatggatggctcccttcccccattcgccttcccagaatatccttcaagttccacttcccagggagctctgggggaggggcggccattctggctccgtccccagtggccaccttggaaacatcggctggctttgggactattccacctccttcccctgagcccagatctgcccccaccatcctttctctggcttcttttagcaagttatcaactaatcactaactccttccttttcctctgcatgccagcctgaaaattccaaatctagcctctgaatgtcttggctccatctcttcagacccctttgcctttaaaaaaaaaacaaaaacaaaaacaaaaaaacccataatgcccacagaatgtcaaatgaggggcctcctgcctcctgctctgaatattctgtagctgtagaggcattttaaccctttgtcctccagcatcccttcacttcctcatcctctctaacctcctttttctttttttaatgctgcagcctccacactccacccacaggtggacccttccctttttctctagctggatctgtgtttcttcccttcgggcccccatgttttcctgcacccgccctaccatggtctctctctgcagttatttaatgcctgtgtcagatctactgtaaaaagaggattaagtaaaataaaatgagagcaattatatatataaatatatatcatacacagagaaaaaaaaaaaaaaaaaa

SEQ ID NO: 395348 - DNA, 1000 bp, Homo Sapiens
tacagccattggttgctgttcaggtcagctttgctcctaacaacactgggaaagaagtaacagttgagtgcaagattgatggatcagccaacctaaaaagtcaggatgatcgtgacaagtttttgggacgagttatgttcaaaatcacagcacgtgcatagtatgagtaggatatctccacagagtaaatgttgtgttgtctgtcttcattttgtaacagctggaccttccattctagaattatgagaccaccttggagaaaggtgtgtggtacatgacattgggttacatcataacgtgcttccagatcatagtgttcagtgtcctctgaagtaactgcctgttgcctctgctgccctttgaaccagtgtacagtcgccagatagggaccggtgaacacctgattccaaacatgtaggatgggggtcttgtcctctttttatgtggtttaattgccaagtgtctaaagcttaatatgccgtgctatgtaaatattttatggatataacaactgtcatattttgatgtcaacagagttttagggataaaatggtacccggccaacatcaagtgactttatagctgcaagaaatgtggtatgtggagaagttctgtatgtgaggaaggaaaaaaagaaaataaaagtgtgtttgaaaaatattatcttgggttctttgtaaaatttattttttacatgctgaattagcctcgatctttttgattaagagcacaaacttttttttgtaaaacatgtaaaaaaaaaaactgggattaatttttagtgttggaactgcctcttattttaggctgtagataaaatagcatttttaggttagccagtgtgactatgcacctaattttttatgagattaaattcataagacttaatttgtacaatagtttgtgaaatatcttgttactgcttttatttagcagactgtggactgtaataaagtatataaattgtgaaatataaaaacttggaacttattcaaagctt

SEQ ID NO: 395349 - DNA, 1000 bp, Homo Sapiens; identical to SEQ ID NO: 115643

SEQ ID NO: 395350 - DNA, 1000 bp, Homo Sapiens; identical to SEQ ID NO: 115644

SEQ ID NO: 395351 - DNA, 1000 bp, Homo Sapiens; identical to SEQ ID NO: 115645

SEQ ID NO: 395352 - DNA, 1000 bp, Homo Sapiens; identical to SEQ ID NO: 115646

SEQ ID NO: 395353 - DNA, 1000 bp, Homo Sapiens; identical to SEQ ID NO: 285154

SEQ ID NO: 395354 - DNA, 1000 bp, Homo Sapiens; identical to SEQ ID NO: 285155

SEQ ID NO: 395355 - DNA, 1000 bp, Homo Sapiens; identical to SEQ ID NO: 221033

SEQ ID NO: 395356 - DNA, 815 bp, Homo Sapiens
agagaacctagcggttacgccaacgcgcgcgtgcgcccttgcgcgtttctctcttcccactcgggtttgacctacagccgcccgggagaagatggctgccccagcagtgtccgggctctcccggcaggtgcgatgcttcagtacctctgtggtcagaccatttgccaagcttgtgaggcctcctgttcaggtatacggtattgaaggtcgctatgccacagctctttattctgctgcatcaaaacagaataagctggagcaagtagaaaaggagttgttgagagtagcacaaatcctgaaggaacccaaagtggctgcttctgttttgaatccctatgtgaagcgttccattaaagtgaaaagcctaaatgacatcacagcaaaagagaggttctctcccctcactaccaatctgatcaatttgcttgctgaaaatggtcgattaagcaatacccaaggagtcgtttctgccttttctaccatgatgagtgtccatcgcggagaggtaccttgcacagtgacctctgcatctcctttagaagaagccacactctctgaattaaaaactgtcctcaagagcttcctaagtcaaggccaagtattgaaattggaggctaagactgatccgtcaatcttgggtggaatgattgtgcgcattggcgagaaatatgttgacatgtctgtcaagaccaagattcagaagctgggcagggctatgcgggagattgtctaaaagtgttggttttctgccatcagtgaaaattcttaaacttggagcaacaataaaaagcttccagaacagatcaaaaaaaaaa

SEQ ID NO: 395357 - DNA, 1000 bp, Homo Sapiens; identical to SEQ ID NO: 285158

SEQ ID NO: 395358 - DNA, 1000 bp, Homo Sapiens; identical to SEQ ID NO: 285159

SEQ ID NO: 395359 - DNA, 1000 bp, Homo Sapiens; identical to SEQ ID NO: 115647

SEQ ID NO: 395360 - DNA, 1000 bp, Homo Sapiens; identical to SEQ ID NO: 115648

SEQ ID NO: 395361 - DNA, 1000 bp, Homo Sapiens; identical to SEQ ID NO: 115649

SEQ ID NO: 395362 - DNA, 1000 bp, Homo Sapiens; identical to SEQ ID NO: 285163

SEQ ID NO: 395363 - DNA, 1000 bp, Homo Sapiens; identical to SEQ ID NO: 285164

SEQ ID NO: 395364 - DNA, 1000 bp, Homo Sapiens; identical to SEQ ID NO: 115650

SEQ ID NO: 395365 - DNA, 1000 bp, Homo Sapiens; identical to SEQ ID NO: 284724

SEQ ID NO: 395366 - DNA, 1000 bp, Homo Sapiens; identical to SEQ ID NO: 285165

SEQ ID NO: 395367 - DNA, 1000 bp, Homo Sapiens; identical to SEQ ID NO: 115651

SEQ ID NO: 395368 - DNA, 1000 bp, Homo Sapiens
tgtctgtagcataaggtctggtaactgcagaaacataaccgtgaagctcttcctaccctcctcccccaaaaacccaccaaaattagttttagctgtagatcaagctatttggggtgtttgttagtaaatagggaaaataatctcaaaggagttaaatgtattcttggctaaaggatcagctggttcagtactgtctatcaaaggtagattttacagagaacagaaatcggggaagtggggggaacgcctctgttcagttcattcccagaagtccacaggacgcacagcccaggccacagccagggctccacggggcgcccttgtctcagtcattgctgttgtatgttcgtgctggagttttgttggtgtgaaaatacacttatttcagccaaaacataccatttctacacctcaatcctccatttgctgtactctttgctagtaccaaaagtagactgattacactgaggtgaggctacaaggggtgtgtaaccgtgtaacacgtgaaggcagtgctcacctcttctttaccagaacggttctttgaccagcacattaacttctggactgccggctctagtaccttttcagtaaagtggttctctgcctttttactatacagcataccacgccacagggttagaaccaacgaagaaaataaaatgagggtgcccagcttataagaatggtgttagggggatgagcatgctgtttatgaacggaaatcatgatttccctgtagaaagtgaggctcagattaaattttagaatattttctaaatgtctttttcacaatcatgtgactgggaaggcaatttcatactaaactgattaaataatacatttataatctacaactgtttgcacttacagctttttttgtaaatataaactataatttattgtctattttatatctgttttgctgtggcgttggggggggggccgggcttttgggggggggggtttgtttggggggtgtcgtggtgtgggcgggcgg

SEQ ID NO: 395369 - DNA, 1000 bp, Homo Sapiens; identical to SEQ ID NO: 285168

SEQ ID NO: 395370 - DNA, 1000 bp, Homo Sapiens
cagggagtgacaagtagtaattaggctgagttgggtggagaggtttgtctcagcctctgctgttctcggaaactgctgttctccttggagcagccactgggagttggagtgtttatttgatttctgacttgctaagcctgtaatttacctgctggaatagacagagtccagctgcccaaaccgtgtcattaaaagcagatcctgcgcccgccccatccacaggcacagcccggcagagtggttccacctccccatgggcccaaggatgcgcctctctggagttcacgtgctgcacccccagggaggggcctggggaaagctggtccagcagcaggggtggaggctggggccacactgcgggacagcagcccctccacctggaccagggagggcctccatgtgcaagcgcagaggaagagaccctcccatgtacgcaaagggcagccccaggctgtctggaagttggagaattccctatcagcacagggatctcagctctggcctggaggtgaagagacctgccttgtaggtggcttccttatctgcgcctccattttctatctgcactttttgatctccaaacaaccttcagccaaagaatctgtctaccaactcctcatagtgagccagaagcagcctcataaccctgaatgtggggctctggtggctgtcacgaagcagagttggcacataacatggaacctggccaggcatggtggctcacacctataaccccagcactttgggaggccaaggcaggcagatcacctgaagtcaggagttcaagaccatcctggccaacacagtgaaaccccatctgtactaaaaatacaagattacctgggcatggtggtgcatgcctataatcccagctactcaggaggctgaggcagaattgcttgaacctgggaggtggaggttgcagtgagcagagatcacaacattgcacttcagcctggtgacatgagcaaaactgttgtctcaacaaaatgaaattatg

SEQ ID NO: 395371 - DNA, 1000 bp, Homo Sapiens; identical to SEQ ID NO: 115652

SEQ ID NO: 395372 - DNA, 1000 bp, Homo Sapiens; identical to SEQ ID NO: 285172

SEQ ID NO: 395373 - DNA, 1000 bp, Homo Sapiens
ctggcttttggagatcttttacttctgctaacttgtgtgccagtggatgcaactcactaccttgcagaaggatggctgttcggaagaattggttgtaaggtgctctctttcatccggctcacttctgttggtgtgtcagtgttcacattaacaattctcagcgctgacagatacaaggcagttgtgaagccacttgagcgacagccctccaatgccatcctgaagacttgtgtaaaagctggctgcgtctggatcgtgtctatgatatttgctctacctgaggctatattttcaaatgtatacacttttcgagatcccaataaaaatatgacatttgaatcatgtacctcttatcctgtctctaagaagctcttgcaagaaatacattctctgctgtgcttcttagtgttctacattattccactctctattatctctgtctactattccttgattgctaggaccctttacaaaagcaccctgaacatacctactgaggaacaaagccatgcccgtaagcagattgaatcccgaaagagaattgccagaacggtattggtgttggtggctctgtttgccctctgctggttgccaaatcacctcctgtacctctaccattcattcacttctcaaacctatgtagacccctctgccatgcatttcattttcaccattttctctcgggttttggctttcagcaattcttgcgtaaacccctttgctctctactggctgagcaaaagcttccagaagcattttaaagctcagttgttctgttgcaaggcggagcggcctgagcctcctgttgctgacacctctcttaccaccctggctgtgatgggaacggtcccgggcactgggagcatacagatgtctgaaattagtgtgacctcgttcactgggtgtagtgtgaagcaggcagaggacagattctagcttttcaaggaaaaatgctgcttctcctcccagcgtgtgtatccgactctaagctgtgtgcagg

SEQ ID NO: 395374 - DNA, 1000 bp, Homo Sapiens; identical to SEQ ID NO: 115653

SEQ ID NO: 395375 - DNA, 1000 bp, Homo Sapiens; identical to SEQ ID NO: 115654

SEQ ID NO: 395376 - DNA, 1000 bp, Homo Sapiens; identical to SEQ ID NO: 285176

SEQ ID NO: 395377 - DNA, 1000 bp, Homo Sapiens; identical to SEQ ID NO: 285177

SEQ ID NO: 395378 - DNA, 1000 bp, Homo Sapiens; identical to SEQ ID NO: 115656

SEQ ID NO: 395379 - DNA, 1000 bp, Homo Sapiens; identical to SEQ ID NO: 285179

SEQ ID NO: 395380 - DNA, 1000 bp, Homo Sapiens
aacatgacacctctctgaaacctattagtgtctcctacaacccagccacagccaaagaaattatcaatgtggggcattctttccatgtaaattttgaggacaacgataaccgatcagtgctgaaaggtggtcctttctctgacagctacaggctctttcagtttcattttcactggggcagtacaaatgagcatggttcagaacatacagtggatggagtcaaatattctgccgagcttcacgtagctcactggaattctgcaaagtactccagccttgctgaagctgcctcaaaggctgatggtttggcagttattggtgttttgatgaaggttggtgaggccaacccaaagctgcagaaagtacttgatgccctccaagcaattaaaaccaagggcaaacgagccccattcacaaattttgacccctctactctccttccttcatccctggatttctggacctaccctggctctctgactcatcctcctctttatgagagtgtaacttggatcatctgtaaggagagcatcagtgtcagctcagagcagctggcacaattccgcagccttctatcaaatgttgaaggtgataacgctgtccccatgcagcacaacaaccgcccaacccaacctctgaagggcagaacagtgagagcttcattttgatgattctgagaagaaacttgtccttcctcaagaacacagccctgcttctgacataatccagttaaaataataatttttaagaaataaatttatttcaatattagcaagacagcatgccttcaaatcaatctgtaaaactaagaaacttaaattttagttcttactgcttaattcaaataataattagtaagctagcaaatagtaatctgtaagcataagcttatcttaaattcaagtttagtttgaggaattctttaaaattacaactaagtgatttgtatgtctatttttttcagtttatttgaaccaataaaataattttatctctttct

SEQ ID NO: 395381 - DNA, 1000 bp, Homo Sapiens; identical to SEQ ID NO: 285181

SEQ ID NO: 395382 - DNA, 1000 bp, Homo Sapiens; identical to SEQ ID NO: 285182

SEQ ID NO: 395383 - DNA, 1000 bp, Homo Sapiens; identical to SEQ ID NO: 221040

SEQ ID NO: 395384 - DNA, 1000 bp, Homo Sapiens; identical to SEQ ID NO: 285184

SEQ ID NO: 395385 - DNA, 1000 bp, Homo Sapiens; identical to SEQ ID NO: 115657

SEQ ID NO: 395386 - DNA, 1000 bp, Homo Sapiens; identical to SEQ ID NO: 285187

SEQ ID NO: 395387 - DNA, 1000 bp, Homo Sapiens; identical to SEQ ID NO: 285190

SEQ ID NO: 395388 - DNA, 1000 bp, Homo Sapiens
acccacctccctgcctccaggaaccacaccacatctaagcctgaaggggcgtctgttcccccttcacaaagcccaagggatctggtcctacccatccccgcagtgtgcactaaggggcccggccagccatgtctgcatttcggtggctagtcaagctcctcctccctgcatctgaccagcagcgcctttcccaactctagctgggggtgggccaggctgatgggacagaattggatacatacaccagcattccttttgaacgcccccccccacccctgggggctctcatgttttcaactgccaaaatgctctagtgccttctaaaggtgttgtcccttctagggttattgcatttggattggggtccctctaaaatttaatgcatgatagacacatatgagggggaatagtctagatggctcctctcagtactttggaggcccctatgtagtccgtgctgacagctgctcctagagggaggggcctaggcctcagccagagaagctataaattcctctttgctttgctttctgctcagcttctcctgtgtgattgacagctttgctgctgaaggctcattttaatttattaattgctttgagcacaactttaagaggacataatgggggcctggccatcccacaagtggtggtaaccctggtggttgctgttttcctcccttctgctactggcaaaaggatctttgtggccaaggagctgctatagcctggggtggggtcatgccctcctctcccattgtccctctgccccatcctccagcagggaaaatgcagcagggatgccctggaggtggctgagcccctgtctagagagggaggcaagccctgttgacacaggtctttcctaaggctgcaaggtttaggctggtggcccaggaccatcatcctactgtaataaagatgattgtgaaataaaactggctttggcttcttggaaaaaaaaaaaaaaaaaaaaaaaaaaaaaaaaaaaaaaaaaaaaa

SEQ ID NO: 395389 - DNA, 1000 bp, Homo Sapiens; identical to SEQ ID NO: 221041

SEQ ID NO: 395390 - DNA, 1000 bp, Homo Sapiens
tgacacctgcccacgtttcatcttgggtcttcttgatgcaggaaaggcacatctccagcggcaagtgaagcccgaggcctggctgtcccatggccccagtcctggccctggccatctgcagcttgtgtgccatgtctcaggattctacccaaagcccgtgtgggtgatgtggatgcggggtgagcaggagcagcagggcactcagcgaggggacatcttgcccagtgctgatgggacatggtatctccgcgcaaccctggaggtggccgctggggaggcagctgacctgtcctgtcgggtgaagcacagcagtctagagggccaggacatcgtcctctactgggagcatcacagttccgtgggcttcatcatcttggcggtgatagtgcctttacttcttctgataggtcttgcgctttggttcaggaaacgctgtttctgttaagacacaccatgagcctcctcgtcacccttctccttttggggtgagagaccagcagcccaagggctccagacacacctgaacacatcgtgatgatgacgtcctctcaactctctttgtaaaaattttgttatttttgcttgtttctgattaatgattgtttgtcaatataagctcaatttaattttgcaggatttgttgttctgacctgggttctgggacttttaaattcaaattttatctccagatggaatggggtcctagcaacctccacatgttcacctattaatggatcatcaggcctgttttagatatcccttactccagagggccttccctgacttacaagtgggaagcagtctcttcctggtctgaactcccgccacattttagccgtactttgctaactgtgctcctcacttcctcttcttcattgcagttatttagatcccccctttccttctaatttttcagctccttcaatgcaaagtacatgtatttttaatatatgcatccctggtgaaggatcttgcctgcatgaaacatgttctcaataaa

SEQ ID NO: 395391 - DNA, 1000 bp, Homo Sapiens
tagaggagatattccgagtctacatctttggattcgctcgagaagtacaagactttgccggtgatttccagatgaaatacccctttgagatccagggcatagcaggctgtgagctacattctggaggtgccatagtaagcttcctgaggggagctctaggaggattggatttcctgagtgtcaagaatgcttcatgtgtgccttccccagaaggtggcagcagggcacagaaattctgtgcactaatcatacaatatcaaggtatcatggaaactgtgagaattctcctctatgaaacctgcccccgatatctcttgggcgtcctcaatgcaggaaaagcagatctgcaaagacaagtgaagcctgaggcctggctgtccagtggccccagtcctggacctggccgtctgcagcttgtgtgccatgtctcaggattctacccaaagcccgtgtgggtgatgtggatgcggggtgagcaggagcagcagggcactcagctaggggacatcctgcccaatgctaactggacatggtatctccgagcaaccctggatgtggcagatggggaggcggctggcctgtcctgtcgggtgaagcacagcagtttagagggccaggacatcatcctctactggagaaaccccacctccattggctcaattgttttggcaataatagtgccttccttgctccttttgctatgccttgcattatggtatatgaggcgccggtcatatcagaatatcccatgagccatcatcatgtctcctctcccattcgcaataagctaccaagaagcccaagatatcagcccaaaaatcaatcttatcatatttcaaatgattttcaaatttgatgaaatcagagttttcatgtattttaaaataaattattatttaaacatcagcaaaaaagtacttaaaactgtaaatttattatgagactgtactaacagtgtgattcaccctgattttacacacattaaaatgttagaaaaaat

SEQ ID NO: 395392 - DNA, 1000 bp, Homo Sapiens; identical to SEQ ID NO: 115663

SEQ ID NO: 395393 - DNA, 1000 bp, Homo Sapiens; identical to SEQ ID NO: 115664

SEQ ID NO: 395394 - DNA, 1000 bp, Homo Sapiens; identical to SEQ ID NO: 285195

SEQ ID NO: 395395 - DNA, 1000 bp, Homo Sapiens; identical to SEQ ID NO: 115665

SEQ ID NO: 395396 - DNA, 1000 bp, Homo Sapiens
gagcaagaaactaataataataattccagcttctacacaggagtctatattctgatcggagccggcgccctcatgatgctggtgggcttcctgggctgctgcggggctgtgcaggagtcccagtgcatgctgggactgttcttcggcttcctcttggtgatattcgccattgaaatagctgcggccatctggggatattcccacaaggatgaggtgattaaggaagtccaggagttttacaaggacacctacaacaagctgaaaaccaaggatgagccccagcgggaaacgctgaaagccatccactatgcgttgaactgctgtggtttggctgggggcgtggaacagtttatctcagacatctgccccaagaaggacgtactcgaaaccttcaccgtgaagtcctgtcctgatgccatcaaagaggtcttcgacaataaattccacatcatcggcgcagtgggcatcggcattgccgtggtcatgatatttggcatgatcttcagtatgatcttgtgctgtgctatccgcaggaaccgcgagatggtctagagtcagcttacatccctgagcaggaaagtttacccatgaagattggtgggattttttgtttgtttgttttgttttgtttgttgtttgttgtttgtttttttgccactaattttagtattcattctgcattgctagataaaagctgaagttactttatgtttgtcttttaatgcttcattcaatattgacatttgtagttgagcggggggtttggtttgctttggtttatattttttcagttgtttgtttttgcttgttatattaagcagaaatcctgcaatgaaaggtactatatttgctagactctagacaagatattgtacataaaagaatttttttgtctttaaatagatacaaatgtctatcaactttaatcaagttgtaacttatattgaagacaatttgatacataataaaaaattatgacaatgtcaaaaaaaaaaaaaaa

SEQ ID NO: 395397 - DNA, 1000 bp, Homo Sapiens
ttggcttatctgatcttctgcctgtgttcccttgtgggcattcttcatcttcaaagagccctggtcctgaggaggaaaagaaagcgaatgactgaccccaccaggagattcttcaaagtgacgcctcccccaggaagcgggccccagaaccagtacgggaacgtgctgtctctccccacacccacctcaggcctcggacgcgcccagcgttgggccgcaggcctggggggcactgccccgtcttatggaaacccgagcagcgacgtccaggcggatggagccttggggtcccggagcccgccgggagtgggcccagaagaagaggaaggggagggctatgaggaacctgacagtgaggaggactccgagttctatgagaacgactccaaccttgggcaggaccagctctcccaggatggcagcggctacgagaaccctgaggatgagcccctgggtcctgaggatgaagactccttctccaacgctgagtcttatgagaacgaggatgaagagctgacccagccggtcgccaggacaatggacttcctgagccctcatgggtcagcctgggaccccagccgggaagcaacctccctggggtcccagtcctatgaggatatgagaggaatcctgtatgcagccccccagctccgctccattcggggccagcctggacccaatcatgaggaagatgcagactcttatgagaacatggataatcccgatgggccagacccagcctggggaggagggggccgcatgggcacctggagcaccaggtgatcctcaggtggccagcctggatctcctcaagtccccaagattcacacctgactctgaaatctgaagacctcgagcagatgatgccaacctctggagcaatgttgcttaggatgtgtgcatgtgtgtaagtgtgtgtgtgtgtgtgtgtgtgtatacatgccagtgacacttccagtcccctttgtattccttaaataaactcaatgagctcttccaa

SEQ ID NO: 395398 - DNA, 1000 bp, Homo Sapiens
aaaggttagaagggcccccctctctgaaggcccccactccctgggatgctacaatccaatgatggaagatggcattagctacaccaccctgcgctttcccgagatgaacataccacgaactggagatgcagagtcctcagagatgcagagacctccccggacctgcgatgacacggtcacttattcagcattgcacaagcgccaagtgggcgactatgagaacgtcattccagattttccagaagatgaggggattcattactcagagctgatccagtttggggtcggggagcggcctcaggcacaagaaaatgtggactatgtgatcctcaaacattgacactggatgggctgcagcagaggcactgggggcagcgggggccagggaagtccccgagtttccccagacaccgccacatggcttcctcctgcgtgcatgtgcgcacacacacacacacacgcacacacacacacacacactcactgcggagaaccttgtgcctggctcagagccagtctttttggtgagggtaaccccaaacctccaaaactcctgcccctgttctcttccactctccttgctacccagaaatcatctaaatacctgccctgacatgcacacctcccctgccccaccagcccactggccatctccacccggagctgctgtgtcctctggatctgctcgtcattttccttcccttctccatctctctggccctctacccctgatctgacatccccactcacgaatattatgcccagtttctgcctctgagggaaagcccagaaaaggacagaaacgaagtagaaaggggcccagtcctggcctggcttctcctttggaagtgaggcattgcacggggagacgtacgtatcagcggccccttgactctggggactccgggtttgagatggacacactggtgtggattaacctgccagggagacagagctcacaataaaaatggctcagatgccacttcaaagaaaaaaaaaa

SEQ ID NO: 395399 - DNA, 1000 bp, Homo Sapiens; identical to SEQ ID NO: 221043

SEQ ID NO: 395400 - DNA, 1000 bp, Homo Sapiens; identical to SEQ ID NO: 285197

SEQ ID NO: 395401 - DNA, 1000 bp, Homo Sapiens; identical to SEQ ID NO: 221044

SEQ ID NO: 395402 - DNA, 1000 bp, Homo Sapiens; identical to SEQ ID NO: 115668

SEQ ID NO: 395403 - DNA, 1000 bp, Homo Sapiens; identical to SEQ ID NO: 285200

SEQ ID NO: 395404 - DNA, 1000 bp, Homo Sapiens; identical to SEQ ID NO: 115669

SEQ ID NO: 395405 - DNA, 916 bp, Homo Sapiens
ggccggggggcgcagctagagagccccggagccgcggcgggagaggaacgcgcagccagccttgggaagcccaggcccggcagccatggcggtggaaggaggaatgaaatgtgtgaagttcttgctctacgtcctcctgctggccttttgcgcctgtgcagtgggactgattgccgtgggtgtcggggcacagcttgtcctgagtcagaccataatccagggggctacccctggctctctgttgccagtggtcatcatcgcagtgggtgtcttcctcttcctggtggcttttgtgggctgctgcggggcctgcaaggagaactattgtcttatgatcacgtttgccatctttctgtctcttatcatgttggtggaggtggccgcagccattgctggctatgtgtttagagataaggtgatgtcagagtttaataacaacttccggcagcagatggagaattacccgaaaaacaaccacactgcttcgatcctggacaggatgcaggcagattttaagtgctgtggggctgctaactacacagattgggagaaaatcccttccatgtcgaagaaccgagtccccgactcctgctgcattaatgttactgtgggctgtgggattaatttcaacgagaaggcgatccataaggagggctgtgtggagaagattgggggctggctgaggaaaaatgtgctggtggtagctgcagcagcccttggaattgcttttgtcgaggttttgggaattgtctttgcctgctgcctcgtgaagagtatcagaagtggctacgaggtgatgtaggggtctggtctcctcagcctcctcatctgggggagtggaatagtatcctccaggtttttcaattaaacggattattttttcagaccgaaaagaaaaaaaaaaaaaaaaaaaaaa

SEQ ID NO: 395406 - DNA, 1000 bp, Homo Sapiens; identical to SEQ ID NO: 285204

SEQ ID NO: 395407 - DNA, 1000 bp, Homo Sapiens; identical to SEQ ID NO: 221048

SEQ ID NO: 395408 - DNA, 1000 bp, Homo Sapiens; identical to SEQ ID NO: 221049

SEQ ID NO: 395409 - DNA, 1000 bp, Homo Sapiens; identical to SEQ ID NO: 115672

SEQ ID NO: 395410 - DNA, 1000 bp, Homo Sapiens; identical to SEQ ID NO: 285209

SEQ ID NO: 395411 - DNA, 1000 bp, Homo Sapiens; identical to SEQ ID NO: 285210

SEQ ID NO: 395412 - DNA, 1000 bp, Homo Sapiens; identical to SEQ ID NO: 285211

SEQ ID NO: 395413 - DNA, 1000 bp, Homo Sapiens; identical to SEQ ID NO: 285212

SEQ ID NO: 395414 - DNA, 1000 bp, Homo Sapiens
tatttgcctggcctgacaaaaaatccaatgagatggtcaagaagtctgaaagagtcttgagggaaaaccagtgtgcctacatcaatgattccattggcttacatcgagtagagaacatcagccatacggaacctgctgtgagccttcacttgtacagtccaccttttgatacatgccatgcctttgatcaaagaacaggacataaaaacaaagtcacaatgacattccatagtaaatttggaatcagaactccaaatgcaacttcgggctcgctggagaacaactaaggggcaccaaaccctctgaggttttactttaaggttcgctgtatgtttgccttggacaaaaaggctacctaccacgtgctatccagtaatatacttaaataagccaatacttagatctactgtaaggcagatgctaattataaggcattaagtaagcaaatagtgccctcagctactgcagaagaaaagtcccactgaggaaaagaaagtcttgtgatttttaaaggcaagttttcaagtgctctcatagttctatcctctaattccattaaatccatactaggagcgtcagtgagggttttcatagcttttggaaatactttggtctctgaactgtaattagcaagaagtaaaaacagaaacgtcaaacgtcaaatgtttgctttgttacctggaggactaaatgtagatgtctttagtatactttgtatgttcttaatattggaagataattttgtgaatctgtagattttattttttcagtcttaccttacaaatttcttttctatgaataatagaggaacttacggcactctgccatttgttaatgaaaggaagtgcagaggatttagaaaagtacatgatccccagaccacaacaaaccaaaacataaactcatgtctgtgtcccatggtcatagtcaaagattttgtactgctaaaattaccaaataatttaaataaagtggatttgaacacaaaaaaaaaaaaaaa

SEQ ID NO: 395415 - DNA, 1000 bp, Homo Sapiens; identical to SEQ ID NO: 285214

SEQ ID NO: 395416 - DNA, 1000 bp, Homo Sapiens; identical to SEQ ID NO: 221052

SEQ ID NO: 395417 - DNA, 1000 bp, Homo Sapiens; identical to SEQ ID NO: 115674

SEQ ID NO: 395418 - DNA, 1000 bp, Homo Sapiens
cacagaggaggaaagagcaggcagcagagaccatggggcccccctcagcccctccccacagagaatgcatcccctggcaggggcttctgctcacagcctcacttctaaacttctggaacccgcccaccactgccaagctcactattgaatccatgccgctcagtgtcgcagaggggaaggaggtgcttctacttgtccacaatctgccccagcatctttttggctacagctggtacaaaggggaaagagtggatggcaacagtctaattgtgggatatgtaataggaactcaacaagctaccccaggggccgcatacagcggtcgagagacaatatacaccaatgcatccctgctgatccagaatgtcacccagaatgacataggattctacaccctacaagtcataaagtcagatcttgtgaatgaagaagcaactggacagttccatgtataccaagaaaatgccccaggccttcctgtgggggccgtcgccggcatcgtgaccggggtcctggtcggagtggcgctggtggccgcgctggtgtgtttcctgctccttgccaaaactggaaggccgtggtccctcccacagctctgccttctcgatgtcccctctctccactgcctaggcccccctacccaaccccaggacagcagcttccatctatgagaagtggcttcttagcttcctccaggagctgctcctgtgggttgatggagagtccccaaggcccccagccctggggatggggaaggacatgaagcctgagccagagaaccagctataagtcctgagaagacactggtgtctggggacagggagggatggggtccctgatgaatatctggagacctcgacagcctgccctaggccctgggtgggtcaggacaaaggcctctcatcaccgcagaaagcgggggcttgcagggaaagtgaatgggcctgtggcccacctggggtcacttggaaaggatctgaataaaggggacccttcctcg

SEQ ID NO: 395419 - DNA, 1000 bp, Homo Sapiens
gactgtctatgaacttgcaaacaggctgatacctttgtgaagttgcccaccaaaacacagaaggaaaaaaacatgaatttcattgaactaaataataatgaggataatgtttttaagatttttttttttttttgagatggaatctcgctctgtcgcccaggctggagtgcagtggcacgatctcaactcactgcaagctccgcctcctgggttcacaccattctcctgcctcagcctcctgagtagctgggactacaggcgcctgccacaacgcccggctaattttttgtatttttagtagagacggggtttcactgtggtctcaatctcctgacttcatggtccgcctgcctcagcctcccaaagttctgggattacaggtgtgagccaccgcgcccagcccgtttttaagattttttatttgaaaaattgccaattctttaagtgttttctttttcagatttatgaatttctttatcttttaagctatctataccttactgcaatttggtaaagcagacttttgtgaacaaaaattataacatttacttttgctccctacctgactgccacagaactgggcaactattcatgagtattcatatgtttatggtaattcagttatttgcacaagttcagtgagaatctgctgtctttataatgggatatagtttaaaacattggttatattaccaaggctttgattgggatgttatatttgagaaaatacagagaatgatagattaacggagtgtctaatctatcgtgtcaaccccaaatttttacgtatgagatcctttagtccacccaatggctgacagtaacagcatctttaacacaactctttgttcaaatgtactatggtctcttttagagtcagactcctagactcacttgttctcactgtctgttttaatttaacccaggcatgcaatgctagataataaaattgctccctattggctgatcaaaaaaaaaaaaaaaaaaaaaaaaaaaaaaa

SEQ ID NO: 395420 - DNA, 1000 bp, Homo Sapiens
tccaagaaaaccagatggacaaggcaaggaggcatccacaaggtgcgtggaaagagctggacagaaattatctcaactacggtgaggaaggagccccagggaagtggcagcagcagggagacctgcaggacactaaagaaaacagggaggaagctaggtttcaagataaacaatatagctcccatcacacagctgaaaagaggaagagattaggggaactgttcaacccatactacgaccctctccagtggaagagcagccattttgaaagaagagacaacatgaatgacaattttctcgagggtgaggaggaaaatgagctgaccttgaacgagaagaatttcttcccagaatacaactatgactggtgggagaaaaagcccttctctgaggatgtgaactgggggtatgagaagagaaacctcgccagggtccccaagctggacctgaaaaggcaatatgacagggtggcccaactggaccagctccttcactacaggaagaagtcagctgagtttccagacttctatgattctgaggagccggtgagcacccaccaggaggcagaaaatgaaaaggacagggctgaccagacagtcctgacagaggacgagaaaaaagaactcgaaaacttggctgcaatggatttggaactacagaagatagctgagaaattcagccaaaggggctgactgtcattggagcggtgggcactgttaagaagcagccatcacatgatctgtttttcaccacttcactgaaagacaccatttatatacccaagggcagaaagtagaacttactattcattaaatgtttgacacaattggaattgtctttaatttctgtcagaatgctattgaaaatgtgaattgcatgacttgtagcatattcttttctgcaaaatagacatattaacatgcttatgacaatgactgtgctactgtctttggaaaaatgtttgtctcagttggaaataataaaagattcacctgagacc

SEQ ID NO: 395421 - DNA, 1000 bp, Homo Sapiens; identical to SEQ ID NO: 285217

SEQ ID NO: 395422 - DNA, 1000 bp, Homo Sapiens; identical to SEQ ID NO: 285218

SEQ ID NO: 395423 - DNA, 1000 bp, Homo Sapiens; identical to SEQ ID NO: 115675

SEQ ID NO: 395424 - DNA, 1000 bp, Homo Sapiens
gagcagcagcagctcatcgatgaccacttcctgttcgacaagcccgtgtccccgctgctgctggcctcaggcatggcccgcgactggcccgacgcccgtggcatctggcacaatgacaacaagagcttcctggtgtgggtgaacgaggaggatcacctccgggtcatctccatggagaaggggggcaacatgaaggaggttttccgccgcttctgcgtagggctgcagaagattgaggagatctttaagaaagctggccaccccttcatgtggaaccagcacctgggctacgtgctcacctgcccatccaacctgggcactgggctgcgtggaggcgtgcatgtgaagctggcgcacctgagcaagcaccccaagttcgaggagatcctcacccgcctgcgtctgcagaagaggggtacaggtggcgtggacacagctgccgtgggctcagtatttgacgtgtccaacgctgatcggctgggctcgtccgaagtagaacaggtgcagctggtggtggatggtgtgaagctcatggtggaaatggagaagaagttggagaaaggccagtccattgacgacatgatccccgcccagaagtaggcgcctgcccacctgccaccgactgctggaacccagccagtgggagggcctggcccaccagagtcctgctccctcactcctcgccccgccccctgtcccagagtcccacctgggggctctctccacccttctcagagttccagtttcaaccagagttccaaccaatgggctccatcctctggattctggccaatgaaatatctccctggcagggtcctcttcttttcccagagctccaccccaaccaggagctctagttaatggagagctcccagcacactcggagcttgtgctttgtctccacgcaaagcgataaataaaagcattggtggccttaaaaaaaaaaaaaaaaaaaaaaaaaaaaaaaaaaaaaaaaaaaaaaaaaaaaaaaaaaaaaaaa

SEQ ID NO: 395425 - DNA, 717 bp, Homo Sapiens; identical to SEQ ID NO: 285221

SEQ ID NO: 395426 - DNA, 1000 bp, Homo Sapiens; identical to SEQ ID NO: 221053

SEQ ID NO: 395427 - DNA, 1000 bp, Homo Sapiens; identical to SEQ ID NO: 115676

SEQ ID NO: 395428 - DNA, 1000 bp, Homo Sapiens
gcaagtatatgatcccaaatactgtgctgctcctacagaacctgtcattcacaacggaagccaaggaacaggaacaaatggttcggaaatcagtgatagtgattatcaggcagaataccctgatgagtatcatggcgagtaccaggatgactaccccagagattaccaatatagcgaccaaggcattgattattagatccacacagaaggagctcagtatttagtcctttgtttttattcagtgagaaccaagctagccttgagtaatttttatcttgtcttcctaaaacactattaagcttattgtacttttaagaaaaattgccttacgtacattcctttttcctttttctgcctcttccctcaatagttgccttttagtgctgtaatagttaaatcctacagcataatcaataactcgcatatgaagtaaaaaggaatactgtgaaaggggagtactcttgtacagccagttcttttatgcaaaaatctatgcatttttacaatcttatattaaactggtattttcaaacaataggaaacttttttttttttttttttttacagtttagtgtatctggtttctacatggaagactaaactcatgcttattgctaaatgtggtctttgccaactaaatttaagatgcagcattttagaaatttacatatcaatgtttctacagtattgtttgctaatttttaaataaagtcatgatcagtgtgcatttgtgattatatgtgtactcattctcttacctagcgaacaagatcttttcagagtggtgtttctaaaagagcatgtacaaaagtggcctgtggacatttaggcctgggtgatgcatttgctcttcctgtttgtgccaatgtatcaatgtagagttgctctgttttcttcaactgtatttattgctgcatttctcagcataaacttatcccattgtattttttataaataaatattttttttgaactttcatatgaaaaaaaaaaaaaaaaaa

SEQ ID NO: 395429 - DNA, 1000 bp, Homo Sapiens; identical to SEQ ID NO: 221054

SEQ ID NO: 395430 - DNA, 1000 bp, Homo Sapiens; identical to SEQ ID NO: 115679

SEQ ID NO: 395431 - DNA, 1000 bp, Homo Sapiens
cacctgccactactacgccaacaagtacagcttctggctgaccaccattcccgagcagagcttccagggctcgccctccgccgacacgctcaaggccggcctcatccgcacacacatcagccgctgccaggtgtgcatgaagaacctgtgagccggcgcgtgccaggaagggccattttggtgcttattcttaacttattacctcaggtgccaacccaaaaattggctttatttttttcttaaaaaaaaaaaagtctaccaaaggaatttgcatccagcagcagcacttagacctgccagccactgtcaccgagcgggtgcaagcactcggggtccctggagggcaagccctgcccacagaaagccaggagcagccctggcccccatcagccctgctagacgcaccgcctgaaggcacagctaaccacttcgcacacacccatgtaaccactgcactttccaatgccacagacaactcacattgttcaactcccttctcggggtgggacagacgagacaacagcacacaggcagccagccgtggccagaggctcgaggggctcaggggctcaggcacccgtccccacacgagggccccgtgggtgggcctggccctgctttctacgccaatgttatgccagctccatgttctcccaaataccgttgatgtgaattattttaaaggcaaaaccgtgctctttattttagaaaacactgataatcacactgcggtaggtcattcttttgccacatccctatagaccactgggtttggcaaaactcaggcagaagtggagacccttctagacatcactgtcagccttgctacttgaaggtacaccccatagggtcggaggtgctgtccccactgccccacgttgtccctgagatttaacccctccactgctgggggtgagctgtactcttctgactgccccctcctgtgtaacgactacaaaataaaacttggttctgaatatttttaaaaaaaaaaaaaaaa

SEQ ID NO: 395432 - DNA, 1000 bp, Homo Sapiens; identical to SEQ ID NO: 285228

SEQ ID NO: 395433 - DNA, 1000 bp, Homo Sapiens
ggaaggtggcgctgggctagcccaccctgcacgccggcaccaaaccctgtcctcccacccctccccactcatcactaaacagagcccaagcttggaaagccaggacacaacgctgctgcctgctttgtgcagggtcctccggggctcagccctgagttggcatcacctgcgcagggccctctggggctcagctctgagctagtgtcacctgcacagggccctctgaggctcagccctgagctggcgtcacctgtgcagggccctctggggctcagccctgagctggcctcacctgggttccccaccccgggctctcctgccctgccctcctgcccgccctccctcctgcctgcgcagctccttccctaggcacctctgtgctgcatcccaccagcctgagcaagacgcctctcggggcctgtgccgcactagcctccctctcctctgtccccatagctggtttttcccaccaatcctcacctaacagttactttacaattaaactcaaagcaagctcttctcctcagcttggggcagccattggcctctgtctcgttttgggaaaccaaggtcaggaggccgttgcagacataaatctcggcgactcggccccgtctcctgagggtcctgctggtgaccggcctggaccttggccctacagccctggaggccgctgctgaccagcactgaccccgacctcagagagtactcgcaggggcgctggctgcactcaagaccctcgagattaacggtgctaaccccgtctgctcctccctcccgcagagactggggcctggactggacatgagagccccttggtgccacagagggctgtgtcttactagaaacaacgcaaacctctccttcctcagaatagtgatgtgttcgacgttttatcaaaggccccctttctatgttcatgttagttttgctccttctgtgtttttttctgaaccatatccatgttgctgacttttccaaataaaggttttcactcctc

SEQ ID NO: 395434 - DNA, 1000 bp, Homo Sapiens
ctccgacctggtcgctgagaagttcatcgatgacatggaggacgtcctctgcccggaccctcagatcgtgtgcccagaccttccctgccaaacagagctgtccgtggcacagtgcacgcagcggcccgtggacatcgtcttcctgctggacggctccgagcggctgggtgagcagaacttccacaaggcccggcgcttcgtggagcaggtggcgcggcggctgacgctggcccggagggacgacgaccctctcaacgcacgcgtggcgctgctgcagtttggtggccccggcgagcagcaggtggccttcccgctgagccacaacctcactgccatccacgaggcgctggagaccacacaatacctgaactccttctcgcacgtgggcgcaggcgtggtgcacgccatcaatgccatcgtgcgcagcccgcgtggcggggcccggaggcacgcagagctgtccttcgtgttcctcacggacggcgtcacgggcaacgacagtctgcacgagtcggcgcactccatgcgcaagcagaacgtggtacccaccgtgctggccttgggcagcgacgtggacatggacgtgctcaccacgctcagcctgggtgaccgcgccgccgtgttccacgagaaggactatgacagcctggcgcaacccggcttcttcgaccgcttcatccgctggatctgctagcgccgccgcccgggccccgcagtcgagggtcgtgagcccaccccgtccatggtgctaagcgggcccgggtcccacacggccagcaccgctgctcactcggacgacgccctgggcctgcacctctccagctcctcccacggggtccccgtagccccggcccccgcccagccccaggtctccccaggccctccgcaggctgcccggcctccctccccctgcagccatcccaaggctcctgacctacctggcccctgagctctggagcaagccctgacccaataaaggctttgaacccaaaaaaaaaaa

SEQ ID NO: 395435 - DNA, 1000 bp, Homo Sapiens; identical to SEQ ID NO: 223037

SEQ ID NO: 395436 - DNA, 1000 bp, Homo Sapiens; identical to SEQ ID NO: 221055

SEQ ID NO: 395437 - DNA, 1000 bp, Homo Sapiens; identical to SEQ ID NO: 285230

SEQ ID NO: 395438 - DNA, 1000 bp, Homo Sapiens
ccccggtcctctgggcctgcagggcgtcccgggtgttcctggcatcacggggaagccgggagttccggggaaggaggccagcgagcagcgcatcagggagctgtgtggggggatgatcagcgaacaaattgcacagttagccgcgcacctaaggaagcctttggcacccgggtccattggtcggcccggtccagctggcccccctgggcccccaggacccccaggctccattggtcaccctggcgctcgaggaccccctggataccgcggtcccactggggagctgggagaccccgggcccagaggaaaccagggtgacagaggagacaaaggcgcggcaggagcagggctggacgggcctgaaggagaccaggggccccaaggaccccaaggcgtgcccggcaccagcaaggacggccaggacggtgctcccggcgagcctgggcctcccggagatcctgggcttccaggtgccattggggcccaggggacaccggggatctgcgacacctcagcctgccaaggagccgtgttaggaggggtcggggagaaatcaggctctcgaagctcataaaattcaacgtgaggaagcaagtgacaaggacgcccgaagcacagtggacggtcatgaaggagcgggggtgtggcaggcgggtgacgtccaggagagggagcgcccctggctgcccctcggccgccgactggacgcgcgggccttgccagcgagcaccctcatcgggctgtcgcctgacagcatacctcaaaaggccctagctaataaacctgtaagcccagcatttgagagaaggtagggtgtgtatatataaaaggttgtgtacaactccacgaggtgaaaaatattcagtaacttgtttacatagcatttgtgtaaagactatgatctcatcccaataaaatgatatattaaaccttcagattaatgactggctacagagtaacaaaaaataaagaatttaatgtacagtaaattctctcccat

SEQ ID NO: 395439 - DNA, 1000 bp, Homo Sapiens; identical to SEQ ID NO: 285231

SEQ ID NO: 395440 - DNA, 1000 bp, Homo Sapiens; identical to SEQ ID NO: 285232

SEQ ID NO: 395441 - DNA, 1000 bp, Homo Sapiens; identical to SEQ ID NO: 285233

SEQ ID NO: 395442 - DNA, 1000 bp, Homo Sapiens; identical to SEQ ID NO: 285234

SEQ ID NO: 395443 - DNA, 1000 bp, Homo Sapiens
gcccaggcatggtcttgtgtcttaagacagctgctgtgaccaaagggagaatggagataacaggggtggcagggttactgagcccatgacaatgcttctctgtgactcaaaccaggaatttccaaagatttcaagccagggagaagggttcttggtgatgcagggcatggaacctggacaccctcagctctcctgctttgtgccttatctacaggagcatcgcccattggacttcctgacctcttctgtctttgagggacagagaccaagctagatcctttttctcacctttctgcctttggaacacatgaagatcatctcgtctatggatcatgttgacaaactaagttttttttatttttcccattgaactcctagttggcaattttgcacattcatacaaaaaaatttttaatgaaatgatttcattgattcatgatggatggcagaaactgctgagacctatttccctttcttggggagagaataagtgacagctgattaaaggcagagacacaggactgctttcaggctcctggtttattctctgattgactgagctccttccaccagaaggcactgcctgcaggaagaagatgatctgatggccgtgggtgtctgggaagctcttcgtggcctcaatgccctcctttatcctcatctttcttctatgcagaacaaaaagctgcatctaataatgttcaatacttaatattctctatttattacttactgcttactcgtaatgatctagtggggaaacatgattcattcacttaaaatactgattaagccatgggcaggtactgactgaagatgcaatccaaccaaagccattacattttttgagttagatgggactctctggatagttgaacctcttcactttataaaaaaggaaagagagaaaatcactgctgtatactaaatacctcacagattagatgaaaagatggttgtaagctttgggaattaaaaacaaatacattttagtaaatat

SEQ ID NO: 395444 - DNA, 802 bp, Homo Sapiens
cgacgttcgcagcgctacccttttccgctccacggtgacctccgtgcggccgggtgcgggcggagtcttcctcgatcccgtggtgctccgcggcgcggccttgctctcttccggtcgcgggacaccgggtgtagagggcggtcgcggcgggcagtggcggcagaatgttggctaccagggtatttagcctagttggcaagcgagcaatttccacctctgtgtgtgtacgagctcatgaaagtgttgtgaagagcgaagacttttcgctcccagcttatatggatcggcgtgaccaccccttgccggaggtggcccatgtcaagcacctgtctgccagccagaaggcactgaaggagaaggagaaggcctcctggagcagcctctccatggatgagaaagtcgagttgtatcgcattaagttcaaggagagctttgctgagatgaacaggggctcgaacgagtggaagacggttgtgggcggtgccatgttcttcatcggtttcaccgcgctcgttatcatgtggcagaagcactatgtgtacggccccctcccgcaaagctttgacaaagagtgggtggccaagcagaccaagaggatgctggacatgaaggtgaaccccatccagggcttagcctccaagtgggactacgaaaagaacgagtggaagaagtgagagatgctggcctgcgcctgcacctgcgcctggctctgtcaccgccatgcaactccatgcctatttactggaaacctgttatgccaaacagttgtaccactgctaataaatgaccagtttacctgaaa

SEQ ID NO: 395445 - DNA, 523 bp, Homo Sapiens; identical to SEQ ID NO: 115680

SEQ ID NO: 395446 - DNA, 1000 bp, Homo Sapiens; identical to SEQ ID NO: 115682

SEQ ID NO: 395447 - DNA, 1000 bp, Homo Sapiens; identical to SEQ ID NO: 221056

SEQ ID NO: 395448 - DNA, 1000 bp, Homo Sapiens
aagaatcgaatgtggagaaagaaccgttctttctatgcgaacaatcattgcatcggaacagacctgaataggaactttgcttccaaacactggtgtgaggaaggtgcatccagttcctcatgctcggaaacctactgtggactttatcctgagtcagaaccagaagtgaaggcagtggctagtttcttgagaagaaatatcaaccagattaaagcatacatcagcatgcattcatactcccagcatatagtgtttccatattcctatacacgaagtaaaagcaaagaccatgaggaactgtctctagtagccagtgaagcagttcgtgctattgagaaaactagtaaaaataccaggtatacacatggccatggctcagaaaccttatacctagctcctggaggtggggacgattggatctatgatttgggcatcaaatattcgtttacaattgaacttcgagatacgggcacatacggattcttgctgccggagcgttacatcaaacccacctgtagagaagcttttgccgctgtctctaaaatagcttggcatgtcattaggaatgtttaatgcccctgattttatcattctgcttccgtattttaatttactgattccagcaagaccaaatcattgtatcagattatttttaagttttatccgtagttttgataaaagattttcctattccttggttctgtcagagaacctaataagtgctactttgccattaaggcagactagggttcatgtctttttaccctttaaaaaaaattgtaaaagtctagttacctactttttctttgattttcgacgtttgactagccatctcaagcaactttcgacgtttgactagccatctcaagcaagtttaatcaaagatcatctcacgctgatcattggatcctactcaacaaaaggaagggtggtcagaagtacattaaagatttctgctccaaattttcaataaatttctgcttgtgcctttagaaataca

SEQ ID NO: 395449 - DNA, 1000 bp, Homo Sapiens; identical to SEQ ID NO: 221057

SEQ ID NO: 395450 - DNA, 1000 bp, Homo Sapiens; identical to SEQ ID NO: 220715

SEQ ID NO: 395451 - DNA, 1000 bp, Homo Sapiens; identical to SEQ ID NO: 221058

SEQ ID NO: 395452 - DNA, 1000 bp, Homo Sapiens; identical to SEQ ID NO: 285239

SEQ ID NO: 395453 - DNA, 969 bp, Homo Sapiens
agctttggggttgtccctggacttgtcttggttccagaacctgacgacccggcgacggcgacgtctcttttgactaaaagacagtgtccagtgctccagcctaggagtctacggggaccgcctcccgcgccgccaccatgcccaacttctctggcaactggaaaatcatccgatcggaaaacttcgaggaattgctcaaagtgctgggggtgaatgtgatgctgaggaagattgctgtggctgcagcgtccaagccagcagtggagatcaaacaggagggagacactttctacatcaaaacctccaccaccgtgcgcaccacagagattaacttcaaggttggggaggagtttgaggagcagactgtggatgggaggccctgtaagagcctggtgaaatgggagagtgagaataaaatggtctgtgagcagaagctcctgaagggagagggccccaagacctcgtggaccagagaactgaccaacgatggggaactgatcctgaccatgacggcggatgacgttgtgtgcaccagggtctacgtccgagagtgagtggccacaggtagaaccgcggccgaagcccaccactggccatgctcaccgccctgcttcactgccccctccgtcccaccccctccttctaggatagcgctccccttaccccagtcacttctgggggtcactgggatgcctcttgcagggtcttgctttctttgacctcttctctcctcccctacaccaacaaagaggaatggctgcaagagcccagatcacccattccgggttcactccccgcctccccaagtcagcagtcctagccccaaaccagcccagagcagggtctctctaaaggggacttgagggcctgagcaggaaagactggccctctagcttctaccctttgtccctgtagcctatacagtttagaatatttatttgttaattttattaaaatgctttaaaaaaa

SEQ ID NO: 395454 - DNA, 1000 bp, Homo Sapiens; identical to SEQ ID NO: 285241

SEQ ID NO: 395455 - DNA, 1000 bp, Homo Sapiens; identical to SEQ ID NO: 221059

SEQ ID NO: 395456 - DNA, 1000 bp, Homo Sapiens
gtgaggaagaggtggcaccgctggcaggaccatcactcccttcgagtccccatggcccgggccatgtccatccctacatcacccacacggatcagcttccacagcatcaagcagacggccgctgtgtgacccctcggtcgcccacctgcacagctcccctgtcctcctccaccttcttcctctgggttctctgtgctgggcaggctctcgtggggcaggagatgggaggggagagaccagctctccagcctggcaggaaagagggggtgcggcagccaagggggactgcaagggacagggatgagtgggggccaccaggctcagcgcaagaggaagcagagggaattcacaggaccccctgagaagagccagtcagatgtctgcaggcatttgcccatcccagcctctctggccagggccttactgggcccagagcagagaaggacctgtccaacacacacagctatttatagtagcagacacagggctcccctgccctactcatggagccagcagccaggcaatggtgtggccctgcactggcccttggactccacactcagtggtgccctgcagttgggtgggttacgccagcaaaggatcagtttggctgccttatcccagggctgtcacctagagaggctcacttgtaccccaccctgttcctgtgtcccctccccagccatcctcccgccttgggggctccatgaaggatgcaggcttccaggcctggcttcctctcttgggagaccccttctctgcctagtccacagattaggcaatcaaggaagacgccatcagggaagccacatccttagtcaaccagttgcatcgtgcggggcaaaatgaggagcagaggcatggaggagggaggcgtgggatgggaatagcagaaccaccatgtcttcagtgattgaaactcataccccattgccctttgccctccagtctccccttcagaaacatctctgctctctgtgaaataaaccatgcctcttgg

SEQ ID NO: 395457 - DNA, 1000 bp, Homo Sapiens
gtgcaatatcccatcacaaagcccagagagccctgtgggggccagaacacagtgcccggagtcaggaactacggattttgggataaagataaaagcagatatgatgttttctgttttacatccaatttcaatggccgtttttactatctgatccaccccaccaaactgacctatgatgaagcggtgcaagcttgtctcaatgatggtgctcagattgcaaaagtgggccagatatttgctgcctggaaaattctcggatatgaccgctgtgatgcgggctggttggcggatggcagcgtccgctaccccatctctaggccaagaaggcgctgcagtcctactgaggctgcagtgcgcttcgtgggtttcccagataaaaagcataagctgtatggtgtctactgcttcagagcatacaactgaatgtgcccttagagcgcatcagttttaaagtcattaagaacatgtgaaaggtgttttttttttccaatatgaactcatgcaagttaccaaaactgtgataacccttttttacttactgtaaagagtcattttcataagatcaattcattgatttgttttttgtaaagctatcattcaatatatattataaattaatataaatttaagggaagctctatgtaaggagacttagagccaaactgtttaagctgtatcatcccaacaaagtatcctttcatgaacggggcatgcaatagcttaagaattgctaggattaaattaaggaaagtaaagctactcagagcaacaggttccacaagcacaaactttacacatttgtacaattttgaaatgcactacaataaacaaattagagcaacacatttgaaatacaggcttctttacataaactgagaggttatacaaaactcagtttcacaagggaacaatctatacctttctaaaagttaatatttcaagtctctaataggcagaatattttactctttaaaatcctgcctttctgaccaaaaaaaaa

SEQ ID NO: 395458 - DNA, 1000 bp, Homo Sapiens; identical to SEQ ID NO: 115683

SEQ ID NO: 395459 - DNA, 1000 bp, Homo Sapiens; identical to SEQ ID NO: 285246

SEQ ID NO: 395460 - DNA, 1000 bp, Homo Sapiens
gtctggcagaattctatcatcctgctcaggagtacaatgttcgtgtagcctcaaggtacttcaagggaccagagctcctcgtggactatcagatgtatgattatagcttggacatgtggagtttgggctgtatgttagcaagcatgatctttcgaagggaaccattcttccatggacaggacaactatgaccagcttgttcgcattgccaaggttctgggtacagaagaactgtatgggtatctgaagaagtatcacatagacctagatccacacttcaacgatatcctgggacaacattcacggaaacgctgggaaaactttatccatagtgagaacagacaccttgtcagccctgaggccctagatcttctggacaaacttctgcgatacgaccatcaacagagactgactgccaaagaggccatggagcacccatacttctaccctgtggtgaaggagcagtcccagccttgtgcagacaatgctgtgctttccagtggtctcacggcagcacgatgaagactggaaagcgacgggtctgttgcggttctcccacttttccataagcagaacaagaaccaaatcaaacgtcttaacgcgtatagagagatcacgttccgtgagcagacacaaaacggtggcaggtttggcgagcacgaactagaccaagcgaagggcagcccaccaccgtatatcaaacctcacttccgaatgtaaaaggctcacttgcctttggcttcctgttgacttcttcccgacccagaaagcatggggaatgtgaagggtatgcagaatgttgttggttactgttgctccccgagcccctcaactcgtcccgtggccgcctgtttttccagcaaaccacgctaactagctgaccacagactccacagtggggggacgggcgcagtatgtggcatggcggcagttacatattattattttaaaagtatatattattgaataaaaggttttaaaagaaaaaaaaaaaaaaaaaa

SEQ ID NO: 395461 - DNA, 736 bp, Homo Sapiens
ggctctcaccctcctctcctgcagctccagctttgtgctctgcctctgaggagaccatggcccggcctctgtgtaccctgctactcctgatggctaccctggctggggctctggcctcgagctccaaggaggagaataggataatcccaggtggcatctatgatgcagacctcaatgatgagtgggtacagcgtgcccttcacttcgccatcagcgagtacaacaaggccaccgaagatgagtactacagacgcccgctgcaggtgctgcgagccagggagcagacctttgggggggtgaattacttcttcgacgtagaggtgggccgcaccatatgtaccaagtcccagcccaacttggacacctgtgccttccatgaacagccagaactgcagaagaaacagttgtgctctttcgagatctacgaagttccctgggaggacagaatgtccctggtgaattccaggtgtcaagaagcctaggggtctgtgccaggccagtcacaccgaccaccacccactcccacccactgtagtgctcccacccctggactggtggcccccaccctgcgggaggcctccccatgtgcctgtgccaagagacagacagagaaggctgcaggagtcctttgttgctcagcagggcgctctgccctccctccttccttcttgcttctaatagacctggtacatggtacacacacccccacctcctgcaattaaacagtagcatcgcc

SEQ ID NO: 395462 - DNA, 1000 bp, Homo Sapiens; identical to SEQ ID NO: 285247

SEQ ID NO: 395463 - DNA, 1000 bp, Homo Sapiens; identical to SEQ ID NO: 285249

SEQ ID NO: 395464 - DNA, 1000 bp, Homo Sapiens; identical to SEQ ID NO: 115684

SEQ ID NO: 395465 - DNA, 1000 bp, Homo Sapiens; identical to SEQ ID NO: 115685

SEQ ID NO: 395466 - DNA, 1000 bp, Homo Sapiens; identical to SEQ ID NO: 221063

SEQ ID NO: 395467 - DNA, 1000 bp, Homo Sapiens; identical to SEQ ID NO: 115686

SEQ ID NO: 395468 - DNA, 924 bp, Homo Sapiens; identical to SEQ ID NO: 29217

SEQ ID NO: 395469 - DNA, 1000 bp, Homo Sapiens
cccccccagctatccgtggtctcaccgtggcctcctctcttccttggaccacaccagcatccggaggggtttccaggtatataagcaggtgtgcgcctcctgccacagcatggacttcgtggcctaccgccacctggtgggcgtgtgctacacggaggatgaagctaaggagctggctgcggaggtggaggttcaagacggccccaatgaagatggggagatgttcatgcggccagggaagctgttcgactatttcccaaaaccataccccaacagtgaggctgctcgagctgccaacaacggagcattgccccctgacctcagctacatcgtgcgagctaggcatggtggtgaggactacgtcttctccctgctcacgggctactgcgagccacccaccggggtgtcactgcgggaaggtctctacttcaacccctactttcctggccaggccattgccatggcccctcccatctacacagatgtcttagagtttgacgatggcaccccagctaccatgtcccagatagccaaggatgtgtgcaccttcctgcgctgggcatctgagccagagcacgaccatcgaaaacgcatggggctcaagatgttgatgatgatggctctgctggtgcccctggtctacaccataaagcggcacaagtggtcagtcctgaagagtcggaagctggcatatcggccgcccaagtgaccctgtccagtgtctgcttgccatcctgccagaacaggccctcaagcccaagagccatcccaggcctgttcaggcctcagctaagcctctcttcatctggaagaagaggcaagggggcaggagaccaggctctagctctgggccctccttcagcccccatcatgggaataaattaattttctcaatgtaaaaaaaaaaaaaaaaaaaaaaaaaaaaaaaaaaaaaaaaaaaaaaaaaaaaaaaaaaaaaaaaaaaaaaaaaaaaaaaaaaaaaaaaaaaaaaaaaaaaaaa

SEQ ID NO: 395470 - DNA, 1000 bp, Homo Sapiens; identical to SEQ ID NO: 285256

SEQ ID NO: 395471 - DNA, 1000 bp, Homo Sapiens; identical to SEQ ID NO: 221065

SEQ ID NO: 395472 - DNA, 1000 bp, Homo Sapiens; identical to SEQ ID NO: 115688

SEQ ID NO: 395473 - DNA, 1000 bp, Homo Sapiens; identical to SEQ ID NO: 285258

SEQ ID NO: 395474 - DNA, 1000 bp, Homo Sapiens; identical to SEQ ID NO: 115689

SEQ ID NO: 395475 - DNA, 542 bp, Homo Sapiens; identical to SEQ ID NO: 285260

SEQ ID NO: 395476 - DNA, 1000 bp, Homo Sapiens; identical to SEQ ID NO: 285262

SEQ ID NO: 395477 - DNA, 1000 bp, Homo Sapiens; identical to SEQ ID NO: 285263

SEQ ID NO: 395478 - DNA, 1000 bp, Homo Sapiens; identical to SEQ ID NO: 220407

SEQ ID NO: 395479 - DNA, 1000 bp, Homo Sapiens; identical to SEQ ID NO: 285265

SEQ ID NO: 395480 - DNA, 1000 bp, Homo Sapiens; identical to SEQ ID NO: 285266

SEQ ID NO: 395481 - DNA, 1000 bp, Homo Sapiens; identical to SEQ ID NO: 221066

SEQ ID NO: 395482 - DNA, 1000 bp, Homo Sapiens; identical to SEQ ID NO: 285268

SEQ ID NO: 395483 - DNA, 1000 bp, Homo Sapiens; identical to SEQ ID NO: 115692

SEQ ID NO: 395484 - DNA, 1000 bp, Homo Sapiens
cttgctgagatggaaagtcaaaattgctccttctttaatgacagcttgtccccagatgacagcatagacgaggaccagtacctgctgcggcactccagccccatcacagaccgggagccagcctttggacagcaggctccatgcagtgtggctacagaaagcaaaggggagctacagaagatcctggcccacttggaagatgagaaccggattctccagggagagctgaggcgcctgaagtggcagcatgaggaggcagctgaggcacccagtctggctgacggctccactgaggcagcaacagaccaccgcaatgaggagcttctggccgaggcccgtatccttcggcaacataagagccgcctggagacgcgcatgcagatcctcgaagatcacaacaagcagctagagtcccagctgcagcgtctgagggagcttctcctgcagccacccaccgaatcagatggcagtggctctgcaggctcgtccctagcttcctctccacagcagtcagaaggcagtcacccccgggagaagggacagaccactccagataccgaggctgcagatgatgtggggtcaaagagccaggatgtcagcctgtgcttggaggacatcatggagaaactccgtcatgccttccccagtgtgcgaagttctgatgtgactgccaacaccctgctggcctcttgatggagccagatccccatcctatagttcatagtcctctcctggttccggtcaaagcctttcctcagccttcacccaacctttccagtttccactggccccacattcctcaactagtattatttgggctctgggcagcagcagggatctggtggtatgtgaggtgcatgcgggcagtgatgggagaaggggaggcatgattcttctgaccctagaaatgttccctttaatcttcaagttcgagatcagccctttaagtacctttctgttgcagcccaggcaaatatcacttggccattcagatggggag

SEQ ID NO: 395485 - DNA, 1000 bp, Homo Sapiens; identical to SEQ ID NO: 285270

SEQ ID NO: 395486 - DNA, 1000 bp, Homo Sapiens
gccactggagttggcatctgttcctcagggcagtctggaaccatgagaacaaggcattccactggaggaaccaataaggactacgctgatggggcgataagcatgaattttctggactcctacttttctcagaaagcatttgcctgtgcggaggaagacgatggccaggaagcaaatgactgcttgttgatctatgataatgaaggcgcagatgccactggttctcctgtgggctccgtgggttgttgcagttttattgctgatgacctggatgacagcttcttggactcacttggacccaaatttaaaaaacttgcagagataagccttggtgttgatggtgaaggcaaagaagttcagccaccctctaaagacagcggttatgggattgaatcctgtggccatcccatagaagtccagcagacaggatttgttaagtgccagactttgtcaggaagtcaaggagcttctgctttgtccgcctctgggtctgtccagccagctgtttccatccctgaccctctgcagcatggtaactatttagtaacggagacttactcggcttctggttccctcgtgcaaccttccactgcaggctttgatccacttctcacacaaaatgtgatagtgacagaaagggtgatctgtcccatttccagtgttcctggcaacctagctggcccaacgcagctacgagggtcacatactatgctctgtacagaggatccttgctcccgtctaatatgaccagaatgagctggaataccacactgaccaaatctggatctttggactaaagtattcaaaatagcatagcaaagctcactgtattgggctaataatttggcacttattagcttctctcataaactgatcacgattataaattaaatgtttgggttcataccccaaaagcaatatgttgtcactcctaattctcaagtactattcaaattgtagtaaatcttaaagtttttcaaaaccctaaaatcatattcgc

SEQ ID NO: 395487 - DNA, 1000 bp, Homo Sapiens; identical to SEQ ID NO: 221067

SEQ ID NO: 395488 - DNA, 1000 bp, Homo Sapiens; identical to SEQ ID NO: 285272

SEQ ID NO: 395489 - DNA, 1000 bp, Homo Sapiens; identical to SEQ ID NO: 115693

SEQ ID NO: 395490 - DNA, 1000 bp, Homo Sapiens
ggaactccccaaagagctgtcagaaatctttgatcccacacgagagtgcatgagctcggagctgctggaggagttgatgtcctcagaagtgtttgcccctctgcttcgtctttctccacccccgggagaccacgattatatctacaacctggacgagagtgaaggtgtctgtgacctctttgatgtgcctgttctcaacctctgactgacagggacatgccctgtgtggctgggacccagactgtctgacctgggggttgcctggggacctctcccacccgacccctacagagcttgagagccacagacgcctggcttctccggcctcccctcaccgcacagttctggccacagctcccgctcctgtgctggcacttctgtgctcgcagagcaggggaacaggactcagcccccatcaccgtggagccaaagtgtttgcttctccctttctgcggccttcgccagcccaggctcggctgccacccagtggcacagaaccgaggagctgccattaccccccatagggggcagtgtcttgttcctgccagcctcagtgtcttgcttctgccagctccttcccctaggagggaagggtggggtggaactgggcacatgccagcaccacttctagcttccttcgctatcccccaccccctgaccctccagctcctcctggccctctcacgtgcccacttctgctgggcctttagccctagaacctgcaggtggtgggggcggctaccaagaaggaacagaggtctctggggaggagtctgggtggtccagccctgatgattggccccacctcctgctgccccataaccctctcttcatttcggctttttcatttaccctcatttagagccatttgcagagatttagaaagatttacagtaacgaatggattcctatataaagattatttttatactttttgcagcaaaaggaaattgtaatatttgtacagtgttcaagtgaataaaaaccatgcctaaggcta

SEQ ID NO: 395491 - DNA, 1000 bp, Homo Sapiens; identical to SEQ ID NO: 285274

SEQ ID NO: 395492 - DNA, 1000 bp, Homo Sapiens; identical to SEQ ID NO: 115696

SEQ ID NO: 395493 - DNA, 1000 bp, Homo Sapiens; identical to SEQ ID NO: 115697

SEQ ID NO: 395494 - DNA, 1000 bp, Homo Sapiens; identical to SEQ ID NO: 285277

SEQ ID NO: 395495 - DNA, 961 bp, Homo Sapiens
ggacaatttgtgggccatttaattcagggcccccaattcgtacgtggagaagtgggaatgcaaaagtactttgacctttaaccttcggtccggcgcggtggagggaaacgcctccgtctctatataaggaattttccggtctcttcgggtcctttttcctctcttcagcgtggggcgcccacaatttgcgcgctctctttctgctgctccccagctctcggatacagccgacaccatgggtttcggagacctgaaaagccctgccggcctccaggtgctcaacgattacctggcggacaagagctacatcgaggggtatgtgccatcacaagcagatgtggcagtatttgaagccgtgtccagcccaccgcctgccgacttgtgtcatgccctacgttggtataatcacatcaagtcttacgaaaaggaaaaggccagcctgccaggagtgaagaaagctttgggcaaatatggtcctgccgatgtggaagacactacaggaagtggagctacagatagtaaagatgatgatgacattgacctctttggatctgatgatgaggaggaaagtgaagaagcaaagaggctaagggaagaacgtcttgcacaatatgaatcaaagaaagccaaaaaacctgcacttgttgccaagtcttccatcttactagatgtgaaaccttgggatgatgagacagatatggcgaaattagaggagtgcgtcagaagcattcaagcagacggcttagtctggggctcatctaaactagttccagtgggatacggaattaagaaacttcaaatacagtgtgtagttgaagatgataaagttggaacagatatgctggaggagcagatcactgcttttgaggactatgtgcagtccatggatgtggctgctttcaacaagatctaaaatccatcctggatcatggcatttaaataaaagattgaaagattaaaa

SEQ ID NO: 395496 - DNA, 994 bp, Homo Sapiens; identical to SEQ ID NO: 285278

SEQ ID NO: 395497 - DNA, 1000 bp, Homo Sapiens; identical to SEQ ID NO: 115698

SEQ ID NO: 395498 - DNA, 1000 bp, Homo Sapiens; identical to SEQ ID NO: 221070

SEQ ID NO: 395499 - DNA, 1000 bp, Homo Sapiens; identical to SEQ ID NO: 115699

SEQ ID NO: 395500 - DNA, 1000 bp, Homo Sapiens
gcagtggcgtggctgcaccacccgtgccgccgccgccgcccacccctttcccccaggccaaggcgcgacgcaaggggcgccgcggcggcaaatgcagcacgcgctgcttctgcccgcggccgcacgccaaggccttcgcttgcccggtggagagttgtgtgcggagctttgcgcgctccgacgagctcaatcgccacctgcgcatccacacgggccacaaacccttccagtgccgcatctgcctccgcaacttcagccgcagcgaccacctcaccacgcacgtgcgcacccacaccggcgagaagccttttgcttgcgacgtgtgcggccgccgcttcgcgcgcagcgatgagaagaaacggcacagcaaggtgcacctcaagcagaaggcgcgcgccgaggagcggctcaagggcctcggcttttactcgctgggcctctccttcgcttctctctgagcaagagatgggtttatgggttggggcgccgccgttcggcgcgcacgagttccgggccgttcccctccccgctcttcttccaactcctcctcgcacgcccgagggccggcctccgtcccgcttccagtttccttgaagcgcccgccgcacacgccctattcagcaccagctcgccggacagttcccgcggtccaggcgctgtcacccttgtcagccgcgctttgggggaagtcttctgagaccacccagtgaataggcactaccctgggattcaagacagtcttttgtaactgcacacgccccacgccttcctctataacccccagagacaggctggggcaggccaaggcggtctcgcgcgggactttgtacagcagtgtcttatccagcagccgattggatgtaacgttttgctttgggttttttttccttttgttgttgttaatttttgtaaagcagacgctactctcaagcagttgacaaaactgtttatttttgcaattaaaattattgtgctaaaaaaaaaaaaaaaaaaaaaaaaa

SEQ ID NO: 395501 - DNA, 1000 bp, Homo Sapiens; identical to SEQ ID NO: 115700

SEQ ID NO: 395502 - DNA, 1000 bp, Homo Sapiens
cgcaaggtggactggctgactgagaagatgcatgccagagacttcacagtttctgctctgcatggtgacatggaccagaaggagagagatgttatcatgagggaattccggtcagggtcaagtcgtgttctgatcactactgacttgttggctcgcgggattgatgtgcaacaagtgtctttggttataaattatgatctacctaccaatcgtgaaaactatattcacagaattggcagagggggtcgatttgggaggaaaggtgtggctataaactttgttactgaagaagacaagaggattcttcgtgacattgagactttctacaatactacagtggaggagatgcccatgaatgtggctgaccttatttaattcctgggatgagagttttggatgcagtgctcgctgttgctgaataggcgatcacaacgtgcattgtgcttctttctttgggaatatttgaatcttgtctcaatgctcataacggatcagaaatacagattttgatagcaaagcgacgttagtcgtgagctcttgtgaggaaagtcattggctttatcctctttagagttagactgttggggtgggtataaaagatggggtctgtaaaatctttctttcttagaaatttatttcctagttctgtagaaatggttgtattagatgttctctatcatttaataatatacttgtggactaaaagatataagtgctgtataaaatcagccaattatgttaaactagcatatctgcctttattgtgtttgtcattagcctgagtagaaaggcctttaaaatttttttagaaagcatttgaatgcattttgtttggtattgtatttattcaataaagtatttaattagtgctaagtgtgaactggaccctgttgctaagccccagcaagcaatcctaggtagggtttaatccccagtaaaattgccatattgcacatgtcttaatgaagtttgaatgttaaataaattgtatattcacttt

SEQ ID NO: 395503 - DNA, 1000 bp, Homo Sapiens; identical to SEQ ID NO: 285283

SEQ ID NO: 395504 - DNA, 1000 bp, Homo Sapiens; identical to SEQ ID NO: 115701

SEQ ID NO: 395505 - DNA, 1000 bp, Homo Sapiens; identical to SEQ ID NO: 221072

SEQ ID NO: 395506 - DNA, 1000 bp, Homo Sapiens; identical to SEQ ID NO: 115702

SEQ ID NO: 395507 - DNA, 1000 bp, Homo Sapiens; identical to SEQ ID NO: 221073

SEQ ID NO: 395508 - DNA, 1000 bp, Homo Sapiens; identical to SEQ ID NO: 221074

SEQ ID NO: 395509 - DNA, 1000 bp, Homo Sapiens; identical to SEQ ID NO: 115704

SEQ ID NO: 395510 - DNA, 1000 bp, Homo Sapiens; identical to SEQ ID NO: 115705

SEQ ID NO: 395511 - DNA, 1000 bp, Homo Sapiens; identical to SEQ ID NO: 221077

SEQ ID NO: 395512 - DNA, 933 bp, Homo Sapiens; identical to SEQ ID NO: 221078

SEQ ID NO: 395513 - DNA, 1000 bp, Homo Sapiens; identical to SEQ ID NO: 115706

SEQ ID NO: 395514 - DNA, 1000 bp, Homo Sapiens; identical to SEQ ID NO: 285293

SEQ ID NO: 395515 - DNA, 1000 bp, Homo Sapiens; identical to SEQ ID NO: 221080

SEQ ID NO: 395516 - DNA, 1000 bp, Homo Sapiens; identical to SEQ ID NO: 221081

SEQ ID NO: 395517 - DNA, 1000 bp, Homo Sapiens; identical to SEQ ID NO: 285296

SEQ ID NO: 395518 - DNA, 1000 bp, Homo Sapiens; identical to SEQ ID NO: 115707

SEQ ID NO: 395519 - DNA, 1000 bp, Homo Sapiens; identical to SEQ ID NO: 285298

SEQ ID NO: 395520 - DNA, 1000 bp, Homo Sapiens; identical to SEQ ID NO: 285299

SEQ ID NO: 395521 - DNA, 570 bp, Homo Sapiens
agcagtgacgtgacacgcagcccacggtctgtactgacgcgccctcgcttcttcctctttctcgactccatcttcgcggtagctgggaccgccgttcagtcgccaatatgcagctctttgtccgcgcccaggagctacacaccttcgaggtgaccggccaggaaacggtcgcccagatcaaggctcatgtagcctcactggagggcattgccccggaagatcaagtcgtgctcctggcaggcgcgcccctggaggatgaggccactctgggccagtgcggggtggaggccctgactaccctggaagtagcaggccgcatgcttggaggtaaagtccatggttccctggcccgtgctggaaaagtgagaggtcagactcctaaggtggccaaacaggagaagaagaagaagaagacaggtcgggctaagcggcggatgcagtacaaccggcgctttgtcaacgttgtgcccacctttggcaagaagaagggccccaatgccaactcttaagtcttttgtaattctggctttctctaataaaaaagccacttagttcagtcaaaaaaaaaaa

SEQ ID NO: 395522 - DNA, 1000 bp, Homo Sapiens; identical to SEQ ID NO: 115709

SEQ ID NO: 395523 - DNA, 1000 bp, Homo Sapiens; identical to SEQ ID NO: 221083

SEQ ID NO: 395524 - DNA, 1000 bp, Homo Sapiens; identical to SEQ ID NO: 285302

SEQ ID NO: 395525 - DNA, 1000 bp, Homo Sapiens
gtgtgcaacacgtgccctgaaaagtggatcaatttccaacggaagtgctactacttcggcaagggcaccaagcagtgggtccacgcccggtatgcctgtgacgacatggaagggcagctggtcagcatccacagcccggaggagcaggacttcctgaccaagcatgccagccacaccggctcctggattggccttcggaacttggacctgaagggggagtttatctgggtggatgggagccacgtggactacagcaactgggctccaggggagcccaccagccggagccagggcgaggactgcgtgatgatgcggggctccggtcgctggaacgacgccttctgcgaccgtaagctgggcgcctgggtgtgcgaccggctggccacatgcacgccgccagccagcgaaggttccgcggagtccatgggacctgattcaagaccagaccctgacggccgcctgcccaccccctctgcccctctccactcttgagcatggatacagccaggcccagagcaagaccctgaagacccccaaccacggcctaaaagcctctttgtggctgaaaggtccctgtgacattttctgccacccaaacggaggcagctgacacatctcccgctcctctatggcccctgccttcccaggagtacaccccaacagcaccctctccagatgggagtgcccccaacagcaccctctccagatgagagtacaccccaacagcaccctctccagatgagagtacaccccaacagcaccctctccagatgagagtacaccccaacagcaccctctccagatgcagccccatctcctcagcaccccaggacctgagtatccccagctcaggtggtgagtcctcctgtccagcctgcatcaataaaatggggcagtgatggcctcccaaaaaaaaaaaaaaaaaaaaaaaaaaaaaaaaaaaaaaaaaaaaaaaaaaaaaaaaaaaaaaaaaaaaaaaaaaaaaaaaaaaaaaaaaaaa

SEQ ID NO: 395526 - DNA, 1000 bp, Homo Sapiens; identical to SEQ ID NO: 115710

SEQ ID NO: 395527 - DNA, 1000 bp, Homo Sapiens; identical to SEQ ID NO: 285303

SEQ ID NO: 395528 - DNA, 1000 bp, Homo Sapiens; identical to SEQ ID NO: 115711

SEQ ID NO: 395529 - DNA, 1000 bp, Homo Sapiens; identical to SEQ ID NO: 285304

SEQ ID NO: 395530 - DNA, 1000 bp, Homo Sapiens
aggtcggccgtgcgctcccgcgggacgccacaggcgcagctctgccccccagcttcccgggcgcactgaccgcctgaccgacgcacgccctcgggccgggatgtcggggcccgggacggccgcggtagcgctgctcccggcggtcctgctggccttgctggcgccctgggcgggccgagggggcgccgccgcacccactgcacccaacggcacgctggaggccgagctggagcgccgctgggagagcctggtggcgctctcgttggcgcgcctgccggtggcagcgcagcccaaggaggcggccgtccagagcggcgccggcgactacctgctgggcatcaagcggctgcggcggctctactgcaacgtgggcatcggcttccacctccaggcgctccccgacggccgcatcggcggcgcgcacgcggacacccgcgacagcctgctggagctctcgcccgtggagcggggcgtggtgagcatcttcggcgtggccagccggttcttcgtggccatgagcagcaagggcaagctctatggctcgcccttcttcaccgatgagtgcacgttcaaggagattctccttcccaacaactacaacgcctacgagtcctacaagtaccccggcatgttcatcgccctgagcaagaatgggaagaccaagaaggggaaccgagtgtcgcccaccatgaaggtcacccacttcctccccaggctgtgaccctccagaggacccttgcctcagcctcgggaagcccctgggagggcagtgcgagggtcaccttggtgcactttcttcggatgaagagtttaatgcaagagtaggtgtaagatatttaaattaattatttaaatgtgtatatattgccaccaaattatttatagttctgcgggtgtgttttttaattttctggggggaaaaaaagacaaaacaaaaaaccaactctgacttttctggtgcaacagtggagaatcttaccattggatttctttaacttgt

SEQ ID NO: 395531 - DNA, 1000 bp, Homo Sapiens; identical to SEQ ID NO: 221085

SEQ ID NO: 395532 - DNA, 1000 bp, Homo Sapiens
tatccagggaaccaggaaagaccacagccgatttggcattctggaatttatcagtatagcagtgggcctggtcagcattcgaggcgtggacagtggactctacctcgggatgaatgagaagggggagctgtatggatcagaaaaactaacccaagagtgtgtattcagagaacagttcgaagaaaactggtataatacgtactcgtcaaacctatataagcacgtggacactggaaggcgatactatgttgcattaaataaagatgggaccccgagagaagggactaggactaaacggcaccagaaattcacacattttttacctagaccagtggaccccgacaaagtacctgaactgtataaggatattctaagccaaagttgacaaagacaatttcttcacttgagcccttaaaaaagtaaccactataaaggtttcacgcggtgggttcttattgattcgctgtgtcatcacatcagctccactgttgccaaactttgtcgcatgcataatgtatgatggaggcttggatgggaatatgctgattttgttctgcacttaaaggcttctcctcctggagggctgcctagggccacttgcttgatttatcatgagagaagaggagagagagagagactgagcgctaggagtgtgtgtatgtgtgtgtgtgtgtgtgtgtgtgtgtgtgtatgtgtgtagcgggagatgtgggcggagcgagagcaaaaggactgcggcctgatgcatgctggaaaaaagacacgcttttcatttctgatcagttgtacttcatcctatatcagcacagctgccatacttcgacttatcaggattctggctggtggcctgcgcgagggtgcagtcttacttaaaagactttcagttaattctcactggtatcatcgcagtgaacttaaagcaaagacctcttagtaaaaaataaaaaaaaataaaaaataaaaataaaaaaagttaaatttatttatagaaattccaaaa

SEQ ID NO: 395533 - DNA, 1000 bp, Homo Sapiens; identical to SEQ ID NO: 115712

SEQ ID NO: 395534 - DNA, 1000 bp, Homo Sapiens; identical to SEQ ID NO: 115714

SEQ ID NO: 395535 - DNA, 1000 bp, Homo Sapiens; identical to SEQ ID NO: 115715

SEQ ID NO: 395536 - DNA, 1000 bp, Homo Sapiens; identical to SEQ ID NO: 221087

SEQ ID NO: 395537 - DNA, 1000 bp, Homo Sapiens; identical to SEQ ID NO: 285308

SEQ ID NO: 395538 - DNA, 1000 bp, Homo Sapiens; identical to SEQ ID NO: 285309

SEQ ID NO: 395539 - DNA, 1000 bp, Homo Sapiens; identical to SEQ ID NO: 115716

SEQ ID NO: 395540 - DNA, 1000 bp, Homo Sapiens; identical to SEQ ID NO: 285311

SEQ ID NO: 395541 - DNA, 1000 bp, Homo Sapiens; identical to SEQ ID NO: 221088

SEQ ID NO: 395542 - DNA, 1000 bp, Homo Sapiens; identical to SEQ ID NO: 285314

SEQ ID NO: 395543 - DNA, 1000 bp, Homo Sapiens; identical to SEQ ID NO: 285315

SEQ ID NO: 395544 - DNA, 1000 bp, Homo Sapiens; identical to SEQ ID NO: 221089

SEQ ID NO: 395545 - DNA, 1000 bp, Homo Sapiens; identical to SEQ ID NO: 221090

SEQ ID NO: 395546 - DNA, 1000 bp, Homo Sapiens; identical to SEQ ID NO: 285319

SEQ ID NO: 395547 - DNA, 1000 bp, Homo Sapiens; identical to SEQ ID NO: 115719

SEQ ID NO: 395548 - DNA, 1000 bp, Homo Sapiens; identical to SEQ ID NO: 115720

SEQ ID NO: 395549 - DNA, 1000 bp, Homo Sapiens
gaattcttcctatggtgtgaatgattccttcccagatggagactatggtgccaacctggaagcagctgccccctgccactcctgtaacctgctggatgactctgcactgcccttcttcatcctcaccagtgtcctgggtatcctagctagcagcactgtcctcttcatgcttttcagacctctcttccgctggcagctctgccctggctggcctgtcctggcacagctggctgtgggcagtgccctcttcagcattgtggtgcccgtcttggccccagggctaggtagcactcgcagctctgccctgtgtagcctgggctactgtgtctggtatggctcagcctttgcccaggctttgctgctagggtgccatgcctccctgggccacagactgggtgcaggccaggtcccaggcctcaccctggggctcactgtgggaatttggggagtggctgccctactgacactgcctgtcaccctggccagtggtgcttctggtggactctgcaccctgatatacagcacggagctgaaggctttgcaggccacacacactgtagcctgtcttgccatctttgtcttgttgccattgggtttgtttggagccaaggggctgaagaaggcattgggtatggggccaggcccctggatgaatatcctgtgggcctggtttattttctggtggcctcatggggtggttctaggactggatttcctggtgaggtccaagctgttgctgttgtcaacatgtctggcccagcaggctctggacctgctgctgaacctggcagaagccctggcaattttgcactgtgtggctacgcccctgctcctcgccctattctgccaccaggccacccgcaccctcttgccctctctgcccctccctgaaggatggtcttctcatctggacacccttggaagcaaatcctagttctcttcccacctgtcaacctgaattaaagtctacactgcctttgtgaaaaaaaaaaaaaaaaaa

SEQ ID NO: 395550 - DNA, 1000 bp, Homo Sapiens; identical to SEQ ID NO: 294340

SEQ ID NO: 395551 - DNA, 1000 bp, Homo Sapiens; identical to SEQ ID NO: 285323

SEQ ID NO: 395552 - DNA, 1000 bp, Homo Sapiens; identical to SEQ ID NO: 285324

SEQ ID NO: 395553 - DNA, 1000 bp, Homo Sapiens; identical to SEQ ID NO: 221091

SEQ ID NO: 395554 - DNA, 1000 bp, Homo Sapiens; identical to SEQ ID NO: 115721

SEQ ID NO: 395555 - DNA, 1000 bp, Homo Sapiens; identical to SEQ ID NO: 285327

SEQ ID NO: 395556 - DNA, 1000 bp, Homo Sapiens; identical to SEQ ID NO: 285328

SEQ ID NO: 395557 - DNA, 1000 bp, Homo Sapiens
gtgacatacaagtgactgaacacttcctggggagctacaggggcacttaacccaccacagcacagcctcatcaaaatgcagctggcaacttctcccccaggtgccttccccctgctgccggcctttgctccttcacttccaacatctctcaaaataaaaatccctcttcccgctctgagcgattcagctctgcccgcagcttgtacatgtctctcccctggcaaaacaagagctgggtagtttagccaaacggcaccccctcgagttcactgcagacccttcgttcaccgtgtcacacatagaggggttctgagtaagaacaaaacgttctgctgctcaagccagtctggcaagcactcagcccagcctcgaggtccttctggggagagtgtaagtggacagagtcctggtcagggggcaggagtgtcccaagggctggcccacctgctgtctgtctgctcctcctagcccttggtcagatggcagccagagtccctcaggacctgcagcctcgccccggcagaagtcttttgtccaggaggcaaaaagccagagattctgcaacacgaattcgaagcaaacaaacacaacacaacagaattcctggaaagaagacgactgctaagacacggcaggggggcctggagggagcctccgactctgagctgctccgggatctgccgcgttctcctctgcacattgctgtttctgcccctgatgctggagctcaaggagactccttcctctttctcagcagagctgtagctgactgtggcattactacgcctccccacacgcccagacccctcactccaaaatcctactggctgtagcagagaatacctttgaaccaagattctgttttaatcatcatttacattgttttcttccaaaggccccctcgtataccctccctaacccacaaacctgttaacattgtcttaaggtgaaatggctggaaaatcagtatttaactaataaatttatctgtattcctctt

SEQ ID NO: 395558 - DNA, 1000 bp, Homo Sapiens; identical to SEQ ID NO: 115722

SEQ ID NO: 395559 - DNA, 1000 bp, Homo Sapiens; identical to SEQ ID NO: 285331

SEQ ID NO: 395560 - DNA, 1000 bp, Homo Sapiens
cccagaaggacctcctgagcgatgactcaagtgtctcagtccacctgagctgccatccagggatgccatctgtgggcacgctgtgggcaggtgggagcttgattctcagcacttgggggatctgttgtgtacgtggagagggatgaggtgctgggagggatagaggggggctgcctggcccccagctgtgggtacagagaggtcaagcccaggaggactgccccgtgcagactggaggggacgctggtagagatggaggaggaggcaattgggatggcgctaggcatacaagtaggggttgtgggtgaccagttgcacttggcctctggattgtgggaattaaggaagtgactcatcctcttgaagatgctgaaacaggagagaaaggggatgtatccatgggggcagggcatgactttgtcccatttctaaaggcctcttccttgctgtgtcataccaggccgccccagcctctgagcccctgggactgctgcttcttaaccccagtaagccactgccacacgtctgaccctctccaccccatagtgaccggctgcttttccctaagccaagggcctcttgcggtcccttcttactcacacacaaaatgtacccagtattctaggtagtgccctattttacaattgtaaaactgaggcacgagcaaagtgaagacactggctcatattcctgcagcctggaggccgggtgctcagggctgacacgtccaccccagtgcacccactctgctttgactgagcagactggtgagcagactggtgggatctgtgcccagagatgggactgggagggcccacttcagggttctcctctcccctctaaggccgaagaagggtccttccctctccccaagacttggtgtcctttccctccacttcctcctgccacctgctgctgctgctgctgctaatcttcagggcactgctgctgcctttagtcgctgaggaaaaataaagacaaatgctgcgcccttccccag

SEQ ID NO: 395561 - DNA, 1000 bp, Homo Sapiens; identical to SEQ ID NO: 285332

SEQ ID NO: 395562 - DNA, 1000 bp, Homo Sapiens; identical to SEQ ID NO: 285333

SEQ ID NO: 395563 - DNA, 1000 bp, Homo Sapiens; identical to SEQ ID NO: 115723

SEQ ID NO: 395564 - DNA, 1000 bp, Homo Sapiens; identical to SEQ ID NO: 285335

SEQ ID NO: 395565 - DNA, 1000 bp, Homo Sapiens; identical to SEQ ID NO: 115503

SEQ ID NO: 395566 - DNA, 722 bp, Homo Sapiens
gtcggcgcgggaggctcaaatggctggaggcggcgggcacgcacactgcgggctccgaggggcacaggtccaggctcctgcgtgaagtgatgctcctctttgccttactcctagccatggagctcccattggtggcagccagtgccaccatgcgcgctcagtggacttacagtttgagatgccatgactgtgcggtcataaatgacttcaactgtcccaacattagagtatgtccgtatcatattaggcgctgtatgacaatctccattcgcataaattctcgtgaactacttgtttataagaactgtacaaacaactgcacatttgtatatgcagctgaacagcctcctgaagccccaggaaaaatcttcaaaactaatagcttctactgggtttgttgttgtaatagcatggtttgcaatgcaggaggacctactaatcttgaaagggacatgttacccgatgaagtaactgaggaggagcttccagaaggaactgtgaggctgggggtatcaaaactgttgctgagttttgcctctatcatagtcagcaatatattgccatgaggaccccaccttggagggtctgaccatcttcacctgttccgcagagaaatgttgctctccattattcccttctaagccagagacccttatccactgctcctctaggtggcccatttatggtttgttgtaagagaaaaattaaaaaaatattgttta

SEQ ID NO: 395567 - DNA, 1000 bp, Homo Sapiens; identical to SEQ ID NO: 115725

SEQ ID NO: 395568 - DNA, 1000 bp, Homo Sapiens; identical to SEQ ID NO: 221093

SEQ ID NO: 395569 - DNA, 1000 bp, Homo Sapiens
gcctggcgggatgggccaccgccgactttgtaccccccaacccctgaggaagatgggggcaagaagatcacgctccccgcctgttcccccgccgcttttctcctctttcctctctttgttctcagctccccctgtcccctcagctccagacgtaggggaggggttgccacaggcctccctgtttgaagcctgcccttgtctgagatgctggtaatggccatggtacccccttctgggcatctgttctggtttttaaccattgtcttgttctgtgatgaggggaggggggcacatgctgagtctcccaaggctgcgtctggaggggcccctgcttctccagcctggacccccagctttgcccaacaccagcccctgccccagcccaagtccaaatgtttacagggagcctcctgcccagtcccccaaccccagccgctcggaggccccaaaggaaaaagcacaagaagcgtgagacgccaccattcctggaaaccacagtccacctgctcattctcgtagctttttaaaaaaatgaaagtaaaggaaaaaaaaaaaactgcaaatctagaaaactttttagagaaaaactatttaaaactgtcagatcctgaccagcaagcccccccccagccccccttccaagtgactccgtgccttgagtgtgtctgcgtgtttacacccgtccctctgctggccgcccccgtgcgagcggcacccctgccctgccctccacagaattgggttccaagggctgttccagacaactgccaacgtcactgagggccctgccccagcggccctggccccaggctctattaacctaaaatgtagctccctagcgctaacctaggaaccgccgctgcctgctggggggccacgcccctcatgcccttgtcccaggcccggggccttcagcgttgaacacttccttgcttttttcacatgttttatggaattgttcacctggtttgaaataataaaatgtagaaagaaaaaaaat

SEQ ID NO: 395570 - DNA, 1000 bp, Homo Sapiens
aaacaagatatgctggcagaaaaagtcttggcagggaaatcaaaaattgaagactatttcccagaatatgcaaattatactgttcctgaagacgcaacaccagatgcaggagaagatcccaaagttacaagagccaagttctttatccgggacctgtttttgaggatcagcacggccaccggtgacggcaaacattactgctacccgcacttcacctgcgccgtggacacagagaacatccgcagggtgttcaacgactgccgcgacatcatccagcggatgcacctcaagcagtatgagctcttgtgaggacttggccgccaccctgcgacggagcggcgcccccggactgcctgactgccagccccatgccatggtaggaggcagagtctctagttccatctcgctgccgtctgtcccgttctgtgtcgaccaccaagcctctggctacctctgtcccctcaggtttggttgtgtagcttctgttgtcattgaatacggcttcccgcagcatcccacccccaaaccaccgactctcattgccgacactgcagcagaatctctccgggtgggagcccaattattcattctccctttattgattcatcgaggagaacttggtagatggggagaaaaacacagttggtttttttttccacgttatcaaccgtgactgcaagagcgttcgtgcatgccctgagccacggccgtctctgattctccctttatgaagctgcaggctgacgagagatggtcccttcccattgccttagcccaagacttggagtcgaccccaagcgacagagtgaccagaaacccttttacagtcacattcagagtcgctgctggcctcaggcatttgaattagagctactttgagcctcttaggcagaaaacctaccacattcactactgcaaaatgtgtcctgtctaaaaatgattctctaaactttccctatacttaggcatagtcttctttcttagattctctttgttgttg

SEQ ID NO: 395571 - DNA, 1000 bp, Homo Sapiens; identical to SEQ ID NO: 285337

SEQ ID NO: 395572 - DNA, 1000 bp, Homo Sapiens; identical to SEQ ID NO: 115727

SEQ ID NO: 395573 - DNA, 1000 bp, Homo Sapiens; identical to SEQ ID NO: 115728

SEQ ID NO: 395574 - DNA, 1000 bp, Homo Sapiens; identical to SEQ ID NO: 221094

SEQ ID NO: 395575 - DNA, 1000 bp, Homo Sapiens; identical to SEQ ID NO: 285342

SEQ ID NO: 395576 - DNA, 1000 bp, Homo Sapiens
cagacaatgagagagggtggatggtggtgagtggatcatttctttcagccacagtgtgtaacactcagcatttgaatgtttctcagaaaagaacatgtagtgacacagggcagaggcatccatggctggcgtctggaatattaaaccaaactctccccggtccttttttctccaacttttctcaaagagtttacatgtgcaagaaagtcatcgcaccaaaaaacctgtcaattatgccattgcaatatttcagaagctttaactgaagtgtcaggttcctcgtgagaaacagcacacgttagaggctttgagagaaggcctagttctgtcatgagtagtcggcctcgtgtctgtcctcccatcttggaacaaccttatcaacaggccgcactgcagaaatgatgttttatgaaaaccaatgaggctgctgccactccagcaagggaaataatgcagtttcctgtcttatttaagaaaaagagaaggctctcttttctcccttgtcattgccgttcttttccttacacgcaaagattttttaactattgcagattttcatcccattctactgcttgattgaccatcaactccatcctatcgagatttatttaagaatgaagaacataattttctgctgatgctgtaccctcacccttttcagcaaagaatagtggagagtaggaaactgtactttatctcggcatcctcttgaatgatagtgcaagtttctccagttgggatgttgtctctgcccggttggacctcctccctttgttgaatgtggtgtgcagcctctcatctcacactgtgagtccagcggcgcagggtggtaccaggaaagaggatattctaggctttgcgtgctgctagctgggttcaggcttcacccactggaaagaaccaccatctgctctaaccatgtagacttattgcggcctggtttctctgttacaataaaattactgtagacccaaaaaaaaaaaaaaaaaaaaaaaaaaaa

SEQ ID NO: 395577 - DNA, 1000 bp, Homo Sapiens; identical to SEQ ID NO: 285343

SEQ ID NO: 395578 - DNA, 1000 bp, Homo Sapiens; identical to SEQ ID NO: 115729

SEQ ID NO: 395579 - DNA, 923 bp, Homo Sapiens; identical to SEQ ID NO: 115730

SEQ ID NO: 395580 - DNA, 1000 bp, Homo Sapiens
gtgtgccaggagatgctgcaggagctgcgccacgccgtttcttgccgcaagacgtcgcgttcccgccggcgccgacgcccgggcggcccgagccgggccctgctgtcactgcgcgcggtccgcgagatgcgcctcagcaacggcaagctctactcggccggcgcgggcggggatgcgggcagcgcgcacgggggcccgcagcgcctcctggacgacccggggccccccagcggagcccgacccgccgcccccaccccctgcacccacgtgcgcgtctgccaggagtgccggcgcatccaggcgctgcgggcctcgggggccggcgcgcctccgcgtggcctgggcgtccccgccgaagccaccagcccgccccggccgcggcctggccccgccggcccccgggagctggcggagcacgagtgaccacgggcggggctgtgcgggcgcccggactgaccgaagggacggggcccgccccaggccccagcagtctccgctcccgcagcgggcgcgggacaggacttgtgcgccggcgccccggacgccgcgattttgcctttggttccccgcgaagtccgaggcctggctctggagcccgcctgcgccccccagtggactcgcgagagggtgccgcgggcgagaagggcgcaggaaccgaggactccaggggctggggacttcgggggcggctctgggaagcggaaagcagtcagcggagaggaccccattctgggactgctcaggctccccaagacttgacgcagccccccacgcttctggaggtggggagggcctctggacagatgggtgtcccctggtgcccctccactcttctcttcctctcttttttggggggagaaacctcggaatttctatgagacctcccccagggagggggtcagttgggcccccatccctccccttgccacatcgcagcccctgttggaataaaaaaaagaacaaaaccccagaaaaaaaaaaaaaaaaaaaaaaaaaaaaa

SEQ ID NO: 395581 - DNA, 1000 bp, Homo Sapiens; identical to SEQ ID NO: 285346

SEQ ID NO: 395582 - DNA, 1000 bp, Homo Sapiens; identical to SEQ ID NO: 115731

SEQ ID NO: 395583 - DNA, 1000 bp, Homo Sapiens; identical to SEQ ID NO: 115732

SEQ ID NO: 395584 - DNA, 1000 bp, Homo Sapiens; identical to SEQ ID NO: 221097

SEQ ID NO: 395585 - DNA, 1000 bp, Homo Sapiens; identical to SEQ ID NO: 285352

SEQ ID NO: 395586 - DNA, 1000 bp, Homo Sapiens; identical to SEQ ID NO: 115734

SEQ ID NO: 395587 - DNA, 1000 bp, Homo Sapiens; identical to SEQ ID NO: 221099

SEQ ID NO: 395588 - DNA, 1000 bp, Homo Sapiens; identical to SEQ ID NO: 115737

SEQ ID NO: 395589 - DNA, 1000 bp, Homo Sapiens; identical to SEQ ID NO: 221101

SEQ ID NO: 395590 - DNA, 1000 bp, Homo Sapiens; identical to SEQ ID NO: 115738

SEQ ID NO: 395591 - DNA, 1000 bp, Homo Sapiens; identical to SEQ ID NO: 115739

SEQ ID NO: 395592 - DNA, 1000 bp, Homo Sapiens
cacggtggggaccatgatgtcctgtggctatgaggacccccgttgcgagataggcctcattgtcggaaccggcaccaatgcctgctacatggaggagctccggaatgtggcgggcgtgcctggggactcaggccgcatgtgcatcaacatggagtggggcgcctttggggacgatggctctctggccatgctcagcacccgctttgatgcaagtgtggaccaggcgtccatcaaccccggcaagcagaggtttgaaaagatgatcagcggcatgtacctgggggagatcgtccgccacatccttttacatttaaccagccttggcgttctcttccggggccagcagatccagcgccttcagaccagggacatcttcaagaccaagttcctctctgagatcgaaagtgacagcctggccctgcggcaggtccgagccatcctagaggatctggggctacccctgacctcagatgacgccctgatggtgctagaggtgtgccaggctgtgtcccagagggctgcccagctctgtggggcgggtgtagctgccgtggtggagaagatccgggggaaccggggcctggaagagctggcagtgtctgtgggggtggatggaacgctctacaagctgcacccgcgcttctccagcctggtggcggccacagtgcgggagctggcccctcgctgtgtggtcacgttcctgcagtcagaggatgggtccggcaaaggtgcggccctggtcaccgctgttgcctgccgccttgcgcagttgactcgtgtctgaggaaacctccaggctgaggaggtctccgccgcagccttgctggagccgggtcggggtctgcctgtttcccagccaggcccagccacccaggactcctgggacatcccatgtgtgacccctctgcggccatttggccttgctccctggctttccctgagagaagtagcactcaggttagcaatatatatatataatttatttacaaaaaaaaaaaaa

SEQ ID NO: 395593 - DNA, 1000 bp, Homo Sapiens
tgagagcctacctggatggcacgtgcgtggagtggctccgcagatacctggagaacgggaaggagacgctgcagcgcacggacccccccaagacacatatgacccaccaccccatctctgaccatgaggccaccctgaggtgctgggccctgggcttctaccctgcggagatcacactgacctggcagcgggatggggaggaccagacccaggacacggagctcgtggagaccaggcctgcaggggatggaaccttccagaagtgggcggctgtggtggtgccttctggagaggagcagagatacacctgccatgtgcagcatgagggtctgcccaagcccctcaccctgagatgggagctgtcttcccagcccaccatccccatcgtgggcatcattgctggcctggttctccttggagctgtgatcactggagctgtggtcgctgccgtgatgtggaggaggaagagctcagatagaaaaggagggagttacactcaggctgcaagcagtgacagtgcccagggctctgatgtgtccctcacagcttgtaaagtgtgagacagctgccttgtgtgggactgagaggcaagagttgttcctgcccttccctttgtgacttgaagaaccctgactttgtttctgcaaaggcacctgcatgtgtctgtgttcgtgtaggcataatgtgaggaggtggggagaccaccccacccccatgtccaccatgaccctcttcccacgctgacctgtgctccctccccaatcatctttcctgttccagagaggtggggctgaggtgtctccatctctgtctcaacttcatggtgcactgagctgtaacttcttccttccctattaaaattagaaccttagtataaatttactttctcaaattcttgccatgagaggttgatgagttaattaaaggagaagattcctaaaatttgagagacaaaataaatggaacacatgagaaccttccaaaaaaaaaaaaaaaaaaa

SEQ ID NO: 395594 - DNA, 1000 bp, Homo Sapiens; identical to SEQ ID NO: 285361

SEQ ID NO: 395595 - DNA, 1000 bp, Homo Sapiens; identical to SEQ ID NO: 285362

SEQ ID NO: 395596 - DNA, 1000 bp, Homo Sapiens; identical to SEQ ID NO: 285363

SEQ ID NO: 395597 - DNA, 1000 bp, Homo Sapiens; identical to SEQ ID NO: 285366

SEQ ID NO: 395598 - DNA, 1000 bp, Homo Sapiens; identical to SEQ ID NO: 115741

SEQ ID NO: 395599 - DNA, 1000 bp, Homo Sapiens; identical to SEQ ID NO: 285368

SEQ ID NO: 395600 - DNA, 1000 bp, Homo Sapiens; identical to SEQ ID NO: 285369

SEQ ID NO: 395601 - DNA, 1000 bp, Homo Sapiens
catcttctgctcaggcctggtgctacaccggctgcagtgtgcccgtggcttcggggactggattgacagtatcctggccttctcaaggtccctgcacagcttgcttgtcgatgtccctgccttcgcctgcctctctgcccttgtcctcatcaccgaccggcatgggctgcaggagccgcggcgggtggaggagctgcagaaccgcatcgccagctgcctgaaggagcacgtggcagctgtggcgggcgagccccagccagccagctgcctgtcacgtctgttgggcaaactgcccgagctgcggaccctgtgcacccagggcctgcagcgcatcttctacctcaagctggaggacttggtgccccctccacccatcattgacaagatcttcatggacacgctgcccttctgacccctgcctgggaacacgtgtgcacatgcgcactctcatatgccaccccatgtgcctttagtccacggacccccagagcacccccaagcctgggcttgagctgcagaatgactccaccttctcacctgctccaggaggtttgcagggagctcaagcccttggggagggggatgccttcatgggggtgaccccacgatttgtcttatcccccccagcctggccccggcctttatgttttttgtaagataaaccgtttttaacacatagcgccgtgctgtaaataagcccagtgctgctgtaaatacaggaagaaagagcttgaggtgggagcggggctgggaggaagggatgggccccgccttcctgggcagcctttccagcctcctgctggctctctcttcctaccctccttccacatgtacataaactgtcactctaggaagaagacaaatgacagattctgacatttatatttgtgtattttcctggatttatagtatgtgacttttctgattaatatatttaatatattgaataaaaaatagacatgtagttggaaaaaaaaaaaaaaaaaaaaaaaaaaaaaaa

SEQ ID NO: 395602 - DNA, 1000 bp, Homo Sapiens
ggaagttcagagttctaggagtggaagaggaggcaactttggctttggggattcacgtggtggcggtggaaatttcggaccaggaccaggaagtaactttagaggaggatctgatggatatggcagtggacgtggatttggggatggctataatgggtatggaggaggacctggaggtggcaattttggaggtagccccggttatggaggaggaagaggaggatatggtggtggaggacctggatatggcaaccagggtgggggctacggaggtggttatgacaactatggaggaggaaattatggaagtggaaattacaatgattttggaaattataaccagcaaccttctaactacggtccaatgaagagtggaaactttggtggtagcaggaacatggggggaccatatggtggaggaaactatggtccaggaggcagtggaggaagtgggggttatggtgggaggagccgatactgagcttcttcctatttgccatgggcttcactgtataaataggagaggatgagagcccagaggtaacagaacagcttcaggttatcgaaataacaatgttaaggaaactcttatctcagtcatgcataaatatgcagtgatatggcagaagacaccagagcagatgcagagagccattttgtgaatggattggattatttaataacattaccttactgtggaggaaggattgtaaaaaaaaatgcctttgagacagtttcttagctttttaattgttgtttctttctagtggtctttgtaagagtgtagaagcattccttctttgataatgttaaatttgtaagtttcaggtgacatgtgaaaccttttttaagatttttctcaaagttttgaaaagctattagccaggatcatggtgtaataagacataacgtttttcctttaaaaaaatttaagtgcgtgtgtagagttaagaagctgttgtacatttatgatttaataaaataattctaaaggaaaaaa

SEQ ID NO: 395603 - DNA, 1000 bp, Homo Sapiens; identical to SEQ ID NO: 115742

SEQ ID NO: 395604 - DNA, 1000 bp, Homo Sapiens; identical to SEQ ID NO: 285372

SEQ ID NO: 395605 - DNA, 1000 bp, Homo Sapiens
ctgccgctttgatggaggaggtattgtaagctttccattttctataagaaaaaggaaaagttgaggggggggcattagtgctgatagctgtgtgtgttagcttgtatatatatttttaaaaatctacctgttcctgacttaaaacaaaaggaaagaaactacctttttataatgcacaactgttgatggtaggctgtatagtttttagtctgtgtagttaatttaatttgcagtttgtgcggcagattgctctgccaagatacttgaacactgtgttttattgtggtaattatgttttgtgattcaaacttctgtgtactgggtgatgcacccattgtgattgtggaagatagaattcaatttgaactcaggttgtttatgaggggaaaaaaacagttgcatagagtatagctctgtagtggaatatgtcttctgtataactaggctgttaacctatgattgtaaagtagctgtaagaatttcccagtgaaataaaaaaaaattttaagtgttctcggggatgcatagattcatcattttctccaccttaaaaatgcgggcatttaagtctgtccattatctatatagtcctgtcttgtctattgtatatataatctatatgattaaagaaaatatgcataatcagacaagcttgaatattgtttttgcaccagacgaacagtgaggaaattcggagctatacatatgtgcagaaggttactacctagggtttatgcttaattttaattggaggaaatgaatgctgattgtaacggagttaattttattgataataaattatacactatgaaaccgccattgggctactgtagatttgtatccttgatgaatctggggtttccatcagactgaacttacactgtatattttgcaatagttacctcaaggcctactgaccaaattgttgtgttgagatgatatttaactttttgccaaataaaatatattgattcttttctaaaaaaaaaaaaaaaaaaaa

SEQ ID NO: 395606 - DNA, 1000 bp, Homo Sapiens; identical to SEQ ID NO: 285373

SEQ ID NO: 395607 - DNA, 1000 bp, Homo Sapiens; identical to SEQ ID NO: 115744

SEQ ID NO: 395608 - DNA, 1000 bp, Homo Sapiens; identical to SEQ ID NO: 221104

SEQ ID NO: 395609 - DNA, 1000 bp, Homo Sapiens; identical to SEQ ID NO: 115746

SEQ ID NO: 395610 - DNA, 1000 bp, Homo Sapiens; identical to SEQ ID NO: 221106

SEQ ID NO: 395611 - DNA, 1000 bp, Homo Sapiens; identical to SEQ ID NO: 115747

SEQ ID NO: 395612 - DNA, 1000 bp, Homo Sapiens; identical to SEQ ID NO: 221107

SEQ ID NO: 395613 - DNA, 1000 bp, Homo Sapiens; identical to SEQ ID NO: 221108

SEQ ID NO: 395614 - DNA, 1000 bp, Homo Sapiens; identical to SEQ ID NO: 285380

SEQ ID NO: 395615 - DNA, 1000 bp, Homo Sapiens; identical to SEQ ID NO: 115748

SEQ ID NO: 395616 - DNA, 1000 bp, Homo Sapiens
cagatagctgcttcgataaaggaatttggagtttaaaaatcaacttgtgaaaacaaggttgtttttgtctttatcgtttgttagagttatagatttatgatttcataggcttgattctatgtgaaatatctttttacttttatgcattttaataagatttaaaaatatttagattaaagccccctttaatgagtacaagaaaaactcttggcttgttagaagaaagtatattctttctagaatttggtgcaggaatatgtgttcatatccaggcaaacgggtgtgtttttatcttcagacaatgaaaccttctcctctggggctttgttgccaggaagattagaactaaatttatttttttcatttctgtcatgaaatcattccagatacctcttttcttctttccaaatggttttcacatgtgtttgaaatatttgtacttcgaattgtcggattttccatgtcctcctttctcctttgtgcccagcctgagtcagcaccaatcccgcattcagaacctcccagtgaaagggcagccttcattttgagaaggtggaaggtgttagggtttgggagacagctcatccaatctcccaagtctcatggtggatttgtgactgtgagagtttccggtttaaaatctgaaaagccagatatgcctgtttccttttcccagcaccatgcctgtggaggggacagtcagacccagaggtcctttacgtgtggatggagttcacaggcgaatagaggagaggaccaggggacgtggcttgtcccttttgtccaacaaagcattatatttttaagaatggcagacctgtttgctgaagtgttcataagataacaataggcttgaatctccaattcaaatgaatgtcaaagcacatatctttaatatgctgaatgaatatttatttttgtatccattaaaacagtatattgatctcttttattctttattaaaataaaatgctcttttttaaaaaaaaaaaaaaaaaaa

SEQ ID NO: 395617 - DNA, 1000 bp, Homo Sapiens; identical to SEQ ID NO: 285383

SEQ ID NO: 395618 - DNA, 1000 bp, Homo Sapiens; identical to SEQ ID NO: 115749

SEQ ID NO: 395619 - DNA, 1000 bp, Homo Sapiens
atgggcatgtacaacaccgacgagtccatctcaggttttgcgcacagctgcttccagtatgccatccagaagaaatggccgctgtacatgagcaccaagaacaccatactgaaagcctacgatgggcgtttcaaggacatcttccaggagatctttgacaagcactataagaccgacttcgacaagaataagatctggtatgagcaccggctcattgatgacatggtggctcaggtcctcaagtcttcgggtggctttgtgtgggcctgcaagaactatgacggagatgtgcagtcagacatcctggcccagggctttggctcccttggcctgatgacgtccgtcctggtctgccctgatgggaagacgattgaggctgaggccgctcatgggaccgtcacccgccactatcgggagcaccagaagggccggcccaccagcaccaaccccatcgccagcatctttgcctggacacgtggcctggagcaccgggggaagctggatgggaaccaagacctcatcaggtttgcccagatgctggagaaggtgtgcgtggagacggtggagagtggagccatgaccaaggacctggcgggctgcattcacggcctcagcaatgtgaagctgaacgagcacttcctgaacaccacggacttcctcgacaccatcaagagcaacctggacagagccctgggcaggcagtagggggaggcgccacccatggctgcagtggaggggccagggctgagccggcgggtcctcctgagcgcggcagagggtgagcctcacagcccctctctggaggcctttctaggggatgtttttttataagccagatgtttttaaaagcatatgtgtgtttcccctcatggtgacgtgaggcaggagcagtgcgttttacctcagccagtcagtatgttttgcatactgtaatttatattgcccttggaacacatggtgccatatttagctactaaaaagctcttcacaaaaaaaaaaa

SEQ ID NO: 395620 - DNA, 985 bp, Homo Sapiens
acatcccaatggccctgtccttttctttactgatggccgtgctggtgctcagctacaaatccatctgttctctgggctgtgatctgcctcagacccacagcctgggtaataggagggccttgatactcctggcacaaatgggaagaatctctcctttctcctgcctgaaggacagacatgactttggattcccccaagaggagtttgatggcaaccagttccagaaggctcaagccatctctgtcctccatgagatgatccagcagaccttcaatctcttcagcacaaaggactcatctgctacttgggaacagagcctcctagaaaaattttccactgaacttaaccagcagctgaatgacatggaagcctgcgtgatacaggaggttggggtggaagagactcccctgatgaatgtggactccatcttggctgtgaagaaatacttccaaagaatcactctttatctgacagagaagaaatacagcccttgtgcttgggaggttgtcagagcagaaatcatgagatccttctctttatcaaaaatttttcaagaaagattaaggaggaaggaatgaaaccgtttcaacatggaaatgatctgtattgactaatacaccagtccacacttctatgacttctgccatttcaaagactcatttctcctataaccaccgcatgagttgaatcaaaattttcagatcttttcaggagtgtaaggaaacatcatgtttacctgtgcaggcactagtcctttacagatgaccatgctgatagatctaattatctatctattgaaatatttatttatttattagatttaaattatttttgtccatgtaatattatgtgtacttttacattgtgttatatcaaaatatgttaatctaatatttagtcaatatattattttctttttattaatttttactattaaaacttcttatattatttggttattctttaataaagaaattccaagccc

SEQ ID NO: 395621 - DNA, 1000 bp, Homo Sapiens; identical to SEQ ID NO: 221110

SEQ ID NO: 395622 - DNA, 1000 bp, Homo Sapiens; identical to SEQ ID NO: 285386

SEQ ID NO: 395623 - DNA, 1000 bp, Homo Sapiens; identical to SEQ ID NO: 115750

SEQ ID NO: 395624 - DNA, 1000 bp, Homo Sapiens; identical to SEQ ID NO: 285388

SEQ ID NO: 395625 - DNA, 1000 bp, Homo Sapiens; identical to SEQ ID NO: 285390

SEQ ID NO: 395626 - DNA, 1000 bp, Homo Sapiens
gcagtgccatcgagaagacccagaggatgctgagcggattctgcccgcacaaggtctcagctgggcagttttccagcttgcatgtccgagacaccaaaatcgaggtggcccagtttgtaaaggacctgctcttacatttaaagaaactttttcgcgagggacagttcaactgaaacttcgaaagcatcattatttgcagagacaggacctgactattgaagttgcagattcatttttctttctgatgtcaaaaatgtcttgggtaggcgggaaggagggttagggaggggtaaaattccttagcttagacctcagcctgtgctgcccgtcttcagcctagccgacctcagccttccccttgcccagggctcagcctggtgggcctcctctgtccagggccctgagctcggtggacccagggatgacatgtccctacacccctcccctgccctagagcacactgtagcattacagtgggtgccccccttgccagacatgtggtgggacagggacccacttcacacacaggcaactgaggcagacagcagctcaggcacacttcttcttggtcttatttattattgtgtgttatttaaatgagtgtgtttgtcaccgttggggattggggaagactgtggctgctagcacttggagccaagggttcagagactcagggccccagcactaaagcagtggacaccaggagtccctggtaataagtactgtgtacagaattctgctacctcactggggtcctggggcctcggagcctcatccgaggcagggtcaggagaggggcagaacagccgctcctgtctgccagccagcagccagctctcagccaacgagtaatttattgtttttccttgtatttaaatattaaatatgttagcaaagagttaatatatagaagggtaccttgaacactgggggaggggacattgaacaagttgtttcattgactatcaaactgaagccagaaataaagttggtgacagat

SEQ ID NO: 395627 - DNA, 1000 bp, Homo Sapiens; identical to SEQ ID NO: 224335

SEQ ID NO: 395628 - DNA, 1000 bp, Homo Sapiens
ggggcttggagtgtgatggcaaggtcaacatctgctgtaagaaacagttctttgtcagtttcaaggacatcggctggaatgactggatcattgctccctctggctatcatgccaactactgcgagggtgagtgcccgagccatatagcaggcacgtccgggtcctcactgtccttccactcaacagtcatcaaccactaccgcatgcggggccatagcccctttgccaacctcaaatcgtgctgtgtgcccaccaagctgagacccatgtccatgttgtactatgatgatggtcaaaacatcatcaaaaaggacattcagaacatgatcgtggaggagtgtgggtgctcatagagttgcccagcccagggggaaagggagcaagagttgtccagagaagacagtggcaaaatgaagaaatttttaaggtttctgagttaaccagaaaaatagaaattaaaaacaaaacaaaaaaaaaaacaaaaaaaaacaaaagtaaattaaaaacaaaacctgatgaaacagatgaaggaagatgtggaaaaaatccttagccagggctcagagatgaagcagtgaaagagacaggaattgggagggaaagggagaatggtgtaccctttatttcttctgaaatcacactgatgacatcagttgtttaaacggggtattgtcctttccccccttgaggttcccttgtgagccttgaatcaaccaatctagtctgcagtagtgtggactagaacaacccaaatagcatctagaaagccatgagtttgaaagggcccatcacaggcactttcctacccaattacccaggtcataaggtatgtctgtgtgacacttatctctgtgtatatcagcatacacacacacacacacacacacacacacacacacaggcatttccacacattacatatatacacatactggtaaaagaacaatcgtgtgcaggtggtcacacttcctttttctgtaccacttttgcaacaaaacaa

SEQ ID NO: 395629 - DNA, 1000 bp, Homo Sapiens; identical to SEQ ID NO: 285392

SEQ ID NO: 395630 - DNA, 1000 bp, Homo Sapiens
acggtaaccccatactctccttttgactccttttggaacccccacttttacgttgtgtccctccgcctcccccatggcgcaacaggagtcagtctctttctgtacaagggagaaaagctgtacgcgtttgtctcgtggttggaagcctccccttggcggggagaagctttttttcttgctagtattcgctgtgttcatggtctagaaatgcggtctggtctcgcctcgcctaccaatctctgctctctatgtatgtagcgtacgggttgttttgggtgaatcttgaggaataaatgcctttatatttcacaggctgtaaattgaacttcccacacgattagctttattatggcttgtgaactgctggagtctggctttacctttttgtatgtgaacaaatcaaattgcttaaaaaagagttttctttagtatagccacaaatgccttgaactgttgtctgggattgttttgtggggggagggaagggagtgttccgaagatgctgtagtaactgcctcagtgtttcacgtaagactttttggtttgatcatctttgttgaggtaggactatcagttccctctaaatgtatatgttgatttatgagtaattgttatttattctttatttatttatattaattatgaagattatgatattatttgattgcagatttttttggcgcgctgccccctccccaccctgccactcttgacattccactgtgcgttttagaagagagcctttttctaaagggatctgcttaaagttttaacttttatacctatctgagtgaattacagacaacctatcatttattctgcttcgagggtccccagggcccttgtacaaccgacagctcttacttttaaatgcaatctcttttctacatacattattttcttaattgttagctatttatagaaagcttcaatagaactgtttcaactgtataactatttactattcaaataaaatattttcaaagtcaaaaaaaaaaaa

SEQ ID NO: 395631 - DNA, 1000 bp, Homo Sapiens
gagagctacgagcgcattcaccgcagtaacctggttgggatgggtgtgatcccacttgaatatctccctggtgagaatgcagatgccctggggctcacagggcaagaacgatacactatcattattccagaaaacctcaaaccacaaatgaaagtccaggtcaagctggatactggcaagaccttccaggctgtcatgaggtttgacactgatgtggagctcacttatttcctcaacgggggcatcctcaactacatgatccgcaagatggccaagtaggagacgtgcacttggtcgtgcgcccagggaggaagccgcaccaccagccagcgcaggccctggtggagaggcctccctggctgcctctgggaggggtgctgccttgtagatggagcaagtgagcactgagggtctggtgccaatcctgtaggcacaaaaccagaagtttctacattctctatttttgttaatcatcttctctttttccagaatttggaagctagaatggtgggaatgtcagtagtgccagaaagagagaaccaagcttgtctttaaagttactgatcacaggacgttgctttttcactgtttcctattaatcttcagctgaacacaagcaaaccttctcaggaggtgtctcctaccctcttattgttcctcttacgctctgctcaatgaaaccttcctcttgagggtcattttcctttctgtattaattataccagtgttaagtgacatagataagaactttgcacacttcaaatcagagcagtgattctctcttctctccccttttccttcagagtgaatcatccagactcctcatggataggtcgggtgttaaagttgttttgattatgtaccttttgatagatccacataaaaagaaatgtgaagttttcttttactatcttttcatttatcaagcagagacctttgttgggaggcggtttgggagaacacatttctaatttgaatgaaatgaaatctattttcagtg

SEQ ID NO: 395632 - DNA, 1000 bp, Homo Sapiens; identical to SEQ ID NO: 115752

SEQ ID NO: 395633 - DNA, 1000 bp, Homo Sapiens; identical to SEQ ID NO: 115754

SEQ ID NO: 395634 - DNA, 1000 bp, Homo Sapiens; identical to SEQ ID NO: 115755

SEQ ID NO: 395635 - DNA, 1000 bp, Homo Sapiens; identical to SEQ ID NO: 221115

SEQ ID NO: 395636 - DNA, 1000 bp, Homo Sapiens; identical to SEQ ID NO: 221116

SEQ ID NO: 395637 - DNA, 1000 bp, Homo Sapiens; identical to SEQ ID NO: 285399

SEQ ID NO: 395638 - DNA, 1000 bp, Homo Sapiens; identical to SEQ ID NO: 115756

SEQ ID NO: 395639 - DNA, 1000 bp, Homo Sapiens; identical to SEQ ID NO: 115757

SEQ ID NO: 395640 - DNA, 1000 bp, Homo Sapiens; identical to SEQ ID NO: 115758

SEQ ID NO: 395641 - DNA, 1000 bp, Homo Sapiens; identical to SEQ ID NO: 221118

SEQ ID NO: 395642 - DNA, 1000 bp, Homo Sapiens; identical to SEQ ID NO: 221119

SEQ ID NO: 395643 - DNA, 1000 bp, Homo Sapiens; identical to SEQ ID NO: 285404

SEQ ID NO: 395644 - DNA, 1000 bp, Homo Sapiens
gtgtggagcggctctgtgtggaccccagacaccgccaggggccagtgaacctgctctcagaccctgagcaaggggttgaggtgactggccagtatgagagggagaaggctgggttctcatggatcgaagtgaccttcaagaaccccctggtatgggttcacgcatcccctgaacacgtggtggtgactcggaaccgaagaagctctgcgtacaagtggaaggagacgctattctcagtgatgcccggcctgaagatgaccatggacaagacgggtctcctgctgctcagtgacccagacaaagtgaccatcggcctgttgttctgggatggccgtggggaggggctccggctccttctgcgtgacactgaccgcttctccagccacgttggagggacccttggccagttttaccaggaggtgctctggggatctccagcagcatcagatgacggcagacgcacgctgagggttcagggcaatgaccactctgccaccagagagcgcaggctggattaccaggaggggcccccgggagtggagatttcctgctggtctgtggagctgtagttctgatggaaggagctgtgcccaccctgtacacttggcttccccctgcaactgcagggccgcttctggggcctggaccaccatggggaggaagagtcccactcattacaaataaagaaaggtggtgtgagcctgggaagtgggtgtctccagttccatgtggccaaatcctagggcctcaacctcgcatcctgaaccttagcatcgtggaacacagaagcttccactgtcagctctcaagagcccatggccaggaaggcccatgctgagctttcagtccagccccttcattttacaaacaaggaaactgagctcgaaccacccatttgagatgtcactgtggcccccagctagaggcccagggctgggagcattctccaggagcagaggttcagtctgcttcatggtctcttggaccagttttgactaca

SEQ ID NO: 395645 - DNA, 1000 bp, Homo Sapiens
ccttgtgtgctcgactgcaaaatgggcgtcaggacttacctagaggaggagctgaccaaggcccgtgagcggcccaagctgcggaaggacatgtacaagaaaatgctggcggtggatcctgaagctcccacggaggaggagcacgcgcagcgcgccgtcaccaagccgcgctacatgcagtggcgggaaggcatcagctccagcaccaccctcggcttccgcatcgagggcatcaagaaagcggacggctcctgcagcaccgacttcaagactacgcgaagccgagagcaggtgcttcgcgtctttgaagagtttgtgcaaggagatgaggaagtgctgaggcggtatctgaaccgcctgcagcagatccgggacaccctggaggtatccgagttcttcaggaggcacgaggtgatcggcagctcgctcctctttgtgcacgatcactgccatcgcgccggcgtgtggctcatcgacttcggcaagaccacgcccctccccgatggccagatcctggaccaccggcggccctgggaggagggcaaccgcgaggacggctatttgctggggctggacaatctcattggcatcctggccagcctggctgagagatgaggctggactcctgtccccgcgggccgctcacctgacatgtggacctgcagctttgtccccactgtgcatgccggcttgagactggagccccgcggtgcagggcagttcaccgggtcctgcaggaccaggtgccagccactaagggggggcaccgccgatgccaggggttttgcccacccgggccccagcgttcccagagccaaatgacactaacttatagaaggggagggggcaaagggcttcttcctcaggccagctcttctgaggaggctctgccctctccagaggtgccagaccgcggattttatttagcaagcccagaccttccggtctaacgtctcacaccacgacggactccccttcctaataaaactcaaagacaaaa

SEQ ID NO: 395646 - DNA, 1000 bp, Homo Sapiens
aatatgcaaatgatgtgcttattaaaggaggcccatggggcctcttattggcaatacttggctgtgggttacattaaatatgtgaacatagtatgaagtagcatcattttagggttattctgttacttagggtttttgttttctgttttttttttctctttttttgtatttaccgtgctagttctcttctacacctactctgtctctcaagccattttgccactcgcttccctgccatctggcccttccctttgtctcagtgggatagatggattgtgaaatggaatctcccagaacccctgccctggcagcctggaagaccgtgcctgcccagccctcgtcaccacagggactccttgggtcctggcagtgcatgtgccagcaggcaggacaaactctgtgtacctgtgcccaggtgaatgggcgcagggtcctcttgccctgtcctgcggggggccccacgagttcctggcattcagcactgcttagcattctcggaaggtttcttcaactgcttgcttttcccaggcttgcctttagtgtcatgtaagacatttttaagttatatttattttgttgggttttaaaattgcacagaacactaagaccgaaaggctggactcttgtttctccttgaaagctttgcctttgttttgaacttcctttcccacttggtagaaagagcccagaagcagccctggccctgtaagatggactctttcatccttcagttgtatttagctttgagtttctctgcatctgtccaccccatgtgtatataacccagcccctggctctggggtggtcacctcgtcagtgccttttgttctggaggagaggaccccccccgcctgccgagaggctctcttcctgttctgcacccctctccccatgggaccttggagaaaactgaactgttacaaacccctgcacagtgcctgtcaaacagatgcaaaccttcctgaataaagccttggagaccaaaaaaaaaaaaaaaaaa

SEQ ID NO: 395647 - DNA, 1000 bp, Homo Sapiens; identical to SEQ ID NO: 285405

SEQ ID NO: 395648 - DNA, 1000 bp, Homo Sapiens; identical to SEQ ID NO: 221120

SEQ ID NO: 395649 - DNA, 1000 bp, Homo Sapiens; identical to SEQ ID NO: 115759

SEQ ID NO: 395650 - DNA, 1000 bp, Homo Sapiens; identical to SEQ ID NO: 221121

SEQ ID NO: 395651 - DNA, 1000 bp, Homo Sapiens; identical to SEQ ID NO: 115760

SEQ ID NO: 395652 - DNA, 1000 bp, Homo Sapiens; identical to SEQ ID NO: 285410

SEQ ID NO: 395653 - DNA, 1000 bp, Homo Sapiens; identical to SEQ ID NO: 285412

SEQ ID NO: 395654 - DNA, 1000 bp, Homo Sapiens; identical to SEQ ID NO: 285413

SEQ ID NO: 395655 - DNA, 1000 bp, Homo Sapiens
tcagaattttaaaggcagttgtttctttcctaagcacatcaattcgtagtaaatgatgcttcggtttgatggacctttcaacgttatttattgaatatgtatttcggttgcctaccctgtagatatgtggatgaagagtctaactagaataatgacttgtaaacccaccatgagttatttggtttttgacttaaattcctatttgaatcccctttcccggaattttaagtgtctctacaactttgaataaagggaaatgcccaagatgtcctgatctgactaattagtttaattctttcgggcttgctaagcatttctaaagcattagactaacagattcctgtgaagttctgtgcatatgtcccagccccaacaactatcaaagtctagaaacagatgttttcagtgttgctgagagaaacaaaaaatttcctaatgcatctgagagataagcttcggcagtatcacaagaagattaaagtggcagacaccccttccagcggaagttactaattcggacctgactgatgcagtttccatagcaacccatgtttcctgggaaacccgaaaaaggttgtcatggcatctcttgcacagtaacctttccagatggttcctacttaaatgatttcataaggaaaaccactgtttgaataagccgcacaaaaaataaagttaagtctgagactctaaggaggtgaaatgaatcccaaatgcattttttaactatgaaaatcattatgtcattccataatgactgaatcaaggaggaaaatatggtgtttggaatgttagatattaaccacaataaggcatgatctggattaaatgccatttattaggcaataatttttaaagatgcttcccaagaactttcaagccaacaaatgaaatttaaaagcaaatgtaaaagtgttctgtacataagcaaatgagagattcgatcagtgtgcctgaaaccttactacaagggaccttcaggctttctctttaaaaaaaa

SEQ ID NO: 395656 - DNA, 1000 bp, Homo Sapiens; identical to SEQ ID NO: 285414

SEQ ID NO: 395657 - DNA, 1000 bp, Homo Sapiens; identical to SEQ ID NO: 285415

SEQ ID NO: 395658 - DNA, 1000 bp, Homo Sapiens
tcacgcacctgggtgcccgcatgatggagctgaccaacgtgcagcaggccgtgcaggcgctgcggatcatgcgcatcgcgcgcatcttcaagctggcccgccactcctcgggcctgcagaccctcacctatgccctcaagcgcagcttcaaggaactggggctgctgctcatgtacctggcagtgggtatcttcgtcttctctgccctgggctacaccatggagcagagccatccagagaccctgtttaagagcatcccccagtccttctggtgggccatcatcaccatgaccaccgtcggctacggcgacatctaccccaagaccacgctgggcaagctcaacgcggccatcagcttcttgtgtggtgtcatcgccatcgccctgcccatccaccccatcatcaacaactttgtcaggtactacaacaagcagcgcgtcctggagaccgcggccaagcacgagctggagctgatggaactcaactccagcagcgggggcgagggcaagaccgggggctcccgcagtgacctggacaacctccctccagagcctgcggggaaggaggcgccgagctgcagcagccggctgaagctctcccacagcgacaccttcatccccctcctgaccgaggagaagcaccacaggacccggctccagagttgcaagtgacaggagggcccctcaggcagagatggaccaggcggtggacagatgggtagatgtggcaggcatgtcatcgacagcacagaagggctgtcctgtgtccccccaaccctcccctggacagactctgaaggccctcccggcacctctgccaaggctgggtaagactcctctatgttgcctgctgtccaggagcccgggagggaggggtgtgcaggagccgcagggccgtgtgggacgagtggaggccgcggcctggctggcacgagagcccacgcccgcttctgtatctccctcaataaagcctcctgctctgtgcaaaaaaaaaaaaaaaa

SEQ ID NO: 395659 - DNA, 1000 bp, Homo Sapiens; identical to SEQ ID NO: 285417

SEQ ID NO: 395660 - DNA, 1000 bp, Homo Sapiens; identical to SEQ ID NO: 285418

SEQ ID NO: 395661 - DNA, 1000 bp, Homo Sapiens
gtgagaagaaaacattttctgacttacccttttggaatctcctccattattacccaggctttgctttaagttgcactttaaatcacactgtcctattaatgcgatctggcatcttctcccacaagccccctacagggaacaactaccccctaccttaactctaaatggttctttagactatagtctgtctcctctgacctgaaatcctcttttaggcaataggccgagctttagaagcagccaggtctggtgagaaatgggcccccataccaactgtggacttggaatatcagcagagtagtaggcacagttgtaaaaaggggagatttcggtaggcacaggtgtaaaaaggggagatttcagaagacgggcgaaacaactgatgggggaagatacctggggtgagaagatgagaaagaaatgatgctgagggacctagtgaaatcaatgaaactcttgagtcttgcttaggctcgcaaacaagaagtggggaggcttgggaaattaggatatgacatatatgaaaggtttatctaagaagaaagaaacagagataatatatatatagaaagatgtatatagatgtatatatgcccaaatatattgaatgtacagaaaggaaatattcagagactttagcattgggggcagatatcttggcctggttatggggtaggacacccagattttcagacttacaatcagtggtcctggtttcaacatggaagtgagatagctgatgaaggatttcaagtctggaaatgggaaagggaggggtagaagttccttttcagaaataaagaggcattcatgaaggcttttgttgaatcctatgctactgataggaccaggaagagaggaactcggaggacaatagggaggggaagtcttggaaaatctaccacttacactgtgtgtccccatccccagcagcgtcctgccactgtagcgcctttttaaaataaataaaataaaataaagcaccattttgtttcccttt

SEQ ID NO: 395662 - DNA, 1000 bp, Homo Sapiens; identical to SEQ ID NO: 285422

SEQ ID NO: 395663 - DNA, 1000 bp, Homo Sapiens; identical to SEQ ID NO: 285423

SEQ ID NO: 395664 - DNA, 1000 bp, Homo Sapiens
caggctaacacgcttaccgacctagccaagacccagaccgtcatgtacgaccttgtatcggagctgcacgctcagcacgaggagctggaggcccgcctggccaccctggaaagccgcttggatgcgctgggtgcctctctacaggccctgcctggcctcatcgcccaagccatacgcccacccccgcctcccctgcctcccaggcccggccccggcccccaagaccaggcagcccggagctccccctgccggtggacgcccgtggccccctcggactgcgggtgacggccctgcccgccaccagacccctaaatcttggccatcgtgtggccgccacctccgggaagccttgtacagtggcgcctcttggagttcaagaagccaacgctgagtcaggctgagtggactgaggcctgccccgcccagactgcccaggcagagggcagggctggaccatgggtgagggcaggggagcccggagcttcctctggtcacctggtcccccgactctccccaggcccccggtgggcatggagcagcccggggaggggtccgtgctggttctgaataaagcaggacccgcctagtggctgcctgtgtgcatggctggaaggcactggtgatgtcccaggaggtagacctccagccctgggtaccaagatgaatgtgggaatcagaaaaacctgttcccatcaccggcctagcctagaatcctagcctagaagccctctctccctctgggctggagctcagtgagggacaactctctagggacacctgtaccagccccacctggcgctgagatccctcagacagcatggcccagccctggccagaagcatcgctccccttcaaccaaccgcgttgatggacacccactgtgtgccaggccccagcggggcccatgggggaggtgacctgggtgaggaaggtcatttgggtttttgtgagatttgtattgagcacctgctgtctacagagaatgtgatgatgtcaatta

SEQ ID NO: 395665 - DNA, 1000 bp, Homo Sapiens
tggccgtggtggcccggaagctggagtttaacaaggcagagaagcacgtgcacaacttcatgatggatatccagtataccaaagagatgaaggagtccgctgcccgagtgctacaagaagcctggatgttctacaaacatactcgcaggaaggagtctcatgctgcccgcaggcatcagcgcaagctgctggccgccatcaacgcgttccgccaggtgcggctgaaacaccggaagctccgggaacaagtgaactccatggtggacatctccaagatgcacatgatcctgtatgacctgcagcagaatctgagcagctcacaccgggccctggagaaacagattgacacgctggcggggaagctggatgccctgactgagctgcttagcactgccctggggccgaggcagcttccagaacccagccagcagtccaagtagctggacccacgaggaggaaccaggctactttccccagtactgaggtggtggacatcgtctctgccactcctgacccagccctgaacaaagcacctcaagtgcaaggaccaaagggggccctggcttggagtgggttggcttgctgatggctgctggaggggacgctggctaaagtgggtaggccttggcccacctgaggccccaggtgggaacatggtcacccccactctgcataccctcatcaaaaacactctcactatgctgctatggacgacctccagctctcagttacaagtgcaggcgactggaggcaggactcctgggtccctgggaaagagggtactaggggcccggatccaggattctgggaggcttcagttaccgctggccgagctgaagaactgggtatgaggctggggcggggctggaggtggcgccccctggtgggacaacaaagaggacaccatttttccagagctgcagagagcacctggtggggaggaagaagtgtaactcaccagcctctgctcttatctttgtaataaatgttaaagccagaa

SEQ ID NO: 395666 - DNA, 1000 bp, Homo Sapiens
aatatattccttgtaggttcttcactcactcactcaacaaatacccgttggaagagtcttaaactggggcttcatgtgtggcctgcagtcatgtttcggcttagtccaacagtgtttttattatattttaagaatctgaatgcctttgcgtgaggcatgcactctcaggttccccatagtgtctcccccgctgccacccacaaacagacacacatgccgttgtgttatgcccagccactctgatatactggcttctgacttatgggctgcttactagtctcaagagatacagtggtggaaaaatatatccctatactcatgaagcttaccgactagtagggaagatagactctaatgcaataatcacataaatatagcgagctctactaagtacaggtgtgtataatgtatcagggaccatggcccgagaaagtgagaaggctttcctgagcaagtgacaatctaacctgccatccaaatgataaattgctaattaagcaaatgaggttccaggggggagtactccaagcagagagaatggcatgtgtgaaggtgtgtgtcatacacagggcctagtacatagtgggccccctacatacgcatggattctgggtctccagattggaacagaggatggagctaagcagcaaagggcctcccttgaattcaccacacacataccagcccttctgcacactctgctccttacatctaggcccagctgaacccaggttaggggcagatcagaagggctgcgtgtagcacccttatggtcttgcagaacacaccaagaaacccgacggcttccatattttctgaccctacaaacaggtccctaatactgatgtggagaaagctcaagagggaatcatctggcctgagcctaccatgaggctgtttgtggtcctggcagaaaagcaacaactcgctccccttcccatgtatcagtgaaaaccattatgcaaataaagagctgggccccaaaaaaaaaaaaaaaaaa

SEQ ID NO: 395667 - DNA, 1000 bp, Homo Sapiens; identical to SEQ ID NO: 221123

SEQ ID NO: 395668 - DNA, 1000 bp, Homo Sapiens; identical to SEQ ID NO: 221124

SEQ ID NO: 395669 - DNA, 725 bp, Homo Sapiens
ctcttgagaccgggagcccagctgcccaccctctggacattcacccagccaggtggtctcgtcacctcagaggctccgccagactcctgcccaggccaggactgaggcaagcctcaaggcacttctaggacctgcctcttctcaccaagatgaactcactggtttcttggcagctactgcttttcctctgtgccacccactttggggagccattagaaaaggtggcctctgtggggaattctagacccacaggccagcagctagaatccctgggcctcctggcccccggggagcagagcctgccgtgcaccgagaggaagccagctgctactgccaggctgagccgtcgggggacctcgctgtccccgccccccgagagctccgggagcccccagcagccgggcctgtccgccccccacagccgccagatccccgcaccccagggcgcggtgctggtgcagcgggagaaggacctgccgaactacaactggaactccttcggcctgcgcttcggcaagcgggaggcggcaccagggaaccacggcagaagcgctgggcggggctggggcgcaggtgcggggcagtgaacttcagaccccaaaggagtcagagcatgcggggcgggggcggggggcggggacgtagggctaagggagggggcgctggagcttccaacccgaggcaataaaagaaatgttgcgtaactcaaaaaaaaaaaaaaaaaa

SEQ ID NO: 395670 - DNA, 1000 bp, Homo Sapiens; identical to SEQ ID NO: 115763

SEQ ID NO: 395671 - DNA, 1000 bp, Homo Sapiens
ttatgggaatatacacatattaatgtggctccctttttcttgtgggggaataaaagaggactcctcctcattccctttaacatgggggaaaaaactgacattaaaagatgagactaaatctttatcttgaattttacacaactacttacgacaagggagatgtttagacctgttggtatacttcagagtacttttcatgagttcttccacagtgaacccttggattacctggtggctttttctagccagattgcattaatccttactgagattggatggttttctttcctctattggcgccattcttcagatattaaagttaaaccatccactccctcaccttcagccttcagtgaatgtgctttctagttgtcaggaatgctgaagaattaacactttgactcctaaatgtgatactggtgggtaagagcagggcacatttaatttgttcgcttttgcttctctttggtctgggcacatttaatttgttcgcttttgcttctctttggtcttttcgaatacttagtaatcgaaaaccatatcctgtaatttaataaaaaaaactaaggacgaaaaaacccctccaattttcccaaatgcaatcagtgtaactaggggctgtgtttctgcattaaaataaatgtttcaggctttgtggtcctgatcaaggtcctcattaaaaaattggagttcaccctaggcttttcccctctgtgactggcagataacacatacttttgaaagtaactttgggattttttttcttaggtgcagctcgattctaatcttttcatgctgcacacgattcctttaatcgatagcatccttatctgaaagaaataaccatcttctcaacatgacctgcttaacccaaataagaacagtgatcttataacctcattgtttcctaatctattttatttcatctcctgctagtactgtgccgcttccccctccccccacacaaaataaaaacagtatctcgcttctggctcatttt

SEQ ID NO: 395672 - DNA, 1000 bp, Homo Sapiens; identical to SEQ ID NO: 115764

SEQ ID NO: 395673 - DNA, 1000 bp, Homo Sapiens; identical to SEQ ID NO: 115765

SEQ ID NO: 395674 - DNA, 1000 bp, Homo Sapiens; identical to SEQ ID NO: 285430

SEQ ID NO: 395675 - DNA, 1000 bp, Homo Sapiens; identical to SEQ ID NO: 285432

SEQ ID NO: 395676 - DNA, 1000 bp, Homo Sapiens
acttggaggcaacattgaacagctggtagcccgaagtaacatcctgacactaatgtatcagtgcatgcaggataaaatgccagaagttcgacagagttcttttgccctgttaggtgacctcacaaaagcttgctttcagcatgttaagccttgtatagctgatttcatgccaatattgggaaccaacctaaatccagaattcatttcagtctgcaacaatgccacatgggcaattggagaaatctccattcaaatgggtatagagatgcagccttatattcctatggtgttgcaccagcttgtagaaatcattaacagacccaacacaccaaagacgttgttagagaatacagcaataacaattggtcgtcttggttacgtttgtcctcaagaggtggcccccatgctacagcagtttataagaccctggtgcacctctctgagaaacataagagacaatgaggaaaaggattcagcattccgtggaatttgtaccatgatcagtgtgaatcccagtggcgtaatccaagattttatatttttttgtgatgccgttgcatcatggattaacccaaaagatgatctcagagacatgttctgtaagatccttcatggatttaaaaatcaagttggcgatgaaaattggaggcgtttctctgaccagtttcctcttcccttaaaagagcgtcttgcagctttttatggtgtttaatctaatacacttaagctgcagtcccaaaattaggggtccttcagtcttggagactataagggagcctctgcacccagggaaaatgttaccctttacaggggggaagggtaaaccagtagggaatacagtacaatcccaaccctactgggaggggcgggagggaggtgttgccgtcactgtattaagtcgatgttgggaaacgttttaacatctggagcctttgtgggtggaaatatgtctccagttacaactccgcagtggatgtgaagaagcaaaaaaaaaaaaaaa

SEQ ID NO: 395677 - DNA, 1000 bp, Homo Sapiens; identical to SEQ ID NO: 285433

SEQ ID NO: 395678 - DNA, 1000 bp, Homo Sapiens; identical to SEQ ID NO: 115767

SEQ ID NO: 395679 - DNA, 1000 bp, Homo Sapiens; identical to SEQ ID NO: 115768

SEQ ID NO: 395680 - DNA, 1000 bp, Homo Sapiens
gatgagctgaccctggccaggactgacctggagatgcagatcgagggcctgaatgaggagctagcctacctgaagaagaaccacgaagaggagatgaaggagttcagcagccagctggccggccaggtcaatgtggagatggacgcagcaccgggtgtggacctgacccgtgtgctggcagagatgagggagcagtacgaggccatggcggagaagaaccgccgggatgtcgaggcctggttcttcagcaagactgaggagctgaacaaagaggtggcctccaacacagaaatgatccagaccagcaagacggagatcacagacctgagacgcacgatgcaggagctggagatcgagctgcagtcccagctcagcatgaaagctgggctggagaactcactggccgagacagagtgccgctatgccacgcagctgcagcagatccaggggctcattggtggcctggaggcccagctgagtgagctccgatgcgagatggaggctcagaaccaggagtacaagatgctgcttgacataaagacacggctggagcaggagatcgctacttaccgcagcctgctcgagggccaggatgccaagatggctggcattggcatcagggaagcctcttcaggaggtggtggtagcagcagcaatttccacatcaatgtagaagagtcagtggatggacaggtggtttcttcccacaagagagaaatctaagtgtctattgcaggagaaacgtcccttgccactccccactctcatcaggccaagtggaggactggccagagggcctgcacatgcaaactccagtccctgccttcagagagctgaaaagggtccctcggtcttttatttcagggctttgcatgcgctctattccccctctgcctctccccaccttctttggagcaaggagatgcagctgtattgtgtaacaagctcatttgtacagtgtctgttcatgtaataaagaattacttttccttttgcaaat

SEQ ID NO: 395681 - DNA, 1000 bp, Homo Sapiens
cttggtgaccgcctcaatgttgaggtggacgctgccccacctgttgacctgaaccgagttctggaggagatgaggtgccagtatgaaaccctggtggagaataaccgccgggatgctgaagactggttggacacccagagtgaggagctgaaccagcaggtggtgtccagctcagagcagttgcagtcctgccaggcagagatcatcgagctgagacgcacggtcaacgccctggagattgagctgcaggctcagcacagcatgagagatgctttggaatccaccctggcagagacggaggcccgctatagctcccagctggcccagatgcagtgcatgatcaccaacgtggaggcccagctggccgagatccgggctgacctggagcggcagaaccaggagtaccaggtgctgctggacgtccgggcccggctggagtgtgagatcaacacgtaccggggcctgctggagagtgaggacagcaagctcccctgtaacccatgtgcacctgactactcaccctccaagtcatgccttccctgtcttcctgcggcctcctgcggtcctagtgcagcccgcacaaactgcagcccccgccccatttgtgtgccctgcccagggggtcggttctgagagcgggtgacccagatggccatggctattgtctccagggcttgaacttggcctctacccaaacttaacccttgtagcccaatcccctctcttcgcgcagagcccaggcccagggtctggctgaaaaggctttctgcaaatacatgccctaaagtttctcagagcctgtcacaaaggccggctgcccccaaaggtctcaactcctcatcatttcaatgggtgccagggtctctgttctcaggctgcctcctgggtcaggttttccttctaggtgctgttccggtggattctgaaatgcagtagagggcttttgttggcagaacaataaagtgcatttgctcaggcccctgatgcctaacttgcacca

SEQ ID NO: 395682 - DNA, 1000 bp, Homo Sapiens
tctgagcagcagggtgaggcggccctcagcgatgcccgctgcaagttggccgagctggagggtgccctgcagaaggccaagcaggacatggcctgcctgatcagggagtaccaggaggtgatgaactccaagctgggcctggacatcgagatcgccacctacaggcgcctgctggagggcgaggagcagaggctgtgcgaaggcgtcggctcggtgaatgtctgcgtcagcagctcccgcggtggcgttgtctgtggcgatctctgcgcctccactactgcccctgttgtctccaccagagtcagtagcgtccccagcaacagcaacgtggtggtgggcactactaacgcctgcgccccctccgcccgggttggcgtctgcggcggcagctgtaagaggtgctaaggaggctgccgcctccgccagcgcctgtcgccgtcactctccacccagccagtacctcgcgccaggagaacgcgccgcccgcgccggcctcccaatagccgccgcccgctgcctgcactctaagcgctctccccacgtccgctccgggagccatccccggtcgcaggagtccggggagggccgggaggcgccatggtctctctctgtagcctttcctggtagtcaatttgttgtcccgaggattcatctttttcttcctcctaccttctgttttttttttcatgtatgcattggtcttgcctgagctcttcctcaaagcttggaggaacgggggagggcccgggaatgtccctgtctgcacgacctgggactctgcccatgtgcttttgcctgtggaatggagacgcggaccctggatagtggttctatgactctgcgagggacaggcccacgcgtgtggggagaacatctccttccggggctgccctcaagagcttctgaaaaactaatgactctgctgccttctcctttgtctttgtttcactctgtgtttccaataaactcattgtagcgaatcaaaaaaaaaaaaaaaaaa

SEQ ID NO: 395683 - DNA, 1000 bp, Homo Sapiens; identical to SEQ ID NO: 284739

SEQ ID NO: 395684 - DNA, 1000 bp, Homo Sapiens; identical to SEQ ID NO: 221127

SEQ ID NO: 395685 - DNA, 1000 bp, Homo Sapiens; identical to SEQ ID NO: 221128

SEQ ID NO: 395686 - DNA, 1000 bp, Homo Sapiens
gaagcagttccggaaccctggtccacggccacagtgtcaatggggagtacctaaatgttcacatgaaaaatggacaggtcatagtgaaagtcaataatggcatcagagatttttccacctcagtaacacccaagcagagtctctgtgatggcagatggcacagaattacagttattagagattctaatgtggttcagttggatgtggactctgaagtgaaccatgtggttggacccctgaatccaaaaccaattgatcacagggagcctgtgtttgttggaggtgttccagaatctctactgacaccacgcttggcccccagcaaacccttcacaggctgcatacgccactttgtgattgatggacacccagtgagcttcagtaaagcagccctggtcagcggcgccgtaagcatcaactcctgtccagcagcctgacatgacagagcacagctgcccaaatacaaagttctttagagcactgaaagaaacacaaagccagccaggaggaacagtaactcttccttcgggtggaagctttcatcgagttgaacaggacttaaacgaatcatcagggaccggatatttcttatttctcatttggattcttaaccttgaatccaaagtgtctgcaatggacaacaattgaaggagaggcaaacttacttgtattgagagcacacgcaattcctactggtgaaattactgtttctgtttctaataaaatagaagggattccaaataaacacttgcacacatttttgaagtgcggctagattctcagattcacctttcttccagggaagataactttcaatctatataaaaatctctgtcctaaaactacctttctttattttgaagagacttactaacttacatataatctaaattagatgatagatttctttttagcccttttgtttggtctatcagtataagaagaatattttaggtttatagctgaagttatcaaggtttaataaagtaaatttctaaca

SEQ ID NO: 395687 - DNA, 1000 bp, Homo Sapiens; identical to SEQ ID NO: 285440

SEQ ID NO: 395688 - DNA, 1000 bp, Homo Sapiens; identical to SEQ ID NO: 285441

SEQ ID NO: 395689 - DNA, 1000 bp, Homo Sapiens; identical to SEQ ID NO: 221129

SEQ ID NO: 395690 - DNA, 1000 bp, Homo Sapiens
acttaggtggcaccaatcttgacttccagatggaacagtacatctataaaaggaaaagtgatggcatctatatcataaatctcaagaggacctgggagaagcttctgctggcagctcgtgcaattgttgccattgaaaaccctgctgatgtcagtgttatatcctccaggaatactggccagagggctgtgctgaagtttgctgctgccactggagccactccaattgctggccgcttcactcctggaaccttcactaaccagatccaggcagccttccgggagccacggcttcttgtggttactgaccccagggctgaccaccagcctctcacggaggcatcttatgttaacctacctaccattgcgctgtgtaacacagattctcctctgcgctatgtggacattgccatcccatgcaacaacaagggagctcactcagtgggtttgatgtggtggatgctggctcgggaagttctgcgcatgcgtggcaccatttcccgtgaacacccatgggaggtcatgcctgatctgtacttctacagagatcctgaagagattgaaaaagaagagcaggctgctgctgagaaggcagtgaccaaggaggaatttcagggtgaatggactgctcccgctcctgagttcactgctactcagcctgaggttgcagactggtctgaaggtgtacaggtgccctctgtgcctattcagcaattccctactgaagactggagcgctcagcctgccacggaagactggtctgcagctcccactgctcaggccactgaatgggtaggagcaaccactgactggtcttaagctgttcttgcataggctcttaagcagcatggaaaaatggttgatggaaaataaacatcagtttctaaaagttgtcttcatttagtttgctttttactccagatcagaatacctgggattgcatatcaaagcataataataaatacatgtctcgacatgagttgtacttctaaaaaaaaaaa

SEQ ID NO: 395691 - DNA, 786 bp, Homo Sapiens
agcctctcccagccccagcaagcgacctgtcaggcggccgtggactcagactccggagatgaagcccctgctcctggccgtcagccttggcctcattgctgccctgcaggcccaccacctcctggcctcagacgaggagattcaggatgtgtcagggacgtggtatctgaaggccatgacggtggacagggagttccctgagatgaatctggaatcggtgacacccatgaccctcacgaccctggaagggggcaacctggaagccaaggtcaccatgctgataagtggccggtgccaggaggtgaaggccgtcctggagaaaactgacgagccgggaaaatacacggccgacgggggcaagcacgtggcatacatcatcaggtcgcacgtgaaggaccactacatcttttactgtgagggcgagctgcacgggaagccggtccgaggggtgaagctcgtgggcagagaccccaagaacaacctggaagccttggaggactttgagaaagccgcaggagcccgcggactcagcacggagagcatcctcatccccaggcagagcgaaacctgctctccagggagcgattaggggcaggggacaccttggctcctcagcagcccaaggacggcaccatccagcacctccgtcattcacagggacatggaaaaagctccccacccctgcagaacgcggctggctgcaccccttcctaccaccccccgccttccccctgccctgcgccccctctcctggttctccataaagagcttcagcagttaaaaaaa

SEQ ID NO: 395692 - DNA, 1000 bp, Homo Sapiens; identical to SEQ ID NO: 285444

SEQ ID NO: 395693 - DNA, 1000 bp, Homo Sapiens; identical to SEQ ID NO: 285445

SEQ ID NO: 395694 - DNA, 1000 bp, Homo Sapiens
tatcttactgaaggatttggctgatgaacttgcccttgttgatgttgcattggacaaactgaagggagaaatgatggatcttcagcatggcagtcttttctttagtacttcaaagattacttctggaaaagattacagtgtatctgcaaactccagaatagttattgtcacagcaggtgcaaggcagcaggagggagaaactcgccttgccctggtccaacgtaatgtggctataatgaaatcaatcattcctgccatagtccattatagtcctgattgtaaaattcttgttgtttcaaatccagtggatattttgacatatatagtctggaagataagtggcttacctgtaactcgtgtaattggaagtggttgtaatctagactctgcccgtttccgttacctaattggagaaaagttgggtgtccaccccacaagctgccatggttggattattggagaacatggtgattctagtgtgcccttatggagtggggtgaatgttgctggtgttgctctgaagactctggaccctaaattaggaacggattcagataaggaacactggaaaaatatccataaacaagttattcaaagtgcctatgaaattatcaagctgaaggggtatacctcttgggctattggactgtctgtgatggatctggtaggatccattttgaaaaatcttaggagagtgcacccagtttccaccatggttaagggattatatggaataaaagaagaactctttctcagtatcccttgtgtcttggggcggaatggtgtctcagatgttgtgaaaattaacttgaattctgaggaggaggcccttttcaagaagagtgcagaaacactttggaatattcaaaaggatctaatattttaaattaaagccttctaatgttccactgtttggagaacagaagatagcaggctgtgtattttaaattttgaaagtattttcattgatcttaaaaaataaaaacaaattggagacctg

SEQ ID NO: 395695 - DNA, 1000 bp, Homo Sapiens; identical to SEQ ID NO: 115772

SEQ ID NO: 395696 - DNA, 1000 bp, Homo Sapiens
gttccgaaccccaagaattgttcctgggcacaaggacttaattttcagaagccagaaacgtttgagcatctttttatcaagcatacagcatcagtgacatgtggtcctcttcttttggagcctgaaacaatttcagaagatatcagtgttgatacatcatggaaaaataaagatgagatgatgccaacaactgtggtctctctactttcaacaacagatcttgaaaagggttctgtttgtattagtgaccagttcaacagtgttaacttctctgaggctgagggtactgaggtaacctatgaggacgaaagccagagacaaccctttgttaaatacgccacgctgatcagcaactctaaaccaagtgaaactggtgaagaacaagggcttataaatagttcagtcaccaagtgcttctctagcaaaaattctccgttgaaggattctttctctaatagctcatgggagatagaggcccaggcattttttatattatcagatcagcatcccaacataatttcaccacacctcacattctcagaaggattggatgaacttttgaaattggagggaaatttccctgaagaaaataatgataaaaagtctatctattatttaggggtcacctcaatcaaaaagagagagagtggtgtgcttttgactgacaagtcaagggtatcgtgcccattcccagccccctgtttattcacggacatcagagttctccaggacagttgctcacactttgtagaaaataatatcaacttaggaacttctagtaagaagacttttgcatcttacatgcctcaattccaaacttgttctactcagactcataagatcatggaaaacaagatgtgtgacctaactgtgtaatttcactgaagaaaccttcagatttgtgttataatgggtaatataaagtgtaatagattatagttgtgggtgggagagagaaaagaaaccagagtcaaatttgaaaataattgttccaaatgaa

SEQ ID NO: 395697 - DNA, 1000 bp, Homo Sapiens; identical to SEQ ID NO: 221130

SEQ ID NO: 395698 - DNA, 526 bp, Homo Sapiens; identical to SEQ ID NO: 285447

SEQ ID NO: 395699 - DNA, 1000 bp, Homo Sapiens; identical to SEQ ID NO: 221131

SEQ ID NO: 395700 - DNA, 1000 bp, Homo Sapiens; identical to SEQ ID NO: 221132

SEQ ID NO: 395701 - DNA, 1000 bp, Homo Sapiens; identical to SEQ ID NO: 221133

SEQ ID NO: 395702 - DNA, 1000 bp, Homo Sapiens; identical to SEQ ID NO: 115773

SEQ ID NO: 395703 - DNA, 1000 bp, Homo Sapiens; identical to SEQ ID NO: 221134

SEQ ID NO: 395704 - DNA, 1000 bp, Homo Sapiens
tccaattcggaggcacaaaagtaggtgagactgcttttgtatctgcgaagtgcttcactcctgaatgtaattctagctgagtgcaatctaggttaagagccggacaagcgggtaattagagcccgctagctgcccgaggaccggccgccccgccaaagcgcgccccgagtcggcgcccttctcccggccgagcctagctgcggctggacacggagcgcccgagatgatggtgctggacaaggaggacggcgtgccgatgctctccgtccagcccaaagggaagcagaagggctgtgcgggctgtaaccgcaagatcaaggaccgctatctgctgaaggcattggacaagtactggcacgaagactgcctcaagtgtgcgtgctgtgactgccgcctgggcgaggtgggctccaccctctacaccaaggccaacctcatcctgtgccgacgcgactacctgaggctctttggcaccacagggaactgtgctgcttgcagcaagctgatcccagccttcgagatggtgatgcgggcccgggacaacgtgtatcacctcgactgcttcgcctgccagctctgcaaccagagattttgtgtgggagacaaattcttcctgaagaacaacatgatcttgtgtcagatggactatgaggaagggcagctcaatggcacctttgaatcccaagttcagtaacgcccggcgcctggcctccaggcccgtctgtccatctgcccgcctgcccacctgcctggccggccagccagccactctaccagtgcaggctggccagccgctctcctgccacattagaacttctccgtcctcgatgggagggatggcccttcctcctccaccaccgcccgtctgtgtgtgacccctcctggggccaggccgggcctgtacagtctgtcttctgtatataaatgggaacatttattttatgagaaatgtaatgcgattttattactggcgtggattaaacttatgaatgtttccggg

SEQ ID NO: 395705 - DNA, 1000 bp, Homo Sapiens; identical to SEQ ID NO: 285453

SEQ ID NO: 395706 - DNA, 1000 bp, Homo Sapiens; identical to SEQ ID NO: 115775

SEQ ID NO: 395707 - DNA, 1000 bp, Homo Sapiens; identical to SEQ ID NO: 115776

SEQ ID NO: 395708 - DNA, 1000 bp, Homo Sapiens; identical to SEQ ID NO: 285458

SEQ ID NO: 395709 - DNA, 1000 bp, Homo Sapiens; identical to SEQ ID NO: 221137

SEQ ID NO: 395710 - DNA, 1000 bp, Homo Sapiens; identical to SEQ ID NO: 285461

SEQ ID NO: 395711 - DNA, 1000 bp, Homo Sapiens
accctgggagcccggcatatacccagggcacccctacggctgccgccagtctcatgcccaggtgggtgctctgggctggagcgagggccaggttttgggccgaggcttccccaggcaatcctgtgagctcccttctagcctctgacccagtctggtctggcttgcatggatgtagggcttggggtgggaagttcaggtcctggctttgcctttgcctgatgtggatgagcagctcacatgctcagggccacctgagactgtcactgctctcccctggctactgggaggagtcactgagagcttcgttacccctgctgccttgcccagggcacaccctatacctcctcatctgctcttcccctccctgccgccttctgggcaggtagcagtccctggcctctccccctggctgatcactctccctcaggcagtggagatctgcgtctggacaccctcagatcctgtcattgcctgcccagagtccttcaggggcacccctctgccttggtgtgcggtccagggctctcacccaggtgccgcaccctctggggtcttctgtccagctcccttgccccatgtgctgtcactgactctccttgggactcgcctgcctgctcagagccctgcagggcttggtcagctgcctgttcagtgtcaacacttccctgcacatcttaaaactgggctttattttcgctgaaggaactgtgttgggacccttgacatctgtcaggtttgcacatgctgtttttttttctcagcccacgtgttctcccccacgtggggtagcagcaggacagacagtgaatcacagagtctgccctgagcagaggctgctgtccctgggactcctagccatggtcagactgtacaaaacggttttccagaaatgaaatgtaaatccatttttatactgaaaatgttactgaaagtcacttttatgagcatctgccttaataaacagacattgattcccttatcagaaaaaaaaaaaaaaaaa

SEQ ID NO: 395712 - DNA, 1000 bp, Homo Sapiens; identical to SEQ ID NO: 285462

SEQ ID NO: 395713 - DNA, 1000 bp, Homo Sapiens
ggaaggatatcttgctgtggcggtggttaggagatcagacactagccttacctggaactctgtgaaaggcaagaagtcctgccacaccgccgtggacaggactgcaggctggaatatccccatgggcctgctcttcaaccagacgggctcctgcaaatttgatgaatatttcagtcaaagctgtgcccctgggtctgacccgagatctaatctctgtgctctgtgtattggcgacgagcagggtgagaataagtgcgtgcccaacagcaacgagagatactacggctacactggggctttccggtgcctggctgagaatgctggagacgttgcatttgtgaaagatgtcactgtcttgcagaacactgatggaaataacaatgaggcatgggctaaggatttgaagctggcagactttgcgctgctgtgcctcgatggcaaacggaagcctgtgactgaggctagaagctgccatcttgccatggccccgaatcatgccgtggtgtctcggatggataaggtggaacgcctgaaacaggtgttgctccaccaacaggctaaatttgggagaaatggatctgactgcccggacaagttttgcttattccagtctgaaaccaaaaaccttctgttcaatgacaacactgagtgtctggccagactccatggcaaaacaacatatgaaaaatatttgggaccacagtatgtcgcaggcattactaatctgaaaaagtgctcaacctcccccctcctggaagcctgtgaattcctcaggaagtaaaaccgaagaagatggcccagctccccaagaaagcctcagccattcactgcccccagctcttctccccaggtgtgttggggccttggcctcccctgctgaaggtggggattgcccatccatctgcttacaattccctgctgtcgtcttagcaagaagtaaaatgagaaattttgttgatattctctccttaaaaaaaaaaaaaaaaaaaaaaaaaaaaaa

SEQ ID NO: 395714 - DNA, 1000 bp, Homo Sapiens; identical to SEQ ID NO: 115779

SEQ ID NO: 395715 - DNA, 957 bp, Homo Sapiens
cgcgtctgcggctgcgttccccgaaagacgaggctgcgcccggattccggtccgcagggagaccgaagggcacagctccccgcgccgcgcacgccgcccgagcccggagtgcggacacccccgggatgcttgcgccccagaggacccgcgccccaagcccccgcgccgcccccaggcccacccggagcatgctgcctgcagccatgaagggcctcggcctggcgctgctggccgtcctgctgtgctcggcgcccgctcatggcctgtggtgccaggactgcaccctgaccaccaactccagccattgcaccccaaagcagtgccagccgtccgacacggtgtgtgccagtgtccgaatcaccgatcccagcagcagcaggaaggatcactcggtgaacaagatgtgtgcctcctcctgtgacttcgttaagcgacactttttctcagactatctgatggggtttattaactctgggatcttaaaggtcgacgtggactgctgcgagaaggatttgtgcaatggggcggcaggggcagggcacagcccctgggccctggccggggggctcctgctcagcctggggcctgccctcctctgggctgggccctgatgtctcctccttcccacggggcttctgagcttgctcccctgagcctgtggctgccctctccccagcctggcgtggctggggctgggggcagccttggcccagctccgtggctgtggcctgtggctctcactcctcccccgacgtgaagcctccctgtctctccgccagctctgagtcccaggcagctggacatctccaggaaaccaggccatctgggcaggaggcctggggatgagggtggggggggacccccaggtcccggaggggaagtgaagcaacagcccagctggaagggcgtcttctgcggagaaataaagtcacttttgagtcctgagaaaaaaaaaaa

SEQ ID NO: 395716 - DNA, 1000 bp, Homo Sapiens
aggacggtgttcagtcccagccttctgttccagccaagctgaggccccagcggatacaccagaacccacagctggccacacgctatactctgtgctctcccaaggatatgagaagctggacactcccctcaggcctgccaggcaacagcctacacccacctcagacagcagctctgacagcaacctcacaactgaggaggatgaggacaggcctgaggtgcacaagcccatcagtggaagatatgaggtatttgaccaggtcactcaggagggcgctggacatgacccagcccctgagggccaagcagactatgatcccgtcactccatatgtcacggaagttgagtctgtggttggagagaacaccatgtatgcacaagtgttcaacttacagggaaagaccccagtttctcagaaggaagagagctcagccacaatctactgctccatacggaaacctcaggtggtgccaccaccacaacagaatgatcttgagattcctgaaagtcctacctatgaaaatttcacctgaaaggaaaagcagctgctgcctctctcctgggaccgtggggttggaaagtcagctggacctcatggggcctggggctcacagacagaagcacctcagaatttccttcagtgcctcagagatgcctggatgtggcccctccccctccttctcacccttaaggactcccaaacccattaatagttcagacacaggctccttcttggagcctatgggcttcagatgtctttgccccatttgtcacctcgcacacttatagcgtttcctcctcgaaattctaccaagactggtcaaatgttgctgaggggcctggaccagctgtcctttacaccaccttctcaacactgctgaaaagaacccaagagaattgtcacacatgacacaagatgtacataatatcatgctcactgcagtgttatttaaaataaaaggcaggaaataaaaaaaaaaaaaaaaaaaaaaaaaaaaaaa

SEQ ID NO: 395717 - DNA, 1000 bp, Homo Sapiens; identical to SEQ ID NO: 221138

SEQ ID NO: 395718 - DNA, 1000 bp, Homo Sapiens; identical to SEQ ID NO: 115780

SEQ ID NO: 395719 - DNA, 1000 bp, Homo Sapiens; identical to SEQ ID NO: 221139

SEQ ID NO: 395720 - DNA, 1000 bp, Homo Sapiens; identical to SEQ ID NO: 115781

SEQ ID NO: 395721 - DNA, 1000 bp, Homo Sapiens
gtgtgtgaacactgctggggtcagaagaacagacaaggacactgaaataacctgctctgagcgagtgagaacctactggatcatcattgaactaaaacacaaagcaagagaaaaaccttatgatagtaaaagtttgcggactgcacttcagaaggagatcacaacgcgttatcaactggatccaaaatttatcacgagtattttgtatgagaataatgttatcactattgatctggttcaaaattcttctcaaaaaactcagaatgatgtggacatagctgatgtggcttattattttgaaaaagatgttaaaggtgaatccttgtttcattctaagaaaatggacctgacagtaaatggggaacaactggatctggatcctggtcaaactttaatttattatgttgatgaaaaagcacctgaattctcaatgcagggtctaaaagctggtgttattgctgttattgtggttgtggtgatagcagttgttgctggaattgttgtgctggttatttccagaaagaagagaatggcaaagtatgagaaggctgagataaaggagatgggtgagatgcatagggaactcaatgcataactatataatttgaagattatagaagaagggaaatagcaaatggacacaaattacaaatgtgtgtgcgtgggacgaagacatctttgaaggtcatgagtttgttagtttaacatcatatatttgtaatagtgaaacctgtactcaaaatataagcagcttgaaactggctttaccaatcttgaaatttgaccacaagtgtcttatatatgcagatctaatgtaaaatccagaacttggactccatcgttaaaattatttatgtgtaacattcaaatgtgtgcattaaatatgcttccacagtaaaatctgaaaaactgatttgtgattgaaagctgcctttctatttacttgagtcttgtacatacatacttttttatgagctatgaaataaaacattttaaactg

SEQ ID NO: 395722 - DNA, 1000 bp, Homo Sapiens; identical to SEQ ID NO: 285467

SEQ ID NO: 395723 - DNA, 1000 bp, Homo Sapiens; identical to SEQ ID NO: 285468

SEQ ID NO: 395724 - DNA, 1000 bp, Homo Sapiens; identical to SEQ ID NO: 115782

SEQ ID NO: 395725 - DNA, 1000 bp, Homo Sapiens; identical to SEQ ID NO: 118306

SEQ ID NO: 395726 - DNA, 1000 bp, Homo Sapiens; identical to SEQ ID NO: 285470

SEQ ID NO: 395727 - DNA, 698 bp, Homo Sapiens
ggcgccgccgcaaacgtcagtgtacgaggcagacggcggcagtgcggcttgctcttggaagttcaggctcggttgtcttttgggagccatggagagtgacttttatctgcgttactacgtggggcacaagggcaagttcggccacgagttcctggagtttgagtttcgaccggacgggaagttaagatatgccaacaacagcaattacaagaatgatgtcatgatcagaaaagaggcttatgtacataaaagcgtgatggaggaactgaagagaataattgacgacagtgaaattaccaaagaggatgatgcattgtggcctcctcctgaccgagtgggccggcaggagcttgaaatcgtcattggagatgaacacatttcttttacaacatcaaaaattggttcccttattgatgtcaatcaatccaaggatccagaaggcttacgagtattttattatcttgtccaggacctgaagtgtttggtcttcagtcttattggattacacttcaagattaaaccaatctagactgaatattggtgtggacatggggggtgggtgggagtagaaaattttgtgtatatcagggcagtatttttttatgaactataaatgattgtctttaataaatatgtgataaaatccaatttttattattttataaagacctgaacatgtgaaaaaaaaaaaaaaaaaa

SEQ ID NO: 395728 - DNA, 1000 bp, Homo Sapiens; identical to SEQ ID NO: 221141

SEQ ID NO: 395729 - DNA, 1000 bp, Homo Sapiens; identical to SEQ ID NO: 221142

SEQ ID NO: 395730 - DNA, 1000 bp, Homo Sapiens; identical to SEQ ID NO: 115784

SEQ ID NO: 395731 - DNA, 1000 bp, Homo Sapiens
gcatctccccagtggggtttgttgagaatgggattctcctctggttcctgtgcttccggatgagaagaaatcccttcactgtctacatcacccacctgtctatcgcagacatctcactgctcttctgtattttcatcttgtctatcgactatgctttagattatgagctttcttctggccattactacacaattgtcacattatcagtgacttttctgtttggctacaacacgggcctctatctgctgacggccattagtgtggagaggtgcctgtcagtcctttaccccatctggtaccgatgccatcgccccaagtaccagtcggcattggtctgtgcccttctgtgggctctttcttgcttggtgaccaccatggagtatgtcatgtgcatcgacagagaagaagagagtcactctcggaatgactgccgagcagtcatcatctttatagccatcctgagcttcctggtcttcacgcccctcatgctggtgtccagcaccatcttggtcgtgaagatccggaagaacacgtgggcttcccattcctccaagctttacatagtcatcatggtcaccatcattatattcctcatcttcgctatgcccatgagactcctttacctgctgtactatgagtattggtcgacctttgggaacctacaccacatttccctgctcttctccacaatcaacagtagcgccaaccctttcatttacttctttgtgggaagcagtaagaagaagagattcaaggagtccttaaaagttgttctgaccagggctttcaaagatgaaatgcaacctcggcgccagaaagacaattgtaatacggtcacagttgagactgtcgtctaagaactgtgagggaagttgtggataaaaatggtggaacacaggtcatttttagtttgtgcttggaatatgacttaagtatctcctaaatgtgatacagaagaacatctcatcccatatgcatgagatactaattaatgatgaaa

SEQ ID NO: 395732 - DNA, 1000 bp, Homo Sapiens; identical to SEQ ID NO: 285476

SEQ ID NO: 395733 - DNA, 1000 bp, Homo Sapiens; identical to SEQ ID NO: 221143

SEQ ID NO: 395734 - DNA, 1000 bp, Homo Sapiens
catctgcgctctgtgcgccaaggagttcaagaacggctacaatctccggaggcacgaagccatccacacgggagccaaggccggccgggtcccctcgggtgctatgaagatgccgaccatggtgcccctgagcctcctgagcgtgccccagctgagcggagccggcgggggagggggagaggcgggtgccggcggcggcgctgcagtggccgccggtggcgtggtgaccacgaccgcctcggggaagcgcatccggaagaaccatgcctgcgagatgtgtggcaaggccttccgcgacgtctaccacctgaaccgacacaagctgtcgcactcggacgagaagccctaccagtgcccggtgtgccagcagcgcttcaagcgcaaggaccgcatgagctaccacgtgcgctcacatgacggcgctgtgcacaagccctacaactgctcccactgtggcaagagcttctcccggccggatcacctcaacagtcacgtcagacaagtgcactcaacagaacggcccttcaaatgtgagaaatgtgaggcagctttcgccacgaaggatcggctgcgggcgcacacagtacgacacgaggagaaagtgccatgtcacgtgtgtggcaagatgctgagctcggcttatatttcggaccacatgaaggtgcacagccagggtcctcaccatgtctgtgagctctgcaacaaaggtactggtgaggtttgtccaatggcggcggcagcggcagcagcggcagcagtagcagcccctcccacagctgtgggctccctctcgggggcggagggggtgcctgtgagctctcagccacttccctcccaaccctggtgagctccaagttggttgcgggggagaggggagaatggagtagagtcccttggtacaagctcctctcccccctcttttcccaccaactcctatttccctaccaaccaaggagcctccagaaggaaaggaggaagaaatgttttcttaggggaattc

SEQ ID NO: 395735 - DNA, 1000 bp, Homo Sapiens; identical to SEQ ID NO: 115785

SEQ ID NO: 395736 - DNA, 1000 bp, Homo Sapiens; identical to SEQ ID NO: 285480

SEQ ID NO: 395737 - DNA, 1000 bp, Homo Sapiens; identical to SEQ ID NO: 285481

SEQ ID NO: 395738 - DNA, 1000 bp, Homo Sapiens; identical to SEQ ID NO: 115786

SEQ ID NO: 395739 - DNA, 1000 bp, Homo Sapiens
cactccctacccccattccagagccgagtagtaagtttacagatgtttcccccattacgtacccccacccatccctgctgcagcgagcctgagagccaggtagagccaggcacagctcctcagtcttctcacacagtcctgccggtggccttccctcatgacccttgcttgggagggtggagcactggctccttgaccctaaaaggtagctggcaggggcaagatgggggccagctacctaatggatgaaagccacaagtgaatacagttcttgtcaccagggttgccctgccctcactcggcagggagttctgacaccccagggcccgtgagctacctgcttgagcccctgtttctggggcaccttcgaggaggcgttgtggagggcatcgccccctgtttattcacaacaccctcaggggcaaacaggcctgggacccgctgacaccattttgggtagctggatgcacccgacagcagtggggtccacacactgagctccagctggcactgcccactcaagggctgagtggaggggcccctccggccagctctgctccaccagccctgcaagctgatgcagggcgggggaagggctgggtgttgcactattgctgcgctgccttaaggcatctgtcctctggtggtgcacccgtgcacacaggtacagtgcatctgggcacagcttttggatccacacctctgcacaagtgtgaatacctctgcacatatgggcgtatctgtgtgtgctcgtgtatatggggtggggaacatgagacttcctgtgaccagtccaccctggctcccagctgtctgtatcctcctgccccgccctggcgagtgcctaccctggcagaacccagggaggagtggaggctgcctctgcctgggcctccacacagcatcctgtacatacgccacctgggctgggggtggggaggcagggccaggagcatcgattaaagatcacatcctggggcttccagggagctcacaccaa

SEQ ID NO: 395740 - DNA, 1000 bp, Homo Sapiens; identical to SEQ ID NO: 285483

SEQ ID NO: 395741 - DNA, 1000 bp, Homo Sapiens; identical to SEQ ID NO: 115787

SEQ ID NO: 395742 - DNA, 1000 bp, Homo Sapiens; identical to SEQ ID NO: 115788

SEQ ID NO: 395743 - DNA, 1000 bp, Homo Sapiens; identical to SEQ ID NO: 221148

SEQ ID NO: 395744 - DNA, 1000 bp, Homo Sapiens; identical to SEQ ID NO: 115789

SEQ ID NO: 395745 - DNA, 1000 bp, Homo Sapiens; identical to SEQ ID NO: 285486

SEQ ID NO: 395746 - DNA, 1000 bp, Homo Sapiens; identical to SEQ ID NO: 115790

SEQ ID NO: 395747 - DNA, 1000 bp, Homo Sapiens; identical to SEQ ID NO: 115791

SEQ ID NO: 395748 - DNA, 1000 bp, Homo Sapiens
caggctgcacggtggacatgctgcaggcagtgtatgggctggacggcatccgcctgcgccgccgccagtactacaccatgcccaacttcagacagtatgagaaccgcaccggccacatcctggtgcagtggtcgctgggcagccccctgcacttcgccggctggcactgctcctggtgcttcacgcccgagggcatctacttcaagctcgtgtccgcccagaatggcgacttcccacgctggggtgactacgaggacaagcgggacctgaactacatccgcggcctgatccgcaccgggggctggttcgacggcacgcagcaggagtacccgcctgcagaccccagcgagcacatgtatgcgcccaagtacctgctgaagaactacgaccggttccactacctgctggacaacccctaccaggagcccaggagcacggcggcgggcgggtggcgccacaggggtcccgagggaaggccgcccgcccggggcaaactggacgaggcggaagtctagagctgcatgatctgatagggtttgtgacagggcgggggtggcggcggcccctagcgctatctccctgcctcctgccggctccttggttcttgaggggaccaggagtgggtggggagtgggggtgggggtagggtttccctactgaagcccttgtgaatcaagggtcaggcctttgagctcagaaaatatccctcctgttgggagagggcgcaggccgtgacgtctgggtggcccttatgactgccaagactgctgtggccaggaggtgccactggagtgtgcgtggtggtccctgggtagcgggggagggtaggcaggattggggaagagagcctgcaggatctcaccaggcagcctctggggggtggccaggccgggaaaaagcccaccatttggcatccctgggccttgggctccgtgtgggagaccggcctgccaggaggacccagggctctgtaagtagatgcatttgggtccaggaggaa

SEQ ID NO: 395749 - DNA, 1000 bp, Homo Sapiens; identical to SEQ ID NO: 285489

SEQ ID NO: 395750 - DNA, 561 bp, Homo Sapiens
accacagtggtgtccgagaagtcaggcacgtagctcagcggcggccgcggcgcgtgcgtctgtgcctctgcgcgggtctcctggtccttctgccatcatgccgatgttcatcgtaaacaccaacgtgccccgcgcctccgtgccggacgggttcctctccgagctcacccagcagctggcgcaggccaccggcaagcccccccagtacatcgcggtgcacgtggtcccggaccagctcatggccttcggcggctccagcgagccgtgcgcgctctgcagcctgcacagcatcggcaagatcggcggcgcgcagaaccgctcctacagcaagctgctgtgcggcctgctggccgagcgcctgcgcatcagcccggacagggtctacatcaactattacgacatgaacgcggccaatgtgggctggaacaactccaccttcgcctaagagccgcagggacccacgctgtctgcgctggctccacccgggaacccgccgcacgctgtgttctaggcccgcccaccccaaccttctggtggggagaaataaacggtttagagact

SEQ ID NO: 395751 - DNA, 1000 bp, Homo Sapiens; identical to SEQ ID NO: 221149

SEQ ID NO: 395752 - DNA, 571 bp, Homo Sapiens
tcagccggacaccagaagacaagcagagagactcctccagacccactcagaccacgtgcacgccctccaagatggtatcccgtaaggctgtggctgctctgctggtggtgcatgtagctgccatgctggcctcccagacggaagccttcgtccccatcttcacctatggcgaactccagaggatgcaggaaaaggaacggaataaagggcaaaagaaatccctgagtgtatggcagaggtctggggaggaaggtcctgtagaccctgcggagcccatcagggaagaagaaaacgaaatgatcaagctgactgctcctctggaaattggaatgaggatgaactccagacagctggaaaagtacccggccaccctggaagggctgctgagtgagatgcttccccagcatgcagccaagtgatggccacgctggggagaaggtggacagatttgggaggcccctcctgcccaagtgaggccctgggaatttacagagcctgccagctgggcttggaaggaaaacacctttccaaagcaaattcccctccagcaaataaagcatgaaatatacag

SEQ ID NO: 395753 - DNA, 1000 bp, Homo Sapiens; identical to SEQ ID NO: 221151

SEQ ID NO: 395754 - DNA, 1000 bp, Homo Sapiens; identical to SEQ ID NO: 115794

SEQ ID NO: 395755 - DNA, 1000 bp, Homo Sapiens
atataaatggcattcagtccctctatggacctccccctgactcccctgagacccccctggtacccacggaacctgtccctccagaacctgggacgccagccaactgtgatcctgctttgtcctttgatgctgtcagcactctgaggggagaaatcctgatctttaaagacaggcacttttggcgcaaatccctcaggaagcttgaacctgaattgcatttgatctcttcattttggccatctcttccttcaggcgtggatgccgcatatgaagttactagcaaggacctcgttttcatttttaaaggaaatcaattctgggctatcagaggaaatgaggtacgagctggatacccaagaggcatccacaccctaggtttccctccaaccgtgaggaaaatcgatgcagccatttctgataaggaaaagaacaaaacatatttctttgtagaggacaaatactggagatttgatgagaagagaaattccatggagccaggctttcccaagcaaatagctgaagactttccagggattgactcaaagattgatgctgtttttgaagaatttgggttcttttatttctttactggatcttcacagttggagtttgacccaaatgcaaagaaagtgacacacactttgaagagtaacagctggcttaattgttgaaagagatatgtagaaggcacaatatgggcactttaaatgaagctaataattcttcacctaagtctctgtgaattgaaatgttcgttttctcctgcctgtgctgtgactcgagtcacactcaagggaacttgagcgtgaatctgtatcttgccggtcatttttatgttattacagggcattcaaatgggctgctgcttagcttgcaccttgtcacatagagtgatctttcccaagagaaggggaagcactcgtgtgcaacagacaagtgactgtatctgtgtagactatttgcttatttaataaagacgatttgtcagttattttatctt

SEQ ID NO: 395756 - DNA, 1000 bp, Homo Sapiens; identical to SEQ ID NO: 115795

SEQ ID NO: 395757 - DNA, 1000 bp, Homo Sapiens; identical to SEQ ID NO: 285497

SEQ ID NO: 395758 - DNA, 1000 bp, Homo Sapiens; identical to SEQ ID NO: 285498

SEQ ID NO: 395759 - DNA, 1000 bp, Homo Sapiens; identical to SEQ ID NO: 221152

SEQ ID NO: 395760 - DNA, 1000 bp, Homo Sapiens; identical to SEQ ID NO: 285499

SEQ ID NO: 395761 - DNA, 1000 bp, Homo Sapiens; identical to SEQ ID NO: 285500

SEQ ID NO: 395762 - DNA, 1000 bp, Homo Sapiens; identical to SEQ ID NO: 115796

SEQ ID NO: 395763 - DNA, 1000 bp, Homo Sapiens; identical to SEQ ID NO: 285501

SEQ ID NO: 395764 - DNA, 1000 bp, Homo Sapiens; identical to SEQ ID NO: 115797

SEQ ID NO: 395765 - DNA, 1000 bp, Homo Sapiens; identical to SEQ ID NO: 221155

SEQ ID NO: 395766 - DNA, 1000 bp, Homo Sapiens; identical to SEQ ID NO: 293163

SEQ ID NO: 395767 - DNA, 572 bp, Homo Sapiens; identical to SEQ ID NO: 115798

SEQ ID NO: 395768 - DNA, 1000 bp, Homo Sapiens
ttggcatctagagcttgatgccagtaggctcaactagggagtgagtgcaaaaagctgagtatggtgagagaagcctgtgccctgatccaagtttactcaaccctctcaggtgaccaaaatccccttctcatcactcccctccaaagaggtgactgggccctgcctctgtttgacaaacctctaacccaggtcttgacaccagctgttctgtcccttggagctgtaaaccagagagctgctggggattctggcctagtcccttccacacccccaccccttgctctcaacccaggagcatccacctccttctctgtctcatgtgtgctcttcttctttctacagtattatgtactctactgatatctaaatattgatttctgccttccttgctaatgcaccattagaagatattagtcttggggcaggatgattttggcctcattactttaccacccccacacctggaaagcatatactatattacaaaatgacattttgccaaaattattaatataagaagctttcagtattagtgatgtcatctgtcactataggtcatacaatccattcttaaagtacttgttatttgtttttattattactgtttgtcttctccccagggttcagtcctcaaggggccatcctgtcccaccatgcagtgcccctagcttagagcctccctcaattccccctggccaccaccccccactctgtgcctgaccttgaggagtcttgtgtgcattgctgtgaattagctcacttggtgatatgtcctatattggctaaattgaaacctggaattgtggggcaatctattaatagctgccttaaagtcagtaacttacccttagggaggctgggggaaaaggttagattttgtattcaggggttttttgtgtactttttgggttttttaaaaattgtttttggaggggtttatgctcaatccatgttctatttcagtgccaataaaatttaggaagacttcaaaaaaaaaaaa

SEQ ID NO: 395769 - DNA, 1000 bp, Homo Sapiens; identical to SEQ ID NO: 221156

SEQ ID NO: 395770 - DNA, 1000 bp, Homo Sapiens; identical to SEQ ID NO: 221158

SEQ ID NO: 395771 - DNA, 1000 bp, Homo Sapiens; identical to SEQ ID NO: 115799

SEQ ID NO: 395772 - DNA, 1000 bp, Homo Sapiens; identical to SEQ ID NO: 221159

SEQ ID NO: 395773 - DNA, 1000 bp, Homo Sapiens; identical to SEQ ID NO: 115800

SEQ ID NO: 395774 - DNA, 1000 bp, Homo Sapiens; identical to SEQ ID NO: 285510

SEQ ID NO: 395775 - DNA, 1000 bp, Homo Sapiens; identical to SEQ ID NO: 115801

SEQ ID NO: 395776 - DNA, 1000 bp, Homo Sapiens; identical to SEQ ID NO: 221160

SEQ ID NO: 395777 - DNA, 1000 bp, Homo Sapiens; identical to SEQ ID NO: 221161

SEQ ID NO: 395778 - DNA, 1000 bp, Homo Sapiens; identical to SEQ ID NO: 115802

SEQ ID NO: 395779 - DNA, 1000 bp, Homo Sapiens; identical to SEQ ID NO: 115803

SEQ ID NO: 395780 - DNA, 1000 bp, Homo Sapiens; identical to SEQ ID NO: 285515

SEQ ID NO: 395781 - DNA, 1000 bp, Homo Sapiens
ggcaggctcctggcaaaaggtcagagtctggatcaccttctgctggaggccacagcaaacctcctcacagcccactggtcctcaagaggtgccacgtctccacacatcagcacaactacgcagcgcctccctccactcggaaggactatcctgctgccaagagggtcaagttggacagtgtcagagtcctgagacagatcagcaacaaccgaaaatgcaccagccccaggtcctcggacaccgaggagaatgtcaagaggcgaacacacaacgtcttggagcgccagaggaggaacgagctaaaacggagcttttttgccctgcgtgaccagatcccggagttggaaaacaatgaaaaggcccccaaggtagttatccttaaaaaagccacagcatacatcctgtccgtccaagcagaggagcaaaagctcatttctgaagaggacttgttgcggaaacgacgagaacagttgaaacacaaacttgaacagctacggaactcttgtgcgtaaggaaaagtaaggaaaacgattccttctaacagaaatgtcctgagcaatcacctatgaacttgtttcaaatgcatgatcaaatgcaacctcacaaccttggctgagtcttgagactgaaagatttagccataatgtaaactgcctcaaattggactttgggcataaaagaacttttttatgcttaccatcttttttttttctttaacagatttgtatttaagaattgtttttaaaaaattttaagatttacacaatgtttctctgtaaatattgccattaaatgtaaataactttaataaaacgtttatagcagttacacagaatttcaatcctagtatatagtacctagtattataggtactataaaccctaattttttttatttaagtacattttgctttttaaagttgatttttttctattgtttttagaaaaaataaaataactggcaaatatatcattgagccaaaaaaaaaaaaaaaaaaaaa

SEQ ID NO: 395782 - DNA, 1000 bp, Homo Sapiens; identical to SEQ ID NO: 115804

SEQ ID NO: 395783 - DNA, 1000 bp, Homo Sapiens; identical to SEQ ID NO: 221162

SEQ ID NO: 395784 - DNA, 1000 bp, Homo Sapiens; identical to SEQ ID NO: 285519

SEQ ID NO: 395785 - DNA, 1000 bp, Homo Sapiens; identical to SEQ ID NO: 285521

SEQ ID NO: 395786 - DNA, 855 bp, Homo Sapiens
atctcatctcccagacgccacgtctctcggtttcttcttagatcactcctctgccaaagatcccaacaagacaacatggctcccaagaagcctgagcctaagaaggaggcagccaagccagctccagctccagctccagcccctgcaccagcccctgccccagctcctgaggctcccaaggaacctgcctttgaccccaagagtgtaaagatagacttcactgccgaccagattgaagagttcaaagaggccttttcattgtttgaccggaccccgactggagagatgaagatcacctacggccagtgcggggatgtactgcgggccctgggccagaaccctaccaatgccgaggtgctgcgtgtgctgggcaagcccaagcctgaagagatgaatgtcaagatgctggactttgagacgttcttgcccatcctgcagcacatttcccgcaacaaggagcagggcacctatgaggacttcgtggagggcctgcgtgtctttgacaaggagagcaatggcacggtcatgggtgctgagcttcggcacgtccttgccaccctgggagagaagatgactgaggctgaagtggagcagctgttagctgggcaagaggatgccaatggctgcatcaattatgaagcctttgtcaagcacatcatgtcagggtgaagcagagtcttccaggtgcctggcccttggctttagccataccagggtgagttaaagagaggccccggctgggtgagctgagatggagtcctcgacttatcaccacaccactgccccaaggaccttacaggccctccctgttaataaacagctctaacacggccaggctgggctctgggattctga

SEQ ID NO: 395787 - DNA, 1000 bp, Homo Sapiens; identical to SEQ ID NO: 115805

SEQ ID NO: 395788 - DNA, 1000 bp, Homo Sapiens; identical to SEQ ID NO: 221163

SEQ ID NO: 395789 - DNA, 1000 bp, Homo Sapiens; identical to SEQ ID NO: 115806

SEQ ID NO: 395790 - DNA, 1000 bp, Homo Sapiens; identical to SEQ ID NO: 285525

SEQ ID NO: 395791 - DNA, 1000 bp, Homo Sapiens; identical to SEQ ID NO: 115807

SEQ ID NO: 395792 - DNA, 600 bp, Homo Sapiens; identical to SEQ ID NO: 285528

SEQ ID NO: 395793 - DNA, 823 bp, Homo Sapiens; identical to SEQ ID NO: 285529

SEQ ID NO: 395794 - DNA, 1000 bp, Homo Sapiens; identical to SEQ ID NO: 115809

SEQ ID NO: 395795 - DNA, 418 bp, Homo Sapiens
gcaagatggcgccgtccgccttgctgcgtcccctttcccggctgctggcccccgccaggctcccgagcggcccttcagtgcgatcaaagttctacgtgcgagagccgccgaatgccaaacctgactggctgaaagttgggttcaccttgggcaccactgtcttcttgtggatctatctcatcaaacaacacaatgaagatattttagagtacaaaagaagaaatgggctggaataaacttttgaaacactaatgtagtatgctccgtatagtgattgtagctgttcctctggattcaccatctgttgagttgtaaatgtgagagaaaaagttatatgtgaatatatatcaagccagcatttgtattttgcatcattaaataaaaagaaataaaaatacttctgtattcttcaaaaaaa

SEQ ID NO: 395796 - DNA, 779 bp, Homo Sapiens
cccgctggcccaatggcagcgtcctacagtgtagcctccgcctcccgattgactggcctgcttggcaaggcaagtagcggcggcgcttcaagatgcgctgcctgaccacgcctatgctgctgcgggccctggcccaggctgcacgtgcaggacctcctggtggccggagcctccacagcagtgcagtggcagccacctacaagtatgtgaacatgcaggatcccgagatggacatgaagtcagtgactgaccgggcagcccgcaccctgctgtggactgagctcttccgaggcctgggcatgaccctgagctacctgttccgggaaccggccaccatcaactacccgttcgagaagggcccgctgagccctcgcttccgtggggagcatgcgctgcgccggtacccatccggggaggagcgttgcattgcctgcaagctctgcgaggccatctgccccgcccaggccatcaccatcgaggctgagccaagagctgatggcagccgccggaccacccgctatgacatcgacatgaccaagtgcatctactgcggcttctgccaggaggcctgtcccgtggatgccatcgtcgagggccccaactttgagttctccacggagacccatgaggagctgctgtacaacaaggagaagttgctcaacaacggggacaagtgggaggccgagatcgccgccaacatccaggctgactacttgtatcggtgacgccccaccggcctgcagcccctgctgcccaataaaaccactccgaccccacgg

SEQ ID NO: 395797 - DNA, 1000 bp, Homo Sapiens; identical to SEQ ID NO: 115810

SEQ ID NO: 395798 - DNA, 1000 bp, Homo Sapiens; identical to SEQ ID NO: 221165

SEQ ID NO: 395799 - DNA, 1000 bp, Homo Sapiens; identical to SEQ ID NO: 115811

SEQ ID NO: 395800 - DNA, 1000 bp, Homo Sapiens
gattgtatggtcactaggtatgcaatcacgcattcaaagaggctctttacaccatcactgtgattgctctgagagttgagggactattgggctttatttggacaaaccaaacttttagcctgaaaccaactttatgccactaagtcatagcctcagttgtcccagttatttgtcctcctgaaaatgcctgaaacatcagacagacattgcttgctttacccaaactgatcaaaatctttaggagcacaaatgaattttttagtctgaaataccaaataatgaattggtataccatatccggaatcacacatgttatcttaaacccagccatcatacctaagtcttttgccaaaacctctcataggtatatctagctgaacttattttggcattttcaatgtgatcagttctagacctagaagggggtcaggctgctttacagaattctatttccttaagtccctggcacttctcataccacatcactgaacctgttcagtaacaatcagtttggccgtcccccatgatggtaggaaatatagagagcaagttcttctgccagggtcacactgtggtctctgaactgaccagtatatccctaactcctctttgatagagaaagagtctcaaatggacaactgtcctgtgttgctttccctaggccttcagcagcctattggctctccctgcctctgagctctggactctgtttgaatattccaagtagtatatggacagtccagggcttatgcccagcagcccactggaggcattcttcaggctcctttaaggcaggtgcattgatagttccattagtgtgacccttgcattggcacccctccagcctggaggccaggcttccagcaacttccttctgccctagagcaagccatgagccccagagcagtagcaggagacttgagaagtagagtgacaaaaacaagcacttaattaaattataaaatttaactttaaaaaaaaaaaaaaaaaaaaaaaaaaa

SEQ ID NO: 395801 - DNA, 1000 bp, Homo Sapiens; identical to SEQ ID NO: 285536

SEQ ID NO: 395802 - DNA, 1000 bp, Homo Sapiens
gaatcagcctaggggtcagggaccaaggacccctcaccttgcaacacacagacacacgcacacacacacacaggaggagaaatctcacttttctccatgagttttttctcttgggctgagactggatactgcccggggcagctgccagagaagcatcggagggaattgaggtctgctcggccgtcttcactcgcccccgggtttggcgggccaaggactgccgaccgaggctggagctggcgtctgtcttcaagggcttacacgtggaggaatgctcccccatcctccccttccctgcaaacatggggttggctgggcccagaaggttgcgatgaagaaaagcgggccagtgtgggaatgcggcaagaaggaattgacttcgactgtgacctgtggggatttctcccagctctagacaaccctgcaaaggactgttttttcctgagcttggccagaagggggccatgaggcctcagtggactttccaccccctccctggcctgttctgttttgcctgaagttggagtgagtgtggctcccctctatttagcatgacaagccccaggcaggctgtgcgctgacaaccaccgctccccagcccagggttcccccagccctgtggaagggactaggagcactgtagtaaatggcaattctttgacctcaacctgtgatgaggggaggaaactcacctgctggcccctcacctgggcacctggggagtgggacagagtctgggtgtatttattttcctccccagcaggtggggagggggtttggtggcttgcaagtatgttttagcatgtgtttggttctggggcccctttttactccccttgagctgagatggaacccttttggcccccagctgggggccatgagctccagacccccagcaaccctcctatcacctcccctccttgcctcctgtgtaatcatttcttgggccctcctgaaacttacacacaaaacgttaagtgatgaacattaaatagcaaag

SEQ ID NO: 395803 - DNA, 1000 bp, Homo Sapiens; identical to SEQ ID NO: 285538

SEQ ID NO: 395804 - DNA, 1000 bp, Homo Sapiens; identical to SEQ ID NO: 285539

SEQ ID NO: 395805 - DNA, 1000 bp, Homo Sapiens; identical to SEQ ID NO: 285540

SEQ ID NO: 395806 - DNA, 1000 bp, Homo Sapiens; identical to SEQ ID NO: 221166

SEQ ID NO: 395807 - DNA, 1000 bp, Homo Sapiens
cttctcaggcaccgacctgctggccatcagcacggcgcttaacacgctggccagttacggctacaacaccaactccctgggcctgggcctcaactcggccgcagcttccggcgtcctggccgccgtggccgccggggccaacccagcggccgccgccgccgccaacctcctggcatcctacgcgggcgaggccggggccgggccagccggaggggccgccccgccgccgcccccgcctcccggagccctggggtcctttgcgttggccgcagccgccaacggctacctcggggccggggcgggcggcggggcgggcggagggggcggcccgctggtggccgctgcagccgcggccggggcggccgggggcttcctgacggcggagaagctggcggctgagagtgccaaggagctggtggagattgcggtgcctgagaacctggtgggagccatcctggggaaggggggcaagacgttggtggagtaccaggagctgacgggcgctcgcatccagatctccaagaagggcgagttcctgccaggcacgcggaaccggcgggtcaccatcacgggcagccccgcggccacgcaagccgctcaatacctcatcagtcagcgggtcacctacgagcagggagtgagggcctcaaacccccagaaagtgggatgaggcctgtggtgtgtgctcccacccttttctctcctcccatctcctcctcttccctctcctcctcccccccaactcctgacctcagcttggtgtagtcctgctcctcttgggatggggctggggtaggcccgactgcaccctccccttctggtagtcataggcaggattgagtgacggttgggaagggggctcagaagccccctccccagcccggaactgacccctccttcctccctccctgtgcttggctgggcctgacccttcctgtcccagggcccaggtctgtgtgatatctgtatatattgcattttgttgattttaatagaaaac

SEQ ID NO: 395808 - DNA, 1000 bp, Homo Sapiens; identical to SEQ ID NO: 285542

SEQ ID NO: 395809 - DNA, 1000 bp, Homo Sapiens; identical to SEQ ID NO: 115814

SEQ ID NO: 395810 - DNA, 692 bp, Homo Sapiens; identical to SEQ ID NO: 285545

SEQ ID NO: 395811 - DNA, 1000 bp, Homo Sapiens; identical to SEQ ID NO: 221169

SEQ ID NO: 395812 - DNA, 1000 bp, Homo Sapiens
aggtccagcagcccctcttcagagcccctgtaaatgctatcgcagcctgagtcctgccgccttccagttccttggtgtcccgtgcaccccttctgtctgtcccctttcatggctgtgcagccgtcccgctggagtggccatgtcccttgtgcattgagtgcatccccgctggtgactaagctcgcagcaagcggctaccccccgatctgcaaaagggcctctccctttgtgttctatacattgtgaatcttcccgtctgaagaacgcccagcctgcccagacaaagccccgccttccccaaagcagaggggctgtctgtgtctccagaaaggggacatcgggggggaggggggctcagaaaggagaagggctgtgatctccggtcccttcccccatcatccttccttagactgatgctttgactgaatcatcactagctatggcattaaaaggcctctcttctcatctggtgccaaaggttccgttgcagctttttacaaccatccggtgtggtttggaggttttgttttttttttttcccaacagaaaagaacagccattagaagaaggctcccattttctgatgttccgccccactgtgaagagtgtgctcgttttaaattcatgttgattcttgtaagcactggactgtcttcatcaagtatttccctacagaactcctcaagaaaacagagatcatttggctagagattgtctgagtgactccaagctactcactgtattggacgggagtagtaatttattttaaagataaagtgactaagtggggaaatttataaagctaaatattatatattttatttttcatacatgtttgaagtgcaaatctgtggatattccatttgtaggaccaagtcgacatgcccatcctgacattgtatgctacgagaactcttctgatgatggaatttcgattaaagtgcactgaaagataaaaaaaaaaaaaaaaaaaaaaaaaaaaaaaaaaaaaaaaaaaaaa

SEQ ID NO: 395813 - DNA, 1000 bp, Homo Sapiens; identical to SEQ ID NO: 115815

SEQ ID NO: 395814 - DNA, 1000 bp, Homo Sapiens; identical to SEQ ID NO: 115816

SEQ ID NO: 395815 - DNA, 1000 bp, Homo Sapiens
ttcctggccgagtgctacaacctcagcccgaccaaggacaagatgcttgtggctgtgaaggccctgaaggatcccaccctggctgcccggaaggatttccagagggaggccgagctgctcaccaacctgcagcatgagcacattgtcaagttctatggagtgtgcggcgatggggaccccctcatcatggtctttgaatacatgaagcatggagacctgaataagttcctcagggcccatgggccagatgcaatgatccttgtggatggacagccacgccaggccaagggtgagctggggctctcccaaatgctccacattgccagtcagatcgcctcgggtatggtgtacctggcctcccagcactttgtgcaccgagacctggccaccaggaactgcctggttggagcgaatctgctagtgaagattggggacttcggcatgtccagagatgtctacagcacggattattacagggtgggaggacacaccatgctccccattcgctggatgcctcctgaaagcatcatgtaccggaagttcactacagagagtgatgtatggagcttcggggtgatcctctgggagatcttcacctatggaaagcagccatggttccaactctcaaacacggaggtcattgagtgcattacccaaggtcgtgttttggagcggccccgagtctgccccaaagaggtgtacgatgtcatgctggggtgctggcagagggaaccacagcagcggttgaacatcaaggagatctacaaaatcctccatgctttggggaaggccaccccaatctacctggacattcttggctagtggtggctggtggtcatgaattcatactctgttgcctcctctctccctgcctcacatctcccttccacctcacaactccttccatccttgactgaagcgaacatcttcatataaactcaagtgcctgctacacatacaacactgaaaaaaggaaaaaaaaagaaagaaaaaaaaaccc

SEQ ID NO: 395816 - DNA, 1000 bp, Homo Sapiens
atgctacagtatctgcagtcgcttggatctggctgttgagttgacgggttccttgaaccccacaaaatccctctccaaccacaggacccttcggctcaccaagaacggggcccaggggagtcaggcctattcgctgcacttcctgccaaactttgcccccacaagcctggtcatcagccaggcagccctcccagtgcccaagggccaccaaccccagggaaacagggccagcacagaggggccttcctcccccacagagctcccatgacatagtctgctctgggcggaagagctttgctgccagccagggatgtccagaggtcggtgcagcccctatccctgctcaggagtgggctcagagtctagcaaatgctaaggcccctcaggctgggctctgaacgaggacctggactcagagccagacagggcagcctcagacccttctctggggctcctggaccttgggccataatttctgagcctcggtttccccatctaaggaacagatgtggtcgttccgccctctcagctggatgagactgtcctggaggatccaccccggaacagacagaacggtgtctctcaggatggtgctctgagagagggcagagtggatgccccactgccctagaccctcggtagacgtggggtctctggggcggggtctgtggctgtgactgaagtcggctttcccgttgatgtcttgatgctcctatctgtgcacttaccgtaggtagggacacgtgtccatgcaccacagacacacccacgacacctgatctcgtatcactagcttgcggccaggtcatgatgtggccccggaagctggccctgcgtgccatgagtgcgtcggtcatggagtccggagcccctgagccggcccctggtgacggcacagccctcacagctcaaacgcccacccccactcccaccatctgcaggtggtgaaaacaaaccccgtgtatctctcaataaaggtggccgaagggcctcgatgtgg

SEQ ID NO: 395817 - DNA, 1000 bp, Homo Sapiens; identical to SEQ ID NO: 115818

SEQ ID NO: 395818 - DNA, 1000 bp, Homo Sapiens; identical to SEQ ID NO: 294304

SEQ ID NO: 395819 - DNA, 1000 bp, Homo Sapiens; identical to SEQ ID NO: 285551

SEQ ID NO: 395820 - DNA, 1000 bp, Homo Sapiens; identical to SEQ ID NO: 285552

SEQ ID NO: 395821 - DNA, 1000 bp, Homo Sapiens; identical to SEQ ID NO: 115819

SEQ ID NO: 395822 - DNA, 1000 bp, Homo Sapiens; identical to SEQ ID NO: 221173

SEQ ID NO: 395823 - DNA, 1000 bp, Homo Sapiens; identical to SEQ ID NO: 115820

SEQ ID NO: 395824 - DNA, 1000 bp, Homo Sapiens; identical to SEQ ID NO: 115821

SEQ ID NO: 395825 - DNA, 1000 bp, Homo Sapiens; identical to SEQ ID NO: 115822

SEQ ID NO: 395826 - DNA, 1000 bp, Homo Sapiens
acaaaagcccatgtgatagggactccatgttctacccaaatatcatctttaaaggaacataacatgtatcccacaccttctggatttacctcaagcttattcactgtaagtgggatgcagacagtggacaccattaactctctgagtgtggtaactcaacccaaagtgaccaaaatacccaaacaatatcgaacaaaggaaacaacgtttggtgccactctaagcaaagacaccacctttactagcactgataaggcttttgtgccctatccagaagatacatccacagagactatcaattcacatgaagcagcagctgcaactctaactattcatctccaagatggaatggtcacaaacacaagcctcactagctcaacaaaatcatccccaacacccatgaccctaagtatcactagtggcatgccaaataatttctctgaaatgcctcaacaaagcacaacccttaacttatggagggaagagacaaccacaaatgtaaagactccattaccttctgtggcaaatgcttggaaagtaaatgcttcatttctcttattgctcaatgttgtggtcatgctggctgtctgagggtctgcattttctgaaactaatgaaagcactcctccctgatgtacagttgggaaaatatgtccatatctaaccagtgattcgagctatatttaagtattcaagaaagccagtcttaacatttctaactctgatgtaaatgaagtaacttgtcttaaataaaagaaatgcacaatgtcttggtacttgctgctattttactgtcttaattaagtaaactaatgagtttcttttataaaaaaaatgaaatgttttaaggcttcaatttattgcacaaaatataaagcatctaaactttaatatgtattttatgtatgtttacactgtcaaacatctggaaaataaaaggtctatgctcaaaaaaaaaaaaaaaaaaaaaaaaaaaaaaaaaaaaaaaaaaaaaaaaaaa

SEQ ID NO: 395827 - DNA, 1000 bp, Homo Sapiens; identical to SEQ ID NO: 221174

SEQ ID NO: 395828 - DNA, 1000 bp, Homo Sapiens; identical to SEQ ID NO: 221175

SEQ ID NO: 395829 - DNA, 1000 bp, Homo Sapiens; identical to SEQ ID NO: 115823

SEQ ID NO: 395830 - DNA, 1000 bp, Homo Sapiens; identical to SEQ ID NO: 221176

SEQ ID NO: 395831 - DNA, 1000 bp, Homo Sapiens; identical to SEQ ID NO: 285560

SEQ ID NO: 395832 - DNA, 1000 bp, Homo Sapiens; identical to SEQ ID NO: 115824

SEQ ID NO: 395833 - DNA, 1000 bp, Homo Sapiens
acacctgcaccctagcttcgtgcttctctctccggactctcattatccaacccgctgcctccatttctctagatctgtgctctccgatgtggcagtcagtaaccataggtgactaaattaaactaaaataaaatagaatgaaacacaaaattcaattcctcggctgaactagccacatttcaactgctcagtagatacgtgtggttagtggctgccatactggacagctcggggcattttcactgtcaaagaaagttctattagacagccctgcttgagccctgtttcttcctggccttcggtttccctggggaacttatcgacaatgcaagctcctgggcccacccccagacctcctgaaccaaaagctccagggctggccgtatgatctgtgtggatggcaaactccccaggccattctgggacctaagtttaagaagtgccgtcctcgaactttctgactctaagctcctgagcgggagtcagacttagccctgagcctgcacttcctgttcaggtgcagacactgaacagggtctcaaacaccttcagcatgtgtgttgtgtgctcacgtgccacacagtgtctcatgcacacaacccagtgtacacaccacctacgtgcacacagcatccttccacactgtgtatgtgaacagcttgggccctgcaaacacaaccatctacacacatctacacccccaagcacacacacatggtccgtgccatgtcacctccatagggaaaggcttctctccaagtgtgccaggccaggacagccctcccagccatgaatccttactcagctacctcgggttggggtgggagccccagccaaatcctgggctccctgcctgtggctcagccccagctcccaaggcctgcctggctctgtctgaacagaaggtctgggggaagcgacgggtggagtacaataaagggaatgaggacaaacaaaaaaaaaaaaaaaaaaaaaaaaaaaaaaaaaaaaaaaaaaaaaa

SEQ ID NO: 395834 - DNA, 1000 bp, Homo Sapiens
atcatcaccaagatgattgttactgaaaatcagatgcaaggattctgcccagagagtgaggagaaataccgctgtgtatcagacagccagtgcgggcctgagcgcttgccaggtggggggatcctcactggccgctgcgtgaactacagctctgtgctccggacctgtgagatccagggctggtgccccacggaggtggacacagtggaaacgcccatcatgatggaagctgagaacttcactattttcatcaagaacagcatccgtttccccctcttcaactttgagaagggaaacctccttcccaacctgacagccagggacatgaagacctgccgcttccacccggacaaggaccctttctgccccatcttgcgggtaggggacgtggtcaagtttgcggggcaggattttgccaaactggcgcgcacggggggagttctgggcattaagatcggctgggtgtgcgacttggacaaggcctgggaccagtgcatccccaaatactccttcacccggctcgacagcgtttctgagaaaagcagcgtgtccccaggctacaacttcaggtttgccaagtactacaaaatggaaaatggcagtgagtaccgcaccctcctgaaggcttttggcatccgcttcgacgtgctggtatacgggaatgctggcaagttcaacatcatccccaccatcatcagctctgtggcggcctttacttctgtgggagtgggaactgttctctgtgacatcatcctgctcaacttcctcaagggggccgaccagtacaaagccaagaagtttgaggaggtgaatgagactacgctgaaaatcgcggctttgaccaacccagtgtaccccagcgaccagaccacagcggagaagcagtccaccgattcgggggccttctccataggccactagggcctctttccagggccccacactcacaaaggctccaggcctccccacagaggaccctgcctgagcaaggggcatggga

SEQ ID NO: 395835 - DNA, 1000 bp, Homo Sapiens; identical to SEQ ID NO: 115825

SEQ ID NO: 395836 - DNA, 1000 bp, Homo Sapiens
ctcctatgtgccctaccacatcatgcgggtgctcaacgtggatgctcggcggcgctggagcacccgctgcccgagctttgcagacatagcccaggccacagcagccctggagctggggccctacgtgggctaccaggtgatgcggggcctcatgcccctggccttctgtgtccaccctctactctacatggccgcagtgcccagcctgggctgctgctgccgacactgccccggctacagggacagctggaacccagaggacgccaagagcactggccaagccctgcccctcaatgccacagccgcccctaaaccgtcagagccccagtcccgtgagctgagccaatgatgtggcctagcggaagctgcctcctcaccctaggtgttgctggagaaccctgagggcagggcccgagccccgacacatcccttcccccaaaaagcaacacctgtgcttgcagccaggtcaggcccagctgcagcccaggcaggagcagtcgcctttcccacccacagcgctggccacagggctccctgcagggtcagggaccagaccacgcccagaggaggggaggcactggcccccgccacaggactggagacgcaagaacaaaaagaaccaagtagagagagtggagctgctttattgcccttggagcccgcgctctcggaggctgtcttctgtcgccaagggtcccggaccgagtacacagtggcagctggcttagttggtggacggcctggggtaggggagggtggcaggtataagacttctgggggcaccccaagaccccagacacccaagtggcatcttgggggtgggtgggcagaggacggggtaatgtgaggacgaagcgggcacggagccagatggccagtctccaggcctggtccacggactggcagggaccccaggcacaagagctgccacccctctgcccggttttggaaaaaaacaataaaggactgtcccctcaaaaccagccgggggactgttaaa

SEQ ID NO: 395837 - DNA, 1000 bp, Homo Sapiens; identical to SEQ ID NO: 285565

SEQ ID NO: 395838 - DNA, 1000 bp, Homo Sapiens; identical to SEQ ID NO: 285566

SEQ ID NO: 395839 - DNA, 1000 bp, Homo Sapiens; identical to SEQ ID NO: 221179

SEQ ID NO: 395840 - DNA, 1000 bp, Homo Sapiens; identical to SEQ ID NO: 115827

SEQ ID NO: 395841 - DNA, 1000 bp, Homo Sapiens; identical to SEQ ID NO: 221181

SEQ ID NO: 395842 - DNA, 1000 bp, Homo Sapiens; identical to SEQ ID NO: 115828

SEQ ID NO: 395843 - DNA, 1000 bp, Homo Sapiens; identical to SEQ ID NO: 221182

SEQ ID NO: 395844 - DNA, 1000 bp, Homo Sapiens; identical to SEQ ID NO: 285571

SEQ ID NO: 395845 - DNA, 1000 bp, Homo Sapiens; identical to SEQ ID NO: 285572

SEQ ID NO: 395846 - DNA, 1000 bp, Homo Sapiens; identical to SEQ ID NO: 221183

SEQ ID NO: 395847 - DNA, 1000 bp, Homo Sapiens; identical to SEQ ID NO: 285574

SEQ ID NO: 395848 - DNA, 1000 bp, Homo Sapiens; identical to SEQ ID NO: 285575

SEQ ID NO: 395849 - DNA, 1000 bp, Homo Sapiens; identical to SEQ ID NO: 285576

SEQ ID NO: 395850 - DNA, 1000 bp, Homo Sapiens; identical to SEQ ID NO: 115829

SEQ ID NO: 395851 - DNA, 1000 bp, Homo Sapiens; identical to SEQ ID NO: 285577

SEQ ID NO: 395852 - DNA, 1000 bp, Homo Sapiens; identical to SEQ ID NO: 115830

SEQ ID NO: 395853 - DNA, 1000 bp, Homo Sapiens; identical to SEQ ID NO: 285579

SEQ ID NO: 395854 - DNA, 1000 bp, Homo Sapiens; identical to SEQ ID NO: 221184

SEQ ID NO: 395855 - DNA, 1000 bp, Homo Sapiens
gggccactctgaccgctgctggagcccatcctgcagcgggcccaacgcacatccatcgcctcacccaccagcccagatgtcaaccttctgtaagagcacgtcactgcctcgggatcctctgcgcagggacaattactaccaggcccagctgcccaagacagtggggctgcagagcgtctatgagaaagtactgcacagagactatgacaggacagtcactctgctctcccctccccgtccagggaggctcccagacctgcaggagattggagtacccctctaccagtcccctcctggcaggtacctgtccccgaagaagggagccaatgaaaatgtgtaatcccatgctgcatgtcttcacacatatacaggtcactccgagaagcccctaagttattgaccggtttcagtgttgtatatataaatatgcaagatgtgccttacaatgaagttgttggaagctatttccaatcacattggtactgtttggtatttgcaaacaaaaatgtagttaatgtaatttttatgaaatgtgtgcagtatttaatttttcttatgctattgactttgatttcaattgcggcttgccattttcttagtgtttttaacctgtacattgtgtaatgtaatgtttgtatataatgaaattttgttatatttttatataataaaagctaaagtggaagttattgccaaaggaactgtctgtaagacaaaaaacaaaacatgttggaattacttaattgaaatttatctttcacctgaaacaacctagtgtttgagaaattttgccttgccaagtataacttgtatatcttgactctgtggtagatttcaagttcaatgttatttaattacatttggttttccgtaaaccgtgtcacttataagcacagtaataaaagatttgtcatgtgtttgaagaaaaaaaaaaaaaaaaaaaaaaaaaaaaaaaaaaaaaaaaaaaaaaaaaaaaaaaaaaaaaaaaaaaaaaaaaaaa

SEQ ID NO: 395856 - DNA, 1000 bp, Homo Sapiens; identical to SEQ ID NO: 285580

SEQ ID NO: 395857 - DNA, 1000 bp, Homo Sapiens; identical to SEQ ID NO: 285581

SEQ ID NO: 395858 - DNA, 1000 bp, Homo Sapiens; identical to SEQ ID NO: 285582

SEQ ID NO: 395859 - DNA, 1000 bp, Homo Sapiens
tgcacctctgaccacaccttggcaagtctttcccaagccattctttgtctgagcagcttgatggtttctccttgccccatttctgccccaccagatctttgctcctttccctttgaggactcccaccctttgggtctccaggatcctcatggaaggggaaggtgagacatctgagtgagcagagtgtggcatcttggaaacagtccttagttctgtgggaggactagaaacagccgcggcgaaggccccctgaggaccactactatactgatggtgggattgggacctgggggatacaggggccccaggaagaagctggccagaggggcagctcagtgctctgcagagaggggccctggggagaagcaggatgggattgatgggcaggagggatccccgcactgggagacaggcccaggtatgaatgagccagccatgcttcctcctgcctgtgtgacgctgggcgagtctcttcccctgtctgggccaaacagggagcgggtaagacaatccatgctctaagatccattttagatcaatgtctaaaatagctctatggctctgcggagtcccagcagaggctatggaatgtttctgcaaccctaaggcacagagagccaaccctgagtgtctcagaggccccctgagtgttccccttggcctgagccccttacccattcctgcagccagtgagagacctggcctcagcctggcagcgctctcttcaaggccatatccacctgtgccctggggcttgggagaccccataggccgggactcttgggtcagcccgccactggcttctctctttttctccgtttcattctgtgtgcgttgtggggtgggggagggggtccacctgccttacctttctgagttgcctttagagagatgcgtttttctaggactctgtgcaactgtcgtatatggtcccgtgggctgaccgctttgtacatgagaataaatctatttctttctaccaaaaaaaaaaaaaaaaaaa

SEQ ID NO: 395860 - DNA, 1000 bp, Homo Sapiens; identical to SEQ ID NO: 115831

SEQ ID NO: 395861 - DNA, 1000 bp, Homo Sapiens
gggtgtggccagcacaccaagtggctgggtgccctctcaggtgggttagagatggagtttgctgttgaggtggtgtagatggtgacctgggtatcccctgcctcctgccaccccttcctccccatactccactctgattcacctcttcctctggttcctttcatctctctacctccaccctgcattttcctcttgtcctggcccttcagtctgctccaccaaggggctcttgaaccccttattaaggccccagatgaccccagtcactcctctctagggcagaagactagaggccagggcagcaagggacctgctcatcatattccaacccagccacgactgccatgtaaggttgtgcagggtgtgtactgcacaaggacattgtatgcagggagcactgttcacatcatagataaagctgatttgtatatttattatgacaatttctggcagatgtaggtaaagaggaaaaggatccttttcctaattcacacaaagactccttgtggactggctgtgcccctgatgcagcctgtggctggagtggccaaataggagggagactgtggtaggggcagggaggcaacactgctgtccacatgacctccatttcccaaagtcctctgctccagcaactgcccttccaggtgggtgtgggacacctgggagaaggtctccaagggagggtgcagccctcttgcccgcacccctccctgcttgcacacttccccatctttgatccttctgagctccacctctggtggctcctcctaggaaaccagctcgtgggctgggaatgggggagagaagggaaaagatccccaagaccccctggggtgggatctgagctcccacctcccttcccacctactgcactttcccccttcccgccttccaaaacctgcttccttcagtttgtaaagtcggtgattatatttttgggggctttccttttattttttaaatgtaaaatttatttatattccgtatttaaagttgt

SEQ ID NO: 395862 - DNA, 1000 bp, Homo Sapiens; identical to SEQ ID NO: 285589

SEQ ID NO: 395863 - DNA, 1000 bp, Homo Sapiens; identical to SEQ ID NO: 285590

SEQ ID NO: 395864 - DNA, 1000 bp, Homo Sapiens; identical to SEQ ID NO: 221187

SEQ ID NO: 395865 - DNA, 1000 bp, Homo Sapiens; identical to SEQ ID NO: 285594

SEQ ID NO: 395866 - DNA, 1000 bp, Homo Sapiens
aagtcctacctggagcgaagcgttaaggaagctgaggacaacatccgggagatgctgatggcacgaagggcccagtagggagcctctctgggaagctcttcctcctgcccctcccattcctggtgggggcagaggagtgtctgcagggaaacagcttctcctctgccccgatggatgctttatttggatggcctggcaacatcacattttctgcatcaccctgagccccatttgcttcccagccctggagtttttacccggctttgcctgccacctctgcccaggacactcttccctctcgggatgtgtgatgaactcccaggagagggaagatgggagccagggcaagataggaagctctgcctgagctttccactaggcacgccagccagaccaataaaaagcgtctgtcccactctgctaagcctggttttcttgagcagagggatggaacagagggtgagagaggcagtggccgtctccacctcagctcctgctccctctgcatcagagcccttcctttcttgggggatgggccttgccctcttctcttttcccttcctgtacctttgactaacgctcagcttccgggcctgcatgcagtagacagaagaggaagaaagaacagatgttcacagctgaatctcagtgaacagaatagcagtccctggatggcagtctgcctaaagattcctttccctgccttctcccatacattccaaaaggaagttcaacagtaagcagcacctccaagactgtctccttttggccaatatcataagatggacgccataatcctgaggcctcctagaggctgagggggcaacggtgtgatccagctggctcatcccagcccaggtgggccaattattcaattttcaagaattttgttgcaagccagttgtcaaacacagccattataattatgtaaatttgcaaattatgttaaaaacaaggacaataaatattcaaaatgcatccctaaaaaaaaaaaaaaaaa

SEQ ID NO: 395867 - DNA, 661 bp, Homo Sapiens
agagacttcctcttcgttaagtcggccttcccaacatggcgcagtctattaacatcacggagctgaatctgccgcagctagaaatgctcaagaaccagctggaccaggaagtggagttcttgtccacgtccattgctcagctcaaagtggtacagaccaagtatgtggaagccaaggactgtctgaacgtgctgaacaagagcaacgaggggaaagaattactcgtcccactgacgagttctatgtatgtccctgggaagctgcatgatgtggaacacgtgctcatcgatgtgggaactgggtactatgtagagaagacagctgaggatgccaaggacttcttcaagaggaagatagattttctaaccaagcagatggagaaaatccaaccagctcttcaggagaagcacgccatgaaacaggccgtcatggaaatgatgagtcagaagattcagcagctcacagccctgggggcagctcaggctactgctaaggcctgagagtttttgcagaaatggggcagagggacaccctttgggcgtggcttcctggtgatgggaagggtcttgtgttttaatgccaataaatgtgccagctgggcagaaaaaaaaaaaaaaaaaaaaaaaaaaaaaaaaaaaaaaaaaaaaaaaaaaaaaaaaaa

SEQ ID NO: 395868 - DNA, 1000 bp, Homo Sapiens
ccatggaagctgtggctgcccagggcaaggccaagaagtgaaggccggcggggaggatactgtccccaggagcaccctccctgcccgtcttgtccctctgcccctcccacctgcacatgtcacactgaccacatctgtagacatcttgagttgtagctgcagacggggaccagtggctcccattttcattttagccattttgtcgcctgcacccactcccttcatacaatctagtcagaatagcagttctagagcacaggttctcagtctaagctatggaaaagctccccttatccaacagagtttaaaagtagtgacttgggtttttgcgagtgctttgtttactaaggactttggggaggaaccatgctaagccatgaccagtgaggagaagcaacagagcctgtctgtccccatgagcggagtctgtcctctgctcttctgcagtcaggtcactgcctactgcctgggggctctagtcattccagtggaagacgaatgtaacctgcgtggtgatgtgacaactgtttcctccctgaccccagaggatctggctctaggttgggatcaatcctgaatttcgttatgtgttaatttacttttattaaaaaagtatagtatatataatacaaaacaataacccttctggggtttcttgtggcggttgaaatagtcccacatgtggtcatcagaaaataagccattcctcataccaatataggatcagctccttgacctctgaggggcaggagtgcttcctggtgtgtgtattagaatcccttcctgccttgtttcatggcagtgaaatgcctcttggtcctgtccaagtgtatctttcactgatttctgaatcatgttctagttgcttgaccctgccacatgggtccagtgttcatctgagcataactgtactaaatcctttttccatatcagtataataaaggagtgatgtgcaataaaaaaaaaaaaaaaaaaaaaaaaaaaaaaaaaaaaaaaaaaa

SEQ ID NO: 395869 - DNA, 1000 bp, Homo Sapiens; identical to SEQ ID NO: 115834

SEQ ID NO: 395870 - DNA, 1000 bp, Homo Sapiens
aagctgtctttgctcggtgcttatcatctctgaaggatgagagaattcaagctagcaaaaagctgaagggtccccagaagttccagtttgatggtgataagaaatcattcctggaggacattcggaaggcactctacgcttccaagatcatctcttacgctcaaggctttatgctgctaaggcaggcagccaccgagtttggctggactctcaattatggtggcatcgccctgatgtggagagggggctgcatcattagaagtgtattcctaggaaagataaaggatgcatttgatcgaaacccggaacttcagaacctcctactggacgacttctttaagtcagctgttgaaaactgccaggactcctggcggcgggcagtcagcactggggtccaggctggcattcccatgccctgttttaccactgccctctccttctatgacgggtacagacatgagatgcttccagccagcctcatccaggctcagcgggattacttcggggctcacacctatgaactcttggccaaaccagggcagtttatccacaccaactggacaggccatggtggcaccgtgtcatcctcgtcatacaatgcctgatcatgctgctcctgtcaccctccacgattccacagaccaggacattccatgtgcctcatggcactgccacctggccctttgccctattttctgttcagttttttaaaagtgttgtaagagactcctgaggaagacacacagtttatttgtaaagtagctctgtgagagccaccatgccctctgcccttgcctcttgggactgaccaggagctgctcatgtgcgtgagagtgggaaccatctccttgcggcagtggcttccgcgtgccccgtgtgctggtgcggttcccatcacgcagacaggaagggtgtttgcgcactctgatcaactggaacctctgtatcatgcggctgaattccctttttcctttactcaataaaagctacatcacactga

SEQ ID NO: 395871 - DNA, 1000 bp, Homo Sapiens; identical to SEQ ID NO: 221190

SEQ ID NO: 395872 - DNA, 1000 bp, Homo Sapiens; identical to SEQ ID NO: 115835

SEQ ID NO: 395873 - DNA, 1000 bp, Homo Sapiens; identical to SEQ ID NO: 221191

SEQ ID NO: 395874 - DNA, 1000 bp, Homo Sapiens; identical to SEQ ID NO: 221192

SEQ ID NO: 395875 - DNA, 623 bp, Homo Sapiens; identical to SEQ ID NO: 221193

SEQ ID NO: 395876 - DNA, 1000 bp, Homo Sapiens; identical to SEQ ID NO: 115836

SEQ ID NO: 395877 - DNA, 1000 bp, Homo Sapiens; identical to SEQ ID NO: 115838

SEQ ID NO: 395878 - DNA, 1000 bp, Homo Sapiens; identical to SEQ ID NO: 221195

SEQ ID NO: 395879 - DNA, 1000 bp, Homo Sapiens; identical to SEQ ID NO: 285606

SEQ ID NO: 395880 - DNA, 1000 bp, Homo Sapiens; identical to SEQ ID NO: 285607

SEQ ID NO: 395881 - DNA, 1000 bp, Homo Sapiens; identical to SEQ ID NO: 285608

SEQ ID NO: 395882 - DNA, 1000 bp, Homo Sapiens; identical to SEQ ID NO: 221196

SEQ ID NO: 395883 - DNA, 1000 bp, Homo Sapiens; identical to SEQ ID NO: 115839

SEQ ID NO: 395884 - DNA, 591 bp, Homo Sapiens; identical to SEQ ID NO: 115840

SEQ ID NO: 395885 - DNA, 1000 bp, Homo Sapiens; identical to SEQ ID NO: 221197

SEQ ID NO: 395886 - DNA, 1000 bp, Homo Sapiens
cgtgggtgccgtggaggcctccttcaagtgctgcagtggggccataatcgtcctcaccaagtctggcaggtctgctcaccaggtggccagataccgcccacgtgcccccatcattgctgtgacccggaatccccagacagctcgtcaggcccacctgtaccgtggcatcttccctgtgctgtgcaaggacccagtccaggaggcctgggctgaggacgtggacctccgggtgaactttgccatgaatgttggcaaggcccgaggcttcttcaagaagggagatgtggtcattgtgctgaccggatggcgccctggctccggcttcaccaacaccatgcgtgttgttcctgtgccgtgatggaccccagagcccctcctccagcccctgtcccacccccttcccccagcccatccattaggccagcaacgcttgtagaactcactctgggctgtaacgtggcactggtaggttgggacaccagggaagaagatcaacgcctcactgaaacatggctgtgtttgcagcctgctctagtgggacagcccagagcctggctgcccatcatgtggccccacccaatcaagggaagaaggaggaatgctggactggaggcccctggagccagatggcaagagggtgacagcttcctttcctgtgtgtactctgtccagttcctttagaaaaaatggatgcccagaggactcccaaccctggcttggggtcaagaaacagccagcaagagttaggggccttagggcactgggctgttgttccattgaagccgactctggccctggcccttacttgcttctctagctctctaggcctctccagtttgcacctgtccccaccctccactcagctgtcctgcagcaaacactccaccctccaccttccattttcccccactactgcagcacctccaggcctgttgctatagagcctacctgtatgtcaataaacaacagctgaagcaccaaaaaaaaaaaaaaaaaaaaa

SEQ ID NO: 395887 - DNA, 1000 bp, Homo Sapiens; identical to SEQ ID NO: 221198

SEQ ID NO: 395888 - DNA, 1000 bp, Homo Sapiens; identical to SEQ ID NO: 115842

SEQ ID NO: 395889 - DNA, 1000 bp, Homo Sapiens; identical to SEQ ID NO: 115843

SEQ ID NO: 395890 - DNA, 1000 bp, Homo Sapiens; identical to SEQ ID NO: 221201

SEQ ID NO: 395891 - DNA, 1000 bp, Homo Sapiens; identical to SEQ ID NO: 221202

SEQ ID NO: 395892 - DNA, 1000 bp, Homo Sapiens; identical to SEQ ID NO: 285616

SEQ ID NO: 395893 - DNA, 1000 bp, Homo Sapiens; identical to SEQ ID NO: 115844

SEQ ID NO: 395894 - DNA, 1000 bp, Homo Sapiens; identical to SEQ ID NO: 285617

SEQ ID NO: 395895 - DNA, 1000 bp, Homo Sapiens; identical to SEQ ID NO: 285618

SEQ ID NO: 395896 - DNA, 1000 bp, Homo Sapiens; identical to SEQ ID NO: 285621

SEQ ID NO: 395897 - DNA, 1000 bp, Homo Sapiens; identical to SEQ ID NO: 115846

SEQ ID NO: 395898 - DNA, 1000 bp, Homo Sapiens
cattgagaagtttgattatgtgtttgccgagaacgggacggtgcagtataagcacggacgactgctctccaagcagaccatccagaaccacctgggggaggagctgctgcaggacttgatcaacttctgcctcagctacatggccctgctcaggctgcccaagaagcgtggaaccttcatcgagttccggaatggcatgctgaacatctcgcccatcggccggagctgcaccctggaggagaggatcgagttctccgaactggacaagaaagagaagatccgggagaagttcgtggaagacctgaaaacagagtttgctggcaaagggctgaggttctctcgaggaggcatgatcagctttgacgtcttccccgagggctgggacaagcgctactgcctggatagcctggaccaggacagcttcgacaccatccacttctttgggaacgagactagccctggtgggaacgactttgagatctttgccgacccccggactgttggccacagcgtggtgtctcctcaggacacggtgcagcgatgccgggagattttcttcccagagacagctcatgaggcgtgaccggggcccacatctgtgtgtcgtgacttctgaagagtttggcctaggcctaaagagaggtcctggtgttggatagatgccagggcccctcctctggcccaggacgcctgctgcaagcccacccagatggggccagagtctgtgtggacaaccgtccccagccagtctgctcctagtggcactggcttcgtcctcccagggcccagagtgttccccatgctccacctggtgccccaggccacagctgctgcttgtatttcggtacagaagaggtttctttctgcaccaggaggaggcgtgctcaagtatcggtacgagatctagcctgccctgcctgcctgccctgggcgatgaggtacggtggggaaggtgcctattttagagaactttgtcacagtattaaagttccctcgtgcc

SEQ ID NO: 395899 - DNA, 1000 bp, Homo Sapiens; identical to SEQ ID NO: 285624

SEQ ID NO: 395900 - DNA, 1000 bp, Homo Sapiens; identical to SEQ ID NO: 221205

SEQ ID NO: 395901 - DNA, 1000 bp, Homo Sapiens; identical to SEQ ID NO: 285625

SEQ ID NO: 395902 - DNA, 1000 bp, Homo Sapiens
gtcattagctgttttacagccaacaccccaagttactcaggagcaagggcatttactacctgagaggaaggattttcctgtagagtctgtaaaactcactgaggtaccagtagagccagtcttgacagtacatccagagagcaagagcaaaaccaaaactaggagcagaagtagaggtcgagctagaaataaaacaagcaagagtagaagtcgaagcagtagcagtagcagttctagtagcagttcaaccagtagcagcagtggaagtagttccagcagtggaagtagtagcagtcgcagtagttccagtagcagctccagtacaagtggcagcagcagcagagatagtagcagtagcactagtagtagtagtgagagtagaagtcggagtaggggccggggacataatagagatagaaagcacagaaggagcgtggatcggaagagaagggatacttcaggactagaaagaagtcacaaatcttcaaaaggtggtagtagtagagatacaaaaggatcaaaggataagaattcccggtccgacagaaagaggtctatatcagagagtagtcgatcaggcaaaagatcttcaagaagtgaaagagaccgaaaatcagacaggaaagacaaaaggcgttaatggaagaagccaggctttcttagccattctttgcagcagaagatttcttgataaaaaaggattacctttccttgtaaagaggatgctgccttaagaattgcatgttgtaaaaaatctttttggaaaatacagactgtttgtttaccagacattcttgtactttttgcataattttgtaagagttatttatcaaaattatgtgaggttccaaaatatgtaaaaatgataataataaaaaaagattaacatcccttgtcatcttttttaaatatcctatactcttcagtaagaatctgtatattttaataggcaaatctttaagtctgttcccttctaattctgtatcatacattgcttttg

SEQ ID NO: 395903 - DNA, 1000 bp, Homo Sapiens; identical to SEQ ID NO: 285627

SEQ ID NO: 395904 - DNA, 1000 bp, Homo Sapiens
ctacttcccatacctgcttatcagcaagaagcgctacgcgggcctgctcttctcctcccggcccgacgcccacgaccgcatggactgcaagggcctggaggccgtgcgcagggacaactgccccctcgtggccaacctggtcactgcctcactgcgccgcctgctcatcgaccgagaccctgagggcgcggtggctcacgcacaggacgtcatctcggacctgctgtgcaaccgcatcgatatctcccagctggtcatcaccaaggagctgacccgcgcggcctccgactatgccggcaagcaggcccacgtggagctggccgagaggatgaggaagcgggaccccgggagtgcgcccagcctgggcgaccgcgtcccctacgtgatcatcagtgccgccaagggtgtggccgcctacatgaagtcggaggacccgctgttcgtgctggagcacagcctgcccattgacacgcagtactacctggagcagcagctggccaagcccctcctgcgcatcttcgagcccatcctgggcgagggccgtgccgaggctgtgctactgcggggggaccacacgcgctgcaagacggtgctcacgggcaaggtgggcggcctcctggccttcgccaaacgccgcaactgctgcattggctgccgcacagtgctcagccaccagggagccgtgtgtgagttctgccagccccgggagtctgagctgtatcagaaggaggtatcccatctgaatgccctggaggagcgcttctcgcgcctctggacgcagtgccagcgctgccagggcagcctgcacgaggacgtcatctgcaccagccgggactgccccatcttctacatgcgcaagaaggtgcggaaggacctggaagaccaggagcagctcctgcggcgcttcggaccccctggacctgaggcctggtgaccttgcaagcatcccatggggcgggggcgggaccagggagaattaataaagttctggacttttgct

SEQ ID NO: 395905 - DNA, 1000 bp, Homo Sapiens; identical to SEQ ID NO: 115847

SEQ ID NO: 395906 - DNA, 1000 bp, Homo Sapiens; identical to SEQ ID NO: 285630

SEQ ID NO: 395907 - DNA, 828 bp, Homo Sapiens; identical to SEQ ID NO: 285631

SEQ ID NO: 395908 - DNA, 1000 bp, Homo Sapiens; identical to SEQ ID NO: 221207

SEQ ID NO: 395909 - DNA, 1000 bp, Homo Sapiens; identical to SEQ ID NO: 285633

SEQ ID NO: 395910 - DNA, 1000 bp, Homo Sapiens
tgccatgacagcacctgtcattttgccacgtgcagctgtgctcaccccaggtcatcagactccaccgtgtgcatgtgcatcaatgtccctcttttctcccacacatctcacatcatggggaggccagagggggccacacgagagctccaggctctgggctggtcactccgaagaagaggatttgtgacgtcacttagagaagcaccttgctagcatggtttctgaagggtgaattctggtggggaaccagaaactccctgtctttggggcagggctaaagcagctcctaaggatcactggccattagctcttgcttttgatggcattctctttccaccttgtcttctcctttgctcctctgtgttagtgtggcaggtatgacaactcatccagtggaaacacagcctcacactgcccttccgccccccacactttgcctgcaggtgcaccgaaaggacctgggagataaaattcaaaaaagtgtgatgtgctgctcagaaggtcagactccatgtctgccttgacctcaaggtcagaaggttcccaaacccctggggctggaacatgggatctcctcttccacctcttcctggttcctttgcggggaaaattgcactaaaacagaaccttttcttaatccatgttggaaggaagcaacagtgaactctacctgttctggagttctcctgggtctgcagaaggttgggaatttagaaaataaggctgttctttcatattttaatttaatctctgtcaatggccatccctcccacaaaaaaacgtgggttaagagaacttgcagactggatatgcaagcaaacgggcaactctggagaaaaataaggaaaggaatgctgactttctctttctttctcttgtccccacacccattcccaacccaatactggggccttctcaaaaggagcaaattaaacaataaaccagacagcaaggccctgggggaaaggacaacatcctgaaataaatgatggagcccagg

SEQ ID NO: 395911 - DNA, 1000 bp, Homo Sapiens; identical to SEQ ID NO: 115848

SEQ ID NO: 395912 - DNA, 1000 bp, Homo Sapiens; identical to SEQ ID NO: 285636

SEQ ID NO: 395913 - DNA, 1000 bp, Homo Sapiens; identical to SEQ ID NO: 284862

SEQ ID NO: 395914 - DNA, 1000 bp, Homo Sapiens; identical to SEQ ID NO: 285638

SEQ ID NO: 395915 - DNA, 1000 bp, Homo Sapiens; identical to SEQ ID NO: 285640

SEQ ID NO: 395916 - DNA, 1000 bp, Homo Sapiens
ctcgtgaatacaatttaacttccatttagctatagctttactcagcatgactgtagataaggatagcagcaaacaatcattggagcttaatgaacatttttaaaaataattaccaaggcctcccttctacttgtgagttttgaaattgttctttttattttcagggataccgtttaatttaattatatgatttgtctgcactcagtttattccctactcaaatctcagccccatgttgttctttgttattgtcagaacctggtgagttgttttgaacagaactgttttttccccttcctgtaagacgatgtgactgcacaagagcactgcagtgtttttcataataaacttgtgaactaagaactgagaaggtcaaattttaattgtatcaatgggcaagactggtgctgtttattaaaaaagttaaatcaattgagtaaattttagaatttgtagacttgtaggtaaaataaaaatcaagggcactacataacctctctggtaactccttgacattcttcagattaacttcaggatttatttgtatttcacatattacaatttgtcacattgttggtgtgcactttgtgggttcttcctgcatattaacttgtttgtaagaaaggaaatctgtgctgcttcagtaagacttaattgtaaaaccatataacttgagatttaagtctttgggttttgttttaataaaacagcatgttttcaggtagagcttaaactaaatgatgtgtttacttagtgcagtttctggttatgaatattatattgctatgtgtatattatatggactctttaaaatgattgacagattggcaaattcttaaatctttgtacattgttgagtcatatgttcttagagttaaatttgtctcagataagaaagtgttaaagcattagcctgtgtcaagttctttgagtgatactagtgaaaccaaatagaaaactattgttggatcatgatttagtcttatgtacattcacccga

SEQ ID NO: 395917 - DNA, 1000 bp, Homo Sapiens; identical to SEQ ID NO: 115851

SEQ ID NO: 395918 - DNA, 1000 bp, Homo Sapiens; identical to SEQ ID NO: 115852

SEQ ID NO: 395919 - DNA, 944 bp, Homo Sapiens; identical to SEQ ID NO: 115855

SEQ ID NO: 395920 - DNA, 1000 bp, Homo Sapiens; identical to SEQ ID NO: 119067

SEQ ID NO: 395921 - DNA, 1000 bp, Homo Sapiens; identical to SEQ ID NO: 115856

SEQ ID NO: 395922 - DNA, 1000 bp, Homo Sapiens; identical to SEQ ID NO: 285650

SEQ ID NO: 395923 - DNA, 1000 bp, Homo Sapiens; identical to SEQ ID NO: 115857

SEQ ID NO: 395924 - DNA, 1000 bp, Homo Sapiens; identical to SEQ ID NO: 115858

SEQ ID NO: 395925 - DNA, 1000 bp, Homo Sapiens; identical to SEQ ID NO: 285652

SEQ ID NO: 395926 - DNA, 1000 bp, Homo Sapiens; identical to SEQ ID NO: 115859

SEQ ID NO: 395927 - DNA, 1000 bp, Homo Sapiens; identical to SEQ ID NO: 285656

SEQ ID NO: 395928 - DNA, 1000 bp, Homo Sapiens; identical to SEQ ID NO: 115860

SEQ ID NO: 395929 - DNA, 1000 bp, Homo Sapiens; identical to SEQ ID NO: 119143

SEQ ID NO: 395930 - DNA, 1000 bp, Homo Sapiens
cccttggctacaggactatcagacctggttagatttgcgagagctggaatgcaaaatcggggagcgctacatcacccatgaaagtgatgacctgaggtgggagaagtatgcaggcgagcagcggctgcagtaccccacacacctgatcaatccaagtgctagccacagtgacactcctgagactgaagaaacagaaatgaaagccctcggtgagcgtgtcagcatcctctgagttccatctcctataatctgtcaaaacactgtggaactaataaatacatacggtcaggtttaacatttgccttgcagaactgccattattttctgtcagatgagaacaaagctgttaaactgttagcactgttgatgtatctgagttgccaagacaaatcaacagaagcatttgtattttgtgtgaccaactgtgttgtattaacaaaagttccctgaaacacgaaacttgttattgtgaatgattcatgttatatttaatgcattaaacctgtctccactgtgcctttgcaaatcagtgtttttcttactggagcttcattttggtaagagacagaatgtatctgtgaagtagttctgtttggtgtgtcccattggtgttgtcattgtaaacaaactcttgaagagtcgattatttccagtgttctatgaacaactccaaaacccatgtgggaaaaaaatgaatgaggagggtagggaataaaatcctaagacacaaatgcatgaacaagttttaatgtatagttttgaatcctttgcctgcctggtgtgcctcagtatatttaaactcaagacaatgcacctagctgtgcaagacctagtgctcttaagcctaaatgccttagaaatgtaaactgccatatataacagatacatttccctctttcttataatactctgttgtactatggaaaatcagctgctcagcaacctttcacctttgtgtatttttcaataataaaaaatattcttgtcaaaaaaaaaaaaa

SEQ ID NO: 395931 - DNA, 1000 bp, Homo Sapiens; identical to SEQ ID NO: 115861

SEQ ID NO: 395932 - DNA, 1000 bp, Homo Sapiens; identical to SEQ ID NO: 115862

SEQ ID NO: 395933 - DNA, 1000 bp, Homo Sapiens; identical to SEQ ID NO: 285662

SEQ ID NO: 395934 - DNA, 1000 bp, Homo Sapiens
agatgctgtgtggaatcaagcaccttcattctgctggaattattcatcgggacttaaagcccagtaatatagtagtaaaatctgattgcactttgaagattcttgacttcggtctggccaggactgcaggaacgagttttatgatgacgccttatgtagtgactcgctactacagagcacccgaggtcatccttggcatgggctacaaggaaaacgtggatttatggtctgtggggtgcattatgggagaaatggtttgccacaaaatcctctttccaggaagggactatattgatcagtggaataaagttattgaacagcttggaacaccatgtcctgaattcatgaagaaactgcaaccaacagtaaggacttacgttgaaaacagacctaaatatgctggatatagctttgagaaactcttccctgatgtccttttcccagctgactcagaacacaacaaacttaaagccagtcaggcaagggatttgttatccaaaatgctggtaatagatgcatctaaaaggatctctgtagatgaagctctccaacacccgtacatcaatgtctggtatgatccttctgaagcagaagctccaccaccaaagatccctgacaagcagttagatgaaagggaacacacaatagaagagtggaaagaattgatatataaggaagttatggacttggaggagagaaccaagaatggagttatacgggggcagccctctcctttagcacaggtgcagcagtgatcaatggctctcagcatccatcatcatcgtcgtctgtcaatgatgtgtcttcaatgtcaacagatccgactttggcctctgatacagacagcagtctagaagcagcagctgggcctctgggctgctgtagatgactacttgggccatcggggggtgggagggatggggagtcggttagtcattgatagaactactttgaaaacaattcagtggtcttatttttgggtgatttttcaaaaaatgta

SEQ ID NO: 395935 - DNA, 1000 bp, Homo Sapiens; identical to SEQ ID NO: 115864

SEQ ID NO: 395936 - DNA, 1000 bp, Homo Sapiens; identical to SEQ ID NO: 221216

SEQ ID NO: 395937 - DNA, 1000 bp, Homo Sapiens; identical to SEQ ID NO: 285667

SEQ ID NO: 395938 - DNA, 683 bp, Homo Sapiens
agaccagaccaacagtaacaccaagggcaggtgggcaggcctccgccctcctcccctactccagggcccactgcagcctcagcccaggagccaccagatctcccaacaccatggtccgataccgcgtgaggagcctgagcgaacgctcgcacgaggtgtacaggcagcagttgcatgggcaagagcaaggacaccacggccaagaggagcaagggctgagcccggagcacgtcgaggtctacgagaggacccatggccagtctcactataggcgcagacactgctctcgaaggaggctgcaccggatccacaggcggcagcatcgctcctgcagaaggcgcaaaagacgctcctgcaggcaccggaggaggcatcgcagaggctgcagaaccaggaagagaacatgcagaaggcactaagcttcctgggcccctcacccccagctggaaattaagaaaaagtcgcccgaaacaccaagtgaggccatagcaattcccctacatcaaatgctcaagcccccagctggaagttaagagaaagtcacctgcccaagaaacaccgagtgaggccatagcaactcccctacatcaaatgctcaagccctgagttgccgccgagaagcccacaagatctgagtgaaacgagcaaaagtcacctgcccaataaagcttgacaagacactc

SEQ ID NO: 395939 - DNA, 1000 bp, Homo Sapiens; identical to SEQ ID NO: 221218

SEQ ID NO: 395940 - DNA, 1000 bp, Homo Sapiens; identical to SEQ ID NO: 285669

SEQ ID NO: 395941 - DNA, 1000 bp, Homo Sapiens
accttggaaaatttataattataataccatggattttgaattttccttttttttttttttttttggataactcagtttcagataaaccatcttggttactgtgcttaatttggaccaaattttatttagcttaatatggacactgacacattttggggggtatacattagacatatcagagcagtgtatttctggatcattttttaaatgacctcttctaaaacataactgtcacttacctgaaatgctgcatcctaaaattccaaaattatattgagcaatcgccaaggcctaaagccaactgacttaaaggtaatcatttcagctaagattaaatttaaagcctaagaatgtatagagctagttttaaaataatgatctcagatttttaaaaaggatataggaacctgcattgtcattctctgaattaagaactgatggtttctatcattatttagccccacctttgtattttaaaatccttcagaatacatttatgaaccaatgcgactggacttagccacacacaatggaaattcagaccttgactatttggtgtttccagttcacaaaggtgatgaagactgtcttgggagcagcttaatcccaaaatttgtacatttcttgctgctcctggcgtggaaacttaagtgagaccaccaaatacattggtcctgtccaattctactgaatgggggtggacctggcatttatctggccaaaaacaggagccagagaaatatgaatataccaaagttgtttgtttagcctccaacttaaattacattagtcaacttatagatactcatatgatcacttttctttttagatactacatcaactagattcaggagtatatcatttgcagtgcttgtattggtttaaaatgtaagattttaagatcctctaacactgtactaaaacatttcaataaaatcattctgactgcgttaaaaaaaaaaaaaaaaaaaaaaaaaaaaaaaacaaaaaaaaaaaaaaa

SEQ ID NO: 395942 - DNA, 1000 bp, Homo Sapiens
gtccatggggacagaaccgtcactcagatccacattcaagtgtgcccaccctgcagtcttcatcctcactcagctgctgcctctggaggtgcctttggccacatgtgctgtgctgtttgtctcctcgacagggagcctgtccaccagcaggctgcggtcccagcgggtgcgtctgcagctcctccccttgggcaggctggttctcccggaggacctttccttggggccctgcttcatgacgatgctgcctgtgtcaccctctaccatctgtaaacaactgggtgccttccccgaccacaccccaatgccttcccagcttggaagccaaggcagctgatgaagggagctcaggagagccgtcttcagctgggctggggttggggctgctgtgaggaaaacctgccattgtggccctggagagtcaccagcagctcttgggaaggacttgctgggaggctgagagaggctttgggcacagcctgctgtcttttccatttcctaaagtttacttcattgtcttgaggcttccaggttttgtttttgtttttgccaaagtagaaaaggcaggtggtgggcggctggcagggagtgcgggtccccgcccctcttcagtcctgccctcccctcctcagtcctgcccaccccgtgcagcccatgctgaggctgcagtggtgtcgtgggtgttacgtgcaggaacgtggagaccctgacgtgggctcactgcatttggttttcttttcagaacttgggagcccccagggaggggctagtgttggtaggtcctagacgtggttccctccagcctccccaaaatcaaccctggtgttgagagaacgtccttctgtccatcgtgggtaacagccttggggagggtgcagagctctgcagagccatgggccaggtggggctgcctcagtcctgtccccttgggcactgaggagaggggcccattcacctttctcctagaatgctgttgtaaataaacaaatggatccctgga

SEQ ID NO: 395943 - DNA, 800 bp, Homo Sapiens
accaccatgaatccactcctgatccttacctttgtggcagctgctcttgctgccccctttgatgatgatgacaagatcgttgggggctacaactgtgaggagaattctgtcccctaccaggtgtccctgaattctggctaccacttctgtggtggctccctcatcaacgaacagtgggtggtatcagcaggccactgctacaagtcccgcatccaggtgagactgggagagcacaacatcgaagtcctggaggggaatgagcagttcatcaatgcagccaagatcatccgccacccccaatacgacaggaagactctgaacaatgacatcatgttaatcaagctctcctcacgtgcagtaatcaacgcccgcgtgtccaccatctctctgcccaccgcccctccagccactggcacgaagtgcctcatctctggctggggcaacactgcgagctctggcgccgactacccagacgagctgcagtgcctggacgctcctgtgctgagccaggctaagtgtgaagcctcctaccctggaaagattaccagcaacatgttctgtgtgggcttccttgagggaggcaaggattcatgtcagggtgattctggtggccctgtggtctgcaatggacagctccaaggagttgtctcctggggtgatggctgtgcccagaagaacaagcctggagtctacaccaaggtctacaactatgtgaaatggattaagaacaccatagctgccaatagctaaagcccccagtatctcttcagtctctataccaataaagtgaccctgttctc

SEQ ID NO: 395944 - DNA, 1000 bp, Homo Sapiens; identical to SEQ ID NO: 221219

SEQ ID NO: 395945 - DNA, 1000 bp, Homo Sapiens; identical to SEQ ID NO: 115868

SEQ ID NO: 395946 - DNA, 1000 bp, Homo Sapiens; identical to SEQ ID NO: 115869

SEQ ID NO: 395947 - DNA, 1000 bp, Homo Sapiens; identical to SEQ ID NO: 115870

SEQ ID NO: 395948 - DNA, 1000 bp, Homo Sapiens; identical to SEQ ID NO: 115871

SEQ ID NO: 395949 - DNA, 1000 bp, Homo Sapiens; identical to SEQ ID NO: 285676

SEQ ID NO: 395950 - DNA, 1000 bp, Homo Sapiens
tcagccgccctctcctgcccagcgctgccacccgcctctcccaggaggagcaggtgcggacccacgaggccaagctgaaggccatggcaagtgagctgcgggagcaccgggccgcccagctgggcaagaagggccggggcaaggaggctgaagagcagcggcagaaggaggcctacctggagtttgagaaatcccgctacagcacctatgcagcgctgcttcgggtcaagctgaaggcaggcagtgaggagctggatgcagtggaggcagcactggcccaggccgggagcacagaggatggactccctccttctcactccagtccctccctgcagcccaaaccctccagccagccccgggctcagcgtcacagctcagagcctcggccaggggcaggcagtgggcggcggaagccctgagatgaggtttagggtggggagtgcctgctgggcacctgaaggatgacatggccctgcctgagcccgggccggcctcgggccacccacgagggcctcccggcctagggcccgaccgcgccggacgcggtgtccggggcagggcagggctggggcctgggcctcaggagcctaggctaggggcacctccgagagcccctttttgtgataatgttttgcactttttcgtacagggtgggcgggggcgggaggggctagcgcccctgaacttttgatgctttttttttgtgtgggagaggcctgatgccgtttctgctttctgctgagaccacccccaccctgacaccatcagtccccctctgtcctggggcctggcttggacagagaccaggatttggggctgagctggtttcccctccttcctccccaagggcttactctttctcttgctggaggtggaggaagggcgtccatgccaaggccccatacctgggccgggggcagcacggcctggctttcccccgcttcagtgggccttgccctttgtacagcctccacccccattaaaactgctctggacttgc

SEQ ID NO: 395951 - DNA, 1000 bp, Homo Sapiens
ggtggctaaatggtcagagcctcccggtcagtcccagggtaaagcaacccattgaaaacaggatcctcattctacccagtgtcacgagaaatgaaacaggaccctatgaatgtgaaatacgggaccgagatggtggcatgcacagtgacccagtcaccctgaatgtcctctatggtccagacctccccagcatttacccttcattcacctattaccgttcaggagaaaacctctacttgtcctgcttcgcggaatctaacccaccggcagagtatttttggacaattaatgggaagtttcagcaatcaggacaaaagctctctatcccccaaattactacaaagcatagagggctctatacttgctctgttcgtaactcagccactggcaaggaaagctccaaatccatgacagtcgaagtctctgctccttcaggaataggacgtcttcctctccttaatccaatatagcagccgtgaagtcatttctgtatttcaggaagactggcagacagttgctttgattcttcctcaaactacttacaatcacctacagtccaaaattgctttttcttcaaggagatttatggaaaagactctgacaaggactcttgaatacaagttcctgataacttcaagatcataccactggactaagaactttcaaaattttaatgaacaggctgataccttcatgaaattctagacaaagaagaaaaaaactccatgttattggactaaataatcaaaagcataatgttttcataattttctatttgaaaatgtgctgattctttgaatgttttattctccagatttatgaactttttttcttgagcaattggtaaagtatacttttgtaaacaaaaattgaaacatttgcttttactctctatctgagtgccccagaattgggaaactattcatgagtattcatatgtttatggtaataaagttatctgcacaagttcaaaaaaaaaaaaaaaaaaaaaaaaaaaaaa

SEQ ID NO: 395952 - DNA, 1000 bp, Homo Sapiens; identical to SEQ ID NO: 285678

SEQ ID NO: 395953 - DNA, 1000 bp, Homo Sapiens; identical to SEQ ID NO: 285679

SEQ ID NO: 395954 - DNA, 1000 bp, Homo Sapiens
gactcccaagccctccatctccagcagcaacttaaaccccagggaggccatggagactgtgatcttaacctgtaatcctgagactccggacgcaagctacctgtggtggatgaatggtcagagcctccctatgactcataggatgcagctgtctgaaaccaacaggaccctctttctatttggtgtcacaaagtatactgcaggaccctatgaatgtgaaatatggaactcagggagtgccagccgcagtgacccagtcaccctgaatctcctccatggtccagacctccccagaattttcccttcagtcacctcttactattcaggagagaacctcgacttgtcctgcttcgcaaactctaacccaccagcacagtattcttggacaattaatgggaagtttcagctatcaggacaaaagctctttatccctcagattactccaaagcataatgggctctatgcttgctctgctcgtaactcagccactggcgaggaaagctccacatccttgacaatcagagtcattgctcctccaggattaggaacttttgctttcaataatccaacgtagcagccgtgatgtcatttttgtatttcaggaagactggcaggagatttatggaaaagactatgaaaaggactcttgaatacaagttcctgataacttcaagatcataccactggactaagaactttcaaaattttgatgaacaggctgataccttcatgaaattcaagacaaagaagaaaagaactccatttcattggactaaataacaaaaggataatgttttcataattttttattggaaaatgtgctgattttttgaatgttttatcctccagatttatgaatttttttcttcagcaattggtaaagtatacttttgtaaacaaaaattgaaacatttgcttttgctctctgagtgccccagaattgggaatctattcatgaatattcatatgtttatggtaataaagttatttgcacaagttt

SEQ ID NO: 395955 - DNA, 949 bp, Homo Sapiens; identical to SEQ ID NO: 285681

SEQ ID NO: 395956 - DNA, 1000 bp, Homo Sapiens
ataccaagttgaatatgccatggaagctattggacatgcaggcacctgtttgggaattttagcaaatgatggtgttttgcttgcagcagagagacgcaacatccacaagcttcttgatgaagtctttttttctgaaaaaatttataaactcaatgaggacatggcttgcagtgtggcaggcataacttctgatgctaatgttctgactaatgaactaaggctcattgctcaaaggtatttattacagtatcaggagccaataccttgtgagcagttggttacagcgctgtgtgatatcaaacaagcttatacacaatttggaggaaaacgtccctttggtgtttcattgctgtacattggctgggataagcactatggctttcagctctatcagagtgaccctagtggaaattacgggggatggaaggccacatgcattggaaataatagcgctgcagctgtgtcaatgttgaaacaagactataaagaaggagaaatgaccttgaagtcagcacttgctttagctatcaaagtactaaataagaccatggatgttagtaaactctctgctgaaaaagtggaaattgcaacactaacaagagagaatggaaagacagtaatcagagttctcaaacaaaaagaagtggagcagttgatcaaaaaacatgaggaagaagaagccaaagctgagcgtgagaagaaagaaaaagaacagaaagaaaaggataaatagaatcagagattttattactcatttggggcaccatttcagtgtaaaagcagtcctactcttccacactaggaaggctttactttttttaactggtgcagtgggaaaataggacattacatactgaattgggtccttgtcatttctgtccaattgaatactttattgtaacgatgatggttacccttcatggacgtcttaatcttccacacacatcccctttttttggaataaaatttggaaaatggaaatgaaaaaaaaaaaaaaaaa

SEQ ID NO: 395957 - DNA, 1000 bp, Homo Sapiens; identical to SEQ ID NO: 115873

SEQ ID NO: 395958 - DNA, 1000 bp, Homo Sapiens
cgggaggtgcttgtgtgcctggtgcgggagctacggggcccagggattgtgtttaaagtagtgcttctaccaacatgtcccgtggttccagcgccggttttgaccgccacattaccattttttcacccgagggtcggctctaccaagtagaatatgcttttaaggctattaaccagggtggccttacatcagtagctgtcagagggaaagactgtgcagtaattgtcacacagaagaaagtacctgacaaattattggattccagcacagtgactcacttattcaagataactgaaaacattggttgtgtgatgaccggaatgacagctgacagcagatcccaggtacagagggcacgctatgaggcagctaactggaaatacaagtatggctatgagattcctgtggacatgctgtgtaaaagaattgccgatatttctcaggtctacacacagaatgctgaaatgaggcctcttggttgttgtatgattttaattggtatagatgaagagcaaggccctcaggtatataagtgtgatcctgcaggttactactgtgggtttaaagccactgcagcgggagttaaacaaactgagtcaaccagcttccttgaaaaaaaagtgaagaagaaatttgattggacatttgaacagacagtggaaactgcaattacatgcctgtctactgttctatcaattgatttcaaaccttcagaaatagaagttggagtagtgacagttgaaaatcctaaattcaggattcttacagaagcagagattgatgctcaccttgttgctctagcagagagagactaaacattgtcgttagtttaccagatccgtgatgccacttacctgtgtgtttggtaacaacaaaccaacatcatggaggtccctggattgaaaaaggagcctctcccactcctcctaccaccgaagtggttaggactctatataaataaaaacaaggcttttggaaaataaaaaaaaaaaaaaaaaaa

SEQ ID NO: 395959 - DNA, 872 bp, Homo Sapiens; identical to SEQ ID NO: 285683

SEQ ID NO: 395960 - DNA, 850 bp, Homo Sapiens; identical to SEQ ID NO: 29312

SEQ ID NO: 395961 - DNA, 1000 bp, Homo Sapiens; identical to SEQ ID NO: 115876

SEQ ID NO: 395962 - DNA, 1000 bp, Homo Sapiens; identical to SEQ ID NO: 115878

SEQ ID NO: 395963 - DNA, 1000 bp, Homo Sapiens
ctgaaaagctaaagccaggagacctggtgggtgtgaacaaagactcctatctgatcctggagacgctgcccacagagtatgactcgcgggtgaaggccatggaggtagacgagaggcccacggagcaatacagtgacattgggggtttggacaagcagatccaggagctggtggaggccattgtcttgccaatgaaccacaaggagaagtttgagaacttggggatccaacctccaaaaggggtgctgatgtatgggcccccagggacggggaagaccctcctggcccgggcctgtgccgcacagactaaggccaccttcctaaagctggctggcccccagctggtgcagatgttcattggagatggtgccaagctagtccgggatgcctttgccctggccaaggagaaagcgccctctatcatcttcattgatgagttggatgccatcggcaccaagcgctttgacagtgagaaggctggggaccgggaggtgcagaggacaatgctggagcttctgaaccagctggatggcttccagcccaacacccaagttaaggtaattgcagccacaaacagggtggacatcctggaccccgccctcctccgctcgggccgccttgaccgcaagatagagttcccgatgcccaatgaggaggcccgggccagaatcatgcagatccactcccgaaagatgaatgtcagtcctgacgtgaactacgaggagctggcccgctgcacagatgacttcaatggggcccagtgcaaggctgtgtgtgtggaggcgggcatgatcgcactgcgcaggggtgccacggagctcacccacgaggactacatggaaggcatcctggaggtgcaggccaagaagaaagccaacctacaatactacgcctagggcacacaggccagccccagtctcacggctgaagtgcgcaataaaagatggtttagggtccctgccaaaaaaaaaaaaaaaaaaaaaaaaaaaaaaaaaaaaaa

SEQ ID NO: 395964 - DNA, 1000 bp, Homo Sapiens
gacgtggacaaaaacattgacatcaatgatgtgacacccaattgccgggtggctctaaggaatgacagctacactctgcacaagatcctgcccaacaaggtagacccattagtgtcactgatgatggtggagaaagtaccagattcaacttatgagatgattggtggactggacaaacagatcaaggagatcaaagaagtgatcgagctgcctgttaagcatcctgagctcttcgaagcactgggcattgctcagcccaagggagtgctgctgtatggacctccaggcactgggaagacactgttggcccgggctgtggctcatcatacggactgtacctttattcgtgtctctggctctgaactggtacagaaattcataggggaaggggcaagaatggtgagggagctgtttgtcatggcacgggaacatgctccatctatcatcttcatggacgaaatcgactccatcggctcctcgcggctggaggggggttctggaggggacagtgaagtgcagcgcacgatgctggagttgctcaaccagctcgacggctttgaggccaccaagaacatcaaggttatcatggctactaataggattgatatcctggactcggcactgcttcgcccagggcgcattgacagaaaaattgaattcccaccccccaatgaggaggcccggctggacattttgaagattcattctcggaagatgaacctgacccgggggatcaacctgagaaaaattgctgagctcatgccaggagcatcaggggctgaagtgaagggcgtgtgcacagaagctggcatgtatgccctgcgagaacggcgagtccatgtcactcaggaggactttgagatggcagtagccaaggtcatgcagaaggacagtgagaaaaacatgtccatcaagaaattatggaagtgagtggacagcctttgtgtgtatctctccaataaagctctgtgggccaagtcctctaggaaaaaaaaaaaaa

SEQ ID NO: 395965 - DNA, 1000 bp, Homo Sapiens; identical to SEQ ID NO: 285684

SEQ ID NO: 395966 - DNA, 1000 bp, Homo Sapiens
tgaaatcacttgtccaaaggtgaatcagttcagacagctgtattccaaagtcatcaatgataagcatgatgatgtcatggccaagtttggcgctattctggcccagggcatactggatgcaggtggtcataatgtcacaatctccttgcagtccaggactgggcatactcatatgccttctgtggttggcgtccttgtatttacccagttttggttctggtttcctctttcacacttcctgtcattggcttatacccctacctgtgtcattggccttaacaaggacttaaagatgccgaaagttcagtataaatcgaactgtaaaccatccacatttgcatatcctgcccctctggaagtaccaaaagaaaaagaaaaggaaaaggtttctactgctgtattatctataactgccaaggctaaaaagaaggaaaaagaaaaggaaaaaaaggaggaggagaaaatggaagtggatgaggcagagaaaaaggaggaaaaagagaagaaaaaagaacctgagccaaacttccagttattggataacccagcccgagttatgcctgcccagcttaaggtcctaaccatgccggagacctgtagataccagcctttcaaaccactctctattggaggcatcatcattctgaaggataccagtgaagacattgaggagctggtggaacctgtggcagcacatggcccaaaaatcgaggaggaggaacaagagccagaacccccagaaccatttgagtatattgatgattaagggccagaggatctcacttgcttatctgaagaagattgtccaggctcatattgggaatgcttatgaggaaattcatgccgagacctgctattcaatgcatgtatcgttgcctctgcactgacctgaagaaccctgtctccaagtctttggttgaagagaagatatatgactgttgagtgtgctctttcacagaacttggttttcaaataaatataagatctccagatggacaag

SEQ ID NO: 395967 - DNA, 1000 bp, Homo Sapiens; identical to SEQ ID NO: 285687

SEQ ID NO: 395968 - DNA, 1000 bp, Homo Sapiens; identical to SEQ ID NO: 285688

SEQ ID NO: 395969 - DNA, 1000 bp, Homo Sapiens; identical to SEQ ID NO: 115879

SEQ ID NO: 395970 - DNA, 1000 bp, Homo Sapiens; identical to SEQ ID NO: 292930

SEQ ID NO: 395971 - DNA, 1000 bp, Homo Sapiens
ctaacgtagataaacaccttaataatctcagttaatactgtatttcaaaacacatttaactgttttctaatgctttgcattatcagttacaacctagagagattttgagcctcatatttctttgatacttgaaatagagggagctagaacacttaatgtttaatctgttaaacctgctgcaagagccataactttgaggcattttctaaatgaactgtggggatccaggatttgtaatttcttgatctaaactttatgctgcataaatcacttatcggaaatgcacatttcatagtgtgaagcactcatttctaaaccttattatctaaggtaatatatgcacctttcagaaatttgtgttcgagtaagtaaagcatattagaataattgtgggttgacagatttttaaaatagaatttagagtatttggggttttgtttgtttacaaataatcagactataatatttaaacatgcaaaataactgacaataatgttgcacttgtttactaaagatataagttgttccatgggtgtacacgtagacagacacacatacacccaaattattgcattaagaatcctggagcagaccatagctgaagctgttattttcagtcaggaagactacctgtcatgaaggtataaaataatttagaagtgaatgtttttctgtaccatctatgtgcaattatactctaaattccactacactacattaaagtaaatggacattccagaatatagatgtgattatagtcttaaactaattattattaaaccaatgattgctgaaaatcagtgatgcatttgttatagagtataactcatcgtttacagtatgttttagttggcagtatcatacctagatggtgaataacatattcccagtaaatttatatagcagtgaagaattacatgccttctggtggacattttataagtgcattttatatcacaataaaaattttttctctttaaaaaaaaaaaaaaaaaaaaaa

SEQ ID NO: 395972 - DNA, 1000 bp, Homo Sapiens; identical to SEQ ID NO: 285691

SEQ ID NO: 395973 - DNA, 1000 bp, Homo Sapiens; identical to SEQ ID NO: 285692

SEQ ID NO: 395974 - DNA, 1000 bp, Homo Sapiens; identical to SEQ ID NO: 115882

SEQ ID NO: 395975 - DNA, 1000 bp, Homo Sapiens
tgaaccacctggggaggaggcgggagagggagctgccatctctaggcacctcaagccccctgaccccattccctcccctcccaccccttgctccttgtctggcctagaagtgtgggaaattcaggaaaacgagttgctccagtgaagcttcttggggttgctaggacagagagctcctttgacacaaaagacaggagcagggtccaggttcccctgctgtgcagggagggcagccccgggcagtgggcatagggcagctcagtccctggcctcttagcaccacattcctgtttttcagcttatttgaagtcctgcctcattctcactggagcctcagtctctcctgcttggtcttggccctcaactggggcaagtgaagccagaggagggtcccccagctgggtgggctggaatggaactcctcactagctgctggggctccgcccaccctgctcccttccggacaatgaagaagcctttgcaccctgggaggaaggaccaccccgggccctctatgcctggccagcctccagctcctcagacctcctgggtggggtttggcttcagggtggggtttggaagcttctggaagtcgtgctggtctcccaggtgaggcaagccatggttgctgggctgtagggtgagtggcttgcttggtgggacctgacgagttggtggcatgggaaggatgtgggtctctagtgccttgccctggcttagctgcaggagaagatggctgctttcacttccccccattgagctctgctccctctgagcctggtcttttgtccttttttattttggtctccaagatgaatgctcatctttggagggtgccaggtagaagctagggaggggagtgtcttctctctccaggtttcaccttccagtgtgcagaagttagaagggtctggcgggggcagtgccttacacatgcttgattcccacgctaccccctgccttgggaggtgtgtggaataaattatttttgttaaggcaa

SEQ ID NO: 395976 - DNA, 1000 bp, Homo Sapiens; identical to SEQ ID NO: 221222

SEQ ID NO: 395977 - DNA, 1000 bp, Homo Sapiens; identical to SEQ ID NO: 115883

SEQ ID NO: 395978 - DNA, 1000 bp, Homo Sapiens; identical to SEQ ID NO: 285695

SEQ ID NO: 395979 - DNA, 1000 bp, Homo Sapiens; identical to SEQ ID NO: 115884

SEQ ID NO: 395980 - DNA, 1000 bp, Homo Sapiens; identical to SEQ ID NO: 115885

SEQ ID NO: 395981 - DNA, 1000 bp, Homo Sapiens; identical to SEQ ID NO: 115886

SEQ ID NO: 395982 - DNA, 1000 bp, Homo Sapiens; identical to SEQ ID NO: 115887

SEQ ID NO: 395983 - DNA, 1000 bp, Homo Sapiens
aaagtctgaaggcttgataacctctgaaaatgagaaatgtgatcatccagcgggaggtattcactatgaaatgtgcatagaatgtccacctactttcagtgacaagagagaacaaatatcagaaaatccaacagaagccacagatattggttttggtaatcgatgtggaaaacccaaaggaccaagagatccaccttcagaatggacatgattcagggagctagaagacactttaagttatactggaaaattcaggtgccactgaaagccagatttatagtattccatctttaatatgtgggactaacagcagtgtagattgttaccttaatattttttgctgggaccatctacctgccttatactacacttaggaaaaagtattacatatggtttattttgaaacttcaagtattattgccttaatgtctcttaaccctgttacacgctgcttgtagacatgttaatatagtaatacctttatgatatattgagtttaaggactactctttttctgttttatcatgtatgcattattttgtatatgtacagggcaagtaggtatataatttgataaagttgcaattgaaatattattaacagaagatgtaagaaatttctgcatggtctaaatctttgtgtactttatttgtaaattatttgccctggagttttagaaaatagtttctgaattttaaacttgctggattcatgcagccagctttgcaggttatcagagatcaaagattgtaataataattttgtaaattgtaagcaaaaagttatttttatattatatacagtctaattgttcatcctaattgttcctgttttcatctagtcagagattcagtaagtgccttggaacaatattgaattctcttagcttgtgtgtgtttctttaatatttgaactcaagtgggattagaagactatcaaaatacatgtatgtttcaggatatttgacctgtcattaaaaaaaacaaacagttttacagtg

SEQ ID NO: 395984 - DNA, 1000 bp, Homo Sapiens; identical to SEQ ID NO: 285698

SEQ ID NO: 395985 - DNA, 1000 bp, Homo Sapiens; identical to SEQ ID NO: 285699

SEQ ID NO: 395986 - DNA, 1000 bp, Homo Sapiens; identical to SEQ ID NO: 115888

SEQ ID NO: 395987 - DNA, 1000 bp, Homo Sapiens
agcaggaatgttatgtgcccttaccaccctgtcccagcaactggagaatgaaaatgctgtggatgttttccaggttgcaaaaatgatcaatcttatgaggcctggagtattcacagacattgaacaataccagttcatctataaagcaaggcttagcttggtcagcactaaagaaaatggaaatggtcccatgacagtagacaaaaatggtgctgttcttattgcagatgaatcagaccctgctgagagcatggagtccctagtgtgactggaatcctgaaagggcacttaatttgtaaacttctgaagactgagaacttttttgaggccttttttgccagactctaggttatacaataacccagttacttttttacactgataaaagttttgatatttattttttgccattttatgtcttaatggtatcctactgagcatttgcacctctgttcatttcacacagtgaaacgcaattttacctagtttgcactatatgatcagtgttactgcctataatcttatacaacagcaaaccctgatgtgacattccatgacgacatacatgctacttttttttagttcaatacagtgaaggtctttgttatgacagtgaatattgcttttattattattattgctgaagtggttgcattctactagcaggcaatgctgtacttttcttcagtcctcctctcctttttattttaggcactgttcaatactgtatgccttctgtattttaatggagtggatagcattgttttcttttacagactagcaggctactgggacctaaaaaggtctgttaatgtcatggccttgaaacagttccatttatgctggttaagagatcccttaagaagttagaaggcttaagaactgcttcatgtgaacatcccttattagttacaaagttatattcacagttttttaaaaatgtgtcaaaataaaggataactctgtattacagctttcccagtaaaaaaaaaaaaaaaaa

SEQ ID NO: 395988 - DNA, 1000 bp, Homo Sapiens; identical to SEQ ID NO: 221224

SEQ ID NO: 395989 - DNA, 1000 bp, Homo Sapiens; identical to SEQ ID NO: 221225

SEQ ID NO: 395990 - DNA, 1000 bp, Homo Sapiens; identical to SEQ ID NO: 221226

SEQ ID NO: 395991 - DNA, 1000 bp, Homo Sapiens; identical to SEQ ID NO: 115889

SEQ ID NO: 395992 - DNA, 1000 bp, Homo Sapiens; identical to SEQ ID NO: 115890

SEQ ID NO: 395993 - DNA, 1000 bp, Homo Sapiens; identical to SEQ ID NO: 285705

SEQ ID NO: 395994 - DNA, 1000 bp, Homo Sapiens
ctctgaagcccatgtatggcatggattgtggaagactgggcaacatatttaagatttccagctccttgtgtatatgaatgcatttgtaagcatcccccaaattattctgaaggttttttgatgatggaggtatgataggtttatcacacagcctaaggcagattttgttttgtctgtactgactctatctgccacacagaatgtatgtatgtaatattcagtaataaatgtcatcaggtgatgactggatgagctgctgaagacattcgtattatgtgttagatgctttaatgtttgcaaaatctgtcttgtgaatggactgtcagctgttaaactgttcctgttttgaagtgctattacctttctcagttaccagaatcttgctgctaaagttgcaagtgattgataatggatttttaacagagaagtctttgtttttgaaaaacaaaaatcaaaaacagtaactattttatatggaaatgtgtcttgataatattacctattaaatgtgtatttatagtccctcctatcaaacaattacagagcacaatgattgtcattgggtatatatgtatttactctctattattgggcataaaggtggcttctgctccagaactctatccactgtatttccacatcgtgagtcattttactttaaaagggaaaaacaaatttgtagcaactctgaagtatcaagagttttaactacttgtctctcttttgctaagaagggatttttgaatatgctatctacctggaatctctctctcaacaaaaggtatatgccttcaggaatgatataatctgtcccattttcgaggctccttataaggacatttccatgtatgtccttacatttctgaaagctttcaatcttcaagagccaaaaaaaattaaaataactaccctcagcaaacactagctgttctgctcatatatgaatttttaatgcagcaatgttgactttgtttcatactgccaataaactcttaatact

SEQ ID NO: 395995 - DNA, 1000 bp, Homo Sapiens; identical to SEQ ID NO: 221227

SEQ ID NO: 395996 - DNA, 1000 bp, Homo Sapiens; identical to SEQ ID NO: 221229

SEQ ID NO: 395997 - DNA, 1000 bp, Homo Sapiens; identical to SEQ ID NO: 115891

SEQ ID NO: 395998 - DNA, 1000 bp, Homo Sapiens; identical to SEQ ID NO: 285709

SEQ ID NO: 395999 - DNA, 1000 bp, Homo Sapiens; identical to SEQ ID NO: 285710

SEQ ID NO: 396000 - DNA, 1000 bp, Homo Sapiens; identical to SEQ ID NO: 115414

SEQ ID NO: 396001 - DNA, 1000 bp, Homo Sapiens; identical to SEQ ID NO: 285712

SEQ ID NO: 396002 - DNA, 1000 bp, Homo Sapiens; identical to SEQ ID NO: 115894

SEQ ID NO: 396003 - DNA, 1000 bp, Homo Sapiens; identical to SEQ ID NO: 285714

SEQ ID NO: 396004 - DNA, 1000 bp, Homo Sapiens; identical to SEQ ID NO: 285715

SEQ ID NO: 396005 - DNA, 1000 bp, Homo Sapiens; identical to SEQ ID NO: 115895

SEQ ID NO: 396006 - DNA, 1000 bp, Homo Sapiens; identical to SEQ ID NO: 285717

SEQ ID NO: 396007 - DNA, 1000 bp, Homo Sapiens
accatcggaattgatttcaagatccgcactgtggatatagaggggaagaagatcaaactacaagtctgggacacggctggccaagagcggttcaagacaataactactgcctactaccgtggagccatgggcattatcctagtatacgacatcacggatgagaaatctttcgagaatattcagaactggatgaaaagcatcaaggagaatgcctcggctggggtggagcgcctcttgctggggaacaaatgtgacatggaggccaagaggaaggtgcagaaggagcaggccgataagttggctcgagagcatggaatccgatttttcgaaactagtgctaaatccagtatgaatgtggatgaggcttttagttccctggcccgggacatcttgctcaagtcaggaggccggagatcaggaaacggcaacaagcctcccagtactgacctgaaaacttgtgacaagaagaacaccaacaagtgctccctgggctgaggaccctttcttgcctccccaccccggaagctgaacctgagggagacaacggcagagggagtgagcaggggagaaatagcagaggggcttggagggtcacataggtagatggtaaagagaatgaggagaaaaaggagaaaagggaaaagcagaaaggaaaaaaaggaagagagaggaagggagaagggagaggaatgaattgaggaagtgaaagaaggcaaggaggtaggaagagagggaggaggaaaggaaggagagatgcctcaggcttcagaccttacctgggttttcagggcaaacataaatgtaaatacactgatttattctgttactagatcaggttttagggtcctgcaaaaggctagctcggcactacactagggaatttgctcctgttctgtcacttgtcatggtctttcttggtattaaaggccaccatttgcacaaaaaaaaaaaaaaaaaaaaaaaaaaaaaaaaaaaaaaaaaaaaaaaaaaaaaaaaaaaa

SEQ ID NO: 396008 - DNA, 1000 bp, Homo Sapiens; identical to SEQ ID NO: 115896

SEQ ID NO: 396009 - DNA, 1000 bp, Homo Sapiens; identical to SEQ ID NO: 285721

SEQ ID NO: 396010 - DNA, 884 bp, Homo Sapiens
cgaggttcgggtcgtggggcggagggaagagcgggcgggcgggaggcgccggcgccagacgcggagggaaggagctacgagtagccgccgagaggccgcggagccagcgacgaccgacccagccgagccgccgccgccgccgcgcccccatggcggccgccaaggacactcatgaggaccatgatacttccactgagaatacagacgagtccaaccatgaccctcagtttgagccaatagtttctcttcctgagcaagaaattaaaacactggaagaagatgaagaggaactttttaaaatgcgggcaaaactgttccgatttgcctctgagaacgatctcccagaatggaaggagcgaggcactggtgacgtcaagctcctgaagcacaaggagaaaggggccatccgcctcctcatgcggagggacaagaccctgaagatctgtgccaaccactacatcacgccgatgatggagctgaagcccaacgcaggtagcgaccgtgcctgggtctggaacacccacgctgacttcgccgacgagtgccccaagccagagctgctggccatccgcttcctgaatgctgagaatgcacagaaattcaaaacaaagtttgaagaatgcaggaaagagatcgaagagagagaaaagaaagcaggatcaggcaaaaatgatcatgccgaaaaagtggcggaaaagctagaagctctctcggtgaaggaggagaccaaggaggatgctgaggagaagcaataaatcgtcttattttattttcttttcctctctttcctttcctttttttaaaaaattttaccctgcccctctttttcggtttgtttttattctttcatttttacaagggacgttatataaagaactgaactc

SEQ ID NO: 396011 - DNA, 1000 bp, Homo Sapiens; identical to SEQ ID NO: 115897

SEQ ID NO: 396012 - DNA, 1000 bp, Homo Sapiens; identical to SEQ ID NO: 285724

SEQ ID NO: 396013 - DNA, 1000 bp, Homo Sapiens; identical to SEQ ID NO: 115898

SEQ ID NO: 396014 - DNA, 1000 bp, Homo Sapiens; identical to SEQ ID NO: 115900

SEQ ID NO: 396015 - DNA, 1000 bp, Homo Sapiens
cccaggaggacccaggtgacaaccagatcacgctggaggagatcacgcagatggctgaaggcgtgaaggctgagccctttgaaaaccactcagccctggagatcgcggagcagctgaccctgctagatcacctcgtcttcaagaagattccttatgaggagttcttcggacaaggatggatgaaactggaaaagaatgaaaggaccccttatatcatgaaaaccactaagcacttcaatgacatcagtaacttgattgcttcagaaatcatccgcaatgaggacatcaacgccagggtgagcgccatcgagaagtgggtggccgtagctgacatatgccgctgcctccacaactacaatgccgtactggagatcacctcgtccatgaaccgcagtgcaatcttccggctcaaaaagacgtggctcaaagtctctaagcagactaaagctttgattgataagctccaaaagcttgtgtcatctgagggcagatttaagaatctcagagaagctctgaaaaattgtgacccaccctgtgtcccttacctggggatgtacctcaccgacctggccttcatcgaggaggggacgcccaattacacggaagacggcctggtcaacttctccaagatgaggatgatatcccatattatccgagagattcgccagtttcaacaaactgcctacaaaatagagcaccaagcaaaggtaacgcaatatttactggaccaatcttttgtaatggatgaagaaagcctctacgagtcttctctccgaatagaaccaaaactccccacctgaagctgagcccagcccagacccagctgctcccggggacatgtgctagatgatactgtacatattcgtttggtttcactggattttcttcttcagtatgtgcttctccaagaatacaaatcgtccttgttcttagattcctgtagaaccggaatatgaatttctgcaccgtttcagacttcgcccacccatccctcccctcg

SEQ ID NO: 396016 - DNA, 1000 bp, Homo Sapiens; identical to SEQ ID NO: 285726

SEQ ID NO: 396017 - DNA, 1000 bp, Homo Sapiens; identical to SEQ ID NO: 221234

SEQ ID NO: 396018 - DNA, 1000 bp, Homo Sapiens; identical to SEQ ID NO: 115902

SEQ ID NO: 396019 - DNA, 1000 bp, Homo Sapiens
tctccaggctgctggtggagcacatctggaagaagatcatgcacacggatgccatgatcatcgacatgaggttcaacatcggtggccccacatcctccattcccatcttgtgctcctacttctttgatgaaggccctccagttctgctggacaagatctacagccggcctgatgactctgtcagtgaactctggacacacgcccaggttgtaggtgaacgctatggctccaagaagagcatggtcattctgaccagcagtgtgacggccggcaccgcggaggagttcacctatatcatgaagaggctgggccgggccctggtcattggggaggtgaccagtgggggctgccagccaccacagacctaccacgtggatgacaccaacctctacctcactatccccacggcccgttctgtgggggcctcggatggcagctcctgggaaggggtgggggtgacaccccatgtggttgtccctgcagaagaggctctcgccagggccaaggagatgctccagcacaaccagctgagggtgaagcggagcccaggcctgcaggaccacctgtagggaagggccccataggcagagccccagggcagacagaacctctgggacacacaccaagggcactcctgcaggtggcccggcctgaggttcccaggagcagcaaaggggcctgctgagctctggttaggttacagctggaggtgtgtatatatacacacacacacatgtatatacacatatatatgtgtatgtatatatatgtatatatatatggctttccaataaccacctaaattttaacaaaggttccttctaagtggtagaacttggggtggtatttttaccttccttcttcatactttgctctttttcttaaatactcattaatgtgcatatatcattattttcagatgcagctatcattattccaaaatacaaaataaagaagataaaataaattatatacccgagccattaaaaaaaaaaaaaaa

SEQ ID NO: 396020 - DNA, 1000 bp, Homo Sapiens
tgttgctacaattgtctaattacagcagttgtgatcccacaaaaagcaagtttatacctcagattggggtataaaaattgtttttcgctcagtatttactggaaaatggacatcactagtctttcagtaagatttctctcaaaacacgtgaaaaccttggtaaattgcaattctttctggggatatattggtacaacatgacttaaaacttttttttttctattaaaacttaaaggggaacaaaacttgaaaaagccctgttcttcagaaggtgagtgggttgagggaggcagtaatatgaagtgactgctgtgtattttaactaccagatttttatatttgccactgttagatagttggaaaggggaaattctgtttaagcgaaagtggtatcatcctaggtaagcttatttcagaacaagtctaatatatcagattctttcttttcgactttatactctgagttattacttactgtaagtggtgtatatgaaacctccatgcattttccagtatggatctgctaatatgcacagtaaatccatgtctttgtttgtttttctattaagaagcaatcaagaaagataatgtgaaaaagaaaggaatttagaggtagggaaaagatgaatgtcagacatgtgaagaactatagtaaaaatgataaaccacctaaatatccttgaacctaccttaaaatgccaatgaggtaggcctgatctttgaatagtggctaggatacaatgcatttcctcagtgatcactgattagaatgagttggtgggatccttgggaagccaaacggagcggggttctggatcatgtcccatccagtccagtgaatccccgacccgcagacctgccccccccgcaacagcttataccatggaatgaggacaaggtgatactctgagctgtggactgaactggcagacacaacctgtacagattgaaatttcaccttgtaaggaggaagtgaatgaaataaaggatccccctaagg

SEQ ID NO: 396021 - DNA, 1000 bp, Homo Sapiens; identical to SEQ ID NO: 115903

SEQ ID NO: 396022 - DNA, 1000 bp, Homo Sapiens
aaggagatcctggaggagctgcagctgaacaccaagttctcggaggaggagctgtgctcctggtaccagtccttcctgaaggactgtcccaccggccgcatcacccagcagcagttccagagcatctacgccaagttcttccccgacaccgaccccaaggcctacgcccagcatgtgttccgcagcttcgattccaacctcgacggcaccctggacttcaaggagtacgtcatcgccctgcacatgaccaccgcgggcaagaccaaccagaagctggagtgggccttctccctctacgacgtggacggtaacgggaccatcagcaagaatgaagtgctggagatcgtcatggctattttcaaaatgatcactcccgaggacgtgaagctccttccagacgatgaaaacacgccggaaaagcgagccgagaagatctggaagtactttggaaagaatgatgatgataaacttacagagaaagaattcattgaggggacactggccaataaggaaattctgcgactgatccagtttgagcctcaaaaagtgaaggaaaagatgaagaacgcctgatgccaactgttcagctgtcctccctccacctaccactcacatgacacccgtgagcgcctgtgcacacacacacacatgcacacacacgcgcgcgcacacacacacacacacatccaccccagggccaagagaaaggcctgcacacaagcccacagcacagctccctgccaaactgaagcatctgtagtgacccactggttccttcttcctgggtcttcagcattccctcccatcatgcccggtcccacccctccctctgtccaccagcccatggccctgtgctaatcccaggattaggccataggagtcctaagtgtcaccccgctgtaagctcctttgtggagtgctgggtaagcagtttccaataaacgcaagctgagctgggaaaaaaaaaaaaaaaaaaaaaaaaaaaaaaaaaaaaaaaaaa

SEQ ID NO: 396023 - DNA, 1000 bp, Homo Sapiens; identical to SEQ ID NO: 115904

SEQ ID NO: 396024 - DNA, 1000 bp, Homo Sapiens; identical to SEQ ID NO: 115905

SEQ ID NO: 396025 - DNA, 1000 bp, Homo Sapiens
tggaactcagaagcatgtaacaaaatgtgcgataactgctgtaaagacagtgcatttgaaagaaagaacataacagagtactgcagagatctaatcaagatcctgaagcaggcagaggaactgaatgaaaaactcactccattgaaactgattgattcttggatgggaaagggtgcagcaaaactgagagtagcaggtgttgtggctcccacacttcctcgtgaagatctggagaagattattgcacactttctaatacagcagtatcttaaagaagactacagttttacagcttatgctaccatttcgtatttgaaaataggacctaaagctaaccttctgaacaatgaggcacatgctattactatgcaagtgacaaagtccacgcagaactctttcagggctgaatcgtctcaaacttgtcattctgaacaaggtgataaaaagatggaggaaaaaaattcaggcaacttccagaagaaggctgcaaacatgcttcagcagtctggttctaagaatacaggagctaagaaaagaaaaatcgatgatgcctgatatgaatgttactaaattttctaattaaagatggtttatgcatgtatatgccattatttttgtagttagacaatagtttttaaaagaatttcatagatattttatatgtatggatctatattttcagagcttatctctgaagatctaaacttttgagaatgtttgaaaattagagatcatgaattatataattttccagtataaaacaagggaaaaatttttatgtaaaaccctttaaatgtaaaatatttgagaataagttcatacaatcgtcttaagttttttatgcctttatatacttagctatattttttcttttgacataactatctttttgaaagcaatattatactgacagaggctcactgagtgatactttaagttaaatatgtagatcaagggatgtccaatcttttggcttccctgagccagcgaattgtgcaca

SEQ ID NO: 396026 - DNA, 1000 bp, Homo Sapiens; identical to SEQ ID NO: 221237

SEQ ID NO: 396027 - DNA, 1000 bp, Homo Sapiens; identical to SEQ ID NO: 221238

SEQ ID NO: 396028 - DNA, 1000 bp, Homo Sapiens; identical to SEQ ID NO: 285734

SEQ ID NO: 396029 - DNA, 1000 bp, Homo Sapiens; identical to SEQ ID NO: 115906

SEQ ID NO: 396030 - DNA, 1000 bp, Homo Sapiens; identical to SEQ ID NO: 285736

SEQ ID NO: 396031 - DNA, 1000 bp, Homo Sapiens; identical to SEQ ID NO: 285737

SEQ ID NO: 396032 - DNA, 1000 bp, Homo Sapiens; identical to SEQ ID NO: 115908

SEQ ID NO: 396033 - DNA, 1000 bp, Homo Sapiens; identical to SEQ ID NO: 285739

SEQ ID NO: 396034 - DNA, 1000 bp, Homo Sapiens; identical to SEQ ID NO: 115909

SEQ ID NO: 396035 - DNA, 1000 bp, Homo Sapiens
agttctggctggcttgtgaagactataagaaaacagagtctgatcttttgccctgtaaagcagaagagatatataaagcatttgtgcattcagatgctgctaaacaaatcaatattgacttccgcactcgagaatctacagccaagaagattaaagcaccaacccccacgtgttttgatgaagcacaaaaagtcatatatactcttatggaaaaggactcttatcccaggttcctcaaatcagatatttacttaaatcttctaaatgacctgcaggctaatagcctaaagtgactggtccctggctgaagggaattaacagatagtatcaagcgcagaaggaatgtgccagtatggctccctgggtgaacagcttggccttttttgggtgtcttgacaggccaagaagaacaaatgactcagaatggattaacatgaaagttatccaggcgcagagttgaagaagcataagcaagacaaaaacagagagaccgcagaaggaggaagatactgtggtactgtcataaaaaacagtggagctctgtattagaaagcccctcagaactgggaaggccaggtaactctagttacacagaaactgtgactaaagtctatgaaactgattacaacagactgtaagaatcaaagtcaactgacatctatgctacatattattatatagtttgtactgagctattgaagtcccattaacttaaagtatatgttttcaaattgccattgctactattgcttgtcggtgttattttattttattgtttttgactttggaagagatgaactgtgtatttaacttaagctattgctcttaaaaccagggagtcagaatatatttgtaagttaaatcattggtgctaataataaatgtggattttgtattaaaatatatagaagcaatttctgtttacatgtccttgctacttttaaaaacttgcatttattcctcagattttaaaaataaataaataattcatttaagattc

SEQ ID NO: 396036 - DNA, 1000 bp, Homo Sapiens; identical to SEQ ID NO: 285741

SEQ ID NO: 396037 - DNA, 1000 bp, Homo Sapiens; identical to SEQ ID NO: 285742

SEQ ID NO: 396038 - DNA, 859 bp, Homo Sapiens
ggcgtctctgggaaggcagtggattgttggtctgcgtggaacttctcaggtggacaccagagcatggaacacatccacgacagcgatggcagttccagcagcagccaccagagcctcaagagcacagccaaatgggcggcatccctggagaatctgctggaagacccagaaggcgtgaaaagatttagggaatttttaaaaaaggaattcagtgaagaaaatgttttgttttggctagcatgtgaagattttaagaaaatgcaagataagacgcagatgcaggaaaaggcaaaggagatctacatgacctttctgtccagcaaggcctcatcacaggtcaacgtggaggggcagtctcggctcaacgagaagatcctggaagaaccgcaccctctgatgttccagaaactccaggaccagatctttaatctcatgaagtacgacagctacagccgcttcttaaagtctgacttgtttttaaaacacaagcgaaccgaggaagaggaagaagatttgcctgatgctcaaactgcagctaaaagagcttccagaatttataacacatgagcccccaaaaagccgggactggcagctttaagaagcaaaggaatttcctctcaggaccgtgccgggtttatcattgctttgttatttgtaaggactgaaatgtacaaaacccttcaatgggatgtgtgttttattaactgcttcaccagtaaattttgcatgatggctaagctaacataaaaaaagaataataataacttggaagttttagtttacaaaacagagattccttcaacactggacacgtcgagcattttgtagcttaattaaacctcatgtaaggccaaaaaaa

SEQ ID NO: 396039 - DNA, 1000 bp, Homo Sapiens
ttgcctcacggtggagcagaatttctagggcaaagaagctttataagatttacatccagccacagtcccctagagagattaacattgacagttcgacaagagagactatcatcaggaacattcaggaacccactgaaacatgttttgaagaagctcagaaaatagtctatatgcatatggaaagggattcctaccccagatttctaaagtcagaaatgtaccaaaaacttttgaaaactatgcagtccaacaacagtttctgactacaactcaaaagtttaaatagaaaacagtatattgaaagtggtgggtttgatctttttatttagaaacccacaaaatcagaaacacagtacaaataaaacagaaatcaaactataagttgacttttagttcctaaaaagaaacatatttcaaaagcaatggaatctagaattcttataacatgaataacaaaatgtacagcaagcctatgtagttcaattaatatataaggaaaaggaaggtctttcttcatgatacaagcattataaagtttttactgtagtagtcaattaatggatatttccttgttaataaaattttgtgtcataatttacaaattagttctttaaaaattgttgttatatgaattgtgtttctagcatgaatgttctatagagtactctaaataacttgaatttatagacaaatgctactcacagtacaatcaattgtattataccatgagaaaatcaaaaaggtgttcttcagagacattttatctataaaattttcctactattatgttcattaacaaacttctttatcacatgtatcttctacatgtaaaacatttctgatgattttttaacaaaaaatatatgaatttcttcatttgctcttgcatctacattgctataaggatataaaatgtggtttctatattttgagatgttttttccttacaatgtgaactcatcgtgatcttggaaatcaataaagtcaaatatcaactaaa

SEQ ID NO: 396040 - DNA, 1000 bp, Homo Sapiens; identical to SEQ ID NO: 115910

SEQ ID NO: 396041 - DNA, 1000 bp, Homo Sapiens; identical to SEQ ID NO: 115911

SEQ ID NO: 396042 - DNA, 735 bp, Homo Sapiens; identical to SEQ ID NO: 285745

SEQ ID NO: 396043 - DNA, 716 bp, Homo Sapiens
gaacaaccagctggatcagttctcacaggagccacagctcagagactgggaaacatggttccaaaactgttcacttcccaaatttgtctgcttcttctgttggggcttatgggtgtggagggctcactccatgccagacccccacagtttacgagggctcagtggtttgccatccagcacatcagtctgaacccccctcgatgcaccattgcaatgcgggcaattaacaattatcgatggcgttgcaaaaaccaaaatacttttcttcgtacaacttttgctaatgtagttaatgtttgtggtaaccaaagtatacgctgccctcataacagaactctcaacaattgtcatcggagtagattccgggtgcctttactccactgtgacctcataaatccaggtgcacagaatatttcaaactgcacgtatgcagacagaccaggaaggaggttctatgtagttgcatgtgacaacagagatccacgggattctccacggtatcctgtggttccagttcacctggataccaccatctaagctcctgtatcagcagtcctcatcatcactcatctgccaagctcctcaatcatagccaagatcccatccctccatgtactctgggtatcagcaactgtcctcatcagtctccataccccttcagctttcctgagctgaagtcccttgtgaaccctgcaataaactgctttgcaaattca

SEQ ID NO: 396044 - DNA, 1000 bp, Homo Sapiens
actgggcttggatgcttcgggcttctgactgctccataggttttgactggtgaaacaggggcccagatgacaacctctccttcgctccacaggtacgcgggagcctcaggttctctcaggggcagcaaagtggcccaagctgcccctgacagcacagggcctggggggtggctaacgagagaggccttacagtgccggcatgcctcctcttccactgtcgtccttcctcagagggcctcacgccaaacaaacggccttttcgtgtgaaacatcttcagggcgggaaaggggccacttctggctttgttagcaataactgaccttcagtttacccttctgaaggagcagggactcagcacagaattcactttagacggggctgaaggagtgtccctcctctatgtgaaaagaaaattgttttattcttcattctgactttttaactgtttggctcacttccagttagtttgaatgaaaataataattttctacttggagttgaagagggcagaatccgcagctctcatcattgtgatgtgtagcatgtctgccctctgactggacatcattgccattaactttcttctgggcatcacggcaatgtcacgatgcccagacttggagcaaggcaaccttggagtcagtccactcataaaatatggtaacacccattttaaaatttaagttttgtccttaaagacaacttcagtggttaattataaaagttgtgttacttcgtcctaaattaaattgatagaaagatttaaaaatgtgttttgtttctactattcagaaactgcgaactagggaaaggttggtatgaagaaatgtctttccttttttcaatgtacatagttcaactctttctttgttacatttaaactatatccatggatatcagtctgctttggactcctctgctagtgttacagatggaaataaaaccattaatttgaaccaaaaaaaaaaaaaaaaaaaaaaaaaaaaaaaaaaaaaaaaa

SEQ ID NO: 396045 - DNA, 1000 bp, Homo Sapiens; identical to SEQ ID NO: 221241

SEQ ID NO: 396046 - DNA, 1000 bp, Homo Sapiens; identical to SEQ ID NO: 220410

SEQ ID NO: 396047 - DNA, 1000 bp, Homo Sapiens; identical to SEQ ID NO: 115914

SEQ ID NO: 396048 - DNA, 1000 bp, Homo Sapiens; identical to SEQ ID NO: 221243

SEQ ID NO: 396049 - DNA, 1000 bp, Homo Sapiens; identical to SEQ ID NO: 115915

SEQ ID NO: 396050 - DNA, 1000 bp, Homo Sapiens; identical to SEQ ID NO: 115916

SEQ ID NO: 396051 - DNA, 1000 bp, Homo Sapiens; identical to SEQ ID NO: 115917

SEQ ID NO: 396052 - DNA, 962 bp, Homo Sapiens; identical to SEQ ID NO: 115918

SEQ ID NO: 396053 - DNA, 541 bp, Homo Sapiens; identical to SEQ ID NO: 285752

SEQ ID NO: 396054 - DNA, 1000 bp, Homo Sapiens; identical to SEQ ID NO: 293951

SEQ ID NO: 396055 - DNA, 1000 bp, Homo Sapiens; identical to SEQ ID NO: 115919

SEQ ID NO: 396056 - DNA, 1000 bp, Homo Sapiens; identical to SEQ ID NO: 115920

SEQ ID NO: 396057 - DNA, 738 bp, Homo Sapiens
agtctcagattggtaaacacccgaactggtcaactctcaagagaccatctggttcaggttcctgactgggccagcgagtgaggatggccaggcctctggagcaggcggtagctgccatcgtgtgcaccttccaggaatacgcagggcgctgtggggacaaatacaagctctgccaggcggagctcaaggagctgctgcagaaggagctggccacctggaccccgactgagtttcgggaatgtgactacaacaaattcatgagtgttctggacaccaacaaggactgcgaggtggactttgtggagtatgtgcgctcacttgcctgcctctgtctctactgccacgagtacttcaaggactgcccctcagagcccccctgctcccagtagcctctgctccagggggtgcgctggctgtcgggggctgggcatgtctcccacaccccctcctaccctctctcctgtacccctttcaatctggacttgcccaggtcttctgcgatcagttaacccattttacctaggaggcccagagatgtgagggctccttcctcaggatgcccagcgaatgaggggtagagccactctggggcccagcctgcctgccgcacccctgtggcctcccttgtggatgggaggaggcgggatctgctctgaggccctcgaggctcagcagagcgtgcaccaatgagaccacgatgggaaagggcctatttaactcctaataaaaaactggcat

SEQ ID NO: 396058 - DNA, 710 bp, Homo Sapiens
tcccacacttctgaggttttctttccaggacagcctggtttcccttcttcggcttattgttccatcagatttcagattttgagttctgatttttggtcagaagagtaaagtttctgggattggggacgtgtgtgctatgggaactcagtgtgtccccagcccttgtttgtaaacaaggaagggacagagatcagggaaataaaggcagaaggcagtgagagggaggctatgcctgctgcttggattctctgggctcactcccacagtgagctgcacactgtgatggagactcctctggagaaggccctgaccactatggtgaccacgtttcacaaatattcggggagagagggtagcaaactgaccctgagtaggaaggaactcaaggagctgatcaagaaagagctgtgtcttggggagatgaaggagagcagcatcgatgacttgatgaagagcctggacaagaacagcgaccaggagatcgacttcaaggagtactcggtgttcctgaccatgctgtgcatggcctacaacgacttctttctagaggacaacaagtgaccagggctgccctccaccctcaccctccaccctttgctgctgacctcggctgctcctctcacagaccctctttggccccctgccctcctctccctcccagatggacccttccatgggaggaaataaagtttccatcgcaggtgctggga

SEQ ID NO: 396059 - DNA, 437 bp, Homo Sapiens
gtccaaacacacacatctcactcatccttctactcgtgacgcttcccagctctggctttttgaaagcaaagatgagcaacactcaagctgagaggtccataataggcatgatcgacatgtttcacaaatacaccagacgtgatgacaagattgacaagccaagcctgctgacgatgatgaaggagaacttccccaacttccttagtgcctgtgacaaaaagggcacaaattacctcgccgacgtctttgagaaaaaggacaagaatgaggataagaagattgatttttctgagtttctgtccttgctgggagacatagccacagactaccacaagcagagccatggagcagcgccctgttccgggggcagccagtgacccagccccaccaatgggcctccagagacccaggaacaataaaatgtcttctcccaccag

SEQ ID NO: 396060 - DNA, 428 bp, Homo Sapiens
atgtctcttgtcagctgtctttcagaagacctggtggggcaagtccgtgggcatcatgttgaccgagctggagaaagccttgaactctatcatcgacgtctaccacaagtactccctgataaaggggaatttccatgccgtctacagggatgacctgaagaaattgctagagaccgagtgtcctcagtatatcaggaaaaagggtgcagacgtctggttcaaagagttggatatcaacactgatggtgcagttaacttccaggagttcctcattctggtgataaagatgggcgtggcagcccacaaaaaaagccatgaagaaagccacaaagagtagctgagttactgggcccagaggctgggcccctggacatgtacctgcagaataataaagtcatcaatacctcaaaaaaaaaaaaaaaaaaaaa

SEQ ID NO: 396061 - DNA, 649 bp, Homo Sapiens; identical to SEQ ID NO: 285757

SEQ ID NO: 396062 - DNA, 1000 bp, Homo Sapiens; identical to SEQ ID NO: 115922

SEQ ID NO: 396063 - DNA, 1000 bp, Homo Sapiens
aagatcaggaagtggggatccttccagcttctggaatcagtatgcagcagcgctctccaacgggctggcgatgaaggccaacgagatctccgtcattcagaacggtggcatccctccaattcctggaagcctcggcagtgggaacagctcacctattagtgggctgacgggaaacctggagaggctccagaactcagagcccaatgctcccctggccggcctggagaaaatggcaagcagtgagaacggaaccaacttccgcttcacccgcttcgtggaggacagcaaggagatcgtcacgagttaaagcagctcgggctggagacatagcattcattcctgttcagaatgcgacctatggtggcctcctactccttgccccccaccccgccccgccccttccttctgttccccagatctatgaactacaacattatgaagacattcttttgtaccttgttcaactttagagttctaagaaagcttatttattagcgatataaccttgctttgcaaacagaatgcaagcgttaactttggtcttctgtattttggactaaatactaattgactagagtgctgtaaacttgctgtaacatttatggcaattgcaagttgccctgctaggcagttgtaatctggcattaacttattttctatatccagtttaatatgaatctggtgttgatgcaatgcctcagtgatgcattagatctctaataaagtctgtatatacatgtacactttgatcctgctggaaaattttatcagcaaacacattgtctaatctttcaaaacagatttaaggaaaggactgaaagtacagactgaacagtgtggttctttgaaaggtttggttttttaatttttattctaaaattcaaccttttttttgtcgatttaaccatttccattttgaactgctatttgtattgtgctttttacttgagtcgtcttcaatgttaataagtttctgtacagtaataagcacgcagaattc

SEQ ID NO: 396064 - DNA, 1000 bp, Homo Sapiens; identical to SEQ ID NO: 115923

SEQ ID NO: 396065 - DNA, 1000 bp, Homo Sapiens; identical to SEQ ID NO: 115924

SEQ ID NO: 396066 - DNA, 1000 bp, Homo Sapiens
gctctccatctggccagtccacagcagcagtcagccatttaccacgcggggcttgcgccaactccaccctccatgacacctgcctccaacacgcagtcgccacagaatagtttcccagcagcacaacagactgtctttacgatccatccttctcacgttcagccggcgtataccaacccaccccacatggcccacgtacctcaggctcatgtacagtcaggaatggttccttctcatccaactgcccatgcgccaatgatgctaatgacgacacagccacccggcggtccccaggccgccctcgctcaaagtgcactacagcccattccagtctcgacaacagcgcatttcccctatatgacgcacccttcagtacaagcccaccaccaacagcagttgtaaggctgccctggaggaaccgaaaggccaaattccctcctcccttctactgcttctaccaactggaagcacagaaaactagaatttcatttattttgtttttaaaatatatatgttgatttcttgtaacatccaataggaatgctaacagttcacttgcagtggaagatacttggaccgagtagaggcatttaggaacttgggggctattccataattccatatgctgtttcagagtcccgcaggtaccccagctctgcttgccgaaactggaagttatttattttttaataacccttgaaagtcatgaacacatcagctagcaaaagaagtaacaagagtgattcttgctgctattactgctaaaaaaaaaaaaaaaaaaaaatcaagacttggaacgcccttttactaaacttgacaaagtttcagtaaattcttaccgtcaaactgacggattattatttataaatcaagtttgatgaggtgatcactgtctacagtggttcaacttttaagttaagggaaaaacttttactttgtagataatataaaataaaaacttaaaaaaaatttaaaaaataaaaaaagttttaaaaactga

SEQ ID NO: 396067 - DNA, 1000 bp, Homo Sapiens; identical to SEQ ID NO: 115925

SEQ ID NO: 396068 - DNA, 1000 bp, Homo Sapiens; identical to SEQ ID NO: 221247

SEQ ID NO: 396069 - DNA, 1000 bp, Homo Sapiens; identical to SEQ ID NO: 285764

SEQ ID NO: 396070 - DNA, 1000 bp, Homo Sapiens
cctgtacctcccgctgccccaggccctgcagggagtctgcattcaagctctccactgggacctccaggtggccttccgccaagtcagctggatggactctggccacgctaggtgaacaggggctgccgcatcagagccacagacagaggagcagcctggccaaaatcaacatcgtctaccaggagctcaactaccgctcagtggaggaggcgcccgtgtactcggtgccgcagctgctctcggccatgggcagcctctgcagcctgtggtttggggcctccgtcctctccctcctggagctcctggagctgctgctcgatgcttctgccctcaccctggtgctaggcggccgccggctccgcagggcgtggttctcctggcccagagccagccctgcctcaggggcgtccagcatcaagccagaggccagtcagatgcccccgcctgcaggcggcacgtcagatgacccggagcccagcgggcctcatctcccacgggtgatgcttccaggggttctggcgggagtctcagccgaagagagctgggctgggccccagccccttgagactctggacacctgaaccagacctgccagggctgtgcgatctcttggcctggtccttgcagctgtggcagcagcaggctccccagcggcccagggtgggccagaccagcagcccaggaagcagcacacgcggccgtggggaggcaggcaccgggcatgtcggcgcctctggtcaaaccacctacactgcctggggtgggtctcaaggaggcccggggcggaggggggttcccgcgtgcacacgagtgcggctggacgtgccgacacgcggtgatgtacccatgctccgtgtgtctgtgtctgcatgtccacacgtctgatgcacctgtgtacgtgtgtcaagcctagccacctcagctgcagggaggcagaaggcaaggcaggccccacggacacacttgggctgctctgaaataaagctgttgactccacctg

SEQ ID NO: 396071 - DNA, 1000 bp, Homo Sapiens; identical to SEQ ID NO: 115926

SEQ ID NO: 396072 - DNA, 542 bp, Homo Sapiens
acagtggtgagctcttagcttcaccaggctcatcaaagctgctccaggaaggcccaagccagaccagaagacatgcagatcatcaccacagccctggtgtgcttgctgctagctgggatgtggccggaagatgtggacagcaagagcatgcaggtacccttctccagatgttgcttctcatttgcggagcaagagattcccctgagggcaatcctgtgttacagaaataccagctccatctgctccaatgagggcttaatattcaagctgaagagaggcaaagaggcctgcgccttggacacagttggatgggttcagaggcacagaaaaatgctgaggcactgcccgtcaaaaagaaaatgagcagatttctttccattgtgggctctggaaaccacatggcttcacctgtccccgaaactaccagccctacaccattccttctgccctgcttttgctaggtcacagaggatctgcttggtcttgataagctatgttgttgcactttaaacatttaaattatacaatcatcaacccccaac

SEQ ID NO: 396073 - DNA, 760 bp, Homo Sapiens; identical to SEQ ID NO: 115927

SEQ ID NO: 396074 - DNA, 793 bp, Homo Sapiens
aggagttgtgagtttccaagccccagctcactctgaccacttctctgcctgcccagcatcatgaagggccttgcagctgccctccttgtcctcgtctgcaccatggccctctgctcctgtgcacaagttggtaccaacaaagagctctgctgcctcgtctatacctcctggcagattccacaaaagttcatagttgactattctgaaaccagcccccagtgccccaagccaggtgtcatcctcctaaccaagagaggccggcagatctgtgctgaccccaataagaagtgggtccagaaatacatcagcgacctgaagctgaatgcctgaggggcctggaagctgcgagggcccagtgaacttggtgggcccaggagggaacaggagcctgagccagggcaatggccctgccaccctggaggccacctcttctaagagtcccatctgctatgcccagccacattaactaactttaatcttagtttatgcatcatatttcattttgaaattgatttctattgttgagctgcattatgaaattagtattttctctgacatctcatgacattgtctttatcatcctttcccctttcccttcaactcttcgtacattcaatgcatggatcaatcagtgtgattagctttctcagcagacattgtgccatatgtatcaaatgacaaatctttattgaatggttttgctcagcaccaccttttaatatattggcagtacttattatataaaaggtaaaccagcattctcactgtgaaaaaaaaaaaaaaaaaaaaaaaa

SEQ ID NO: 396075 - DNA, 878 bp, Homo Sapiens; identical to SEQ ID NO: 115928

SEQ ID NO: 396076 - DNA, 1000 bp, Homo Sapiens; identical to SEQ ID NO: 221250

SEQ ID NO: 396077 - DNA, 1000 bp, Homo Sapiens; identical to SEQ ID NO: 115929

SEQ ID NO: 396078 - DNA, 1000 bp, Homo Sapiens; identical to SEQ ID NO: 115931

SEQ ID NO: 396079 - DNA, 1000 bp, Homo Sapiens; identical to SEQ ID NO: 115932

SEQ ID NO: 396080 - DNA, 1000 bp, Homo Sapiens
ttctgaattggccagaggaaatctgaatgtattatcctgtgtgtgtctaggtagagatattggaaggctgccaggggatttcgaagtttgcaacctttataggataactgatggcaatattaagacagacgcctgcttttgcaaataacttacaagactgtaaattccaaagatctgaatggggctttcctgatgttggtatctaaggcttaggcctatagattgatttacctttggaattgtgctccaaatgtctactgaagcttaaccgaagaactaataaatggactacagtagctcacgttacagggaaggagggtaggcagggaggctctgtgtgttaaaatgagggtctcactgctttaggattgaagtggctggaaagagtgatgcctggggaaggagatggagttatgagggtactgtggctggtactttctgtactaaacatttcctttttctattttaccactaattttgttttaaactgtgagccgtccaagtcagaagaagacagcaaaaaaagcaacttttccaacatacaatttacttttaataaagtatgaatatttcattttgagaacattccctggaattgccacataattcattaaaaacatttttttaagcaacacttggaacagtgtttactttaaatccttaatggccttaattaattctcagattcctgccccatcacttacagaaccaattcactttagagtgactaaaaggaaacgatagcctagctttctaaagccacgctgtgtccctcaattacagagggtaggaatgggtatacctctaactgtgcaaagcagagtgaaattcaattcatagaataacaactgctgggaatatccgtgccaggaaaagaaaaatttctggcaaatattttgtcactgctgtaaagcaaaatatttgtgaaagtgccaaaataaagtctgtcatgccaaaagtaaatcattgtatagactgacatccagttttcttcaactgt

SEQ ID NO: 396081 - DNA, 1000 bp, Homo Sapiens; identical to SEQ ID NO: 115933

SEQ ID NO: 396082 - DNA, 1000 bp, Homo Sapiens
ggttaaggggtggggctggacgtcaggagccaagatggcggcggtggtcgcactctccttgaggcgccggttgccggccacaacccttggcggagcctgcctgcaggcctcccgaggagcccagacagctgcagccacagctccccgtatcaagaaatttgccatctatcgatgggacccagacaaggctggagacaaacctcatatgcagacttataaggttgaccttaataaatgtggccccatggtattggatgctttaatcaagattaagaatgaagttgactctactttgaccttccgaagatcatgcagagaaggcatctgtggctcttgtgcaatgaacatcaatggaggcaacactctagcttgcacccgaaggattgacaccaacctcaataaggtctcaaaaatctaccctcttccacacatgtatgtgataaaggatcttgttcccgatttgagcaacttctatgcacagtacaaatccattgagccttatttgaagaagaaggatgaatctcaggaaggcaagcagcagtatctgcagtccatagaagagcgtgagaaactggacgggctctacgagtgcattctctgtgcctgctgtagcaccagctgccccagctactggtggaacggagacaaatatctggggcctgcagttcttatgcaggcctatcgctggatgattgactccagagatgacttcacagaggagcgcctggccaagctgcaggacccattctctctataccgctgccacaccatcatgaactgcacaaggacctgtcctaagggtctgaatccagggaaagctattgcagagatcaagaaaatgatggcaacctataaggagaagaaagcttcagtttaactgtttccatgctaaacatgatttataaccagctcagagctgaacataatttatatctaatttgagttcctttaaagatcttggttttccatgaatacagcatgtataataaaaattttaaga

SEQ ID NO: 396083 - DNA, 1000 bp, Homo Sapiens; identical to SEQ ID NO: 115934

SEQ ID NO: 396084 - DNA, 1000 bp, Homo Sapiens; identical to SEQ ID NO: 285770

SEQ ID NO: 396085 - DNA, 1000 bp, Homo Sapiens; identical to SEQ ID NO: 115935

SEQ ID NO: 396086 - DNA, 1000 bp, Homo Sapiens
ctcctgggtgcgtgcagacccttcccctccaccccccaggtcttccaagctctgcttcctcagtttccaaaatggaaccacctcacctccgcagcacccgacttaccaggacgcatgcccctccctctgccctcatcaaacccacagacccggactccctttctgccaccccaggctggtccggccccaggtgtggggtccgctctctccactcccagggctccgcgcccaagtgagggggcccctgccggagcctcagacacactggagttcagggctgggggggccttggcacatacctgtcccttggctatgagcaggctttgggggcccttccgcggcagccccgggggccgaggtagggtctgggggcttagaggctgggatggctcctggccccaccgccagggggcaagcgcaggccgggctgggaggcggcggcggcggctcgggctggggggtcaggtggacgctgcctccggggctggtcgcgcatccctcagtccctcggccacccgggggtcgctccctcgtgcccaccgcacctgccgagcctctttggacccagatctgttcatgcttttgtcttcgtcactgcggcggggccctttgatgtcttcatctgtatggggtggaaaaatcaccgggaatcccccttcagttctttgaaaaagttccatgactcgaatatctgaaatgaagaaaacaaaccgactcacaaacctccaagtagctccaaatgcaatttttaaaatggaaaacaaaaatctgaaagaaacgtctttagtggctttaagccccaaaacgtccctaaggcgtcctcgagatgaagacgggggggagcccccagccaggtggagaccccgcaggacgcggcggcgcccggtgaccgaggcctcgcacagccggccgccctgagggtcgggccggagccagggtccaagaggggcgcgtttgtgtctcgggttaaaataaggttccgtccgcgtgctgggtcaga

SEQ ID NO: 396087 - DNA, 1000 bp, Homo Sapiens; identical to SEQ ID NO: 221253

SEQ ID NO: 396088 - DNA, 893 bp, Homo Sapiens; identical to SEQ ID NO: 115936

SEQ ID NO: 396089 - DNA, 1000 bp, Homo Sapiens; identical to SEQ ID NO: 221255

SEQ ID NO: 396090 - DNA, 1000 bp, Homo Sapiens; identical to SEQ ID NO: 115937

SEQ ID NO: 396091 - DNA, 1000 bp, Homo Sapiens; identical to SEQ ID NO: 221257

SEQ ID NO: 396092 - DNA, 1000 bp, Homo Sapiens; identical to SEQ ID NO: 115938

SEQ ID NO: 396093 - DNA, 1000 bp, Homo Sapiens; identical to SEQ ID NO: 221258

SEQ ID NO: 396094 - DNA, 1000 bp, Homo Sapiens
ggctggtgctgcacatgaagaatggcgcgggctgcccctgcccacagctggacagcctggcgggcagcttcctggtcatgggccgcaaagtggatggacagctgctgctcatggccgtctaccgctgggacaagaagaataaggagatgaagtttgcagtcaaattcatgttctcctacccctgctccctctactaccctttcttctacggggcggcagagccccactgaagggcactcctccttgccctgccagctgtgccttgcttgccctctggccccgccccaacttccaggctgacccggccctactggagggtgttttcacgaatgttgttactggcacaaggcctaagggatgggcacggagcccaggctgtcctttttgacccaggggtcctggggtccctgggatgttgggcttcctctctcaggagcagggcttcttcatctgggtgaagacctcagggtctcagaaagtaggcaggggaggagagggtaagggaaaggtggaggggctcagggcaccctgaggcggaggtttcagagtagaaggtgatgtcagctccagctcccctctgtcggtggtggggcctcaccttgaagagggaagtctcaatattaggctaagctatttgggaaagttctccccaccgcccctgtacgcgtcatcctagccccccttaggaaaggagttagggtctcagtgcctccagccacaccccctgccttccccagcttgcccatttccctgccccaaggcccagagctccccccagactggagagcaagcccagcccagcctcggcatagacccccttctggtccgcccgtggctcgattcccgggattcattcctcagcctctgcttctcccttttatcccaataagttattgctactgctgtgaggccataggtactagacaaccaatacatgcagggttgggttttctaatttttttaactttttaattaaatcaaaggtcgacgcgcggccgcg

SEQ ID NO: 396095 - DNA, 1000 bp, Homo Sapiens; identical to SEQ ID NO: 115939

SEQ ID NO: 396096 - DNA, 1000 bp, Homo Sapiens; identical to SEQ ID NO: 115940

SEQ ID NO: 396097 - DNA, 1000 bp, Homo Sapiens; identical to SEQ ID NO: 115941

SEQ ID NO: 396098 - DNA, 1000 bp, Homo Sapiens; identical to SEQ ID NO: 221259

SEQ ID NO: 396099 - DNA, 1000 bp, Homo Sapiens; identical to SEQ ID NO: 115942

SEQ ID NO: 396100 - DNA, 1000 bp, Homo Sapiens; identical to SEQ ID NO: 115943

SEQ ID NO: 396101 - DNA, 1000 bp, Homo Sapiens
gagtcatggaattgtcaaagtaagccttccctcaccagcaaattgtctcctgatctgaatgaatttgtctcttaatgcatccatagaaaagtgttaattgtgggttcaaagcattctctgcaaataggcatctcagctcctcacacttatggctatttctgacgtatagccagttttcttccctccttgctattaaagccagagtcgtaattccaaattatttttcagtaagacagttaatcagcattattgtgagagggactgaaaagaaattctccattatgaggaattgggaagaaatctggtatccaagcttaaatttcttgctatacagaactatgtatgtatttaggctattctgaagggcacagggaaggggaacaaatatcttcacttcagttttatttgtgaattacatgtttcatgaatccatttggcacagagacacaaggaagaaaacactagtaaccaactttccactagttcatatactgagaaacagtaaatacctttcctttccacttttaccctgtgttctttgaacatcatttgtgcagattctgccctcaatgaggaccaaataaagatgatttttgtgcttagcagtttaaggtatatggctggcatatgcaaaactctttcccaattcagtcgctacttttacttctgccctttctatccatcgtcttcattttgtgtgtacagtgctgtgtgtaagcttatcagtgtgtttttttatttgtatcagtcatgaaagtcctgttaggtatccagagttctatttatctagctgtacagactctttcagaggtttaacgtgctgcttccgatgtgccacctgcagtagtggatcatgtggagtgaaaggcaaatcttactgcttaatgtataaactctcaccacaggaagcatcgctgtttccaataaatattgctgaagacagaaaaaaaaaaaaaaaaaaaaaaaaaaaaaaaaaaaaaaaaaaaaaaaaaaaaaaaaa

SEQ ID NO: 396102 - DNA, 1000 bp, Homo Sapiens; identical to SEQ ID NO: 285779

SEQ ID NO: 396103 - DNA, 1000 bp, Homo Sapiens; identical to SEQ ID NO: 221261

SEQ ID NO: 396104 - DNA, 1000 bp, Homo Sapiens; identical to SEQ ID NO: 285781

SEQ ID NO: 396105 - DNA, 1000 bp, Homo Sapiens; identical to SEQ ID NO: 285785

SEQ ID NO: 396106 - DNA, 1000 bp, Homo Sapiens; identical to SEQ ID NO: 221262

SEQ ID NO: 396107 - DNA, 1000 bp, Homo Sapiens; identical to SEQ ID NO: 221264

SEQ ID NO: 396108 - DNA, 1000 bp, Homo Sapiens; identical to SEQ ID NO: 285789

SEQ ID NO: 396109 - DNA, 1000 bp, Homo Sapiens
cgaccgcgagctgctgctggtgggacggctctgggtggtgttcatcgtggtagtgtcggtggcctggcttcccgtggtgcaggcggcacagggcgggcagctcttcgattacatccaggcagtctctagctacctggcaccgcccgtgtccgccgtcttcgtgctggcgctcttcgtgccgcgcgttaatgagcagggcgccttctggggactcatcgggggcctgctgatgggcctggcacgcctgattcccgagttctccttcggctcgggcagctgtgtgcagccctcggcgtgcccagctttcctctgcggcgtgcactacctctacttcgccattgtgctgttcttctgctctggcctcctcaccctcacggtctccctgtgcaccgcgcccatccccagaaagcacctccaccgcctggtcttcagtctccggcatagcaaggaggaacgggaggacctggatgctgatgagcagcaaggctcctcactccctgtacagaatgggtgcccagagagtgccatggagatgaatgagccccaggccccggcaccaagcctcttccgccagtgcctgctctggttttgtggaatgagcagaggtggggtgggcagtcctccgccccttacccaggaggaggcagcggcagcagccaggcggctggaggacatcagcgaggacccgagctgggcccgtgtggtcaacctcaatgccctgctcatgatggcagtggccgtgttcctctggggcttctatgcctaagaccaactgcgttggacaccataagccacagcctcacaggaagtgggggtgaggagcctgcggtgctccccagaaaaggggaaggggcagtggggtgagaaggtcctggctccccttctcccggccttcctctgcctggggcccactgcatctgattggcagtcacttcccatgagggcctggcccacccgctgcagttgccctaaggaaaaataaagctgcctttcccctgta

SEQ ID NO: 396110 - DNA, 1000 bp, Homo Sapiens; identical to SEQ ID NO: 285790

SEQ ID NO: 396111 - DNA, 1000 bp, Homo Sapiens
tgtcagggtcctggccccccagaactggcttgatcaagggccttatgtggagcagaggttgtctctgaaccaggagagaaggtactatacctttcaaatccccagggcagacacacccccacccagcccctatttggacctaaactgtgccatttgaacagtcacttccaagctcagtctaaatgaaaccgaaacgtgaccacgcacaaaggcagtcactgcctcgaggggtgcagaccgcagaattttcacagcaggggctcttggaactctggaaacccccttcttaaatttgggaggaggagtatgcctttggtgtccccctcccaaggggcaattctgaaccccatctttggcaggcatacatatttcactgtttccaaagctatctactctgccaaacaacacccagtcctattccaaactctcaacgattctatcttgttcctgtttttctatgtatttatggttgccgtttgtgtctgatttgattttactgttttttccctgattttatggagtagcattgtgacctgttttcctttgtcttatataactttagtaaactaaccactgtcaatgattgagggcaggtggcacgtggggaagaggggacttggcacgcagtggctacctgggcatttgtggtcatttcagtttccatctccccagcgggggctccctgggtgaaaggccacagtattttgggttggtaggcaaattgcaacattctggacatggcctgaggaaggcctcttcttataagattctcagaccaaattctagaccaaagacacaggcagaccaagtccccaggccccgcctggaaggaagtcgttcctcaactctccccaaggcacctgtctccaatcagagccctctcgcccagccagccctggctctgtgtgcagagcatagctctgcgagtacctgtgtaataatgctcaaccttcatgtctccgtataaacgaaactttccatgagaaaaaaaaaaaaaaaa

SEQ ID NO: 396112 - DNA, 1000 bp, Homo Sapiens
gagaaggagacccatttgtagggtgtggccagagcgaggcggctcctaagccgggaacctaggtcagggccaccctccattctcagcggacagcctctgcctctgtctcctgccacaatcctgctgggaactctggagagccacaggcacccccagctggaggccagactcctctcttgtgctagctggagcagctccttcccctttgctgataacaccaccactgggacgtgccatgttgggacgccactccctgtggaaggcaccatcgtttttataaaggggggtctttttggaggccgccatctgattgcaacacctcgagttatgaggattccactgtggggatgcctcttgttagagcgtactgcatttgtacacggggagaggagctataattggaacgcacactgccgtccaatgtggagagcctgatgggacaataccctgttggaagtgacaactgaacacactgtgttggatcggaggttccgttaggggatccttccttaggcttaacgacagaggcaagcctttgcatgccgtcagtctggagtttcctccgagtctctcatggcatctccagctcctgccctagttccgcactgttcttgcagtgtttcatcaactcctggagcattggaatggaaggggcttgggagatgattcctagacttcacaaacactcggcatgcctccctgcactgtccgttcctctgcccaaggccgatattgctaactgatcacagattctttcccacctcacaatcctccgaatgtgctccaggcgacaccatttgccatcctgcttctaacgcaaacccctgacttcatggatgaggaacctggagaccaaagagacaaagggactttttcaagttcacatggggacccccttcttgggggccagagatatgactaaaaccttatctccttgtgctcaggccagtgtcttcccattaaccccctgccttagttaacaagtgtgtatggattgcca

SEQ ID NO: 396113 - DNA, 1000 bp, Homo Sapiens; identical to SEQ ID NO: 285791

SEQ ID NO: 396114 - DNA, 1000 bp, Homo Sapiens; identical to SEQ ID NO: 285792

SEQ ID NO: 396115 - DNA, 1000 bp, Homo Sapiens; identical to SEQ ID NO: 115944

SEQ ID NO: 396116 - DNA, 1000 bp, Homo Sapiens; identical to SEQ ID NO: 221266

SEQ ID NO: 396117 - DNA, 1000 bp, Homo Sapiens; identical to SEQ ID NO: 115945

SEQ ID NO: 396118 - DNA, 1000 bp, Homo Sapiens; identical to SEQ ID NO: 285797

SEQ ID NO: 396119 - DNA, 1000 bp, Homo Sapiens
gctgacctcagtgggttactttgctctgtctctggatgctcctaatttacatggagatgcctacctgaactgtttcctctctgccttgattgaaattccagcttacattacagcctggctgctattgcgaaccctgcccaggcgttatatcatagctgcagtactgttctggggaggaggtgtgcttctcttcattcaactggtacctgtggattattacttcttatccattggtctggtcatgctgggaaaatttgggatcacctctgctttctccatgctgtatgtcttcactgctgagctctacccaaccctggtcaggaacatggcggtgggggtcacatccacggcctccagagtgggcagcatcattgccccctactttgtttacctcggtgcttacaacagaatgctgccctacatcgtcatgggtagtctgactgtcctgattggaatcctcaccctttttttccctgaaagtttgggaatgactcttccagaaaccttagagcagatgcagaaagtgaaatggttcagatctgggaaaaaaacaagagactcaatggagacagaagaaaatcccaaggttctaataactgcattctgaaaaaatatctaccccatttggtgaagtgaaaaacagaaaaataagaccctgtggagaaattcgttgttcccactgaaatggactgactgtaacgattgacaccaaaatgaaccttgctatcaagaaatgctcgtcatacagtaaactctggatgattcttccagataatgtccttgctttacaaaccaaccatttctagagagtctccttactcattaattcaatgaaatggattggtaagatgtcttgaaaacatgttagtcaaggactggtaaaatacatataaagattaacactcatttccaatcatacaaatactatccaaataaaaataacatcattgtattaacgcaaatattaggtgacaacaaaaaaaaaaaaaaaaaaaaaaaa

SEQ ID NO: 396120 - DNA, 1000 bp, Homo Sapiens; identical to SEQ ID NO: 115946

SEQ ID NO: 396121 - DNA, 1000 bp, Homo Sapiens
gagggatgcccgtggatgtcaactcagctgccttccgcctgtggcagatcctcaacggcaccggcttccacggttgcatccgaaacctgtacatcaacaacgagctgcaggacttcaccaagacgcagatgaagccaggcgtggtgccaggctgcgaaccctgccgcaagctctactgcctgcatggcatctgccagcccaatgccaccccagggcccatgtgccactgcgaggctggctgggtgggcctgcactgtgaccagcccgctgacggcccctgccatggccacaagtgtgtccatgggcaatgcgtgcccctcgacgctctttcctacagctgccagtgccaggatgggtactcgggggcactgtgcaaccaggccggggccctggcagagccctgcagaggcctgcagtgcctgcatggccactgccaggcctcaggcaccaagggggcacactgtgtgtgtgaccccggcttttcgggcgagctgtgtgagcaagagtccgagtgccggggggaccctgtccgggactttcaccaggtccagaggggctatgccatctgccagaccacgcgccccctgtcatgggtggagtgccggggctcgtgcccaggccagggctgctgccagggccttcggctgaagcggaggaagttcacctttgagtgcagcgatgggacctcttttgccgaggaggtggaaaagcccaccaagtgtggctgtgccctctgcgcatagcgctgggcgtggacaggccggtgagggcgggcaaggggccccagccgctgcagcagcggagacagtcgccagcagctgggctggggtgcaggtcatcacaggacggctcctgggcagctgggccctcctgggtggggtggtgccagagcagccttttaaaagcaaattgcgccatagctgggggcagcgggggtgggcgaggcctgagctgcgggctgccctctccggaagtccttgcacaaataggcgcttaataa

SEQ ID NO: 396122 - DNA, 1000 bp, Homo Sapiens; identical to SEQ ID NO: 115947

SEQ ID NO: 396123 - DNA, 1000 bp, Homo Sapiens; identical to SEQ ID NO: 285799

SEQ ID NO: 396124 - DNA, 1000 bp, Homo Sapiens; identical to SEQ ID NO: 115948

SEQ ID NO: 396125 - DNA, 1000 bp, Homo Sapiens; identical to SEQ ID NO: 115949

SEQ ID NO: 396126 - DNA, 1000 bp, Homo Sapiens; identical to SEQ ID NO: 115950

SEQ ID NO: 396127 - DNA, 1000 bp, Homo Sapiens; identical to SEQ ID NO: 115951

SEQ ID NO: 396128 - DNA, 1000 bp, Homo Sapiens; identical to SEQ ID NO: 285802

SEQ ID NO: 396129 - DNA, 1000 bp, Homo Sapiens; identical to SEQ ID NO: 285805

SEQ ID NO: 396130 - DNA, 1000 bp, Homo Sapiens
caagggggacgccggggtccccctcagggacacaggagcccagggggcctctgggcctggagaagctgcccctgcgccagcctgggcctgagaagggggccctggacctggagaagccgcccctaccccagcctgggcctgagaagggggccctggacctgggcctgctgtcccaggagggcgaggcagccacacagcagtggctggggggccagcggggggtgcgtgtgcctcttctgggcagcagactgccctatcagcccccagccctgtgcagcctgcgagctctgtccggtctcctactccacaagaaggccctggagcacaaggccacctccctggtggtggggggcgaggctgagcggccggccggagcactgcaagcctcactggggctggtgcgggggcagctccaggacaacccggcctacctcctgttgcgggcgcggttcctggcagccttcaccctccctgcgctcctggccaccctggccccccaaggcgtccgcaccaccctctcagtaccttcgagggtgggctctgagagtgaggatgaagacctcctgagtgagctggaacttgcagacagggacgggcagccgggctgcacgacagccacatgccccattcagggagccccagactctggtaaatgctctgcttcctcctgcctggatacttctaatgaccctgacgacctggacgtgctcagaacccggcatgccaggcacacccggaagcggaggcggctggtgtgagcagcaggacaagcactttctcagaagcccgtggccctgctgacgagagacagcccacccccagcctgcaagagaggcagccagaggccaggtatctgctggccgctgactgaccaggtccgcagtgaacagaggcgggcctgccgactgactgtgtggcatggagcatggctgttccccaagtgcacacctgaacacttggaggaataaagttctgtttttaattgtggaaaaaaaaaaaa

SEQ ID NO: 396131 - DNA, 720 bp, Homo Sapiens; identical to SEQ ID NO: 115955

SEQ ID NO: 396132 - DNA, 1000 bp, Homo Sapiens; identical to SEQ ID NO: 221269

SEQ ID NO: 396133 - DNA, 1000 bp, Homo Sapiens; identical to SEQ ID NO: 115956

SEQ ID NO: 396134 - DNA, 462 bp, Homo Sapiens
tctggccatttctcttgaaactgcggctcgggacctgcggtacctgctgtagtcacgagggacgggcggcggctggtcggcagagagtagcctgcaacattcggccgtggtttacatgagtttacccctcaatcccaaacctttcctcaatggactaacaggaaagccagtgatggtgaaacttaagtggggaatggagtacaagggctatctggtatctgtagatggctacatgaacatgcagcttgcaaatacagaagaatacatagatggagctttgtctggacatctgggtgaagttttaataaggtgtaataatgtcctttatatcagaggtgtggaagaagaggaagaagatggggaaatgagagaatagcatcttttgtgggggattttttttatatatatttctagacaataaagatttgtttgtttttcaacttgaaaaaaaaaaaaaaaaaa

SEQ ID NO: 396135 - DNA, 1000 bp, Homo Sapiens; identical to SEQ ID NO: 290605

SEQ ID NO: 396136 - DNA, 1000 bp, Homo Sapiens; identical to SEQ ID NO: 285808

SEQ ID NO: 396137 - DNA, 1000 bp, Homo Sapiens; identical to SEQ ID NO: 285809

SEQ ID NO: 396138 - DNA, 1000 bp, Homo Sapiens; identical to SEQ ID NO: 285810

SEQ ID NO: 396139 - DNA, 1000 bp, Homo Sapiens; identical to SEQ ID NO: 285811

SEQ ID NO: 396140 - DNA, 1000 bp, Homo Sapiens; identical to SEQ ID NO: 115958

SEQ ID NO: 396141 - DNA, 1000 bp, Homo Sapiens; identical to SEQ ID NO: 115959

SEQ ID NO: 396142 - DNA, 1000 bp, Homo Sapiens; identical to SEQ ID NO: 115960

SEQ ID NO: 396143 - DNA, 1000 bp, Homo Sapiens; identical to SEQ ID NO: 285813

SEQ ID NO: 396144 - DNA, 1000 bp, Homo Sapiens; identical to SEQ ID NO: 221271

SEQ ID NO: 396145 - DNA, 1000 bp, Homo Sapiens; identical to SEQ ID NO: 221273

SEQ ID NO: 396146 - DNA, 1000 bp, Homo Sapiens; identical to SEQ ID NO: 115962

SEQ ID NO: 396147 - DNA, 1000 bp, Homo Sapiens; identical to SEQ ID NO: 285818

SEQ ID NO: 396148 - DNA, 1000 bp, Homo Sapiens; identical to SEQ ID NO: 115963

SEQ ID NO: 396149 - DNA, 1000 bp, Homo Sapiens; identical to SEQ ID NO: 285820

SEQ ID NO: 396150 - DNA, 1000 bp, Homo Sapiens
gccccgaggggaagggatccgaggcagggactcgcaagaagctgcgcctgtaccagttcctgctggggctactgacgcgcggggacatgcgtgagtgcgtgtggtgggtggagccaggcgccggcgtcttccagttctcctccaagcacaaggaactcctggcgcgccgctggggccagcagaaggggaaccgcaagcgcatgacctaccagaagctggcgcgcgccctccgaaactacgccaagaccggcgagatccgcaaggtcaagcgcaagctcacctaccagttcgacagcgcgctgctgcctgcagtccgccgggcctgagcacacccgaggctcccacctgcggagccgctgggggacctcacgtcccagccaggatccccctggaagaaaaagggcgtccccacactctaggtgataggacttacgcatccccaccttttggggtaaggggagtgctgccctgccataatccccaagcccagcccgggcctgtctgggattccccacttgtgcctggggtccctctgggatttctttgtcatgtacagactccctgggatcctcatgttttgggtgacaggacctatggaccactatactcggggaggcagggtagcagtgcttccagagtcccaagagcttctctgggattttcttgtgatatctgattccccagtgaggcctgggacctttttaagatcgctgtgtgtctgtaaaccctgaatctcatctggggtgggggccctgctggcaaccctgagccctgtccaaggttccctcttgtcagatctgagatttcctagttatgtctggggccctctgggagctgttatcatctcagatctcttcgcccatctatggctgtgttgtcacatctgtcccctcatttttgagatcccccaattctctggaactattctgctgcccctttttatgtgtctggagttccccaatcacatctagggctcctccaaaaaaaaaaaaaaaaaaaa

SEQ ID NO: 396151 - DNA, 1000 bp, Homo Sapiens; identical to SEQ ID NO: 285822

SEQ ID NO: 396152 - DNA, 619 bp, Homo Sapiens; identical to SEQ ID NO: 285823

SEQ ID NO: 396153 - DNA, 1000 bp, Homo Sapiens; identical to SEQ ID NO: 285824

SEQ ID NO: 396154 - DNA, 1000 bp, Homo Sapiens; identical to SEQ ID NO: 221275

SEQ ID NO: 396155 - DNA, 1000 bp, Homo Sapiens; identical to SEQ ID NO: 115965

SEQ ID NO: 396156 - DNA, 1000 bp, Homo Sapiens; identical to SEQ ID NO: 285827

SEQ ID NO: 396157 - DNA, 1000 bp, Homo Sapiens; identical to SEQ ID NO: 221276

SEQ ID NO: 396158 - DNA, 1000 bp, Homo Sapiens; identical to SEQ ID NO: 115966

SEQ ID NO: 396159 - DNA, 1000 bp, Homo Sapiens; identical to SEQ ID NO: 115967

SEQ ID NO: 396160 - DNA, 1000 bp, Homo Sapiens; identical to SEQ ID NO: 285831

SEQ ID NO: 396161 - DNA, 1000 bp, Homo Sapiens; identical to SEQ ID NO: 115969

SEQ ID NO: 396162 - DNA, 628 bp, Homo Sapiens
cctgcgtggctgggctgctcgggttagatcgtcaggaaaagcctaaagattagactgtaagaaaagaaaatagaagccatgtttcgaagacctgtattacaggtacttcgtcagtttgtaagacatgagtccgaaacaactaccagtttggttcttgaaagatccctgaatcgtgtgcacttacttgggcgagtgggtcaggaccctgtcttgagacaggtggaaggaaaaaatccagtcacaatattttctctagcaactaatgagatgtggcgatcaggggatagtgaagtttaccaactgggtgatgtcagtcaaaagacaacatggcacagaatatcagtattccggccaggcctcagagacgtggcatatcaatatgtgaaaaaggggtctcgaatttatttggaagggaaaatagactatggtgaatacatggataaaaataatgtgaggcgacaagcaacaacaatcatagctgataatattatatttctgagtgaccagacgaaagagaaggagtagaaaggatgattcttctttggccatcatttggtacagtctcatttccaagtcatgtataatctttatggcttccaaggacaagaattaaaatactcttttacgt

SEQ ID NO: 396163 - DNA, 1000 bp, Homo Sapiens; identical to SEQ ID NO: 115970

SEQ ID NO: 396164 - DNA, 1000 bp, Homo Sapiens
ctcaagcagaggaaggagccaggcttttggcttccaaatcactgctgaacagatacgccgtggagggacgagacctgaccttgcagtacaacatctacaatgttggctcaagtgctgcattagacgtggaactatctgatgattccttccctccagaagactttggcattgtgtctggaatgctcaatgtcaaatgggaccggattgcccctgctagcaatgtctcccacactgtggtcctgcgccctctcaaggctggttatttcaacttcacctcggcaacaattacttacctggcccaggaggatgggcccgttgtgattggctctaccagtgcacctggacagggaggaatcctggctcagcgggagtttgacaggcgattctcccctcattttctggactgggcagcctttggggtcatgacccttccctccatcggcatccccctgctattgtggtactccagcaagaggaaatatgacactcccaaaacgaagaagaactgattggggcttccacagccctcctctcccaagaaatccaggctcctctcccaagaaatccaggtgctttccagactccaaagggtatcttaaatgcaatctcttctctcttagcccttggccactttctcctggatcctgccctgctctcagccatagtgaaggaccagccctaggagtctgcgagagcctccttggttccatcgtgaagccataaacaggaatgcctttggcaatagccttgagcctagagggccctctgatgccccactgaggtgctgttggtttattgctggcaacgtgaattctctcaggggtctaggaggggcattttggagactgcctgacaccacccctatcccctgcctccccctctcagaagagggtggaagatgaaatgaaagctatgggactcttggaggatacccagtgtctattctgggttagagaagtgcttactaaggggttttctaataaaaacaaatgccaattgc

SEQ ID NO: 396165 - DNA, 1000 bp, Homo Sapiens; identical to SEQ ID NO: 221277

SEQ ID NO: 396166 - DNA, 1000 bp, Homo Sapiens; identical to SEQ ID NO: 285836

SEQ ID NO: 396167 - DNA, 1000 bp, Homo Sapiens; identical to SEQ ID NO: 115971

SEQ ID NO: 396168 - DNA, 1000 bp, Homo Sapiens; identical to SEQ ID NO: 285838

SEQ ID NO: 396169 - DNA, 1000 bp, Homo Sapiens; identical to SEQ ID NO: 285839

SEQ ID NO: 396170 - DNA, 1000 bp, Homo Sapiens; identical to SEQ ID NO: 285840

SEQ ID NO: 396171 - DNA, 1000 bp, Homo Sapiens; identical to SEQ ID NO: 115972

SEQ ID NO: 396172 - DNA, 1000 bp, Homo Sapiens; identical to SEQ ID NO: 285842

SEQ ID NO: 396173 - DNA, 1000 bp, Homo Sapiens; identical to SEQ ID NO: 221278

SEQ ID NO: 396174 - DNA, 1000 bp, Homo Sapiens; identical to SEQ ID NO: 285844

SEQ ID NO: 396175 - DNA, 1000 bp, Homo Sapiens; identical to SEQ ID NO: 115973

SEQ ID NO: 396176 - DNA, 1000 bp, Homo Sapiens; identical to SEQ ID NO: 221280

SEQ ID NO: 396177 - DNA, 1000 bp, Homo Sapiens; identical to SEQ ID NO: 285848

SEQ ID NO: 396178 - DNA, 1000 bp, Homo Sapiens
tgagtgttgattatgtagtggacaaagcacaacttctgagaaaaggtgtatctggggactggaaaaatcacttcacagtggcccaagctgaagactttgataaattgttccaagagaagatggcagatcttcctcgagagctgttcccatgggaataacgtccaaaacactctggatcttatatggagaatgacattgattctcctgtccttgtacatgtacctgactggggtcattgtgtaagacttattattttatcctgaaaccttaaatatcaaacctctgcatctctgatcccttccttgttaaaagttaccacggttggccaggcgcggtggttcatgcctgtaatcccagcactatgggaggccgagacgggcggatcacgaggtcaggagactgagaccatcctggctaacacggtgaaaccccatctctactaaaaatacaaaaaacaaaaaaaattagccaggcgcattggctcatgtctgtaatcccagcactttgggaggtcgggggggtgggggaggatcacggggtcaggagatcgagaccatcctggccaacatgatgaaaccctatctctactaaaaatacaaaaattagccgggcatggtggtgcacgcctatagtcccagctactcgggaggctgaggtaggagaatcgtttgaactcaggaggcagaggttgcaatgagccaagatcgcgccactgcactccagcctgggtgacagagcgagaccgtctcaaaaagaaagaagtgactagggttcagagaaccagggttcaaagcccagggatgcaaaggttgcagtgagttgagtcatgggatcccagacttttttaaatgtttgcaatgtttcccgtttacagaatgctacaagaataatgtacgtactacctaaaaggatgtctaaatgtttgttaataaaaataagaaatagctacagtgacagattttagagcaaaaattagtaataaaaataagaaataaaatta

SEQ ID NO: 396179 - DNA, 1000 bp, Homo Sapiens; identical to SEQ ID NO: 115974

SEQ ID NO: 396180 - DNA, 1000 bp, Homo Sapiens; identical to SEQ ID NO: 285850

SEQ ID NO: 396181 - DNA, 1000 bp, Homo Sapiens; identical to SEQ ID NO: 285851

SEQ ID NO: 396182 - DNA, 1000 bp, Homo Sapiens; identical to SEQ ID NO: 285852

SEQ ID NO: 396183 - DNA, 1000 bp, Homo Sapiens; identical to SEQ ID NO: 285853

SEQ ID NO: 396184 - DNA, 1000 bp, Homo Sapiens
gcaacttgaaatagaaagagaagagaaggaaaaactcaaaagagaggcaaaagaaaacacagctactcttaaagaaaaaaaagacaagaaaacacaaacatttttattggaaacacctgaaatttattggaaattggattctaaagcagttccttcacaaactgtatctcgaaatttcacatcagttgatcatggcatatccaaagataaaagagactatctgtggacatctgccaaaaatactttatctacaccattgccaaaggcatatacagtgaagacaccaacaaaaccaaaactacagcaaagagaaaacttgaatatacccattgaagaaagtaaaaaaaagagaaaaatggcctttgaatttgatattaattcagatagttcagaaactactgatcttttgagcatggtttcagaagaagagacattgaaaacactgtataggaacaataatccaccagcttctcatctttgtgtcaaaacaccaaaaaaggccccttcatctctaacaacccctggatctacactgaagtttggagctataagaaaaatgcgggaggaccgttgggctgtaattgctaaaatggatagaaaaaaaaaactaaaagaagctgaaaagttatttgtttaatttcagagaatcagtgtagttaaggagcctaataacgtgaaacttatagttaatattttgttcttatttgccagagccaaattttatctggaagttgagacttaaaaaatacttgcatgaatgatttgtgtttctttatatttttagcctaaatgttaactacatattgtctggaaacctgtcattgtattcagataattagatgattatatattgttgttactttttcttgtattcatgaaaactgtttttactaagttttcaaatttgtaaagttagcctttgaatgctaagaatgcattattgagggtcattctttattctttactattaaaatattttggatgcaaaaaaaaaaaaaaa

SEQ ID NO: 396185 - DNA, 1000 bp, Homo Sapiens; identical to SEQ ID NO: 221281

SEQ ID NO: 396186 - DNA, 1000 bp, Homo Sapiens
gatgctgaggcagttcattaaaccaggcctcagcttcagtgcctcatcttgccatctcccggccaggctgggaacgggcaccaagcagccgcctctaacaaacaccatggtccgtggaagttcatgccagcagcttgcctttgagaagaaatgctgctggctctatttttacattcccttccacctctatactgtcatgtcaccgttctgaactcccagatctgagaaggaactagtgttggtggtatgtaacaagagttacgtatccaggggcttgtgccttggtttctcctttgattgctggtaaattctgaggccacagagaaatgcattgagtgtgaatgttgtcatctgtaatccctccctcagctgataatggtagttgatctgttgtaaatatatacatatatgcatatttgcacttccagatgggttgcataagaatcaggtccttaaatacctcccaatctgatgaaacgatagaataaagtaacatttcccagaatggaggaatacattattttatcgtatatttttgtccaagcgataagctgacggtggtattgcttctctgcatgttatcagtgtgtacatctggtgcttttcatgtgtcatttgtgagccacaaatgcaaagttgccatttgaattcagtcaggctacagggtggtgtcagtcaaggtctttcaggtgggggagaaattggttagggctcccactgccaaatgcaagcagatagcataacctgactgttatgtgccctcaggcagcatgcttagggacaactctgtggcctgggggacatctgtgtcacagtataggattgccattcaggtgttttgtacctatttctttcctgacgttgtcccctttttttgtactgatccaactgggagaacctcagccaatgctggaagtatgattgaagtacctctcttttgtgactcttgtacagcttaatgtgcaataaaggaaaagttatatctgaaaaaaaaaaaaaa

SEQ ID NO: 396187 - DNA, 1000 bp, Homo Sapiens
cctacgtggagctggggggcagggtgctggtcatggcggtgtacgacttcgaccgcttctctcgcaatgacgccatcggggaggtgcgggtccctatgagctccgtggacctggggcggccagtgcaggcctggcgggagctgcaggcggctccgcgggaggagcaggagaagcttggggacatctgcttctccctccgctatgtccccacggccgggaagctcaccgtcatcgtcctggaggctaaaaacctgaagaagatggacgtaggaggactgtcagatccatacgtcaaggtccacctgctgcagggcggcaaaaaggtgcggaagaagaaaaccaccatcaagaagaacactctgaacccctattacaacgaagctttcagcttcgaggtgccctgtgaccaagtccagaaggtgcaggtggagctgaccgtgctggactacgacaagctgggcaagaacgaggccatcgggagggtggccgtgggggcggccgccggcggggctggcctgcggcactgggcggacatgctggccaacccgcggcggcccattgcccagtggcactcgctgcggcccccggaccgagtgaggctgctgcctgcgccctgactcccaccccaagcccccggccaagcctggactctagcccctgaccccagactcccgagaccggccaaagccaagccagccccacccttaagcttcctctgacggttaccctccccccaccttccaccccaaccatctgaaccattcctgtcttctcacccccaacgatgccaatcacgacaactttccagcacactcccccgaccctcgcggacacacccagatgccccagggaccccgggaagggaaggcagcctggtttctcctgcccccgggtcctgccccctgctttgacaatcagccatcctcgtctgctctcctctctcttccaacacagcccatccctgcactgctcctgaggccaaataaatattcagcagctc

SEQ ID NO: 396188 - DNA, 1000 bp, Homo Sapiens; identical to SEQ ID NO: 115975

SEQ ID NO: 396189 - DNA, 1000 bp, Homo Sapiens; identical to SEQ ID NO: 221282

SEQ ID NO: 396190 - DNA, 1000 bp, Homo Sapiens; identical to SEQ ID NO: 285857

SEQ ID NO: 396191 - DNA, 1000 bp, Homo Sapiens; identical to SEQ ID NO: 285858

SEQ ID NO: 396192 - DNA, 1000 bp, Homo Sapiens; identical to SEQ ID NO: 115976

SEQ ID NO: 396193 - DNA, 1000 bp, Homo Sapiens; identical to SEQ ID NO: 285859

SEQ ID NO: 396194 - DNA, 1000 bp, Homo Sapiens; identical to SEQ ID NO: 285860

SEQ ID NO: 396195 - DNA, 1000 bp, Homo Sapiens; identical to SEQ ID NO: 221283

SEQ ID NO: 396196 - DNA, 1000 bp, Homo Sapiens; identical to SEQ ID NO: 221284

SEQ ID NO: 396197 - DNA, 1000 bp, Homo Sapiens; identical to SEQ ID NO: 115977

SEQ ID NO: 396198 - DNA, 1000 bp, Homo Sapiens; identical to SEQ ID NO: 285862

SEQ ID NO: 396199 - DNA, 1000 bp, Homo Sapiens; identical to SEQ ID NO: 285865

SEQ ID NO: 396200 - DNA, 1000 bp, Homo Sapiens
tgaagctatcgtaaaattaagaaaggataaagttggtaaaccttttatatttagtatctttttattcagctcatggacttctgccagcataatacttgctttggaaaacccagataaaggttcatgcaaactttattttgtgtttaggaactactgaggatcagagtaatccaagcaaatgtgaatcattttacctttgacaaaggtaaatcagactatgaagttttttttatacaggatgatgactatggaaagagtactcttgtttccttatattatggaggcaggagtttcgttttcaaaattgttacaaattgtagaagccacggtgttctgtgatataagtgtgtgtttttcataaagcaggcagaactcatctaggtaaattacagttcctaggtataattcacattgtattcagagttgatggttgtacatataagtgattgctggttttagttgcaactttgtataaaagggactgagaaatttataaacttttttcttactgtcttttttctaaagtaaaaacaaagaaattatgtgccagatttatgcatattattttatgttgcatagaataaaatttttaatctttaattttacatttcctaaatatattttaagacgaaacatttgttctatagcttttccctttttttaagtaaggaattttatttttttctgaattattttctctcgtgagtatattgatccagaaagaaaacttgtattatgtgtgttttaaaatgagaaatctaaaaaacgaaaagtctccaaagtctctggaatttgaaacactttgcataacgtataaaagcctgtttaagagacagccaactatggcctgtggatcaaatccagcctgctgcctgctttttatggcctgtgagctaggaattgtgtttataattttaaatgtttttttttaaagacttttatgatacttgaaaattaacatgaatatttagtgttcataaataaagtttgttgaaacaca

SEQ ID NO: 396201 - DNA, 1000 bp, Homo Sapiens; identical to SEQ ID NO: 224790

SEQ ID NO: 396202 - DNA, 1000 bp, Homo Sapiens; identical to SEQ ID NO: 285867

SEQ ID NO: 396203 - DNA, 1000 bp, Homo Sapiens; identical to SEQ ID NO: 115980

SEQ ID NO: 396204 - DNA, 1000 bp, Homo Sapiens; identical to SEQ ID NO: 285869

SEQ ID NO: 396205 - DNA, 1000 bp, Homo Sapiens; identical to SEQ ID NO: 285870

SEQ ID NO: 396206 - DNA, 1000 bp, Homo Sapiens
cctggtgcccagactccttgcatggcttgtgtggtcctcagactccgcacagcgagcgtaggtctctgggtttcagatgaagtgcccaggctccaggaagttgagggacccacaggagaggtgggcagagctggagttctcatccagggctgcttgtccccagagcccaggtttatactacctccctggggcgggggctggccgcagggtaggggagaggctctgcagtgtggagtggagcctcatcgaggggcgctgggttaggggagcacctgtttcagactgggcatgaagaagggagcacagcagctactagaccccattagcacctcattagcccacaagccagccaggggccccaggaagatggggcaccccccagcaccctccagattgagagcaaggtagaggaaggagtcccagcctctgggcagaccagaggcccagagggagagagtagcagaaggcttttgatttttctcttgcctgaggcttgaatctgacaaacccttggtgggcactgctcccttaggttcttccccacctcaatctacctgcctagagtagcagctcccagacccagttctgggactgaaggttaacccttcacctgctgtcccttcttaacacccaggcccccagagccagctgggcctgtccagcagccacctgtgggtatttatgagtttcatatgaagtactgtgccccttcccttcctcatcccgaccctgcccgagcttcctgaaggtcctcactgtttgcatatcgctcaggccacctccaaaccccacctaggttttataatgtatattatatatttttttgtgtatttttaaaatccagctgtgatgggttatatcataaatgcagcttggggttggagcaggggccctcaaaggcccagctcctgctcaaaaaaaaaaaaaaaaaaaaattaaagttatttgtttgtgggtcagtcatgtaaaaaaaaaaaaaaaaaaaaaaaaaaaaaaaaaa

SEQ ID NO: 396207 - DNA, 1000 bp, Homo Sapiens; identical to SEQ ID NO: 221286

SEQ ID NO: 396208 - DNA, 1000 bp, Homo Sapiens; identical to SEQ ID NO: 285873

SEQ ID NO: 396209 - DNA, 1000 bp, Homo Sapiens; identical to SEQ ID NO: 285875

SEQ ID NO: 396210 - DNA, 1000 bp, Homo Sapiens
agttttagaatcttttaaatacattccctgggccaacagacccacacacttagccattgaaatgtcaaattgatgtgccctagatcaacagatcaacaataccttttttttcagtgttaaggtaatggttggtttttgtgtccgctaaatatttaccttgaaaaaaagaaaagtgtgtatctagcttcttcagagatcaagtcctctggtaggaggcaaaggttctatctgcttagcaactagttaataagtggtatctgacacactctaaaccccgtgttcaaacgggggccttctggttttaggaaacttgtagaaacgaagcctgctgattgatttttttctcctttttttttttttttttttttaactttgaaagttaactcttcaaatgggagactctttgaaatgacatgttcctttaaggtactgaagctttatttgcatatttatttcagatgtttcgagtaaacttgaaaagggtaggcacgaagcaatttgttgctgcttgtcacccccaagtccccgtggaggttctgtattttaagaaacagtgcgttgagtgtacagattttatttatgcgtaatttaatggggtctgtaaatactggtgcacttcttacgacttttttgagacatgggatccaattttaatattaacttttaatggtgatggggtaatctataacacatcataaggttttattcatatatatacagggtattaagaattaagaggatgctgggctctgttcttggcttggaagattctatttaattgaaactctctgttcagaaagcaataactttgtctcgttcctgttgggctgaaccctaaggtgagtgtgcagtacagtgtgtgtgggtgaaatggagatttggaattgaactctctgcctgtaaatgttccccaaataattgttgtgtgtatgatacgtgtataataaaagtattcttgttagaatctgaaaaaaaaaaaaaaaaaaaaaaaaaaaaaaaa

SEQ ID NO: 396211 - DNA, 1000 bp, Homo Sapiens; identical to SEQ ID NO: 285876

SEQ ID NO: 396212 - DNA, 1000 bp, Homo Sapiens; identical to SEQ ID NO: 115982

SEQ ID NO: 396213 - DNA, 508 bp, Homo Sapiens
atccctgactcggggtcgcctttggagcagagaggaggcaatggccaccatggagaacaaggtgatctgcgccctggtcctggtgtccatgctggccctcggcaccctggccgaggcccagacagagacgtgtacagtggccccccgtgaaagacagaattgtggttttcctggtgtcacgccctcccagtgtgcaaataagggctgctgtttcgacgacaccgttcgtggggtcccctggtgcttctatcctaataccatcgacgtccctccagaagaggagtgtgaattttagacacttctgcagggatctgcctgcatcctgacgcggtgccgtccccagcacggtgattagtcccagagctcggctgccacctccaccggacacctcagacacgcttctgcagctgtgcctcggctcacaacacagattgactgctctgactttgactactcaaaattggcctaaaaattaaaagagatcgatattaaaaaaaaaaaaaaaaaa

SEQ ID NO: 396214 - DNA, 685 bp, Homo Sapiens
gccaaaacagtgggggctgaactgacctctcccctttgggagagaaaaactgtctgggagcttgacaaaggcatgcaggagagaacaggagcagccacagccaggagggagagccttccccaagcaaacaatccagagcagctgtgcaaacaacggtgcataaatgaggcctcctggaccatgaagcgagtcctgagctgcgtcccggagcccacggtggtcatggctgccagagcgctctgcatgctggggctggtcctggccttgctgtcctccagctctgctgaggagtacgtgggcctgtctgcaaaccagtgtgccgtgccagccaaggacagggtggactgcggctacccccatgtcacccccaaggagtgcaacaaccggggctgctgctttgactccaggatccctggagtgccttggtgtttcaagcccctgcaggaagcagaatgcaccttctgaggcacctccagctgcccccggccgggggatgcgaggctcggagcacccttgcccggctgtgattgctgccaggcactgttcatctcagcttttctgtccctttgctcccggcaagcgcttctgctgaaagttcatatctggagcctgatgtcttaacgaataaaggtcccatgctccacccgaggacagttcttcgtgcctgaaaaaaaaaaaaaaaaaa

SEQ ID NO: 396215 - DNA, 1000 bp, Homo Sapiens; identical to SEQ ID NO: 285877

SEQ ID NO: 396216 - DNA, 1000 bp, Homo Sapiens; identical to SEQ ID NO: 115983

SEQ ID NO: 396217 - DNA, 1000 bp, Homo Sapiens; identical to SEQ ID NO: 221287

SEQ ID NO: 396218 - DNA, 1000 bp, Homo Sapiens; identical to SEQ ID NO: 221288

SEQ ID NO: 396219 - DNA, 1000 bp, Homo Sapiens
tcaagtccaaagatttaacatctccaacccagcgctacatcgacagcaaagttgtgaaaacaagagcagaaggcgaatggctctccttcgatgtaactgatgctgttcatgaatggcttcaccataaagacaggaacctgggatttaaaataagcttacactgtccctgctgcacttttgtaccatctaataattacatcatcccaaataaaagtgaagaactagaagcaagatttgcaggtattgatggcacctccacatataccagtggtgatcagaaaactataaagtccactaggaaaaaaaacagtgggaagaccccacatctcctgctaatgttattgccctcctacagacttgagtcacaacagaccaaccggcggaagaagcgtgctttggatgcggcctattgctttagaaatgtgcaggataattgctgcctacgtccactttacattgatttcaagagggatctagggtggaaatggatacacgaacccaaagggtacaatgccaacttctgtgctggagcatgcccgtatttatggagttcagacactcagcacagcagggtcctgagcttatataataccataaatccagaagcatctgcttctccttgctgcgtgtcccaagatttagaacctctaaccattctctactacattggcaaaacacccaagattgaacagctttctaatatgattgtaaagtcttgcaaatgcagctaaaattcttggaaaagtggcaagaccaaaatgacaatgatgatgataatgatgatgacgacgacaacgatgatgcttgtaacaagaaaacataagagagccttggttcatcagtgttaaaaaatttttgaaaaggcggtactagttcagacactttggaagtttgtgttctgtttgttaaaactggcatctgacacaaaaaaagttgaaggccttattctacatttcacctactttgtaagtgagagagacaagaagcaaatttttttaaa

SEQ ID NO: 396220 - DNA, 1000 bp, Homo Sapiens
cctcactgagaggcctggagcccacaaccttcggctccgggcaaatggctgagatggaggtttccttttggaacatttctttcttgctggctctgagaatcacggtggtaaagaaagtgtgggtttggttagaggaaggctgaactcttcagaacacacagactttctgtgacgcagacagaggggatggggatagaggaaagggatggtaagttgagatgttgtgtggcaatgggatttgggctaccctaaagggagaaggaagggcagagaatggctgggtcagggccagactggaagacacttcagatctgaggttggatttgctcattgctgtaccacatctgctctagggaatctggattatgttatacaaggcaagcatttttttttttaaagacaggttacgaagacaaagtcccagaattgtatctcatactgtctgggattaagggcaaatctattacttttgcaaactgtcctctacatcaattaacatcgtgggtcactacagggagaaaatccaggtcatgcagttcctggcccatcaactgtattgggccttttggatatgctgaacgcagaagaaagggtggaaatcaaccctctcctgtctgccctctgggtccctcctctcacctctccctcgatcatatttccccttggacacttggttagacgccttccaggtcaggatgcacatttctggattgtggttccatgcagccttggggcattatgggtcttcccccacttcccctccaagaccctgtgttcatttggtgttcctggaagcaggtgctacaacatgtgaggcattcggggaagctgcacatgtgccacacagtgacttggccccagacgcatagactgaggtataaagacaagtatgaatattactctcaaaatctttgtataaataaatatttttggggcatcctggatgatttcatcttctggaatattgtttctagaacagtaaaagccttattctaaggtg

SEQ ID NO: 396221 - DNA, 1000 bp, Homo Sapiens; identical to SEQ ID NO: 221289

SEQ ID NO: 396222 - DNA, 1000 bp, Homo Sapiens; identical to SEQ ID NO: 221290

SEQ ID NO: 396223 - DNA, 1000 bp, Homo Sapiens; identical to SEQ ID NO: 115985

SEQ ID NO: 396224 - DNA, 1000 bp, Homo Sapiens; identical to SEQ ID NO: 221291

SEQ ID NO: 396225 - DNA, 1000 bp, Homo Sapiens; identical to SEQ ID NO: 221292

SEQ ID NO: 396226 - DNA, 1000 bp, Homo Sapiens; identical to SEQ ID NO: 115986

SEQ ID NO: 396227 - DNA, 1000 bp, Homo Sapiens; identical to SEQ ID NO: 221294

SEQ ID NO: 396228 - DNA, 1000 bp, Homo Sapiens; identical to SEQ ID NO: 285886

SEQ ID NO: 396229 - DNA, 1000 bp, Homo Sapiens; identical to SEQ ID NO: 285887

SEQ ID NO: 396230 - DNA, 1000 bp, Homo Sapiens; identical to SEQ ID NO: 221296

SEQ ID NO: 396231 - DNA, 1000 bp, Homo Sapiens; identical to SEQ ID NO: 115988

SEQ ID NO: 396232 - DNA, 1000 bp, Homo Sapiens; identical to SEQ ID NO: 221298

SEQ ID NO: 396233 - DNA, 1000 bp, Homo Sapiens; identical to SEQ ID NO: 221299

SEQ ID NO: 396234 - DNA, 1000 bp, Homo Sapiens; identical to SEQ ID NO: 221300

SEQ ID NO: 396235 - DNA, 1000 bp, Homo Sapiens; identical to SEQ ID NO: 285893

SEQ ID NO: 396236 - DNA, 1000 bp, Homo Sapiens
ttagcatacaaagtttggtaaccaaatatagctctgtgtataacatcgtactgcggccttcaaaactacgttatgttggagcatttattttaaaaataatggtaggttttaaattaaaagtgttatcaaaagtttcccctctattgtaatacattattaagtggccttcagaactgagttaataagtgaaaagtagcttatgccatgtgatttgctttttctctatcttcttttttcttttctttctctttcttttgttctttcttcttcttttttaataccataggccaggcaaccttgtcaaaggaattgatggacaaaatgagattctcaccaggacttcaggttggataacatgtcaaaaagagaagagctttactaaaagaacataagtcaagggaggatgaataaaaacagcaaaaccaaataaagtggagatgagtgattgagtgaggtagattgctgtcccgttaacatagtgctgaaaccaaaggcagtgggggtccaaactcgtggtgcagcaagtcacaccagacaggaaacgaatatggacgtaattgcagaaggaacttcaaggagatgaatgaatgctaaaagggttcttgactgatccattgctaacagcctgagactcttcaatgcctttccgaaaactggtttctagtaaagccttgaatgaacacacacacacacacacacacacacacacacacacacacacacacacacaccgtcctacactttaagctgctcctttggtatgactctatacttatggaaatgtagaaacaaacatttttaaatagctgctgtacttttcacattttgatttattaggtactagcactgaggaaaaaaaattcagcacttggactatcataggatgagtaaaacttttcttgtacaaagtgaattaactgatttgtgaagttaaaaggttgtactcattgtatttacaaagaataaaaatatattgaatttaaatgaaaaaaaaaaaaaa

SEQ ID NO: 396237 - DNA, 1000 bp, Homo Sapiens; identical to SEQ ID NO: 285894

SEQ ID NO: 396238 - DNA, 1000 bp, Homo Sapiens; identical to SEQ ID NO: 115989

SEQ ID NO: 396239 - DNA, 1000 bp, Homo Sapiens; identical to SEQ ID NO: 115990

SEQ ID NO: 396240 - DNA, 1000 bp, Homo Sapiens; identical to SEQ ID NO: 221302

SEQ ID NO: 396241 - DNA, 686 bp, Homo Sapiens; identical to SEQ ID NO: 285899

SEQ ID NO: 396242 - DNA, 1000 bp, Homo Sapiens; identical to SEQ ID NO: 285900

SEQ ID NO: 396243 - DNA, 1000 bp, Homo Sapiens; identical to SEQ ID NO: 221303

SEQ ID NO: 396244 - DNA, 1000 bp, Homo Sapiens; identical to SEQ ID NO: 285902

SEQ ID NO: 396245 - DNA, 1000 bp, Homo Sapiens
agcaagctgaggaccgctgcaagcagctggaggaggagcagcaggccctccagaagaagctgaaggggacagaggatgaggtggaaaagtattctgaatccgtgaaggaggcccaggagaaactggagcaggccgagaagaaggccactgatgctgaggcagatgtggcctccctgaaccgccgcattcagctggttgaggaggagctggaccgggcccaggagcgcctggctacagccctgcagaagctggaggaggccgagaaggcggctgatgagagcgagagaggaatgaaggtcatcgaaaaccgggccatgaaggatgaggagaagatggaactgcaggagatgcagctgaaggaggccaagcacatcgctgaggattcagaccgcaaatatgaagaggtggccaggaagctggtgatcctggaaggagagctggagcgctcggaggagagggctgaggtggccgagagtaaatgtggggacctagaggaggagctgaaaattgttaccaacaacttgaaatccctggaggcccaggcggacaagtattccaccaaagaagataaatatgaagaggagatcaaactgttggaggagaagctgaaggaggctgagacccgagcagagtttgccgagaggtctgtggcaaagttggagaaaaccatcgatgacctagaagatgaagtctatgcccagaagatgaagtacaaggccattagcgaggaactggacaacgcactcaatgacatcacctccctctgagccccacgccagcgtggccacctcagctctcttctctcctctcctttccattctctctatggggaggggagcaggcaggaggagcagaaattgccaacattgcacagccaggctgggagcagcctagggagagcccccatcatgcccaccacccactctggcactggcttcatcctttacctatccccttccaccctcctttgctgcttaataaattctgaacttggtctcca

SEQ ID NO: 396246 - DNA, 1000 bp, Homo Sapiens; identical to SEQ ID NO: 221304

SEQ ID NO: 396247 - DNA, 1000 bp, Homo Sapiens; identical to SEQ ID NO: 115991

SEQ ID NO: 396248 - DNA, 1000 bp, Homo Sapiens; identical to SEQ ID NO: 285904

SEQ ID NO: 396249 - DNA, 830 bp, Homo Sapiens
cccccccgagcgccgctccggctgcaccgcgctcgctccgagtttcaggctcgtgctaagctagcgccgtcgtcgtctcccttcagtcgccatcatgattatctaccgggacctcatcagccacgatgagatgttctccgacatctacaagatccgggagatcgcggacgggttgtgcctggaggtggaggggaagatggtcagtaggacagaaggtaacattgatgactcgctcattggtggaaatgcctccgctgaaggccccgagggcgaaggtaccgaaagcacagtaatcactggtgtcgatattgtcatgaaccatcacctgcaggaaacaagtttcacaaaagaagcctacaagaagtacatcaaagattacatgaaatcaatcaaagggaaacttgaagaacagagaccagaaagagtaaaaccttttatgacaggggctgcagaacaaatcaagcacatccttgctaatttcaaaaactaccagttctttattggtgaaaacatgaatccagatggcatggttgctctattggactaccgtgaggatggtgtgaccccatatatgattttctttaaggatggtttagaaatggaaaaatgttaacaaatgtggcaattattttggatctatcacctgtcatcataactggcttctgcttgtcatccacacaacaccaggacttaagacaaatgggactgatgtcatcttgagctcttcatttattttgactgtgatttatttggagtggaggcattgtttttaagaaaaacatgtcatgtaggttgtctaaaaataaaatgcatttaaactcatttgagag

SEQ ID NO: 396250 - DNA, 1000 bp, Homo Sapiens
acgtgcactacatctgtgagtctgcatcccgtctgcttttcctctcaatgcactgggctcggtcaatcccagcctttcaggcacttgggcaggactgcaacaccagccttgtgcgggcctgctggaatgagctcttcaccctcggcctggcccagtgtgcccaggtcatgagtctctccaccatcctggctgccattgtcaaccacctgcagaacagcatccaggaagataaactttctggtgaccggataaagcaagtcatggagcacatctggaagctgcaggagttctgtaacagcatggcgaagctggatatagatggctatgagtatgcataccttaaagctatagttctctttagccccgatcatccaggtttgaccagcacaagccagattgaaaaattccaagaaaaggcacagatggagttgcaggactatgttcagaaaacctactcagaagacacctaccgattggcccggatcctcgttcgcctgccggcactcaggctgatgagctccaacataacagaagaacttttttttactggtctcattggcaatgtttcgatagacagcataatcccctacatcctcaagatggagacagcagagtataatggccagatcaccggagccagtctatagcgcaaaccacacacctgccaaggagcaacagaatccttccaggaccgttcacatacaaagaaaagtagtggtattttggtatgtgcaaatatttccatatgttagccatttcctgtctggtttctccttatctgttaatcccagacaatagcaattaaaagactagtaggatcctttcctgacataagaaatgttttaatgccttttgatgaagcagcagattttggaacaatcttttaactcaatttgtatttagaaattctcaaagggcaaaaaacaaaaaaaaaggttttataatgtcagagactagtattaaagaaaactgaaagaacctgaaaaaaaaaaaaaaaaaa

SEQ ID NO: 396251 - DNA, 1000 bp, Homo Sapiens; identical to SEQ ID NO: 115992

SEQ ID NO: 396252 - DNA, 1000 bp, Homo Sapiens
agtctgggggcctggctataggagccagagagagccagggccaggggccaaagaggaagctgctggggtctctggccctgcaggaagaggaagaggaggcgagcacgggccccaggtgcccctgagccagcctccagaggatgagctggataggctgacgaagaagctggttcacgacatgaaccacccgcccagcggggagtactttggccagtgtggtggctgcggagaagatgtggttggggatggggctggggttgtggcctttgatcgcgtctttcacgtgggctgctttgtatgttctacatgccgggcccagcttcgcggccagcatttctacgccgtggagaggagggcatattgcgagggctgctacgtggccaccctggagaaatgtgccacgtgctcccagcccatcctggaccggatcctgcgggctatggggaaggcctaccaccctggctgcttcacctgcgtggtgtgtcaccgcggcctcgacggcatccccttcacagtggatgctacgagccagatccactgcattgaggactttcacaggaagtttgccccaagatgctcagtgtgcggtggggccataatgcctgagccaggtcaggaggagactgtgagaattgttgctctggatcgaagttttcacattggctgttacaagtgcgaggagtgtgggctgctgctctcctctgagggcgagtgtcagggctgctacccgctggatgggcacatcttgtgcaaggcctgcagcgcctggcgcatccaggagctctcagccaccgtcaccactgactgctgagtcttcctagaagtacctgctgggttctcagttccagttcccatcctttgattgatcactctccctgacatccacctgtatgactttgtcaccaaatgctgtcttctctttctccaatcaagaaataataatccctcgagtttacaaaacaaaaaaaaaaaaaaaaaaaaaaaaaaaaaaaaaaaaaaa

SEQ ID NO: 396253 - DNA, 1000 bp, Homo Sapiens; identical to SEQ ID NO: 221306

SEQ ID NO: 396254 - DNA, 1000 bp, Homo Sapiens; identical to SEQ ID NO: 115993

SEQ ID NO: 396255 - DNA, 1000 bp, Homo Sapiens; identical to SEQ ID NO: 221307

SEQ ID NO: 396256 - DNA, 1000 bp, Homo Sapiens; identical to SEQ ID NO: 285911

SEQ ID NO: 396257 - DNA, 1000 bp, Homo Sapiens; identical to SEQ ID NO: 115994

SEQ ID NO: 396258 - DNA, 937 bp, Homo Sapiens; identical to SEQ ID NO: 285912

SEQ ID NO: 396259 - DNA, 1000 bp, Homo Sapiens
ggacgcgtcctggtactcaccaggcacccgagaggcccgcaaggagtacctcgagcgccacgtacccggcgcctctttctttgacatagaagagtgccgggacacggcgtcgccctacgagatgatgctgcccagcgaggctggcttcgccgagtatgtgggccgcctgggcatcagcaaccacacgcacgtggtggtgtatgatggtgaacacctgggcagcttctatgctccccgggtctggtggatgttccgtgtgtttggccaccgcaccgtatcagtgctcaatggtggcttccggaactggctgaaggagggccacccggtgacatccgagccctcacgcccagaaccggccgtcttcaaagccacactggaccgctccctgctcaagacctacgagcaggtgctggagaaccttgaatctaagaggttccagctggtggattcaaggtctcaagggcggttcctgggcaccgagccggagccggatgcagtaggactggactcgggccatatccgtggtgccgtcaacatgcctttcatggacttcctgactgaggatggcttcgagaagggcccagaagagctccgtgctctgttccagaccaagaaggtggatctctcgcagcctctcattgccacgtgccgcaagggagtcaccgcctgccacgtggccttggctgcctacctctgcggcaagcctgatgtggccgtgtacgatggctcctggtccgagtggtttcgccgggcccccccagagagccgtgtgtcccagggaaagtctgagaaggcctgagccgtgacctcttctgcttactgtaactgcggccggtttagtgaccccatgacttacagccggttcttacctcttaggtgaaggagatgacatgtttttagaattgctgtgcaaggctcaccctctctctgtcaacactggaataaactttgccttttctgaaaaaaaaaaaaaaaaaaaaaaaaaaaaaaaaaaaaaaaa

SEQ ID NO: 396260 - DNA, 1000 bp, Homo Sapiens; identical to SEQ ID NO: 285914

SEQ ID NO: 396261 - DNA, 1000 bp, Homo Sapiens; identical to SEQ ID NO: 115996

SEQ ID NO: 396262 - DNA, 1000 bp, Homo Sapiens; identical to SEQ ID NO: 115241

SEQ ID NO: 396263 - DNA, 1000 bp, Homo Sapiens; identical to SEQ ID NO: 115997

SEQ ID NO: 396264 - DNA, 1000 bp, Homo Sapiens; identical to SEQ ID NO: 285915

SEQ ID NO: 396265 - DNA, 1000 bp, Homo Sapiens; identical to SEQ ID NO: 224459

SEQ ID NO: 396266 - DNA, 1000 bp, Homo Sapiens; identical to SEQ ID NO: 285916

SEQ ID NO: 396267 - DNA, 1000 bp, Homo Sapiens; identical to SEQ ID NO: 285917

SEQ ID NO: 396268 - DNA, 1000 bp, Homo Sapiens
aagacttggaaaagaagagagaggcctctgagtctacagggacgaactcctcagcagcacacaacgaagagttgtccaaggccctgaaaggcgagggtggcacggacagcgaccatatgaggcacgaagcctccttggcaatccgctccccctgccctgggctggaggaggacatggaagcctacgtgctgcggccagcgctcccgggcaccatgatgcagtgctacctcacccgtgacaagcacggcgtggacaagggcttgttccccctctactacctctacctggagacctctgacagcctgcagcgcttcctcctggctgggcgaaagagaagaaggagcaaaacttctaattacctcatctccctggatcctacactcctatctcgggacggggacaatttcgtgggcaaagtcagatccaatgtcttcagcaccaagttcaccatctttgacaatggggtgaatcctgaccgggagcatttaaccaggaatactgcccggatcagacaggagctgggggctgtgtgttatgagcccaacgtcttaggatacctggggcctcggaaaatgactgtgattctcccaggaaccaacagccagaaccagcgaatcaatgtccagccactaaatgaacaggagtcgctactgagtcgttaccaacgtggggacaaacaagggttgcttttgttgcacaacaaaaccccgtcgtgggacaaggagaacggtgtctacacgctcaatttccatggtcgagtcactcgggcttcggtgaagaacttccaaatcgtggatcccaaacaccaagaacatctggtgctccagttcggccgagtgggcccagacacattcaccatggacttctgctttccatttagcccgctccaggccttcagcatctgcttgtccagtttcaattagaagctggctgttgaataactcaataaaataccatacccttgccagcaaaaaaaaaaaaaaaaaaaaaaaaaaaaaaa

SEQ ID NO: 396269 - DNA, 1000 bp, Homo Sapiens; identical to SEQ ID NO: 115998

SEQ ID NO: 396270 - DNA, 1000 bp, Homo Sapiens; identical to SEQ ID NO: 221310

SEQ ID NO: 396271 - DNA, 1000 bp, Homo Sapiens; identical to SEQ ID NO: 285920

SEQ ID NO: 396272 - DNA, 1000 bp, Homo Sapiens; identical to SEQ ID NO: 115999

SEQ ID NO: 396273 - DNA, 1000 bp, Homo Sapiens
gtctgtgcaggtccccgaattcacccccaagtctggcgtcaagatccatgtttctgaccaggagctgcagagcgccaatgcctctgttgatgacagtcgtctagaggagctcaaagccactctgcccagcccagacaagctccctggattcaagatgtaccccattgactttgagaaggatgatgacagcaactttcatatggatttcatcgtggctgcatccaacctccgggcagaaaactatgacattccttctgcagaccggcacaagagcaagctgattgcagggaagatcatcccagccattgccacgaccacagcagccgtggttggccttgtgtgtctggagctgtacaaggttgtgcaggggcaccgacagcttgactcctacaagaatggtttcctcaacttggccctgcctttctttggtttctctgaaccccttgccgcaccacgtcaccagtactataaccaagagtggacattgtgggatcgctttgaggtacaagggctgcagcctaatggtgaggagatgaccctcaaacagttcctcgactattttaagacagagcacaaattagagatcaccatgctgtcccagggcgtgtccatgctctattccttcttcatgccagctgccaagctcaaggaacggttggatcagccgatgacagagattgtgagccgtgtgtcgaagcgaaagctgggccgccacgtgcgggcgctggtgcttgagctgtgctgtaacgacgagagcggcgaggatgtcgaggttccctatgtccgatacaccatccgctgaccccgtctgctcctctaggctggccccttgtccacccctctccacaccccttccagcccagggttcccatttggcttctggcagtggcccaactagccaagtctggtgttccctcatcatccccctacctgaacccctcttgccactgccttctaccttgtttgaaacctgaatcctaataaagaattaataactccc

SEQ ID NO: 396274 - DNA, 1000 bp, Homo Sapiens; identical to SEQ ID NO: 116001

SEQ ID NO: 396275 - DNA, 1000 bp, Homo Sapiens
aacatcagaaaacaccctctatgaaatcaaatgtactgtacctgggttacttgcaaaaattactaatgcttcagtttttctgttgtatttcatttccagttttcaggcagttatttttattattgtactttaagcttttaagatgaattgttatacaagaggtgcttatgcttagcttgatgaccaggatgttatttttaacaaaatgattgctgaagtgtttcatcctggctggtccttcacttgtgttggatttagaagtgaatgtgtttggaatatggcctacagagaatagaaacaaatccatgtaaacaattttgaaggaggcatgggagctaaaaatcctgtgatactaagatctcagtcatatgaattacaacgtagtatttactggcaagaaggagaaagttgaaggactcagctaaaggagtacagcaattgtagtaactgacacatcctctctttgcaagctgctgactgggcacactcatgccaagtttcagaattattggtcttctgggtttttgctttttaaaagaggtgtgggagcagaggaatggaaacaatcgtgagtttttgagctagggaaagttggagctcctttaatctttttaaaggatcagtgctgccctaagtgaataaactcaattgtccatctttattttagagttttaatgaattcaaggaagggagcatagcatatctgtggcaaactattttccactcaaatcctgagttattgctgcatgctttaatttcttccctttcagcatctgagaaccttaaagccaatgtctgcgatctttttttggatatttatacttttagatatatagtacctttaagtagcagtatgggacaaggcttgtaaatgttttgtctaatgttctattgtcaccttttatgcatttatcacttccaaatctaactttgcacaagtaacccatgtaaaaaaaaatgtacatttttcaaaagttgtaaataaaaataaccttaaaaa

SEQ ID NO: 396276 - DNA, 1000 bp, Homo Sapiens; identical to SEQ ID NO: 221311

SEQ ID NO: 396277 - DNA, 1000 bp, Homo Sapiens; identical to SEQ ID NO: 285926

SEQ ID NO: 396278 - DNA, 1000 bp, Homo Sapiens; identical to SEQ ID NO: 118923

SEQ ID NO: 396279 - DNA, 1000 bp, Homo Sapiens; identical to SEQ ID NO: 116003

SEQ ID NO: 396280 - DNA, 1000 bp, Homo Sapiens; identical to SEQ ID NO: 118946

SEQ ID NO: 396281 - DNA, 1000 bp, Homo Sapiens; identical to SEQ ID NO: 285929

SEQ ID NO: 396282 - DNA, 1000 bp, Homo Sapiens
aatgagctttgcctctgtccgcatcggcctgtatgattctgtcaaacagttctacaccaagggctctgagcatgccagcattgggagccgcctcctagcaggcagcaccacaggtgccctggctgtggctgtggcccagcccacggatgtggtaaaggtccgattccaagctcaggcccgggctggaggtggtcggagataccaaagcaccgtcaatgcctacaagaccattgcccgagaggaagggttccggggcctctggaaagggacctctcccaatgttgctcgtaatgccattgtcaactgtgctgagctggtgacctatgacctcatcaaggatgccctcctgaaagccaacctcatgacagatgacctcccttgccacttcacttctgcctttggggcaggcttctgcaccactgtcatcgcctcccctgtagacgtggtcaagacgagatacatgaactctgccctgggccagtacagtagcgctggccactgtgcccttaccatgctccagaaggaggggccccgagccttctacaaagggttcatgccctcctttctccgcttgggttcctggaacgtggtgatgttcgtcacctatgagcagctgaaacgagccctcatggctgcctgcacttcccgagaggctcccttctgagcctctcctgctgctgacctgatcacctctggctttgtctctagccgggccatgctttccttttcttccttctttctcttccctccttcccttctctccttccctctttccccacctcttccttccgctcctttacctaccaccttccctctttctacattctcatctactcattgtctcagtgctggtggagttgacatttgacagtgtgggaggcctcgtaccagccaggatcccaagcgtcccgtcccttggaaagttcagccagaatcttcgtcctgcccccgacagcccagcctagcccacttgtcatccataaagcaagctcaaccttgg

SEQ ID NO: 396283 - DNA, 1000 bp, Homo Sapiens
gttgctgattcaagaaacagaagtagaagaggaggagggattctggtcttcactgccatgcctcaagaacacctttgttttgcactgacaagatggaaaataaattatattaatttttgaaacccattaggcatgcctaatatttaggcaagagaaaataaaccaagatagatccatttggacaaaatggaaggttggagacgtgtatccccgtgaaatctggttagataatgaatgataagcaggaaggatggcaagcacgggacaggaggggcccacaatggagtgggagatcagccacggagcctggagggatgccacccagcaacacagagctggcgactgcagctgcaccatcacacatgcatcatcagcctatttgtaatatgtctgccacagagagtcctttgggattctaggaaacccaaggaacaagagaaaaaactagagcctgtgctaaagaagccctgctgggcccatgtgaggctggggctcgtaaatattccctgacgacactgaagaatcaagagggcagcccccactttcctacaaaatggagggagccatcccttccctgtccacctcaccaggggtgctatgacatgcaagtgagaagctgggcatgaacgcactttataaaagcaaaagctctgtgtaaatctaactacaaggacaatgccttgggagagattttgtcgggacagagaggagttgccagggaagaaggtttgaaagatacggttgtctagaggtgagaccaaaggatccagagacttggggaccagaggtgacagtggatgacgtgaagccacaggagccccacccccatgcagcctcttccccacccccccccaccacgcgctcaatcatgagtacctcaaaggattgttgggcttgggggaaaagaggtggattcctgggcaagaacctaaagtagcaggactcggaattctcgggaaattattatgactcaataaaagaattcacaccttaggtgtgg

SEQ ID NO: 396284 - DNA, 1000 bp, Homo Sapiens; identical to SEQ ID NO: 116007

SEQ ID NO: 396285 - DNA, 1000 bp, Homo Sapiens
gtttttaaggaaacaaaactatttttttaatcatcagatttatactagctatatggatattagcatatctggtaattatgaatctagaatttttttacatatttttataatactgttagctcagttattggatgagtgaaagataatcatgttggttttaatagtgtcaatttttgtaaaataaaaattaaacttcaaactctttactttataaattgtccataggccacactttaatatcacattataaagggaaggacagtcttcattcctcctggttattggtttgtttgtcattaaagatatattttgaatccatgaaattgctatgctaaacagcctttacatgtatggtctggttaaagttcctttgttccttttgttttaataaaatgtgtcactgattttttagctcaaaatcatcactgttaatttccagtcaccccaaatatggttaaaagattttttttttaatcatgaagagaaaattagtagcatttctttctctccccattatttattggttttcctcactaatctttttttttttagtccaaaagccaaaaatatttatcttggttttacattttaatttccattcttaattgtaatttttttctttaaataaggaaaccaatataatctcatgtataaaaacttaaatattttacaagttacatatagcatcattctaaaataagaattttttttgttttctgtctgcttttttcttatgtctcttgttgagttttatattttcagtggttatttttgcttgtgttagatcattattaaaatatatccaatgtccctttgatacttgtgctctgctgagaatgtacagtttgcattaaacatcccaggtctcatccttcaggaattttgcagttcaatgagaagagggagacaaatataaagatgaggacagaagcatctctacagatgaaaattacataaataaaacattctccatcaacaactaaaaaaaaaaaaaaaaaaa

SEQ ID NO: 396286 - DNA, 1000 bp, Homo Sapiens; identical to SEQ ID NO: 285935

SEQ ID NO: 396287 - DNA, 1000 bp, Homo Sapiens; identical to SEQ ID NO: 285937

SEQ ID NO: 396288 - DNA, 1000 bp, Homo Sapiens; identical to SEQ ID NO: 221314

SEQ ID NO: 396289 - DNA, 1000 bp, Homo Sapiens; identical to SEQ ID NO: 116010

SEQ ID NO: 396290 - DNA, 1000 bp, Homo Sapiens; identical to SEQ ID NO: 116011

SEQ ID NO: 396291 - DNA, 1000 bp, Homo Sapiens
cgacgaggagatggatccgcagacgatcgacagcctcattgagctgtccaccaaactccacctgccagcggacgacgtggtcagcatcatcgaggaggtggaggagaagcggaagcggaagaagaacgcccctcccgagcccgtgccgcccccccgtgccgcccccgcccccacccacgtccgctccccgcagcccccgccccccgcccccgctcccgcacgagacgagctgccggactggaacgaggtgctcccgccctgggatcgggaggaggacgaggtgtacccgccagggccgtaccaccctttccccaactacatccggccgcggacactgcagccgccctcggccttgcgccgccgccactaccaccacgccttgccgccttcgcgccactatcccggccgggaggcccaggcgcggcgcgcgcaggaggaggcggaggcggaggagcgccggctgcaggagcaggaggagctggagaattacatcgagcacgtgctgctccggcgcccgtgactgcccttcccggtcccgcccccgcgcgcccccgccgcgcgcgcgcgccggcgcccccctccgtgttgcccgctccccctcggtgtttgcatgcgccccggccctgccccttggccctgcccctgtccccgggctgcgtcgggacctgccagacccccctcccgggtcctgagcccgaactcccagagctcacccgcgggtgaccgggggccagcccaggagggcgggtggtttgtgcgagttcccttgccacgcggggccccggccccatcaagtccctctggggacgtccccgtcggaaaccggaaaaagcagttccagttaattgtgtgaagtgtgtctgtctccagcccttcgggcctcccacgagcccctccagcctctccaagtcgctgtgaattgaccccttctttcctttctctgttgtaaatacccctcacggaggaaatagttttgctaagaaataaaagtgactatttt

SEQ ID NO: 396292 - DNA, 1000 bp, Homo Sapiens; identical to SEQ ID NO: 285941

SEQ ID NO: 396293 - DNA, 1000 bp, Homo Sapiens; identical to SEQ ID NO: 285943

SEQ ID NO: 396294 - DNA, 1000 bp, Homo Sapiens
aagtactgcaactactgtgacttacagtgagacaaaagatacgaacacaacagaaatttcagcaactagtggactagttcctggagggatcaatgtgaccacagcagtatcagaggtcagtgttcccccaaaagggacttctgccgcatgggccattcttcctctcttgctcttagtgatggcagcagtaggtggctacttgatgtggcggaattggcaacacaagaacatgaaaagcatgaactttgacaatcctgtgtacttgaaaaccactgaagaggacctctccatagacattggtagacacagtgcttctgttggacacacgtacccagcaatatcagttgtaagcacagatgatgatctagcttgacttctgtgacaaatgttgacctttgaggtctaaacaaataatacccccgtcggaatggtaaccgagccagcagctgaagtctctttttcttcctctcggctggaagaacatcaagatacctttgcgtggatcaagcttgtgtacttgaccgtttttatattacttttgtaaatattcttgtccacattctacttcagctttggatgtggttaccgagtatctgtaacccttgaatttctagacagtattgccacctctggccaaatatgcactttccctagaaagccatattccagcagtgaaacttgtgctatagtgtataccacctgtacatacattgtataggccatctgtaaatatcccagagaacaatcactattcttaagcactttgaaaatatttctatgtaaattattgtaaactttttcaatggttgggacaatggcaataggacaaaacgggttactaagatgaaattgccaaaaaaatttataaactaattttgtacgtatgaatgatatctttgacctcaatggaggtttgcaaagactgagtgttcaaactactgtacattttttttcaagtgctaaaaaattaaaccaagcagcttaaccatgaaaaaaaaaa

SEQ ID NO: 396295 - DNA, 1000 bp, Homo Sapiens; identical to SEQ ID NO: 285945

SEQ ID NO: 396296 - DNA, 1000 bp, Homo Sapiens; identical to SEQ ID NO: 285946

SEQ ID NO: 396297 - DNA, 1000 bp, Homo Sapiens; identical to SEQ ID NO: 285947

SEQ ID NO: 396298 - DNA, 1000 bp, Homo Sapiens; identical to SEQ ID NO: 285948

SEQ ID NO: 396299 - DNA, 1000 bp, Homo Sapiens; identical to SEQ ID NO: 116013

SEQ ID NO: 396300 - DNA, 1000 bp, Homo Sapiens; identical to SEQ ID NO: 285949

SEQ ID NO: 396301 - DNA, 1000 bp, Homo Sapiens; identical to SEQ ID NO: 285950

SEQ ID NO: 396302 - DNA, 1000 bp, Homo Sapiens; identical to SEQ ID NO: 221315

SEQ ID NO: 396303 - DNA, 1000 bp, Homo Sapiens; identical to SEQ ID NO: 285951

SEQ ID NO: 396304 - DNA, 1000 bp, Homo Sapiens; identical to SEQ ID NO: 116015

SEQ ID NO: 396305 - DNA, 1000 bp, Homo Sapiens; identical to SEQ ID NO: 285953

SEQ ID NO: 396306 - DNA, 1000 bp, Homo Sapiens; identical to SEQ ID NO: 221316

SEQ ID NO: 396307 - DNA, 1000 bp, Homo Sapiens; identical to SEQ ID NO: 285957

SEQ ID NO: 396308 - DNA, 1000 bp, Homo Sapiens; identical to SEQ ID NO: 285958

SEQ ID NO: 396309 - DNA, 1000 bp, Homo Sapiens; identical to SEQ ID NO: 285959

SEQ ID NO: 396310 - DNA, 1000 bp, Homo Sapiens
atcaattcagttagtggccatgacatctcaatcttgtacttcaaagactgagaagctggatttaatcatccctgccctacatatataaacataaggtaacctactgaattttatgtcccttagttctttattaccttacataaaaatgaaaattgcggcaggatgcatgtctgtctgttctatctagagatcacccatatacctatatatgtttgtatctatgacttatctaatctgcctatcaatctatctagtagctatctatatattttcaaaagatagcttatgtctaaaacagtggtgatgagtaaggccagttgagcattgcttacttatggttaaagtgcttcttaaaagaaccatagtccatttacaattttggaaggcaaaggctgatttgtttgctgtatatagttcaattcataattatcgcaattatccataacatttatatagcggtgtaataactgcagcagttctgaaatgatgctatgggaaaaaaattgcaaaatatgtatttttaaagttcatgatttgtaggcaaagatgttaagagcattgtttccattaaaatcaataacaatgaaaaacggttgtttgctttgtgataaaatgttaacaatccatttaatcttcagtgaagcaactcatttggacaaacagttcttttacagtggttatatggaaaagaaattgattgctattttggggggctggagtgggtagagtattgagaccttttttattagggtgctgtttgttattgagagcccaatctctgcatgaataacagaaaggtggacataaggaattgtaaagtatttagaatgtattgaataggcttaagtacctcctttaaggggcaatgctctaggtttttggtggcagtcaatttggtattatatatgatcattttcaattctagaattttgtttattgttctttttgaagaaataaagtcttggcacatcttatttatgttataaaaaaaaaaaaaaaa

SEQ ID NO: 396311 - DNA, 1000 bp, Homo Sapiens; identical to SEQ ID NO: 221317

SEQ ID NO: 396312 - DNA, 1000 bp, Homo Sapiens; identical to SEQ ID NO: 221319

SEQ ID NO: 396313 - DNA, 1000 bp, Homo Sapiens; identical to SEQ ID NO: 221320

SEQ ID NO: 396314 - DNA, 1000 bp, Homo Sapiens; identical to SEQ ID NO: 221321

SEQ ID NO: 396315 - DNA, 1000 bp, Homo Sapiens
aggagagagaccatacaaatgtgaggaatgtgggaaagtcttcagctggagctcataccttcaagcccatcaaagagttcacaccggagaaaaaccatacaaatgtgaggagtgtgggaagggcttcagttggagctcaagtcttatcattcatcagcgagtccatgctgatgatgagggtgacaaggactttccttcatcagaggattcacacaggaaaactcgataaaatatgttttactatctcagatgggtgctgaaatattttaataatcagagctatcatagacaaaacatttgttttatagagtcagtagttcagccaagtgattgggagaccacacagcagagaagcctcacaagagtggagacatatggactgcattcagaacattgaccattagctgatacatgcagacaagaggatcaggaaggatgagtctgatctggagtaaatcagaagtactaagatagaaatgctgaattctgttccactagaatataagatccaagagggcagggactttgttgactgccaaatctactctgccttttcagtgcctaatacgttgtaatttttcagtagtatttgaaattactgtcatatttgaaattcagtaatatttgacatttttatttatctctagaagtttctctaaaattgtactcagaagaattctgcaaggcttggaggatatataagttagtcatatggcctgattttcccatttttgcagatctcgtggacaagtgtttatcaaactgaaggttgcagcttgttagtgggttcagaaatcagtttctggctagcaactagaagttttgtatgttaacagtactttattgaggtgtaatctgcatgcagtaacatgcacaagtctcaagttcatggctttctgaattttgacaaatgtaatcatcaccaagatcaatgtatacaatatgtctattaaaccaaaaagttttcttgtgcccatttccagtcaaaaaaaaaaaaaaa

SEQ ID NO: 396316 - DNA, 1000 bp, Homo Sapiens; identical to SEQ ID NO: 285967

SEQ ID NO: 396317 - DNA, 1000 bp, Homo Sapiens
cagcgccgatggcacccagacgcagcccgtcacaatcattacctctggggctgtggtggctgaggactcaagtgtagcatctcttcgtcatcaacaggtggcactgttggccacagccaacggaacgcacattgcagtgcagctggaggaacagcagaccttagaggaggccatcaatgtggccactgcggccatgcagcaaggggctgtgaccctggagacaacagtgtcggagagtggctgctgagtccaagagggctgggtcccacaccatgctggaggaagtgccatctgcatggccactcttgcccccaagggcccaggctgtggctgacacatagaaggtggccacataggtctctggggtgagaagacagcaagaaaactgcctaactgaagggaatgggggccctgctcaagaagggggccaggcagctggaatcaggggagtgcatcatcctcgggagctgacaacagccaggctacaccagggcacccgcctctcaaaatcagctgggcgcccactctcctcctaaagaacacccttctggccctcagtctgttccccttctcaggtagagattggggctgctatggggactggccctgtagggttgagccacagacagctcttcagcccagtagcagtggagcaggccctgtcctgccctcccagcaataaccacctccctggaggccagctgagatgcctggctacttggcaccagggacttcctgacaccacagtcaattaattcctcaggggcctgtggctggagaaaaggtgcccagcccccaccactcctcagctgccccccaacctctctatggcagagaggcagggagtggccctgtacatagactgctggggattgggtttgatttgttttgtttttttaaattccattttgataatttttttcctgctctgggtggtggtggcacatggatgaatgagtatttaataaaagttccaaatttcaaaaaaaaaaaaaaaaaa

SEQ ID NO: 396318 - DNA, 1000 bp, Homo Sapiens
aagctttcagttgtctcagttccttgcaaggacatataaaggctcatgctggtgaagaaccctatccatgtaagcaatgtgggaaagccttcagatacgccagttcccttcagaaacacgagaaaactcatattgcacagaaaccctatgtatgtaacaattgtggtaaaggcttcagatgttccagttcccttcgtgaccatgaaaggactcatactggagagaaaccctatgaatgtcagaaatgtggcaaagcctttagtcgtgctagtaccctttggaagcataaaaaaactcatactggagaaaagccctataaatgtaaaaaaatgtaaaggctttaatcactacagtttttgtcaaaaacatgaacagtcacatacttgagagaaactgtgaatgtaaggtgtaggaaagtacttaattttcccagatttcctcaaatacatgaaacgaatcaaactggagataaaccctatgactataagcaataaggtaaagcattcaatttttccatttctttttgaaaacttgaaaggactcactgaagaaaatccatatgaatgtttaaaatgtggtaaggcctgcagttgttccagtggtatttgatggtataacataactcattctagagaaaaactttatgaaggtatcgaatgtgagaatgccttcatttatcctataactcactcagagacacatggtaacacatactccagattgaccttataaataaaagaatgcccaccagattgaaatcctagaaatacagaaaattctgaattttaacaattactttaaaggtcatgtgaaaactcccactggaaataaatcctgtaaatgtaaatattatggaaaaccttatggaaaataattatagtacaattctcaagaaaattcactatgtgaatgagatgttttaggagctataaataaattgaatatattggttgctcatttttgaagagagtctctagaatatagattttcacttcttttg

SEQ ID NO: 396319 - DNA, 1000 bp, Homo Sapiens; identical to SEQ ID NO: 221322

SEQ ID NO: 396320 - DNA, 1000 bp, Homo Sapiens; identical to SEQ ID NO: 285970

SEQ ID NO: 396321 - DNA, 1000 bp, Homo Sapiens; identical to SEQ ID NO: 221323

SEQ ID NO: 396322 - DNA, 1000 bp, Homo Sapiens; identical to SEQ ID NO: 285971

SEQ ID NO: 396323 - DNA, 1000 bp, Homo Sapiens; identical to SEQ ID NO: 221324

SEQ ID NO: 396324 - DNA, 1000 bp, Homo Sapiens; identical to SEQ ID NO: 116018

SEQ ID NO: 396325 - DNA, 1000 bp, Homo Sapiens
ttcatgctggagagaaacttcacatgtgaaccgtgtgcaaagcctttaaatggtcctcaacccttaatgaacgtaagtgaattcatgctggagcaaaaatgcttcacatgcgaagaatgtggcacagtctttaccacatcctcaaactttgttaaacataagagaatttataccagagagaaaccctacacatgtaaagaagtgtgcaaagccttcaataggttctcaacccttactgtgcacaagataattcattctggggaaaaaaatgctacaaatgtgaaaaacgtggcagagccttcagaccatccacaaacctttatgaaaattcatatttgagagtagaagaatcattccacaaacttacattgagaagatatgaaagatgaatataagaattcatcctagatataaaaccatagaaatgtaaaagatgtgacaaaacctttaagccatactccaggcttcttaaacataatgagaactcatactggaggaaagtcttacaaatgtgaagaatgtggcagtctttaaatcttcctcagtcttttctaaatcatgaagataattcacactgaagagaaactgcaaacgtggagaagtgtgacaaagcttgcaaccacactcaatctattctaaatataagagaaagtatattggtgagaagccaccaaaaatattgaaaaatgtgcaaagccttcaaatgcttgtcacatcttactgtatatatataattcctactgaagaaatcccctggaaatgcaaaaaatgtggcaggatttttaccaatgctcatctttttgcacatgatatcctttatattcgagaaaagttatagaaatataaaaaatatagaaaagtcatatctcctcacattttactaactagcaatgttcatacttaataaaaacattataaatgtaatttctgttgaaagacttcagaaaatataggcctttaaagtgaagaagagtattcttaagacaacaatacactttag

SEQ ID NO: 396326 - DNA, 1000 bp, Homo Sapiens; identical to SEQ ID NO: 116019

SEQ ID NO: 396327 - DNA, 1000 bp, Homo Sapiens; identical to SEQ ID NO: 285977

SEQ ID NO: 396328 - DNA, 1000 bp, Homo Sapiens; identical to SEQ ID NO: 285978

SEQ ID NO: 396329 - DNA, 1000 bp, Homo Sapiens; identical to SEQ ID NO: 285979

SEQ ID NO: 396330 - DNA, 1000 bp, Homo Sapiens; identical to SEQ ID NO: 116020

SEQ ID NO: 396331 - DNA, 1000 bp, Homo Sapiens; identical to SEQ ID NO: 285983

SEQ ID NO: 396332 - DNA, 1000 bp, Homo Sapiens; identical to SEQ ID NO: 118975

SEQ ID NO: 396333 - DNA, 1000 bp, Homo Sapiens; identical to SEQ ID NO: 221331

SEQ ID NO: 396334 - DNA, 1000 bp, Homo Sapiens
tcaacgtaatcttcctcggccaggacaggcccccatcggtaatccaccagttggaccaattggaggtatgatgccaccacagccaggcatcccacagcaacaaggaatgagacccccaatgccacctcatggtcagtatggtggtcatcatcaaggcatgccaggataccttcctggtgctatgcccccgtatgggcagggaccgccaatggtgcccccttaccagggtgggcctcctcgacctccgatgggaatgagacctcctgtaatgtcgcaaggtggccgttactgatcttacttcatccagtctaataggtttggagattaaaccttttctcaacttgtgctgtttatatagccaagcttccgtcaataaggcttcattgtgactttaacaaacattatcttcccacataccaggaactattggacatttattttacatgggaaaaattatttggaataataaagcaggaacttttcctgaagttgcaatttatactgtatggcttctttttcatgtttcatctaggtttttagaagtgaagtatagtaaatttggttcgttaaattgtgaaggcgctggaattacatgaacataccaccctagtaaaggcaagttctgtaagcttacattgctatttgtaaagtttgccttcacagcatttcagatgctgttggacttcatgtccccaacctagcttggtgagggctgtaactgtttccaagtacttgtacattggaagtctgaatgtgtaacaatatttaatgtatttagagttcctcatgttgcagggtttaagaaatctgacccaccaaggtcatgtgacttttctgtactgttaaacttcattgtaataaaatgagagaaaaatttatgcctttttattcataacccagctgtggaccactgcctgaaaggtttgtacagatgcatgccacagtagatgtccacataataaaattcatagttaccaatgcagtaaaaaaaaaaaaaaaa

SEQ ID NO: 396335 - DNA, 1000 bp, Homo Sapiens; identical to SEQ ID NO: 285986

SEQ ID NO: 396336 - DNA, 1000 bp, Homo Sapiens
cgctgttgtcggtgccaggagtccgggcaacccatgagctgcacctgtgggcccttacgctcacttaccatgttgcctctgcacacctggccatcgactccaccgctgaccctgaagccgtcctggctgaagcctcatcccggctctactcccggtttggattctccagctgcaccctgcaggtcgagcagtatcagccggagatggcccagtgcctgcgctgccaggaacccccccaagcctgagccatggccctgccctcaccccactgccaggccgaggctcagccccagactctcagcatctgctgccctgatcacagagacgggaccgagccaggtccataccccttcctctctccctcctaccacctgccagtttccccagcctcagccccagccccagccccagtgggcaagaccaaagtgtggcggggagtggggtgggagtcaggggaatagatgtgactagttcaggggcggggactcccaggcctcagtgtggcagggtgtgttgaaggcctgtggtgccatctccccatggttcatgtggagccacgaacatcctttccctgcagtccatttgtctgtgtggcaggctggctggctgggggcatctgcctgtctatgtgctgttggtgtgcctatgcctgggggaggtcagtaggggccccctccccacatggccctcgctctgtctatgcaggggccccaaagcccgcactttgtccgtgtgtcttagccctgtggttttgtctgtgtgtgtgtgtgtgtgtgtgtgtgtgtgtgtgtgtgtgttcttggtgctgtggcctgtgtgtctctgtgcctatgtggctgtgctatggtttctatgagtctgctccatccatgtgtctgtttgggggtctatctctccatccctctgttggtgctgtgcccttggctatccctgaaagagggaggactccgctgcagctccaccaataaacttgtgtctcactgcaaaaaaaaaaaaaaaa

SEQ ID NO: 396337 - DNA, 1000 bp, Homo Sapiens; identical to SEQ ID NO: 115366

SEQ ID NO: 396338 - DNA, 1000 bp, Homo Sapiens
agtacggctgctagacaactgcattttagtatttctcttccattctcctggttttgtagacccagaagattgaatgagtgacataaatctttagttcggggcaagccagggtgggctagggtggtaagctggaggacttcatccttcagttaggctgcacaagtaacattacctaaaaggcactaacatgctcaggttccccagaaagaggcgtaagaagggcctctccttagcagagcttccacctgccatccgtcttgggttcagtgagcttcaaggctcacaatggaagcactgtcatttccccagaaaagctgtgttccctatgctgaacacaccatacacattctcatctggaatctaaggagcagcttttaccctgatccagtatcctgaggaattttaagcctccactcaaatgacctgcctgtgttgtcatttccatgggaaagaactctttccacgagatctgctagttccaggcctctaagacaggaacgtatgtgccataagtgggtctacttcacagactcaatgaggcagaaattattgtagttttctcctatttcttctgcacccaactttctccttgtatttcaaaggccaggccatgtacactaacgtccttgaaatttgcagttctgtatgcttctattccaaatcattcattaccaataaaaacgaaataccaccctttccattttatagacctcatcccctatttctgtcagacagttatatgacagggtgactgtggaacctcttagttcatccaaagtctacctgaagtgctagactttcagactcttatcactgaaatccttaaggttgaggaggctttatttccctagcactggtgaagggcttcaactgtcaaacctcagaacaaatgcattagggccttagaaatgtcaatggggcaggaagaaaacacaatttctaactgcctgtttttgtataatttaataaaaaccttttaaacattaaaaaaaaaaaaaaa

SEQ ID NO: 396339 - DNA, 1000 bp, Homo Sapiens; identical to SEQ ID NO: 285987

SEQ ID NO: 396340 - DNA, 1000 bp, Homo Sapiens
aaccttatggcctacgacttccatggctcttgggagaaggtcacgggacataacagccccctctacaagaggcaagaagagagtggtgcagcagccagcctcaacgtggatgctgctgtgcaacagtggctgcagaaggggacccctgccagcaagctgatccttggcatgcctacctacggacgctccttcacactggcctcctcatcagacaccagagtgggggccccagccacagggtctggcactccaggccccttcaccaaggaaggagggatgctggcctactatgaagtctgctcctggaagggggccaccaaacagagaatccaggatcagaaggtgccctacatcttccgggacaaccagtgggtgggctttgatgatgtggagagcttcaaaaccaaggtcagctatctgaagcagaagggactgggcggggccatggtctgggcactggacttagatgactttgccggcttctcctgcaaccagggccgataccccctcatccagacgctacggcaggaactgagtcttccatacttgccttcaggcaccccagagcttgaagttccaaaaccaggtcagccctctgaacctgagcatggccccagccctggacaagacacgttctgccagggcaaagctgatgggctctatcccaatcctcgggaacggtccagcttctacagctgtgcagcggggcggctgttccagcaaagctgcccgacaggcctggtgttcagcaactcctgcaaatgctgcacctggaattgagtcgtaaagcccctccagtccagctttgaggctgggcccaggatcactctacagcctgcctcctgggttttcctgggggccgcaatctggctcctgcaggcctttctgtggtcttcctttatccaggctttctgctctcagccttgccttccttttttctgggtctcctgggctgcccctttcacttgcaaaataaatctttggtttgtgcccctcttca

SEQ ID NO: 396341 - DNA, 1000 bp, Homo Sapiens; identical to SEQ ID NO: 284356

SEQ ID NO: 396342 - DNA, 1000 bp, Homo Sapiens; identical to SEQ ID NO: 221333

SEQ ID NO: 396343 - DNA, 1000 bp, Homo Sapiens
tgcaattaggtgttcattttttactacattttattaaaacctgctttatactttcaactgcttgtaggcacaacttctgcaagtttaaatatttgagctttacaaataaacatacacatgctcagttttttaagtaaacctgtaaaatacccaggaaggcaaatgttcattgtttaattagcactgggattttataatataatgtttggtatttttgaggcattgttaacatgaaagtcaaccactggctttgtgaaaaatgctatgtcactattcagaatatgctgggtaaattgacttgcctagtgaaaagcaaaatgttaaagaaagaacttctggttctataatcatattatatgcactaaactatatgcatgaaagttctttgcatggattaatggggcttacccttgttgcactcgaaatctgaggtgtatctagccctgccactattggctacttaccctcattaatatcccacttgagaaaaattgtgagactatactgtgtcaatatctgtaaaaagagagaaaacatgttttgtttttttttgaagggggtggtgtgggagtggccctttaactctatttggctatctgaggatgtacaaaattctcatttaattttctggtcagcaagttccccacacagaaatcactctgaggtttacagaagaactgtaatattattttaaaatgcgatttttctgtcattagttctagatatgtacttcatggttaaattctaaatctgaaaatgctagtgggagatatcaagaaattttctttttgattactagtacctgtattctaacagagagtttgaattttttgcccgtgttatcagaatgatggaaattgatcattttcagttgttcattgtgtattcaatccagcgaactgctgtatgtatagaggagctgaggtgctgtctaatgggaaatgtgatttgattgatttatttgcttagagtaataaaagcattttgtgcattcaatctt

SEQ ID NO: 396344 - DNA, 1000 bp, Homo Sapiens; identical to SEQ ID NO: 116023

SEQ ID NO: 396345 - DNA, 1000 bp, Homo Sapiens; identical to SEQ ID NO: 221334

SEQ ID NO: 396346 - DNA, 1000 bp, Homo Sapiens
aaatactcagataaggtaaaatgccatgatgcctctgtcttctggactggttttcacattagaagacaattgacaacagttacataattcactctgagtgttttatgagaaagccttcttttgggggtcaacagttttcctatgctttgaaacagaaaaatatgtaccaagaatcttggtttgccttccagaaaacaaaactgcatttcactttcccggtgttccccactgtatctaggcaacatagtattcatgactatggataaactaaacacgtgacacaaacacacacaaaagggaacccagctctaatacattccaactcgtatagcatgcatctgtttattctatagttattaagttctttaaaatgtaaagccatgctggaaaataatactgctgagatacatacagaattactgtaactgattacacttggtaattgtactaaagccaaacatatatatactattaaaaaggtttacagaattttatggtgcattacgtgggcattgtctttttagatgcccaaatccttagatctggcatgttagcccttcctccaattataagaggatatgaactgagtttttcttttgttgtttgttcttagctgtaattcctatgcttctatttcagagagccaggagagtttgatattaaaggaggttaaaactgtgatcttatgccatgtcatcaatggccacttaggggccatggctgatgacacattcttatctctacagtactaatgtgttattatagagccatgcattttatttctgaataagaacatatttaaactaatattcccttacaatatggacagtattaatccttccaagatgcagtatttatcaagtgaagcatatttagcagcaaattccattttaacataacttaggaaccaataaccagggtgttttgtggttgggggaggcacggggtggagtattcttttttatatcctcaaaacaaaaaaaatcaatacttatatttc

SEQ ID NO: 396347 - DNA, 1000 bp, Homo Sapiens; identical to SEQ ID NO: 221335

SEQ ID NO: 396348 - DNA, 1000 bp, Homo Sapiens; identical to SEQ ID NO: 285992

SEQ ID NO: 396349 - DNA, 1000 bp, Homo Sapiens; identical to SEQ ID NO: 221336

SEQ ID NO: 396350 - DNA, 1000 bp, Homo Sapiens; identical to SEQ ID NO: 285994

SEQ ID NO: 396351 - DNA, 1000 bp, Homo Sapiens; identical to SEQ ID NO: 116024

SEQ ID NO: 396352 - DNA, 1000 bp, Homo Sapiens; identical to SEQ ID NO: 285997

SEQ ID NO: 396353 - DNA, 1000 bp, Homo Sapiens
cggcacccacccaccgccgccgccgccaccggcagcgcctcctcctctcctcctcctcctcccctcttctctttttggcagccgctggacgtccggtgttgatggtggcagcggcggcagcctaagcaacagcagccctcgcagcccgccagctcgcgctcgccccgccggcgtccccagccctatcacctcatctcccgaaaggtgctgggcagctccggggcggtcgaggcgaagcggctgcagcggcggtagcggcggcgggaggcaggatgagcgcacgcggtgagggcgcggggcagccgtccacttcagcccagggacaacctgccgccccagcgcctcagaagagaggacgcggccgccccaggaagcagcagcaagaaccaaccggtgagccctctcctaagagacccaggggaagacccaaaggcagcaaaaacaagagtccctctaaagcagctcaaaagaaagcagaagccactggagaaaaacggccaagaggcagacctaggaaatgggacaatctactaccaagaaccagctccaagaagaaaacatctctgggaaacagtaccaaaaggagtcactgaattgtcattggaggagtccaggatagctcttcatgttattttcaccttgaggaattgtccattacatctatgagccttatgtgtggctttctccgatatagaaacctatcaggtgtcttttagatcatttcaaaacactggcttattctttcttatgtttccaactgaagtctgcatcccaagatgtagtttcactgctaccccatatggcacccttgtacgaatttgaaaaaagtactcactctaggcacatgcagagccatgcctgcggggacagcttagagagtagagggtgggctgaactccagttactctcgtacagggatccacctttttgcagaaatcacagtgtggctatggtgtggtttgatttcataaaacagatgcttaaaaagtaaaaaaaaaaa

SEQ ID NO: 396354 - DNA, 1000 bp, Homo Sapiens; identical to SEQ ID NO: 221337

SEQ ID NO: 396355 - DNA, 1000 bp, Homo Sapiens; identical to SEQ ID NO: 285999

SEQ ID NO: 396356 - DNA, 1000 bp, Homo Sapiens
tcatgcggaaatatgaactttgctcgaaggaattcctgcaatcagtgcaatgagcctagaccagaggactctcgtccctcaggaggagatttccgggggagaggctacggtggagagaggggctacagaggtcgtgggggcagaggtggagaccgaggcggctatggtggagacagaagtgggggtggctatggtggagacagaagcagcggtggtggctacagcggagatagaagtgggggcggctatggtggagacagaagtgggggtggctatggtggggacagaggcggcggctatggtggggacagaggaggcggctatggaggagaccgaggaggtggctatggaggagatcgaggtggctatggaggagaccgaggtggaggctatggtggagaccgaggaggctatggaggagatcgaggaggttacggaggagatcgaggaggttatggaggagatcgaggaggctatggaggagacagaagccgggggggctatggaggagaccgtggtggtggcagtggctacggtggagaccgaagtggaggctatggaggagacaggagtggtggcggctatggaggagaccgaggtgggggctacggaggagaccgaggtggctatggaggcaaaatgggaggaagaaacgactacagaaatgatcagcgcaaccgaccatactgatgactgttttgaatgttcctttgtctctgacatgatccatagtgaaattgccagagttttgcctgctgctttcctcgtggcctcttcttgggtagtgaaattaagtgacatttggatttttatttgggtgggagggctgggacagtttttcttctagaaatgtctgttgagatttccccctttagtttccaaccttctccccaacccttggagctaaatgcgttgtaaaatattgccaaaatgaaaagtgttttgtaatactgcaataaaggctgcttgtttttgtggaaaaaaaaaaaaaaaaaaaaaa

SEQ ID NO: 396357 - DNA, 1000 bp, Homo Sapiens; identical to SEQ ID NO: 116025

SEQ ID NO: 396358 - DNA, 1000 bp, Homo Sapiens; identical to SEQ ID NO: 286001

SEQ ID NO: 396359 - DNA, 1000 bp, Homo Sapiens
cgcccgtggccggcctccctgccttcctggccatgccgttcaactcactcgtgaacatggcctacacgctgctggggctgtcgtggctgcacaggggcggcgcgatggggctgggtccccgctacctgaaggacgtgttcgcagccatggccctgctctatggccccgtgcagtggctgcgcctgtggacgcagtggcgccgtgccgcggtgctggaccagtggctcacactgcccatctttgcatggcccgtggcctggtgcctctacctagaccgcggctggcggccctggctgttcctctctcttgagtgcgtctccctggccagttatggcctcgctctgctgcatccccagggcttcgaggtcgcactgggtgctcacgtggtggccgctgtggggcaggcgctgcgcacccacaggcactatggcagcaccacctcggctacctacttagctttgggggtgctctcttgcctgggctttgtggtcctcaagctgtgtgaccatcagctcgcacggtggcgtctcttccagtgcctcacaggccacttctggtccaaggtctgtgacgtgctccagttccactttgcgtttttgtttctgacgcatttcaacactcacccaagattccatccctctggcgggaagacgcgttgaacccagggaagaacctgctgaaaaccgatgacccccagcattgaaatggactctgagatggcagcgtggtgccagtgtcagacatcctgtgtgtgatgatatgcactgattacacaagactgccctttcctgagaagctgcgggcttcggtgtggaggggtggagtgctgtgatctcgacaacttactttcaaagacataaagcacagatctccgcacaggggatgtgtgtgttcctgatgtaatttgcataacttttctgtagtttgaaatgtttccaaataaatattggcaaggggagtggaaatgacaccaagaagcccctcatgctcatggttggac

SEQ ID NO: 396360 - DNA, 1000 bp, Homo Sapiens; identical to SEQ ID NO: 286002

SEQ ID NO: 396361 - DNA, 370 bp, Homo Sapiens; identical to SEQ ID NO: 286003

SEQ ID NO: 396362 - DNA, 1000 bp, Homo Sapiens; identical to SEQ ID NO: 116026

SEQ ID NO: 396363 - DNA, 1000 bp, Homo Sapiens
ggacacgtggtgggggccactgaaaccaggcctaggagggagaacaagttccaaaggtgccgactggaagaagggggtaaaagtttgctttggtgagtgagaaaaggctggggcgtgtgatccatcccctcacgtttcagaacttccaggctttctacctcgactctcaccacagccagcacatacacctaggctgtttttccttcctccacacctgagggacgcagcaacagctaggatctgcattttcaggttccgagcctgacccctggaactgaccagcgctcgattgtcagccttggcctggggttttgaccttgccagtgaagtttcggttttgaagtgattaaatgtcacttcctcatcagtttcacttctggaggttttcttatcctactccctggtgccagggacgtacctgggagtttgaatcaggcccatttgagcgtggcagccgtgttgggtgaaggtccggggctcggtgaggcactgggggggttttcgggaggaaaatgaaaatgcttctagaatgagtgaaccacatcatagctctcactgttttttcaatagctactttttttagcagacaccagagccacactcaaatggctaagtaggttatgacctctctggattatttttgaatgcccaactgttgcattcaagttttctgactaataagaaattaagcattcatccttcgtatcactgcagaagcaacagtgggggcacagggagggaactcttgacactgagccactaaaatatggactaattttttggacaaatcttcaaacggactgtgctactgtatttgtctcaaagctaccaagtttgtgcaataagtggaagggatgtcatccttcttcaataaatgctgaatgacattcaagctgattttctagaccactgagaaaatctttatttacaataaatttcaataaaatttgcataaatatattcccaaaaaaaaaaaaaaaaaaaaagaaaaaaaaaaaaa

SEQ ID NO: 396364 - DNA, 1000 bp, Homo Sapiens; identical to SEQ ID NO: 286005

SEQ ID NO: 396365 - DNA, 1000 bp, Homo Sapiens; identical to SEQ ID NO: 286006

SEQ ID NO: 396366 - DNA, 1000 bp, Homo Sapiens; identical to SEQ ID NO: 221338

SEQ ID NO: 396367 - DNA, 1000 bp, Homo Sapiens; identical to SEQ ID NO: 286007

SEQ ID NO: 396368 - DNA, 1000 bp, Homo Sapiens; identical to SEQ ID NO: 116027

SEQ ID NO: 396369 - DNA, 1000 bp, Homo Sapiens; identical to SEQ ID NO: 286009

SEQ ID NO: 396370 - DNA, 1000 bp, Homo Sapiens
gctaaaggaaatgtaagaggttttgttgtctgttttaaataaatttaattcggaacacatgatccaacagactatgttaaaatattcagggaaatctctcccttcatttactttttcttgctataagcctatatttaggtttcttttctatttttttctcccatttggatcctttgaggtaaaaaaacataatgtcttcagcctcataataaaggaaagttaattaaaaaaaaaaagcaaagagccattttgtcctgttttcttggttccatcaatctgtttattaaacatcatccatatgctgaccctgtctctgtgtggttgggttgggaggcgatcagcagataccatagtgaacgaagaggaaggtttgaaccatgggccccatctttaaagaaagtcattaaaagaaggtaaacttcaaagtgattctggagttctttgaaatgtgctggaagacttaaatttattaatcttaaatcatgtactttttttctgtaatagaactcggattcttttgcatgatggggtaaagcttagcagagaatcatgggagctaacctttatcccacctttgacactaccctccaatcttgcaacactatcctgtttctcagaacagtttttaaatgccaatcatagagggtactgtaaagtgtacaagttactttatatatgtaatgttcacttgagtggaactgctttttacattaaagttaaaatcgatcttgtgtttcttcaaccttcaaaactatctcatctgtcagatttttaaaactccaacacaggttttggcatcttttgtgctgtatcttttaagtgcatgtgaaatttgtaaaatagagataagtacagtatgtatattttgtaaatctcccatttttgtaagaaaatatatattgtatttatacatttttactttggatttttgttttgttggctttaaaggtctaccccactttatcacatgtacagatcacaaataaatttttttaaatac

SEQ ID NO: 396371 - DNA, 1000 bp, Homo Sapiens; identical to SEQ ID NO: 116029

SEQ ID NO: 396372 - DNA, 396 bp, Homo Sapiens; identical to SEQ ID NO: 116030

SEQ ID NO: 396373 - DNA, 1000 bp, Homo Sapiens; identical to SEQ ID NO: 286012

SEQ ID NO: 396374 - DNA, 1000 bp, Homo Sapiens; identical to SEQ ID NO: 286013

SEQ ID NO: 396375 - DNA, 945 bp, Homo Sapiens
atgatgggacaaaatcaaaccagcatctcagacttcctgctcctgggcctgcccatccaaccagagcagcaaaacctgtgctatgccctgttcttggccatgtatcttaccaccctcctggggaacctcctcatcattgtcctcattcgactggattcccatctccacacgcctatgtatttgtttctcagcaacttgtccttctctgacctctgcttctcttccgtgaccattcccaagttgttacagaacatgcagaaccaggacccatccatcccctatgcggactgcctgacccaaatgtacttcttcctgttatttggagacctggagagcttcctccttgtggccatggcctatgaccgctatgtggccatctgcttccccctgcactacaccgccatcatgagccccatgctctgtctcaccctggtggcgctgtcctgggtgctgaccaccttccatgccatgttacacactttactcatggccaggttgtgtttttgtgcagacaatgtgatcccccactttttctgtgatatgtctgctctgctgaagctggccttctctgacactcgagttaatgaatgggtgatatttatcatgggagggctcattcttgtcatcccattcctactcatccttgggtcctatgcaagaattgtctcctccatcctcaaggtcccttcttctaagggtatctgcaaggccttctctacttgtggctcccacctgtctgtggtgtcactgttctatggaaccgttattggtctctacttatgctcatcagctaatagttctactctaaaggacactgtcatggctatgatgtacactgtggtgacccccatgctgaaccccttcatctacagcctgaggaacagagacatgaagggagccctgagcagagtcattcatcagaagaaaactttcttctctctctga

SEQ ID NO: 396376 - DNA, 1000 bp, Homo Sapiens; identical to SEQ ID NO: 286014

SEQ ID NO: 396377 - DNA, 1000 bp, Homo Sapiens
ttgatgaagaagccctgggatcccgacacaggccagacctggtccctagcactccatcactgtttgaagctgcttccttggcaaccacaatttcatcttcttccttatacgtcaatgagcactatccacacgacaggcctacactctattcaaacagcaaagggttaccttccagttcaacatttaccttggaagaggggaccatctacttgaccgctgagcccaacactctggaagtgcaggatgacaatgcttctgtgcttgacgtctatttataagtgaaaatggtgatcacctaagcacatggatgagacgtgagcacagttatggcagagaagttctcgcaccagaattatccacagcaactgctgagccccactacatacagagaaactatcaacctgacttaagagttttcaagatgtcaaacttaaggctgatcagcagatgggatgtgaaaaatactccctattctatcatttgctgttgcttgctgaactgtgaagaactgcatgaactatatttaagctgctttctgtaccattgccaatcacctttttggagttggaagtgctattttcctatggacttttgcattatttcattgtgcatgcatccagtgattatacataagcaacatatgtaatctgcttatatatttttaaaaatccatccacacacattggtaaattaagtataaattcttttgcaaaattatagttcatatgtcattgaaagttaaattggttcattaaagatcaatatactaggtctgccttcactttatagaaaactagcttctataaagattttttcactgtttactagtgaaatgagaaaagcaaagctatttataaaaggccttatgtcgtgtacatacattgtctttgaaatatttgtgatctagtttattgcttgtaaaagagaaattatataatttatttagtaaatactactgtaaactatagttttgtgagagaaataaaatattttgttctca

SEQ ID NO: 396378 - DNA, 1000 bp, Homo Sapiens
gccagcaaggtgcccccatcttagagtgtggtgtccaaacgtgaggtggcttcctagttacatgaggatgtgatccaggaaatccagtttggaggcttgatgtgggttttgacctggcctcagccttggggctgtttttccttgttgccccgctctagacttttagcagatctgcagcccacaggcttttttggaaggagtggcttcctgcaggtgttccacctgccttcggagcctgccacccaggccctcagaactgagccacaggctgctctggccaggagagaaacagctctgttgttctgcattgggggaggtacattcctgcatcttctcaccccctcaaccaggaactggggatttgggatgagatatggtcagacttgtagataaccccaaagatgtgaagatcgcttgtgaaaccattttgaatgaatagattggtttcctgtggctccctccaaacctggccaagcccagcttccgaagcaggaaccagcactgtctctgtgcctgactcacagcatataggtcaggaaagaatggagacggcattcttggacttcactggggctgctggattggatgggaaaccttctggaagaggcagatgggggtcaaaccactgccttggccccaggaaggggccataggtaggtctgaacaactgccgcaagaccactacatgacttagggaacttgaaaccaactggctcatggagaaaacaaatttgacttgggaaagggattatgtaggaataatgtttggacttgatttccccacgtcataatgaagaatggaagtttggatctgctcctcgtcaggcgcagcatctctgaagcttggaaagctgtcttccagcagcctccgtggcctcgggttcctaccggcttctctgcatttggtctgctgatcatgttgccataatgtgtatggaaagtgtaacacattcttactggttaaagacgactaccaggtatctaacttgtttaacattga

SEQ ID NO: 396379 - DNA, 1000 bp, Homo Sapiens; identical to SEQ ID NO: 115274

SEQ ID NO: 396380 - DNA, 1000 bp, Homo Sapiens; identical to SEQ ID NO: 286015

SEQ ID NO: 396381 - DNA, 1000 bp, Homo Sapiens; identical to SEQ ID NO: 116032

SEQ ID NO: 396382 - DNA, 1000 bp, Homo Sapiens
cctgcaagcagctgagcgctatggcattaacaccactgacatcttccaaactgtggacctctgggaaggaaagaacatggcctgtgtgcagcggacgctgatgaatctgggtgggctggcagtagcccgagatgatgggctcttctctggggatcccaactggttccctaagaaatccaaggagaatcctcggaacttctcagataaccagctgcaagagggcaagaacgtgatcgggttacagatgggcaccaaccgcggggcgtctcaggcaggcatgactggctacgggatgccacgccagatcctctgatcccaccccaggccttgcccctgccctcccacgaatggttaatatatatgtagatatatattttagcagtgacattcccagagagccccagagctctcaagctcctttctgtcagggtggggggttcagcctgtcctgtcacctctgaggtgcctgctggcatcctctcccccatgcttactaatacattcccttccccatagccatcaaaactggaccaactggcctcttcctttcccctgggaccaaaatttaggggcctcagtccctcaccgccatgccctggcctattctgtctctccttcttccccctggcctgttctgtctctgagctctgtgtcctccgttcattccatggctgggagtcactgatgctgcctctgccttctgatgctggactggccttgcttctacaagtatgcttctcccacagctgtggctgcaggaacttaatttatagggaggagcctgtggcagctgctgccccagccacagctgcactgactgtgctcaccacacatctggggcagccttccctggcaggggccctcgtggcttctcattttccattcccttcactgtggctaaggggtggggtgaggggatggagagggagggctgcctaccatggtctggggcttgaggaagatgagtttgttgatttaaataaagaatttgtcatttttg

SEQ ID NO: 396383 - DNA, 1000 bp, Homo Sapiens
tcattttttctttaaaggagaaaacttgtaggtgtttaagaattggttttgggagggcgaggactgggccaggttagaggcagatggcacaggggcgtgtggcgggcgggtgaggctgctttgcacacctgtgttggtggctgtcccctgccgcccctccctgtggcagcagcaggacaggtgtgtgcccagcaccctccctacctgggcctggaagcagatgaggggaatacttcatgcaaagaaaaaagtaacatgtgcaaaagctccccgtccagctttgacagtcagttttgatgtcagctcctcggcagggtaggcctgatgacagccctgtccctccctgcctccgccttgcccaaggccacggagggcgtctgcagagaggcctgccttccggattccaggcgggcatgccctgcaaaccccgcctgggcctcccttggtctgcccagccctcggttagccctgcctgaatcagtagatacttgaacgagtccccagtctgcgggaggcagtggtggggccatggacccatgcggggggttccagggtcacacgccacataacagacaaaaatacacacacgtgtgtttttctttgcaatacttgaaatattgccactgtgcttggacttagaagaagaaaatccccgtgacttcttcctcatcaccttgatggctttattctcaccttgtggggcatgtttgaatttattgcttcatggccgactggaatcctgagtcctgggaagctggcactgcggggatcttgcccggtgtcctggtcctcttgcttccgtcgcggccgcatgtgcgtgtgtccaagcaggtcctgggcgcctcaactgctgcccctggttgaatgttctcttgatagtgctggaccctttgtctattttaaagcgaattttgtgtgatttcctgccctttgcgttatattgtataataccaacgtaaggaaataaacctttggaattgttgaaaaaaaaaaaaaaaaa

SEQ ID NO: 396384 - DNA, 1000 bp, Homo Sapiens; identical to SEQ ID NO: 221341

SEQ ID NO: 396385 - DNA, 1000 bp, Homo Sapiens; identical to SEQ ID NO: 286019

SEQ ID NO: 396386 - DNA, 1000 bp, Homo Sapiens; identical to SEQ ID NO: 116033

SEQ ID NO: 396387 - DNA, 1000 bp, Homo Sapiens
ggaaaatgcccggctcatgctgcagacagaaactatccaggccggagcagatgactttaaagagagatatgaaaatgagcagccatttcgaaaggcagcagaagaggaaattaactctctgtataaagtcattgatgaggctaatttgactaaaatggacctggagagtcaaatagaaagtctgaaagaagaacttggctctctatcaagaaactatgaagaggatgtgaagctgctgcacaaacagttggcagggtgtgagctggaacaaatggatgctcccattggcactggtctggacgacatccttgagacgatcagaattcagtgggagagagatgttgaaaagaaccgggtggaggcaggagccctgctccaagctaagcaacaggcggaggtggcccacatgtcccagacccaggaggagaagctggcagctgccctcagggtggagttacacaacacttcgtgccaagtccagagcctccaggctgagacagaatccttacgtgccctgaaacgaggcctggagaacaccttgcacgatgccaagcactggcatgacatggagctccagaacctgggcgctgtggtcggccggctggaggcggagctcagggaaatccgagcggaggcggagcagcagcaacaggagcgcgcgcatctgctggcccgcaagtgccagctgcagaaggacgtggcgtcctaccacgccctgctggacagggaggagagcggctgatggagaaacttcctctttttcatgaagaaaacacccttcctcaacagctgacccaagaagttgcttgaggagctttctcctgagctccagtccctgctggattccctggttaattcagcttgagctgaaaagcttcctggaagtggagaggatccttctgctttaatctgagtagtctgtagcttgagcaatctcccttgtcctccttcaaataaatgctttgtgcgcagcgtccagtttaaaaaaaaaaaaaaaaaa

SEQ ID NO: 396388 - DNA, 1000 bp, Homo Sapiens; identical to SEQ ID NO: 116034

SEQ ID NO: 396389 - DNA, 1000 bp, Homo Sapiens; identical to SEQ ID NO: 221343

SEQ ID NO: 396390 - DNA, 1000 bp, Homo Sapiens; identical to SEQ ID NO: 221344

SEQ ID NO: 396391 - DNA, 1000 bp, Homo Sapiens; identical to SEQ ID NO: 116036

SEQ ID NO: 396392 - DNA, 1000 bp, Homo Sapiens; identical to SEQ ID NO: 116037

SEQ ID NO: 396393 - DNA, 1000 bp, Homo Sapiens; identical to SEQ ID NO: 221868

SEQ ID NO: 396394 - DNA, 1000 bp, Homo Sapiens; identical to SEQ ID NO: 286024

SEQ ID NO: 396395 - DNA, 1000 bp, Homo Sapiens; identical to SEQ ID NO: 286025

SEQ ID NO: 396396 - DNA, 1000 bp, Homo Sapiens; identical to SEQ ID NO: 116039

SEQ ID NO: 396397 - DNA, 1000 bp, Homo Sapiens; identical to SEQ ID NO: 286026

SEQ ID NO: 396398 - DNA, 1000 bp, Homo Sapiens; identical to SEQ ID NO: 221348

SEQ ID NO: 396399 - DNA, 1000 bp, Homo Sapiens
ctatttgggcaaaccatatgtagccatggttacaacataccaaatggcagttcttcttgcctttaacaacagtgaaactgtcagttataaagagcttcaggacagcactcagatgaatgaaaaggaactgacaaaaacaatcaaatcattacttgatgtgaaaatgattaaccatgattcagaaaaggaagatattgatgcagaatcttcgttttcattaaatatgaactttagcagtaaaagaacaaaatttaaaattactacatcaatgcagaaagacacaccacaagaaatggagcagactagaagtgcagttgatgaggaccggaaaatgtatctccaagctgctatagttcgtatcatgaaagcacgaaaagtgcttcggcacaatgcccttattcaagaggtgattagccagtcaagagctaggtttaatcccagtatcagcatgattaagaagtgtattgaagttctgatagacaaacaatacatagaacgcagccaggcgtcggcagatgaatacagctacgtcgcgtgatgtcgctctcctccagcgtggtgtgagaagatcattgccatcaccatttggtgtgttcctgtgggaaaaagcaggactgtgcctccataatttggtcatttggcagcccctgttttctgctgtttacaacatcaccagtgccacgtcatgagcgtcaaagaaaatgcctagagatatttcaagctcatgtcattatgacatttcttaaaactttattaaaagaatgagtgaagtattgctgaaaagtggaaattcggttgggtaccatgctttttctccccttcacgtttgcagttgatgtgtctttttttttttttttaatgtatcttaaaggacataaaatttaaaaacttaaatattgtaatatgacagataacctaataattgtatctacattaaaatgacaaacatgatactgctgcttgtcaaataaaaaaaaaaaaaaaaaaaaaaaaaaaaaaa

SEQ ID NO: 396400 - DNA, 1000 bp, Homo Sapiens; identical to SEQ ID NO: 286028

SEQ ID NO: 396401 - DNA, 1000 bp, Homo Sapiens; identical to SEQ ID NO: 221349

SEQ ID NO: 396402 - DNA, 1000 bp, Homo Sapiens; identical to SEQ ID NO: 284357

SEQ ID NO: 396403 - DNA, 1000 bp, Homo Sapiens; identical to SEQ ID NO: 286031

SEQ ID NO: 396404 - DNA, 1000 bp, Homo Sapiens; identical to SEQ ID NO: 286032

SEQ ID NO: 396405 - DNA, 1000 bp, Homo Sapiens; identical to SEQ ID NO: 221350

SEQ ID NO: 396406 - DNA, 1000 bp, Homo Sapiens; identical to SEQ ID NO: 116041

SEQ ID NO: 396407 - DNA, 1000 bp, Homo Sapiens; identical to SEQ ID NO: 221351

SEQ ID NO: 396408 - DNA, 1000 bp, Homo Sapiens; identical to SEQ ID NO: 116043

SEQ ID NO: 396409 - DNA, 1000 bp, Homo Sapiens; identical to SEQ ID NO: 222313

SEQ ID NO: 396410 - DNA, 1000 bp, Homo Sapiens; identical to SEQ ID NO: 116044

SEQ ID NO: 396411 - DNA, 1000 bp, Homo Sapiens; identical to SEQ ID NO: 116045

SEQ ID NO: 396412 - DNA, 1000 bp, Homo Sapiens; identical to SEQ ID NO: 286041

SEQ ID NO: 396413 - DNA, 1000 bp, Homo Sapiens; identical to SEQ ID NO: 221353

SEQ ID NO: 396414 - DNA, 1000 bp, Homo Sapiens; identical to SEQ ID NO: 286043

SEQ ID NO: 396415 - DNA, 1000 bp, Homo Sapiens; identical to SEQ ID NO: 116046

SEQ ID NO: 396416 - DNA, 1000 bp, Homo Sapiens; identical to SEQ ID NO: 286045

SEQ ID NO: 396417 - DNA, 1000 bp, Homo Sapiens; identical to SEQ ID NO: 286046

SEQ ID NO: 396418 - DNA, 1000 bp, Homo Sapiens; identical to SEQ ID NO: 221354

SEQ ID NO: 396419 - DNA, 1000 bp, Homo Sapiens; identical to SEQ ID NO: 286048

SEQ ID NO: 396420 - DNA, 1000 bp, Homo Sapiens; identical to SEQ ID NO: 116047

SEQ ID NO: 396421 - DNA, 1000 bp, Homo Sapiens
aacaagtccttcagctcctccaacatctcgaactccttcaggcaacgtttgggtgactcatgaagaaatggaaaatcttgcagctccagcaaaaacgaaagaatctgaggaaggaagctgggcccagtgtccggtttttctacagaccctggcttatggagatatgaatcatgagtggattggaaatgaatggcttcccagcttggggttacctcagtacagaagttactttatggaatgcttggtagatgcaagaatgttagatcacctaacaaaaaaagatctccgtgtccatttaaaaatggtggatagtttccatcgaacaagtttacaatatggaattatgtgcttaaagaggttgaattatgacagaaaagaactagaaagaagacgggaagcaagccaacatgaaataaaagacgtgttggtgtggagcaatgaccgagttattcgctggatacaagcaattggacttcgagaatatgcaaataatatacttgagagcggtgtgcatggctcacttatagccctggatgaaaactttgactacagcagcttagctttattattacagattccaacacagaacacccaggcaaggcagattcttgaaagagaatacaataacctcttggccctgggaactgaaaggcgactggatgaaagtgatgacaagaacttcagacgtggatcaacctggagaaggcagtttcctcctcgtgaagtacatggaatcagcatgatgcctgggtcctcagaaacattaccagctggatttaggttaaccacaacctctgggcagtcaagaaaaatgacaacagatgttgcttcatcaagactgcagaggttagacaactccactgttcgcacatactcatgttgaccagccactcaaaggaggcagcactgacctgctatggcgtcttttcagtctactctacctaaagtgcactaccatctaagaagacgagcagtgaaaacctttgtgaaaactgaattc

SEQ ID NO: 396422 - DNA, 1000 bp, Homo Sapiens; identical to SEQ ID NO: 221355

SEQ ID NO: 396423 - DNA, 1000 bp, Homo Sapiens; identical to SEQ ID NO: 284240

SEQ ID NO: 396424 - DNA, 1000 bp, Homo Sapiens; identical to SEQ ID NO: 116049

SEQ ID NO: 396425 - DNA, 1000 bp, Homo Sapiens; identical to SEQ ID NO: 286054

SEQ ID NO: 396426 - DNA, 1000 bp, Homo Sapiens; identical to SEQ ID NO: 286055

SEQ ID NO: 396427 - DNA, 1000 bp, Homo Sapiens; identical to SEQ ID NO: 116050

SEQ ID NO: 396428 - DNA, 1000 bp, Homo Sapiens
tggcactacgctccctgcagaaccgctgtcttgtccctggctactattctacccatctacaacgctggctgacttactacccctctggacagttgctgattgtggatgggcaagagctgcgtaccaacccagcagcctcaatggagagcatccagaagttcctgggtatcacaccctttctgaactacacacggaccctcaggtttgatgatgataagggattttggtgccagggacttgaaggtggtaagactcgctgtctaggccggagcaaaggccggaggtatccagatatggacactgagtcccgtcttttccttacggattttttccggaaccataatttggagttgtcgaagctgctgagccggcttggacagccagtgccctcgtggcttcgggaagaactgcagcattccagtctgggctgatgtcccagcctcccataccagcaaaatgccccctgcttccctaaggggcaggtccagagcagggcccacaagggggattagagtggcctggcccctccccctctacctcagtagcccccaggcctgagatggctgagaagggaagggtatccttttcccacagttctgggacaaataaaggggcttcctttggtaccccacataatagtgctaggtacctttgacccatcatcttgggaggtggggaggaatgagagggtccaggcagggtgtaggggaatgtattagtccaatgagatttccctcttcatccgcagcagtgtatctattctatacctggctatgggagagaccccttgcatgggagggaccccttgctatggcccctttagccaggcagtgggatctacctgtggcccggcctccctaatgtcattcacattgaatggggatgaggtcggacagtggctcatagagccgagtatgagccctagctgtgggctagaaatgtccttaataaacatccttatttttctgtttaaaaaaaaaaaaaaaaaaaaaaaaaaaaa

SEQ ID NO: 396429 - DNA, 1000 bp, Homo Sapiens; identical to SEQ ID NO: 221358

SEQ ID NO: 396430 - DNA, 1000 bp, Homo Sapiens
gagcattaacttcgatctccaaatcagaagttccaacaaggacaatccagacagcaattttgtgagcctgcaaatcaacatcactgctgtagcgcaggtggaaataagaggagtgtcacaccctccgcagattgttctgcccattcataactgggaaccagaagaggagccccacaaagaggaggaggttggaccattggtggaacatatttatgagctgcacaatattggaccaagtaccatcagtgacaccatcctggaggtgggctggcctttctctgcccgggatgaatttcttctctatattttccatattcaaactctgggacctctgcagtgccaaccaaatcctaatatcaatccacaggatataaagcctgctgcctccccagaggacacccctgagctcagcgcctttttgcgaaactctactattcctcatcttgtcaggaagagggatgtacatgtggtcgaattccacagacagagccctgcaaaaatactgaattgtacaaatatcgagtgtttacaaatctcctgtgcagtgggacgactcgaaggaggagaaagcgcagtcctgaaagtcaggtcacgattatgggcccacaccttcctccagagaaaaaatgatccctatgctcttgcatccctggtgtcctttgaagttaagaagatgccttatacagatcagccagcaaaactcccagaaggaagcatagcaattaagacatcagttatttgggcaactccgaatgtttccttctcaatcccattatgggtaataatactagcaatacttcttggattgttggttctcgccattttaaccttagctttatggaagtgtggattctttgacagagccagacctcctcaggaggacatgaccgacagggaacagctgacaaatgacaagacccctgaggcatgacaagaaaaaaaaagaagaccaaagacctcaaacactggtcctgttcaaagaaaaagaaagaacatgagg

SEQ ID NO: 396431 - DNA, 1000 bp, Homo Sapiens; identical to SEQ ID NO: 286058

SEQ ID NO: 396432 - DNA, 1000 bp, Homo Sapiens; identical to SEQ ID NO: 221359

SEQ ID NO: 396433 - DNA, 1000 bp, Homo Sapiens; identical to SEQ ID NO: 286060

SEQ ID NO: 396434 - DNA, 1000 bp, Homo Sapiens; identical to SEQ ID NO: 116052

SEQ ID NO: 396435 - DNA, 1000 bp, Homo Sapiens; identical to SEQ ID NO: 221361

SEQ ID NO: 396436 - DNA, 1000 bp, Homo Sapiens
tgaccgtcgctcacgggtcttaccccatcccaacagaatacaggctggtgagattggagagatgaaggatggagtcccagagggagcacaacttcagggaccggttcatcgaaatccaacttaccgcccaaggtaccgtagcaggggacctcctcgcccacgacctgccccagcagttggagaggctgaagataaagaaaatcagcaagccaccagtggtccaaaccagccgtctgttcgccgtggatatcggcgtccctacaattaccggcgtcgcccgcgtcctcctaacgctccttcacaagatggcaaagaggccaaggcaggtgaagcaccaactgagaaccctgctccacccacccagcagagcagtgctgagtaacaccaggctcctcaggcaccttcaccatcggcaggtgacctaaagaattaatgaccattcagaaataaagcaaaaagcaggccacaaccttaaccaacaccaaagaaacatccaagcaataaagtggaagactaaccaagatttggacattggaatgtttactgttattctttaagaaacatctacaaaaagaaaatgtcaacaaatttttccagcaagctgagaacctgggaattcctgcacggaagacaagagagtagcctctccagtttcagcaaccgctaggtttctattttttttcctggtttttactgttttggtaatatatatattgaaacaagaaatattaataccacatggggagaaccccaaccaaagaaatctgaaatatatagtaaatgcttttttttccgtttttgttcattttggatgctggtgctaaacctccaagtgtcatgatttaaaaaaaaaaaaaatttatgtccttcttatttatttctaggatgaggggaggataacatttttgctttcttatgtgactctctttgaaaatgtgcagtaagaaattcctcaaaaataaaatttttacccttcagaggaaaaaaaaaaaaaaaaaaa

SEQ ID NO: 396437 - DNA, 1000 bp, Homo Sapiens; identical to SEQ ID NO: 116054

SEQ ID NO: 396438 - DNA, 1000 bp, Homo Sapiens; identical to SEQ ID NO: 286067

SEQ ID NO: 396439 - DNA, 1000 bp, Homo Sapiens; identical to SEQ ID NO: 286068

SEQ ID NO: 396440 - DNA, 1000 bp, Homo Sapiens; identical to SEQ ID NO: 221363

SEQ ID NO: 396441 - DNA, 1000 bp, Homo Sapiens; identical to SEQ ID NO: 286069

SEQ ID NO: 396442 - DNA, 1000 bp, Homo Sapiens; identical to SEQ ID NO: 116055

SEQ ID NO: 396443 - DNA, 1000 bp, Homo Sapiens; identical to SEQ ID NO: 221364

SEQ ID NO: 396444 - DNA, 1000 bp, Homo Sapiens
gaagagtggagtcagatctcagagatggccaaagatgttgtgaggaagctcctgaaggtcaaaccggaggagagactcaccatcgagggagtgctggaccacccctggctcaattccaccgaggccctggataatgtgctgccttctgctcagctgatgatggacaaggcagtggttgcaggaatccagcaggctcacgcggaacagttggccaacatgagaatccaggatctgaaagtcagcctcaaacccctgcactcagtgaacaaccccattctgcggaagaggaagttacttggcaccaagccaaaggacagtgtctatatccacgaccatgagaatggagccgaggattccaatgttgccttggaaaaactccgagatgtgattgctcagtgtattctcccccaggctggagagaatgaagatgagaaactgaatgaagtaatgcaggaggcttggaagtataaccgggaatgcaaactcctaagagatactctgcagagcttcagctggaatggtcgtggattcacagataaagtagatcgactaaaactggcagaaattgtgaagcaggtgatagaagagcaaaccacgtcccacgaatcccaataatgacagcttcagactttgtttttttaacaatttgaaaaattattctttaatgtataaagtaattttatgtaaattaataaatcataatttcatttccacattgattaaagctgctgtatagatttagggtgcaggacttaataatagtatagttattgtttgtttttaagaaaagctcagttctagagacatactattactttaggactgtgtagttgtatatttgtaagatgacagatgatgctgtcaagcaatattgttttatttgtaataaaatatacaaaaatcacttgccagcagtagaaaaaggaccgactataccgacctttctgattagtaaacagttgaatcaaggactctggaaaaaaaaaaaaaaaaaaaaaaa

SEQ ID NO: 396445 - DNA, 946 bp, Homo Sapiens; identical to SEQ ID NO: 286073

SEQ ID NO: 396446 - DNA, 1000 bp, Homo Sapiens; identical to SEQ ID NO: 116057

SEQ ID NO: 396447 - DNA, 1000 bp, Homo Sapiens; identical to SEQ ID NO: 221366

SEQ ID NO: 396448 - DNA, 1000 bp, Homo Sapiens; identical to SEQ ID NO: 116058

SEQ ID NO: 396449 - DNA, 1000 bp, Homo Sapiens; identical to SEQ ID NO: 221367

SEQ ID NO: 396450 - DNA, 1000 bp, Homo Sapiens; identical to SEQ ID NO: 116059

SEQ ID NO: 396451 - DNA, 1000 bp, Homo Sapiens; identical to SEQ ID NO: 286080

SEQ ID NO: 396452 - DNA, 1000 bp, Homo Sapiens; identical to SEQ ID NO: 116060

SEQ ID NO: 396453 - DNA, 1000 bp, Homo Sapiens; identical to SEQ ID NO: 116061

SEQ ID NO: 396454 - DNA, 1000 bp, Homo Sapiens; identical to SEQ ID NO: 286083

SEQ ID NO: 396455 - DNA, 1000 bp, Homo Sapiens; identical to SEQ ID NO: 221369

SEQ ID NO: 396456 - DNA, 1000 bp, Homo Sapiens
ccatgctgccctgaaggggccacagcctgggtggaaggcagacctgaatcacaacgggccagctctagtaatacgaaggtgaggtctgggatgctgcgtgcggcgcgacgacaggaggtatgacctgggtggggtcagggaaagtcttagctgagaactaagagatgagggaggcacaaactctgcacgggggaactgtgtgtgcaaaggtgagctgggggcgagaaaggcctctgtggccgtcatcggcactagcgggttgggggtggtggtggggtgctggcagcctcaggagcgatcgctcccctggagagggtgattgagtgtggagatcaccggggccgccgcgggccgtctgcacttctgttccaggtttttctggcattttctgttccaggtttcttccacccacgagcactttattctcctccgagacccccttttcttccccttcctctctcccaccagggggcgcgcttaaatttccagacagagaccagaaggaaggtttagaaagaaaagaacacttgcccagggcagctttgccctccaagaggctccctcctgtctctaagtcaattccacccctcctcgaagtcccggcttccacccctctcctcagagtcccggcgtttacctcgtggtgtgtttgccttgggcctttcatgccccggctgcacacatcgtctgtgaattgtggctgttcactcccgaggatgtgtcctagactccgggtcgcgtggatctaccctctagtttacttgctcgggagaagaaactgactcgttttatttagtgcctatttagcgagcccagagtaacgtacatttgtgctgttttcaattttgtgctatcgcaaatcacaaaaaaactgttatcaattcacattcatcatcagcacgagacccatttccttgtgctcctgccagctcaggatattatgtttcttttttcatttttgccagtctgttaagtaaaatgtcatatgcgtttgttttaa

SEQ ID NO: 396457 - DNA, 1000 bp, Homo Sapiens; identical to SEQ ID NO: 286085

SEQ ID NO: 396458 - DNA, 1000 bp, Homo Sapiens; identical to SEQ ID NO: 286086

SEQ ID NO: 396459 - DNA, 1000 bp, Homo Sapiens
ggctgctgctaccattcttcaagagaggtacgctgtggaatgagatagaaaggctgaaggacaaaggcaacttcctgaccgaggatcaaatcctttggctgctgctggggatctgcagaggccttgaggccattcatgccaagggttatgcccacagagacttgaagcccaccaatatattgcttggagatgaggggcagccagttttaatggacttgggttccatgaatcaagcatgcatccatgtggagggctcccgccaggctctgaccctgcaggactgggcagcccagcggtgcaccatctcctaccgagccccagagctcttctctgtgcagagtcactgtgtcatcgatgagcggactgatgtctggtccctaggctgcgtgctatatgccatgatgtttggggaaggcccttatgacatggtgttccaaaagggtgacagtgtggcccttgctgtgcagaaccaactcagcatcccacaaagccccaggcattcttcagcattgcggcagctcctgaactcgatgatgaccgtggacccgcatcagcgtcctcacattcctctcctcctcagtcagctggaggcgctgcagcccccagctcctggccaacatactacccaaatctgaaaaagcagcatgttgagaagatggccccttgtgccttggaaagaggttcccatccctcattggaatcaccacccattccatccaggacttctcttacacttgggggtagcggggtcaggacaatcatctcagtcctgcatcttttcttctgctttcttccctccaagagcaaaacctgggcaaggggacttactgagtgggggtgggtgggggttgggaaaagggaaactggtgggatatggaacatggctctgagcaggactgttgagctcacatagtgttctgactccaaatctgggagcaggagaatgtgtaaacaagaataaagtggaagcaggttggtgtagaaaaaaaaaaaaaaaaaa

SEQ ID NO: 396460 - DNA, 1000 bp, Homo Sapiens; identical to SEQ ID NO: 286089

SEQ ID NO: 396461 - DNA, 945 bp, Homo Sapiens
atgaccagaaaaaattatacctcactgactgagttcgtcctattgggattagcagacacgctggagctacagattatcctctttttgttttttcttgtgatttatacacttacagtactgggaaatctcgggatgatcctcttaatcaggatcgattcccagcttcacacacccatgtatttcttcctggctaacctgtcctttgtggacgtttgtaactcaactaccatcaccccaaagatgctggcagatttattatcagagaagaaaaccatctcttttgctggctgcttcctacagatgtacttctttatctccctggcgacaaccgaatgcatcctctttgggttaatggcctatgacaggtatgcggccatatgtcgcccgctgctttactccttgatcatgtccaggaccgtctacctaaaaatggcagccggggcttttgctgcagggttgctgaacttcatggtcaacacaagccatgtcagcagcttgtcattctgtgactccaatgtcatccatcacttcttctgtgacagtcccccacttttcaagctctcttgttctgacacaatcctgaaagaaagcataagttctattttggctggtgtgaatattgtggggactctgcttgtcatcctctcctcctactcctacgttctcttctccattttttctatgcattcgggggaggggaggcacagagctttctccacgtgtgcctctcacctgacagccataattctgttctatgccacctgcatctatacttacctgagacctagttccagctactccctgaatcaggacaaagtggcttctgtgttctacacagtggtgattcccatgttgaatcctctgatctacagcctcaggagtaaggaagtaaagaaggctttagcgaatgtaattagcaggaaaaggacctcttcctttctgtga

SEQ ID NO: 396462 - DNA, 1000 bp, Homo Sapiens; identical to SEQ ID NO: 116064

SEQ ID NO: 396463 - DNA, 1000 bp, Homo Sapiens; identical to SEQ ID NO: 221371

SEQ ID NO: 396464 - DNA, 1000 bp, Homo Sapiens; identical to SEQ ID NO: 286095

SEQ ID NO: 396465 - DNA, 1000 bp, Homo Sapiens; identical to SEQ ID NO: 221373

SEQ ID NO: 396466 - DNA, 1000 bp, Homo Sapiens; identical to SEQ ID NO: 286098

SEQ ID NO: 396467 - DNA, 1000 bp, Homo Sapiens; identical to SEQ ID NO: 286099

SEQ ID NO: 396468 - DNA, 1000 bp, Homo Sapiens; identical to SEQ ID NO: 286100

SEQ ID NO: 396469 - DNA, 1000 bp, Homo Sapiens; identical to SEQ ID NO: 286102

SEQ ID NO: 396470 - DNA, 1000 bp, Homo Sapiens
aaagtgaacctcattggtgtgatccaggtgaccttgagcatgcttcctttggtgaggagagcacggggaagaattgtcaatgtctccagcattctgggaagagttgctttctttgtaggaggctactgtgtctccaagtatggagtggaagccttttcagatattctgaggcgtgagattcaacattttggggtgaaaatcagcatagttgaacctggctacttcagaacgggaatgacaaacatgacacagtccttagagcgaatgaagcaaagttggaaagaagcccccaagcatattaaggagacctatggacagcagtattttgatgccctttacaatatcatgaaggaagggctgttgaattgtagcacaaacctgaacctggtcactgactgcatggaacatgctctgacatcggtgcatccgcgaactcgatattcagctggctgggatgctaaatttttcttcatccctctatcttatttacctacatcactggcagactacattttgactagatcttggcccaaaccagcccaggcagtctaaagaaaactgggttggtgcttcttggaatgaaggcaaaaatctgaaattgttagtgtctcagtaatcctgatttagaacccaggctttttgtaacaatgtgttttcttgcctaaattcatttatctggcatcatcagagtactaacatgtttatatttcagatatccaaagcttaccactttaggtgatgaatctttactattttagcccttttttgatgagactatttgtctaaagtgaatcatttgttcttgccttattaaacagagtagatggaaaacaatttaacctattttgaagtcatttctttatgaatatgaataattgttctatgctttaataatctattgtgaggaaactactaagaaatatgttggtgtgtttgtccttacttgaaatgggtctgtattatggtacttttaataaatatttgatttttctttctcttc

SEQ ID NO: 396471 - DNA, 1000 bp, Homo Sapiens
cttcctcattaagggctacagtgtacggatggccccccacctgcgaagagattccaagaaagaatcctgctttgaactgacctcccaggataggcgcagctatgagtttacagctactagtccagcagaagccagagactgggtggatcaaataagtttcttgttaaaggatctgagctccttaaccattccatatgaagaggatgaggaggaagaagaaaaagaagagacatatgatgatattgatggttttgactccccaagttgtggttcccagtgcagacccactatcttgcctgggagtgtggggataaaagagcctacagaggagaaagaagaagaagatatttatgaagtcttgccagatgaagagcatgatctagaagaggatgagagtggcactcgacgaaaaggagtagactatgccagttactaccagggcctatgggattgccatggtgaccagccagatgaactgtccttccaacggggtgacctcatccgtattctgagcaaggagtataacatgtatggctggtgggtgggagaactgaacagcctcgttgggattgttccaaaggagtatctcaccactgcctttgaagtggaagaaagatgaaacccaggaaatatattcttccctctctcctgcctttatgaggaaactgatcatcaaaagttcccactccctacttctgccaccccaccaacgccttggactcctctctttgctgaagagacccaagtctcttgacacctcagagtgactgtaagctaccagtaagacaagtgggaagaggcacgttcatcaaacctgttactaaaccagcctagtcatagctcatccccatgtgtaaatgtgtccacacaaccacatctgccttttccacaagcttttcacaaagaaggtgagagagaaggaaaccttgggaggaggacattactggttgttctggctggtttgaaaagcacaaataaacttgggatgtggttccttgcc

SEQ ID NO: 396472 - DNA, 1000 bp, Homo Sapiens
acatcctggagaagattccggagactttcaacatggctgagatcatggcaaaggcagcggaaaagaccccctacgtggtagtcgcctttcaagaatgtgaaagaatgaacatcctgaccaacgaaatgcgccgttcgctcaaggagctgaacctggggctgaagggagaactgaccatcacgaccgacgtggaagatctgtccacggctctcttctatgacaccgtgcctgatacgtgggtggcccgggcctacccctccatgatgggcctggcggcctggtacgcagacctgctgctccgcatcagggaactcgaggcctggacgacagactttgccctgcccaccaccgtgtggctggccggcttcttcaacccccagtcgttcctcacggccatcatgcagtccatggccaggaagaacgagtggcccctggacaagatgtgtctgtctgtcgaggtgaccaagaaaaaccgagaggacatgaccgctcctccgcgagagggctcctacgtgtacggactcttcatggaaggggctcgctgggacacccagactggagtcatcgctgaagcgcggctgaaagagctgaccccggccatgcctgtcatcttcatcaaggccattcctgtggaccgcatggagaccaagaacatctatgagtgtcccgtgtacaaaacacgcatccgcggccccacctatgtctggacctttaacttgaagaccaaagagaaggcagcgaagtggatcctggcagccgtggcgctgctcctacaggtttagctcgctcctgcctcacagcccacactccctggggctggaccacaactcagcccttcacctgtgcacctgtgacttattctttacaggaactggtggtggtttttcgttctcttaaataatcaggtgctttgtaaccaagcacatcggaaccagagggtggaggttggtgtggaagaggtggggcagattaaagccagtggagccactcaaaaaaaaaa

SEQ ID NO: 396473 - DNA, 1000 bp, Homo Sapiens
caccatcaccacggtcacggggcccagtgctttcagcatccctctccctatccggcagaagctctgtagcagcctggatgccccccagacgagaggccatgactggaggatgctggcccataagctgaacctggacaggtacttgaattactttgccaccaaatccagcccaactggcgtaatcctggatctttgggaagcacagaacttcccagatggaaacctgagcatgctggcagctgtcttggaagaaatgggaagacatgaaacggtggtgtccttagcagcagaagggcagtattaaccaccatgctggaaggggaaatgaaggacaaaaatgcacagggagtctgtggccgtccaggtgaatcacagctgaggaggaaatccagatgagaccaatgcacttcacaggcaagaatgcagcaggagccagaaggaaaacagatacaactgcccatgtacatgcccactttactcggagatcatcacgggagttaagaaaaattgtgtaaatttgtaccttgaatttagctatcaacctaattttcctcttagttgggctgtatgctgtgtggtacaggatcttacagtttcctaggaaacgctttttattgctatccagatatatggataaactttcttaacaaacccaatttctacaaatgttgtttacatcaaattggacagggatgcagacactgtccatggctcgttctatttttgttcaaatcatttgaagttgaagctgtggacggtttgttgtgtctatttcagattagtaatttacagagaaatcacagacttttgctacaaatcgtgtgcatcaagtgtctcagataatcctcccatcagtgttctgtttctagaacttgtagaaccagtgttactgtttgtatcagggaagtggagaatctaagtgtaaaaaagaaataactaagactcctattccttggagggacccttctggtgccctttgggaataaagctgtagcactgc

SEQ ID NO: 396474 - DNA, 1000 bp, Homo Sapiens; identical to SEQ ID NO: 116069

SEQ ID NO: 396475 - DNA, 1000 bp, Homo Sapiens; identical to SEQ ID NO: 289819

SEQ ID NO: 396476 - DNA, 1000 bp, Homo Sapiens; identical to SEQ ID NO: 289819

SEQ ID NO: 396477 - DNA, 1000 bp, Homo Sapiens; identical to SEQ ID NO: 116070

SEQ ID NO: 396478 - DNA, 1000 bp, Homo Sapiens
gtcagagacttgccagggctgccaaggagccgggacccaggagagggctgctattttgatggtgaccggagctggcgggcagcgggtacgcggtggcaccccgttgtgcccccctttggcttaattaagtgtgctgtctgcacctgcaaggggggcactggagaggtgcactgtgagaaggtgcagtgtccccggctggcctgtgcccagcctgtgcgtgtcaaccccaccgactgctgcaaacagtgtccagtggggtcgggggcccacccccagctgggggaccccatgcaggctgatgggccccggggctgccgttttgctgggcagtggttcccagagagtcagagctggcacccctcagtgcccccttttggagagatgagctgtatcacctgcagatgtggggcaggggtgcctcactgtgagcgggatgactgttcactgccactgtcctgtggctcggggaaggagagtcgatgctgttcccgctgcacggcccaccggcggccagccccagagaccagaactgatccagagctggagaaagaagccgaaggctcttagggagcagccagagggccaagtgaccaagaggatggggcctgagctggggaaggggtggcatcgaggaccttcttgcattctcctgtgggaagcccagtgcctttgctcctctgtcctgcctctactcccacccccactacctctgggaaccacagctccacaagggggagaggcagctgggccagaccgaggtcacagccactccaagtcctgccctgccaccctcggcctctgtcctggaagccccacccctttcctcctgtacataatgtcactggcttgttgggatttttaatttatcttcactcagcaccaagggcccccgacactccactcctgctgcccctgagctgagcagagtcattattggagagttttgtatttattaaaacatttctttttcagtcaaaaaaaaaaaaaaaaaaaaaaaaaa

SEQ ID NO: 396479 - DNA, 1000 bp, Homo Sapiens; identical to SEQ ID NO: 286107

SEQ ID NO: 396480 - DNA, 643 bp, Homo Sapiens
ggtagcgacggtagctctagccgggcctgagctgtgctagcacctcccccaggagaccgttgcagtcggccagcccccttctccacggtaaccatgtgcgaccgaaaggccgtgatcaaaaatgcggacatgtcggaagagatgcaacaggactcggtggagtgcgctactcaggcgctggagaaatacaacatagagaaggacattgcggctcatatcaagaaggaatttgacaagaagtacaatcccacctggcattgcatcgtggggaggaacttcggtagttatgtgacacatgaaaccaaacacttcatctacttctacctgggccaagtggccattcttctgttcaaatctggttaaaagcatggactgtgccacacacccagtgatccatccagaaacaaggactgcagcctaaattccaaataccagagactgaaattttcagccttgctaagggaacatctcgatgtttgaacctttgttgtgttttgtacagggcattctctgtactagtttgtcgtggttataaaacaattagcagaatagcctacatttgtatttattttctattccatacttctgcccacgttgttttctctcaaaatccattcctttaaaaaataaatctgatgcaccg

SEQ ID NO: 396481 - DNA, 1000 bp, Homo Sapiens; identical to SEQ ID NO: 116071

SEQ ID NO: 396482 - DNA, 1000 bp, Homo Sapiens; identical to SEQ ID NO: 116072

SEQ ID NO: 396483 - DNA, 1000 bp, Homo Sapiens; identical to SEQ ID NO: 116073

SEQ ID NO: 396484 - DNA, 1000 bp, Homo Sapiens; identical to SEQ ID NO: 286111

SEQ ID NO: 396485 - DNA, 1000 bp, Homo Sapiens
agggcctgctgctgcgcagcctgcaggagcgcaaccaggagcaggagaaggtggagcggcgccgtcaggtccccttccacctgcacatcaacctggagctgctggagtgtgtctacctggtgtctgccatgctcctggagatcccctacatggccgcccatgagagcgatgcccgccgacgcatgatcagcaagcagttccaccaccagctgcgcgtgggcgagcgacagcccctgctgggtccccctgagtccatgcgggaacatgtggtcgctgcctccaaggccatgaagatgggtgactggaagacctgtcacagttttatcatcaatgagaagatgaatgggaaagtgtgggaccttttccccgaggctgacaaagtccgcaccatgctggttaggaagatccaggaagagtcactgaggacctacctcttcacctacagcagtgtctatgactccatcagcatggagacgctgtcagacatgtttgagctggatctgcccactgtgcactccatcatcagcaaaatgatcattaatgaggagctgatggcctccctggaccagccaacacagacagtggtgatgcaccgcactgagcccactgcccagcagaacctggctctgcagctggccgagaagctgggcagcctggtggagaacaacgaacgggtgtttgaccacaagcagggcacctacgggggctacttccgagaccagaaggacggctaccgcaaaaacgagggctacatgcgccgcggtggctaccgccagcagcagtctcagacggcctactgagctctccactctgtttcccgcctgggccatccaaccttgaagtcctaaaccacacctcagtcactaaaggtctgtttaaagttgttctggttgattgcttgttgccacaaaggtgtgttgagcccattcatttgctgattatacttctgagctgctaccacatgacagacacaaggctcagatgaagaggtgaattgaac

SEQ ID NO: 396486 - DNA, 1000 bp, Homo Sapiens; identical to SEQ ID NO: 116074

SEQ ID NO: 396487 - DNA, 1000 bp, Homo Sapiens
gctctgcctggtcctgctcttccagggcccttccccggcggccgcgtggtcaggctgcacccagtcattttggcctccattgtggacagctacgagagacgcaacgagggtgctgcccgagttatcgggaccctgttgggaactgtcgacaaacactcagtggaggtcaccaattgcttttcagtgccgcacaatgagtcagaagatgaagtggctgttgacatggaatttgctaagaatatgtatgaactgcataaaaaagtttctccaaatgagctcatcctgggctggtacgctacgggccatgacatcacagagcactctgtgctgatccatgagtactacagccgagaggcccccaaccccatccacctcactgtggacacaagtctccagaacggccgcatgagcatcaaagcctacgtcagcactttaatgggagtccctgggaggaccatgggagtgatgttcacgcctctgacagtgaaatacgcgtactacgacactgaacgcatcggagttgacctgatcatgaagacctgctttagccccaacagagtgattggactctcaagtgacttgcagcaagtaggaggggcatcagctcgcatccaggatgccctgagtacagtgttgcaatatgcagaggatgtactgtctggaaaggtgtcagctgacaatactgtgggccgcttcctgatgagcctggttaaccaagtaccgaaaatagttcccgatgactttgagaccatgctcaacagcaacatcaatgaccttttgatggtgacctacctggccaacctcacacagtcacagattgcactcaatgaaaaacttgtaaacctgtgaatggaccccaagcagtacacttgctggtctaggtattaaccccaggactcagaagtgaaggagaaatgggttttttgtggtcttgagtcacactgagatagtcagttgtgtgtgactctaataaacggagcctaccttttgtaaaaaaaaa

SEQ ID NO: 396488 - DNA, 1000 bp, Homo Sapiens
ctcaaggggatccctctggccacaggtgacaccagcccagagccagagctactgccgggagctccactgccgcctcccaaggaggtcatcaacggaaacataaagacagtgacagagtacaagatagatgaggatggcaagaagttcaagattgtccgcaccttcaggattgagacccggaaggcttcaaaggctgtcgcaaggaggaagaactggaagaagttcgggaactcagagtttgacccccccggacccaatgtggccaccaccactgtcagtgacgatgtctctatgacgttcatcaccagcaaagaggacctgaactgccaggaggaggaggaccctatgaacaaactcaagggccagaagatcgtgtcctgccgcatctgcaagggcgaccactggaccacccgctgcccctacaaggatacgctggggcccatgcagaaggagctggccgagcagctgggcctgtctactggcgagaaggagaagctgccgggagagctagagccggtgcaggccacgcagaacaagacagggaagtatgtgccgccgagcctgcgcgacggggccagccgccgcggggagtccatgcagcccaaccgcagagccgacgacaacgccaccatccgtgtcaccaacttgtcagaggacacgcgtgagaccgacctgcaggagctcttccggcctttcggctccatctcccgcatctacctggctaaggacaagaccactggccaatccaagggctttgccttcatcagcttccaccgccgcgaggatgctgcgcgtgccattgccggggtgtccggctttggctacgaccacctcatcctcaacgtcgagtgggccaagccgtccaccaactaagccagctgccactgtgtactcggtccgggacccttggcgacagaagacagcctccgagagcgcgggctccaagggcaataaagcagctccactctctctaaaaaaaaaaaaaaaaaaaaaaaaaaaa

SEQ ID NO: 396489 - DNA, 1000 bp, Homo Sapiens
atccgagccagattgacaacaatgagccctacatgaagatcccttgcaatgactctaaaatcaccagtgctgtttggggacccctgggggagtgcatcatcgctggccatgagagtggagagctcaaccagtatagtgccaagtctggagaggtgttggtgaatgttaaggagcactcccggcagatcaacgacatccagttatccagggacatgaccatgtttgtgaccgcgtccaaggacaacacagccaagctttttgactccacaactcttgaacatcagaagactttccggacagaacgtcctgtcaactcagctgccctctcccccaactatgaccatgtggtcctgggcggtggtcaggaagccatggatgtaaccacaacctccaccaggattggcaagtttgaggccaggttcttccatttggcctttgaagaagagtttggaagagtcaagggtcactttggacctatcaacagtgttgccttccatcctgatggcaagagctacagcagcggcggcgaagatggttacgtccgtatccattacttcgacccacagtactttgaatttgagtttgaggcttaagaagctggatctcctgccgggcgtggttggctcatgcctgtaatcccaccactttttttttaaggcaggcggatcacctgaggtcaggagtttaagaccagcctgaccaacatggagaaacctcgtctctactaaaaatacaaaaattagccaggcatggtggcacacgcctatagtcccagctactcaggaggctgaggcaggagaatcacttgaacccaggaggcagaggttgcagtgagctgagatcacgtcattgcactccatcctgagccacaagagcaaaactccgtctcaaaaaaaaaaaagaagaaggtggatctccaaccaggccagagaagattctcacagaaggttttgaactctaagaaataaattggtttggtaataaatggcttctggtcaga

SEQ ID NO: 396490 - DNA, 1000 bp, Homo Sapiens; identical to SEQ ID NO: 221380

SEQ ID NO: 396491 - DNA, 1000 bp, Homo Sapiens; identical to SEQ ID NO: 116075

SEQ ID NO: 396492 - DNA, 1000 bp, Homo Sapiens; identical to SEQ ID NO: 221383

SEQ ID NO: 396493 - DNA, 1000 bp, Homo Sapiens; identical to SEQ ID NO: 116078

SEQ ID NO: 396494 - DNA, 1000 bp, Homo Sapiens; identical to SEQ ID NO: 286116

SEQ ID NO: 396495 - DNA, 1000 bp, Homo Sapiens
ggaggcccagcaggagtccctgaaggaggagcagctctccctcaagagcaaccacgagcaggaagtaaagattctgaggagtcagctgggggagaagttccggatcgagctggacattgagcccaccattgacctgaacagggtgttgggggagatgcgggctcagtacgaggccatggtggagaccaaccaccaggatgtggaacagtggttccaagcccagtctgaaggcatcagcctgcaggccatgtcctgctccgaggagctgcagtgctgccagtcggagatcctggagctgagatgcacggtgaatgccctggaggtggagcgccaagcccagcacaccttgaaggactgtctgcagaactccctgtgtgaagcggaggaccgctacggcacagagctggcccagatgcagagcctcattagcaacttggaagagcagttgtctgagatccgggccgacctggagcggcagaaccaggagtaccaggtgctgctggacgtgaaggcccggttggagaacgagattgccacataccggaaccttctggagagcgaggactgcaaactcccctgcaatccctgttccacgcctgcctcctgtacttcttgtccaagctgtggccctgtcaccggtgggtctccctctggccatggagccagcatggggagatgattctgaaggcccgagttaggagattgaggctggttgcactggggtcaggagtgccctcaccttgcccagtcttccttcaagactagactcactgaggcattttccctaaatcaaccggtagcagatacttccaaggagtggctccctgcctatgcctctaagctgtattttttgttgttgctaaaatgttgtaattatcttccatgaaagcaattatttttcctggtgtctcttcttggtacttttagttctattccagtgtttcagaatctccaaaaatgtaactgggttccctgcattaaatggtcaataaacctcctt

SEQ ID NO: 396496 - DNA, 1000 bp, Homo Sapiens; identical to SEQ ID NO: 286117

SEQ ID NO: 396497 - DNA, 1000 bp, Homo Sapiens; identical to SEQ ID NO: 286118

SEQ ID NO: 396498 - DNA, 1000 bp, Homo Sapiens
tgggctggaactgcctgtgcgcctttgaccgctgctccagccttctgcccctctactccaagcgctacatcctcttctgcctggtgatcttcgccggcgtcctggccaccatcatgggcctctatggggccatcttccgcctggtgcaggccagcgggcagaaggccccacgcccagcggcccgccgcaaggcccgccgcctgctgaagacggtgctgatgatcctgctggccttcctggtgtgctggggcccactcttcgggctgctgctggccgacgtctttggctccaacctctgggcccaggagtacctgcggggcatggactggatcctggccctggccgtcctcaactcggcggtcaaccccatcatctactccttccgcagcagggaggtgtgcagagccgtgctcagcttcctctgctgcgggtgtctccggctgggcatgcgagggcccggggactgcctggcccgggccgtcgaggctcactccggagcttccaccaccgacagctctctgaggccaagggacagctttcgcggctcccgctcgctcagctttcggatgcgggagcccctgtccagcatctccagcgtgcggagcatctgaagttgcagtcttgcgtgtggatggtgcagccaccgggtgcgtgccaggcaggccctcctggggtacaggaagctgtgtgcacgcagcctcgcctgtatggggagcagggaacgggacaggcccccatggtcttcccggtggcctctcggggcttctgacgccaaatgggcttcccatggtcaccctggacaaggaggtaaccaccccacctccccgtaggagcagagagcaccctggtgtgggggcgagtggttccccacaaccccgcttctgtgtgattctggggaagtcccggcccctctctgggcctcagtagggctcccaggctgcaaggggtggactgtgggatgcatgccctggcaacattgaagttcgatcatggtaaaaaa

SEQ ID NO: 396499 - DNA, 1000 bp, Homo Sapiens; identical to SEQ ID NO: 286120

SEQ ID NO: 396500 - DNA, 1000 bp, Homo Sapiens; identical to SEQ ID NO: 116080

SEQ ID NO: 396501 - DNA, 1000 bp, Homo Sapiens
aggcagtaatttccttttggaaaggactctgaaggcagaaaagaagggagagaacctcatgggcagaatattataaaaagagtgtcatattccagcatttgaattggaaagagaagagtgaagatccaagttgcattattaatctgccctgtgttttttccttttaacaatcagtttgagctgctgctgttatgagtttctcatcaagatgaaagccctaatatgtaaagtcaaatccgatttaaattttgtgcttttatagaaagaaatttcttcatagacgtggtgatatatcatttcttggacctgctaatagtaggtcaaaggggagcactccttgccccctgttcctgggtttatgcagttttctttttagagtttatatagggcaagtggttctttttctctgaattacaggatggaaaaaggtcatatcctttgtcaggaaatataaacttgaaagtatgtagtcagctcttgtaatactcatatttatgattgtcctatatgaaaaacaacttcagttaaaactataatgtgtgattctgtataacaaggtgatgtctgtttcccagggctcagacctaatccagttataataaaatcaattaaatgaaatattctatagaatcgatctatgcccttgttaatctccatccatataggagtcacgttctttaagacagatggtggtagttatttttgtggcatggttagatttgactggttttgcagaagattacagttatgtactgcataatgacatatacaatagtggtcccataaaattataatggagcagaaaatctattgcctcatgatgttttagccgttttaatgtcatagcctagtgcattactcacgtgtctgtggagatgctggtgtaaacaaacctactacactgccagttgtataaaagtacagcacattcagttatgtacagtatgtaatactgataatgacaataaatgacaccggtttgtgtatttactttttataa

SEQ ID NO: 396502 - DNA, 1000 bp, Homo Sapiens; identical to SEQ ID NO: 286123

SEQ ID NO: 396503 - DNA, 680 bp, Homo Sapiens; identical to SEQ ID NO: 221385

SEQ ID NO: 396504 - DNA, 1000 bp, Homo Sapiens; identical to SEQ ID NO: 116081

SEQ ID NO: 396505 - DNA, 1000 bp, Homo Sapiens
acatgcagaggagacatttcaggtgactggccaacagataatttctgctgctgaaacattgacattgcatccatctagtaaaattgctaaagaaaacctagatgtattttgtgaagcttgggaatcccaaattagtgacatgtcaacactgctgagagaaatcaatgacgtgtttgaaggaagacgaggagagaagtatggctacctttcacttccaaagccaatgaagaataatgcaaacctgaaatcattaaagccagacaagcctgactctgaggagcaagccaagatagcaaagcttggacttaagctgggtttgctcacctctgacgctgactgcgaaattgagaagtgggaagatcaggagaatgagattgttcaatatggacggaacatgtccagtatggcctattctctgtatttatttactagaggagaggggccactgaaaacttcccaggatttaattcatcaactagaggtttttgctgcagagggtttaaagcttacttccagtgttcaagctttttcaaaacagctgaaagacgatgacaagcttatgcttctcctggaaataaacaagctaattcctctatgccaccagctccagacagtaactaagacttctttgcagaataaagtatttctaaaggttgacaagtgtattacgaagacaagatccatgatggctctcttagtccaacttctttcactttgttataaactgctgaagaagcttcagatggaaaataacggatgggtctcagttacaaataaggacactatggatagtaaaacttgagaagcttttggggtcagatctctggaacatcatgtgatgaagctgacatttttaaaaatcaaatgatcctttatcttttcagaaattcatcaattttataaagaaaacaatattgaaattttgctctattttctgatcatgaaactgattgtaaagctttttgacaactaataaatgtcttggtaattgctagattct

SEQ ID NO: 396506 - DNA, 1000 bp, Homo Sapiens; identical to SEQ ID NO: 286129

SEQ ID NO: 396507 - DNA, 1000 bp, Homo Sapiens; identical to SEQ ID NO: 286130

SEQ ID NO: 396508 - DNA, 1000 bp, Homo Sapiens; identical to SEQ ID NO: 116083

SEQ ID NO: 396509 - DNA, 1000 bp, Homo Sapiens; identical to SEQ ID NO: 286131

SEQ ID NO: 396510 - DNA, 1000 bp, Homo Sapiens; identical to SEQ ID NO: 221387

SEQ ID NO: 396511 - DNA, 1000 bp, Homo Sapiens; identical to SEQ ID NO: 221388

SEQ ID NO: 396512 - DNA, 1000 bp, Homo Sapiens
aagagcgatcgcagcccattatgaagttcatccacgacctggacaggacggagcgcaggcaggtgtggacgggacagtgagtggctgggaggaagccagaatcaacagctccagccctctgcgctacaaccgccagatcggggagtttatagtcacccgggctgggctctactacctgtactgtcaggtgcactttgatgaggggaaggctgtctacctgaagctggacttgctggtggatggtgtgctggccctgcgctgcctggaggaattctcagccactgcggcgagttccctcgggccccagctccgcctctgccaggtgtctgggctgttggccctgcggccagggtcctccctgcggatccgcaccctcccctgggcccatctcaaggctgcccccttcctcacctacttcggactcttccaggttcactgaggggccctggtctccccgcagtcgtcccaggctgccggctcccctcgacagctctctgggcacccggtcccctctgccccaccctcagccgctctttgctccagacctgcccctccctctagaggctgcctgggcctgttcacgtgttttccatcccacataaatacagtattcccactcttatcttacaactcccccaccgcccactctccacctcactagctccccaatccctgaccctttgaggcccccagtgatctcgactcccccctggccacagacccccagggcattgtgttcactgtactctgtgggcaaggatgggtccagaagaccccacttcaggcactaagaggggctggacctggcggcaggaagccaaagagactgggcctaggccaggagttcccaaatgtgaggggcgagaaacaagacaagctcctcccttgagaattccctgtggatttttaaaacagatattatttttattattattgtgacaaaatgttgataaatggatattaaatagaataagtcataaaaaaaaaaaaaaaaaaaaaa

SEQ ID NO: 396513 - DNA, 1000 bp, Homo Sapiens; identical to SEQ ID NO: 116084

SEQ ID NO: 396514 - DNA, 1000 bp, Homo Sapiens; identical to SEQ ID NO: 221389

SEQ ID NO: 396515 - DNA, 1000 bp, Homo Sapiens; identical to SEQ ID NO: 221390

SEQ ID NO: 396516 - DNA, 1000 bp, Homo Sapiens
tgaatgtgaccttccagaatggtgcaatggaacatctcatcagtgtccagaagatagatatgtgcaggacgggatcccctgtagtgacagtgcctactgctatcaaaagaggtgtaataaccatgaccagcattgcagggagatttttggtaaagatgcaaaaagtgcatctcagaattgctataaagaaatcaactctcagggaaaccgttttggtcactgtggtataaatggcacaacatacctaaaatgtcatatctctgatgtcttttgtgggagagttcaatgtgagaatgtgagagacattcctcttctccaagatcattttactttgcagcacactcatatcaatggtgtcacctgctggggtattgactatcatttaaggatgaacatatctgacattggtgaagtgaaagatggtactgtgtgtggcccaggaaagatctgcatccataagaagtgtgtcagtctgtctgtcttgtcacatgtctgccttcctgagacctgcaatatgaaggggatctgcaataacaaacatcactgccactgtggctatgggtggtccccaccctactgccagcacagaggctatgggggcagtattgacagtggcccagcatctgcaaagagaggagtttttttgccgctgattgtgattccttctttgtctgttttgactttcctgtttactgtcgggcttcttatgtatctacgacaatgttctggtcccaaagaaactaaggctcattcatcaggttaagaaaatgtctctaacttaatattccatgcattagtacactttagtctcttggcagtagaaacattagtacatccctgaaactgagcacatttctgaccatttccagaaagctgcaaagatcttcccttacattagtaccacaaacattgtcattaagttcaagttattcttaacatgtttctatctattgtttattgttttaagcagcaaataaagctacatccttccctcccttta

SEQ ID NO: 396517 - DNA, 1000 bp, Homo Sapiens; identical to SEQ ID NO: 116085

SEQ ID NO: 396518 - DNA, 1000 bp, Homo Sapiens; identical to SEQ ID NO: 115295

SEQ ID NO: 396519 - DNA, 1000 bp, Homo Sapiens; identical to SEQ ID NO: 286137

SEQ ID NO: 396520 - DNA, 1000 bp, Homo Sapiens; identical to SEQ ID NO: 286139

SEQ ID NO: 396521 - DNA, 1000 bp, Homo Sapiens; identical to SEQ ID NO: 116087

SEQ ID NO: 396522 - DNA, 1000 bp, Homo Sapiens; identical to SEQ ID NO: 116088

SEQ ID NO: 396523 - DNA, 1000 bp, Homo Sapiens; identical to SEQ ID NO: 116089

SEQ ID NO: 396524 - DNA, 1000 bp, Homo Sapiens; identical to SEQ ID NO: 286143

SEQ ID NO: 396525 - DNA, 1000 bp, Homo Sapiens; identical to SEQ ID NO: 286144

SEQ ID NO: 396526 - DNA, 1000 bp, Homo Sapiens; identical to SEQ ID NO: 286145

SEQ ID NO: 396527 - DNA, 1000 bp, Homo Sapiens; identical to SEQ ID NO: 293834

SEQ ID NO: 396528 - DNA, 1000 bp, Homo Sapiens; identical to SEQ ID NO: 286146

SEQ ID NO: 396529 - DNA, 1000 bp, Homo Sapiens; identical to SEQ ID NO: 221394

SEQ ID NO: 396530 - DNA, 1000 bp, Homo Sapiens
tcctcaaactcgcagcagtaatttgtggcactatgacagctatttttatgactatcctgttctgtgggggggggggtctgttttccccccatatttgtattccttttcataacttttcttgatatctttcctccctcttttttaatgtaaaggttttctcaaaaattctcctaaaggtgagggtctctttcttttctcttttccttttttttttctttttttggcaacctggctctggcccaggctagagtgcagtggtgcgattatagcccggtgcagcctctaactcctgggctcaagcaatccaagtgatcctcccacctcaaccttcggagtagctgggatcacagctgcaggccacgcccagcttcctccccccgactccccccccagagacacggtcccaccatgttacccagcctggtctcaaactccccagctaaagcagtcctccagcctcggcctcccaaagtactgggattacaggcgtgagcccccacgctggcctgctttacgtattttcttttgtgcccctgctcacagtgttttagagatggctttcccagtgtgtgttcattgtaaacacttttgggaaagggctaaacatgtgaggcctggagatagttgctaagttgctaggaacatgtggtgggactttcatattctgaaaaatgttctatattctcatttttctaaaagaaagaaaaaaggaaacccgatttatttctcctgaatctttttaagtttgtgtcgttccttaagcagaactaagctcagtatgtgaccttacccgctaggtggttaatttatccatgctggcagaggcactcaggtacttggtaagcaaatttctaaaactccaagttgctgcagcttggcattcttcttattctagaggtctctctggaaaagatggagaaaatgaacaggacatggggctcctggaaagaaagggcccgggaagttcaaggaagaataaagttgaaattttaaaaaaaaa

SEQ ID NO: 396531 - DNA, 1000 bp, Homo Sapiens; identical to SEQ ID NO: 286148

SEQ ID NO: 396532 - DNA, 1000 bp, Homo Sapiens
gtgcacagagggtgtggattacaccaacgcttccaacaatgaaccttcttgcttcccatgtacagtttgtaaatcagatcaaaaacataaaagttcctgcaccatgaccagagacacagtgtgtcagtgtaaagaaggcaccttccggaatgaaaactccccagagatgtgccggaagtgtagcaggtgccctagtggggaagtccaagtcagtaattgtacgtcctgggatgatatccagtgtgttgaagaatttggtgccaatgccactgtggaaaccccagctgctgaagagacaatgaacaccagcccggggactcctgccccagctgctgaagagacaatgaacaccagcccagggactcctgccccagctgctgaagagacaatgaccaccagcccggggactcctgccccagctgctgaagagacaatgaccaccagcccggggactcctgccccagctgctgaagagacaatgaccaccagcccggggactcctgcctcttctcattacctctcatgcaccatcgtagggatcatagttctaattgtgcttctgattgtgtttgtttgaaagacttcactgtggaagaaattccttccttacctgaaaggttcaggtaggcgctggctgagggcggggggcgctggacactctctgccctgcctccctctgctgtgttcccacagacagaaacgcctgcccctgccccaagtcctggtgtctccagcctggctctatcttcctccttgtgatcgtcccatccccacatcccgtgcaccccccaggaccctggtctcatcagtccctctcctggagctgggggtccacacatctcccagccaagtccaagagggcagggccagttcctcccatcttcaggcccagccaggcagggggcagtcggctcctcaactgggtgacaagggtgaggatgagaagtggtcacgggatttattcagccttggtcagagcagaaaaaaaaaaaaaaaaaaa

SEQ ID NO: 396533 - DNA, 1000 bp, Homo Sapiens
attgtacgccctggagtgacatcgagtgtgtccacaaagaatcaggcaatggacataatatatgggtgattttggttgtgactttggttgttccgttgctgttggtggctgtgctgattgtctgttgttgcatcggctcaggttgtggaggggaccccaagtgcatggacagggtgtgtttctggcgcttgggtctcctacgagggcctggggctgaggacaatgctcacaacgagattctgagcaacgcagactcgctgtccactttcgtctctgagcagcaaatggaaagccaggagccggcagatttgacaggtgtcactgtacagtccccaggggaggcacagtgtctgctgggaccggcagaagctgaagggtctcagaggaggaggctgctggttccagcaaatggtgctgaccccactgagactctgatgctgttctttgacaagtttgcaaacatcgtgccctttgactcctgggaccagctcatgaggcagctggacctcacgaaaaatgagatcgatgtggtcagagctggtacagcaggcccaggggatgccttgtatgcaatgctgatgaaatgggtcaacaaaactggacggaacgcctcgatccacaccctgctggatgccttggagaggatggaagagagacatgcaaaagagaagattcaggacctcttggtggactctggaaagttcatctacttagaagatggcacaggctctgccgtgtccttggagtgaaagactctttttaccagaggtttcctcttaggtgttaggagttaatacatattaggttttttttttttttaacatgtatacaaagtaaattcttagccaggtgtagtggctcatgcctgtaatcccagcactttgggaggctgaggcgggtggatcacttgaggtcagaagttcaagaccagcctgaccaacatcgtgaaatgccgtctttacaaaaaaatacaaaaattaactggaaaaaaaaaaaaaaa

SEQ ID NO: 396534 - DNA, 1000 bp, Homo Sapiens
aaaatatagtgctataccaaaagggccaagcctctgttaaagtcattgactttggatcaagctgttatgaacaccagaaagtatacacgtacatccaaagccggttctaccgatccccagaagtgatcctgggccacccctacgacgtggccattgacatgtggagcctgggctgcatcacggcggagttgtacacgggctaccccctgttccccggggagaatgaggtggagcagctggcctgcatcatggaggtgctgggtctgccgccagccggcttcattcagacagcctccaggagacagacattctttgattccaaaggttttcctaaaaatataaccaacaacagggggaaaaaaagatacccagattccaaggacctcacgatggtgctgaaaacctatgacaccagcttcctggactttctcagaaggtgtttggtatgggaaccttctcttcgcatgaccccggaccaggccctcaagcatgcttggattcatcagtctcggaacctcaagccacagcccaggccccagaccctgaggaaatccaattcctttttcccctctgagacaaggaaggacaaggttcaaggctgtcatcactcgagcagaaaagcagatgagatcaccaaagagactacagagaaaacaaaagatagccccacgaagcatgttcagcattcaggtgatcagcaggactgtctccagcacggagctgacactgttcagctgcctcaactggtagacgctcccaagaagtcagaggcagctgtcggggcggaggtgtccatgacctccccaggacagagcaaaaacttctccctcaagaacacaaacgttttaccccctattgtatgacctttgctgagggtatgtcctgctcctttccaccagtgatttgtattaagacagcacttatattgtacaatacttcagactgttttttttaaatacataaaactttatgttaaaaaactctaaaaaaaaaaaaaaaa

SEQ ID NO: 396535 - DNA, 1000 bp, Homo Sapiens
ctcgagtccttagaggtcatcccccacttctgctagacgtggtcagaaatgcctgtgatctcttcattcctctggacaaactaggcctctggcgctgtggccctgggattgtggggctttgtggcctcgtgtcctccatcctgtctattctcaccctaatctatccctggctacgactcaagccctgaccttccggtacaggataaggaggggacctgaattggtgagatggaatcttagatcgtcccccatgtgccagcctcattcgaattctactctttggttaaagttagaaattcagagatttaggggtggaggaagagctttggggaagatgaggtaaggaaagatgactcgtgaagttaataggatgtctctaatttctagatgtgcctgagcttctgttcttttcctctttctttgtgtctctcttgaatatatttactttgtgtctcttaactctgtttaaggttctgtgtctatgcatctctctctttcttttttcaaccttctcattctcctatccagggatttaatcagcagaattactttttgataggggaggtataaggtttggcctgtaaggttctaactgccttcttttttctcacagaggtggcttatggcagatttttcctccttcaaactccaaacataatttttaagactatgtgccagtggactcttcccttatatctctgcaccacaagttgttggatgtttcctcttcctcccttatgtctacctcaccaacctcgctcatcatttggcccttatccttccttgtacacctaccttcagatttctgcttacactttgatttcagagctttattccccagtctgttcttactcctttgtcgcttatccagaatgatgctatgtgtagcatcttgctgtaaatcctgtacaatgattctgtgtaaatagctgtggcctatgccaataatgaagagcaagcctttcaggtaagcaaattaaagttcagtttgctcatcgac

SEQ ID NO: 396536 - DNA, 1000 bp, Homo Sapiens
tagatatttgttagagcccaaagctggcaaagagaaggtggtaatgaagctcaagaaactggagtccagtgtgagcactggtcgtaaatggttcagactaggcaatgtggtacatgctatacaggcaactgagcagagcattcatgccactgacctggtacctcgcttatgcttaacattagccaacctgaaccgtgtgatttatttcatctgtgacaccatcctctgggtgaggagcgtaggtctcacctctggcatcaacaaagagaaatggcgaacgagggctgctcaccactactactattctcttctgctgagccttgtcagggatctgtatgaaatctccctgcagatgaaacgagttacatgtgacagggcaaagaaagagaaatcagcatcccaggatcctctttggttcagcgtggctgaggaggaaacagaatggctccaatcctttctacttcttttattccgatctctgaagcagcatcctcccttgctcctggacacagtgaagaacctttgtgatatcctgaaccctttggaccagctggggatctataaatccaatcctggcatcattggacttggaggtcttgtgtcctctatagcaggcatgatcactgtggcatatcctcagatgaagctgaagacccgttagggtgtttttaggcttggaactagtacctactttaaaagatggcctcttggtgggacagacatttgtataagtcacaggccatgtcatactgtgcttcctttcttgttcatgtgagcatttaacaacctgtgatgtgggcagagatgaggccaagaacggagaagggaggagcatgaagagttgtatgtttttggagtgctggagtgacttgtgaatttctgaatattttcccttcatctaacattgattgaacatctcttatgtgcatagtgggagcttagtatttgctgaatgaataaaaattgaaaggaaaaaatttaaaaaaaaaaaaaaaaaaaa

SEQ ID NO: 396537 - DNA, 1000 bp, Homo Sapiens
ataaaaagggatggttcatcattgtgaaagaaatggttatctcattggggaagaaaaggggagggggaaggcaagaatcactgaaaaatcttaaatctgtgttttctggaataagatatctagacagcctaaatctgattttagtctttataaaaataatatcttgtgttctcatacttttctgtcactgtaagcctgcccagtaggcagtgttttgcagactttggggagtggtctatgtggccaaatattgtgtgtatagacagaatttgaaatcaagtcctgcttcatttacaagaattttggtgggcatcgaatcctacataatgaaaaagaaaaacagaccatttaaaaactcagacaagattatatttaatatattaattactaaaaaggcacaagattacactgaacatattagctactaaaaaggcactgctaagacattcaagcaaatagctattacacactactgcagattttacaggtttctaattctaacatatgtttgaaaaatccgtgagtattccaaaatatatttaataatggaatatctgcattaatataccatccatgtgtttttaccatttgccttaatattgaatatactgtttacctcacactaaaaagaaaaccagaagccttatttgtgattttgggagtggaagcttccatttttgtgtcaaaaatgaatcctgattcttatggaaatctctgttattaagatatttcaagatgagacaacactgaagatcaaattgtgtttagtatcactatcttctctcctcgtttctctcttactcctcatcctcccagaatctaccagtttatggtagaaagatgggaaccttatttgaatgtgtttttttttttccatgatgtccaattttgttgtgggaaaggatttggataaaatttttgtttaaattttggtagatttttatctatacaaatttaaataaaattatgttttgtaagctgaaaaaaaaaaaaaaaaaaa

SEQ ID NO: 396538 - DNA, 1000 bp, Homo Sapiens; identical to SEQ ID NO: 286149

SEQ ID NO: 396539 - DNA, 1000 bp, Homo Sapiens; identical to SEQ ID NO: 286150

SEQ ID NO: 396540 - DNA, 1000 bp, Homo Sapiens; identical to SEQ ID NO: 286151

SEQ ID NO: 396541 - DNA, 1000 bp, Homo Sapiens
tcagagaaggggtggaaacccatgtctcttttcgggaacataatttgtacacagtaaacatcaccttcttggaagtgaaaatggaagattatggccttcctttcatgtgccacgctggagtgtccacagcatacattatattacagctcccagctccggattttcgagcttacttgataggagggcttatcgccttggtggctgtggctgtgtctgttgtgtacatatacaacatttttaagatcgacattgttctttggtatcgaagtgccttccattctacagagaccatagtagatgggaagctgtatgacgcctatgtcttataccccaagccccacaaggaaagccagaggcatgccgtggatgccctggtgttgaatatcctgcccgaggtgttggagagacaatgtggatataagttgtttatattcggcagagatgaattccctggacaagccgtggccaatgtcatcgatgaaaacgttaagctgtgcaggaggctgattgtcattgtggtccccgaatcgctgggctttggcctgttgaagaacctgtcagaagaacaaatcgcggtctacagtgccctgatccaggacgggatgaaggttattctcattgagctggagaaaatcgaggactacacagtcatgccagagtcaattcagtacatcaaacagaagcatggtgccatccggtggcatggggacttcacggagcagtcacagtgtatgaagaccaagttttggaagacagtgagataccacatgccgcccagaaggtgtcggccgtttcctccggtccagctgctgcagcacacaccttgctaccgcaccgcaggcccagaactaggctcaagaagaaagaagtgtactctcacgactggctaagacttgctggactgacacctatggctggaagatgacttgttttgctccatgtctcctcattcctacacctattttctgctgcaggatgaggctagggttagcattctaga

SEQ ID NO: 396542 - DNA, 1000 bp, Homo Sapiens
ataaggcagcatggtgtggcagttaagagatgggctgtgcagcccatcctgagctccagtcctgagtttgctacttacttctgtggcctctggaaccttatccaacctcttggtgcttcagtttcctcatctgtgaaattagaatttataataattgcacctacctcccaggggtaactaaatgaataaatataataaagtacttacagtggttcctgacacagactcagcactccgtcagtgttgccatgactatttttattatcattattaatgattacttagatcaattatttagcagtggactaatggaagctacagagcagggaagggaagcagatctagggaggaaggcagttttgatttgaggaggtttgcacatgtagagaagcatactggagaagcatatccagagggcgaaagatatctctccattgtgcatctgcctcttttgacgttggaagacacatgtcttactccccaaagggagcccagcactgggagccttcttgatgatctcaaaaataatagctattcaagaaaatcaccaagtgactgtgaaaccgtcagttcggaaggctggttagaacatgtgggagcaacatgaatgttctacaaaagtttaaagcagagattgtttcaaatgggtgtagtagatattactgaaaaccaaaaaagagtgagattgtcagtgtaagaatgtgatttaatgtttgtagtgcttacaattttgtgtaccaactggatgactaaaaagagtaaaataatttaattaatagctcatattttatgtgtgaaaacatgttagtgaacatatataatcaaaatagatttcattgctattgcatagtctctaatacatagaatgattttgcttttctcttttattatacttgctttaaaatacttgaaatatattttgcattaaatgcatttcaagttaaatgtcttaaatgtatacattagatgtgtgttttaaaatgcataaaacacgttgaaa

SEQ ID NO: 396543 - DNA, 1000 bp, Homo Sapiens; identical to SEQ ID NO: 286153

SEQ ID NO: 396544 - DNA, 1000 bp, Homo Sapiens; identical to SEQ ID NO: 221395

SEQ ID NO: 396545 - DNA, 1000 bp, Homo Sapiens
cgtgccgctgtctaacttggtgtgcagagtgaattgccgctgccggagcggagagaggcggagcggccaggagagaggggatttctgtcagcgccggcctcgggagctcggagacatgaacggcttcacgcctgacgagatgagccgcggcggggatgcggccgccgcagtggccgcagtggtcgctgccgcggccgccgccgcctcggcggggaacgggaccggcgcgggcaccggggctgaggtgccgggcgcgggggcggtctcagcggctgggcccccgggggcggccgggccgggccccgggcaactgtgctgcctgcgggaggatggtgagcggtgcggccgggcggcaggcaacgccagcttcagcaagaggatccagaagagcatctcccagaagaaggtgaagatcgagctggataagagcgcaaggcatctttacatatgtgattatcataaaaacttaattcagagtgttcgaaacagaagaaagagaaaagggagtgatgatgatggaggtgattcacctgttcaagatattgataccccagaggttgatttataccaattacaagtaaatacacttaggagatacaaaagacacttcaagctaccaaccagaccaggacttaataaagcacaacttgttgagatagttggttgccactttaggtctattccagtgaatgaaaaagacaccttaacatatttcatctactcagtgaagaatgacaagaacaaatcagatctcaaggttgatagtggtgttcactaggagacgtggaattgagactaataacttggatgttaacactgtttactgttttttcacatgtagaaatgttctttgtgtattttttctacagaggattttctctgattttattttctttgtttctgactctaataattagttggaaactcatataaaatgagctttcctaaattaaatctattttaaataaaggttattactattaaaaaaaaaaaaaaaaaa

SEQ ID NO: 396546 - DNA, 892 bp, Homo Sapiens
ccacatttgtgcatcacttctttagagaaagttaagtctgtgttctgcttaggagagataacactttttgtccctgtaggtggcccccctggtgtagccattagttgctaattacttgcaaacaaataaacaattaactccttaagctgctggctgggcaagtgttcattgacatgctaaaactttctaagacaggattttaattagtgacgttctaaatccagcccccttgtcagcggagctataaggtgaactgcaggaagatcccagccctatacacgtggggcagagccagcagaggccagagctgttgctctgtgcagaccacgagaggatgtctcccagccttcaggaaggcgctcagctcggggaaaacaaaccctcaacttgctccttttcaattgagagaatcttaggactggaccagaagaaagactgtgttccattaatgaaaccccacaggccctgggcagacacctgcagctcatcagggaaagatggtaacttatgtctacatgtcccaaatcctcccagtgggatttcattccctagcgtggtggatcacccaatgccagaagaaagagcttcgaaatatgaaaattacttttcagcctcagaaagactgtctttgaaaagagagttgagttggtatagaggccgaagaccaagaactgcttttactcaaaaccagattgaagtgttagaaaatgtctttagagtaaactgctatcctggtatcgatattagagaagacttagctcaaaaattgaatctagaggaagacagaatccagatttggtttcaaaatcggcgtgcaaaactgaaaaggtcccatagagaatcacagtttctaatggcgaaaaaaaatttcaacacaaatctgctggaatag

SEQ ID NO: 396547 - DNA, 1000 bp, Homo Sapiens; identical to SEQ ID NO: 116090

SEQ ID NO: 396548 - DNA, 1000 bp, Homo Sapiens; identical to SEQ ID NO: 286156

SEQ ID NO: 396549 - DNA, 1000 bp, Homo Sapiens; identical to SEQ ID NO: 116091

SEQ ID NO: 396550 - DNA, 1000 bp, Homo Sapiens; identical to SEQ ID NO: 221396

SEQ ID NO: 396551 - DNA, 1000 bp, Homo Sapiens; identical to SEQ ID NO: 286161

SEQ ID NO: 396552 - DNA, 1000 bp, Homo Sapiens; identical to SEQ ID NO: 116092

SEQ ID NO: 396553 - DNA, 1000 bp, Homo Sapiens
cctggtgagagatggctgtggatgctgtaaaatctgtgccaagcaaccaggggaaatctgcaatgaagctgacctctgtgacccacacaaagggctgtattgtgactactcagtagacaggcctaggtacgagactggagtgtgtgcataccttgtagctgttgggtgcgagttcaaccaggtacattatcataatggccaagtgtttcagcccaaccccttgttcagctgcctctgtgtgagtggggccattggatgcacacctctgttcataccaaagctggctggcagtcactgctctggagctaaaggtggaaagaagtctgatcagtcaaactgtagcctggaaccattactacagcagctttcaacaagctacaaaacaatgccagcttatagaaatctcccacttatttggaaaaaaaaatgtcttgtgcaagcaacaaaatggactccctgctccagaacatgtgggatgggaatatctaacagggtgaccaatgaaaacagcaactgtgaaatgagaaaagagaaaagactgtgttacattcagccttgcgacagcaatatattaaagacaataaagattcccaaaggaaaaacatgccaacctactttccaactctccaaagctgaaaaatttgtcttttctggatgctcaagtactcagagttacaaacccactttttgtggaatatgcttggataagagatgctgtatccctaataagtctaaaatgattactattcaatttgattgcccaaatgaggggtcatttaaatggaagatgctgtggattacatcttgtgtgtgtcagagaaactgcagagaacctggagatatattttctgagctcaagattctgtaaaaccaagcaaatgggggaaaagttagtcaatcctgtcatataataaaaaaattagtgagtaaaaaaaaaaaaaaaaaaaaaaaaaaaaaaaaaaaaaaaaaaaaaaaaaaagaaaaaaaaaaaaaaaaaaaa

SEQ ID NO: 396554 - DNA, 1000 bp, Homo Sapiens; identical to SEQ ID NO: 286163

SEQ ID NO: 396555 - DNA, 1000 bp, Homo Sapiens; identical to SEQ ID NO: 221398

SEQ ID NO: 396556 - DNA, 1000 bp, Homo Sapiens; identical to SEQ ID NO: 286164

SEQ ID NO: 396557 - DNA, 1000 bp, Homo Sapiens; identical to SEQ ID NO: 116093

SEQ ID NO: 396558 - DNA, 1000 bp, Homo Sapiens; identical to SEQ ID NO: 286166

SEQ ID NO: 396559 - DNA, 1000 bp, Homo Sapiens; identical to SEQ ID NO: 286167

SEQ ID NO: 396560 - DNA, 1000 bp, Homo Sapiens; identical to SEQ ID NO: 116094

SEQ ID NO: 396561 - DNA, 1000 bp, Homo Sapiens; identical to SEQ ID NO: 221400

SEQ ID NO: 396562 - DNA, 1000 bp, Homo Sapiens; identical to SEQ ID NO: 286171

SEQ ID NO: 396563 - DNA, 1000 bp, Homo Sapiens
aagacctacagcctcagcccccgcgactgcctcaagacctgccttttccagaagtggcagcgcatggtagcaccccctgcggagcccacacgtcagcagcccagcaaacggcggaaacggaagatgtcagggggcagcaccatgagctctggtggtggcaacaccaacaacagcaacagcaagaagaagagcccagctagcaccttcgccctctccagccaggtacctgatgtgatggtggtgggggagcccaccctgatgggcggggagttcggggacgaggacgagaggctcatcacccggctggagaacacccagtttgacgcagccaacggcattgacgacgaggacagctttaacaactcccctgcactgggcgccaacagcccctggaacagcaagcctccgtccagccaagaaagcaaatcggagaaccccacgtcacaggcctcccagtaaaaggccctgctgtggccacccagtgctctgcctacctgccccacccctcacagccccagggagcagaagacagaatgaagagactgagcatctaaaatgggcagcctccatccacccgcttcagggaggaactggactctctgggggcaggtgccaagatttgcccccccagtggccctgggctgggcctggcctctacagagccttttagggggagggggtactcatgtggatgcctacttggaacctgggcctctgagacatgtcctgaccaccccccagggcatttgcctccatcttcaccccagattgtgggtttcccatccccctgactttacccctttcaagcctggggttgtctatacccacagcccttagggacttaaagttacggggcttcgttgaatgctccttcccctaggcagctggtaatagaggggtaaagctctgggcccctcctccctgctgccacttatcccagctccaagtttttttaaaaataatattattaaaaatgtaagttaaaaaaaaaaaaaaaaaa

SEQ ID NO: 396564 - DNA, 1000 bp, Homo Sapiens; identical to SEQ ID NO: 116095

SEQ ID NO: 396565 - DNA, 1000 bp, Homo Sapiens; identical to SEQ ID NO: 286174

SEQ ID NO: 396566 - DNA, 1000 bp, Homo Sapiens; identical to SEQ ID NO: 116096

SEQ ID NO: 396567 - DNA, 1000 bp, Homo Sapiens; identical to SEQ ID NO: 116097

SEQ ID NO: 396568 - DNA, 1000 bp, Homo Sapiens; identical to SEQ ID NO: 286177

SEQ ID NO: 396569 - DNA, 1000 bp, Homo Sapiens; identical to SEQ ID NO: 116098

SEQ ID NO: 396570 - DNA, 1000 bp, Homo Sapiens; identical to SEQ ID NO: 286179

SEQ ID NO: 396571 - DNA, 1000 bp, Homo Sapiens; identical to SEQ ID NO: 116099

SEQ ID NO: 396572 - DNA, 1000 bp, Homo Sapiens
ttaagattgaaagtgatgttcaagaaccaactgaaccagaggatgaccttgacattatgcttggcaataaaaagaagaaaaagaagaatgttaagttcccagatgaggatgaaatactagagaaagatgaagctctagaagatgaagacaacaaaaaagatgatggtatctcattcagtaatcagacaggccctgcttgggcaggctcagaaagagactacacatacgaggagctgctgaatcgagtgttcaacatcatgagggaaaagaatccagatatggttgctggggagaaaaggaaatttgtcatgaaacctccacaagtcgtccgagtaggaaccaagaaaacttcttttgtcaactttacagatatctgtaaactattacatcgtcagcccaaacatctccttgcatttttgttggctgaattgggtacaagtggttctatagatggtaataaccaacttgtaatcaaaggaagattccaacagaaacagatagaaaatgtcttgagaagatatatcaaggaatatgtcacttgtcacacatgccgatcaccggacacaatcctgcagaaggacacacgactctatttcctacagtgcgaaacttgtcattctagatgttctgttgccagtatcaaaaccggcttccaggctgtcacgggcaagcgagcacagctccgtgccaaagctaactaatttgctaatcactgattttgcaaagcttgttgtggagatgtggctggacaggtttgccatcagagtggatataccgttgtattaaaaacaagataaaaaagctgccaagatttttggcgagtggttggtctgaagtccttgcaagacgctgatgctcaagctgttgacatactcattgcctactttaacacctgtcagagaaacgtgatatggggtaaggaggtgcttttttaaaatcgttcatagacttctgtaaaatgcaagataaattaaagttattataacagtgattctttcaa

SEQ ID NO: 396573 - DNA, 1000 bp, Homo Sapiens; identical to SEQ ID NO: 116100

SEQ ID NO: 396574 - DNA, 1000 bp, Homo Sapiens; identical to SEQ ID NO: 286182

SEQ ID NO: 396575 - DNA, 1000 bp, Homo Sapiens; identical to SEQ ID NO: 116101

SEQ ID NO: 396576 - DNA, 1000 bp, Homo Sapiens; identical to SEQ ID NO: 116102

SEQ ID NO: 396577 - DNA, 1000 bp, Homo Sapiens; identical to SEQ ID NO: 286186

SEQ ID NO: 396578 - DNA, 1000 bp, Homo Sapiens; identical to SEQ ID NO: 286187

SEQ ID NO: 396579 - DNA, 1000 bp, Homo Sapiens; identical to SEQ ID NO: 286188

SEQ ID NO: 396580 - DNA, 1000 bp, Homo Sapiens; identical to SEQ ID NO: 221405

SEQ ID NO: 396581 - DNA, 1000 bp, Homo Sapiens; identical to SEQ ID NO: 221406

SEQ ID NO: 396582 - DNA, 1000 bp, Homo Sapiens
ctgcggcgacgacttgctcagactgtcccggcggccggagtgactttctcgcacccccttgcctgtcccacctcgctgaacaccatcccgccattagcgcatcggaaccccacacagttgcaactcccaaccccgaatctttgcagccgttcggccctgaaagatgccctatccatgagatgccttttcatctgcaaactctgcaaaatgtgtctcatgtttcgcaactctttttttccccctcgctcccgcctaccccgtcggcattttcttcttccaccagcttttactgaactttttggcactgctttggattggggtcaattgcagtccacgtaactggctgcagagaaatctaccgagcaaggaaaaggcacacacacacgtttgcaggggtgtctcggtttgcatttctgttggaatgatccgaactggactcacatcctgtatggtggatggactgtatattgagggttccattcttcgcgcagtttagacatctctgttttgattctttgttgttgtttttattttaaaaggcacaaactctagatattagttgaatgttgaggctttaactttttcggtgtctttctacaactgtgttctgtgactcaattgtatcgtgttaatatcagtgcagactgtctcctctacgtgaccgtataatgtttttctcgtcttgtagtctctatggcgtgtctttatggtgtaataaggttctcacggggtcaatcttttgtgtttagagaggccacggttcagacaatggtatatatttttgttatcaggtgcatgtctgtctgatttctttttttttcctgttggactatgtttgtgaacataattgtcataagttatgtttcagatttttgaatttatttatatgtgttataatgaatgcttctatttaaaagggaaatatttctacatgtgcttatagttttccaagagtgtaccattaacttgattgttgataataaaaaccaaaagcaagtct

SEQ ID NO: 396583 - DNA, 1000 bp, Homo Sapiens; identical to SEQ ID NO: 116103

SEQ ID NO: 396584 - DNA, 1000 bp, Homo Sapiens; identical to SEQ ID NO: 116104

SEQ ID NO: 396585 - DNA, 1000 bp, Homo Sapiens
tttttaatagcactaaccaatgcctttttagatgtatttttgatgtatatatctattattcaaaaaatcatgtttattttgagtcctaggacttaaaattagtcttttgtaatatcaagcaggaccctaagatgaagctgagcttttgatgccaggtgcaatctactggaaatgtagcacttacgtaaaacatttgtttcccccacagttttaataagaacagatcaggaattctaaataaatttcccagttaaagattattgtgacttcactgtatataaacatatttttatactttattgaaaggggacacctgtacattcttccatcatcactgtaaagacaaataaatgattatattcacagactgattggaattctttctgttgaaaagcacacacaataaagaacccctcgttagccttcctctgatttacattcaactctgatccctgggccttaggtttgacatggaggtggaggaagatagcgcatatatttgcagtatgaactattgcctctggacgttgtgagaattgtgctttcaccagaatttctaagaatttctgctaaatatcacctagcatgtgtaattttttttccttgcctgtgacttggacttttgatagttctataagaataaggctttttcttcccttgggcatgagtcagatacacaaggacccttcaggtgttactagaaggcgtccatgtttattgttttttaaagaatgtttggcactctctaacgtccactagcttactgagttatcaggtgcaggtcagactcttggctacagtgagaggcagcttctaggcagagttgcttaatgaaagggtttgtaatactttacaaaccattacctgtacctggcctggcctccaaaatattaacattctttttctgttgaaactcgcgagtgtaactttcataccacttgaatttattgatatttaattatgaaaactagcattacattattaaacgatttctaaaatc

SEQ ID NO: 396586 - DNA, 1000 bp, Homo Sapiens; identical to SEQ ID NO: 116105

SEQ ID NO: 396587 - DNA, 1000 bp, Homo Sapiens; identical to SEQ ID NO: 116106

SEQ ID NO: 396588 - DNA, 1000 bp, Homo Sapiens; identical to SEQ ID NO: 116107

SEQ ID NO: 396589 - DNA, 1000 bp, Homo Sapiens
tatgtaatacatatggtaattgtagggtaatacccacaacaactgtagtttcttacttggccaagagaatgcttatttaagtgttagacttccattctggcaaaatcttgccttatcagaagacattggaaagagggattccctttggtgtttggtcttctacttagaaaaacctattgcagttagtttatcttgtagtattcatctttgtattctgaagataaggtttgaattaaattgatacacacagaggggaaccgattttttttatccaatgtgaattataaatgagataatccacagttattcattgtggagttgttgagactatgaaagactcattgtctttgtattcagctcttaaatagtgtaactatatccccacctctgcttgctttctttccctcccctccaatgataaagaaaatgataaattttctgttgtgcattcaattcttattttaaataagactaagtataggcattgtacctgacattgctacgtttctaccagtgtttcaatttaaagtgctagtgtttaaaaacattttcaagggataaggccttctgtactttgcttatttgaagaatcagtggtaggagcagtgaagtaaattctatggagtacatttctaaaataccacatttctgaaatcataaataagtttattcaggttctaaccctttgctgtacacaagcagacagaaatgcatctgttacataaatgagaaaaagctattatgctgatggagcatgctttttaaatcctttaaaaacactcaccatataaacttgcatttgagcttgtgtgttcttttgttaatgtgtagagttctcctttctcgaaattgccagtgtgtacttggcttaactcaagaacagtttcttctggattccttatttgatttatttaacctaattatattctaatattgcaaatattaccataagtgggtaaaagtaaaattcctcttctgaaaaaaaaaaaaaaaaaaaaaa

SEQ ID NO: 396590 - DNA, 1000 bp, Homo Sapiens; identical to SEQ ID NO: 116108

SEQ ID NO: 396591 - DNA, 1000 bp, Homo Sapiens; identical to SEQ ID NO: 286195

SEQ ID NO: 396592 - DNA, 1000 bp, Homo Sapiens
gtctgtctgcgcccccatttctccatttctgccggggtctcccccttcccttcagcccattccccctcggttttatccatttccttgcctcctttttgtgtcttcatttttcctcctgtctgcattcctctctctctctctccctctctctcctgttcctctctttcttcctccctctccctgcctttccattttccgttccttgggtttgtgtgtctgcatctccatcttaccccttgcctgactgtaccccgtagacccctgtttctcctcctgcacctgtgtccccatctgcccttcttgttgctcctgtcatgtgtcaccatcttccctcctgtctgccttcttcctccacttgtgtcagcttgcatttttttattcctgactgagtcaccacacccctctcccctgatcaaagggaatattagtttttaatttggatcgactgaggtgccaggagaaactgcagtcccaggtatccagacagccaccaggatggtccctcgccccacccccaccgcctctccccaccttttccaacgtgttgcatgctgggagctggggggtgtgggggaaggggctgccggcttctttcaggaggctgaggtttggaggcaaaatcaacctgggagaccaccccggccgcggcgcctcagtggacaggtgggaggaaaagaaaacttcttaccttggaggagggacatcccgcttccttatccttagcttttttgttgctcctccccactgccccttttaatttatttggttgtttgcggagggaggggggaggggggtaggctgggccgggaactgtccgaggtgctgagctggggcgggaccggaatcctcccggtagggtaccagggactgagttgggcctggggccgtgtccaaggtgccaatgatgcgggccgacagagcgggccgcactgtctgtctgtccgtctgtcccggaaagaactataaagcgctggaagcgcctgcaaaaaaaaaaaaaaaa

SEQ ID NO: 396593 - DNA, 1000 bp, Homo Sapiens; identical to SEQ ID NO: 116109

SEQ ID NO: 396594 - DNA, 1000 bp, Homo Sapiens; identical to SEQ ID NO: 286197

SEQ ID NO: 396595 - DNA, 1000 bp, Homo Sapiens; identical to SEQ ID NO: 286199

SEQ ID NO: 396596 - DNA, 1000 bp, Homo Sapiens; identical to SEQ ID NO: 286200

SEQ ID NO: 396597 - DNA, 894 bp, Homo Sapiens; identical to SEQ ID NO: 116111

SEQ ID NO: 396598 - DNA, 1000 bp, Homo Sapiens; identical to SEQ ID NO: 286201

SEQ ID NO: 396599 - DNA, 1000 bp, Homo Sapiens; identical to SEQ ID NO: 221410

SEQ ID NO: 396600 - DNA, 1000 bp, Homo Sapiens; identical to SEQ ID NO: 286203

SEQ ID NO: 396601 - DNA, 1000 bp, Homo Sapiens
agtacatggcccctgagattctggtgcgcagtggccacaaccgggctgtggactggtggagcctgggggccctgatgtacgacatgctcactggatcgccgcccttcaccgcagagaaccggaagaaaaccatggataagatcatcaggggcaagctggcactgcccccctacctcaccccagatgcccgggaccttgtcaaaaagtttctgaaacggaatcccagccagcggattgggggtggcccaggggatgctgctgatgtgcagagacatccctttttccggcacatgaattgggacgaccttctggcctggcgtgtggacccccctttcaggccctgtctgcagtcagaggaggacgtgagccagtttgatacccgcttcacacggcagacgccggtggacagtcctgatgacacagccctcagcgagagtgccaaccaggccttcctgggcttcacatacgtggcgccgtctgtcctggacagcatcaaggagggcttctccttccagcccaagctgcgctcacccaggcgcctcaacagtagcccccgggcccccgtcagccccctcaagttctccccttttgaggggtttcggcccagccccagcctgccggagcccacggagctacctctacctccactcctgccaccgccgccgccctcgaccaccgcccctctccccatccgtcccccctcagggaccaagaagtccaagaggggccgtgggcgtccagggcgctaggaagccgggtgggggtgagggtagcccttgagccctgtccctgcggctgtgagagcagcaggaccctgggccagttccagagacctgggggtgtgtctgggggtggggtgtgagtgcgtatgaaagtgtgtgtctgctggggcagctgtgcccctgaatcatgggcacggagggccgcccgccacgccccgcgctcaactgctcccgtggaagattaaagggctgaatcatggtgctgaaaaaaaaaaaaa

SEQ ID NO: 396602 - DNA, 1000 bp, Homo Sapiens; identical to SEQ ID NO: 286205

SEQ ID NO: 396603 - DNA, 1000 bp, Homo Sapiens; identical to SEQ ID NO: 116112

SEQ ID NO: 396604 - DNA, 1000 bp, Homo Sapiens
ctgcctgctactcttcgacatggagttcttcgtgtggcacctgctgcaccacaaggtgccctggctgtaccgcaccttccacaaggtgcaccaccagaactcgtcctcgttcgcgctggcaacgcagtatatgagcgtctgggaactgttttctttgggcttcttcgacatgatgaacgtcacactgctcgggtgccacccgctcaccaccctgaccttccacgtggtcaacatctggctttccgtggaggaccactccggctacaacttcccttggtccactcacagactggtgcccttcgggtggtacgggggtgtggtgcaccacgacctgcatcactctcactttaactgcaacttcgctccgtactttacacactgggacaaaatactgggaacgctgcggactgcatctgtcccagcgcggtgatgtggctgcggtgggtgcccctaagactcgggactgctgtgcctttcacacttgaatgaagagaaacacctgagctatatatttttttaaagcaactaacttattgctttatgtttatctatgaaaaccatagataaaatctgatgcatttttgtaatctgacaaagtaatttacatactgtttgtgtatcaatacaattttgtgttcttggtattcttagtctagctcacctcaatagccttgaatcctgcatatgaattagacattcatcactggcatatttagaatatctctaaaaggacttgtttgtagaataaggaattttctatgtttcaaagtgttctaaaacctggctaaaagaatgtatttttgtggatggtgttgacttctgactctaaaagcaatcaaacatgtttctgctggacagtgaccaagaattatagtaccttcttatatttttttatagaactgtatatttattttgaaagaaatgttattcgtgctttaaaaaggaaaaaaaaccatgaatcaaataaaagaaaaaaaaaaaaaaaaaaaaaaaaaaaaaa

SEQ ID NO: 396605 - DNA, 1000 bp, Homo Sapiens; identical to SEQ ID NO: 286207

SEQ ID NO: 396606 - DNA, 1000 bp, Homo Sapiens; identical to SEQ ID NO: 286208

SEQ ID NO: 396607 - DNA, 972 bp, Homo Sapiens; identical to SEQ ID NO: 286209

SEQ ID NO: 396608 - DNA, 1000 bp, Homo Sapiens
tggcatgggtaacagccattctggccactttgcctgaattcgtggtttataaacctcagatggaagaccagaaatacaagtgtgcatttagcagaactcccttcctgccagctgatgagacattctggaagcattttctgactttaaaaatgaacatttcggttcttgtcctccccctatttatttttacatttctctatgtgcaaatgagaaaaacactaaggttcagggagcagaggtatagccttttcaagcttgtttttgccataatggtagtcttccttctgatgtgggcgccctacaatattgcatttttcctgtccactttcaaagaacacttctccctgagtgactgcaagagcagctacaatctggacaaaagtgttcacatcactaaactcatcgccaccacccactgctgcatcaaccctctcctgtatgcgtttcttgatgggacatttagcaaatacctctgccgctgtttccatctgcgtagtaacaccccacttcaacccagggggcagtctgcacaaggcacatcgagggaagaacctgaccattccaccgaagtgtaaactagcatccaccaaatgcaagaagaataaacatggattttcatctttctgcattatttcatgtaaattttctacacatttgtatacaaaatcggatacaggaagaaaagggagaggtgagctaacatttgctaagcactgaatttgtctcaggcaccgtgcaaggctctttacaaacgtgagctccttcgcctcctaccacttgtccatagtgtggataggactagtctcatttctctgagaagaaaactaaggcgcggaaatttgtctaagatcacataactaggaagtggcagaactgattctccagccctggtagcatttgctcagagcctacgcttggtccagaacatcaaactccaaaccctggggacaaacgacatgaaataaatgtattttaaaacatctaaaaaaaaaaaaaaaaa

SEQ ID NO: 396609 - DNA, 1000 bp, Homo Sapiens; identical to SEQ ID NO: 286211

SEQ ID NO: 396610 - DNA, 1000 bp, Homo Sapiens; identical to SEQ ID NO: 116114

SEQ ID NO: 396611 - DNA, 1000 bp, Homo Sapiens; identical to SEQ ID NO: 116115

SEQ ID NO: 396612 - DNA, 1000 bp, Homo Sapiens; identical to SEQ ID NO: 286215

SEQ ID NO: 396613 - DNA, 1000 bp, Homo Sapiens; identical to SEQ ID NO: 221414

SEQ ID NO: 396614 - DNA, 1000 bp, Homo Sapiens
gtgacgacgagggcaccgtgctggacgacagccgggctcgtggcaagcccatggagctcatcattggcaagaagttcaagctgcctgtgtgggagaccatcgtgtgcaccatgcgagaaggggagattgcccagttcctctgtgacatcaagcatgtggtcctgtacccgctggtggccaagagtctccgcaacatcgcggtgggcaaggaccccctggagggccagcggcactgctgcggtgttgcacagatgcgtgaacacagctccctgggccatgctgacctggacgccctgcagcagaacccccagcccctcatcttccacatggagatgctgaaggtggagagccctggcacgtaccagcaggacccatgggccatgacagacgaagagaaggcaaaggcagtgccacttatccaccaggagggcaaccggttgtaccgcgaggggcatgtgaaggaggctgctgccaagtactacgatgccattgcctgcctcaagaacctgcagatgaaggaacagcctgggtcccctgaatggatccagctggacaagcagatcacgccgctgctgctcaactactgccagtgcaagctggtggtcgaggagtactacgaggtgctggaccactgctcttccatcctcaacaagtacgacgacaacgtcaaggcctacttcaagcggggcaaggcccacgcggccgtgtggaatgcccaggaggcccaggctgactttgccaaagtgctggagctggacccagccctggcgcctgtggtgagccgagagctgcgggccctggaggcacggatccggcagaaggacgaagaggacaaagcccggttccgggggatcttctcccattgacaggagcacttggccctgccttacctgccaagcccactgctgcagctgccagcccccctgcccgtgctgcgtcatgcttctgtgtatataaaggcctttatttatctctcaaaaaaaaaaaaaaaaaaaaaaaa

SEQ ID NO: 396615 - DNA, 1000 bp, Homo Sapiens
aagaagacatacgagcagaagtgccgggacgcggacgacgcggagcaggccttcgagcgcattagcgccaacggccaccagaagcaggtggagaagagtcagaacaaagccaggcagtgcaaggactcggccaccgaggcagagcgggtatacaggcagagcattgcgcagctggagaaggtccgggctgagtgggagcaggagcaccggaccacctgtgaggcctttcagctgcaagagtttgaccggctgaccattctccgcaacgccctgtgggtgcacagcaaccagctctccatgcagtgtgtcaaggatgatgagctctacgaggaagtgcggctgacgctggaaggctgcagcatagacgccgacatcgacagtttcatccaggccaagagcacgggcacagagccccccgctccggtgccctaccagaactattacgatcgggaggtcaccccgctgaccagcagccctggcatacagccgtcctgcggcatgataaagaggttctctggactgctgcacggaagtcccaagaccacttcgttggcagcttctgctgcgtccacagagaccctgacccccacccccgagcggaatgagggtgtctacacagccatcgcagtgcaggagatacagggaaacccggcctcaccagcccaggagtaccgggcgctctacgattatacagcgcagaacccagatgagctggacctgtccgcgggagacatcctggaggtgatcctggaaggggaggatggctggtggactgtggagaggaacgggcagcgtggcttcgtccctggttcctacctggagaagctttgaggaagggccaggagccccttcggacctgccctgccagtggagccagcagtgcccccagcactgtccccaccttgctagggcccagaaccaagcgtcccccagccccgagagggagcctgtcgtctcccagggaataaaggagtgcgttctgttcaaaaaaaaaaaaaaa

SEQ ID NO: 396616 - DNA, 1000 bp, Homo Sapiens; identical to SEQ ID NO: 116116

SEQ ID NO: 396617 - DNA, 1000 bp, Homo Sapiens; identical to SEQ ID NO: 116117

SEQ ID NO: 396618 - DNA, 1000 bp, Homo Sapiens; identical to SEQ ID NO: 116118

SEQ ID NO: 396619 - DNA, 1000 bp, Homo Sapiens; identical to SEQ ID NO: 286219

SEQ ID NO: 396620 - DNA, 1000 bp, Homo Sapiens; identical to SEQ ID NO: 286222

SEQ ID NO: 396621 - DNA, 1000 bp, Homo Sapiens; identical to SEQ ID NO: 116119

SEQ ID NO: 396622 - DNA, 1000 bp, Homo Sapiens; identical to SEQ ID NO: 221417

SEQ ID NO: 396623 - DNA, 1000 bp, Homo Sapiens; identical to SEQ ID NO: 116120

SEQ ID NO: 396624 - DNA, 1000 bp, Homo Sapiens; identical to SEQ ID NO: 221418

SEQ ID NO: 396625 - DNA, 1000 bp, Homo Sapiens
ttgggggcagtaacattgagccaagtgtccggagctgcttccaatttgctaataataagccagagatcgaagcggccctcttcctagactggatgagactggaaccccagtccatggtgtggctgcccgtcctgcacagagtggctgctgcagaaactgccaagcatcaggccaaatgtaacatctgcaaagagtgtccaatcattggattcaggtacaggagtctaaagcactttaattatgacatctgccaaagctgctttttttctggtcgagttgcaaaaggccataaaatgcactatcccatggtggaatattgcactccgactacatcaggagaagatgttcgagactttgccaaggtactaaaaaacaaatttcgaaccaaaaggtattttgcgaagcatccccgaatgggctacctgccagtgcagactgtcttagagggggacaacatggaaacgtgagtagtagcaaaagcagaacacactcttgtttgatgtatatttgaactcctctcagctgaacaccctcctttcactcccaaatgcaaacagtctcttctatttctttctttttatttacattagctgaaaagagaaaaataagctgatgtccagttgccactttcccacgtcacttgacaatttctttttccaaaagttaaactttatctcacagggggaaaaaaaaaaaaaaaccacaacacaatacagccactaattgccttacaagccttataagaaatatgggactgtttacaaatgagtgattccagtatttcattttgattttctctctcacaatcagtaatgtgtgtctttgtatctcatgtgtggtcatatctagtcactgtctactcacaaatcagtaaatgcttgtgtctttttgtatctcattgtgtgtggtcatatctagtcacttgctttctaccaaaagaaaatatagtcacaggaaactactcacgtaagtagtaatgattctcaagatcaaaggggag

SEQ ID NO: 396626 - DNA, 1000 bp, Homo Sapiens; identical to SEQ ID NO: 286228

SEQ ID NO: 396627 - DNA, 1000 bp, Homo Sapiens; identical to SEQ ID NO: 286229

SEQ ID NO: 396628 - DNA, 1000 bp, Homo Sapiens; identical to SEQ ID NO: 119092

SEQ ID NO: 396629 - DNA, 1000 bp, Homo Sapiens; identical to SEQ ID NO: 116121

SEQ ID NO: 396630 - DNA, 1000 bp, Homo Sapiens; identical to SEQ ID NO: 221421

SEQ ID NO: 396631 - DNA, 1000 bp, Homo Sapiens
tggcttgtatggggataatgtggaagagatggactccatggtgggcaagattcttgatgctatcgatgattttggcctaaggaacaacacccttgtctactttacatcagatcacggagggcatttggaagctaggcgagggcatgcccaacttggtggatggaatggaatatacaaaggtggaaaaggcatggggggctgggaaggtggaatccgcgtcccaggaattgtccgatggcctggaaaggtaccagctggacggttgattaaggaacctacaagtttaatggatattttaccaactgtcgcatcagtgtcaggaggaagtctccctcaggacagggtcattgacggccgagacctcatgcccttgctgcagggcaacgtcaggcactcggagcatgaatttcttttccactactgtggctcctacctgcacgccgtgcggtggatccccaaggacgacagtgggtcagtttggaaggctcactatgtgaccccggtattccagccaccagcttctggtggctgctatgtcacctcattatgcagatgtttcggagaacaggttacctaccacaacccccctctgctcttcgatctctccagggacccctcagagtccacacccctgacacctgccacagagcccctccatgattttgtgattaaaaaggtggccaacgccctgaaggaacaccaggaaaccatcgtgcctgtgacctaccaactctcagaactgaatcagggcaggacgtggctgaagccttgctgtggggtgttcccattttgtctgtgtgacaaggaagaggaagtctctcagcctcggggtcctaacgagaagagataattacaatcaggctaccagaggaagcctttggtcctaacgagaagagataattacaatcaggctaccaaaggaagcactaactttggtgctttcaagttggcaaggagtgcatttaatagtcaataaattcatctaccattccagattatt

SEQ ID NO: 396632 - DNA, 1000 bp, Homo Sapiens; identical to SEQ ID NO: 116124

SEQ ID NO: 396633 - DNA, 1000 bp, Homo Sapiens; identical to SEQ ID NO: 286235

SEQ ID NO: 396634 - DNA, 1000 bp, Homo Sapiens; identical to SEQ ID NO: 116126

SEQ ID NO: 396635 - DNA, 1000 bp, Homo Sapiens; identical to SEQ ID NO: 116127

SEQ ID NO: 396636 - DNA, 1000 bp, Homo Sapiens; identical to SEQ ID NO: 286238

SEQ ID NO: 396637 - DNA, 1000 bp, Homo Sapiens
attctcgtggaggagtttccttgctgagatttcaaatagtcctccccacctcaactgtcaccactgctaagggactctatccattgagcacattttcctaaggccctgctgtctgccgaggagcgccaagaagatgtcacttgtttacacacgaactgccacatccccaagctccgttcttgcccctcgtgtcctaggcccaacccagcctcccagacctcactttccccatcagcaatacctggtgttctcccaccttgaaaggactcttggctcctgccgggttcctgctcaggctggaattgggaaaatatgcaggtgacatttgttcattctctaatcccatcctctcacccatccatttcctcactcagtggagatttgccaaatgaataaacgacacctttgaggccccaggtgaagcggggccctactccggcctctgccttgggcctcgcctctgtcctcaggtcctctcagaggcagatacctaggggagctgctgctgcctgctcattctagcttccgattccattcccagcccctgcgttaaggtccctggagaggtggcgtcagtgggggtgaggaagggcatcttcctgactcctctgcccagtgctggaaggagcatgcctgggttagtgggccaggggccaggcagctgggggcctttggggaccagaaggggagatgtgctcccagagcctctctgctgtaagaccccagcttttcctggaagatgggactctggggtgtgtggtgctcaccagagtcaggccacccactgggctcggcaggagataggggagagcaattactttgttcactgtatgcacccgcgggggcctgggagtccccatttgcaggtgggtagggcctccagcccacaccacccagacctaggcttccctcttctcaggatccaccacagggttaggggacaggaagcctgttctattctcaataaatcttacaaaattccaaaaaaaaaaaaaaaaaa

SEQ ID NO: 396638 - DNA, 1000 bp, Homo Sapiens
gtgatggttgcctgtacacttgctgaaatgaaatattagaaatggctgtatattccaaagaaaccctatattatatatccacattactgctgctaggattcatagttgcacatactgtttattgcttatgtgtagaaggaatgaaactagtttccagagttgttattaatatgaatatatatcatgtgttaatattgagaaaggaaaaatacattcccggtgttagtagttcttcatttcctgtctccaacagaaaattcactcattttagaactagtgtaattcttgataataaaataagagttttgattaagaacagcatagagcttcaaaatgcaaagtgaatgattagtaaaattatgtctcattttattttttcagcacccataccacaattaatattaggctggattgccatgggaaacattttttggcattaatgcagcaacataatactcactttaggtattactacatagttgaaggatttaactgaatgtatggatcaaatttatttatttgacatattcgaagctgtggtttaataggaatttgagaaaggtgtaagaaataggataaaaagaaggtcagcaccatgtaccaggaatagctttactttccatacatagaaatataaatttagtggtatcctatattactttagtgtcgtacgctttgtaagacttaaatattttattctattgattccactactttggtatgttaagacatttctttaaagatgaccaacaatatccttattttaggtgccactagcagatgtaagcgtatacttagttgccgttagatgtgacagaatgagataatttatgtaaagcagtagagtacctggcacaaagcaaacaataaatattattgttattgttgttataattgtaaaatgaatgacttcaaaaacatagtcccagtttggagggattttgtgatgcagaatatctaagtcatagaaatagaagacaggtggaataagtatatgttc

SEQ ID NO: 396639 - DNA, 1000 bp, Homo Sapiens; identical to SEQ ID NO: 116128

SEQ ID NO: 396640 - DNA, 1000 bp, Homo Sapiens; identical to SEQ ID NO: 286239

SEQ ID NO: 396641 - DNA, 1000 bp, Homo Sapiens; identical to SEQ ID NO: 286241

SEQ ID NO: 396642 - DNA, 1000 bp, Homo Sapiens
gccctccgaccccatcagccgaaccctcaggttctccctagtcaatgactcagagggctggctctgcattgagaaattctccggggaggtgcacaccgcccagtccctgcagggcgcccagcctggggacacctacacggtgcttgtggaggcccaggatacagatgagccgagactgagcgcttctgcacccctggtgatccacttcctaaaggcccctcctgccccagccctgactcttgcccctgtgccctcccaatacctctgcacaccccgccaagaccatggcttgatcgtgagtggacccagcaaggaccccgatctggccagtgggcacggtccctacagcttcacccttggtcccaaccccacggtgcaacgggattggcgcctccagactctcaatggttcccatgcctacctcaccttggccctgcattgggtggagccacgtgaacacataatccccgtggtggtcagccacaatgcccagatgtggcagctcctggttcgagtgatcgtgtgtcgctgcaacgtggaggggcagtgcatgcgcaaggtgggccgcatgaagggcatgcccacgaagctgtcggcagtgggcatccttgtaggcaccctggtagcaataggaatcttcctcatcctcattttcacccactggaccatgtcaaggaagaaggacccggatcaaccagcagacagcgtgcccctgaaggcgactgtctgaatggcccaggcagctctagctgggagcttggcctctggctccatctgagtcccctgggagagagcccagcacccaagatccagcaggggacaggacagagtagaagcccctccatctgccctggggtggaggcaccatcaccatcaccaggcatgtctgcagagcctggacaccaactttatggactgcccatgggagtgctccaaatgtcagggtgtttgcccaataataaagccccagagaactgggctgggccctatgggattggta

SEQ ID NO: 396643 - DNA, 1000 bp, Homo Sapiens; identical to SEQ ID NO: 286242

SEQ ID NO: 396644 - DNA, 1000 bp, Homo Sapiens
acagcaagtagataaatatttgacttgcatgaagagaagcaattttggggaagggtttgaattgttttctttaaagatgtaatgtccctttcagagacagctgatacttcatttaaaaaaatcacaaaaatttgaacactggctaaagataattgctatttatttttacaagaagtttattctcatttgggagatctggtgatctcccaagctatctaaagtttgttagatagctgcatgtggcttttttaaaaaagcaacagaaacctatcctcactgccctccccagtctctcttaaagttggaatttaccagttaattactcagcagaatggtgatcactccaggtagtttggggcaaaaatccgaggtgcttgggagttttgaatgttaagaattgaccatctgcttttattaaatttgttgacaaaattttctcattttcttttcacttcgggctgtgtaaacacagtcaaaataattctaaatccctcgatatttttaaagatctgtaagtaacttcacattaaaaaatgaaatattttttaatttaaagcttactctgtccatttatccacaggaaagtgttatttttaaaggaaggttcatgtagagaaaagcacacttgtaggataagtgaaatggatactacatctttaaacagtatttcattgcctgtgtatggaaaaaccatttgaagtgtacctgtgtacataactctgtaaaaacactgaaaaattatactaacttatttatgttaaaagattttttttaatctagacaatatacaagccaaagtggcatgttttgtgcatttgtaaatgctgtgttgggtagaataggttttcccctcttttgttaaataatatggctatgcttaaaaggttgcatactgagccaagtataattttttgtaatgtgtgaaaaagatgccaattattgttacacattaagtaatcaataaagaaaacttccatagctaaaaaaaaaaaaaaaaaaa

SEQ ID NO: 396645 - DNA, 1000 bp, Homo Sapiens; identical to SEQ ID NO: 221422

SEQ ID NO: 396646 - DNA, 1000 bp, Homo Sapiens
catttgacagagatggtgaaaaggccgatatatctgccaatgtctatccagacataaacatcatcactggagcccttaaactgtatttcagagacttacccatccctgtcatcacatatgatacctattccaaatttatagatgcagcaaaaatctccaatgcagatgagaggctggaagccgtccatgaagtgctgatgctgctgcctcctgcccactatgaaaccctccggtacctaatgatccacctcaaaaaggttactatgaatgaaaaagacaatttcatgaatgcagaaaatctggggatcgtgtttgggcccactctgatgaggccccctgaggacagcaccctgaccaccctgcatgatatgcggtaccaaaagctgattgtgcagattttaatagaaaacgaagacgttttattctaatccatcagggaaatgagctgaatggcccagcaccatcaagttgacacagctaaggataaaacatttcttaccacttgatttgttttccaagcaagtgctagaatttgctggactgcagaggatcgctgagtggggtactgtgtctcatagacatgcgccacctccacgtgagaacaagggtgaaggtgagggaagcccctcaggttgggtcttttgctgtgcctcctatgtatgtctggtttgctggaagagtgattaatacatctttaatttattaaaaaacaatgtagacctttaaacttcagtcttattgggaataaaagggaacttaattcatacaggtacttgatacagttatacattttccacttacaaaaagaagacaattctgttaaatgaaacgtgtatcgtaaaatgtaattttatttacccacgagaatgttgttattttagcaatagaactcaatgcagatgcattggttattaccctgtgtaccttgtccctcattttgctgtgacaccctgaaaaagctgaccacaaatgcagtattatcattgacatacctctgtcc

SEQ ID NO: 396647 - DNA, 1000 bp, Homo Sapiens
ccagatggagagtttgagcttatgaggtatcgcacaaccaaggacatcatccttcccttccgggtgatcccgctagtgcgagaagtgggacgcaccaaactggaggtcaaggtggtcatcaagtccaactttaaaccctcactgctggctcagaagatcgaggtgaggatcccaaccccactgaacacaagcggggtgcaggtgatctgcatgaaggggaaggccaagtacaaggccagcgagaatgccatcgtgtggaagatcaagcgcatggcaggcatgaaggaatcgcagatcagcgcagagattgagcttctgcctaccaacgacaagaagaaatgggctcgaccccccatttccatgaactttgaggtgccattcgcgccctctggcctcaaggtgcgctacttgaaggtgtttgaaccgaagctgaactacagcgaccatgatgtcatcaaatgggtgcgctacattggccgcagtggcatttatgaaactcgctgctagctgccactaggcagctagcccacctccccagccaccctcctccacaggtccaggtgccgctccctcccccaccacacatcagtgtctcctccctcctgctttgctgccttccctttgcaccagcccgagtctaggtctgggccaagcacattacaagtgggaccggtggagcagcccctgggctccctgggcaggggagttctgaggctcctgctctcccatccacctgtctgtcctggcctaatgccaggctctgagttctgtgaccaaagccaggtgggttccctttccttcccacccctgtggccacagctctggagtgggagggttggttgcccctcacctcagagctcccccaaaggccagtaatggatccccggcctcagtccctactctgctttgggatagtgtgagcttcattttgtacacgtgtgacttcgtccagttacaaacccaataaactctgtagagtggaaaaaaaaaaaaaaaaaaa

SEQ ID NO: 396648 - DNA, 1000 bp, Homo Sapiens
ccattgcacagagctgccagccctccttctatgatggcaccatcattgtcaagaagctgccatacctgccacggattctgggccgcaacatcggctcccaccatgtgagggtggagcacttcatgaaccacagcatcaccacactggccaaggacacgccgctggaggaggtggtcaaggttgtgacctccacagacgtgaccgagtatcccctggtggagagcacagagtcccagatcctggtaggcatcgtgcagagggcccagctggtgcaggccctccaggctgagcctccttccagggctccaggacaccagcagtgtctccaggacatcttggccaggggctgccccacggaaccagtgaccctgacgctattctcagagaccaccttgcaccaggcacaaaacctctttaagctgttgaaccttcagtccctcttcgtgacatcgcggggcagagctgtgggctgcgtgtcctgggtggagatgaagaaagcaatttccaacctgacaaatccgccagctccaaagtgagccggcccagcaagatgaaacagggcaccccagctgacctggtactgaggttgggctgagaccctgcttctcttcccccatcaccacctgcccctccctccagcccagctccattctttggcataacaggcaactctaacctagcccagaagaggatggctcatcctgggtgggacgatggctcctgccttgaaagacaaaaatcccaccttgggcagagctgagtgtgagaagatggaaaaccagtatctgccaggtgctcagtgactggccatcacattaatgaatgacgagattggagtacactgtcaccaagggcaggcaaagatgccctctggggttgtctggttcccagtgagaggctcctgagaaaaataaagctggttcccagaaaaaaaaaaaaaaaaaaaaaaaaaaaaaaaaaaaaaaaaaaaaaaaaaaaaaaaaaaaaaaaaaaaaaaaaa

SEQ ID NO: 396649 - DNA, 1000 bp, Homo Sapiens; identical to SEQ ID NO: 284703

SEQ ID NO: 396650 - DNA, 1000 bp, Homo Sapiens
atcatcagctctgaccgctgcatctctgtgctcctccctgtctggtcccagaaccaccgcagcgttcgcctggcttacatggcctgcatggtcatctgggtcctggctttcttcttgagttccccatctctcgtcttccgggacacagccaacctgcatgggaaaatatcctgcttcaacaacttcagcctgtccacacctgggtcttcctcgtggcccactcactcccaaatggaccctgtggggtatagccggcacatggtggtgactgtcacccgcttcctctgtggcttcctggtcccagtcctcatcatcacagcttgctacctcaccatcgtgtgcaaactgcagcgcaaccgcctggccaagaccaagaagcccttcaagattattgtgaccatcatcattaccttcttcctctgctggtgcccctaccacacactcaacctcctagagctccaccacactgccatgcctggctctgtcttcagcctgggtttgcccctggccactgcccttgccattgccaacagctgcatgaaccccattctgtatgttttcatgggtcaggacttcaagaagttcaaggtggccctcttctctcgcctggtcaatgctctaagtgaagatacaggccactcttcctaccccagccatagaagctttaccaagatgtcatcaatgaatgagaggacttctatgaatgagagggagaccggcatgctttgatcctcactgtggaacccctcaatggactctctcaacccagggacacccaaggatatgtcttctgaagatcaaggcaagaacctctttagcatccaccaattttcactgcattttgcatgggatgaacagtgttttatgctgggaatctagggcctggaacccctttcttctagtggacagaacatgctgtgttccatacagccttggactagcaatttatgcttcttgggaggccagccttgactgactcaaagcaaaaaaggaagaattc

SEQ ID NO: 396651 - DNA, 1000 bp, Homo Sapiens; identical to SEQ ID NO: 221423

SEQ ID NO: 396652 - DNA, 1000 bp, Homo Sapiens; identical to SEQ ID NO: 114989

SEQ ID NO: 396653 - DNA, 1000 bp, Homo Sapiens; identical to SEQ ID NO: 286250

SEQ ID NO: 396654 - DNA, 1000 bp, Homo Sapiens
tgactacaataccttgctatatatacatagtttttcttcaacatcttaactcttctgagtggaaataaaaatatcaggcataaggttttctcatgctgaaaaatagaacgcggtttttattttgcttagttttctttttaattccagaaataagtgaaaacatgttacttgacagtcaagtgtggtaatatggcaagccttgttcctttctgcatgagaatctaggagagaattcataaccacaccaataacgaaatagaagttttaaactatgtgcctaatcaatgtgtttcccaccaaagattcagaaaacaatgcttgagagaaatgggttaatgcataattaattaagcattgtggagcaaatttagggttcctgtgattaattttgtgatgactaaaatgctggaaagcaagtgagttgcccattaattatgattaaaattctcacctttcacagacagacaataagccagacaacacaatcaaagctcaatagatgatttcttgcttttttcagtcatttataaatataggtgtaatttttcatggatcagttaagtacacttgaaggaagtaaatgattgtatcagtttatttctagtataaatgggtacctgtaataatactgagctcttggaagcgaatcatgcatgcaattagctccctcctcctcacctactccactcccatctttatgacatttcaaatgtttatttggaaacaacagcctagatcactgttgaaggtgttcatggcatagttggagtctctgactgtttaaagaaatcacagaacagtacttttcttttagtgtttcattaagcctatgatgtaaaatgaaatgcttctgagcagtcttgtaatattgttcattcatattgacctgcatctcatcattgcatgttttatgttttcaaacatgccataaggaaaacgagtgcctgaactgcatgatttattagtttctctccactctgcattaaagtgctaatgattt

SEQ ID NO: 396655 - DNA, 927 bp, Homo Sapiens
gaggtcagagacttaagtctaaggcactgagcgtatcatgttaaagatgagcgggtggcagcgacagagccaaaatcagagctggaacctgaggagagagtgttcaagaaggaagtgtatcttcatacatcaccacacctgaaagcagatgtgcttttccagactgatccaactgcagagatggcagctgagtcattgcctttctccttcgggacactgtccagctgggagctggaagcctggtatgaggacctgcaagaggtcctgtcttcagatgaaaatgggggtacctatgtttcacctcctggaaatgaagaggaagaatcaaaaatcttcaccactcttgaccctgcttctctggcttggctgactgaggaggagccagaaccagcagaggtcacaagcacctcccagagccctcactctccagattccagtcagagctccctggctcaggaggaagaggaggaagaccaagggagaaccaggaaacggaaacagagtggtcattccccagcccgggctggaaagcagcgcatgaaggagaaagaacaggagaatgaaaggaaagtggcacagctagctgaagagaatgaacggctcaagcaggaaatcgagcgcctgaccagggaagtagaggcgactcgccgagctctgattgaccgaatggtgaatctgcaccaagcatgaacaattgggagcatcagtcccccacttgggccacactacccacctttcccagaagtggctactgactaccctctcactagtgccaatgatgtgaccctcaatcccacatacgcagggggaaggcttggagtagacaaaaggaaaggtctcagcttgtatatagagattgtacatttatttattactgtccctatctattaaagtgactttctatgagccaaaaaaaaaaaaaaaaaa

SEQ ID NO: 396656 - DNA, 1000 bp, Homo Sapiens; identical to SEQ ID NO: 116129

SEQ ID NO: 396657 - DNA, 1000 bp, Homo Sapiens; identical to SEQ ID NO: 286253

SEQ ID NO: 396658 - DNA, 1000 bp, Homo Sapiens; identical to SEQ ID NO: 116130

SEQ ID NO: 396659 - DNA, 1000 bp, Homo Sapiens
gacggggttttgccatgttagtcaggctggtcttgaactcctgacctcaagtgatccaccacctcggcctcccaaagtgttgagatgacaggcacgagccaccaggcccagcctgagtggtattttctttagggaccaggtagactttaaaacgagggtaagagaaaagccagtgtctttctgaggtaaataatttctgccaggaaacttcccagccccaccagcagcccccctaaaaaaatcactcgtgtccccagggacttctaaagcttggggctccaggaaatcatccagtagagttggagattcagagatttcttgaagccagggacatgctcctaactcctttcccattaaaggtgttagaatagaccagagggtgtcccttttccacagtaatgggatcggctggtgtgccttcagggaggaagagggaggtggtcaagcttgaaaaactggctttaggatggttctgactttgttctccctccccaagtgttctcaacctccattctgcagtgttcagagttttagggaaagggtttgggtgccccagcatccaggtgttgtgtggcttagcgcatgtgaagtgaaaaccttctggggttgtttggaagcagctttctggttcttgtgattgtatcctgaggtcccagaaccctattctcccacgaggatcctcagtgaccatggtggccacacgcctggccagcctgctggctcctgggtgagctgaagaaccttgcctgtggcacttttcgagggtgagctggaaccgagagaacatggtccccgtgctgggactcatgcgggtcatttcctgccggcctggtttcgcctggtcgtgtctttatgagcaccatgtaagcctccttgtattgagataattgggcattaaacattaaactgcagctctgggaaaaaaaaaaaaaaaaaaaaaaaaaaaaaaaaaaaaaaaaaaaaaaaaaaaaaaaaaaaaaaaaaaaaaaaaaaaaaaaaa

SEQ ID NO: 396660 - DNA, 1000 bp, Homo Sapiens
gtcctcaccggcggggataaggcctttgcagctggagctgatatcaaggaaatgcagaacctgagtttccaggactgttactccagcaagttcttgaagcactgggaccacctcacccaggtcaagaagccagtcatcgctgctgtcaatggctatgcctttggcgggggctgtgagcttgccatgatgtgtgatatcatctatgccggtgagaaggcccagtttgcacagccggagatcttaataggaaccatcccaggtgcgggcggcacccagagactcacccgtgctgttgggaagtcgctggcgatggagatggtcctcaccggtgaccggatctcagcccaggacgccaagcaagcaggtcttgtcagcaagatttgtcctgttgagacactggtggaagaagccatccagtgtgcagaaaaaattgccagcaattctaaaattgtagtagcgatggccaaagaatcagtgaatgcagcttttgaaatgacattaacagaaggaagtaagttggagaagaaactcttttattcaacctttgccactgatgaccggaaagaagggatgaccgcgtttgtggaaaagagaaaggccaacttcaaagaccagtgagaaccagctgcccctgcttcacacctctgcttggagaggacaagtgcagcctgtcagttttagaagcaagtaaatcatcctcttttcaagagcagtgtccgtggtgtgcagttcctctccaattgctgcgtggtcgtggcccgacctctcacggcatgacagccttcgtcacccagcctgtgagggtcctgactggagcaccttctaaatctaagattctgctgaggagcccccgctggtccctctgggcatgctgtgctcggacggaaagcggggcctgcgggtccttgtgtccctgccgctgaagaatggggctgctctgagggaaacgctgtctgctgccttcatacagatgctgattaaagtgatagcgattcagatt

SEQ ID NO: 396661 - DNA, 1000 bp, Homo Sapiens; identical to SEQ ID NO: 221425

SEQ ID NO: 396662 - DNA, 1000 bp, Homo Sapiens; identical to SEQ ID NO: 116131

SEQ ID NO: 396663 - DNA, 1000 bp, Homo Sapiens; identical to SEQ ID NO: 286257

SEQ ID NO: 396664 - DNA, 1000 bp, Homo Sapiens
ttcgtgagtggcttccctgccgcggccgccgcgggcgcgggccgctcgctctacggtgggcccgagctcgtgttccccgaggccatgaaccaccccgcgctgaccgtgcatccggcgcaccagctgggcgcctccccgctgcagcccccgcactccttcttcggcgcccagcaccgggaccctctccatttctacccctgggtcctgcggaaccgcttcttcggccaccgcttccaggccagcgacgtgccccaggacgggctgcttctgcacggccccttcgcacgcaagcccaagcggatccgcacggccttctcgccctcgcagctgctgcggctggagcgcgccttcgagaagaaccactacgtggtgggcgccgagcggaagcagctggccggcagtctcagcctctccgagacgcaggtgaaggtgtggttccagaaccggaggacaaagtacaaacggcagaagctggaggaggaagggcctgagtccgagcagaagaagaagggctcccatcacatcaaccggtggcgcattgccacgaagcaggccaatggggaggacatcgatgtcacctccaatgactagggtgggcaaccacaaacccacgagggcagagtgctgcttgctgctggccaggcccctgcgtgggcccaagctggactctggccactccctggccaggctttggggaggcctggagtcatggccccacagggcttgaagcccggggccgccattgacagagggacaagcaatgggctggctgaggcctgggaccacttggccttctcctcggagagcctgcctgcctgggcgggcccgcccaccaccgcagcctcccagctgctctccgtgtctccaatctcccttttgttttgatgcatttctgttttaatttattttccaggcaccactgtagtttagtgatccccagtgtcccccttccctatgggaataataaaagtctctctcttaatgaaaaaaaaaaaaaaaa

SEQ ID NO: 396665 - DNA, 1000 bp, Homo Sapiens; identical to SEQ ID NO: 286258

SEQ ID NO: 396666 - DNA, 1000 bp, Homo Sapiens; identical to SEQ ID NO: 286259

SEQ ID NO: 396667 - DNA, 1000 bp, Homo Sapiens; identical to SEQ ID NO: 221427

SEQ ID NO: 396668 - DNA, 1000 bp, Homo Sapiens; identical to SEQ ID NO: 221428

SEQ ID NO: 396669 - DNA, 1000 bp, Homo Sapiens; identical to SEQ ID NO: 221429

SEQ ID NO: 396670 - DNA, 1000 bp, Homo Sapiens; identical to SEQ ID NO: 221430

SEQ ID NO: 396671 - DNA, 1000 bp, Homo Sapiens; identical to SEQ ID NO: 286265

SEQ ID NO: 396672 - DNA, 1000 bp, Homo Sapiens; identical to SEQ ID NO: 221431

SEQ ID NO: 396673 - DNA, 1000 bp, Homo Sapiens
aagatcaaggaggtcccccgcccgaggaagcggctgacggaactgctgcttcgaacggccacagagaagccagggccggcggaagctgcccgccaggcatcggcctcccgtgcctggggcctccgctttttccgaagcccccagcaggtgctgccctcaccagatgggcggcgggcagcaggtgtccgcctagcagtcactagactggagggtgtcgatgaggccacccgtgcagtgcccacgggagacatggaagacctcccttgtgggctggtgctcagcagcattgggtataagagccgccctgtcgacccaagcgtgccctttgactccaagcttggggtcatccccaatgtggagggccgggttatggatgtgccaggcctctactgcagcggctgggtgaagagaggacctacaggtgtcatagccacaaccatgactgacagcttcctcaccggccagatgctgctgcaggacctgaaggctgggttgctcccctctggccccaggcctggctacgcagccatccaggccctgctcagcagccgaggggtccggccagtctctttctcagactgggagaagctggatgccgaggaggtggcccggggccagggcacggggaagcccagggagaagctggtggatcctcaggagatgctgcgcctcctgggccactgagcccagccccagccccggcccccagcagggaagggatgagtgttgggaggggaagggctgggtccgtctgagtgggactttgcacctctgctgatcccggccggccctggcttggaggcttggctgctcttccagcgtctctcctccctcctggggaaggtcgcccttgcgcgcaaggttttagctttcagcaactgaggtaaccttagggacaggtggaggtgtgggccgatctaaccccttacccatctctctactgctggactgtggagggtcaccaggttgggaacatgctggaaataaaacagctgcaccc

SEQ ID NO: 396674 - DNA, 1000 bp, Homo Sapiens
aagttctagccccaccctcccgccttcttgagtgatacctattacggatgagttctggaaaagacccagctatgattcataaaaacacttctggatgaatcaagaaccatttcttgtttttcctagataattctctaaaaatatgattcttccatatagaatgctaagcttatttttacatgcagtttctagctccttcaacccagctgaggtcgtgccagggagacagagtctggagaagggcagaggaattttggaaggatccctggctcatagtagggaagctgggatgggggaggggtcaaaattatggcatgactgaacctgcatctgtgttgggtggacatgaatacttagctacctcagcaggaattccttccaggtcccctttaaagctgaggtccttagagtaatatgtccttaataaaaaggacaaatggatacagccttgaccctcccagtgaggagaccccaattcagcaataagtctcacccttctcccctacaggtcaggccaagaagggtgaaggcctcttgcactccagacctcatacgccccaacagcttctaattggatagaacttgctttaccttacagctcacaacctcagctgggttttaggtacccaaaaagggcctgtctagattttttcagaaaaacgtggagtgctaggggcagcctggaaaagatggggaacctgctagtgaactaggagggagacttccatagcctcagacttggatagggtaggctgagggggccctaagggagggactaaggctccaaggcaggtcacttttccttaggctgttctacttctggcttgttgcaagaggagtagatgccccctcacccacacaaaccccactcagtctccacccaactcctggcactgctcccaggggatcgggtctccactccagctttctcaattaaagacgatttatacaaaaaaaaaaaaaaaaaaaaaaaaaaaaaaaaaaaaaaaaaaaaaaaaaa

SEQ ID NO: 396675 - DNA, 890 bp, Homo Sapiens
atggccgcggccatcgctagcggcttgatccgccagaagcggcaggcgcgggagcagcactgggaccggccgtctgccagcaggaggcggagcagccccagcaagaaccgcgggctctgcaacggcaacctggtggatatcttctccaaagtgcgcatcttcggcctcaagaagcgcaggttgcggcgccaagatccccagctcaagggtatagtgaccaggttatattgcaggcaaggctactacttgcaaatgcaccccgatggagctctcgatggaaccaaggatgacagcactaattctacactcttcaacctcataccagtgggactacgtgttgttgccatccagggagtgaaaacagggttgtatatagccatgaatggagaaggttacctctacccatcagaactttttacccctgaatgcaagtttaaagaatctgtttttgaaaattattatgtaatctactcatccatgttgtacagacaacaggaatctggtagagcctggtttttgggattaaataaggaagggcaagctatgaaagggaacagagtaaagaaaaccaaaccagcagctcattttctacccaagccattggaagttgccatgtaccgagaaccatctttgcatgatgttggggaaacggtcccgaagcctggggtgacgccaagtaaaagcacaagtgcgtctgcaataatgaatggaggcaaaccagtcaacaagagtaagacaacatagccagatcctcacaggtgttgtgacttattcgtcctgagcacagttgagtgatttatcctcaccagacattcctgctccgtggctgaagagcagcaggaagtaagctaatgcttattctttgctgtctccgaacttctctgttgcaa

SEQ ID NO: 396676 - DNA, 1000 bp, Homo Sapiens; identical to SEQ ID NO: 286269

SEQ ID NO: 396677 - DNA, 1000 bp, Homo Sapiens; identical to SEQ ID NO: 221433

SEQ ID NO: 396678 - DNA, 1000 bp, Homo Sapiens
agaataagtactaccaggtgccaaggaaggggatacaggccaaagaggtgctgaaaaaatatttggagtccaaggaggatgtggctgatgcacttctacagactgatcagtcactctcagaaaaggaaaaagcgattgaagtggaacgtataaaggctgaatctgcagaagctgcaaagaaaatgttggaggaaatacaaaagaagaatgaggagatgatggaacagaaagagaagagttatcaggaacatgtgaaacaattgactgagaagatggagagggacagggcccagttaatggcagagcaagagaagaccctcgctcttaaacttcaggaacaggaacgccttctcaaggagggattcgagaatgagagcaagagacttcaaaaagacatatgggatatccagatgagaagcaaatcattggagccaatatgtaacatactctaaaagtccaaggagcaaaatttgcctgtccagctccctctccccaagaaacaacatgaatgagcaacttcagagtgtcaaacaactgccattaaacttaactcaaaatcatgatgcatgcatttttgttgaaccataaagtttgcaaagtaaaggttaagtatgaggtcaatgttttacctacagagcaattcaactcatgcttatttatagtactaacttttaatatgatctttaactaaatcctatatttgaaatcatacacaaggactcaagagagatattgtgtaactaggatgcattttccaatgagatatcttgcagtttctgttctgggtagatttttttctctcatatgcaccacccttactgtatattcagtcctatactcttattcagggatttaactatggtcgtagcatagggctgaagtgttgtgaatatgatgaaaatgtgatgagaccaaacaaaccatggggcacagtagagcatcactcctgccaagtggtctttgtatggcatgctggctgcaaataaaggagatctgggac

SEQ ID NO: 396679 - DNA, 1000 bp, Homo Sapiens; identical to SEQ ID NO: 221434

SEQ ID NO: 396680 - DNA, 711 bp, Homo Sapiens
aggctcagaaggtccagaaatcaggggaaggagacccctatctgtccttcttctggaagagctggaaaggaagtctgctcaggaaataaccttggaagatggtggccacgaagacctttgctctgctgctgctgtccctgttcctggcagtgggactaggagagaagaaagagggtcacttcagcgctctcccctccctgcctgttggatctcatgctaaggtgagcagccctcaacctcgaggccccaggtacgcggaagggactttcatcagtgactacagtattgccatggacaagattcaccaacaagactttgtgaactggctgctggcccaaaaggggaagaagaatgactggaaacacaacatcacccagagggaggctcgggcgctggagctggccagtcaagctaataggaaggaggaggaggcagtggagccacagagctccccagccaagaaccccagcgatgaagatttgctgcgggacttgctgattcaagagctgttggcctgcttgctggatcagacaaacctctgcaggctcaggtctcggtgactctgaccacacccagctcaggactggattctgcccttcacttagcacctgcctcagccccactccagaatagccaagagaacccaaaccaataaagtttatgctaagtcgagcccattgtgaaaatttattaaaatgactactgagcact

SEQ ID NO: 396681 - DNA, 1000 bp, Homo Sapiens; identical to SEQ ID NO: 116135

SEQ ID NO: 396682 - DNA, 1000 bp, Homo Sapiens; identical to SEQ ID NO: 286274

SEQ ID NO: 396683 - DNA, 1000 bp, Homo Sapiens; identical to SEQ ID NO: 116138

SEQ ID NO: 396684 - DNA, 1000 bp, Homo Sapiens; identical to SEQ ID NO: 286275

SEQ ID NO: 396685 - DNA, 1000 bp, Homo Sapiens; identical to SEQ ID NO: 116139

SEQ ID NO: 396686 - DNA, 1000 bp, Homo Sapiens; identical to SEQ ID NO: 286277

SEQ ID NO: 396687 - DNA, 1000 bp, Homo Sapiens; identical to SEQ ID NO: 221436

SEQ ID NO: 396688 - DNA, 1000 bp, Homo Sapiens; identical to SEQ ID NO: 286279

SEQ ID NO: 396689 - DNA, 1000 bp, Homo Sapiens
gggcgggcgggcgggcaccagctcggtcaggggctgcttggcgcggcactgtgcggtgcagcggcggcgcggcgcggtgcgggcttttcccaggcgccccggggtcgggtggccaacggcgcggccgcgggcgctgagcgcgaccggttcgcggtagcggtggcggcggcgtgcgtgccaggggctgggggctccgccgcctctcttgcggctcaccgagctccgcgcttccctctctccagggcaggcggcttctcagagcacaacagctccagctggcagcatcacttcccgccaatttatccaacttctgccaaggctctgaaatgccaacaacgtcgaggcctgcacttgatgtcaagggtggcacctcacctgcgaaggaggatgccaaccaagagatgagctccgtggcctactccaaccttgcggtgaaagatcgcaaagcagtggccattctgcactaccctggggtagcctcaaatggaaccaaggccagtggggctcccactagttcctcgggatctccaataggctctcctacaaccacccctcccactaaacccccatccttcaacctgcaccccgcccctcacttgctggctagtatgcagctgcagaaacttaatagccagtatcaggggatggctgctgccactccaggccaacccggggaggcaggacccctgcaaaactgggactttggggcccaggcgggaggggcagaatcactctctccttctgctggtgcccagagccctgctatcatcgattcggacccagtggatgaggaagtgctgatgtcgctggtggtggaactggggttggaccgagccaatgagcttccggagctgtggctggggcagaatgagtttgacttcactgcggactttccatctagctgctaatgccaagtgtccctaaagatggaggaataaagccaccaattctgttgtaaataaaaataaagttacttacaaaaaaaaaaaaaaaaaaaaaa

SEQ ID NO: 396690 - DNA, 1000 bp, Homo Sapiens; identical to SEQ ID NO: 221437

SEQ ID NO: 396691 - DNA, 570 bp, Homo Sapiens; identical to SEQ ID NO: 286281

SEQ ID NO: 396692 - DNA, 1000 bp, Homo Sapiens; identical to SEQ ID NO: 286282

SEQ ID NO: 396693 - DNA, 1000 bp, Homo Sapiens; identical to SEQ ID NO: 116142

SEQ ID NO: 396694 - DNA, 1000 bp, Homo Sapiens; identical to SEQ ID NO: 221438

SEQ ID NO: 396695 - DNA, 1000 bp, Homo Sapiens; identical to SEQ ID NO: 116143

SEQ ID NO: 396696 - DNA, 1000 bp, Homo Sapiens; identical to SEQ ID NO: 286285

SEQ ID NO: 396697 - DNA, 1000 bp, Homo Sapiens
tgctgccaagaggaaactcattcaggcaagttcagccctttatgaggaattcccctgtggtcacattccaattcctggacctgctgccaccctcagaactgcatgctccttcttcagactttctaagaatgactcaggtcattggtggagtgaagtcaagatttccaactcagtcacctgaagagatggagataccattcatggagctggaggtccctggagatttgggaattcagataacaagctaagataaggagtttgcctacctctgtcctagagcgaagcctgagccttgggcgcgcagcacaccacaagtatctgttactgtgttttgcagaagcttcaggcggggatataagccccacaaggaaagcgctgagcagaggaggcctcagcttgacctgcggcagtgcagcccttgggacttccctcgccttccacctcctgctcgtctgcttcacaagctatcgctatggtgttcgtgcgcaggccgtggcccgccttgaccacagtgcttctggccctgctcgtctgcctaggggcgctggtcgacgcctaccccatcaaacccgaggctccccgcgaagacgcctcgccggaggagctgaaccgctactacgcctccctgcgccactacctcaacctggtcacccggcagcggtatgggaaaagagacggcccggacacgcttctttccaaaacgttcttccccgacggcgaggaccgccccgtcaggtcgcggtcggagggcccagacctgtggtgaggacccctgaggcctcctgggagatctgccaaccacgcccacgtcatttgcatacgcactcccgaccccagaaacccggattctgcctcccgacggcggcgtctgggcagggttcgggtgcggccctccgcccgcgtctcggtgcccccgccccctgggctggagggctgtgtgtggtccttccctggtcccaaaataaagagcaaattccacagaaaaaaaaaaaaaaaaaaa

SEQ ID NO: 396698 - DNA, 1000 bp, Homo Sapiens; identical to SEQ ID NO: 116145

SEQ ID NO: 396699 - DNA, 1000 bp, Homo Sapiens; identical to SEQ ID NO: 116146

SEQ ID NO: 396700 - DNA, 1000 bp, Homo Sapiens; identical to SEQ ID NO: 221440

SEQ ID NO: 396701 - DNA, 1000 bp, Homo Sapiens
ggcgcgcatcttcggcggtgtggaggacgggcctgaagcagaggcagcagggcacacctatgatcgctccattgtagtggacggagaagaggcatcactcatggtctacgacatttgggagcaggacgggggccgctggttgcccggccactgcatggccatgggggatgcctatgtcattgtgtactcagtgacggacaagggcagcttcgagaaggcctcagaactgcgggtccagctgcggcgtgcacggcaaacagatgatgtgcccatcatcctcgtgggcaacaagagcgacctggtgcgctctcgtgaggtctcggtggatgagggccgggcctgcgcggtggtctttgactgcaagttcattgagacatcagcggcattgcaccacaatgtccaggcgctgtttgaaggtgtcgtgcgccagatacgcctgcgcagggacagcaaagaagccaacgcacgacggcaagcaggcacccggaggcgagagagccttggcaaaaaggcgaagcgcttcttgggccgcatcgtagctcgtaacagccgcaagatggcctttcgcgccaaatccaagtcctgccacgacctctcggttctctaggtcccacccgctcccactatggtgggagacgaacggaagggttggtgggctggcccagccaactgccccgggtgcctcagagcaggctcagactctgggtccctcggagctgccagccgggcacccccaacctcatggtcatggacagatagacagtgctgccctgcgaagtggctctcaggggccagtgagggctgggcccacagagatgcatgcgcaggctcatatgcgtcccaagcagccgcagcgcagccgccgggcaggcctgcgtgccgggagaggactctgccttttttcacagcccgggtgtgcctgccctggagggaggctcttcagtgcggtagctacttgtttacatgcagatttttgtaataaaggctatttcctgataaa

SEQ ID NO: 396702 - DNA, 1000 bp, Homo Sapiens; identical to SEQ ID NO: 221441

SEQ ID NO: 396703 - DNA, 1000 bp, Homo Sapiens; identical to SEQ ID NO: 286287

SEQ ID NO: 396704 - DNA, 1000 bp, Homo Sapiens; identical to SEQ ID NO: 221442

SEQ ID NO: 396705 - DNA, 1000 bp, Homo Sapiens
gaagtcttccccgcccagctccccaggcccagccagccctggccccctgaccaagcagcagagctccttctcagaccacctacagctggtgggcactgtacacgcctccgtccctgagccaggggagctgaagccagccctgaggccctacctgggcttcttggatgggtacagccctggagcagtggtgacttgggcgcttggcgttatgttggcctcagccatcaccataggctgcgtgcttgtctttgggaactcgaccctgcacctcccacactggggttacatcctgctgctcctgctcaccagtgtcatgtttctgctcagcctccttgtcctgggggctcaccagcaacagtatcgggaagacttatttcagatccccatggttcccctgattccagccctgagcatcgtcctcaacatctgcctcatgctgaaacttagctatctgacctgggtgcgcttctccatctggctgctgatgggacttgcagtgtatttcggctatggcatccggcatagcaaggagaaccagcgggagctgccagggctgaactccacacactacgtggtattccccaggggcagcctggaggagacagtgcaggctatgcagccccccagccaggcaccagcacaggaccctggccatatggagtagctgatcagcccacacttgccccgccctcccacacctgcttgggaggccagagaggccagacaagccgagagccccttctgttgtgggcagcctgggtttgcaggcctgcacaggctggggagtcctcaggaccttaggaccttcatccaggggctgggcttcgggtcttcaggagtgggccttggctggtgctggtgccatggactctgcccagagccttcttgtttatgatcagctccagctacctgggcagttgtggtggggtggatgggaaggcccacagcccaagggatccataataataattgcttggccagccatgtggcctgctggcgt

SEQ ID NO: 396706 - DNA, 1000 bp, Homo Sapiens; identical to SEQ ID NO: 116148

SEQ ID NO: 396707 - DNA, 1000 bp, Homo Sapiens
gcagcggaccgaagagaagaaaagtaggccagagccgaactctcttcctgccaagatgtctattggtgtgccgattaaagtactgcatgaggccgagggccacattgtgacatgtgagacgaacaccggtgaggtatatcgggggaagctcattgaagcagaggacaacatgaactgccagatgtccaacatcacagtcacatacagagatggccgagtggcacagctggagcaggtatacatccgtggcagcaaaatccgctttctgattttgcctgacatgctgaagaacgcacccatgttaaagagcatgaaaaataaaaaccaaggctcaggggctggccgaggaaaagctgctattctcaaggcccaagtggccgcaagaggaagaggacgtggaatgggacgtggaaacatctttcaaaagcgaagataattttctaagttgaacagaactttgtccttttttctttcaggttatctgagttcattggagtgggtgcttgtgcatatatgctaggtatcttttgccatctttctctttagatcaggggaaatgtttaagctaaataaatctggggggttttttgttctgttttgttttgttttctttgagaaaataaggactttgtgttcatttgaagtttgctttggctaaattttgacaccctgggggatgtcctgggagaatgccagtactttgaaatagcacagctattgatgagattttaagctgctgttcctggccagttgcaggttaagccccagaaaagttcaccttggagaagctccgagaacacacagattgtgtctcattcatcttcagacacaggcacatagtgtggcactttgttcagttaacatttgtggagctgtcatcagctcagctttaacaacacaggtgactctttcccttgataaagtcataggtaattcaggggctgggtgcggcggctcacgcatgtaatcccagcactttgggaggccaaggcgggcggat

SEQ ID NO: 396708 - DNA, 1000 bp, Homo Sapiens; identical to SEQ ID NO: 286290

SEQ ID NO: 396709 - DNA, 1000 bp, Homo Sapiens; identical to SEQ ID NO: 286291

SEQ ID NO: 396710 - DNA, 1000 bp, Homo Sapiens
tccaccttcaacatcagcctgaacaaagaggagatggagttccagcccaatcaggaggacgaggaggatgctcacgctggcatcattggccgcttcctaggcctgcagtcccatgatcaccatcctcccagggcaaactcaaggaccaaactactgtggcccaagagggaatcccttctccacgagggcctgcccaaaaaccacaaggcagccaaacagaacgttaggggccaggaagacaacaaggcctggaagcttaaggctgtggacgccttcaagtctgccccactgtatcagaggccaggctactacagtgccccacagacacccctcagccccactcccatgttcttccccctagaaccatcagcgccgtcaaagcttcacagtgtcacaggcatagacaccaaagacaaaagcttaaagactgtgagttctggggccaagaaaagttttgaattgctctcagagagcgatggggccttgatggagcacccagaagtatctcaagtgaggaggaaaactgtggagtttaacctgacggatatgccagagatccccgaaaatcacctcaaagaacctttggaacaatcaccaaccaacatacacactacactcaaagatcacatggatccttattgggccttggaaaacagggatgaagcacattcctaacctgcttcctaatggggatgcttcgccagccaggtcctcacctgtgtgtacaccagcaggacactgatccagtcacagccatacagctgtccacactgaagaacatgtcctacaacagcctgaatcaaatggttagcttaatagataaaaatcccagactacttcagcctttaatgccttttattcataaaaactgtgaaagctagactgaaccattggaaacatttaactcagactctggattcagagtcgggaacccttagttctatctgaatccaagacagccacaccttagtatactgcccaaactaatgagtttaataaa

SEQ ID NO: 396711 - DNA, 1000 bp, Homo Sapiens; identical to SEQ ID NO: 286292

SEQ ID NO: 396712 - DNA, 1000 bp, Homo Sapiens; identical to SEQ ID NO: 221443

SEQ ID NO: 396713 - DNA, 1000 bp, Homo Sapiens; identical to SEQ ID NO: 286294

SEQ ID NO: 396714 - DNA, 1000 bp, Homo Sapiens
gatgctggttatgatgtgtggctgggcaacagcagaggaaacacctgggccagaagaaacttgtactattcaccagattcagttgaattctgggctttcagctttgatgaaatggctaaatatgaccttccagccacaatcgacttcattgtaaagaaaactggacagaagcagctacactatgttggccattcccagggcaccaccattggttttattgccttttccaccaatcccagcctggctaaaagaatcaaaaccttctatgctctagctcctgttgccactgtgaagtatacaaaaagccttataaacaaacttagatttgttcctcaatccctcttcaagtttatatttggtgacaaaatattctacccacacaacttctttgatcaatttcttgctactgaagtgtgctcccgtgagatgctgaatctcctttgcagcaatgccttatttataatttgtggatttgacagtaagaactttaacacgagtcgcttggatgtgtatctatcacataatccagcaggaacttctgttcaaaacatgttccattggacccaggctgttaagtctgggaaattccaagcttatgactggggaagcccagttcagaataggatgcactatgatcagtcccaacctccctactacaatgtgacagccatgaatgtaccaattgcagtgtggaacggtggcaaggacctgttggctgacccccaagatgttggccttttgcttccaaaactccccaatcttatttaccacaaggagattcctttttacaatcacttggactttatctgggcaatggatgcccctcaagaagtttacaatgacattgtttctatgatatcagaagataaaaagtagttctggatttaaagaattatccgtttgtttttccaaaatactttattctctcatacatagtattttcataatgtttgacatgcagtgcttctttctgtaattttgactttagaaatatattggc

SEQ ID NO: 396715 - DNA, 1000 bp, Homo Sapiens; identical to SEQ ID NO: 116150

SEQ ID NO: 396716 - DNA, 1000 bp, Homo Sapiens; identical to SEQ ID NO: 221444

SEQ ID NO: 396717 - DNA, 1000 bp, Homo Sapiens
gcgctgccgcccatcgtgctgaggagccaggtgtacagccttgtgcctgacaggaccgtggccgaccggcagctgaaggagcttcaagagcagggggagatcagaatcgtccagctgggcttcgacttggatgcccatggaattatcttcactgaggactacaggaccagagtcctcaaggcctgtgatggccgaccgtatgctggggcagtgcagaaatttctagcttcagtacttccagcctgtggggaccttagtttccagcaggaccaaatgacacagacctttggcttcagggactcagaaatcacgcatctggtgaatgctggagtcctcaccgtccgagatgctgggagctggtggctagctgtgcctggagctgggagattcatcaagtactttgttaaagggcgccaggctgtccttagcatggtccggaaggcaaagtaccgggaactgctcctatcagagctcctgggccggcgggcgcctgtcgtggtgcggcttggcctcacctaccatgtgcacgacctcattggggcccagctagtggactgcatctctaccacttcaggaaccctcctccgcctgccagagacatgaagattctgctcatcattgctcagctcctcagagtgggccgggaggggactagaagagctgcatgatggtggctgagacagggtcaccttgggaaggcttgggagccaggatgagtgtcgggctctcgtgtgtgcaaaaggtcagatgtgactgctgctgtttgcctggtttctgacccagtggtggggtttgagcaatgcttctctgcccttccatggaaagtggaaccagaaatggtgccaaggctgtggctgttccctttcgtgtaaaatggtgctgttattactctgtcttgaaataggaaggtgggatttctggggaggctggtgaaggagggcagggttcttttctctacgtgtcatgttaaaattgccaaataaagtacctctgcctgtga

SEQ ID NO: 396718 - DNA, 1000 bp, Homo Sapiens
ctgccccaggtcctgctgatgaggtggcctctggacaagacaaggggcacaggctctgatgcagtgcccagaggccttgccaggaggcctgccaaaggcaagcttgcaagccatggggaacccagacatcttaaagaatgcttccattgtcacaaatcaaatgagcttgccacaagcaagagaagattaagtcatcagccattacagtgggtggtggaaaattcggagcactcgcctgaagttgaagatgtgattaacagtgttcagttcatagcagaaaacatgaagagccacaatgaaaccaaggaggtagaagatgactggaaatacgtggccatggtggtggacagagtatttctttgggtatttataattgtctgtgtatttggaactgcagggctatttctacagccactacttgggaacacaggaaaatcttaaaatgtattttcttttatgttcagaaatttacagacaccatatttgttctgcattccctgccacaaggaaaggaaagcaaaggcttcccacccaagtcccccatctgctaaaactgatggctacatggaaaaagaggactttcttgcacattaggaagcagaatatcctccagtgtagcacagggggagaagtgagaagtgttatgacattagtgccctgattgggcagcacccacggctacagtatcaggtcaggtttctcgtgtctgtgtgtttggcttctaaagacaagaatgacttacaatacagcctaattatgtaattaacatcaagccacactaaaaagttctgctgtacctccagtggatgctgtttctcagtattatgacatgtgacaggtgaactctgggaattggaccatgcaacatttgtgaactgtttgcaacactttgtgaactattgcatccttgatttcttgtgcatgtctctgtaatgtaactcaccctcctcagcattatttgatacactgattgttagttttaaaaaaaaaaaaaaaaaaa

SEQ ID NO: 396719 - DNA, 1000 bp, Homo Sapiens; identical to SEQ ID NO: 116151

SEQ ID NO: 396720 - DNA, 1000 bp, Homo Sapiens; identical to SEQ ID NO: 286298

SEQ ID NO: 396721 - DNA, 1000 bp, Homo Sapiens
gagacccggacaggtggctgtttctcacgctcactttggattgctccctacggcttcctccgcagccatgtctgacaaacctggtatggctgagatcgagaaattcgataagtcgaaactgaagaagacagaaacgcaagagaagaatccattgtcttccaaagaaactatcgaacaggagaggcaagcaggcgaatcttaaacaggcatgtgccaccaatatctactgtacattctacaagcattgctttcttattttacttcttttacttgtttaacttggttagatgcaaacacgttggatgagtttgaaaggactatgctgcccttttgacatcaaagacctgctgacaatggaggccacgcctgcttctcccatcgcctgtctggctggcagggaaggaaaatagcttgaatgttggtgaaagacttagcggagtgggagggcagtgaaatctagagtaaaaccaagttgggccaagtgtcctgcagaatctaaaatgaagtttaatcagcgtgccatttttgttgttgtttgaaagattttaatttttggaatgcacagtttttatttaaaaaagacatttttaaaccactgcttgtgagattgcttgttgattggaaagagtgttttattcaccatttaaacgtttgcaaagtggcgtgccccttggcctcacaggcaaagaataacttaaaagctgacgatttgaataaattatgttacagtatgaaatatgttttacctggatatgtaaaataccttctttattctagctaattgggagatgattttttttggctaattgagattacctttagattatgttttcaaaactggcttatactgtaatctacaactaataagcactaatttagagttcagctatattgttgcatgtagtgagaagggacttaattacaaacttaagacgtaagtgtgcaataaagtaagctaagaagaaaaaaaaaaaaaaaaaaaaaaaaaaaaaaaaaaaaa

SEQ ID NO: 396722 - DNA, 1000 bp, Homo Sapiens; identical to SEQ ID NO: 221446

SEQ ID NO: 396723 - DNA, 1000 bp, Homo Sapiens; identical to SEQ ID NO: 116152

SEQ ID NO: 396724 - DNA, 1000 bp, Homo Sapiens
aagctcatacccagccctaccaatcatgaattggaactccataaggaggggccaaattgggaggccttttggcaaacagtgtctattttacagagaggcaaaccaagcctccttagtgccctggggctgatggtcacccagagccatagagcacccttcctcctgggccagagctgggttatcatggttggcttaggtacctcaggtggcccaggaggtcccccctccataaggacgtcaaacttctaggagggccagtgttcctagtgtgggccaggaacaggacagggagaccttgtgatggcggggcagggagcctgttcgtagggaagatgaggaggcaagggctgcctctaacacctccaggttctctaagttctggggagggagcgccccacctgctgaggtcggtcctctcagccctgcctgccctggcctgggctctcccagcctcccagccctctgccccctcagatggctttttgtttttgtttttttttgcatccatcagagactgcacctctgtgtggcaggcagggcatgggttttagtcctggccactgaccagctgtgtggccctggccgagtcgtagccccctggagcccagcttccatttctataaaatggttgtttcgggagagaggggcaggctttctgtgtgactcgggagttcttccgtgagggctgccagggggtggtgtgccaggacctcaggctgggcctttgtgctggccttgcagtgggtgtgtggggaagtcactgtcccactatgggtctccactacccagtcactgaccctgggagaccccttctgtgtgggagggagcgggggctggctagcgggccccccagccagggatcccagaggctgagggttggggggaggaagccatcatctcattacctctgtcagtgcaggggtggctgctgcttcccttgtgcacttgggtcgctgtgattgtgaataaaagtgatttcgtaccaaaaaaaaaaaaaaaa

SEQ ID NO: 396725 - DNA, 1000 bp, Homo Sapiens
aggcctgatcactctctcttcttacaacaaattccacaacaactgctacagggacactctaattgtcacctgcaccaacagtgccacaagcatctttgccggcttcgtcatcttctccgttatcggcttcatggccaatgaacgcaaagtcaacattgagaatgtggcagaccaagggccaggcattgcatttgtggtttacccggaagccttaaccaggctgcctctctctccgttctgggccatcatctttttcctgatgctcctcactcttggacttgacactatgtttgccaccatcgagaccatagtgacctccatctcagacgagtttcccaagtacctacgcacacacaagccagtgtttactctgggctgctgcatttgtttcttcatcatgggttttccaatgatcactcagggtggaatttacatgtttcagcttgtggacacctatgctgcctcctatgcccttgtcatcattgccatttttgagctcgtggggatctcttatgtgtatggcttgcaaagattctgtgaagatatagagatgatgattggattccagcctaacatcttctggaaagtctgctgggcatttgtaaccccaaccattttaacctttatcctttgcttcagcttttaccagtgggagcccatgacctatggctcttaccgctatcctaactggtccatggtgctcggatggctaatgctcgcctgttccgtcatctggatcccaattatgtttgtgataaaaatgcatctggcccctggaagatttattgagaggctgaagttggtgtgctcgccacagccggactggggcccattcttagctcaacaccgcggggagcgttacaagaacatgatcgaccccttgggaacctcttccttgggactcaaactgccagtgaaggatttggaactgggcactcagtgctagtccagtggtgtgggatggtccagacttgatcctgtttttcctctctgccccgga

SEQ ID NO: 396726 - DNA, 1000 bp, Homo Sapiens; identical to SEQ ID NO: 221448

SEQ ID NO: 396727 - DNA, 1000 bp, Homo Sapiens; identical to SEQ ID NO: 221449

SEQ ID NO: 396728 - DNA, 1000 bp, Homo Sapiens
ggtgatggagaatagcagtgggacacccgacatcttaacgcggcacttcacaattgatgactttgagattgggcgtcctctgggcaaaggcaagtttggaaacgtgtacttggctcgggagaagaaaagccatttcatcgtggcgctcaaggtcctcttcaagtcccagatagagaaggagggcgtggagcatcagctgcgcagagagatcgaaatccaggcccacctgcaccatcccaacatcctgcgtctctacaactatttttatgaccggaggaggatctacttgattctagagtatgccccccgcggggagctctacaaggagctgcagaagagctgcacatttgacgagcagcgaacagccacgatcatggaggagttggcagatgctctaatgtactgccatgggaagaaggtgattcacagagacataaagccagaaaatctgctcttagggctcaagggagagctgaagattgctgacttcggctggtctgtgcatgcgccctccctgaggaggaagacaatgtgtggcaccctggactacctgcccccagagatgattgaggggcgcatgcacaatgagaaggtggatctgtggtgcattggagtgctttgctatgagctgctggtggggaacccaccctttgagagtgcatcacacaacgagacctatcgccgcatcgtcaaggtggacctaaagttccccgcttctgtgcccacgggagcccaggacctcatctccaaactgctcaggcataacccctcggaacggctgcccctggcccaggtctcagcccacccttgggtccgggccaactctcggagggtgctgcctccctctgcccttcaatctgtcgcctgatggtccctgtcattcactcgggtgcgtgtgtttgtatgtctgtgtatgtataggggaaagaagggatccctaactgttcccttatctgttttctacctcctcctttgtttaataaaggctgaagctttttgt

SEQ ID NO: 396729 - DNA, 1000 bp, Homo Sapiens
gctgtgatctacgggctcctcaatgagaatttccgaagagaatactggaccatcttccatgctatgcggcaccctatcatattcttccctggcctcatcagtgatattcgtgagatgcaggaggcccgtaccctggcccgcgcccgtgcccatgctcgcgaccaagctcgtgaacaagaccgtgcccatgcctgtcctgctgtggaggaaaccccgatgaatgtccggaatgttccattacctggtgatgctgcagctggccaccccgaccgtgcctctggccaccctaagccccattccagatcctcctctgcctatcgcaaatctgcctctacccaccacaagtctgtctttagccactccaaggctgcctctggtcacctcaagcctgtctctggccactccaagcctgcctctggtcaccccaagtctgccactgtctaccctaagcctgcctctgtccatttcaagggtgactctgtccatttcaagggtgactctgtccatttcaagcctgactctgttcatttcaagcctgcttccagcaaccccaagcccatcactggccaccatgtctctgctggcagccactccaagtctgccttcagtgctgccaccagccaccctaaacccatcaagccagctaccagccatgctgagcccaccactgctgactatcccaagcctgccactaccagccaccctaagcccgctgctgctgacaaccctgagctctctgcctcccattgccccgagatccctgccattgcccaccctgtgtctgacgacagtgacctccctgagtcggcctctagccctgccgctgggcccaccaagcctgctgccagccagctggagtctgacaccatcgctgaccttcctgaccctactgtagtcactaccagtaccaatgattaccatgatgtcgtggttgttgatgttgaagatgatcctgatgaaatggctgtgtgaaaaatgctctcgtaggtggccaggcagt

SEQ ID NO: 396730 - DNA, 1000 bp, Homo Sapiens
ggctctcaaggagcacgtcttccacaacctcacccgcctcatcgacatcctcaatgtcttcttccagagggatccctctttgctgctgcataagctgctcctagggaccagtggagagggcaaggcggagggggaaagctccccgcccatggcgcggtccacccccagccaggaactgctccgggccacccagctccatcagtatgtggagggctttctgttgcatgggctcttgccagctcatgtcattcggttgctgcttaagcctcatgtccaggcccagcaggacttgcagctgttgctggagctgctggagaagatgggactctgttactgcctcaataaacccaagggcaagcctttgaatgggtccacagcttggtacaagttcccatgctatgtgcagaacgaggtgccccatgcagaagcctggattaatgggaccaacctagctgggcagtcttttgtggctgagcagttgcagattgaatatagctttccttttacttttccacctgggttgtttgcacgctacagtgtccagatcaacagccatgtggtgcacaggtcggatggtaaatttcagatctttgcctatagagggaaagttcctgtggttgtgagttacagacctgccaggggagtcctgcagccagacaccctgtccattgctagccatgcatcattaccaaatatatggaccgcatggcaagccataacccccttggtggaggaactgaatgtcctacttcaggaatggcctggactgcactacaccgtgcacattctctgttctaagtgccttaagagaggatcgcccaatccacatgcttttccaggggagttgctgagtcagcccagaccggaaggagtggcagagatcatttgccccaagaacggcagcgagcgagtaaatgttgccttggtttacccacccacgccgactgtgatcagcccctgttccaagaagaatgttggtgaaaagcacagaaaccagtga

SEQ ID NO: 396731 - DNA, 1000 bp, Homo Sapiens; identical to SEQ ID NO: 286307

SEQ ID NO: 396732 - DNA, 1000 bp, Homo Sapiens; identical to SEQ ID NO: 221451

SEQ ID NO: 396733 - DNA, 691 bp, Homo Sapiens
ggcggaggcggggtttcagtggcttctggtgctctagggtgagctctgcccggctgcagggatggcggggaggggtaagctcatcgcagtgatcggagacgaggacacggtgactggtttcctgctgggcggcataggggagcttaacaagaaccgccatcccaatttcctggtggtggagaaggatacaaccatcaatgagatcgaagacactttccggcaatttctaaaccgggatgacattggcatcatcctcatcaaccagtacatcgcagagatggtgcggcatgccctggacgcccaccagcagtccatccccgctgtcctggagatcccctccaaggagcacccatatgacgccgccaaggactccatcctgcgcagggccaggggcatgttcactgccgaagacctgcgctaggggactcctcatagccctcagcccttccctcgtttccaggcctctccccaggcttgccatcagccttctttactttttgagcctctgatttccaattccctgctccttcccactccattaagaggctaggtgaggcgcttctaggttgctggggctctgctggttaaggaacaggaagcctgaccatctccctccactacctcttccctgtgctgttacacagtgtcattgttgatgttaaattaaagtcatattcttgcttctctccag

SEQ ID NO: 396734 - DNA, 1000 bp, Homo Sapiens; identical to SEQ ID NO: 221452

SEQ ID NO: 396735 - DNA, 1000 bp, Homo Sapiens; identical to SEQ ID NO: 286311

SEQ ID NO: 396736 - DNA, 1000 bp, Homo Sapiens; identical to SEQ ID NO: 286312

SEQ ID NO: 396737 - DNA, 1000 bp, Homo Sapiens
gtttgaagagagaaagaagcttgcagcttacatctgatcctgggcttccccatctggtgcttttcccatggagaacacacaaccagtaagtgaggttgccccacacagccgtctcccagggaatcccttctgcaaaccaaacgttacttagactgcaagctagaaagccaccaaggccaggctttgttaaaagaagtgtattctatttatgttgttttaaaatgcatactgagagacaaacatcttgtcattttcactgtttgtaaaagataattcagattgtttgtctccttgtgaagaaccatcgaaacctgtttgttcccagcccacccccagtggatgggatgcataatgccagcaagttttgtttaacagcaaaaaaggaagattaatgcaggtgttatagaagccagaagagaaactgtgtcaccctaaagaagcatataatcatagcattaaaaatgcacacattactccaggtggaaggtggcaattgctttctgatatcagctcgtttgatttagtgcaaaaatgttttcaagactatttaatggatgtaaaaaagcctatttctacattataccaactgagaaaaaaatggtcggtaaagtgttctttcataataaataatcagacatggtcccatttgcaggaaaagtgcagactctgagtgttccagggaaacacatgctggacatcccttgtaacccggtatgggcgcccctgcattgctgggatgtttctgcccacggttttgtttgtgcaataacgttatcacatttctaatgaggattcacattaatataatataaaataaataggtcagttactggtctctttctccgaatgttatgttttgcttttatctcacagtaaaataaatataattaatggtttgcatgtgaaattcacttttgaaagaacatgttaccttaccttttgttttagaagttttcaagtattaaaatattttttagaaaaaaaaaaaaaaaaaaaaaaa

SEQ ID NO: 396738 - DNA, 1000 bp, Homo Sapiens; identical to SEQ ID NO: 286313

SEQ ID NO: 396739 - DNA, 1000 bp, Homo Sapiens; identical to SEQ ID NO: 286314

SEQ ID NO: 396740 - DNA, 1000 bp, Homo Sapiens; identical to SEQ ID NO: 116155

SEQ ID NO: 396741 - DNA, 1000 bp, Homo Sapiens
caaggtttccagtggggaaccagggagggccccctctgtgatgaattgattcggaatgtcaagtttaagatcctggatgcggtggttgcccaggagcccctgcaccggggcgggggccagatcatccccacagccaggagagtcgtctactctgccttcctcatggctactcctcgtctgatggagccttactactttgtagaggtccaggcccctgcagattgcgtctctgcagtttataccgtcctggccaggcgcagggggcacgtgactcaggatgcacccatcccaggctcccctctgtacaccatcaaagcttttatcccggccatcgactcttttggctttgagactgatctccggactcacacccagggacaagccttttctctgtctgtcttccaccactggcagattgtgcctggtgatcccctggacaagagcattgtcatccgccccttggagccacagccagctcctcacctggcccgggaattcatgatcaaaacccgccgtaggaagggcctcagtgaagatgtgagcatcagcaaattcttcgatgatcctatgttgctggaacttgccaaacaggatgttgtgctcaattaccccatgtgagtgcgtggactcctgggagctcctgctccctacagtgggctgcaactcctgtacttgaagctgagacctcatatgacgtggccttcgtgttgtcagagagtgtctggaagctgctgttgccatcttgaacaactcaccaacctccaacccagagccccagtgagagaggagcatttggcctcctgcttccttctgtggcctctgccgggctccattcccaaggaaaagagaggagcttgggctcacagaaagagaaggggatgaaaccccaaggggccctatctttgggatttacatggaattttattttctacaagtttgaccttagccatggtttgcaagtgaacagaacattctgacctcaaaaaaaaaaaaaaaaaaa

SEQ ID NO: 396742 - DNA, 1000 bp, Homo Sapiens; identical to SEQ ID NO: 221455

SEQ ID NO: 396743 - DNA, 1000 bp, Homo Sapiens; identical to SEQ ID NO: 286317

SEQ ID NO: 396744 - DNA, 1000 bp, Homo Sapiens
catggccagggcctgaaagacaccctccaggacctggagctggggcctcacccacggtcccccaaatcagtgccctcagagaaggaaacagaggccaagggaagaacttccagcccgggagtggcctttgtgagcagcacatacttctgattgaggtctctaagagctggaccatcagcagcagggagctgcctaaacacctccttggatatggccaggacccacagggacacagggcaagaccagccttgcttatggaggcaggacaccacaatctggcccatggctgtcacctcctgccgagtccaatcccagactgggaaccaccatctgagacaggacctcccggcctccttcacctttctcatctccagagccctgcccccaatactctgtctgggttaggatcttgggtatgtcttggaattaacttgtcctctaacaatcttcatggggtatggctctcttgatctcctcaatctggagtcccctgccctcaaaacacagtgatgttcagaacagaacacaaggtaagccctttccaatttgtgggaacaggaggggagaggaaacaaatgtgaagttgtggactctacccaggcaggtggatgaaaatgctgtggataaaaggaaggttatgattccttctagcggatggaccagattcctctggctaacgtatggccccataggtcactgggtcatacagagagaagattcagttcagcctaaatcaaaacttccaccttgtgttcacttcaaagatggcccaacccccgccctacactcagctcatgcctaacctatgtgtggctcagggaccagcttggggaaggaaaggaggtttgttctgctccccgcctcaccccgcctcctcctgctcatgctcagctgcttctggaccttccagggcccatgcagggtgagggaaagggtagaggtcttttcaccgagctgctgctggttgcagttctttctggtgcacattggctaatgccag

SEQ ID NO: 396745 - DNA, 1000 bp, Homo Sapiens; identical to SEQ ID NO: 286318

SEQ ID NO: 396746 - DNA, 1000 bp, Homo Sapiens; identical to SEQ ID NO: 286319

SEQ ID NO: 396747 - DNA, 1000 bp, Homo Sapiens; identical to SEQ ID NO: 221457

SEQ ID NO: 396748 - DNA, 1000 bp, Homo Sapiens
aaatgaaatattacagcacctagaaaataatttagttttgcttgcttccattgatcagtcttttacttgaggcattaaatatctaattaaatcgtgaaatggcagtatagtccatgatatctaaggagttggcaagcttaacaaaacccattttttataaatgtccatcctcctgcatttgttgataccactaacaaaatgctttgtaacagacttgcggttaattatgcaaatgatagtttgtgataattggtccagttttacgaacaacagatttctaaattagagaggttaacaagacagatgattactatgcctcatgtgctgtgtgctctttgaaaggaatgacagcagactacaaagcaaataagatatactgagcctcaacagattgcctgctcctcagagtctctcctatttttgtattacccagctttctttttaatacaaatgttatttatagtttacaatgaatgcactgcataaaaactttgtagcttcattattgtaaaacatattcaagatcctacagtaagagtgaaacattcacaaagatttgcgttaatgaagactacacagaaaacctttctagggatttgtgtggatcagatacatacttggcaaatttttgagttttacattcttacagaaaagtccatttaaaagtgatcatttgtaagaccaaaatataaataaaaagtttcaaaaatctatctgaatttggaattcttctggtttgttctttcatgtttaaaaatgatgtttttcaatgcatttttttcatgtaagccctttttttagccaaaatgtaaaaatggctgtaatatttaaaacttataacatcttattgttggtaatagtgctttatatttgtctgattttatttttcaaagttttttcatttatgaacacattttcattggtatattatttaaggaatatctcttgatatagaatttttatattaaaaatgatttttctttgcttaaaaaaaaaaaaa

SEQ ID NO: 396749 - DNA, 1000 bp, Homo Sapiens; identical to SEQ ID NO: 286321

SEQ ID NO: 396750 - DNA, 1000 bp, Homo Sapiens; identical to SEQ ID NO: 116157

SEQ ID NO: 396751 - DNA, 1000 bp, Homo Sapiens; identical to SEQ ID NO: 286326

SEQ ID NO: 396752 - DNA, 1000 bp, Homo Sapiens; identical to SEQ ID NO: 116160

SEQ ID NO: 396753 - DNA, 1000 bp, Homo Sapiens; identical to SEQ ID NO: 286328

SEQ ID NO: 396754 - DNA, 1000 bp, Homo Sapiens
aggaactttgtttccttctgtcttattcagccattcccagtatgttttcttacccataagatcaaagcagactcatcagctccatatctgcattccactggggaaagagagagagaaaagagcagattttaaaaaaaagatatgactgagcattgctcagatcactgtggccacactttgctgaaagagatgctgggacatagaacctcttatctgggcagtcatgtgctgagttaaaactcagggattctgtgactacaagatgaaagacaatttggttgctgagatgcagttaatggcttctgttacatggagctcaatggacgtgcccaggaatgcttttggctgttattttgcagttaatacctcctgtaactaaagcatttgtttatgagttgacttgagagaagggctgatctcagagccgctttgagctaagttggattagtcacactaggaagttaattccacacctttcgtctaagtctcagtattgaggcctctccagttctcatgcaccctgatcttagggttagaatacttgaccctgatacctgcaccatgcttcatggttcctgagctctttctcctgtttcatttgagcctccaaactacatatttggtcatattgcctgcctaccccatgcctgctgcagaaatattcatccaggttaaccttgatatacacagagatggtcttggagaattgtgaatgtatgtactgtattgtcatcaaggatactgtcccttatttgaaggcatctaaagagaaactgttttcagatccaagtgctcagatctaaagcctctgcaacaagtcaggtggtggtcatgtttcccttctagttttggctgacaggaagctcagttcagtaccataactacagaacctgtcatctgtattttttgttctcaccccgtttttgttattttgtttctggttttttatattgaggtatgttttagatatagtttacaaaaataaaacgcacagatctta

SEQ ID NO: 396755 - DNA, 1000 bp, Homo Sapiens; identical to SEQ ID NO: 221459

SEQ ID NO: 396756 - DNA, 1000 bp, Homo Sapiens
aaagccggaccctgctggtcatagcgcaccctgacgatgaagccatgttttttgctcccacagtgctaggcttggcccgcctaaggcactgggtgtacctgctttgcttctctgcaggaaattactacaatcaaggagagactcgtaagaaagaacttttgcagagctgtgatgttttggggattccactctccagtgtaatgattattgacaacagggatttcccagatgacccaggcatgcagtgggacacagagcacgtggccagagtcctccttcagcacatagaagtgaatggcatcaatctggtggtgactttcgatgcagggggagtaagtggccacagcaatcacattgctctgtatgcagctgtgagggccctgcactcagaagggaagttacctaaagggtgctctgtgctcacgcttcagtctgtgaatgtgctgcgcaagtacatctcccttctggatctgcccttgtctctgcttcatacgcaggatgtcctcttcgtgctcaacagcaaagaagtggcacaggccaagaaagccatgtcctgccaccgcagccagctcctctggttccgccgcctctacattatcttctcccggtacatgagaatcaactcactgagcttcctctgaagccttgaagggttttcagatccaaggaacaaaggggaaaatagacaaaggagtgcagaggacctggcctggcactggcttatttacctgagctcaaggagatccccgctggagcagcctctgcaaaagggagcccatgtaggccaggggctgtccaaactccagcttcttcccctgggaaaaaacccaaagaaccaaaaacaaaccaccccaaggataataatagctacactgctagcttctcaagttcttgtgaaaaacaatttacataatgacacagtagatgtggaacacctagcccagtgcctgggcaggtccctattatcataaatgaacataaaagtgctctaaaaacactc

SEQ ID NO: 396757 - DNA, 1000 bp, Homo Sapiens; identical to SEQ ID NO: 116162

SEQ ID NO: 396758 - DNA, 1000 bp, Homo Sapiens
gtcatttaatgtcgctctacagtgcatgttcatctgaggtgccacatgggccagttgatcagaagtttcaatccatagtaattggctgtgctcttgaagatcagaagaaaattaagagaagattagagactctgcttagaaatattgaaaactctgacaaggccatcaagctattagagcattctaaaggagctggttccaaaactctgcaacaaaatgctgaaagcagattcaattagtcttcaaacctaagagcatttacacaatacacaaggtgtaaaaatgataaaatactattttaattgataactagttctttgttaggtataaccacttagttgacactgatagttgtttcagatgaggaaaatattccatcaagtatcttcagttttgtgaataacaaaactagcaatattttaattatctatctagagattttttagattgaattcttgtcttgtactaggatctagcatatttcactattctgtggatgaatacatagtttgtggggaaaacaaacgttcagctaggggcaaaaagcatgactgctttttcctgtctggcatggaatcacgcagtcaccttgggcatttagtttactagaaattctttactgaagcagcacacacatttactacacacacagtgttaacaaagcactgtgcttagagggtaaaaaggaatcacaaaacaagaatctttccaaagttgtctcattcagcaatgttaaggcatctgtatcaaattattttggatgtaaagattcctgtgtctcataatatgaatgtattttttgatatacaagaaactgacataaaatgtgagaaaaccacctataatttaccactgtgaacaattatatatctatctgcttcatcttttctcaaatgcatcaattctctaaaattcctatattgtaacttgcctttttttaaaaaagttagatgctgatataaagtctgcttaattgtcaacttaaaaaaaaaaaaaaaaa

SEQ ID NO: 396759 - DNA, 1000 bp, Homo Sapiens; identical to SEQ ID NO: 286331

SEQ ID NO: 396760 - DNA, 1000 bp, Homo Sapiens; identical to SEQ ID NO: 221460

SEQ ID NO: 396761 - DNA, 1000 bp, Homo Sapiens; identical to SEQ ID NO: 116163

SEQ ID NO: 396762 - DNA, 1000 bp, Homo Sapiens; identical to SEQ ID NO: 286333

SEQ ID NO: 396763 - DNA, 1000 bp, Homo Sapiens; identical to SEQ ID NO: 116164

SEQ ID NO: 396764 - DNA, 1000 bp, Homo Sapiens; identical to SEQ ID NO: 221462

SEQ ID NO: 396765 - DNA, 1000 bp, Homo Sapiens; identical to SEQ ID NO: 221463

SEQ ID NO: 396766 - DNA, 1000 bp, Homo Sapiens; identical to SEQ ID NO: 116165

SEQ ID NO: 396767 - DNA, 1000 bp, Homo Sapiens; identical to SEQ ID NO: 286337

SEQ ID NO: 396768 - DNA, 1000 bp, Homo Sapiens; identical to SEQ ID NO: 116166

SEQ ID NO: 396769 - DNA, 1000 bp, Homo Sapiens; identical to SEQ ID NO: 221464

SEQ ID NO: 396770 - DNA, 1000 bp, Homo Sapiens; identical to SEQ ID NO: 221465

SEQ ID NO: 396771 - DNA, 1000 bp, Homo Sapiens; identical to SEQ ID NO: 286339

SEQ ID NO: 396772 - DNA, 1000 bp, Homo Sapiens; identical to SEQ ID NO: 221466

SEQ ID NO: 396773 - DNA, 1000 bp, Homo Sapiens; identical to SEQ ID NO: 286341

SEQ ID NO: 396774 - DNA, 1000 bp, Homo Sapiens; identical to SEQ ID NO: 286342

SEQ ID NO: 396775 - DNA, 1000 bp, Homo Sapiens; identical to SEQ ID NO: 116167

SEQ ID NO: 396776 - DNA, 1000 bp, Homo Sapiens; identical to SEQ ID NO: 116168

SEQ ID NO: 396777 - DNA, 1000 bp, Homo Sapiens
ccgtcagaggtcctgaggacacagacctacctggcttgcattccccttgctgaatggcgtgtgctgcagctgcccactgagggctcttttccctgggattctggacttcagagtaggacagcaggctgggaagatgctgagttccatcaagtgcgtgttggtgggcgactctgctgtggggaaaacctctctgttggtgcgcttcacctccgagaccttcccggaggcctacaagcccacagtgtacgagaacacaggggtggacgtcttcatggatggcatccagatcagcctgggcctctgggacacagccggcaatgacgccttcagaagcatccggcccctgtcctaccagcaggcagacgtggtgctgatgtgctactctgtggccaaccataactcattcctgaacttgaagaacaagtggattggtgaaattaggagcaacttgccctgtacccctgtgctggtggtggccacccagactgaccagcgggagatggggccccacagggcctcctgcgtcaatgccatggaagggaagaaactggcccaggatgtcagagccaagggctacctggagtgctcagcccttagcaatcggggagtacagcaggtgtttgagtgcgccgtccgaactgccgtcaaccaggccaggagacgaaacagaaggaggctcttctccatcaatgagtgcaagatcttctaaaccccaagagacttcacacaacacttatgtatgcaccccaaagactaatggggagagggagggccgggaagccaggaaagcttggtgttttctctgggtacaccccaagcagcgtctccttttggatacagttattgatgaggcttggccactggatgttttcactaactacactctacaagtgaactccttgcccaggccagttagaaaatcccttggggaactgtgatgaatattccatctttgattaaaaaagtgaaatagtctccataaaaaaaaaaaaaaaaaaaa

SEQ ID NO: 396778 - DNA, 1000 bp, Homo Sapiens; identical to SEQ ID NO: 116169

SEQ ID NO: 396779 - DNA, 1000 bp, Homo Sapiens; identical to SEQ ID NO: 286345

SEQ ID NO: 396780 - DNA, 1000 bp, Homo Sapiens
accttggcgtgggatacctcttgataggagataatgacaatgcaaagaaagtttatgaagaggtgctgagtgtgacacctaatgatggctttgctaaagtccattatggcttcatcctgaaggcacagaacaaaattgctgagagcatcccatatttaaaggaaggaatagaatccggagatcctggcactgatgatgggagattttatttccacctgggggatgccatgcagagggttgggaacaaagaggcatataagtggtatgagcttgggcacaagagaggacactttgcatctgtctggcaacgctcactctacaatgtgaatggactgaaagcacagccttggtggaccccaaaagaaacgggctacacagagttagtaaagtctttagaaagaaactggaagttaatccgagatgaaggccttgcagtgatggataaagccaaaggtctcttcctgcctgaggatgaaaacctgagggaaaaaggggactggagccagttcacgctgtggcagcaaggaagaagaaatgaaaatgcctgcaaaggagctcctaaaacctgtaccttactagaaaagttccccgagacaacaggatgcagaagaggacagatcaaatattccatcatgcaccccgggactcacgtgtggccgcacacagggcccacaaactgcaggctccgaatgcacctgggcttggtgattcccaaggaaggctgcaagattcgatgtgccaacgagaccaagacctgggaggaaggcaaggtgctcatctttgatgactcctttgagcacgaggtatggcaggatgcctcatctttccggctgatattcatcgtggatgtgtggcatccggaactgacaccacagcagagacgcagccttccagcaatttagcatgaattcatgcaagcttgggaaactctggagagaggctgcctttctggttccatctccttgggtgtgaggatagaatttcgaacaccaagagtcaa

SEQ ID NO: 396781 - DNA, 1000 bp, Homo Sapiens
ttctattcatatctgtgcagaacacggtgttttaagcttgagtgaaaggagggtgaggctgccgatgccttcctgcccagaagtggatgatgtgggagttgacaggccagggagagggtgaagcaggtatcagagtcactcctctgtaccctctccttctgtttttattttaggcacactatcttcctctctcctatctttccctcaatctcccaagttcctctaccttctttatctttgtcttttacttcttctttctgtgaccctccttttttggcctcctctttccccaagactttcttcctcctgtttctcgttgagttctccccactgaatgtgtgtatgtatgtacacacacacacacgtgtgcacacacaatgcacacaactcctatgactggctcctacttacattcaagttaaaaaggctgatatgaacagggcaggggaaaatcttaggatggttgtacaattgactggaggattttttccccttggaagacactattgatctcaacctgctgacttttcctaatgcttacctgaaggaacccatcctggctagaaagggtgatggtactggaccggtattcaaccttgagttttcaagctgccaaacaggtcttaagggaggtgcttatatcccaccaacactctcccagctcccatgtccccaagacctctggagtttcctcttgaatgtacatgaaccactgtaatagcattagacttttaattgagtgtgcaatcgttttccatggagtttggtccgttcattattttttagttaactacacttcttgatattcaaatgttctattaaaaaaactgagtatgaagaaaaacactttactactgcagaaggaagaaagaatataatatgaccatcttcaggtataacagtgttgtttaaaagagaattattgtatgattataaaagatgaaataattaactgaataataaaacaaagctattagtaagcaaaaaaaaaaaaaaaaaa

SEQ ID NO: 396782 - DNA, 1000 bp, Homo Sapiens
acttggtgaccgacgggctcccagccacagccctgggcttcaacccaccagacctggacatcatggaccgccccccccggagccccaaggagcccctcatcagtggctggctcttcttccgctacatggcaatcgggggctatgtgggtgcagccaccgtgggagcagctgcctggtggttcctgtacgctgaggatgggcctcatgtcaactacagccagctgactcacttcatgcagtgcaccgaggacaacacccactttgagggcatagactgtgaggtcttcgaggcccccgagcccatgaccatggccctgtccgtgctggtgaccatcgagatgtgcaatgcactgaacagcctgtccgagaaccagtccctgctgcggatgccaccctgggtgaacatctggctgctgggctccatctgcctctccatgtccctgcacttcctcatcctctatgttgaccccctgccgatgatcttcaagctccgggccctggacctcacccagtggctcatggtcctcaagatctcactgccagtcattgggctcgacgaaatcctcaagttcgttgctcggaactacctagagggataactgttccccctcctccatctctgagcccgtgtcacagatccagaagatgaaagaaggaagtgagcatccttttgctctgtcctccccaccccgatagtgacacatcttcaggcagagctgtggcacagacccccgtcctgtcccccacacccgtgtcatgtgtctgtttataaacatgtccccttccctttccttccccctcggccacccgcctccctctcaaccttgtaaattccccttcccaaccccgaggggcttgcagggacaaggcgaccgactgcgctgagctgcttatttattgaaaataaacgacggaaaagtctggccttgcctctgtgcaagcttggaggcctgggtcgccgctgtgaaaaaaaaaaaaaaaaaaaaaaaaaaaaaaaaaa

SEQ ID NO: 396783 - DNA, 1000 bp, Homo Sapiens; identical to SEQ ID NO: 221468

SEQ ID NO: 396784 - DNA, 1000 bp, Homo Sapiens
tgggggcgctacggtgggagaggaagccaggggtacctgcctctgccttccagggccaccgttggccccagctgtgccttgactacgtaacatcttgtcctcacagcccagagcatgttccagatcccagagtttgagccgagtgagcaggaagactccagctctgcagagaggggcctgggccccagccccgcaggggacgggccctcaggctccggcaagcatcatcgccaggccccaggcctcctgtgggacgccagtcaccagcaggagcagccaaccagcagcagccatcatggaggcgctggggctgtggagatccggagtcgccacagctcctaccccgcggggacggaggacgacgaagggatgggggaggagcccagcccctttcggggccgctcgcgctcggcgccccccaacctctgggcagcacagcgctatggccgcgagctccggaggatgagtgacgagtttgtggactcctttaagaagggacttcctcgcccgaagagcgcgggcacagcaacgcagatgcggcaaagctccagctggacgcgagtcttccagtcctggtgggatcggaacttgggcaggggaagctccgccccctcccagtgaccttcgctccacatcccgaaactccacccgttcccactgccctgggcagccatcttgaatatgggcggaagtacttccctcaggcctatgcaaaaagaggatccgtgctgtctcctttggagggagggctgacccagattcccttccggtgcgtgtgaagccacggaaggcttggtcccatcggaagttttgggttttccgcccacagccgccggaagtggctccgtggccccgccctcaggctccgggctttcccccaggcgcctgcgctaagtcgcgagccaggtttaaccgttgcgtcaccgggacccgagcccccgcgatgccctgggggccgtgctcactaccaaatgttaataaagcccgcgtctgtgccgcc

SEQ ID NO: 396785 - DNA, 1000 bp, Homo Sapiens; identical to SEQ ID NO: 116170

SEQ ID NO: 396786 - DNA, 1000 bp, Homo Sapiens; identical to SEQ ID NO: 286348

SEQ ID NO: 396787 - DNA, 1000 bp, Homo Sapiens
ggaggtgggcatctaccgcgtgtccggtgtggccacggacatccaggcactgaaggcagccttcgacgtcaataacaaggatgtgtcggtgatgatgagcgagatggacgtgaacgccatcgcaggcacgctgaagctgtacttccgtgagctgcccgagcccctcttcactgacgagttctaccccaacttcgcagagggcatcgctctttcagacccggttgcaaaggagagctgcatgctcaacctgctgctgtccctgccggaggccaacctgctcaccttccttttccttctggaccacctgaaaagggtggcagagaaggaggcagtcaataagatgtccctgcacaacctcgccacggtctttggccccacgctgctccggccctccgagaaggagagcaagctccctgccaaccccagccagcctatcaccatgactgacagctggtccttggaggtcatgtcccaggtccaggtgctgctgtacttcctgcagctggaggccatccctgccccggacagcaagagacagagcatcctgttctccaccgaagtctaaaggtcccagtccatctcctggaggcagacagatggcctggaaacctctggctaatcgggccatccgtagagcgggaaccttcctgaggtgtccttgggccacccccaagtgttgggccatctgccaagagacagcgacccaaagccgaaggacaggtggcctgggcagatctcgcccaggtctgggagccccaggctggcctcagactgtggttttttatgtggccacccgagggcgccccaagccagttcatctcagagtccaggcctgaccctgggagacagggtgaagggagtgatttttatgaacttaacttagagtctaaaagatttctactggatcacttgtcaagatgcgccctctctggggagaagggaacgtgaccggattccctcactgttgtatcttgaataaacgctgctgcttcatcctgtg

SEQ ID NO: 396788 - DNA, 1000 bp, Homo Sapiens; identical to SEQ ID NO: 221469

SEQ ID NO: 396789 - DNA, 1000 bp, Homo Sapiens; identical to SEQ ID NO: 116171

SEQ ID NO: 396790 - DNA, 1000 bp, Homo Sapiens; identical to SEQ ID NO: 116172

SEQ ID NO: 396791 - DNA, 1000 bp, Homo Sapiens; identical to SEQ ID NO: 286352

SEQ ID NO: 396792 - DNA, 1000 bp, Homo Sapiens; identical to SEQ ID NO: 116173

SEQ ID NO: 396793 - DNA, 983 bp, Homo Sapiens
gtggaattcatggcatctacttcgtatgactattgcagagtgcccatggaagacggggataagcgctgtaagcttctgctggggataggaattctggtgctcctgatcatcgtgattctgggggtgcccttgattatcttcaccatcaaggccaacagcgaggcctgccgggacggccttcgggcagtgatggagtgtcgcaatgtcacccatctcctgcaacaagagctgaccgaggcccagaagggctttcaggatgtggaggcccaggccgccacctgcaaccacactgtgatggccctaatggcttccctggatgcagagaaggcccaaggacaaaagaaagtggaggagcttgagggagagatcactacattaaaccataagcttcaggacgcgtctgcagaggtggagcgactgagaagagaaaaccaggtcttaagcgtgagaatcgcggacaagaagtactaccccagctcccaggactccagctccgctgcggcgccccagctgctgattgtgctgctgggcctcagcgctctgctgcagtgagatcccaggaagctggcacatcttggaaggtccgtcctgctcggcttttcgcttgaacattcccttgatctcatcagttctgagcgggtcatggggcaacacggttagcggggagagcacggggtagccggagaagggcctctggagcaggtctggaggggccatggggcagtcctgggtgtggggacacagtcgggttgacccagggctgtctccctccagagcctccctccggacaatgagtcccccctcttgtctcccaccctgagattgggcatggggtgcggtgtggggggcatgtgctgcctgttgttatgggttttttttgcggggggggttgcttttttctggggtctttgagctccaaaaaataaacacttcctttgagggagagcaaaaaaaaaaaaaaaaaaaaaaaaaaaaaaaaaaaa

SEQ ID NO: 396794 - DNA, 1000 bp, Homo Sapiens; identical to SEQ ID NO: 221470

SEQ ID NO: 396795 - DNA, 1000 bp, Homo Sapiens; identical to SEQ ID NO: 221471

SEQ ID NO: 396796 - DNA, 1000 bp, Homo Sapiens; identical to SEQ ID NO: 116174

SEQ ID NO: 396797 - DNA, 1000 bp, Homo Sapiens; identical to SEQ ID NO: 116175

SEQ ID NO: 396798 - DNA, 1000 bp, Homo Sapiens; identical to SEQ ID NO: 286358

SEQ ID NO: 396799 - DNA, 1000 bp, Homo Sapiens; identical to SEQ ID NO: 116176

SEQ ID NO: 396800 - DNA, 1000 bp, Homo Sapiens
ctcagcgaaaaagaatgagccctaagcctgagcttactgaagagcaaaagcaggagatccgggaagcttttgatcttttcgatgcggatggaactggcaccatagatgttaaagaactgaaggtggcaatgagggccctgggctttgaacccaagaaagaagaaattaagaaaatgataagtgaaattgataaggaagggacaggaaaaatgaactttggtgactttttaactgtgatgacccagaaaatgtctgagaaagatactaaagaagaaatcctgaaagctttcaagctctttgatgatgatgaaactgggaagatttcgttcaaaaatctgaaacgcgtggccaaggagttgggtgagaacctgactgatgaggagctgcaggaaatgattgatgaagctgatcgagatggagatggagaggtcagtgagcaagagttcctgcgcatcatgaaaaagaccagcctctattaagatcagtgtcttctttttctactgcaagcacatgtaactagatttagtgcctgccatggtgtgaaatctggcttttgagaacacaaacttttcccccacggacctccctttatcactttaatagtgaccttgagcctattttagccgtttggaagtgttctttgatattacagttctttgtaaaatgacctgcgaattaccctaattctcaaaagcaaaacaagagcacacaagcgtgaagaaaaggatcttaaagctttgagcacctgccattttgccttgcatcgtttccctcgtcatgcatttccacatatccacaaacacagaacgactttagacaagcacatgttacacctgtgttgccacaagcagtcattcttgacggctccagtttttatttgacacttgagtttagttttctcttttataaacccagtgaactcctgcactggcatttggatgtgtgttaatgctatttgttttgtcttaaaagtaaaacctttctcagtttgaaaaaaaaa

SEQ ID NO: 396801 - DNA, 1000 bp, Homo Sapiens
aagatcaccagtgtaaaacctcttctgcaaatcgaggctggaccacctgagtcagcagaatctacaaatatactcaaactttgtcctcgtgaagaattcctgagactgtgtaaaaaaaatcatgatgagatctatccaataaaaaagagagaggaccgcagacgcctggctctcatcatatgcaatacaaagtttgatcacctgcctgcaaggaatggggctcactatgacatcgtggggatgaaaaggctgcttcaaggcctgggctacactgtggttgacgaaaagaatctcacagccagggatatggagtcagtgctgagggcatttgctgccagaccagagcacaagtcctctgacagcacgttcttggtactcatgtctcatggcatcctagagggaatctgcggaactgcgcataaaaagaaaaaaccggatgtgctgctttatgacaccatcttccagatattcaacaaccgcaactgcctcagtctaaaggacaaacccaaggtcatcattgtccaggcctgcagaggtgaaaaacatggggaactctgggtcagagactctccagcatccttggcagtcatctcttcacagtcatctgagaacctggaggcagattctgtttgcaagatccacgaggagaaggacttcattgctttctgttcttcaacaccacataacgtgtcctggagagaccgcacaaggggctccatcttcattacggaactcatcacatgcttccagaaatattcttgctgctgccacctaatggaaatatttcggaaggtacagaaatcatttgaagttccacaggctaaagcccagatgcccaccatagaacgagcaaccttgacaagagatttctacctctttcctggcaattgaaaatgaaaccacaggcagcccagccctcctctgtcaacatcaaagagcacatttaccagtatagcttgcatagtcaatatttggtatttcaataaaagtaaagactgta

SEQ ID NO: 396802 - DNA, 1000 bp, Homo Sapiens
atgtactagttcctgggaattaaaatagcgtggttctctttgtagcacaaacattgctggaatttgcagtcttttcaatgcagccacatttttatccatttcagttgtctcacaaattttaacccatatcagagttccagaacaggtaccacagctttggttttagattagtggaataacattcagcccagaactgagaaactcaacagattaactatcgtttgctctttagacggtctcactgcctctcacttgccagagccctttcaaaatgagcagagaagtccacaccattagggaccatctgtgataaattcagaagggaggagatgtgtgtacagctttaaggattccctcaattccgaggaaagggactggcccagaatccaggttaatacatggaaacacgaagcattagcaaaagtaataattatacctatggtatttgaaagaacaataataaaagacacttcttccaaaccttgaatttgttgtttttagaaaacgaatgcatttaaaaatattttctatgtgagaattttttagatgtgtgtttacttcatgtttacaaataactgtttgctttttaatgcagtactttgaaatatatcagccaaaaccataacttacaataatttcttaggtattctgaataaaattccatttcttttggatatgctttaccattcttaggtttctgtggaacaaaaatatttgtagcattttgtgtaaatacaagctttcatttttattttttccaattgctattgcccaagaattgctttccatgcacatattgtaaaaattccgctttgtgccacaggtcatgattgtggatgagtttactcttaacttcaaagggactatttgtattgtatgttgcaactgtaaattgaattatttggcatttttctcatgattgtaatattaatttgaagtttgaatttaattttcaataaaatggcttttttggttttgttaaaaaaaaaaaaaaaaaaaa

SEQ ID NO: 396803 - DNA, 1000 bp, Homo Sapiens; identical to SEQ ID NO: 221472

SEQ ID NO: 396804 - DNA, 1000 bp, Homo Sapiens; identical to SEQ ID NO: 221473

SEQ ID NO: 396805 - DNA, 1000 bp, Homo Sapiens
aaccacgagccgtccgagatgagtaatcgcaccatgatcatctacttcgaccaggtactagtgaacattgggaacaactttgattcagaacgcagcactttcatcgccccgcgcaaagggatctacagttttaacttccacgtggtaaaagtctacaacagacaaaccatacaggtgagcctcatgctaaacgggtggccggtgatttcagccttcgctggtgaccaggacgtgacccgggaggccgccagcaacggagtcctaatccaaatggagaaaggcgaccgagcatacctcaagctggagcggggaaacttgatggggggctggaagtactcgaccttctccggattcctggtgtttcctctctgactggctcgtagccggaagggaggcagggagagggcgaaggcaggaaggggagtgagaaagaggctgaaattaagagggcgagaaagcagcacgacttgaaacttcctacatgttctctaactgtatctgggtaaaaaggtgcgcgccagctgtgggacaactttgtccatttccttattaggagaaataaatttcgcttagctctgcgcactcccatttccaaaaataaactcgcctcccccattccagttgcagtaatcaagaaagagactgccttgtcattgtttcttatcccccaacttcatgttccctgcaatttatttaaagaaactttgtatttcactacataatctgaaatctttctccctagccccctctggaatccttctgcctactgaaatctgatatattacacaccccccaacctttttttttcgagtttggaaaggggtaaagttttgttgttgttgttgttttgttttggatggggaaggtagttttaatttggcaagtgttgctcttcttaaaacactgctcaaattaattagctgaagatacttagtatcctcggctgcttgttagcagagaaaggactcaccttagtggtgactggtttaaaaaaaaaaaa

SEQ ID NO: 396806 - DNA, 1000 bp, Homo Sapiens; identical to SEQ ID NO: 286360

SEQ ID NO: 396807 - DNA, 1000 bp, Homo Sapiens; identical to SEQ ID NO: 286361

SEQ ID NO: 396808 - DNA, 1000 bp, Homo Sapiens; identical to SEQ ID NO: 286362

SEQ ID NO: 396809 - DNA, 1000 bp, Homo Sapiens; identical to SEQ ID NO: 116177

SEQ ID NO: 396810 - DNA, 1000 bp, Homo Sapiens; identical to SEQ ID NO: 286364

SEQ ID NO: 396811 - DNA, 1000 bp, Homo Sapiens; identical to SEQ ID NO: 116178

SEQ ID NO: 396812 - DNA, 1000 bp, Homo Sapiens; identical to SEQ ID NO: 116180

SEQ ID NO: 396813 - DNA, 1000 bp, Homo Sapiens; identical to SEQ ID NO: 116182

SEQ ID NO: 396814 - DNA, 1000 bp, Homo Sapiens; identical to SEQ ID NO: 116184

SEQ ID NO: 396815 - DNA, 548 bp, Homo Sapiens
cggcgctgcggcagtccagatcaaaaatggcggtagttggtgtgtcctcggtttctcggctgctgggtcggtcccgcccacagctggggcggcctatgtcgagtggcgcccatggcgaagagggctcagctcgcatgtggaagactctcaccttcttcgtcgcgctccccggggtggcagtcagcatgctgaatgtgtacctgaagtcgcaccacggagagcacgagagacccgagttcatcgcctacccccatctccgcatcaggaccaagccgtttccctggggagatggtaaccatactctattccataaccctcatgtgaatccacttccaactggctacgaagatgaataaagagaatctggaccactacccgggcaccagggaccacagcactggtttggaccgttactctgcacatggaccagaaaaagtatatgggaccttaagctaaccttctttacttgtatcaaatgatgactggtatactggtctcccatccctttgcttgtggcaggagatggcttaaataaataacttaaactt

SEQ ID NO: 396816 - DNA, 444 bp, Homo Sapiens; identical to SEQ ID NO: 221479

SEQ ID NO: 396817 - DNA, 1000 bp, Homo Sapiens; identical to SEQ ID NO: 116186

SEQ ID NO: 396818 - DNA, 1000 bp, Homo Sapiens; identical to SEQ ID NO: 116187

SEQ ID NO: 396819 - DNA, 1000 bp, Homo Sapiens; identical to SEQ ID NO: 286375

SEQ ID NO: 396820 - DNA, 1000 bp, Homo Sapiens; identical to SEQ ID NO: 286376

SEQ ID NO: 396821 - DNA, 1000 bp, Homo Sapiens; identical to SEQ ID NO: 221480

SEQ ID NO: 396822 - DNA, 1000 bp, Homo Sapiens; identical to SEQ ID NO: 116189

SEQ ID NO: 396823 - DNA, 1000 bp, Homo Sapiens; identical to SEQ ID NO: 116190

SEQ ID NO: 396824 - DNA, 1000 bp, Homo Sapiens; identical to SEQ ID NO: 286379

SEQ ID NO: 396825 - DNA, 1000 bp, Homo Sapiens; identical to SEQ ID NO: 286380

SEQ ID NO: 396826 - DNA, 1000 bp, Homo Sapiens
atgtcttatgatgaacaaagtcagatctggtcagaatgtattgcagcagccaatgctccctataatcagacattaactggatataatgactacatcaagatgagcattaatcctaagaaacttgtaatgggtgttccttggtatggttatgattatacctgcctgaatctgtctgaggatcatgtttgtaccattgcaaaagtccctttccggggggctccttgtagtgacgctgcaggacgtcaggtgccctacaaaacgatcatgaagcaaataaatagttctatttctggaaacctatgggataaagatcagcgggctccttattataactataaagatcctgctggccactttcatcaagtatggtatgataaccctcagagtatttctttaaaggcaacatatatacaaaactatcgcttacggggcattggcatgtggaatgcaaactgtcttgactactctggagatgctgtagccaaacagcaaactgaagaaatgtgggaagtcttaaagccaaagctgttacagagatgaacatcttttgtcaaaccattaagagttagaaagatgatctgtatcaacagatctagtttcttgcatttttattatgttgctatatacttttgttatccgtatactaaaaaaaaagaataaataaatgttttgattgtttgaatttgaaaaatacacacgaatgtcctcagtatccaggaacataaaggcaagaagcaagtcaacttacctattaaatattcctctattagatgtttcaacactataatttaattgggaaaaattgctttcagaattttattatgccatatttcccttcattatagtaaaatatatgctcacgaatcaatgctgatttttaaaatatgtataatctgaagtggaaattgtttgcttagagtttttaaaaacctagtctttgaaaagcagtttgtgctatacttttcccccaaccctccaataaatcttaaatttaaaacct

SEQ ID NO: 396827 - DNA, 1000 bp, Homo Sapiens
gttcgacgaggttctcagaagaaacacatttcgcctgtacaggctttaagtgaattcaaagcaatggattccttctaggacgataggttttaacaagaaagctttttctttcttttctttctttctttttctttttaattccatttttgtatgcatacctgccagctcgtatgcctctggcatggggaaattaagggaacagtgtctgtttgcatgtaagatgagatgagatcaatactactgatccatctgtagcctgggaaggagacaggacattcctgtactaaggtggcacagagctgtcctttgcaacattctcataaaattgggcacagagttcgcattggcgcaatatttatgggagtgggagggatggggaaaataaacttaactctacaaaagcaaactctaatgcatgcaagaatcattaggttggcaggtatatgcataagtgaaaaatctggaagtgtaatggtagaacataaaacttgtattgcttctgtttcagtgcaaaaatgtactagccaatacgcttaagtgtgtggcccatgaattgaacaatttaaccttgaagtctatatccgtgatattatgtcgatttttaactgaggggaaattaactagtccagcctaaaatgcttcttttaatctgcattctgtttcctcttctagttgtgccattactagtgatcatgtttttttcccccctttaatgaaaacaataaacatctatttgagacaattaaaatccttctgggggcactggaagcacaatacggtgaccaatcttgctttcatttttttttctttttaatttgaaccatgattttgctagaaatagaaggcccagtggtggaatattagagggaaggaaactgacaacgtgtgaaagttagaggcaaatacataggtgtagcttggagtgctggtatctaatataccattgtattcactaactaactcaaaataaacacatttaatcttgaaaaaaaaaaaaaaa

SEQ ID NO: 396828 - DNA, 1000 bp, Homo Sapiens; identical to SEQ ID NO: 286381

SEQ ID NO: 396829 - DNA, 1000 bp, Homo Sapiens; identical to SEQ ID NO: 286382

SEQ ID NO: 396830 - DNA, 1000 bp, Homo Sapiens; identical to SEQ ID NO: 286383

SEQ ID NO: 396831 - DNA, 1000 bp, Homo Sapiens; identical to SEQ ID NO: 116191

SEQ ID NO: 396832 - DNA, 1000 bp, Homo Sapiens; identical to SEQ ID NO: 116192

SEQ ID NO: 396833 - DNA, 1000 bp, Homo Sapiens; identical to SEQ ID NO: 221481

SEQ ID NO: 396834 - DNA, 1000 bp, Homo Sapiens; identical to SEQ ID NO: 116193

SEQ ID NO: 396835 - DNA, 1000 bp, Homo Sapiens; identical to SEQ ID NO: 221482

SEQ ID NO: 396836 - DNA, 1000 bp, Homo Sapiens
tcctgcaggctgcgacctgcagtggcccgtctcaggccctgctcactcccggggccaccaaacgggcccctctctcgggggaaccggacagcagcttggcaaaggcctccctaaaaggccgcatttctgacctgagccccgggtctcggctgtttcgagccccgcctcggacttgccttccctcccctccgggtgagcctgtctggcgccttcctcgccccgggctgagagctgggtcccgggagatggaagcctcccaggcgcgcgaggcttcccgggcgctctgaggcttctttctcctcgcccgctcccctgggctcagctcggacgctgcagttattgacctcccggtcccgcctgcccgccctcccccacgtggccccttgacccgggcggccccgccgcttctttccttcctgcagttcccagccctcggagcccccatcccttatcttacccccaccgcgctcccccaggagcgctccctcagctctctcctcatccatcaccagtggagtttttttattttttatttttttaaaagtttaggtgcctttgcggatgacctcattttgacgttgaaaaaatgattttttaatatgtgaacactgcaaaaatgtgtttaaattatcttttttaaaacctattcaggattattagcctggacttggacacagagtttgtaaataaaggtgtctgtgcagattttcccactgatttatttgtataaaaatactcatcttttcagacttttttgtaaacccccagttgtgaaaactgcagtttagcagtgacctcagcaacccctcctttttattttttcctttaaaaacatttcagttaaattaagctactgatttggatttgttttatcgtatcctaaagtctttgttgttgaaatgaaaggtattttggggttatttattatgaaaacaacatgctcttaatgttgattttacaatatgaagagattatttaaataaattattgttttcattgg

SEQ ID NO: 396837 - DNA, 1000 bp, Homo Sapiens; identical to SEQ ID NO: 221486

SEQ ID NO: 396838 - DNA, 1000 bp, Homo Sapiens
cagtttgggcgtcctgcgggcactctatcagctgggcatgcggtacctgaccctcacccacagctgcaacacgccctgggctgacaactggctggtggacacgggagacagcgagccccagagccaaggcttgtcaccctttgggcagcgtgtggtgaaggagctgaaccgtctgggggtcctcatcgacttggctcacgtgtctgtggccaccatgaaggccaccctgcagctgtccagagccccggtcatcttcagccactcctcggcctacagcgtgtgcgcaagccggcgcaacgtgcctgacgacgtcctgaggctggtgaaacagacagacagcctggtgatggtgaacttctacaacaattacatttcctgcaccaacaaggccaacctgtcccaagtggccgaccatctggatcacatcaaggaggtggcaggagccagagccgtgggttttggtggggactttgatggtgttccaagggtccctgaggggctggaggacgtctccaagtatccagacctgatcgctgagctgctcaggaggaactggacggaggcggaggtcaagggcgcactggctgacaacctgctgagggtcttcgaggctgtggaacaggccagcaacctcacacaggctcccgaggaggagcccatcccgctggaccagctgggtggctcctgcaggacccattacggctactcctctggggcttccagcctccatcgccactgggggctcctgctggcctccctcgctcccctggtcctctgtctgtctctcctgtgaaacctgggagaccagagtcccctttagggttcccggagctccgggaagacccgcccatcccaggactccagatgccaggagccctgctgcccacatgcaaggaccagcatctcctgagaggacgcctgggcttacctggggggcaggatgcctggggacagttcaggacacacacacagtaggcccgcaataaaagcaacacccctt

SEQ ID NO: 396839 - DNA, 1000 bp, Homo Sapiens; identical to SEQ ID NO: 115344

SEQ ID NO: 396840 - DNA, 1000 bp, Homo Sapiens
cagccattcaggggacctgcctggtggcagctgggatgaagagagatggcatgtcaggctggccccgaatcatagctccctgagagggccaagcagagagtactggaaacctccctaccaaaaagacagagacccgccccctcacacacaaacacacatgtcctgttgaactcatgcacgcacacccacgtgcctgtacttgcccccaggctggaagagaagagacagaaagaccccatgacccccccatgtggatccccatctgtgtctcagttgcatctgtacagccttgtctgcaaactggaggatgcggggcaagcccttaggggcctgccagggctcggggggcaaagagggactcgggaaactcagtgtaccccagatgcctcacccattccgtgtcatcacccatgtctgccacccactgattgggcaattgtgggcccatggggtggaagcccccagatgactgagcagttctacaaaagaatggccagcacgagcggggactagagggtcctgattttgtgtctgtgcctcttcatctctctggactctgatctccttctcccttcccatctccaggccttctgtctgtcccagataaaggcgctgttctcccatcctccctaccccatcctctccaccaaatcgctcccaattttgagagccaaaggctggcgcttctgacttcaggagcgaaaggaggaggcctagtttgggccgatgtattttaaagcagagtggacagcagagagtcaatttccctttcgttgggagtgggcagtggggtggctaattgtcttcggccaaccaggggcctgttgcccaggcaactcaccagctccgcctctgctgattggctgccacggtgggagtcagccaagatttaaagggatgccagcgattgctcttttcaaaacctaccagtcccactgtgggtggagaaataaatggtctttctcctcctcaaaaaaaaaaaaaaaaaaaaaaaaaaaaa

SEQ ID NO: 396841 - DNA, 1000 bp, Homo Sapiens
ccactgccaggcaggcatttcccggtcagccaccatctgccttgcttaccttatgaggactaatcgagtcaagctggacgaggcctttgagtttgtgaagcagaggcgaagcatcatctctcccaacttcagcttcatgggccagctgctgcagtttgagtcccaggtgctggctccgcactgttcggcagaggctgggagccccgccatggctgtgctcgaccgaggcacctccaccaccaccgtgttcaacttccccgtctccatccctgtccactccacgaacagtgcgctgagctaccttcagagccccattacgacctctcccagctgctgaaaggccacgggaggtgaggctcttcacatcccattgggactccatgctccttgagaggagaaatgcaataactctgggaggggctcgagagggctggtccttatttatttaacttcacccgagttcctctgggtttctaagcagttatggtgatgacttagcgtcaagacatttgctgaactcagcacattcgggaccaatatatagtgggtacatcaagtccatctgacaaaatggggcagaagagaaaggactcagtgtgtgatccggtttctttttgctcgcccctgttttttgtagaatctcttcatgcttgacatacctaccagtattattcccgacgacacatatacatatgagaatataccttatttatttttgtgtaggtgtctgccttcacaaatgtcattgtctactcctagaagaaccaaatacctcaatttttgtttttgagtactgtactatcctgtaaatatatcttaagcaggtttgttttcagcactgatggaaaataccagtgttgggtttttttttagttgccaacagttgtatgtttgctgattatttatgacctgaaataatatatttcttcttctaagaagacattttgttacataaggatgacttttttatacaatggaataaattatggcatttctattg

SEQ ID NO: 396842 - DNA, 1000 bp, Homo Sapiens
ccaggcttgcaaatgaacttcagacggacctcagggtaggttctcgggactgaaggaaggccaagccattacgggagcacagcatgtgctgactactgtacttccagacccctgccctcttgggactgcccagtccttgcacctcagagttcgccttttcatttcaagcataaggcaataaatacctgcagcaacgtgggagaaagaagttgctggaccaggagaaaaggcagttatgaagccaattcattttgaaggaagcacaatttccaccttattttttgaactttggcagtttcaatgtctgtctctgttgcttcggggcataagctgatcaccgtctagttgggaaagtaaccctacagggtttgtagggacatgatcagcatcctgatttgaaccctgaaatgttgtgtagacaccctcttgggtccaatgaggtagttggttgaagtagcaagatgttggcttttctggattttttttgccatgggttcttcactgaccttggactttggcatgattcttagtcatacttgaacttgtctcattccacctcttctcagagcaactcttcctttgggaaaagagttcttcagatcatagaccaaaaaagtcataccttcgaggtggtagcagtagattccaggaggagaagggtacttgctaggtatcctgggtcagtggcggtgcaaactggtttcctcagctgcctgtccttctgtgtgcttatgtctcttgtgacaattgttttcctccctgcccctggaggttgtcttcaagctgtggacttctgggatttgcagattttgcaacgtggtactactttttttttctttttgtctgttagttatttctccaggggaaaaggcaataattttctaagacccgtgtgaatgtgaagaaaagcagtatgttactggttgttgttgttgttcttgttttttatagtgtaaaataaaaatagtaaaaggagaaaagcaaaaaaaaaaaaaaaaaa

SEQ ID NO: 396843 - DNA, 1000 bp, Homo Sapiens; identical to SEQ ID NO: 221488

SEQ ID NO: 396844 - DNA, 1000 bp, Homo Sapiens; identical to SEQ ID NO: 116196

SEQ ID NO: 396845 - DNA, 1000 bp, Homo Sapiens; identical to SEQ ID NO: 116197

SEQ ID NO: 396846 - DNA, 1000 bp, Homo Sapiens; identical to SEQ ID NO: 116198

SEQ ID NO: 396847 - DNA, 1000 bp, Homo Sapiens; identical to SEQ ID NO: 286399

SEQ ID NO: 396848 - DNA, 1000 bp, Homo Sapiens; identical to SEQ ID NO: 116199

SEQ ID NO: 396849 - DNA, 1000 bp, Homo Sapiens
ccaaagtcccaatactctagccccgctctcttcccctctttctgtcccccattttccagggggtatatggtcagggctccccaacctgagttgggttacttcaagggcagccagcaggcctggatggaggcctagaaagcccttgccttccttcctcccacttctttctccaggcctggttaactcttccgttgtcagcttctcccccttcagcctgtttctgcagcagccagggttctcccccctacaccctctgcaggtggagagagagaagctgggcccagccgggccgtgcctgctggcacagacgccttaacgctgtgtgtatgactgtgtgactgtgtgggagcctggactgacagataggccaagggctactctctggcatctccaggtgttttgtagcaaacagccacttagtgctttgtcctggactccactcagcctcaggatggggaatagccaagaatggcagcctcagcgcagaggcaaggtcagaaagagacggcgcttcagagtttcctttccagacacccctccccgcactgtgaagttcccctgaccgccctcctggttcacaaagagcattaagaaagctgcggtggtctgagcaacatagcccaaagggctgagcctcctggcctgcctgcccgcccaccctgggagtcccagtggtgaggctcagagaactgctaaggggaaagaacagctggagtttctgttgatgtgaagaaggcagctcttggcctcccactcccacacttctttgcctataaatcttcctagcagcaatttgagctacctgaggaggaggcagggcagaaagggcgagggcctgcctctgacctgccgtgtcctttgcaggaaggaggtaggcacctttctgagcttattctattccccacccacacccccaggcagggttggaaatgaaggacttttttaacctttgttttgttttttaaaaataaatctgtaaaatctgaaaaaaaaaaaaaaa

SEQ ID NO: 396850 - DNA, 1000 bp, Homo Sapiens; identical to SEQ ID NO: 286402

SEQ ID NO: 396851 - DNA, 1000 bp, Homo Sapiens
gacatcaagaggattggggtgcggctgcccggccaccagaagcgcatcgcctacagcctgctgggactcaaggaccaggtgaacactgtggggatccccatctgagcctcgacagggcctggagccccatcggccaagaatacttgaagaaacagagtggcctccctgctgtgccatgctgggccactggggactttatttatttctagttctttcctccccctgcaacttccgctgaggggtctcggatgacaccctggcctgaactgaggagatgaccagggatgctgggctgggccctctttccctgcgagacgcacacagctgagcacttagcaggcaccgccacgtcccagcatccctggagcaggagccccgccacagccttcggacagacatataggatattcccaagccgaccttccctccgccttctcccacatgaggccatctcaggagatggagggcttggcccagcgccaagtaaacagggtacctcaagccccatttcctcacactaagagggcagactgtgaacttgactgggtgagacccaaagcggtccctgtccctctagtgccttctttagaccctcgggccccatcctcatccctgactggccaaacccttgctttcctgggcctttgcaagatgcttggttgtgttgaggtttttaaatatatattttgtactttgtggagagaatgtgtgtgtgtggcagggggccccgccagggctggggacagagggtgtcaaacattcgtgagctggggactcagggaccggtgctgcaggagtgtcctgcccatgccccagtcggccccatctctcatccttttggataagtttctattctgtcagtgttaaagattttgttttgttggacatttttttcgaatcttaatttattattttttttatatttattgttagaaaatgacttatttctgctctggaataaagttgcagatgattcaaaccgaaaaaaaaaaaaaaaaaa

SEQ ID NO: 396852 - DNA, 1000 bp, Homo Sapiens; identical to SEQ ID NO: 286403

SEQ ID NO: 396853 - DNA, 1000 bp, Homo Sapiens; identical to SEQ ID NO: 116200

SEQ ID NO: 396854 - DNA, 1000 bp, Homo Sapiens; identical to SEQ ID NO: 221492

SEQ ID NO: 396855 - DNA, 1000 bp, Homo Sapiens; identical to SEQ ID NO: 286405

SEQ ID NO: 396856 - DNA, 1000 bp, Homo Sapiens; identical to SEQ ID NO: 116202

SEQ ID NO: 396857 - DNA, 1000 bp, Homo Sapiens
atcacgcgcacagcctggcagcctggccctcctggtgcccactcccgccagcccctgcctcgaggactgatactgcagtgactgccgtcagctccgactgccgctgagaagggttgatcctgcatctgggtttgtttacagcaattcctggactcgggggtattttggtcacagggtggttttggtttagggggtttgtttgttgggttgttttttgttttttggttttttttaatgacaatgaagtgacactttgacatttcctaccttttgaggacttgatccttctccaggaagaaggtgctttctgcttactgacttaggcaatacaccaagggcgagattttatatgcacatttctggatttttttatacggttttcattgacactcttccctcctcccacctgccaccaggcctcaccaaagcccactgccatggggccatctgggccattcagagactggagtgagatttgggtgtggagggggaggcgccaaggtggaggagcttcccactccaggactgttgatgaaagggacagattgaggaggaagtgggctctgaggctgcagggctggaagtccttgcccacttcccactctcctgccccaatctatctagtacttcccaggcaaataggcccctttgaggctcctgagtgccctcagatggtcaaaacccagttttccctctgggagcctaaaccaggctgcatcggaggccaggacccggatcattcactgtgataccctgccctccagagggtgcgctcagagacacgggcaagcatgcctcttcccttccctggagagaaagtgtgtgatttctctcccacctccttccccccaccagacctttgctgggcctaaaggtcttggccatggggacgccctcagtctagggatctggccacagactccctcctgtgaaccaacacagacacccaagcagagcaatcagttagtgaattgaatggaaataaacgctttagttataa

SEQ ID NO: 396858 - DNA, 1000 bp, Homo Sapiens; identical to SEQ ID NO: 116203

SEQ ID NO: 396859 - DNA, 1000 bp, Homo Sapiens; identical to SEQ ID NO: 116204

SEQ ID NO: 396860 - DNA, 1000 bp, Homo Sapiens; identical to SEQ ID NO: 221494

SEQ ID NO: 396861 - DNA, 1000 bp, Homo Sapiens
tgtttgaaatcgtttttgaagatccaaagataccaggagagaagcaatttgcctatcaaaactcctggggcctgacaactcgaactattggtgttatgaccatggttcatggggacaacatgggtttagtattaccaccccgtgtagcatgtgttcaggtggtgattattccttgtggcattaccaatgcactttctgaagaagacaaagaagcgctgattgcaaaatgcaatgattatcgaaggcgattactcagtgttaacatccgcgttagagctgatttacgagataattattctccaggttggaaattcaatcactgggagctcaagggagttcccattagacttgaagttgggccacgtgatatgaagagctgtcagtttgtagccgtcagacgagatactggagaaaagctgacagttgctgaaaatgaggcagagactaaacttcaagctattttggaagacatccaggtcacccttttcacaagggcttctgaagaccttaagactcatatggttgtggctaatacaatggaagactttcagaagatactagattctggaaagattgttcagattccattctgtggggaaattgactgtgaggactggatcaaaaagaccactgccagggatcaagatcttgaacctggtgctccatccatgggagctaaaagcctttgcatccccttcaaaccactctgtgaactgcagcctggagccaaatgtgtctgtggcaagaaccctgccaagtactacaccttatttggtcgcagctactgagggatgaacgaaagccccctcttcaactcctctcactttttaaagcattgatattagtatcttctcagatacagaccgttttatgattttttaaaaagtaaaagttctaaaatgaagtcacacaggacaattattcttatgcctaagttaacagtggataaaagacttttctgtaaacaactccagtaataaatatcatgaactaaaaaaaa

SEQ ID NO: 396862 - DNA, 1000 bp, Homo Sapiens; identical to SEQ ID NO: 221495

SEQ ID NO: 396863 - DNA, 1000 bp, Homo Sapiens; identical to SEQ ID NO: 221496

SEQ ID NO: 396864 - DNA, 1000 bp, Homo Sapiens; identical to SEQ ID NO: 221497

SEQ ID NO: 396865 - DNA, 1000 bp, Homo Sapiens; identical to SEQ ID NO: 286412

SEQ ID NO: 396866 - DNA, 1000 bp, Homo Sapiens; identical to SEQ ID NO: 221498

SEQ ID NO: 396867 - DNA, 1000 bp, Homo Sapiens; identical to SEQ ID NO: 286414

SEQ ID NO: 396868 - DNA, 1000 bp, Homo Sapiens; identical to SEQ ID NO: 118940

SEQ ID NO: 396869 - DNA, 1000 bp, Homo Sapiens; identical to SEQ ID NO: 286415

SEQ ID NO: 396870 - DNA, 1000 bp, Homo Sapiens; identical to SEQ ID NO: 221499

SEQ ID NO: 396871 - DNA, 1000 bp, Homo Sapiens; identical to SEQ ID NO: 286416

SEQ ID NO: 396872 - DNA, 1000 bp, Homo Sapiens; identical to SEQ ID NO: 286417

SEQ ID NO: 396873 - DNA, 1000 bp, Homo Sapiens; identical to SEQ ID NO: 118360

SEQ ID NO: 396874 - DNA, 1000 bp, Homo Sapiens; identical to SEQ ID NO: 286419

SEQ ID NO: 396875 - DNA, 1000 bp, Homo Sapiens; identical to SEQ ID NO: 221501

SEQ ID NO: 396876 - DNA, 1000 bp, Homo Sapiens
gctcgcccttctccatcgagagcatcatcgggggcagcttgggcccggccgccgctgccgccgccgccgcgcaggccgccgccgccgctcaggcctcgccctcgccctcgccggtggcggcgccgccagctcccggatccagcggaggaggctgcgcggcgcaggcggccgtgggcccggcggccgcgctcacccgatccctcgtggccgccgcggccgccgccgcctcctcagtctcctcgtccgccgccttggggactctgcaccaagggactgccctgtccagtgtcgagaactttactgctaggatttccaattgttaataacgctatgttagcgcgctcgaggaagaaggtaggaatcccggctccttttctcgtcttggtggttcggtgttttgttcgctcctccaggcgcggcccctctcgacctcgcgcgcccattttcgccgctgcgaattctcggacaaaactgtcaacagcccgggcgcgccttttggctctgcgggtccctctatttatgcaaagccgacctatgctacagccccccaacccccgacctggggtagggaggaagagggtgccggggaagggagtccgccctgtccaggcactagaggctcccttgacgtttggcagatgaaaaacaactaagcctttttgaggtgtagagattctcaggtccaggcgttaaaaaataatggtcaaaagaataatacaaaaatagtaaaggtcttgaagaatgccagcgaagcaattcttttttatttgaggacacttgtctggtgtactttttcatgaaaaggaaaaatggttaacatgtttacacaagaaaaaaagtcaaaattatcatttatttcaacctgtgttttgtatcataacagacgtgtggatttttttgtacttactgcgtattctttacaaggagtattgtaaattttactggcaattattattgtactattctaaatgtaagatttttacactttttcagaaataaa

SEQ ID NO: 396877 - DNA, 1000 bp, Homo Sapiens; identical to SEQ ID NO: 286422

SEQ ID NO: 396878 - DNA, 1000 bp, Homo Sapiens
tctatttatgaagtctccagaccttgggccggcacgcgtgacacggcacttcaggctccacgcacagaatctcgcagatagttgggactaagcgggctctatcgctcagggcgacaggcccggggctacgcgaagaagtcgcaggccaagattctttacagtttgagaaataaaagcaggggggtgggggcttcgtttttttccctgcctctgcgcctctcggggaacacattccgggagagatgcctggccaggctccacggatcccgccagaaacaccaacagagggtctccctttctgcctttcccctctcacttcttccccaacgttgagaccctgcttgtccaatattataatttaaagacatctattatctgctttgtgcttaaaagaaaaattcaaccttttttttttttttttttttgctgttctccaaggaagttcgtttcctctgaagcctaaaccagtgtctacgcaggcggagctgaacggagaggtgaagcagggggtctttatattccctgcagaaaccctggatcccactccactgaggaaaatcctttctcttttgtgtttgggtgcttttaaaggaatttctttcctttcccttggctggctgggtccagccatctccggccagcaaccctgtcagtgttccaccctgtcccaggccctgtgatatttattgtggctaaaggcaatgagattgggtggaagagaagggtctgggccagggactggagaggtgggggtggagtgggcaagggcacaccctgtggcagggggtcctataattttgtgtaaatatctgtacagcgcgctgctctcggcgttctctgtccactgggtgtgcattgatttaaacttctccactgtggggaagctctgtgaaatcgtctgatggtctgtgtggaagaaaagaaaaatctgtctgccgcctatttcccattggtgtcaattgaataaatgtatgtgaacttcaaaaaaaaaaaaaaaaaa

SEQ ID NO: 396879 - DNA, 1000 bp, Homo Sapiens; identical to SEQ ID NO: 116205

SEQ ID NO: 396880 - DNA, 1000 bp, Homo Sapiens
gcgcctcatctgcgggtggatgtctttggccgtgccaatggacggccactgtgcgccagctgcctggtgcccaccgtggcccagtaccgcttctacctgtcctttgagaactctcagcaccgcgactacattacggagaaattctggcgcaacgcactggtggctggcactgtgccagtggtgctggggcccccacgggccacctatgaggccttcgtgccggctgacgccttcgtgcatgtggatgactttggctcagcccgagagctggcggctttcctcactggcatgaatgagagccgataccaacgcttctttgcctggcgtgacaggctccgcgtgcgactgttcaccgactggcgggaacgtttctgtgccatctgtgaccgctacccacacctaccccgcagccaagtctatgaggaccttgagggttggtttcaggcctgagatccgctggccgggggaggtgggtgtgggtggaagggctgggtgtcgaaatcaaaccaccaggcatccggcccttaccggcaagcagcgggctaacgggaggctgggcacagaggtcaggaagcaggggtggggggtgcaggtgggcactggagcatgcagaggaggtgagagtgggagggaggtaacgggtgcctgctgcggcagacgggaggggaaaggctgccgaggaccctccccaccctgaacaaatcttgggtgggtgaaggcctggctggaagagggtgaaaggcagggcccttggggctggggggcaccccagcctgaagtttgtgggggccaaacctgggaccccgagcttcctcggtagcagaggccctgtggtccccgagacacaggcacgggtccctgccacgtccatagttctgaggtccctgtgtgtaggctggggcggggcccaggagaccacggggagcaaaccagcttgttctgggctcagggagggagggcggtggacaataaacgtctgagcagtgaaaaaaaaaaaaaa

SEQ ID NO: 396881 - DNA, 1000 bp, Homo Sapiens; identical to SEQ ID NO: 116208

SEQ ID NO: 396882 - DNA, 1000 bp, Homo Sapiens
ccgccgcgccctgcccgccgaggccctggcagctgggggtgggcgccgtccgtacgctgcgcactggacccgctctgctctcggtgcgtaaattcacagagaaacacgaatgggtaacaacagaaaatggcattggaacagtgggaatcagcaattttgcacaggaagcgttgggagatgttgtttattgtagtctccctgaagttgggacaaaattgaacaaacaagatgagtttggtgctttggaaagtgtgaaagctgctagtgaactctattctcctttatcaggagaagtaactgaaattaatgaagctcttgcagaaaatccaggacttgtaaacaaatcttgttatgaagatggttggctgatcaagatgacactgagtaacccttcagaactagatgaacttatgagtgaagaagcatatgagaaatacataaaatctattgaggagtgaaaatggaactcctaaataaactagtatgaaataacgcaagccagcagagttgtcttaaattagtggtggatagaagacttagaatagaaacttttagtattaccgatggggaaaaaaaaactactgttaacactgctaatgaaagaaaatgccctttaactttctaatgattatagataaatataatatgcgtctttttcacaatatcctatgatttttagactaggctctagtgttcagaattcatgaaattatccatggtaaaaactagttataaaaattacataattcaaagataacattgttattcttaagccttatataatattgtaacttgcatgtatccatacctggatttgggatgaaatacttaatgatctttccattggaaataactggaagtgaagaggttttgttgcttgtacagtgtcagatgaggaacaccactatcttaattttgcgatacactgcatttgctggtgctatttttatacagtgaagcaacagctttgcagcaaaataataaaatacttcttcgttaa

SEQ ID NO: 396883 - DNA, 1000 bp, Homo Sapiens; identical to SEQ ID NO: 221505

SEQ ID NO: 396884 - DNA, 1000 bp, Homo Sapiens; identical to SEQ ID NO: 286428

SEQ ID NO: 396885 - DNA, 1000 bp, Homo Sapiens; identical to SEQ ID NO: 116210

SEQ ID NO: 396886 - DNA, 1000 bp, Homo Sapiens
tgcagtgagccgagatcgtgccactgcactctagcctgggcgacagagcgagactccatctcaaaaaaaaagaaaaagaaaattgcagtaaatttaaaactaatttggggaagaatctgtatttttacaatacctagtgttcttgccagtaagcatggttcatcttcccatttatttacgtcattttaaatctttcagtgatgttttagaattttttttataaaaaccttcactataagaacagaaaaccaaacaccgcatgttctcactcataggtgggaattgaacaatgagaacacttggacacagggcggggaacgtcacacgcctggactgttgggggggtggctgggagagggatagtgttaggagaaatacctaatgtaaatgacgagttaatggtgcagccaaccaacctggcacatgtattcatatgtaacaaacctgcacgttgtgcacatgtaccctagaacttaaagtatattaaaaaaagaaaccttggcactgattttgttagatttattcctaggtatccttcctcttttttgatttgtcattgctattgtagatggcatctttttaaaaagttatattttctaaagcaaaaaataaaaaaagttgtatttctaatttttattaccaatatataagaatgtaatttatttttacataattatcttatgtctagtaataattctgataatttgcttcttcctattaaaaccttacacccattattgatttatttttctgttttaaaatatcttcctgcactggctaaaacctccactataatgttgagcagaacagtgaggcatccttagaactatcttggttgcaaagggtaggtctctaatgtttcatcaataaatgtgatgtttctagtctgagtttgctaagtatattttaaaataatcagtaaagttagattttatccatttttatcttaactattgagatgctcatatcatttttcttcttcaatgtgttaaaatggtga

SEQ ID NO: 396887 - DNA, 1000 bp, Homo Sapiens
gtggataagatgatggaacagaagatgaaggaagaacaggagagaaggaagaaaaaggagatggaagagagaatgtcattagaggagaccaaggaacaaattctgaagttggaggagaagcttttggctctacaggaagagaagcaccagcttttcctgcagctcaagaaagttttacatgaggaagaaaaacggaggcgaaaggaacagagtgacctgaccaccctaacatcagctgcataccagcagagcctgactgttcacacaggaactcatctcctcagcatgcaggggagccctggaggacacaatcgcccaggcaccctcatggcagctgacagagccaaacaaatgtttggaccccaagtgcttacgacccggcactacgtgggctcagcagctgcttttgcagggacaccagagcatggacaattccaaggcagtcctggtggtgcctatgggactgctcagcccccacctcactatgggcccacacagccagcttatagtcctagtcagcagctcagagctccttcggcattccctgcagtgcagtacctatctcagccacagccacagccctatgctgtgcatggccactttcagcccactcagacaggtttcctccagcctggtggtgccctgtccttgcaaaagcagatggaacatgctaaccagcagactggcttctccgactcatcctctctgcgccccatgcacccccaggctctgcatccagcccctggactccttgcttccccccagctccctgtgcagatgcagccagcaggaaagtcgggctttgcagctaccagccaacctggccctcggctccccttcatccaacacagccagaacccgcgattctaccacaagtgaccatcagattatatcttcaacaccacaccccccaccccatcgtgggtgagggtatcccctgtgtgtcccaggccaataaaatctacctgccactgccaaaaaaaaaaaaaaaaaaaaaaaa

SEQ ID NO: 396888 - DNA, 736 bp, Homo Sapiens
cgagctggagaggtggtcggagaagtaggaacctcctgccgggctcgtggcggcttctgtccgctccgcggagggaagcgccttccccacaggacatcaatgcaagcttgaataagaaaaacaaattcttcctcctaagccatggcatatcagttatacagaaatactactttgggaaacagtcttcaggagagcctagatgagctcatacagtctcaacagatcaccccccaacttgcccttcaagttctacttcagtttgataaggctataaatgcagcactggctcagagggtcaggaacagagtcaatttcaggggctctctaaatacgtacagattctgcgataatgtgtggacttttgtactgaatgatgttgaattcagagaggtgacagaacttattaaagtggataaagtgaaaattgtagcctgtgatggtaaaaatactggctccaatactacagaatgaatagaaaaaatatgacttttttacaccatcttctgttattcattgcttttgaagagaagcatagaagagactttttatttattctagaattgcagaaatgactacactgtgctataccagagaattccagtagaaagaaacttgtaactctgtagcctcttacatcacctttattatacagcatgaaaaaccataacttttttttaaggacaaaagttgttgccttcctaagaaccttctttaataaactcattttaaaactctg

SEQ ID NO: 396889 - DNA, 1000 bp, Homo Sapiens; identical to SEQ ID NO: 286432

SEQ ID NO: 396890 - DNA, 1000 bp, Homo Sapiens; identical to SEQ ID NO: 116212

SEQ ID NO: 396891 - DNA, 1000 bp, Homo Sapiens; identical to SEQ ID NO: 116214

SEQ ID NO: 396892 - DNA, 1000 bp, Homo Sapiens
ttcctcgatgggaaccctgcttcttctgttgaacaggcgagtacaacagcatcatcagaagttttgtcctctgtagataaacccatagaagttgatgagcttctggatagcagcctagacccagaaccaacccaaagtaagcttgttcgcctggagccattgactgaagctgaagctagtgaagctacactgttttatttatgtgaacttgctcctgcacctctggatagtgatatgccacttttagatagctaaatccccaggaagtggactttacatgtatatattcatcaaaatgatgaactatttattttaaagtatcatttggtactttttttgtaaattgctttgttttgtttaatcagatactgtggaataaaagcaccttttgcttttctcactaaccacacactcttgcagagctttcaggtgttactcagctgcatagttacgcagatgtaatgcacattattggcgtatctttaagttggattcaaatggccatttttctccaattttggtaaattggatatcttttttttacaaatacgaccattaacctcagttaaatttttgtttgttttcctgtttgatgctgtctatttgcattgagtgtaagtcatttgaactaatggtataactcctaaagcttctctgctccagttatttttattaaatatttttcacttggcttatttttaaaactgggaacataaagtgcctgtatcttgtaaaacttcatttgtttcttttggttcagagaagttcatttatgttcaaagacgtttattcatgttcaacaggaaagacaaagtgtacgtgaatgctcgctgtctgatagggttccagctccatatatatagaaagatcgggggtgggatgggatggagtgagccccatccagttagttggactagttttaaataaaggttttccggtttgtgtttttttgaaccatactgtttataaaataaatacaatgaatgttgagtactagtgg

SEQ ID NO: 396893 - DNA, 1000 bp, Homo Sapiens; identical to SEQ ID NO: 116215

SEQ ID NO: 396894 - DNA, 1000 bp, Homo Sapiens
ccaaaaaggagacataagaaaaaaagcctcccaagagggacagcctcatctagacacggaatccaaaagaagctcaaaagggtggatcaggttcctcaaaagaaagatgactcaacttgtaactccacggtagagacaagggcccaaaaggcgagaactgaatgtgcccgaaagtcgagatcagaggagatcattgatggcacttcagaaatgaatgaaggaaagaggtcccagaagacgcctagtacaccacgaagggtcacacaaggggcagcctcacctgggcatggcatccaagagaagctccaagtggtggataaggtgactcaaaggaaagacgactcaacctggaactcagaggtcatgatgagggtccaaaaggcaagaactaaatgtgcccgaaagtccagatcgaaagaaaagaaaaaggagaaagatatctgttcaagctcaaaaaggagatttcagaaaaatattcaccgaagaggaaaacccaaaagtgacactgtggattttcactgttctaagctccccgtgacctgtggtgaggcgaaagggattttatataagaagaaaatgaaacacggatcctcagtgaagtgcattcggaatgaggatggaacttggttaacaccaaatgaatttgaagtcgaaggaaaaggaaggaacgcaaagaactggaaacggaatatacgttgtgaaggaatgaccctaggagagctgctgaagagtggacttttgctctgtcctccaagaataaatctcaagagagagttaaatagcaagtgaatttctactaccctctcagtcaccatgttgcagactttccctgtctggaggctcaccttagagcttctgagtttccaagctctgagtcacctccacatttgggcatggcatcttcaaaacaattaatttgcatagttaatttgggatggggaagcaaatgactctaaaataaaaattaaatgaaaaagctcaaaaaaaaaaaaaaaaaaaa

SEQ ID NO: 396895 - DNA, 1000 bp, Homo Sapiens
gccagctggacataccctgcctcctggccgtgccagccccacttcctgctcaagttccgtttgcagtaccgtccggcgcagcatccagcctggtccacggtggagccagctggactggaggaggtgatcacagatgctgtggctgggctgccccatgctgtacgagtcagtgcccgggactttctagatgctggcacctggagcacctggagcccggaggcctggggaactccgagcactgggaccataccaaaggagataccagcatggggccagctacacacgcagccagaggtggagcctcaggtggacagccctgctcctccaaggccctccctccaaccacaccctcggctacttgatcacagggactctgtggagcaggtagctgtgctggcgtctttgggaatcctttctttcctgggactggtggctggggccctggcactggggctctggctgaggctgagacggggtgggaaggatggatccccaaagcctgggttcttggcctcagtgattccagtggacaggcgtccaggagctccaaacctgtagaggacccaggagggcttcggcagattccacctataattctgtcttgctggtgtggatagaaaccaggcaggacagtagatccctatggttggatctcagctggaagttctgtttggagcccatttctgtgagaccctgtatttcaaatttgcagctgaaaggtgcttgtacctctgatttcaccccagagttggagttctgctcaaggaacgtgtgtaatgtgtacatctgtgtccatgtgtgaccatgtgtctgtgaggcagggaacatgtattctctgcatgcatgtatgtaggtgcctggggagtgtgtgtgggtccttggctcttggcctttccccttgcaggggttgtgcaggtgtgaataaagagaataaggaagttcttggaaaaaaaaaaaaaaaaaaaaaaaaaaaaaaaaaaaaaaaaaaaaaaaaaaaaaa

SEQ ID NO: 396896 - DNA, 1000 bp, Homo Sapiens; identical to SEQ ID NO: 221510

SEQ ID NO: 396897 - DNA, 1000 bp, Homo Sapiens; identical to SEQ ID NO: 221511

SEQ ID NO: 396898 - DNA, 1000 bp, Homo Sapiens; identical to SEQ ID NO: 286438

SEQ ID NO: 396899 - DNA, 1000 bp, Homo Sapiens; identical to SEQ ID NO: 221512

SEQ ID NO: 396900 - DNA, 1000 bp, Homo Sapiens; identical to SEQ ID NO: 286440

SEQ ID NO: 396901 - DNA, 1000 bp, Homo Sapiens; identical to SEQ ID NO: 221513

SEQ ID NO: 396902 - DNA, 1000 bp, Homo Sapiens; identical to SEQ ID NO: 286442

SEQ ID NO: 396903 - DNA, 688 bp, Homo Sapiens; identical to SEQ ID NO: 286443

SEQ ID NO: 396904 - DNA, 1000 bp, Homo Sapiens; identical to SEQ ID NO: 286444

SEQ ID NO: 396905 - DNA, 1000 bp, Homo Sapiens; identical to SEQ ID NO: 116216

SEQ ID NO: 396906 - DNA, 1000 bp, Homo Sapiens; identical to SEQ ID NO: 286445

SEQ ID NO: 396907 - DNA, 1000 bp, Homo Sapiens; identical to SEQ ID NO: 286446

SEQ ID NO: 396908 - DNA, 1000 bp, Homo Sapiens; identical to SEQ ID NO: 116217

SEQ ID NO: 396909 - DNA, 1000 bp, Homo Sapiens; identical to SEQ ID NO: 116218

SEQ ID NO: 396910 - DNA, 1000 bp, Homo Sapiens; identical to SEQ ID NO: 221516

SEQ ID NO: 396911 - DNA, 1000 bp, Homo Sapiens; identical to SEQ ID NO: 286452

SEQ ID NO: 396912 - DNA, 433 bp, Homo Sapiens
agaggagtcaaccctgaggaggaaaaagtagtatgatttgctggcgtcacccctctgctccgtgcgggcgcggcgaatggcaggtcccgaggtcgcagcttccactggcgcgggttgagttccctgttgcccttggtctcggggtcgctgtaggcgctgaggctgcagctatcatggtgaacttacttcagattgtgcgggaccactgggttcatgttcttgtccctatgggatttgtcattggatgttatttagacagaaagagtgatgaacggctaactgccttccggaacaagagtatgttatttaaaagggaattgcaacccagtgaagaagttacctggaagtaaagactggctagattatcgaatgttcacattttaaagttctgagagaaataaaaacatgaagaatctgaaaaaaaaaaaaaaaa

SEQ ID NO: 396913 - DNA, 541 bp, Homo Sapiens
gcacttcctgaagctgaaggtcagcatagacaaagggcctcagaatcgcgcaggcgcaattgtgccctggttcgccaagatgtcgttcccaaagtataagccgtcgagcctgcgcactctgcctgagaccctcgacccagccgaatacaacatatctccggaaacccggcgggcgcaagccgagcggttggccataagagcccagctgaaacgagagtacctgcttcagtacaacgatcccaaccgccgagggctcatcgaaaatcctgccttgcttcgttgggcctatgcaagaacaataaatgtctatcctaatttcagacccactcctaaaaactcactcatgggagctctgtgtggatttgggcccctcatcttcatttattatattatcaaaactgagagggataggaaagaaaaacttatccaggaaggaaaattggatcgaacatttcacctctcatattaagtctggcaatgatgactatatgtattcctgcctaaataaatcatctattaatcattaaaaaaaaaaaaaaaa

SEQ ID NO: 396914 - DNA, 1000 bp, Homo Sapiens; identical to SEQ ID NO: 116221

SEQ ID NO: 396915 - DNA, 1000 bp, Homo Sapiens; identical to SEQ ID NO: 116222

SEQ ID NO: 396916 - DNA, 899 bp, Homo Sapiens; identical to SEQ ID NO: 116223

SEQ ID NO: 396917 - DNA, 750 bp, Homo Sapiens; identical to SEQ ID NO: 286458

SEQ ID NO: 396918 - DNA, 1000 bp, Homo Sapiens; identical to SEQ ID NO: 116224

SEQ ID NO: 396919 - DNA, 1000 bp, Homo Sapiens; identical to SEQ ID NO: 286460

SEQ ID NO: 396920 - DNA, 1000 bp, Homo Sapiens; identical to SEQ ID NO: 116225

SEQ ID NO: 396921 - DNA, 1000 bp, Homo Sapiens; identical to SEQ ID NO: 286463

SEQ ID NO: 396922 - DNA, 1000 bp, Homo Sapiens; identical to SEQ ID NO: 116227

SEQ ID NO: 396923 - DNA, 1000 bp, Homo Sapiens; identical to SEQ ID NO: 221519

SEQ ID NO: 396924 - DNA, 1000 bp, Homo Sapiens; identical to SEQ ID NO: 116228

SEQ ID NO: 396925 - DNA, 1000 bp, Homo Sapiens; identical to SEQ ID NO: 221520

SEQ ID NO: 396926 - DNA, 1000 bp, Homo Sapiens; identical to SEQ ID NO: 116229

SEQ ID NO: 396927 - DNA, 1000 bp, Homo Sapiens
aacttcagaagcagtttgcatcactgactctcccagagtttcctcattggtggcacctaccttttacaaattcagatcacagaagattcagagatctaaatcattacatggaacagatattaaatgtatcacatgaagttacaaacagtgattgtgtacttagctttttcctctctgaggctgtgcaacaaacagttgaatcatcacctgtgtacctaggtgagaagaagtttccagacaagaagcctaaggtgcagttagtcatatcctacgaggatgtgaagctgaccatactagtgaaacacatgaaaaacattcatctcccagatggctctgcgcccagtgcacatgttgaattttatcttttaccatatcccagtgaagttctgaggaggaaaacaaaatctgttccaaaatgtacggaccccacttacaatgaaattgtagtatatgatgaagtcacagagctccaaggacatgtcttaatgcttattgtgaagagtaaaactgtatttgtgggagcaattaacatccgactctgtagtgtcccactcgataaagaaaaatggtatccattaggaaacagtataatttcaccattgctatgaacatatgcattattcattaactacttgtattttttcacttccgggcctctgaatcacataagtaaggcatctttgttgtcaaagacagcacagggtattaaggacacagaaaaaaaatcagaattagtcttttgtgttgtttattttctacctgtgctttcattgttttttcataatcttttctccttcagtggagtactgattgcatgaaatttgatgtgtaaaataataaaagacctttaattaatcattttaatatattttaaattaaacataggtttacatttgttttaattgtgtgcctacagttaaaagcagtatttttaatgtattttataagaaagacaatcaaataaacctcatcaattaattcaaaaaaaaaaaaaaaaaaa

SEQ ID NO: 396928 - DNA, 1000 bp, Homo Sapiens; identical to SEQ ID NO: 286468

SEQ ID NO: 396929 - DNA, 1000 bp, Homo Sapiens; identical to SEQ ID NO: 221523

SEQ ID NO: 396930 - DNA, 1000 bp, Homo Sapiens
gatgcagtcaacaacacagagtgctggaagcctgtggcagaatacattgatcagcagtttgagcagtatttccgagacgagagtggcctgaaccgaaagaacatccaagacaacagggtgcactgctgcctgtacttcatctcacccttcggccatgggctccggccattggatgttgaattcatgaaggccctgcatcagcgggtcaacatcgtgcctatcctggctaaggcagacacactgacacctcccgaagtggaccacaagaaacgcaaaatccgggaggagattgagcattttggaatcaagatctatcaattcccagactgtgactctgatgaggatgaggacttcaaattgcaggaccaagccctaaaggaaagcatcccatttgcagtaattggcagcaacactgtagtagaggccagagggcggcgagttcggggtcgactctacccctggggcatcgtggaagtggaaaacccagggcactgcgactttgtgaagctgaggacaatgctggtacgtacccacatgcaggacctgaaggatgtgacacgggagacacattatgagaactaccgggcacagtgcatccagagcatgacccgcctggtggtgaaggaacggaatcgcaacaaactgactcgggaaagtggtaccgacttccccatccctgctgtcccaccagggacagatccagaaactgagaagcttatccgagagaaagatgaggagctgcggcggatgcaggagatgctacacaaaatacaaaaacagatgaaggagaactattaactggctttcagccctggatatttaaatctcctcctcttcttcctgtccatgccggcccctcccagcaccagctctgctcaggccccttcagctactgccacttcgccttacatccctgctgactgcccagagactcagaggaaataaagtttaataaatctgtaggtggctaaaaaaaaaaaaaaaaaaaaaaaaaaaaaaa

SEQ ID NO: 396931 - DNA, 1000 bp, Homo Sapiens
ctttaacggtgaatatgcaggttttgatgagacgcagccaacagctgaatctggtggaaaaggaaaagtgattaaacttttaaaggaaaaatttcattttaagaaaataatcatgattggagatggtgccacagatatggaagcctgtcctcctgctgatgctttcattggatttggaggaaatgtgatcaggcaacaagtcaaggataacgccaaatggtatatcactgattttgtagagctgctgggagaactggaagaataacatccattgtcgtacagctccaaacaacttcagatgaatttttacaagttatacagattgatactgtttgcttacagttgcctattacaacttgctatagaaagttggtacaaatgatctgtactttaaactacagttaggaatcctagaagattgctttttttttttttttaactgtagttccagtattatatgatgactattgatttcctggagaggttttttttttttttgagacagaatcttgctctgttgcccaggctggagtgcagtggcgcggtctcggctcactgcaagctctgcctcccaggttcacgccattctcctgcctcagcctcccgagtagctgggactacaggcacccgccaccacatccggctaattttttgtatttttagtagagacggggtttgaccgtgttagccaggatggtcttgatctcctgaccttgtgatccgcctgcctcagcctcccaaagtgctgggattacaggcttgggccaccgcgcccagccaatgtcctagagagttttgtgatctgaattctttatgtatatttgtagctatatttcatacaaagtgctttaagtgtggagagtcaattaaacacctttactcttagaaatacggattcggcagccttcagtgaatattggtttctctttggtatgtcaataaaagtttatccgtatgtcagaacggatttgtggaaaaaaaaaaaaaaaaaaaaaaaaaa

SEQ ID NO: 396932 - DNA, 1000 bp, Homo Sapiens; identical to SEQ ID NO: 286471

SEQ ID NO: 396933 - DNA, 1000 bp, Homo Sapiens; identical to SEQ ID NO: 221524

SEQ ID NO: 396934 - DNA, 1000 bp, Homo Sapiens; identical to SEQ ID NO: 116231

SEQ ID NO: 396935 - DNA, 1000 bp, Homo Sapiens
tttggctttgttggggaagcttgatgctattaatgtggaaaaggcaatcgaatttgttttatcctgtatgaactttgacggtggatttggttgcagaccaggttctgaatcccatgctgggcagatctattgttgcacaggatttctggctattacaagtcagttgcatcaagtaaattctgatttacttggctggtggctttgtgaacgacaattaccctcaggcgggctcaatggaaggccggagaagttaccagatgtatgctactcatggtgggtcctggcttccctaaagataattggaagacttcattggattgatagagagaaactgcgtaatttcattttagcatgtcaagatgaagaaacggggggatttgcagacaggccaggagatatggtggatccttttcataccttatttggaattgctggattgtcacttttgggagaagaacagattaaacctgttaatcctgtcttttgcatgcctgaagaagtgcttcagagagtgaatgttcagcctgagctagtgagctagattcattgaattgaaagttgcatagtatagttttgccattttaacatttctgtatttgaagtgcttatcgaatctaaaagtgactactgttaatattttgtatattgtgttaaattaattttaataaattatataattatacatattgtaaaataaagaccggtattttattttctgctttttattctgaagtcctgttattctgactacagttctttgtgtatacttctgtgtctgttatgttcaataactgagctaacataaaataactctaggtttctacttgatttttcccccatgtatacctttcatctgttctatagcaagttgatgtaaattggtttgtcaacaagaatgttaactgatgaaagtggatagaacccatacatgaattaaatgatgcacaaaataaatggctgttgaaatttgaaaaaaaaaaaaaaaaaaaaaaaaaaaaaa

SEQ ID NO: 396936 - DNA, 1000 bp, Homo Sapiens; identical to SEQ ID NO: 286473

SEQ ID NO: 396937 - DNA, 768 bp, Homo Sapiens
ccttcagcataaaagctgatccacaaacaagaggagcaccagacctcctcttggcttcgagatggcttcgccacaccaagagcccaaacctggagacctgattgagattttccgccttggctatgagcactgggccctgtatataggagatggctacgtgatccatctggctcctccaagtgagtaccccggggctggctcctccagtgtcttctcagtcctgagcaacagtgcagaggtgaaacgggggcgcctggaagatgtggtgggaggctgttgctatcgggtcaacaacagcttggaccatgagtaccaaccacggcccgtggaggtgatcatcagttctgcgaaggagatggttggtcagaagatgaagtacagtattgtgagcaggaactgtgagcactttgtcgcccagctgagatatggcaagtcccgctgtaaacaggtggaaaaggccaaggttgaagtcggtgtggccacggcgcttggaatcctggttgttgctggatgctcttttgcgattaggagataccaaaaaaaagcaacagcctgaagcagccacaaaatcctgtgttagaagcagctgtgggggtcccagtggagatgagcctcccccatgcctccagcagcctgaccctcgtgccctgtctcaggcgttctctagatcctttcctctgtttccctctctcgctggcaaaagtatgatctaattgaaacaagactgaaggatcaataaacagccatctgccccttcaaaaaaaaaaa

SEQ ID NO: 396938 - DNA, 1000 bp, Homo Sapiens; identical to SEQ ID NO: 221525

SEQ ID NO: 396939 - DNA, 1000 bp, Homo Sapiens; identical to SEQ ID NO: 116232

SEQ ID NO: 396940 - DNA, 1000 bp, Homo Sapiens; identical to SEQ ID NO: 286476

SEQ ID NO: 396941 - DNA, 1000 bp, Homo Sapiens; identical to SEQ ID NO: 286477

SEQ ID NO: 396942 - DNA, 1000 bp, Homo Sapiens; identical to SEQ ID NO: 118646

SEQ ID NO: 396943 - DNA, 1000 bp, Homo Sapiens; identical to SEQ ID NO: 286479

SEQ ID NO: 396944 - DNA, 1000 bp, Homo Sapiens
gtgaaatagtcaaactaaaaccaaagatggtcactatggtagagattgaccaaatggtgattgatgggtgtaagaaatacatgcgaaaaacgtgtggcgatgtcttagacaatcttaaaggagactgctatcaggttctaatagaagactgtatcccggtactgaagaggtacgccaaagaagggagagaatttgattatgtgattaatgatttgacagctgttccaatctccacgtctccagaagaagattccacatgggagtttctcagactgattcttgacctctcaatgaaagtgttgaaacaggatgggaaatattttacacaggggaactgtgtcaatctgacagaagcactgtcgctctatgaagaacagctggggcgcctgtattgtcctgtggaattttcaaaggagatcgtctgtgtcccttcatacttggaattgtgggtattttacactgtttggaagaaagctaaaccctgaagatcagtagcccctaatcacatgtgctgcaaatagccttcctgacctccatatgctgtacatgacatcaaaatgagtcaggcaattgattgtgaattccttaaagttttcctttttttaataattatttttaatttaaaaaagcaaatggaaaatgtatattttgatgagcttagggtgttttttttttgaaagtcagctgaaggatggttagacagcacagcgaagactgctaaatgcactgaccccccccattagaatgtgatttttgttcctttttatttctctgtgggcttttgtttttgtttttgttttggtagatcttcaatttggatatttggaggagtgaacatcgttgttttgctggagggaagatcttgatggtgtttctttccccaaaaattgacttagatattaaaatttggtgcttataagagagagttaaaaaaaaataggattgcttcaattaaaattacaaaagagacaaaaaaaaaaaaaaaaaaaaaaaaaaaaaa

SEQ ID NO: 396945 - DNA, 1000 bp, Homo Sapiens; identical to SEQ ID NO: 286480

SEQ ID NO: 396946 - DNA, 1000 bp, Homo Sapiens; identical to SEQ ID NO: 221526

SEQ ID NO: 396947 - DNA, 1000 bp, Homo Sapiens; identical to SEQ ID NO: 286482

SEQ ID NO: 396948 - DNA, 1000 bp, Homo Sapiens; identical to SEQ ID NO: 116236

SEQ ID NO: 396949 - DNA, 1000 bp, Homo Sapiens; identical to SEQ ID NO: 293476

SEQ ID NO: 396950 - DNA, 574 bp, Homo Sapiens
gacggttaccccggctctccgcccctccttctcgcgcgctcgagggaccatggccgatcctcgcgtgagacagatcaagatcaagaccggcgtggtgaagcggttggtcaaagaaaaagtgatgtatgaaaaagaggcaaaacaacaagaagaaaagattgaaaaaatgagagctgaagacggtgaaaattatgacattaaaaagcaggcagagatcctacaagaatccaggatgatgatcccagattgccagcgcaggttggaagccgcatatttggatcttcaacggatactagaaaatgaaaaagacttggaagaagctgaggaatataaagaagcacgtttagtactggattcagtgaagttagaagcctgaaacttttctcgtatggggtggtttttgcattaaatcctggggtccattttacaatccattatttttgaccactgctatgtgttcaagtagtatgagaatgtgattgtttttatctggttacatatatatttctttgtctaatttaatatgtcaaataaatgagttcatctaaaaaaaaaaaaaaaaaaaaaaaaaaaa

SEQ ID NO: 396951 - DNA, 1000 bp, Homo Sapiens
cccgtggtggtggtgcgacagcggcaggcggccaacgcgcgggagcgggaccgcactcagagcgtgaacacggccttcacggcgctgcgcacgctcatccccaccgagccggtggaccgcaagctgtccaagatcgagacgctgcgcctggcgtccagctacatcgcgcacctggccaacgtgctgctgctgggcgactcggccgacgacgggcagccgtgcttccgtgccgcgggcagtgccaagggcgccgtccccgccgccgccgacggcggccgccagccgcgctccatctgcaccttctgcctcagcaaccagcgcaaggggggtggccgtcgtgacctggggggcagctgcttgaaggtgaggggggtggccccccttcgagggccacggagatgagcctggaccctggagaaggaggccaggagccagccactggctggacagggaagaagaccccaggagccaagcccaccccttctttgtgtagggaccgggggaccatggcctgttccgggacactctgggcagggccctcgggacatctccacccgatcctggagagctgtgaggatccattcagcctgcccagctctggctggtcagagacaaggcagaacttttggaaaaacaaagactgttggtgacagggtgtgtgtgtatctgtgcgtgagtgtgagtgtgtgtgagagagaattggtgagtttaaaataaaagctatttttaaataaaagacgtcgttctgagctgaggagagtcccgtggacatcggaggtcagaggtgggccctcccctggacctagagagaggcacagatgttctgggggctgccctgagccctggaagggtgggggtggggcgggggaaggcaggcagagccccctctccgggcgccataaccaaactttcctcagtctgctgtttatcagatgttcttaacaactgttaggtgtctgatatggttggtaaagaaatcttaattttacttatttttgaa

SEQ ID NO: 396952 - DNA, 1000 bp, Homo Sapiens; identical to SEQ ID NO: 221527

SEQ ID NO: 396953 - DNA, 1000 bp, Homo Sapiens; identical to SEQ ID NO: 116238

SEQ ID NO: 396954 - DNA, 1000 bp, Homo Sapiens; identical to SEQ ID NO: 116239

SEQ ID NO: 396955 - DNA, 1000 bp, Homo Sapiens; identical to SEQ ID NO: 286488

SEQ ID NO: 396956 - DNA, 1000 bp, Homo Sapiens; identical to SEQ ID NO: 221529

SEQ ID NO: 396957 - DNA, 1000 bp, Homo Sapiens; identical to SEQ ID NO: 224110

SEQ ID NO: 396958 - DNA, 1000 bp, Homo Sapiens
tccccatgcggtttttcctctgaagtttatttcaggttccttcttgcctgctctgtggatcccctgctggggactcccagctctgaaatttgggaaaaagtagcccatgggcctttagaatgctttaatcctttctttagaatgctgtttaaacaccatttaccctacttatccctcaatgcacatgattgataccgttcatacaaaatggtcttacatctatgtaaaattttctgattcatctatttgaaaacattacacttaacaatgaaaaaagtttttcctccactgaaccctggaaacatggtccagttttgtgtgtgtgcgtgtgtgtaaatgtgtacacacagacataaagtacttgccctatttagtttgtggctaatgtggacacacaaaagctctttatgttataaatttttattgtcactaaaaaattttactgtctaaataagtaccttttattggagaaaaatcaaaaccccaaacaaacactgtggttgtttggttccattatagcacaattttgtgccatttctgggagcatttacagatgaatccccacacttagccattgaatgtaaaggggaaaaataaggtgagaatttgtaaatacttatctgttattttcaatatgttctatccttctacccaaatatataaaacaggaatttgcattcatgtgcatttaccaagaggttgttgttgttacttactgatcatgtgaagtggtgtcttaaacaactaaaagcgatgaaggttcatatgtttactcaaagaccattggcattcagaggatgctggacattaactggaactgctacttccaattcaataatgggagatttcaaatgcaaatctttaacttcatcttaaagatgaaatggttgcagaaaatctgtttagctccaactttggcttaatttaaatcaaagaacatttatgtaaccagatcagaaaatacagctgaaaatttggaattcgagctcggtacccgggg

SEQ ID NO: 396959 - DNA, 1000 bp, Homo Sapiens; identical to SEQ ID NO: 221530

SEQ ID NO: 396960 - DNA, 1000 bp, Homo Sapiens; identical to SEQ ID NO: 116241

SEQ ID NO: 396961 - DNA, 1000 bp, Homo Sapiens
gggacgagggctggaagtggggtggctgctctgccgacatccgctacggcatcggcttcgccaaggtctttgtggatgcccgggagatcaagcagaatgcccggactctcatgaacttgcacaacaacgaggcaggccgaaagatcctggaggagaacatgaagctggaatgtaagtgccacggcgtgtcaggctcgtgcaccaccaagacgtgctggaccacactgccacagtttcgggagctgggctacgtgctcaaggacaagtacaacgaggccgttcacgtggagcctgtgcgtgccagccgcaacaagcggcccaccttcctgaagatcaagaagccactgtcgtaccgcaagcccatggacacggacctggtgtacatcgagaagtcgcccaactactgcgaggaggacccggtgaccggcagtgtgggcacccagggccgcgcctgcaacaagacggctccccaggccagcggctgtgacctcatgtgctgtgggcgtggctacaacacccaccagtacgcccgcgtgtggcagtgcaactgtaagttccactggtgctgctatgtcaagtgcaacacgtgcagcgagcgcacggagatgtacacgtgcaagtgagccccgtgtgcacaccaccctcccgctgcaagtcagattgctgggaggactggaccgtttccaagctgcgggctccctggcaggatgctgagcttgtcttttctgctgaggagggtacttttcctgggtttcctgcaggcatccgtgggggaaaaaaaatctctcagagccctcaactattctgttccacacccaatgctgctccaccctcccccagacacagcccaggtccctccgcggctggagcgaagccttctgcagcaggaactctggacccctgggcctcatcacagcaatatttaacaatttattctgataaaaataatattaatttatttaattaaaaagaattcttccacaaaaaaaaaaaaaaaaaa

SEQ ID NO: 396962 - DNA, 1000 bp, Homo Sapiens
aaggactcggaactcgtctatctgcagagctcacctgacttctgcatgaagaatgagaaggtgggctcccacgggacacaagacaggcagtgcaacaagacatccaacggaagcgacagctgcgaccttatgtgctgcgggcgtggctacaacccctacacagaccgcgtggtcgagcggtgccactgtaagtaccactggtgctgctacgtcacctgccgcaggtgtgagcgtaccgtggagcgctatgtctgcaagtgaggccctgccctccgccccacgcaggagcgaggactctgctcaaggaccctcagcaactggggccaggggcctggagacactccatggagctctgcttgtgaattccagatgccaggcatgggaggcggcttgtgctttgccttcacttggaagccaccaggaacagaaggtctggccaccctggaaggagggcaggacatcaaaggaaaccgacaagattaaaaataacttggcagcctgaggctctggagtgcccacaggctggtgtaaggagcggggcttgggatcggtgagactgatacagacttgacctttcagggccacagagaccagcctccgggaaggggtctgcccgccttcttcagaatgttctgcgggaccccctggcccaccctggggtctgagcctgctgggcccaccacatggaatcactagcttgggttgtaaatgttttcttttgttttttgctttttcttcctttgggatgtggaagctacagaaatatttataaaacatagctttttctttggggtggcacttctcaattcctctttatatattttatatatataaatatatatgtatatatataatgatctctattttaaaactagctttttaagcagctgtatgaaataaatgctgagtgagccccagcccgcccctgcagttcccggcctcgtcaagtgaactcggcagaccctggggctggcagagggagctctccagtttccaggca

SEQ ID NO: 396963 - DNA, 1000 bp, Homo Sapiens; identical to SEQ ID NO: 286495

SEQ ID NO: 396964 - DNA, 1000 bp, Homo Sapiens
tgatccaaagatgccccgagaaggtatgttccaccatggggttcccatccctgtgcccccactggaggtgctgaaacttggggagcagatgacccaggaagcccgagagcatctctacctcgtcctcttctttgacaacaaacgaacctggcagtggctgcccaggaccaagctggttcctctgggtgtgaaccaggacctagacaaggagaagatgctggagggccgcaagtccaacatccgcaagtcagtacagatcgcctaccacagggctctgcagcaccgcagcaaggtgcaaggcgagcagagcagtgagaccagcgatagtgattgatactgctcaacacagcccaacctatagtgccctgtgacttctctcctcccctttgctcactgtcctggagtggcaccggcctctgcactgactcatttctggtcttggggccagtctcaggggaagctgggtgggggaggtccctcctgccctaagtgcagctggactgtacagaacactccaagggccaatggcagttcagcgcaaggagagggagggcccacaggtcagaaaaagctccagagacctcacagcattgtagggcggggtggtgggccaaagttaggacactgcgtaaaacaggccatcccaccacctctacctgctcatgccaggagaatccataactgcctagaggcctggggcccctaccggtcgtgaggtgagtgggcatctgtccagcctggaagaggggcactaggtgactccctcccctgctgttgtaaatactgtaattatcggagaatttaaattattctcatttgtaactgcgtttccgggtcgcgccagagtcatttggtactaaaaaaaaaaaaaaaaaagactgggggctgtccccatttcccttctctttcccatagattcccccacctttcaaactggtttgtatttatttcaaaggaagaaaatatattgattcttagaaaataaactgtcaatttagaa

SEQ ID NO: 396965 - DNA, 1000 bp, Homo Sapiens; identical to SEQ ID NO: 286496

SEQ ID NO: 396966 - DNA, 1000 bp, Homo Sapiens; identical to SEQ ID NO: 286498

SEQ ID NO: 396967 - DNA, 1000 bp, Homo Sapiens
aggtgtggacatcatccggacaaacctggaatttctccaagagcagtttaatagcattgctgcgcatgtgctgcattgcacagatagtggatttggggcccggttgctggagttgtgtaaccaaggcctgtttgaatgcctggccctaaacctgcactgcttggggggacagcagatggagcttgctgctgttatcaatggccgaattcgtcgtatgtctcgtggggtgaatccctccttggtgagctggctgaccactatgatgggactgaggcttcaggtggtactggagcacatgcctgtaggccctgatgccattctcagatacgttcgcagggttggtgatcccccccagccacttcctgaggagccaatggaagttcagggagcagaaagagcttcccctgagcctcagcgggagaatgcttccccagcccctggaacaacagcagaagaggccatgtcccgaggtccacctcctgctcctgaggggggctcccgggatgaacaggatggagcttcagctgagacagaaccttgggcagctgcagtccccccagaatgggtccctattatccagcaggacattcagagccagcggaaggtgaaaccgcagccccctctgagtgatgcctacctcagtggtatgcctgccaagagacgcaagacgatgcagggtgagggcccccagctgcttctctcagaggctgtgagccgggcagctaaggcagccggagctcggcccctgacgagccccgagagcctgagccgggacctggaggcaccagaggttcaggagagctacaggcagcagctccggtctgatatacaaaaacgactgcaggaagaccccaactacagtccccagcgcttccccaatgcccagcgggcctttgctgatgatccttagctctttgctctatggcccttcctcatcaggggaccgtttcccccctcttccttcacagtatttaagaaataaaagtcggatttttctggc

SEQ ID NO: 396968 - DNA, 1000 bp, Homo Sapiens; identical to SEQ ID NO: 286499

SEQ ID NO: 396969 - DNA, 1000 bp, Homo Sapiens; identical to SEQ ID NO: 284382

SEQ ID NO: 396970 - DNA, 1000 bp, Homo Sapiens
cgccagctgctcagtgactacgggccaccgtccctaggctacacccagggaactgggaacagccaggtgccccaaagcaaatacgcggagctgctggccatcattgaagagctggggaaggagatcagacccacgtacgcagggagcaagagtgccatggagaggctgaagcgcggcatcattcacgctagaggactggttcgggagtgcttggcagaaacggaacggaatgccagatcctagctgccttgttggttttgaaggatttccatctttttacaagatgagaagttacagttcatctcccctgttcagatgaaacccttgttttcaaaatggttacagtttcgtttttcctcccatggttcacttggctctgaacctacagtctcaaagattgagaaaagattttgcagttaattaggatttgcattttaagtagttaggaactgcccaggttttttttgttttttaagcattgatttaaaagatgcacggaaagttatcttacagcaaactgtagtttgcctccaagacaccattgtctccctttaatcttctcttttgtatacatttgttacccatggtgttctttgttccttttcataagctaataccactgtagggattttgttttgaacgcatattgacagcacgctttacttagtagccggttcccatttgccatacaatgtaggttctgcttaatgtaacttcttttttgcttaagcatttgcatgactattagtgcttcaaagtcaatttttaaaaatgcacaagttataaatacagaagaaagagcaacccaccaaacctaacaaggacccccgaacactttcatactaagactgtaagtagatctcagttctgcgtttattgtaagttgataaaaacatctggaagaaaatgactaaaactgtttgcatctttgtatgtatttattacttgatgtaataaagcttattttcattaacaatttgtattaaaaaaaaaaaaaaaa

SEQ ID NO: 396971 - DNA, 1000 bp, Homo Sapiens; identical to SEQ ID NO: 286500

SEQ ID NO: 396972 - DNA, 1000 bp, Homo Sapiens
ttgggcggcaggagctgctgcaccgggtagctggcgaggggctggctgtggactacaccttcagccgccaacctttctccggggatccccacatggtgtccgtgcacatccacttctccaacagctctgatacccccatcaagggcctgcatgtgggcactcccaaactgcctgctggcatcagcatccaagaatttcccgaaattgagtccctggcacctggagaatctgccactgctgtaatgggcattaatttctgtgactcaacccaggcagccaacttccagctgtgcacccagacccgacagttctacgtctccattcagccacctgttggggagctgatggcccctgtgttcatgagtgaaaatgagtttaagaaggaacagggaaagctgatgggcatgaatgagatcacagagaaactcatgctgccagacacctgtcggagtgaccacattgtggtgcagaaagtgactgccactgccaacctgggtcgtgttccttgtgggacatctgatgagtacaggtttgcagggaggacactgactggtggaagcctcgttctgctgaccctggatgcccggccagctggagctgcccagctgactgtcaacagcgagaaaatggtgattggcaccatgctggtaaaggatgtgatacaggctctgacccagtgacttccaaatgctgtgacctgtttggctcccatctatacctccccatgacacctaggctgtcagtctctctcatctttctctctctctctcatcatcctcctcatgccagatagcattcagggtgtcctctctccctctggaggaccaagccctcccctaatgccctccccatggattccttagtgatctgtgcagagagagatggcagccactcccttcagtcctcccagatttctgtagctatttatgtagcaggctcaataaaatgtcttctctctaaaaaaaaaaaaaaaaaaaaaaaaaaaaaaaaaaaaaaaaaa

SEQ ID NO: 396973 - DNA, 1000 bp, Homo Sapiens; identical to SEQ ID NO: 286501

SEQ ID NO: 396974 - DNA, 1000 bp, Homo Sapiens; identical to SEQ ID NO: 286502

SEQ ID NO: 396975 - DNA, 1000 bp, Homo Sapiens; identical to SEQ ID NO: 116242

SEQ ID NO: 396976 - DNA, 1000 bp, Homo Sapiens; identical to SEQ ID NO: 116243

SEQ ID NO: 396977 - DNA, 1000 bp, Homo Sapiens; identical to SEQ ID NO: 116244

SEQ ID NO: 396978 - DNA, 1000 bp, Homo Sapiens; identical to SEQ ID NO: 221532

SEQ ID NO: 396979 - DNA, 1000 bp, Homo Sapiens; identical to SEQ ID NO: 286507

SEQ ID NO: 396980 - DNA, 1000 bp, Homo Sapiens; identical to SEQ ID NO: 221533

SEQ ID NO: 396981 - DNA, 1000 bp, Homo Sapiens; identical to SEQ ID NO: 221534

SEQ ID NO: 396982 - DNA, 1000 bp, Homo Sapiens
aagtgcaatagattttcaagttattgtgccttgttctaaaattttaagtagggcacttgacagtattgaggtcatttgttaaggtgctatttcaattagtgtaggtttagactcttgtacatttctcccataactttttacaaagtattttgttgcacattcagagaattttatatatatatgtcttgtgtgggtgtcctcgaccttccaatcttatttcgtctcttggagattgttgaatgcagccagtgaagaagtagattcctaaattttattggggaccatggaatggtagttgagaagaaaactatttgcacacaacagattttagatactttttgctgctagttgtgtaatatttattgaacattttgacaaatatttatttttgtaagcctaaaaatgattctttgaaagtttaaagaaacttgaccaaaagacagtacaaaaaacactggcacttgaatgttgaatgtcaccgtatgtgaaataatatattttggggtagtgtgagcttttaatgttaagtctgttaaacttgagtcaaattaagcagacccggcattggcaatgtagctgtaattttctgacaaaatttaagacaaaattgtcaacttgaaactaaaacatgccaaggttttgatatacttgtcttaagatattaatgaaacaattttgaacactgataggaaggtccacatccacaaagtttctcttgagttttgttatgtgttttgctgtgtttgattttcagtgattgtctggtatatttacagtcctcaaacatggttatttctgtcagtgacttaacattcggttttaccagccagcagtattcttcagtaaataaagaatggaattgctgaatgtaatcattgaacctcgagtcactgtaaaagttcagtaattgcttattgtattagttttagatgctggcaccgcatgtgctctgtttattctgattttactaaaataaaaagttcaaaagtcaaaaaaaaaa

SEQ ID NO: 396983 - DNA, 1000 bp, Homo Sapiens; identical to SEQ ID NO: 116248

SEQ ID NO: 396984 - DNA, 1000 bp, Homo Sapiens; identical to SEQ ID NO: 286512

SEQ ID NO: 396985 - DNA, 1000 bp, Homo Sapiens; identical to SEQ ID NO: 286513

SEQ ID NO: 396986 - DNA, 1000 bp, Homo Sapiens; identical to SEQ ID NO: 286514

SEQ ID NO: 396987 - DNA, 1000 bp, Homo Sapiens; identical to SEQ ID NO: 116249

SEQ ID NO: 396988 - DNA, 1000 bp, Homo Sapiens; identical to SEQ ID NO: 221536

SEQ ID NO: 396989 - DNA, 1000 bp, Homo Sapiens; identical to SEQ ID NO: 116250

SEQ ID NO: 396990 - DNA, 1000 bp, Homo Sapiens; identical to SEQ ID NO: 221537

SEQ ID NO: 396991 - DNA, 1000 bp, Homo Sapiens; identical to SEQ ID NO: 116251

SEQ ID NO: 396992 - DNA, 1000 bp, Homo Sapiens; identical to SEQ ID NO: 116252

SEQ ID NO: 396993 - DNA, 1000 bp, Homo Sapiens
gggtaaataaaaaagggaagtacagatagtttaggttgtgcatggttgcatgaattttgaagtcatttctatgtggagcattatttttcttcttgttaaatatagaaaaaaaaagagattctagtacaaagttactgtttaacaaaagcaacataaactctgggaaagatttcattttgccatgttatatttactgtttattctgtgtactagtacatatctttaaattaccaaaaaacaagaaacaaaacataaaaaccccaaaactatcacttggaattagcaatatcacccaactggctttaaaattgaaaatttaaataacatggtggcatgaagtacaattcgagtattaggcaatttgcatagtgttcctcatgctactttctgttacacctctattatattagttttgaatataaacatctttttcagaccaaaaaaaactttattgtatgagagcttatcttatcctgtttatttttccaatgcttttctgtaatacattatgtaatttaaaaaatattcctttttaaacagcaacagaaatgcactataaaatatagtatgtgattaaccaatcctgcttccatatttaagcactgggaatggaaacttaatctctgtgactacaaagggaagtttttgtgccttggtgttccagtcactgattgtggttttagaatcttctgtggctgacttcttgtattcaactctggtttattatcttaatcttcaacttcagacatatatttgtgtgtttatatgctcacaggtggactgagaaatcagttacatcttaagtgacctacagggtatatgttggcaaaagcagactgtgtatatgtcttataaagttgaatttatgttcagtgtgtttggaagtgtatagcatgtaaattatttcatatatgatttaaaggtaattaaatgttcacattttactttgaatgtttttcttctggataaaacaaatggaatcaaaaaaaaaaaaaaaaaa

SEQ ID NO: 396994 - DNA, 1000 bp, Homo Sapiens; identical to SEQ ID NO: 116253

SEQ ID NO: 396995 - DNA, 1000 bp, Homo Sapiens; identical to SEQ ID NO: 286522

SEQ ID NO: 396996 - DNA, 1000 bp, Homo Sapiens
ggagttacaagaggctaccaaagaattccagattaaagaggatattcctgaaacaaagatgaaattcttatcagttgaaactcctgagaatgacagccagttgtcaaatatctcctgttcgtttcaagtgagctcgaaagttccttatgagatacaaaaaggacaagcacttatcacctttgaaaaagaagaagttgctcaaaatgtggtaagcatgagtaaacatcatgtacagataaaagatgtaaatctggaggttacggccaagccagttccattaaattcaggagtcagattccaggtttatgtagaagtttctaaaatgaaaatcaatgttactgaaattcctgacacactgcgtgaagatcaaatgagagacaaactagagctgagcttttcaaagttccgaaatggaggcggagaggtggaccgcgtggactatgacagacagtccgggagtgcagtcatcacgtttgtggagattggagtggctgacaagattttgaaaaagaaagaataccctctttatataaatcaaacctgccatagagttactgtttctccatacacagaaatacacttgaaaaagtatcagatattttcaggaacatctaagaggacagtgcttctgacaggaatggaaggcattcaaatggatgaagaaattgtggaggatttaattaacattcactttcaacgggcaaagaatggaggtggagaagtagatgtggtcaagtgttctctaggtcaacctcacatagcatactttgaagaatagacttaacagaatcatgaaaactatagctttttaacccggattactgtaaatgtttgacaagaatgaatatgcttttccttaaaaaatgaaaactttaatttttaccatccatttatgtttagatacaaaacttatttccatgtttctgaatcttctttgtttcaaatggtgctgcatgttttcaactacaataagtgcactgtaataaaaagttttgtttat

SEQ ID NO: 396997 - DNA, 1000 bp, Homo Sapiens; identical to SEQ ID NO: 221538

SEQ ID NO: 396998 - DNA, 1000 bp, Homo Sapiens; identical to SEQ ID NO: 221539

SEQ ID NO: 396999 - DNA, 1000 bp, Homo Sapiens
ctgcaccctactgggcgggactacggctgatgccatgtgccccatcctggagtttgaagcagaccgccgcgccttcatcatcaccatcaattctttcggcacagagctgtccaaagaggaccgtgccaagctctttccacactgtgggcggctctaccctgagggcctggcgcagctggctcgggctgacgactatgaacaggtcaagaacgtggccgattactacccggagtacaagctgctcttcgagggtgcaggtagcaaccctggagacaagacgctggaggaccgattctttgagcacgaggtaaagctgaacaagttggccttcctgaaccagttccactttggtgtcttctatgccttcgtgaagctcaaggagcaggagtgtcgcaacatcgtgtggatcgctgaatgtatcgcccagcgccaccgcgccaaaatcgacaactacatccctatcttctagcgtcctggcccaaggctctcaattgcactctttgtgtgtgtgtgtgtgtgtgtgcgcgtgtgtgtgcgtgtgtgtgtatgtggtctgtgacaagcctgtggctcacctgcctgtccggggtgtagtacgctgtcctagcggctgcccagttctcctgaccctcttagagactgttcttaggcctgaaaaggggctgggcacccccccccaccaaggatggacgaagaccccctccagagcaaggaggccccctcagccctgtggttacagccgctgatgtatctaagaagcatgtcactttcatgttcctccctaactccctgacctgagaaccctggggcctgggggcagtttgagcctcctctcccttctgtgggtcgctcccagagccatggcccatgggaaggacagagtgtgtgtgtccttggggcctggggggatgttgctcctcagctccctccctcagccctgcccctctgagacaataaaactgccctctctaaggcaaaaaaaaaaaaaaaaaaaaaaaaa

SEQ ID NO: 397000 - DNA, 1000 bp, Homo Sapiens; identical to SEQ ID NO: 286524

SEQ ID NO: 397001 - DNA, 1000 bp, Homo Sapiens; identical to SEQ ID NO: 286525

SEQ ID NO: 397002 - DNA, 1000 bp, Homo Sapiens
gattatacccagacatacaatggctctttctacttctctggcatatgctatctcctctcttcagtttcctttttttttgtaccattggccgaaagatggaaaaacagtctgacctgaaagaaagaagactgcaatcaagtgagagctaaacaaaagaaaacctaaactaatgtcattggaaacaaaagcttgaaagaaacacatcgcatctacatttgtaacatgagaaggaaaacaatttttttttttttttttttgagacggagtctcgctctttcgcccaggctggagtgcagtggcgcaatctcggctcactgtaatctccgcctcctgggttcaagggattctcctgcctcagcctcccaagtagctgggactacaggcacacgccaccacacccagctaattttttgtatttttagtagaggcggggtttcaccatgttagccaggatggtctccatctcctgacctcgtgatccgcccgccttgtcctccaaagtgctgggattacaggcatgagccactgggcgcggccagataagtttttaaggttccttcttgctttagcattctgagaaatgtctaattggtagtaagacaagagtaatagcaacctgtattgttagtatttaaccaaataggctaaaattttaatcaggtaccttatgtattaaatagaaatcggaatgtaccataataaatccaaactctcaattacgccatggtaattcagtcactaaaatatgtaaagatagaaaattttttaatttaaagaagtgtgaaacatagccattgattgatcagaattctggaatctgaatattaaaaccttacttagtgactggaatggtatatgctccctccaaaagtttatctttgtttattgattaaaggtaatccttactttctttgtattacttaggttctcaattaaaggtaatccttactttctttgtattacttaggttcttaaatttctatgataaacatgtattgct

SEQ ID NO: 397003 - DNA, 1000 bp, Homo Sapiens
catgtcagcccccactccaggaaggcagcccaatccctaggtgatggggaacccctctcacggttgaaaatttattacctttttacgccctgccacgaactgtgtagacattgtttttattaatcttttgtttggccgggcgtggtggctcacgcctgtaatcctagcactttgggaggccgaggtgggtagatcgcttgagctcaggagttcaagacgagcctgggcaacatggcaaatgccgtctctgcaaaaaaatactaaaattagctggtcgcggtggcttctgcctgtgattccggctacttgggaggctgaggtgggagggattgcttaagcctgggaggcagaggttgcagtgagccgagattgcgccattgcactctagcctgtgtgacagagcaagaccctgtctcaaaaaaaaaaaaaatttgttcgaatgccttatagccttcctcacagcacccaggattgtgactgactctgcatttttaattcttgaaacttggctttccataacatggtacatgcttcaggactacatatgacccagagagcaaggtggctgaactatagtctggaagccctcaggtaaagaggcacatctcaccactcattggttaaacaatgcatcatagcgagcacttttcctttccctggagaatgggatgtgaagcagtagaccgcagccacgccgatggttatacagtgaagaagacttcacctcttcctattgagtttgcttggaatgctgacagcatcaggcaactctgaactgaacatttgctttgtcagaaaatatctttttttttactttgaagtttggcaaccttcatgttaccccaaagcaaaaccattgtgtcaggagtcaaacaaatgtttagaaagcaaacatgacgtctctattgtacaacctcctttctcttggctgtttaaaggatgtacttcgtgtattaaagggtactttatgttgaagtaaaaaaaaaaaaaaaaaaaaaaa

SEQ ID NO: 397004 - DNA, 1000 bp, Homo Sapiens; identical to SEQ ID NO: 286526

SEQ ID NO: 397005 - DNA, 1000 bp, Homo Sapiens
tctggtgaaggagcgggagaagcagctggccaagaaggagcagtccaaggagctgcagatgaagctggagaagcttcgagagaaggagcgtaagaaggaagccaagcggaagatctccagcctgtccttcaccctggaggaggaagaagagggaggcgaggaggaagaggaggcggccatgtatgaggaggagatggaaagggaagagatcaccacgaagaagagaaaactggggaagaacccagacgttgacacaagcttcttgcctgatcgagaccgtgaggaggaggagaatcggcttcgggaagagctgcggcaggagtgggaagccaagcaggagaagatcaagagtgaggagatcgagatcaccttcagctactgggatggctctgggcaccggcggacagtcaagatgagaaagggcaacaccatgcagcagttcctgcagaaggcgctcgagatccttcggaaagacttcagtgagctgaggtccgcaggggtggagcagctcatgtacatcaaggaggacttgatcatccctcaccatcacagcttctacgacttcatcgtcaccaaggcacgggggaagagtggaccactcttcaactttgatgttcatgacgatgtgcggttgctcagtgacgccactgtggagaaggatgagtcccatgcaggcaaggtggtgctgaggagctggtacgagaagaacaagcacatctttcccgccagccgctgggaaccctacgaccctgaaaagaagtgggacaagtacacgatccgctgagcatccaggaggctgcgcggccccggctcctcagctccctcagtgtgccccgtggtgtcaccgggactccaggcacccgctcccctgcgaccatgccaggcacgctgggaggaggacggcagctgctcgtgtcctgcccctgccacatcagtgactgctttattcttttccaataaagaagtgcacgtgtcagagctggagcgcctgcattgtgag

SEQ ID NO: 397006 - DNA, 1000 bp, Homo Sapiens; identical to SEQ ID NO: 116254

SEQ ID NO: 397007 - DNA, 1000 bp, Homo Sapiens; identical to SEQ ID NO: 221541

SEQ ID NO: 397008 - DNA, 1000 bp, Homo Sapiens; identical to SEQ ID NO: 116255

SEQ ID NO: 397009 - DNA, 1000 bp, Homo Sapiens; identical to SEQ ID NO: 116256

SEQ ID NO: 397010 - DNA, 599 bp, Homo Sapiens; identical to SEQ ID NO: 286532

SEQ ID NO: 397011 - DNA, 1000 bp, Homo Sapiens; identical to SEQ ID NO: 286533

SEQ ID NO: 397012 - DNA, 1000 bp, Homo Sapiens
tgtactgagcggcggttagcgtgggaagggggacagagagggccctcccctctgccctggactttcccatgagcctcctggaactgccagcccctctctttcacctgttccatcctgtgcagctgacacacagctaaggagcctcatagcctggcgggggctggcagagccacaccccaagtgcctgtgcccagagggcttcagtcagccgctcactcctccagggcacttttaggaaagggtttttagctagtgtttttcctcgcttttaatgacctcagccccgcctgcagtggctagaagccagcaggtgcccatgtgctactgacaagtgcctcagcttccccccggcccgggtcaggccgtgggagccgctattatctgcgttctctgccaaagactcgtgggggccatcacacctgccctgtgcagcggagccggaccaggctcttgtgtcctcactcaggtttgcttcccctgtgcccactgctgtatgatctgggggccaccaccctgtgccggtggcctctgggctgcctcccgtggtgtgagggcggggctggtgctcatggcacttcctccttgctcccacccctggcagcagggaagggctttgcctgacaacacccagctttatgtaaatattctgcagttgttacttaggaagcctggggagggcaggggtgccccatggctcccagactctgtctgtgccgagtgtattataaaatcgtgggggagatgcccggcctgggatgctgtttggagacggaataaatgttttctcattcagtctccagtcattggttgagccacagcctaggggttggaggaagactccactctgggtacacccttaggggctggctttatggaacttgtagtttgaacaaggcagtggcaatccgccccctccagcctgcctggctggcccccttccctctgtctggggtcgcattccgcacaagcctttcatcaacatcttaaaatagtaactgtg

SEQ ID NO: 397013 - DNA, 1000 bp, Homo Sapiens; identical to SEQ ID NO: 116257

SEQ ID NO: 397014 - DNA, 1000 bp, Homo Sapiens; identical to SEQ ID NO: 116258

SEQ ID NO: 397015 - DNA, 1000 bp, Homo Sapiens; identical to SEQ ID NO: 116259

SEQ ID NO: 397016 - DNA, 1000 bp, Homo Sapiens; identical to SEQ ID NO: 286536

SEQ ID NO: 397017 - DNA, 1000 bp, Homo Sapiens; identical to SEQ ID NO: 286537

SEQ ID NO: 397018 - DNA, 1000 bp, Homo Sapiens; identical to SEQ ID NO: 286538

SEQ ID NO: 397019 - DNA, 1000 bp, Homo Sapiens
tccacagaagcaccacctatcatatttgccacaccaactaaactgacctccgattccacagtgtatgattatgctgggaaaaacaaagttccagagctacaaaagtttttccagaaagctgatggtgtgcccgtctacctgaaacgaggcctgcctgaccaaatgctttaccggaccaccatggcgctgactgtgggagggaccatctactgcctgatcgccctctacatggcttcgcagcccaaaaacaaatgagttaggctgcagaggactggtttgttttttggcataaaccctttgaagttcctttttcattgttaaattaaaatttttttttttacttggatggcttaacatttttgcaagaaaaataggaagatatgaagatgatgttttggtttgtttatgaaatgcatatggcttgtcagagctcattcgacagttaaagccattgtttaaagaaatggtgctttgctctgtgtttgtgctcctgatttccctggaggttctggatgaaggctgaacacaggcttgttaatgtcagtctgtgctgaggacctcagggacttgaggttgcatttttgagcatggggtgcaggagcctttctggatttggatgtggctatggaaagaacacagaagccaaggtcatgtgcatgaaatgaggagtttgagttagtcacctcggggattttttccattttgcagtaaaatgttaaattaatgtagcctgcctctatttgttgggcaggtaatttcaaagggttatttgcctcatctcctatctttagtgaaatcttatgtgtaattattccaccgtgggaacagagaatacctgtttagtgttgcactttagactggtgtctgttttgttaatgcagctgtgccacaaattctcctttatcttttaaaaatgttatagctttaaattttgatttattttgactgtggaataaatacatgaatgaaaaaaaaaaaaaaaaaaaaaaaaaaaaaaaaa

SEQ ID NO: 397020 - DNA, 1000 bp, Homo Sapiens; identical to SEQ ID NO: 286539

SEQ ID NO: 397021 - DNA, 1000 bp, Homo Sapiens; identical to SEQ ID NO: 221546

SEQ ID NO: 397022 - DNA, 1000 bp, Homo Sapiens; identical to SEQ ID NO: 221547

SEQ ID NO: 397023 - DNA, 1000 bp, Homo Sapiens; identical to SEQ ID NO: 116260

SEQ ID NO: 397024 - DNA, 1000 bp, Homo Sapiens; identical to SEQ ID NO: 286543

SEQ ID NO: 397025 - DNA, 1000 bp, Homo Sapiens; identical to SEQ ID NO: 286544

SEQ ID NO: 397026 - DNA, 1000 bp, Homo Sapiens; identical to SEQ ID NO: 286545

SEQ ID NO: 397027 - DNA, 1000 bp, Homo Sapiens; identical to SEQ ID NO: 116261

SEQ ID NO: 397028 - DNA, 1000 bp, Homo Sapiens; identical to SEQ ID NO: 116262

SEQ ID NO: 397029 - DNA, 1000 bp, Homo Sapiens; identical to SEQ ID NO: 116263

SEQ ID NO: 397030 - DNA, 1000 bp, Homo Sapiens; identical to SEQ ID NO: 286547

SEQ ID NO: 397031 - DNA, 1000 bp, Homo Sapiens; identical to SEQ ID NO: 221550

SEQ ID NO: 397032 - DNA, 1000 bp, Homo Sapiens; identical to SEQ ID NO: 116264

SEQ ID NO: 397033 - DNA, 1000 bp, Homo Sapiens; identical to SEQ ID NO: 286550

SEQ ID NO: 397034 - DNA, 1000 bp, Homo Sapiens; identical to SEQ ID NO: 221551

SEQ ID NO: 397035 - DNA, 1000 bp, Homo Sapiens; identical to SEQ ID NO: 116266

SEQ ID NO: 397036 - DNA, 1000 bp, Homo Sapiens
gaagacatctaagtctgcagttaagaagaagccacagaaggtagcaggaggtgcagccccttccaagccagcctctgcaaagaaaggaaaggctgagagcagcaacagttcttcttctgatgactccagtgaggaagaggaagagaagctcaagggcaagggctctccaagaccacaagcccccaaggccaatggcacctctgcactgactgcccagaatggaaaagcagctaagaacagtgaggaggaggaagaagaaaagaaaaaggcggcagtggtagtttccaaatcaggttcattaaagaagcggaagcagaatgaggctgccaaggaggcagagactcctcaggccaagaagataaagcttcagacccctaacacatttccaaaaaggaagaaaggagaaaaaagggcatcatccccattccgaagggtcagggaggaggaaattgaggtggattcacgagttgcggacaactcctttgatgccaagcgaggtgcagccggagactggggagagcgagccaatcaggttttgaagttcaccaaaggcaagtcctttcggcatgagaaaaccaagaagaagcggggcagctaccggggaggctcaatctctgtccaggtcaattctattaagtttgacagcgagtgacctgaggccatcttcggtgaagcaagggtgatgatcggagactacttactttctccagtggacctgggaaccctcaggtctctaggtgagggtcttgatgaggacagaagtttagagtaggtcctaagactttacagtgtaacatcctctctggtccttttctgtgttcctagttttgtacagacttgtttttgagtgttgagtagcagggacaaaataagggaatgttattttttaagaaaattcattttcattgttgtctccttccttttctgtgaaagtcctcatactgagaaatttgtatattttatattaaatcacttactattgaaaaaaaaaaaggaattc

SEQ ID NO: 397037 - DNA, 1000 bp, Homo Sapiens
cccagatacgttggtcccctttattagggatttatctattatcaccctcttttctgaaagtcattctgcacaattctcagttgcattttggacttgatgagatgtttaattcagatgcagctcaaggagaaggatagctccttggagggccagccttcccaggtgttcgacatttgtacaggtgcaaaatacgaggggtccgaggtacagggggagggtgggtattagacaaggcccctatagacatggccaaccacaggggaagtattttgacaacattaagatgccgtggctgtgcactgtactgaacttctgaccattaggtgtattgataccactgaaactgtgtaacattgtctcccttttctgtcttccctatgcttctgttggatgtgatatttcatttgagagtcatcgtcagtaacctgtgtaccttctcaaaacctatgtctgttgcactgaggatgaaaatccaacactaacaaatgttctttgggctaaaaataaagatcatttaaatacatggttttccaagaagggttgaacctgccacagggttgtgctactgtaatgtctccatgcgtcacttggactaaatctctctaattccattgattagagtcacaaatgggttataatatgttaagttccaatatttttctgacttgattggaacctgcttctctgtgaggctatttttgtaatgagttttttgtacttaatttaactgccgcggtctttggtgggggtgggaagggattttgttcttttgttgtttattgttaatgctctcctatgccagcctgtcattgttccagttgtttgaaaaaacaaaacaaaacaaaacaaaaaaggatgcattcgttgtctgggttctcgagtcaccttatggctgtctaaaaatgtcactgttccgattgcggtctctgcagccttatttgagtgttgccttagactgtctgactggacaaataaactctctttgccctatgttaacaaa

SEQ ID NO: 397038 - DNA, 1000 bp, Homo Sapiens; identical to SEQ ID NO: 286554

SEQ ID NO: 397039 - DNA, 1000 bp, Homo Sapiens; identical to SEQ ID NO: 394044

SEQ ID NO: 397040 - DNA, 1000 bp, Homo Sapiens; identical to SEQ ID NO: 286556

SEQ ID NO: 397041 - DNA, 1000 bp, Homo Sapiens; identical to SEQ ID NO: 286557

SEQ ID NO: 397042 - DNA, 1000 bp, Homo Sapiens; identical to SEQ ID NO: 116268

SEQ ID NO: 397043 - DNA, 1000 bp, Homo Sapiens; identical to SEQ ID NO: 286559

SEQ ID NO: 397044 - DNA, 1000 bp, Homo Sapiens
cctgggagccaggcccgccctcgccccaatggggccccctggccccctgagccagcgcctgccccagctccagagttggacccctttgaggcccagtgggcggcattagaaggcaaagccactgtagagaaaccctccaaccccttttctggtgacctgcaaaagacattcgagattgaactgtagtccgagccgccccacccactccatcatctccaggtgccccacgcctgggggtggaggcacaacctctcccctaaccctgctccctggggctgcgcccctcaacaccctctcaacacccccctccctcaaccaccccgacaaccactacagaaccaacattgtgacgcccaggttgcaacaggatggaattcagggacggacccagcctggctaagggaaccatttcactgccggacttaggctggcaatgcccccttccccaaccccagacacaggggttggccacaatcccactgaatgcccttggttcacactccatttcccagtttctgttgacccccaccttccagtgttggacaggatggaggggggacacttgcttaggggctctcctgggccccacaccagtgcccaccccaaatctggtcgtctcctccccccatgcacagcacaagctaagggctgccctctgaccacacgctgcgttcactgccaatgctgtactcacctccatcaccctccaactttggggcccatgtcttccttgggccaaggtctcatgggggctagcgccaagttgggggcccaggaggcggggagggaggaggaggagaagatgcgcagttacctcatgtcggtgcccgctggggaggggtccgggaagaaggggaaggggtgcctggcgggtacttttctatcttttatttccagattttttttgtatctaaacttgaagatttgtattatacaaggacagccaataaaggaagaatataaaaaaaaaaaaaaaaaaaaaaaaaaaaaaacaaaaaaa

SEQ ID NO: 397045 - DNA, 1000 bp, Homo Sapiens; identical to SEQ ID NO: 286560

SEQ ID NO: 397046 - DNA, 1000 bp, Homo Sapiens; identical to SEQ ID NO: 116269

SEQ ID NO: 397047 - DNA, 1000 bp, Homo Sapiens; identical to SEQ ID NO: 221555

SEQ ID NO: 397048 - DNA, 1000 bp, Homo Sapiens; identical to SEQ ID NO: 116270

SEQ ID NO: 397049 - DNA, 1000 bp, Homo Sapiens; identical to SEQ ID NO: 116271

SEQ ID NO: 397050 - DNA, 1000 bp, Homo Sapiens; identical to SEQ ID NO: 286564

SEQ ID NO: 397051 - DNA, 1000 bp, Homo Sapiens; identical to SEQ ID NO: 286565

SEQ ID NO: 397052 - DNA, 1000 bp, Homo Sapiens
tcaaggaccggattttctggagacggcaggttcacttgcggacaggaattcggcccagcactattaccagctccttcccccagctcatgtccaatgtggatgcagcttacgaagtggctgagaggggcactgcttacttcttcaaaggtccccactactggataacaagaggattccaaatgcaaggtcctcctcggactatttatgactttggatttccaaggcacgtgcagcaaatagatgctgctgtctacctcagggagccacagaagacccttttctttgtgggagatgaatactacagctacgacgaaaggaaaaggaaaatggaaaaagactatccaaagaatactgaagaagaattttcaggagtaaatggccaaatcgatgctgctgtagaattaaatggctacatttacttcttttcaggaccaaaaacatacaagtatgacacagagaaggaagatgtggttagtgtggtgaaatctagttcctggattggttgctaaatagaaaagcctagtcttctcaagcaatgaggatgactacaagcagcctctaactggatcttaaggactaaagcagaatgtaggagagggattcttccaaaggccttcaaatcaaattagaattcactgagaataataatacttccaatttttttcatagttgtataatcagaatttcaatccacattagaaaagtttttatatgggcaactttatgcgaaatccaaatcaacacaatgcactctgcagttagacaccattattttttcttacctaatatactgaagcagattgatccgtttgatttttatttccaggaggaagactagtggtggattccatgacatatattgtaattcttttcataggaaatgtcattacagtatgaattataattatttacaagcaatggcttttgtggccatcatttggccatcatttgttataataaatataaatttcccaatttttacttaaaagacatcacaaca

SEQ ID NO: 397053 - DNA, 1000 bp, Homo Sapiens; identical to SEQ ID NO: 116273

SEQ ID NO: 397054 - DNA, 1000 bp, Homo Sapiens; identical to SEQ ID NO: 116274

SEQ ID NO: 397055 - DNA, 1000 bp, Homo Sapiens; identical to SEQ ID NO: 221559

SEQ ID NO: 397056 - DNA, 1000 bp, Homo Sapiens; identical to SEQ ID NO: 286569

SEQ ID NO: 397057 - DNA, 1000 bp, Homo Sapiens; identical to SEQ ID NO: 116275

SEQ ID NO: 397058 - DNA, 1000 bp, Homo Sapiens; identical to SEQ ID NO: 286571

SEQ ID NO: 397059 - DNA, 1000 bp, Homo Sapiens; identical to SEQ ID NO: 286572

SEQ ID NO: 397060 - DNA, 1000 bp, Homo Sapiens; identical to SEQ ID NO: 116276

SEQ ID NO: 397061 - DNA, 1000 bp, Homo Sapiens
ccaaaattcttggtaataggaccccagaaaactggtaccactgctttgtatttgttcctggttatgcatccttccatccttagtaactcccccagcccaaaaacctttgaggaggtacagttctttaatagaaataactaccacagggggattgattggtatatggatttcttcccagtcccatctaatgtcactaccgactttttgtttgagaagagtgccaattacttccactcagaggaagcccctaaaagagctgcttctctggttcccaaagccaagattatcaccattctcattgacccttcagaccgagcatactcctggtaccagcatcagcgatcacatgaagaccctgcagctctgaagtttagcttctacgaagtgatctcagcagggccccgtgcaccctcggagctcagagccttgcagaagagatgtttggtcccggggtggtatgccagccacatcgagagatggcttgtttatttccccccatttcagttgctaattattgatgggcaacaactaagaactgatcctgctacagtgatggatgaagtacagaagtttctaggagtcttgcctcattataattactcagaagctttaacgtttgattctcataaaggtttctggtgtcagttactggaagaaggtaaaacaaaatgccttggaaagagcaaaggaagaaaataccctccaatggattctgatagcaggacatttctgtcaagctactatcgagatcacaacgtggaactctcaaagctgctgcacaaactgggtcagcctctgccatcctggctgagacaggagctgcagaaagtaagatagcactgagagaaaacttgagacttcatcgtccatgtagaacacaccttttccaaagcttccagaagctaccaaaaggcagttgaaaaatatacctcttcaaatgagaaaaaagaacagtttcttccatgtgctggcacgtggatgattagaaaaaaaaaaaaaa

SEQ ID NO: 397062 - DNA, 1000 bp, Homo Sapiens; identical to SEQ ID NO: 116277

SEQ ID NO: 397063 - DNA, 1000 bp, Homo Sapiens; identical to SEQ ID NO: 116278

SEQ ID NO: 397064 - DNA, 1000 bp, Homo Sapiens; identical to SEQ ID NO: 286574

SEQ ID NO: 397065 - DNA, 1000 bp, Homo Sapiens
gaaacgtaagagcccgggccccggtgcggatctggcggcctacaacgctgcgctaagctgcaacgaaaacgacgcagagcacctggaccgtgaccagccatacccgagcagccagaagaccaagcgcatgcgcacgtccttcaagcaccaccagcttcggaccatgaagtcttactttgccattaaccacaaccccgacgccaaggacttgaagcagctcgcgcaaaagacgggcctcaccaagcgggtcctccaggtctggttccagaacgcccgagccaagttcaggcgcaacctcttacggcaggaaaacacgggcgtggacaagtcgacagacgcggcgctgcagacagggacgccatcgggcccggcctcggagctctccaacgcctcgctcagcccctccagcacgcccaccaccctgacagacttgactagccccaccctgccaactgtgacgtccgtcttaacttctgtgcctggcaacctggagggccatgagcctcacagcccctcacaaacgactcttaccaaccttttctaatgactcgcaacccctcaccccacaatttctttaaaaaagaaattatctttagttgaattccaagtgtattttaaaatagaggctttgagcaactaactaaccacattttaggatctcgcctggaaacagaggtaaaaaaaagaagtgtgcgcccggctaatgcagcggtgtggaccgaggaacaacttggaagatctacctgcaacacaacatttgtgtcactgtacagttttgtggactgagcgaggaaaaacaacaaataatttaagttggctagagcttctgtattttcaaagactgccacgtgccttaggaatactgttttatctccatactttggatgacttgttcatttttctctccctctttttctctgtatatttatgaccagagcaaaaatgtaaaaaacaaaaaaaacaacaaaaaaagtttgttactttgaatagtcctaaaaag

SEQ ID NO: 397066 - DNA, 1000 bp, Homo Sapiens; identical to SEQ ID NO: 221561

SEQ ID NO: 397067 - DNA, 1000 bp, Homo Sapiens; identical to SEQ ID NO: 116279

SEQ ID NO: 397068 - DNA, 1000 bp, Homo Sapiens
ggacgtgctgacgctgctcatcaagcagtactgccgcgagagcggtgtccgcaacctgcagaagcaagtggagaaggtgttacggaaatcggcctacaagattgtcagcggcgaggccgagtccgtggaggtgacgcccgagaacctgcaggacttcgtggggaagcccgtgttcaccgtggagcgcatgtatgacgtgacaccgcccggcgtggtcatggggctggcctggaccgcaatgggaggctccacgctgtttgtggagacatccctgagacggccacaggacaaggatgccaagggtgacaaggatggcagcctggaggtgacaggccagctgggggaggtgatgaaggagagcgcccgcatagcctacaccttcgccagagccttcctcatgcagcacgcccccgccaatgactacctggtgacctcacacatccacctgcatgtgcccgagggcgccacccccaaggacggcccaagcgcaggctgcaccatcgtcacggccctgctgtccctggccatgggcaggcctgtccggcagaatctggccatgactggcgaagtctccctcacgggcaagatcctgcctgttggtggcatcaaggagaagaccattgcggccaagcgcgcaggggtgacgtgcatcgtcctgccagccgagaacaagaaggacttctacgacctggcagccttcatcaccgagggcctggaggtgcacttcgtggaacactaccgggagatcttcgacatcgccttcccggacgagcaggcagaggcgctggccgtggaacggtgacggccaccccgggactgcaggcggcggatgtcaggccctgtctgggccagaactgagcgctgtggggagcgcgcccggacctggcagtggagccaccgagcgagcagctcggtccagtgacccagatcccagggacctcagtcggcttaatcagagtgtggcatagaagctatttaatgattaaagtcatttgcagta

SEQ ID NO: 397069 - DNA, 1000 bp, Homo Sapiens; identical to SEQ ID NO: 286577

SEQ ID NO: 397070 - DNA, 1000 bp, Homo Sapiens; identical to SEQ ID NO: 282941

SEQ ID NO: 397071 - DNA, 1000 bp, Homo Sapiens; identical to SEQ ID NO: 221563

SEQ ID NO: 397072 - DNA, 1000 bp, Homo Sapiens; identical to SEQ ID NO: 286580

SEQ ID NO: 397073 - DNA, 1000 bp, Homo Sapiens; identical to SEQ ID NO: 286581

SEQ ID NO: 397074 - DNA, 1000 bp, Homo Sapiens; identical to SEQ ID NO: 286582

SEQ ID NO: 397075 - DNA, 1000 bp, Homo Sapiens
cctctcaagtccatcaagtacctcatctgcacccggtacaagtggctcatcatcaagatcgtgctggcgctgttggggctgctcatgttggggctcttcctctacagcctccctggctacatggtcaaaaagctccttggggcatgaaggccgccagctcccgccagccgctccccagccctgccgcatttcctttcagtggcttggactctttcccatctcccctggggagcctgaggagcccagcgtccacttttcatgccttgggccgagcctgcctcctgcttgcgggggccgcctgtcctcactgccccaggctgcggcttgcccagtcccgcccctctgacccctgcctgtgggctggggagccttggatggggtggggacctggaatgggtctttcttgccccacctggctgaggcgccacccttcttcaggcccaggctccagaggaagactcctgaaaccctccccaggttttccaagtacaggattgaagctttagtgaaattaaccaaggaccatgggtcagtgcccagggctttaaaaagaatgaacgagcaaaaggtatccccgccgtgacccctgcagatagcaccggtatttgatccgcagcaggggccagaccctgcccacaagtcccagcgcggatgtttctgccactgctgggctccacttggctcctctcacttcccagggggtcgcctgtcctgcctgtgggtttccatggcttcccagagttccctctgccccagccagcgcctccaggcccagctgaggagctgtgagaagcagcagaggggactccccatcccgggcacaccctgtcttcccacccctgcccccttgcccttccagccctttcagctgcaggtgggagctggcccgtcaagtgctgcccctgcctgtgtctgggtttctgttggctgtttttcttttcttggagtggtgatttttctctaaataaaagaagtcaagcactgaaaaaaaaaaaaaaaa

SEQ ID NO: 397076 - DNA, 1000 bp, Homo Sapiens; identical to SEQ ID NO: 116281

SEQ ID NO: 397077 - DNA, 1000 bp, Homo Sapiens
aaatgctttttttttttttttttaaatggagatagggtcttaactcttgtccaggctggaggagtgcagtcgtacagtcatggctcactgaagtcttgaccccgctgcctcagcctcccaaataactggggccacaggtgtgcaccacaactctcagctaatttttaaaattttttatagaggtggggttttactatgctgtccagactggtcttaaactcctgggctcaagtgatccccctgccttggcctcccaaactggtgagattacaggcatgagccaccacaactggcctgaaattcttaaaggatgggagtgtcgatgacagcaccttggcatcgttgtgcctaacctgggagacggaagaagcacgccatgggaagtgtttacacttgggggacaagtgctaagtattgtggagcccatagccccttgagatagatggctactttgcctttcttcttgaactgtcttgcagaatgtggatttggggtaagtggtcttgaaggattcatttagtcaccctcaaattaagatttttacttcatctttcttgggcctgcacctccaagataacaaagaagaagcaatggtcgtgccaaagaggtccacaaccaggtgtgcactgttcactgcagcccatttgctgtatgaactgtggttgttgtgtgcccaatgacaaggctactaagaaattcatcatttgaaacgtagaggccgcagcagtcagcgatgtttctgaaatgagcatccttgacgcctgtgtacttcccaggctggatgtgaagctacattaccatgtgagttgtgccattcacagcacagtggtgaggaattgagctcatgaagcaggcaaggaccgaacacctccaccccaacgtagacctgcaggtgctgccccatgacctccaccaaagcccatataaggagcggagttgttaaggactgaagaaaaacttctctggagaaaaataaaattgcaattctacttaaaaaaaa

SEQ ID NO: 397078 - DNA, 1000 bp, Homo Sapiens; identical to SEQ ID NO: 221566

SEQ ID NO: 397079 - DNA, 1000 bp, Homo Sapiens; identical to SEQ ID NO: 116283

SEQ ID NO: 397080 - DNA, 1000 bp, Homo Sapiens; identical to SEQ ID NO: 286585

SEQ ID NO: 397081 - DNA, 1000 bp, Homo Sapiens
tttcttagccatgttctcacccaagtgtggtggctgcaatcgcccagtgttggaaaactacctttcagccatggacactgtctggcacccagagtgctttgtttgtggggactgcttcaccagtttttctactggctccttctttgaactggatggacgtccattctgtgagctccattaccatcaccgccggggaacgctctgccatgggtgtgggcagcccatcactggccgttgtatcagtgccatggggtacaagttccatcctgagcactttgtgtgtgctttctgcctgacacagttgtcgaagggcattttcagggagcagaatgacaagacctattgtcaaccttgcttcaataagctcttcccactgtaatgccaactgatccatagcctcttcagattccttataaaatttaaaccaagagaggagaggaaagggtaaattttctgttactgaccttctgcttaatagtcttatagaaaaaggaaaggtgatgagcaaataaaggaacttctagactttacatgactaggctgataatcttattttttaggcttctatacagttaattctataaattctctttctccctctcttctccaatcaagcacttggagttagatctaggtccttctatctcgtccctctacagatgtattttccacttgcataattcatgccaacactggttttcttaggtttctccattttcacctctagtgatggccctactcatatcttctctaatttggtcctgatacttgtttcttttcacgttttcccatttgccctgtggctcactgtcttacaatcactgctgtggaatcatgataccacttttagctctttgcatcttccttcagtgtatttttgtttttcaagaggaagtagattttaactggacaactttgagtactgacatcattgataaataaactggcttgtggtttcaataaaaaaaaaaaaaaaaaaaaaaaaaaaaaaaaaaaaaaa

SEQ ID NO: 397082 - DNA, 1000 bp, Homo Sapiens; identical to SEQ ID NO: 221567

SEQ ID NO: 397083 - DNA, 1000 bp, Homo Sapiens; identical to SEQ ID NO: 116284

SEQ ID NO: 397084 - DNA, 1000 bp, Homo Sapiens; identical to SEQ ID NO: 286586

SEQ ID NO: 397085 - DNA, 1000 bp, Homo Sapiens; identical to SEQ ID NO: 116286

SEQ ID NO: 397086 - DNA, 1000 bp, Homo Sapiens; identical to SEQ ID NO: 286588

SEQ ID NO: 397087 - DNA, 1000 bp, Homo Sapiens; identical to SEQ ID NO: 220412

SEQ ID NO: 397088 - DNA, 1000 bp, Homo Sapiens
actcaagaaggcggatggcggccgtgagagcaagcggaaaagggagctgcagcagcacgaaggttttcctcctgccctgggcccagtcgagaagaggattaaaggacgcaccggctggccgcagcaagtctgggcgctggagttaaaccagtgagccgaggcccgcgccgaggacctggccaggccagccactcctgaagccccgggaggagaggaaggcagcggcgaacgccaggctctgggctccggcgactggtgctacgcatcccgcggagcttctgctgagcgccggcaggtcgtcggctgcaaccacacacttggatcgcacgtgcaatgtcctttgattttttttaatacattaagagaaagagaaatatatatatatccacccccagcccaaccgagggcggcccttggcggcaacatgcaagaaggagggactgtcgaacccaagggctcaaagacgcactcttccacccttttggagcgaatttagaacctcagccctatctccatttccctatctggctctttctctcttgtccctccatatgatccgccccgacgccgtcttctctaattaaaatgcaataaggaatcaattcttttcttgcctgagaaagagaaccagacgcaggaagatgaaaggctgccctttgttcttcgaatcgtggtggttttattttatttttctttttgtcgctgcacttcctgtttagttccaagggaaacactttctctctttctctgtctctctcttttcttccttcttttccttcctttttgtttctatctaaataaaagctttccctgtgttggaaagtttttatgtatttaaactacctaccatgcctgttgtgctcaggtgtttgttcatcctgccatccccaacccttttctacctcaagtctgtgtgaccactcacagcccccctcccttcgccaaagcagtgtctatgctcttgattaataaaacattttctgaaatcaaaaaaaaaaaa

SEQ ID NO: 397089 - DNA, 1000 bp, Homo Sapiens
gcgtgcgcgaccgcaccgacagcctggtgtgcgactgcaggcacaacacggccggcccggagtgcgaccgctgcaagcccttccactacgaccggccctggcagcgcgccacagcccgcgaagccaacgagtgcgtggcctgtaactgcaacctgcatgcccggcgctgccgcttcaacatggagctctacaagctttcggggcgcaagagcggaggtgtctgcctcaactgtcgccacaacaccgccggccgccactgccattactgcaaggagggctactaccgcgacatgggcaagcccatcacccaccggaaggcctgcaaagcctgtgattgccaccctgtgggtgctgctggcaaaacctgcaaccaaaccaccggccagtgtccctgcaaggacggcgtgacgggtatcacctgcaaccgctgcgccaaaggctaccagcagagccgctctcccatcgccccctgcataaagatccctgtagcgccgccgacgactgcagccagcagcgtggaggagcctgaagactgcgattcctactgcaaggcctccaaggggaagctgaagattaacatgaaaaagtactgcaagaaggactatgccgtccagatccacatcctgaaggcggacaaggcgggggactggtggaagttcacggtgaacatcatctccgtgtataagcagggcacgagccgcatccgccgcggtgaccagagcctgtggatccgctcgcgggacatcgcctgcaagtgtcccaaaatcaagcccctcaagaagtacctgctgctgggcaacgcggaggactctccggaccagagcggcatcgtggccgataaaagcagcctggtgatccagtggcgggacacgtgggcgcggcggctgcgcaagttccagcagcgtgagaagaagggcaagtgcaagaaggcctagcgccgaggcagcgggcgggcgggccgggcgggcccgagggcggggcgagcgagacggcgcttggc

SEQ ID NO: 397090 - DNA, 1000 bp, Homo Sapiens; identical to SEQ ID NO: 116287

SEQ ID NO: 397091 - DNA, 1000 bp, Homo Sapiens; identical to SEQ ID NO: 221569

SEQ ID NO: 397092 - DNA, 1000 bp, Homo Sapiens; identical to SEQ ID NO: 221570

SEQ ID NO: 397093 - DNA, 1000 bp, Homo Sapiens; identical to SEQ ID NO: 286592

SEQ ID NO: 397094 - DNA, 1000 bp, Homo Sapiens; identical to SEQ ID NO: 116288

SEQ ID NO: 397095 - DNA, 1000 bp, Homo Sapiens; identical to SEQ ID NO: 286593

SEQ ID NO: 397096 - DNA, 1000 bp, Homo Sapiens; identical to SEQ ID NO: 116289

SEQ ID NO: 397097 - DNA, 793 bp, Homo Sapiens; identical to SEQ ID NO: 221572

SEQ ID NO: 397098 - DNA, 1000 bp, Homo Sapiens; identical to SEQ ID NO: 286596

SEQ ID NO: 397099 - DNA, 1000 bp, Homo Sapiens
gggagctcaccagtccagccctggggctcgcctcccaccaggtgcccccgagccctctcgtcagtgccaacggccccggcgaggaaaaactgttccgcagccagagcgctgatgcccccggccccacagagcgcgagcggctaaagaagatgttgtctgagggctccgtgggcgaggtacagtgggaggccgagtttttcgcactgcaggacagcaacaacaagctggcaggcgccctgcgagaggccaacgccgccgcagcccagtggaggcagcagctggaggctcagcgtgcagaggccgagcggctgcggcagcgggtggctgagctggaggctcaggcagcttcagaggtgacccccaccggtgagaaggaggggctgggccagggccagtcgctggaacagctggaagctctggtgcaaaccaaggaccaggagattcagaccctgaagagtcagactggggggccccgcgaggccctggaggctgccgagcgtgaggagactcagcagaaggtgcaggacctggagacccgcaatgcggagttggagcaccagctgcgggcgatggagcgcagcctggaggaggcacgggcagagcgggagcgggcgcgggctgaggtgggccgggcagcgcagctgctggacgtcaggctgtttgagctgagtgagctgcgtgagggcctggcccgcctggctgaggctgcgccctgagccggggctggttttctatgaacgattccggcctgggatgcgggccaggctgcaggcggcatagttgggcccattcgtcctggaaagggactggggggtcccaacttagccctgggtgggccgggccgggctgggctggggtgggccccagtcggctctggttgttggcagctttggggctgtttttgagcttctcattgtgtagaatttctagatcccccgattacatttctaagcgtgaaaaaaaaaaaaaaaaaaaaaaaaaaaaaaaaaaaaaaaaaaaa

SEQ ID NO: 397100 - DNA, 1000 bp, Homo Sapiens; identical to SEQ ID NO: 221574

SEQ ID NO: 397101 - DNA, 1000 bp, Homo Sapiens; identical to SEQ ID NO: 221575

SEQ ID NO: 397102 - DNA, 1000 bp, Homo Sapiens; identical to SEQ ID NO: 221576

SEQ ID NO: 397103 - DNA, 1000 bp, Homo Sapiens; identical to SEQ ID NO: 286600

SEQ ID NO: 397104 - DNA, 1000 bp, Homo Sapiens
aagcagaggagacacagcagtgagggaggcgtcaagtcttctcaagtcttaggattgcagcaacacgttcggctgcccaaacccaaggcgaagaccttgccagagttcatcaaggatggctccagtacgtacagcaagattcctgcccacaggaagggccacaggcccgctaagccccaaaggcaggatctagatgatgatgaacatgattatgaagaaatacttgagcaatttcagaaaaccatctaagtgctggaggaaccacgcttcctaactgctgcttctcagggaatccgacaccagccaaccattttaagcctctaaaagacctcgggcaagtctcacagaaactgagctgcagacggggagtagctttgtggaaactgatttgatggacactgcaccagcttccttcaggttctagattcttgctacttagggcgggctggtttggacctaacatctcgcacgtgactccctcagcctcagagccttgggatgcagagcagctggcagggttcctctcaatcctgcaaccccagctgtcccaccggtggatgcagaggggaatccgaggccatcaaccttggtgacagcagcgcagtgccaatgctgatcacactgcatgggagattttgttaacgtctgccacccccactctcacccccaagctctaagcccccgggaggcctggactgtcttcctcatctctgtagcaccaagcctgatagatctgtatatggtaaacaggggtttaaccacatgtggttaacatggattaatgtgggaatttggcttcaagaacacaaccttaggaccttgggccccaaaagctggtggtgaaatgagaggagccaatttaagaagacccttatggagacctgaggctgcagaaactggtaggtttcatcaggtggttaaagtcgtcaaagttgtaagtgactaaccaagattatttcattttaaaaccacagaataaaaatgacacctgagcttctcc

SEQ ID NO: 397105 - DNA, 1000 bp, Homo Sapiens
aagtttgctgcactttattaccaagcctctgggattttaccagtcaaacatatttgtgcattacatttcatttcttgtgagctagctggctgtccatattgaatgttgacccatttgagtacgctaaaaggcttacagtatcagacacgatcatggttttagatcccataataaaaatgratgtttttcttataaaaaattatacaaatgctgaagtgagattctactattgttcattgcttccttttctttttccttttgcgattttcactgattaatagcacatttcttcacaaaattagataaagttggtcaaagaccagatattctggaatggaaattgtaaagcttaatcaaaaagaatagccagtacagcatacaatctcagaaacttagaagcaagtagaaaataattggttgatgtaaacgaaagtgccattttagtaaaggcaggaaaaaaatagcaatatttgagttatgtaaggataaaaaatccactgacttgtatttttgcacaagaggctggtctgaatatgattgttcacattaagagtgtttattcgtcggttcattttggggattttcccccttgatgttttgacagattgaagtgagctttagtgagcaaaaggatcagaatgcagggaacactaagctgtgatgaagaaagtgtggtaaaaagccagagtagttttatacagacaaaaccagtgtcaggcctttgcagtaggcttgagtgaacttctgatctagatttgaaagtaaattttatgaagacattgcccatttttacttcctcattcattattgtaccagcatcatagctttattactctaatcccaggtaagtcaagcctacaatgccctagaggaagagtaaaaccagaaattcatgctggcttaaataatctatttttgtttcttttcatttgaatatttaaattttatggtttattaaaaaattaaataaaaaagaaaaaaaaaaaaaaaaaaaactcga

SEQ ID NO: 397106 - DNA, 1000 bp, Homo Sapiens; identical to SEQ ID NO: 116290

SEQ ID NO: 397107 - DNA, 979 bp, Homo Sapiens; identical to SEQ ID NO: 286603

SEQ ID NO: 397108 - DNA, 1000 bp, Homo Sapiens
ggcttcacccatcactggtgggttgcaggaacagcacccaggactctgaggagggacagagaagcaagggggctgctgaaatcgcagagacttttgcagcatcagatctgaggagtaaaacggcacctctggccttcatcttggtgctgcgacaattgtggaggcaaagcattctttctgtgactattttgttcctgtagacagtcagcgatggccagagggtggtgtggtgtccaggggtccatctttccagaatccatgcctgtgtaatgctggtccatgcttctgaacctgtgtctgccaagcgcctatttcattcagcacaagacatacgattttagaaggtgaggggaggggaggctttttctacctgagaaggggagtgtctttgagggccttaaaaggaccatggcccaggaatgggggcgctggttgggcttggagctcaggctgctgtggatcccggcgcatcagttctgacttgccttacctgggtggacagcagtgaatctccacctgtcttctccagggagctcccatgttggggctgaagacgagcaggggcaacctgccagcatcacagaattcagtgtagtttatacatttcgattcctttcatctcagcaaaatgggcactgccagagccatttctgatcacaccaccatcctggaccatgtgactggaaggtgggtaaccaagttcaccagcaataaaacccagcgcccaggtagcctccagcagtgcggcttcctggcaacaaggtaggccctggtgcagggcaagccgcagcgaccatttcagataccgtccacagccaggaccgctgagaactgggacagtttcctgggatgagtgccagcctgagcctgcatggtgccgccgagcccggggtggaggagggagccaggcttcgcttcaaggcggcctctaccttttctcagaatggtttcctgattgtgtcaatgtgaaagttaaataaaatttatgtgccaaacctga

SEQ ID NO: 397109 - DNA, 1000 bp, Homo Sapiens; identical to SEQ ID NO: 221577

SEQ ID NO: 397110 - DNA, 1000 bp, Homo Sapiens; identical to SEQ ID NO: 286605

SEQ ID NO: 397111 - DNA, 1000 bp, Homo Sapiens
tgcaacctgcaataaatgctgaggatgctgatctttctaagaaaaaggcaaaatctagacttaagattccctgcataaaattcccaagagggccaaaaaggagtaatcattccaaaattatagaagactcagactgcagcatcaaagtccaggaagaagctgaaattttggatatacaaacacagaccccattgaatgatcaggcaacaaaggctaagtcaacccaggatctaagtgaaggcatctcacggaaagatggtgatgaggtctgtgaatcaaatgtgagcaatagcataacttctggagagaaagtgatttcagtagaacttggattagataatgggcattctgctattcaaacgggaactctaatccttgaagaaattgaaacgatcaaggaaaaacaagatgttcaaccccagcaagcaagcccacttgaaacttcagaaacagaccatcagcagccagtactttctgatgttcctcctttacctgcaattccagatcaacaaattgtggaagaagccagtaacagtaccctagaaagtgcaccaaatggaaaagactatgaaagtacagagattgtagctgaagaaactaagccaaaagatactgaattgagccaagaatcagattttaaagaaaatgggatcactgaagagaaatccaaatcagaagaaagcaaaagaatggagccaattgctattattattacagacactgaaatcagtgaatttgatgttacaaaatctaaaaatgtccctaagcaattcttaatttcagctgaaaatgagcaagtaggggtttttgctaatgataatggttttgaggatagaacttcagaacaatatgaaacactcttaattgaaacagcctcttctctagtcaagaatgctattcagttgtcaatagaacagctggttaatgaaatggcctctgatgataataaaataaacaatcttctacagtgacttactctccagagtcacggcagaaaaaa

SEQ ID NO: 397112 - DNA, 1000 bp, Homo Sapiens; identical to SEQ ID NO: 116291

SEQ ID NO: 397113 - DNA, 1000 bp, Homo Sapiens; identical to SEQ ID NO: 221578

SEQ ID NO: 397114 - DNA, 1000 bp, Homo Sapiens; identical to SEQ ID NO: 221579

SEQ ID NO: 397115 - DNA, 1000 bp, Homo Sapiens; identical to SEQ ID NO: 116292

SEQ ID NO: 397116 - DNA, 1000 bp, Homo Sapiens; identical to SEQ ID NO: 221580

SEQ ID NO: 397117 - DNA, 1000 bp, Homo Sapiens; identical to SEQ ID NO: 286613

SEQ ID NO: 397118 - DNA, 1000 bp, Homo Sapiens; identical to SEQ ID NO: 116293

SEQ ID NO: 397119 - DNA, 1000 bp, Homo Sapiens; identical to SEQ ID NO: 116294

SEQ ID NO: 397120 - DNA, 1000 bp, Homo Sapiens
atgatggactccgcacagagcttcataacctcttcatggactttttatcttcaagccgatgacggaaaaatagttatattccagtctaagccagaaatccagtacgcaccacatttggagcaggagcctacaaatttgagagaatcatctctaagcaaaatgtcctatctgcaaatgagaaattcacaagcgcacaggaattttcttgaagatggagaaagtgatggctttttaagatgcctctctcttaactctgggtggattttaactacaactcttgtcctctcggtgatggtattgctttggatttgttgtgcaactgttgctacagctgtggagcagtatgttccctctgagaagctgagtatctatggtgacttggagtttatgaatgaacaaaagctaaacagatatccagcttcttctcttgtggttgttagatctaaaactgaagatcatgaagaagcagggcctctacctacaaaagtgaatcttgctcattctgaaatttaagcatttttcttttaaaagacaagtgtaatagacatctaaaattccactcctcatagagcttttaaaatggtttcattggatataggccttaagaaatcactataaaatgcaaataaagttactcaaatctgtgaagactgtatttgctataactttattggtattgtttttgtagtaatttaagaggtggatgtttgggattgtattattattttactaatatctgtagctattttgttttttgctttggttattgtttttttcccttttcttagctatgagctgatcattgctccttctcacctcctgccatgatactgtcagttaccttagttaacaagctgaatatttagtagaaatgatgcttctgctcaggaatggcccacaaatctgtaatttgaaatttagcaggaaatgacctttaatgacactacattttcaggaactgaaatcattaaaattttatttgaataaaaaaaaaaaaaaa

SEQ ID NO: 397121 - DNA, 1000 bp, Homo Sapiens; identical to SEQ ID NO: 286615

SEQ ID NO: 397122 - DNA, 1000 bp, Homo Sapiens
cttctataaatttttaaattcaaacagacctaagataagacatactgaaaagaaatctttcaaatgtaaaaaacgtgtcaaattattttgcatgctttcacataaaacccaacacaaaagcatttatcatagagagaagtcctacaaatgtaaagaatgtggaaaaacctttaattggtcctcaacccttactaatcataggaaaatttatactgaagagaaaccttacaaatgtgaagaatataacaaatctcctaagcaactctcaacccttactacacatgaaataattcatgctggagagaaactctacaaatgtgaagaatgtggcaaagcttttaatcggtcctcaacttttactaaacataaggtaattcatactggagtaaaaccctacaaatgtgaagaatgtggcaaagcatttttctggtcctcaaccctaactaaacataagagaattcatactggagagcaaccctacaaatgggaaaaatttggcaaagcctttaatcggtcctcgcacctcaccacagataagataactcatactggagagaaatcttacaagtatgaataatgtgccaaagcctaagaaaaccctcaattcttaatagatataagattattcctactggagagaaactacaaacctgagagaggcgctaatgcttttgacagtacctaaaactttaaagaaaatcattctgctgaaaaatcctagaaatgtgaagaatgtgaaaaagcctttaaatgattgtcacacttgattgtaggtaagataattcatactggagaaaactaccagtgtgaacaacgtggccaagcttcgacaatgctcacaccctattgcacaggaaagcatttatacttgagaagaaatgtacaaatattggcaaagtaaaaaatccattaacacctgctcacatcttactcaaaattgtagagttcatagtaaataaaagcattaaaattcaaaaaaaaaaaaaaaaaaaaaaaaaaa

SEQ ID NO: 397123 - DNA, 561 bp, Homo Sapiens
aatcatgtctgactccctggtggtgtgcgaggtagacccagagctaacagaaaagctgaggaaattccgcttccgaaaagagacagacaatgcagccatcataatgaaggtggacaaagaccggcagatggtggtgctggaggaagaatttcagaacatttccccagaggagctcaaaatggagttgccggagagacagcccaggttcgtggtttacagctacaagtacgtgcatgacgatggccgagtgtcctaccctttgtgtttcatcttctccagccctgtgggctgcaagccggaacaacagatgatgtatgcagggagtaaaaacaggctggtgcagacagcagagctcacaaaggtgttcgaaatccgcaccactgatgacctcactgaggcctggctccaagaaaagttgtctttctttcgttgatctctgggctggggactgaattcctgatgtctgagtcctcaggtgactggggacttggaaccctaggacctgaacaaccaagactttaaataattttaaatgcaaaaactcagaaaaaaaaaaaaaaa

SEQ ID NO: 397124 - DNA, 1000 bp, Homo Sapiens
aggccagtatgacccacctccaggagccagcaacattttgggacttgaggcatctggacatgtggcagagctggggcctggctgccagggacactggaagatcggggacacagccatggctctgctccccggtgggggccaggctcagtacgtcactgtccccgaagggctcctcatgcctatcccagagggattgaccctgacccaggctgcagccatcccagaggcctggctcaccgccttccagctgttacatcttgtgggaaatgttcaggctggagactatgtgctaatccatgcaggactgagtggtgtgggcacagctgctatccaactcacccggatggctggagctattcctctggtcacagctggctcccagaagaagcttcaaatggcagaaaagcttggagcagctgctggattcaattacaaaaaagaggatttctctgaagcaacgctgaaattcaccaaaggtgctggagttaatcttattctagactgcataggcggatcctactgggagaagaacgtcaactgcctggctcttgatggtcgatgggttctctatggtctgatgggaggaggtgacatcaatgggcccctgttttcaaagctactttttaagcgaggaagtctgatcaccagtttgctgaggtctagggacaataagtacaagcaaatgctggtgaatgctttcacggagcaaattctgcctcacttctccacggagggcccccaacgtctgctgccggttctggacagaatctacccagtgaccgaaatccaggaggcccataagtacatggaggccaacaagaacataggcaagatcgtcctggaactgccccagtgaaggaggatggggcaggacaggacgcggccaccccaggcctttccagagcaaacctggagaagattcacaatagacaggccaagaaacccggtgcttcctccagagccgtttaaagctgatatgaggaaataaagagtgaactgg

SEQ ID NO: 397125 - DNA, 1000 bp, Homo Sapiens
tagaaaaaagaaaaagtttcagaagagcagaagtaaacacaaaaaacataagtcctcttcttcctcatcttcctcctcctcctcctcttcctctactgagacttcagaaagcagtagtgagagtgagagtaacaataaagaaaaaaaaatacaaaggaagaaaagaaagaaaaacaagtgttcagggcataacaacagtgattctgaagagaaggacaagtctaagaagagaaagcttcatgaagaactttctagcagtcaccataaccgggaaaaagccaaggaaaagcccaggttcttaaaacacgagagttctagggaggacagcaaatggagccattctgattctgacaaaaagtccagaacccataaacatagcccagagaagagaggctctgaaagaaaggaggggagcagcagaagccacggcagggaggaaaggagccggagaagccggagcagaagtcctggtagttacaagcaaagggagacaaggaaacgggcacagcgaaatcctggtgaagagcaaagcagaagaaatgacagcagaagccatggcacagacttgtatagaggagaaaaaatgtacagagagcacccaggaggtacacatactaaagtgacacaaagagaatgaagcagaagtagagaagaaagactgtatgtgacaattacctgggaataaaaatatctccacttttttattgaatacctttagcaaggggtaaattatgtactgttgtctttctaataaaaaagctcaattttaatttttcatctctagactgtcaattcaagtacaaaactacatgagtactataagaatgaattttgcaaatatttgtaagtaagctattttggggctgtggaaatattttctgttggtaactgtttcttgttccccataccagataaaaaccgcatataactctgtgacattttctttgttctgaaacatcattaaaagaatgacagtacattgaaaaaaaaaaaaaaaaaa

SEQ ID NO: 397126 - DNA, 1000 bp, Homo Sapiens
ctgcagtaatgttacatgtgcaagaagaaaaatattaccgagtgagactcaactcccagaataaaaccagtccagtctactggtgccgggaagactggccaaatcaggaaatgaggaagatctacaccactgtgctgtttgccaacatctacctggctcccctctccctcattgtcatcatgtatggaaggattggaatttcactcttcagggctgcagttcctcacacaggcaggaagaaccaggagcagtggcacgtggtgtccaggaaaaagcagaagatcattaagatgctcctgattgtggccctgctttttattctctcatggctgcccctgtggactctaatgatgctctcagactacgctgacctttctccaaatgaactgcagatcatcaacatctacatctacccttttgcacactggctggcattcggcaacagcagtgtcaatcccatcatttatggtttcttcaacgagaatttccgccgtggtttccaagaagctttccagctccagctctgccaaaaaagagcaaagcctatggaagcttataccctaaaagctaaaagccatgtgctcataaacacatctaatcagcttgtccaggaatctacatttcaaaaccctcatggggaaaccttgctttataggaaaagtgctgaaaaaccccaacaggaattagtgatggaagaattaaaagaaactactaacagcagtgagatttaaaaagagctagtgtgataatcctaactctactacgcattatatatttaaatccattgctttttgtggctttgcacttcaaatttttcaaagaatgttctaaataaaacatttactgaaagccctctctggcaaaaaaattaaaaataaacaaaaatggtcataagatcataaacaatcttatgttgtataaaaatacgtagagtgacttagacatgtttgcatgaataaatatatttctagagaacagttaaaaaaaaaaaaaaaaaaaa

SEQ ID NO: 397127 - DNA, 1000 bp, Homo Sapiens; identical to SEQ ID NO: 116295

SEQ ID NO: 397128 - DNA, 1000 bp, Homo Sapiens; identical to SEQ ID NO: 116296

SEQ ID NO: 397129 - DNA, 1000 bp, Homo Sapiens
ggggattcagcagctgctgcaggccgagaagcgggcagccgagaaggtgtccgaggcccgcaaaagaaagaaccggaggctgaagcaggccaaagaagaagctcaggctgaaattgaacagtaccgcctgcagagggagaaagaattcaaggccaaggaagctgcggcattgggatcccgtggcagttgcagcactgaagtggagaaggagacccaggagaagatgaccatcctccagacatacttccggcagaacagggatgaagtcttggacaacctcttggcttttgtctgtgacattcggccagaaatccatgaaaactaccgcataaatggatagaagagagaagcacctgtgctgtggagtggcattttagatgccctcacgaatatgaagcttagcacagctctagttacattcttatgatatggcattaaattatttccatatattatataataggtccttccactttttggagagtagcaaatctagcttttttgtacagacttagaaattatctaaagatttcatctttttacctcatatttcttaggaatttaatggttatatgttgtctttttttcctatgtcttttggctcaagcaacatgtatatcagtgttgactttttctttcttagatctagtttaaaaaaaaaaaaaaccacataacaattctttgaagaaaggaagggattaaataatttttttccctaacactttcttgaaggtcaggggctttatctatgaaaaagtagtaaatagttctttgtaacctgtgtgaagcagcagccagccttaaagtagtccattcttgctaatggttagaacagtgaatactagtggaattgtttgggctgcttttagtttctcttaatcaaaattactagatgatagaattcaagaacttgttacatgtattacttggtgtatcgataatcatttaaaagtaaagactctgtcatgcaaaaaaaaaaaaaaaaaaaaaaaaaaaaaaa

SEQ ID NO: 397130 - DNA, 1000 bp, Homo Sapiens; identical to SEQ ID NO: 116300

SEQ ID NO: 397131 - DNA, 1000 bp, Homo Sapiens; identical to SEQ ID NO: 221584

SEQ ID NO: 397132 - DNA, 1000 bp, Homo Sapiens; identical to SEQ ID NO: 116301

SEQ ID NO: 397133 - DNA, 1000 bp, Homo Sapiens; identical to SEQ ID NO: 116302

SEQ ID NO: 397134 - DNA, 1000 bp, Homo Sapiens; identical to SEQ ID NO: 116303

SEQ ID NO: 397135 - DNA, 1000 bp, Homo Sapiens
gggaatggtaataagtcctccaacagctcagaggagagaactggcagaggaggtagtggttacgtaaatcaactcagtgcggggtatgaaagtgtagactctcccacgggcagtgaaaactctctcacacaccaatcaaatgacacagactccagtcatgaccctcaagaggagaaagcagtgagtgggaaaggtaatcgaactgtgggttcccgccacgttcagaatggcttggactcaagtgtaaatgtacagggttcagttttgtaatattttttcagcaaatttttatacagtgtcatttaatttgggagaggatactgtccagaaaattaatgcatacttttgtcacaatttgcctttttgtgggtgtacgttttggtttttttttgttgttttttttctttgttttttttttcttttctttttttttttttttttttttttttgcttcaatacttctgccgctttggaaattgtaacagttaattactttgaatgttgctaaaaggacattttgtgtagggtcaagttatttttatatgagttaatgtgaaattgtaaatggaaatttttccttaaaatacaacacaatgatgtctgtataaatctgtctgtttagaatctgtgctgtgtaagggcattcgtactcatgctgttactgtacttatgcaccattcagacttgttagagtagatgtgggtttatgactgccaagtttgcccagtacagtagttttttatcactaaaagttggactcattgatggagtcctgtagtagtttcagtgttagatacagttttttccaccatacatctgtgcattttctctttaggtgactgtttaagaaatttgtgtgcatagttactcagtttttatgaactgttgtatcctgttaatgcatattgctctgtgactccagtatatcttacctgtactgaccaaacctaaataaagatttttattgtaactccttaaaaaaaaaaaaaaaaaaaaaaaa

SEQ ID NO: 397136 - DNA, 1000 bp, Homo Sapiens; identical to SEQ ID NO: 286625

SEQ ID NO: 397137 - DNA, 799 bp, Homo Sapiens; identical to SEQ ID NO: 116305

SEQ ID NO: 397138 - DNA, 1000 bp, Homo Sapiens; identical to SEQ ID NO: 116306

SEQ ID NO: 397139 - DNA, 1000 bp, Homo Sapiens; identical to SEQ ID NO: 116307

SEQ ID NO: 397140 - DNA, 1000 bp, Homo Sapiens; identical to SEQ ID NO: 221587

SEQ ID NO: 397141 - DNA, 1000 bp, Homo Sapiens
tctgtgcggaagactactgccccaccccagaggccacaccccaggccggcccccgcccatcgctgcagctgccattggtgccgatgacctgctgcccatcctgtccttcgtggtgctgaggagcggcctccctcagctggtgtcggagtgcgcggccctggaggagttcatccacgaggggtacctgatcggagaggagggctactgcctcacatcactgcagagtgccctgagctacgtggagctgctgccccggggaggcctggccaagtagtacagctagagcccagggtccctgcagggcctggcctcgcctcccagggctgtctctcctacacctggagccatgggatctactgaggaccatcctggagcctcacgctgctctgcacatggtgggggcttgtccactgtggtgtgctctccagctcttcaccttcctcacctcacatctgaccctggagcttggggttggcacctctgccccgacagaatggggctgaatcagctccaggaggaaccaggccctgctctcctgtgtagcctcagagaggccaagaagggaagctttgggcttcggtgggtgcaggctcagcgatgaacatctggctggggcagctcctggggagcatcagggaagagggggccatgagccggccagcagtggagacggcagtccagtttctctcccctctgacccctagaaggggagttgtagccccatgaactagtttcttgtctgggtcaggaacaagggccggctggggcctggggtgcagctggtgtcagggtatgctgtttgctgatgggcagggacacccctgcagggtctcgggctctgagcccaggacattccctgccccttgctcaccttggctgtgggctgtgaacattccgggaccctgggcatcttatctaggtccgtgcagcccaagggtcagccctcttgactgtcacatgctgcccccacccagcctaaaataaagagctcactgctgtg

SEQ ID NO: 397142 - DNA, 1000 bp, Homo Sapiens; identical to SEQ ID NO: 221588

SEQ ID NO: 397143 - DNA, 1000 bp, Homo Sapiens
gccagatggtggaggccagcctctccgtacggcacccagagtacaacagacccttgctcgctaacgacctcatgctcatcaagttggacgaatccgtgtccgagtctgacaccatccggagcatcagcattgcttcgcagtgccctaccgcggggaactcttgcctcgtttctggctggggtctgctggcgaacggcagaatgcctaccgtgctgcagtgcgtgaacgtgtcggtggtgtctgaggaggtctgcagtaagctctatgacccgctgtaccaccccagcatgttctgcgccggcggagggcaagaccagaaggactcctgcaacggtgactctggggggcccctgatctgcaacgggtacttgcagggccttgtgtctttcggaaaagccccgtgtggccaagttggcgtgccaggtgtctacaccaacctctgcaaattcactgagtggatagagaaaaccgtccaggccagttaactctggggactgggaacccatgaaattgacccccaaatacatcctgcggaaggaattcaggaatatctgttcccagcccctcctccctcaggcccaggagtccaggcccccagcccctcctccctcaaaccaagggtacagatccccagcccctcctccctcagacccaggagtccagaccccccagcccctcctccctcagacccaggagtccagcccctcctccctcagacccaggagtccagaccccccagcccctcctccctcagacccaggggtccaggcccccaacccctcctccctcagactcagaggtccaagcccccaacccctccttccccagacccagaggtccaggtcccagcccctcctccctcagacccagcggtccaatgccacctagactctccctgtacacagtgcccccttgtggcacgttgacccaaccttaccagttggtttttcattttttgtccctttcccctagatccagaaataaagtctaagagaagcgc

SEQ ID NO: 397144 - DNA, 1000 bp, Homo Sapiens; identical to SEQ ID NO: 286631

SEQ ID NO: 397145 - DNA, 1000 bp, Homo Sapiens; identical to SEQ ID NO: 116308

SEQ ID NO: 397146 - DNA, 1000 bp, Homo Sapiens; identical to SEQ ID NO: 221589

SEQ ID NO: 397147 - DNA, 1000 bp, Homo Sapiens; identical to SEQ ID NO: 116309

SEQ ID NO: 397148 - DNA, 1000 bp, Homo Sapiens; identical to SEQ ID NO: 116310

SEQ ID NO: 397149 - DNA, 1000 bp, Homo Sapiens
gcctcccaaagcgttgggattataggcatgagccatgtgcctggtccaccttggcctgttttgtttttctttccttgggctcagcaattcaaattctagttgttatttggtggaagcagtagcccaaccccagtttaggggaaggtagcacagggcagagccactgggcactttgtttccttggccctccgaagctcactgttgcaaatacccccaagcctttgctctaggccagatcttgtttggtgcaggtgatggagaacacagatgactcgggcatgggtcttggagatcttctgttcaaagtacagtgctggcactggggcacagagtgcccacgttagccccgggctctgatagagaggtaggaggcacgttcttggtcactgttccattgcagaccagacttgctggcctgaccacaagggagtggctgggaactcacagccagcatagggacatccccctgcagccttctgacctgcaatcaaggctggggaggggtttgcaggcaggaatatgctgacctttcaccctgccatcccatcccaaccccagctcactagccttcatatatgccttatacttggagtcacaggggccaaaggcctgagaccccaccctgcccccaaactggctaagacagctttcagttcctgactccccaacttggtctctgccctgaagcagggcactgaactctgggctgcttctctgtgtgtaaaatgggcacatcttcctaatctgttaatggtcagtggtgtccccaaggatagtgctggcttccatggaaaccctcactcctggagattccattccattttcaagtgtacagccacagcaaggagcccgacactgatttgatcgattctgtgacacaaaccccaccaattgttaatgcaagtttttatttggctgtatatacaatttaagctattaaaatttgtacaatatttacaaattaaataatcatctgaaactgaaaaaaaaaaaaaaaaaa

SEQ ID NO: 397150 - DNA, 1000 bp, Homo Sapiens
cgacctgatcgacctggtccccagtctatgtgaggatctcctgtcttctgttgaccagccactgaaaattgccagagacaaggtggtgggaaaggattaccttttgtgtgactacaacagagatggggactcctataggtcaccatggagtaacaagtatgaccctcccttggaggatggggccatgccgtcagctcggctgagaaagctggaggtggaagccaacaatgcctttgaccagtatcgagacctgtattttgaaggtggcgtctcatctgtctacctctgggatctggatcatggctttgctggagtgatcctcataaagaaggctggagatggatcaaagaagatcaaaggctgctgggattccatccacgtggtagaagtgcaggagaaatccagcggtcgcaccgcccattacaagttgacctccacggtgatgctgtggctgcagaccaacaaatctggctctggcaccatgaacctcggaggcagccttaccagacagatggagaaggatgaaactgtgagtgactgctccccacacatagccaacatcgggcgcctggtagaggacatggaaaataaaatcagaagtacgctgaacgagatctactttggaaaaacaaaggatatcgtcaatgggctgaggtctgtgcagacttttgcagacaaatcaaaacaagaagctctgaagaatgacctggtggaggctttgaagagaaagcagcaatgctaaacctctgtttcatgctaaccagacacgccgtgcactcgttagattcctttcttagaaaactcgttttctgctcccttccctcgtcccttccctccccgacaggtcacataacagctgcatcattgaccgcacagcgccatctctccctgagaataaagccgatagccacctcctccggctccgagcctgcttctgccacacctcgctctcagtctctccacatttccatagagaccgtgtggtttttgttcacccggg

SEQ ID NO: 397151 - DNA, 1000 bp, Homo Sapiens; identical to SEQ ID NO: 221591

SEQ ID NO: 397152 - DNA, 1000 bp, Homo Sapiens; identical to SEQ ID NO: 221592

SEQ ID NO: 397153 - DNA, 1000 bp, Homo Sapiens; identical to SEQ ID NO: 286640

SEQ ID NO: 397154 - DNA, 1000 bp, Homo Sapiens; identical to SEQ ID NO: 286641

SEQ ID NO: 397155 - DNA, 1000 bp, Homo Sapiens; identical to SEQ ID NO: 116312

SEQ ID NO: 397156 - DNA, 1000 bp, Homo Sapiens; identical to SEQ ID NO: 116313

SEQ ID NO: 397157 - DNA, 1000 bp, Homo Sapiens
tctgaaacatcagtgttaccctcatccctgtccccagcatgtgactggtcactcctggggagagactccccgcccctgccacaagagccccaggtctgcagtgtgcccctcagttgagtgggcagggccgggggtggtccagccctcgcccggcccccaccccagctgcccttgctattgtctgtgcttttgaagagtgttaaattatggaagcccctcaggttcctccctgtcccgcaggacctcttatttatactaaagttccctgttttctcagcgggtctgtccccttcggaggagatgatgtagaggacctgtgtgtgtactctgtggttctaggcagtccgctttccccagaggaggagtgcaggcctgctcccagcccagcgcctcccaccccttttcatagcaggaaaagccggagcccagggagggaacggacctgcgagtcacacaactggtgacccacaccagcggctggagcaggaccctcttggggagaagagcatcctgcccgcagccagggcccctcatcaaagtcctcggtgttttttaaattatcagaactgcccaggaccacgtttcccaggccctgcccagctgggactcctcggtccttgcctcctagtttctcaggcctggccctctcaaggcccaggcaccccaggccggttggaggccccgacttccactctggagaaccgtccaccctggaaagaagagctcagattcctcttggctctcggagccgcagggagtgtgtcttcccgcgccaccctccaccccccgaaatgtttctgtttctaatcccagcctgggcaggaatgtggctccccggccaggggccaaggagctattttggggtctcgtttgcccagggagggcttggctccaccactttcctcccccagcctttgggcagcaggtcacccctgttcaggctctgagggtgccccctcctggtcctgtcctcaccaccccttccccacctcctgggaaa

SEQ ID NO: 397158 - DNA, 1000 bp, Homo Sapiens; identical to SEQ ID NO: 221595

SEQ ID NO: 397159 - DNA, 1000 bp, Homo Sapiens; identical to SEQ ID NO: 116314

SEQ ID NO: 397160 - DNA, 1000 bp, Homo Sapiens; identical to SEQ ID NO: 286645

SEQ ID NO: 397161 - DNA, 1000 bp, Homo Sapiens; identical to SEQ ID NO: 286646

SEQ ID NO: 397162 - DNA, 1000 bp, Homo Sapiens
ataatcattctcatctgctattctcagatctgctgcaaactcttcagaactgccaaacaaaacccactcactgagaaatctggtgtaaacaaaaaggctctcaacacaattattcttattattgttgtgtttgttctctgtttcacaccttaccatgttgcaattattcaacatatgattaagaagcttcgtttctctaatttcctggaatgtagccaaagacattcgttccagatttctctgcactttacagtatgcctgatgaacttcaattgctgcatggacccttttatctacttctttgcatgtaaagggtataagagaaaggttatgaggatgctgaaacggcaagtcagtgtatcgatttctagtgctgtgaagtcagcccctgaagaaaattcacgtgaaatgacagaaacgcagatgatgatacattccaagtcttcaaatggaaagtgaaatggattgtattttggtttatagtgacgtaaactgtatgacaaactttgcaggacttcccttataaagcaaaataattgttcagcttccaattagtattcttttatatttctttcattgggcactttcccatctccaactcggaagtaagcccaagagaacaacataaagcaaacaacataaagcacaataaaaatgcaaataaatatttcatttttatttgtaaacgaatacaccaaaaggaggcgctcttaataactcccaatgtaaaaagttttgttttaataaaaaatttaattattatttcttgccaacaaatggctagaaaggactgaatagattatatattgccagatgttaatactgtaacatactttttaaataacatatttcttaaatccaaatttctctcaatgttagatttaattccctcaataacaccaatgttttgttttgtttcgttctgggtcataaaactttgttaaggaactcttttggaataaagagcaggatgctgcaaagttaaaaaaaaaaaaaaaaa

SEQ ID NO: 397163 - DNA, 1000 bp, Homo Sapiens; identical to SEQ ID NO: 118995

SEQ ID NO: 397164 - DNA, 1000 bp, Homo Sapiens
ctcggccaggcctccatccagaatggcaaagacagcacagccccccagcgtgtccctgttgcctccccatccgcccacaacatcagcagcagtggtggagccccagaccgaactaacttcccccggggtgtgtccagccgaagcaccttccatgctgggcagctccgacaggtgcgggaccagcagaatttgccctacggtgtgaccccagcctctccctctggccacagccagggccggcggggggcctctgggagcatcttcagcaagttcacctccaagtttgtacgcaggaacctgaatgaacctgaaagcaaagaccgagtggagacgctcagacctcacgtggtgggcagtggcggcaacgacaaagaaaaggaagaatttcgggaggccaagccccgctccctccgcttcacgtggagtatgaagaccacgagctccatggagcccaacgagatgatgcgggagatccgcaaggtgctggacgcgaacagctgccagagcgagctgcatgagaagtacatgctgctgtgcatgcacggcacgccgggccacgaggacttcgtgcagtgggagatggaggtgtgcaaactgccgcggctctctctcaacggggttcgatttaagcggatatcgggcacctccatggccttcaaaaacattgcctccaaaatagccaacgagctgaagctttaacaggctgccaggagcgggggcggcgggggcgggccagctggacgggctgccggccgtgcgccgccccacctgggcgagactgcagcgatggattggtgtgtctccctgctggcacttctcccctccctggcccttctcagttttctcccacattcacccctgcccagagattcccccttctcctctcccctactggaggcaaaggaaggggagggtggatgggggggcagggctccccctcggtactgcggttgcacagagtatttcgcctaaaccaagaaattttttattaccaaaaaga

SEQ ID NO: 397165 - DNA, 1000 bp, Homo Sapiens; identical to SEQ ID NO: 221597

SEQ ID NO: 397166 - DNA, 1000 bp, Homo Sapiens
ccatgaaaacctctgccagtgctatattggctggtgccctttctggtaactggaggcccagatgtgcccatcacgttttttctgaggcttttgtactttagtaaatgcttccactaaactgaaaccatggtgagaaagtttgactttgttaaatattttgaaatgtaaatgaaaagaactactgtatattaaaagttggtttgaaccaactttctagctgctgttgaagaatatattgtcagaaacacaaggcttgatttggttcccaggacagtgaaacaatagtaataccacgtaaatcaagccattcattttggggaacagaagatccataactttagaaatacgggttttgacttaactcacaagagaactcatcataagtacttgctgatggaagaatgacctagttgctcctctcaacatgggtacagcaaactcagcacagccaagaagcctcaggtcgtggagaacatggattaggatcctagactgtaaagacacagaagatgctgacctcacccctgccacctatcccaagacctcactggtctgtggacagcagcagaaatgtttgcaagataggccaaaatgagtacaaaaggtctgtcttccatcagacccagtgatgctgcgactcacacgcttcaattcaagacctgaccgctagtagggaggtttattcagatcgctggcagcctcggctgagcagatgcacagaggggatcactgtgcagtgggaccaccctcactggccttctgcagcagggttctgggatgttttcagtggtcaaaatactctgtttagagcaagggctcagaaaacagaaatactgtcatggaggtgctgaacacagggaaggtctggtacatattggaaattatgagcagaacaaatactcaactaaatgcacaaagtataaagtgtagccatgtctagacaccatgttgtatcagaataatttttgtgccaataaatgacatcagaattttaaacata

SEQ ID NO: 397167 - DNA, 1000 bp, Homo Sapiens; identical to SEQ ID NO: 286649

SEQ ID NO: 397168 - DNA, 1000 bp, Homo Sapiens; identical to SEQ ID NO: 116315

SEQ ID NO: 397169 - DNA, 1000 bp, Homo Sapiens; identical to SEQ ID NO: 116316

SEQ ID NO: 397170 - DNA, 1000 bp, Homo Sapiens; identical to SEQ ID NO: 116317

SEQ ID NO: 397171 - DNA, 1000 bp, Homo Sapiens; identical to SEQ ID NO: 286655

SEQ ID NO: 397172 - DNA, 1000 bp, Homo Sapiens; identical to SEQ ID NO: 286656

SEQ ID NO: 397173 - DNA, 1000 bp, Homo Sapiens; identical to SEQ ID NO: 221598

SEQ ID NO: 397174 - DNA, 1000 bp, Homo Sapiens; identical to SEQ ID NO: 221599

SEQ ID NO: 397175 - DNA, 1000 bp, Homo Sapiens
cttccttcacagaccctttcttcattgtagagacactctgcatcatctggttctcctttgaattcttggtgaggttctttgcctgtcccagcaaagccggcttcttcaccaacatcatgaacatcattgacattgtggccatcatcccctacttcatcaccctggggacagagttggctgagaagccagaggacgctcagcaaggccagcaggccatgtcactggccatcctccgtgtcatccggttggtaagagtctttaggattttcaagttgtccagacactccaaaggtctccagattctaggtcagaccctcaaagccagcatgagagaattgggcctcctgatattctttctcttcataggggtcatccttttctctagtgctgtgtattttgcagaggccgatgagcgagagtcccagttccccagcatcccagatgccttctggtgggcagtcgtctccatgacaactgtaggctatggagacatggttccgactaccattgggggaaagatagtgggttccctatgtgcgattgcaggtgtgttaactattgccttaccggtccctgtcattgtgtccaatttcaactacttctaccaccgggagacagagggagaggaacaggcccaatacttgcaagtgacaagctgtccaaagatcccatcctcccctgacctaaagaaaagtagaagtgcctctaccattagtaagtctgattacatggagatccaggagggtgtaaataacagtaatgaggactttagagaggaaaacttgaaaacagccaactgtaccttggctaacacaaactatgtgaatattaccaaaatgttaactgatgtctgattgaaacctattaccgtactcacagctcaatggaactaatgcagatgttgcataatagcctgcattgtagtcagtgtgttctacagtgtgtatctggttctgcatggaaagcaatagttgtgcaagtgaaaaaaaaaaaaaaaaaa

SEQ ID NO: 397176 - DNA, 1000 bp, Homo Sapiens
aggagagacttttgggtgaggtccaaagaggagagctgttcagcttacctgccacagagcttttctgcatgaactctggaacagaaaggccctgtaaagccctcagagagaagagagactccagagaaggctccctaagaccttgagagccatgacaggtccatcagcatgaagttggccaagccatagggcacagcacctccttgtaacaactctatagccctctttgggagatgacatgagtggaactcacagccaccactaccaccactttagacaggaccgaggccacatactccccattctctcgtggctttccatctcagcctcggagggcaacattgacagtcctcctggcttcagctagagaaggatgctggaacaagcggctggtgttgaaagagtgggttgaccaatttggtattgaatgttgcccagccacccctaggaacacctgtccatcacctcctggatggattccactgttagacagctacagggaatgattggtcatggggaagtctctgcgccataagccacgatcccagcgcaaaacccttactcaaatgtcttcattgacttcggtatttcatagtacctgagattttattttgagataccatcagggtgagttgcaccacttgtactcaattctaattgccccctggcaatctgggaagggttcagaaggtgggcacccagccaacagcatgaactcagagcattgttttagggttggaggaggaacacgctttctttacatcactagtgtagactcaaaagatatgcaagtgtcaaatatgcaaaagaaatagtttattcaaagagactgtgtgttactgaagaacagcataaaaatatgatttttttacttgcaaaaatgaaaggaaaaaaataccacgcattgaaatgcccagttcagactgaataattcctgctgcagcaaggaaagtacctactataatagaaattctgttttgttttctgtggttttcaagtt

SEQ ID NO: 397177 - DNA, 1000 bp, Homo Sapiens
cttcgaggacccgtactcgtcccgctacgcgcggtatgtggccttcgcttccctcttcttcatcctggtctccatcaccaccttctgcctggagacccacgagcgcttcaaccccatcgtgaacaagacggagatcgagaacgttcgcaatggcacgcaagtgcgctactaccgggaggccgagacggaggccttccttacctacatcgagggcgtctgtgtggtctggttcaccttcgagttcctcatgcgtgtcatcttctgccccaacaaggtagagttcatcaagaactcgctcaacatcattgactttgtggccatcctgcccttctacctggaggtggggctgagcggcctgtcctccaaggcagccaaggacgtgctgggcttcctgcgcgtcgtccgcttcgtgcgcatcttgcgcatctttaagctgacccgccactttgtgggcctgcgggtcctgggccacacgctccgagccagcaccaacgagttcctgctgctcatcatcttcctggccttgggcgtgctgatcttcgccaccatgatctactacgccgagaggataggggcacagcccaatgaccccagcgccagtgagcacacgcactttaagaacatccccatcggcttctggtgggccgtggtcaccatgacgaccctgggctatggagacatgtacccgcagacgtggtccggcatgctggtgggggctctgtgtgcgctggcgggcgtgctcaccatcgccatgcccgtgcccgtcatcgtgaacaatttcgggatgtattactccttagccatggctaagcagaaactaccaaagaaaaaaaagaagcatattccgcggccaccgcagctgggatctcccaattattgtaaatctgtcgtaaactctccacaccacagtactcagagtgacacatgtccgctggcccaggaagaaattttagaaattaacagagcaggtaggaaacctcttagaggcatgtcgatctga

SEQ ID NO: 397178 - DNA, 1000 bp, Homo Sapiens
gcgggtgggctggggatcatggggctgcctcctctgccagcccccggcgagccttgcccgttggctcaggaggaggtgattgagatcaaccgggcagatcctcgccccaatggggatccggcagcagctgcgcttgcccacgaggactgcccagccattgaccagcctgccatgtccccggaagacaagagccccatcacgcctggaagccgtggccgctatagccgggaccgagcctgcttcctcctcaccgactatgccccttcccctgatggctccatccgaaaagccactggtgctcccccactgcccccccaagactggcgtaagccaggccccccaagcttcttgcccgacctcaacgccaacgccgcggcctggatatccccctagtggacgaaccccctccccccgggctcttgtcaccgcctgagacctcgcgagactttcggtcccccccgccccttccccccaggttagcaattgggaatggctgggagggggtgtccccaagacactgggcttcaaatctccccccaagccctccctcctacgatcaagacaccttttgtccagacagctcccttagcgttgcctggaaaagccacagagctccctgcgggggtgcagaaccctgcaggcagccccaggctttgcagaaaccacacacactgttgctggatcttgagtcccattagctgtgagatgcctgtgagagccttcccgcacccgtcagaagctcagagccttcttggaccctttaaagatgtccctctccccagccctccgcctcaccgccccccacccccgaccccgtccttagaatcttctggaggagcctccctccccccccacccccccccactgctcctggagttctcatcggattccccaagggcactgccagcttcgctccactcagcccccttgcagaccccaccccctgcctgctctctttccctacaactaggtcagcccccagccccgctacggcggccgc

SEQ ID NO: 397179 - DNA, 1000 bp, Homo Sapiens
actcgagacagaaacaagaaggcagctgcctgcttcctgctcagcactggggactatgcctgcgccgatggtagtgtccggaaaggcacattcgtcctccgtgaccttccccttcagcattcacctgaggctgcatgccctccaactgctgggactctgttcctgccacattgaggaagggggctgggcacgacatggcatcatactcaggagccttcttcaccagctccttgggacaatggaatatcccagggtggtgacagcagatggagctacttgggggagagctcaagttggtcaggcaacagctggggtgatggcctgtgagccacaggccacatcaggaactttccccactgcctccatgcaaggctgcagagctatggtccctttctccactgcactggagctttgaagacctaagaggctagtggttcctggagctagtggttacctgaacagagacctgccaagacgccctctcgtccaactatgcccaggctgaagtcctcaccctctcttaaagcggcaccaacgtgagagagacaggcagacagacagaaagccagaggcttagggaaactctggaacccagacaagaatcttttcgctgggaaagactcagatatccttgtttgcacaggactggtggaaaatctcccatgcgaccctcggggcccagagccatctgggtctgatgttctgttccattgtacatcgaagagatatatatgcacatatagtatctatattcatacatattatactcttgtgtgtagtgcacgtgctattggtggtttgtcttctttgttaggctgtgtctccctaagcccttgccccacccagagtttcccgtccccttcactgatttctgttgtttctgctgactgtgtgggtggaatgtcccaagaaaagtgcatctgggaattgccagtccagctgggtagtcccaggctcctgtcttggggatgtttcccctgtcagcaagtaacctggtgaa

SEQ ID NO: 397180 - DNA, 1000 bp, Homo Sapiens; identical to SEQ ID NO: 221600

SEQ ID NO: 397181 - DNA, 1000 bp, Homo Sapiens
agctgctccacggtgcagtgcccgagagctggatgagaaaccttccatccttattcagaccctccaaaagagtgaactgtctcatcaaaattctctgaggaagcgcaactccatgagaagaaacaattccatgaggaggaacaattctatccgaaggaacaattcttccctcatggtaccaaaggtgcaatttatgactccagaaggaaatcaaaacacatcggaatcatgacagcaagataaccccaagacagtcttttatcaagttttgacggtttatgctgggcactgccagactgaaccagagctggaacacaataatgtgtccttctacattttattacactaaatgatattcatattcaagcaacagcactttctgtagtaataaaaagtaacacaccaagtggaggattcatggcttatgcttgtttcatacatgtagaattcgcagtgatatacttaagttatgtgcaggggtgggtatgctcgtttctctcaatttgaaacacaagaattacactaatagtaacaggccttgagcacaaaatttggtcaagaaatgagtctgtttgaaatgcttagttggtgaaacccagatcgctgtgttactaatgatcactctggaaatgcaaatagaataggaggggaaaaaacaaaatcatgttaatgcgttttgtacatcagccttctcctgtctccatgataactgcatttggtaggaagcctgaggcaaaaactgcttaagtggatctgtttgtaagtggattcagttcattcgctttgtctgtcggtgactcctgaaggtttcctggtccatctcattgcggcctgttgggcagagctggacaaggtgtctttgaaggaaagctaagtcttgtctcatttaggactgggttccccacagtgacagtcacttccttcagcatctcacttcttcttctagaatccccacagggaaatactgtattgaatattttattaaaacattttctttgta

SEQ ID NO: 397182 - DNA, 1000 bp, Homo Sapiens
agggtgccctcctagctccaccctcaccaggatgaaggcgtgcaaggggctcagcaaggtgtgaatgaccttagtccgcaagttcagggaagcaggcagagcggggaggtgcctgagctggggcctggagaggggcctgggaaaggaaaaccagggatagctattttcttacagtggagtgagatcttacaggtatcaggcacaggcaggaagagagagagagaggttctggggaggaagggccaggagagagatctagaaagtgggttcactagagctgggaaacagggagcccctaggaaagcagtgtgtccttggggcacagtcattcacatcactgattgggtgccatgtggagtggacattcaaaaacctggttcctgtcctcaaaataaggggcacctgggaaaacagaggaatctacctgtggtgactgaacgagggataattcaaactgacaacctgtgcagtcccgtggagggtaggggagtgtgggtgatcagaaggctggggccagtgtaaggcatagggaatatgtaagtcaggagttagaaatctccagtgtgcgttggaatcacctggagggcttggtaaaacacagatttttgggctccactccaagggtttctgacccaagaggtggggaccaaaaccatgcattcctaagaagtccccaggtcatgctgctgttgctggactgaggaccacactttgagaacctgtgctctaagtgaatacttggaagtcgtttcaggacatggggcatagaaactgaggagtagctgagaggaagatgaagagaagctgagaagaagctgaggatcctcacaggagcagacagagaaatgtgaagggtggggttttatgtgtgggaaagggacccgaagcccaggctgaagagtttaactttgggcccagaaactcaaccatcaatggaaacagggcagtgacaagtggagggggtgtctggaagctgagcaggcccgacagagagatgaag

SEQ ID NO: 397183 - DNA, 1000 bp, Homo Sapiens
tggaccgcatcaaggaggccgttcgctacaagagctcgggcaaacggggccattctgcccagattgccaaacccgtccggcctggccactacccagcatcctcacccaccaacccctatggcacccggagccctgagtgcatcagttacaccaacagcctcttccagaactaccagaatctctacctgcaggccacacccagctccacctcagatatgtactttgcaaactcctgtaccagcagtggagccacatcttctggcggccccttggcttcctaccagaaggccaacatggacaatggaaatgccacagatatcaatgacaataggagtgacctgccgtgtggctatgaggctgaggaccaggccaagcttttccctctccaccaagagacagcagccagctaatctcccacacccacggctgcatacctgcactttcagtttctaagagggactgaggcctcttctcagcatgctgcaaacctgtggtctctgatactaactccctccccaacccctgttgttggactgtactatgtttgatgtcttctcttacttactctgtatctctttgtactctgtatctatatatcaaaagctgctgctatgtctctcttctgtcttattctcaagtatctactgatgtatttagcaatttcaaagcatagtctaccttccttatttggggcaatagggaggagggtgaatgtttcttctttctcatctactcgtctcacactgagtggtgttagtcactgagtagaggtcacagagatgacaaaaggaaaaatgggagctagagggttgtgacccttcatacacacacgcacgcacgcacacaaacatgcacacacgcatgcacacacacaaagccttaagcagaagaatgtcttagcatcatgagacagagaaatagactcttcctccctcctctttcacatatagcacaggggaaggtaaaatggaagggctgctaattgagacatataattttc

SEQ ID NO: 397184 - DNA, 1000 bp, Homo Sapiens
atgatggcctgctgggtgataatcagatcatgcccaagacaggcttcctgataattgtcctggtcatgattgcaatggagggcggccatgctcctgaggaggaaatctgggaggagctgagtgtgatggaggtgtatgatgggagggagcacagtgcctatggggagcccaggaagctgctcacccaagatttggtgcaggaaaagtacctggagtaccggcaggtgccggacagtgatcccgcacgctatgagttcctgtggggtccaagggcccttgctgaaaccagctatgtgaaagtccttgagtatgtgatcaaggtcagtgcaagagttcgctttttcttcccatccctgcgtgaagcagctttgagagaggaggaagagggagtctgagcatgagttgcagccagggccagtgggagggggactgggccagtgcaccttccagggccgcgtccagcagcttcccctgcctcgtgtgacatgaggcccattcttcactctgaagagagcggtcagtgttctcagtagtaggtttctgttctattgggtgacttggagatttatctttgttctcttttggaattgttcaaatgtttttttttaagggatggttgaatgaacttcagcatccaagtttatgaatgacagcagtcacacagttctgtgtatatagtttaagggtaagagtcttgtgttttattcagattgggaaatccattctattttgtgaattgggataataacagcagtggaataagtacttagaaatgtgaaaaatgagcagtaaaatagatgagataaagaactaaagaaattaagagatagtcaattcttgccttatacctcagtctattctgtaaaatttttaaagatatatgcatacctggatttccttggcttctttgagaatgtaagagaaattaaatctgaataaagaattcttcctgttaaaaaaaaaaaaaaaaaaaaaaaaaaaaaaaaaaaaaaaaaaaaaa

SEQ ID NO: 397185 - DNA, 1000 bp, Homo Sapiens; identical to SEQ ID NO: 116319

SEQ ID NO: 397186 - DNA, 1000 bp, Homo Sapiens; identical to SEQ ID NO: 286661

SEQ ID NO: 397187 - DNA, 1000 bp, Homo Sapiens; identical to SEQ ID NO: 116320

SEQ ID NO: 397188 - DNA, 1000 bp, Homo Sapiens; identical to SEQ ID NO: 286663

SEQ ID NO: 397189 - DNA, 1000 bp, Homo Sapiens
aatcaagaaaagtgatatagaaaatatgtaggagactgttaaaattggtgattatggtaatatggtcatgtgaatcaatttttgatttataaagtactcacacaagttgtttcaaagatgatatttctgtgaacagagaggccatgggaagatttgaaaattattaaagaaaaattcctacagattttcaatgcagagaccataatcaaaaagtaaactttctttagtagtatgttcaatacatcatttaattttttaagttatcctgaagaaggaaaggtccttaattattatagtctaaacaaatttatagattactgtttgaagtaaataatacgagtgaatattttcaaatgtgataaaatagcacaagtggctggtgataaaatttgaaattatggttaacctcagctgtgatcttatgtatgtaaagtgaaatttaaatagataattataggttgattacaaaatccatagtgtcattttattttagtcattattgaattataccatttactctgttttcttatagtcttaattttattatattttgttgttactgtattatatttgaaaaccttcaaattagaatacattgtacagttaaagaaattgacttggtacttaaaagaaagatttcccattgcatacaggttattggagaaattttccttttgttgcatttgtggaagttagttttctggcccgtggcctttaattttcttaatcaacctaattacatcaggatagaggtagagtttctgtaaaagaagagacattaagagttcctgaaatttatatctggcataccgataggcttatattcaaaacatcttagtcatacgaccataaattaaaagtggagtcactaaatagtttgcagtacgtttctaatataagtgtaggtgggtatcaaaacaagacaaatgctgttcagggaaagaagttggcaagcttaaggttaaacaaaaataaaattacatgtgttttcgccttccta

SEQ ID NO: 397190 - DNA, 1000 bp, Homo Sapiens
gacgcgagagataaagattctatccgacgagtagtacaacacagcaatgtggtcatcaatcttattggacgagactgggaaaccaaaaactttgattttgaggatgtttttgtgaagattccccaagcaattgctcaactgtccaaggaagctggagttgaaaaattcattcatgtttcacatctgaatgcgaatattaaaagctcttctagatatttgagaaataaggctgttggagagaaagtagtgagagatgcatttccggaagccattatcgtaaagccgtcggacatctttggaagagaggatagattccttaattcttttgcaagtatgcatcggtttggtcctataccccttggttccttgggctggaagacagttaaacaaccagtatatgtcgtagatgtatccaaaggaattgttaatgcagttaaggatcctgatgccaatgggaaatcctttgctttcgttggtcccagtcggtacctccttttccacctggtgaagtacatctttgctgtggctcacagattgttcctcccattccccttgccgctttttgcctatcgatgggtagcaagagtctttgaaataagcccatttgagccctggataacaagggataaagtggagcggatgcacatcacagacatgaaattgcctcacctgcctggcttagaagaccttggtattcaggcaacaccactggaactcaaggccattgaggtgctgcggcgtcatcgcacttaccgctggctgtctgctgaaattgaggatgtgaagccggccaagaccgtcaacatttagtgcctcctgagcagctcttggttttggcgtcttttgggtcggcccatgtggtttgagcacccagccaggcggtctctttagaggatcctgtacacagttccactattaaaacatttcaggttgaaaaaaaaaaaaaaaaaaaaaaaaaaaaaaaaaaaaaaaaaaaaaaaaaaaaaaaaaaaaaaaaaaa

SEQ ID NO: 397191 - DNA, 804 bp, Homo Sapiens; identical to SEQ ID NO: 116322

SEQ ID NO: 397192 - DNA, 1000 bp, Homo Sapiens; identical to SEQ ID NO: 116323

SEQ ID NO: 397193 - DNA, 1000 bp, Homo Sapiens; identical to SEQ ID NO: 286666

SEQ ID NO: 397194 - DNA, 1000 bp, Homo Sapiens; identical to SEQ ID NO: 221604

SEQ ID NO: 397195 - DNA, 1000 bp, Homo Sapiens; identical to SEQ ID NO: 286668

SEQ ID NO: 397196 - DNA, 1000 bp, Homo Sapiens; identical to SEQ ID NO: 221605

SEQ ID NO: 397197 - DNA, 1000 bp, Homo Sapiens; identical to SEQ ID NO: 286669

SEQ ID NO: 397198 - DNA, 1000 bp, Homo Sapiens; identical to SEQ ID NO: 286670

SEQ ID NO: 397199 - DNA, 1000 bp, Homo Sapiens; identical to SEQ ID NO: 221606

SEQ ID NO: 397200 - DNA, 847 bp, Homo Sapiens
acagcgagcggagccgcggtccggacggcagcgcgtgccccgagctctccgcctccccccgcccgccagccgaggcagctcgagcccagtccgcggccccagcagcagcgccgagagcagccccagtagcagcgccatggccgggtggaacgcctacatcgacaacctcatggcggacgggacctgtcaggacgcggccatcgtgggctacaaggactcgccctccgtctgggccgccgtccccgggaaaacgttcgtcaacatcacgccagctgaggtgggtgtcctggttggcaaagaccggtcaagtttttacgtgaatgggctgacacttgggggccagaaatgttcggtgatccgggactcactgctgcaggatggggaatttagcatggatcttcgtaccaagagcaccggtggggcccccaccttcaatgtcactgtcaccaagactgacaagacgctagtcctgctgatgggcaaagaaggtgtccacggtggtttgatcaacaagaaatgttatgaaatggcctcccaccttcggcgttcccagtactgacctcgtctgtcccttccccttcaccgctccccacagctttgcacccctttcctccccatacacacacaaaccattttattttttgggccattaccccataccccttattgctgccaaaaccacatgggctgggggccagggctggatggacagacacctccccctacccatatccctcccgtgtgtggttggaaaacttttgttttttggggttttttttttctgaataaaaaagattctactaacaaaaaaaaaaaaaaaaaaaaaaaaaaaaaaaaaaaaaaaaaa

SEQ ID NO: 397201 - DNA, 1000 bp, Homo Sapiens; identical to SEQ ID NO: 221607

SEQ ID NO: 397202 - DNA, 1000 bp, Homo Sapiens; identical to SEQ ID NO: 286677

SEQ ID NO: 397203 - DNA, 547 bp, Homo Sapiens; identical to SEQ ID NO: 286678

SEQ ID NO: 397204 - DNA, 1000 bp, Homo Sapiens; identical to SEQ ID NO: 116326

SEQ ID NO: 397205 - DNA, 1000 bp, Homo Sapiens; identical to SEQ ID NO: 286679

SEQ ID NO: 397206 - DNA, 971 bp, Homo Sapiens
gcactgtgcgtcatgtaccagcgccggaagttggtctcgacacctggactagccgggttgtatttggaaacgcggagtgagtttttccgtgctgtgtaggggctaacaatggacacccagaaggacgttcaacctccaaagcagcaaccaatgatatatatctgtggagagtgtcacacagaaaatgaaataaaatctagggatccaatcagatgcagagaatgtggatacagaataatgtacaagaaaaggactaaaagattggtcgtttttgatgctcgatgaatgctgggaattcagaggaatgtcttcacttatacttggatttgctctcttcccatttctgattgttgtatagctttcgattttgcttacagtagttcccccttatcttcgggagatacattccaaggcccccagtgaactcctgaaacctcaaacagtaccaaacctttatacactgttttttccatatatatatacctatgataaagtataatgtataaattaagcatagcaagagattaataataatgtaatagaacaatgataacatactataataaaagttatgtgaatgtggttggtctctcttgctttcaaaatatcttcttgtacagtactcacctattttagaatgtggttgactacaggtaaccaaaaccacagaaagggaaactttggatgaggggggcactactgtacttaggaatacaactatatacatatgattttatttttaagaccatattatatttgggtatctactaatattttgtataaagcaattttttgttccattacgtgactttttgttttattgtatatgtaatttaacacacaataaagggtaaagttgcttccccaaaccacacttttaatcaaaacctagaatcatctgcagtccttgttaaaaatgcaggtttctagaaccctctgaagttctgattaaataaatttattgcaaacca

SEQ ID NO: 397207 - DNA, 1000 bp, Homo Sapiens
tgggccgcgacagcgtgggcgccgcctccgtcaacctggagccctcggatgtgccgcaggacgtgtacagcggcgtggccgcgcaggtggaggtgttccgtaggcaggacgcccagcggggcatgcgggtggcacaggtgctggaaggtttcatcacccgcaaggtggtgaagcagacggtgatgacggtggtgtacggggtcacgcgctatggcgggcgcctgcagattgagaagcgcctccgggagctgagcgactttccccaggagttcgtgtgggaggcctctcactatctcgtacgccaggtcttcaagagtctacaggagatgttctcggggacccgggccatccagcactggctgaccgagagtgcccgcctcatctcccacatgggctctgtggtggagtgggtcacacccctgggcgtccccgtcatccagccgtatcgcctggactccaaggtcaagcaaataggaggtggaattcagagcatcacctacacccacaacggagacatcagccgaaagcccaacacacgtaagcagaagaacggcttcccgcccaacttcatccactcgctggactcctcccacatgatgctcaccgccctgcactgctacaggaagggcctgaccttcgtctctgtgcacgactgttactggactcacgcagctgatgtctccgtcatgaaccaggtgtgccgggagcagtttgtccgcttgcacagcgagcccatcctgcaggacctgtccagattcctggtcaagcggttctgctctgagccccagaagatcttggaggccagccagctgaaggagacactgcaggcggtgcccaagccaggggccttcgacctggagcaggtgaagcgttccacctacttcttcagctgacaccccgtgagccttgtcagtgtgtaaataaagctcttttgccaccccccaaaaaaaaaaaaaaaaaaaaaaaaaaaaaaaaaaaaaaaaaaaaaaaaaaaaaaaaa

SEQ ID NO: 397208 - DNA, 1000 bp, Homo Sapiens; identical to SEQ ID NO: 115242

SEQ ID NO: 397209 - DNA, 1000 bp, Homo Sapiens; identical to SEQ ID NO: 116327

SEQ ID NO: 397210 - DNA, 1000 bp, Homo Sapiens; identical to SEQ ID NO: 119060

SEQ ID NO: 397211 - DNA, 1000 bp, Homo Sapiens
ggattttggggatgtgctcctggccacaggggggcccctgaggttgcaggtctgggatcaggactctggcagggacgatgacctccttggcacctgtgatcaggctcccaagtctggttcccatgaggtgagatgcaacctgaatcatggccacctaaaattccgctatcatgccaggtgcttgccccacctgggaggaggcacctgcctggactatgtcccccaaatgcttctgggggagcctccaggaaaccggagtggggccgtgtggtgagaacagtgagcttggaaaggaccagtatgcttggactgaaggggttctcacagtgggagccagggctgtcttcgtattcccattagaccaagcttgtccaacccgaggcccgcatgcggcccaggatggctttgaatgcggcccaacgcaaattcgcaaactttcttaaaacattatgagtttctttttgctattttttttttttttttagctcatcggctatcgttagtgctagtggattttacatgtggcccaacacaattcttcttccaacgtggcccagagaagccaaaagattggatacgcatcagacagatggaaaagggagattcagactgtttttcagggaggtggctgggtttacacgctaatcccgattcaccctgtccaaactgcctaagccctccgccattctcaagccctgcagtcacagctacacagatcacagcttcagccaggagctgggcagaaggccaagaggctgttcccaccaggctgctcagggctggtcttttaggacccttcccttgagccctctatggtgtggcaaagccttcattgccttaactggagccccatcagctccagctgctctgtcttctttgcccacaatgctttgcccctgagacaaatggaggcctgtcctgacctgtctcaccatgtacatagcttgataaagggccaataaatatgatgttatggtgaaaaaaaaaaaaaaaaaaaaaa

SEQ ID NO: 397212 - DNA, 1000 bp, Homo Sapiens; identical to SEQ ID NO: 221610

SEQ ID NO: 397213 - DNA, 1000 bp, Homo Sapiens; identical to SEQ ID NO: 221611

SEQ ID NO: 397214 - DNA, 1000 bp, Homo Sapiens; identical to SEQ ID NO: 223988

SEQ ID NO: 397215 - DNA, 1000 bp, Homo Sapiens; identical to SEQ ID NO: 116328

SEQ ID NO: 397216 - DNA, 1000 bp, Homo Sapiens
tggaatctaacccagacactgaaggatgccaaggagaaactgaggatgttctctgaatggacatttgtggctgactttcatgggctggtccaatggctggttgtgtgagagggcttggctgatactcctatgcttgagttcaaaggctgaaaattcagttaaggtgttacttaataatagtttttaggctccatgaattggctcctgtaaatactaacgacatgaaaatgcaagtgtcaatggagtagtttattaccttctattggcatcaagttttcctctaaattaatgtatggtatttgctctgtgattgttcatttttttctgctacttttgggtagaaaaaagattcaattgcttggctgtagctttctctcatatatatcaccctaaatataatgaagatcttttagtgtgtatcattttccttttagaaactagtattctcttatttcttactttaatgtacttctatcactgcatttattttgcctgtgcataggagcaattaggatctaaaaaaatatatgggaagataaaagatctaagaacaagtacttgctggaaaattagttggctggacattgataaaataatgcatttataacaattacatgtgtttctgggaacaaggaaaatttctcaaaaaagaatatttcacacatcccttcttttgaatggcctctttgtgaccagccagacctcaggtcttcactctttcttctttgtaaactatgtcatgtggaaagatttcctcagttagtgagcttgtgtctgcaaattgattttgtttgtaatgtattttgatagcaaatcatgctgcatctatatctttttcttgtttgagctgttactacattgtacatggcatgtgggatcaattaaaaatttgttttaaaaataaaaaaaaaaaaaaaaaaaaaaaaaaaaaaaaaaaaaaaaaaaaaaaaaaaaaaaaaaaaaaaaaaaaaaaaaaaaaaaaaaaaaaaaaaaaaaaaaa

SEQ ID NO: 397217 - DNA, 1000 bp, Homo Sapiens; identical to SEQ ID NO: 286687

SEQ ID NO: 397218 - DNA, 1000 bp, Homo Sapiens; identical to SEQ ID NO: 116329

SEQ ID NO: 397219 - DNA, 1000 bp, Homo Sapiens
ccgcgcccgccgccgcccggcccgcgcccatgcaggccatcaagtgcgtggtggtcggcgacggcgccgtggggaagacatgcttgctgatcagctacacgaccaacgccttccccggagagtacatccccaccgtttttgacaactactctgccaacgtgatggtggacgggaaaccagtcaacttggggctgtgggacacagcgggtcaggaggactacgatcggctgcggccactctcctacccccaaactgacgtctttctgatctgcttctctctggtgagcccggcctccttcgagaatgttcgtgccaagtggtacccggaggtgcggcaccactgcccccacacgcccatcctcctggtgggcaccaagctggacctccgcgacgacaaggacaccattgagcggctgcgggacaagaagctggcacccatcacctacccacagggcctggccatggcccgggagattggctctgtgaaatacctggagtgctcagccctgacccagcggggcctgaagacagtgtttgacgaggcgatccgcgcggtgctctgcccgcccccagtgaagaagccggggaagaagtgcaccgtcttctagagccctggcccacccgagcctgagggctggcggggagcagccctggacgtgtccgctgttgtgttgagacgtgtggtgtccctgagtcggctgtggggagcggtgggggtgggccggggggaagcatggggatgaggctgggtggcaggatcctgtcctctctgccgcctcattctggggtgtggctccagccttccctggcccccgccggaggccgggagggagcagggtctccctcagggctgcaggggcaggtgcagggaagccccaggatgggcttccctggagggggagggtgggggggagttctgttccttgtgccccgaggtggggcagccccttctcattttatacaataaacattctccacctacaaaaaaaaaaaaaaaaaa

SEQ ID NO: 397220 - DNA, 1000 bp, Homo Sapiens; identical to SEQ ID NO: 286690

SEQ ID NO: 397221 - DNA, 1000 bp, Homo Sapiens; identical to SEQ ID NO: 221612

SEQ ID NO: 397222 - DNA, 1000 bp, Homo Sapiens; identical to SEQ ID NO: 221613

SEQ ID NO: 397223 - DNA, 1000 bp, Homo Sapiens; identical to SEQ ID NO: 286693

SEQ ID NO: 397224 - DNA, 1000 bp, Homo Sapiens; identical to SEQ ID NO: 221614

SEQ ID NO: 397225 - DNA, 1000 bp, Homo Sapiens
gatgaaactgctgcccttccggcagaagaaggcccacatcatggagatccagctgaacggtggcacggtggccgagaaggtggcctgggcccaggcccggctggagaagcaggtgcccgtgcacagcgtgttcagccagagtgaggtcattgatgtcattgctgtcaccaagggtcgaggcgtcaaaggggtcacaagccgctggcataccaagaagctgccgcggaagacccataagggcctgcgcaaggtggcctgcattggcgcctggcaccccgcccgcgtgggctgctccattgctcgggccgggcagaagggctatcaccaccgcacggagctcaacaagaagatcttccgcatcggcaggggcccgcacatggaggacgggaagctggtgaagaacaatgcatccaccagctacgacgtgactgccaagtccatcacaccgctgggtggcttcccccactacggggaagtgaacaacgacttcgtcatgctgaagggttgtattgctggtaccaagaagcgggtcattacgctgagaaagtccctcctggtgcatcacagtcgccaagccgtggagaatattgagctcaagttcattgacaccacctccaagttcggccatggccgcttccagacagcccaagagaagagggccttcatgggcccccaaaagaagcatctggagaaggaaacgccggagacctcgggagacttgtaggctgtgtggggtggatgaaccctgaagcgcaccgcactgtctgccccaatgtctaacaaaggccggaggcgactcttcctgcgaggtctcagagcgctgtgtaaccgcccaaggggttcaccttgcctgctgcctagacaaagccgattcattaagacaggggaattgcaatagagaaagagtaattcacacagagctggctgtgcgggagaccggagttttatgttttattattactcaaatcgatctctttgagcaaaaaaaaaaaaaaaaaaa
